United States Patent Application Publication US 2015/0052636 A1 - sequence listing, part 20

SEQ ID NO: 69065 - DNA, 775 bp, Prunus persica
  Intron number 1 from transcript ppa005603m (locus ppa00560 3m.g) derived from phytozome v7.0 (chr-ID scaffold_3; pos 3721185 to 3721959)
cgaatcggattttggatcccttggcgtgccctggtgtaagtatatccgacttgaatcgcatttctgtaaagtcttattcttcagtgatagattgatggatctggatgttgttttgatgtcgatgtcaatttcggatcaagggtttgctagcgtttcgggcttcgtttcgttgccatcaataaaagatgtagaattttttggtaactgagtaattggggagcttggaatcaatttcaagtctttcactttatgggtttgtaagaaaagttggaaaatttagctcagttgagttgacttgagtgaacaatgaatttagttgcactggcatagtagtagcttcattaagttgatatttcaaaaggaattgtgatgtgcgtattttggattgtagttcttgctggtatgagatatgtttatatttacaaacttttctttatgttttagacttgtctagcatttgttcataatcaaagtgtggcaagccaaccattctgactgaatttagcacccccattaaaatctgcggtatagaagtctaattaaagttaggattttttgcattaaatatgagggccaatgcccatatttgaggattttttgcttaatgttcttgaagttggtagtatgtgaaccctggtgggttctttatgagtgaatgtggggaattttgagttattttattgcgtttagaatccttgcttttggtttgagttcctgggttcatacctttgtttgattcttataatgttatccttggcaaaaggcagatcgaaac

SEQ ID NO: 69066 - DNA, 1030 bp, Prunus persica
  Intron number 2 from transcript ppa000147m (locus ppa00014 7m.g) derived from phytozome v7.0 (chr-ID scaffold_3; pos 20263531 to 20264560)
ccaacctttctagcgcatccgattccttctgcaaagtatatatatcactttctcggcgcgttttcatttcgttttccctgattttgtggtgaattcctgctggtttttgattgccttgagctttttattagttattttgttgttgtggggattatgcacttaattacttctgggttttttgtttgtcgtcatttggatttttttactgttcatttgctgaagttcctttgtggctttctcaattttcgtgggtttggattttacttggttaatttatcatccaattgggtatttatgcctttttaagttttccgtcgctagtaggattatctagtatttttttcttcttttttctaggaagattactgggtcttttccttcatttataaacgtaccattttataaggacaattgtaccatttatatacgttcggtgaatttaacgtgttcctctatcacagaggctttatatgtctgtcttgataatttcatagaagaatttgttggtttcagttttggatattgttaagtacctcatatcgcattacccattatgaattgtttgttttatggttggtcactttgatgggtttatttaaatcctgattgaatgtgcatgataatcattattgacaaagaagctggtctttctctccccgttttaaaaattatattattttatttatcgttaattctgaaagaaagagtttgatagacagcaactctcttgatcatttcccttagaaattatattctctctgaaactaatatataatttgtttgtggattatcctacttttatgttcattacttgaacctttacgaattgaccttcatttctattaatcatgaagcttttagatggtgtgaactatcatttcatatctgaaaatcttttgcctctgttttctagacatgttcatattcttttgtttatccataatttctgcctaatttttatgttatttgatgcattgaaagtgtactccatactttatttagttttaatgaaactttcacttgttatagg

SEQ ID NO: 69067 - DNA, 767 bp, Prunus persica
  Intron number 1 from transcript ppa001317m (locus ppa00131 7m.g) derived from phytozome v7.0 (chr-ID scaffold_3; pos 4261911 to 4262677)
tcgcggcctcagactctctgtggattgttttctaggtacggtctccaaaaccctagcttttgcatcagatcagatctctctttctgaaaatgcttttagatctgttagattctgtttctcgatttgaacattctactgggtttttccttggtcgatgctgtagggttgtagtgcttgcctttctgcttcgattcaattttttttttcttactctgttgttttttgtgttctctttagctggattttggtcagtataactagactacgttgatttgaatgatgctgtaaattcgttaattgttcggtttgaatttggttgtgttatatacttacggttgtgtatttaattagatgaaggatttataggttccttgtgttattaatgtgggattgtatttgctattgcgtttgattaactttaatgtccaatgaagattactattatgtatgctatgtagcttaagtgggacatattttttagtccaaaatttgtggagaggtataatatctcatcttatttttgtttcctttacctgctatgttgttggtttctgatattgtaatcactgtgacgattgtgatgcaagtcatccatggaactcgttataatttctttatttttatgattgaatggtagatttctgtcagtctgctttggctgagctgtttactgatgtggaagctggttgcatataacttgtttgaaatttcagttgttcactgaatgtggtttcttaatttttctccagatttaagattttgcaagg

SEQ ID NO: 69068 - DNA, 484 bp, Prunus persica
  Intron number 1 from transcript ppa002101m (locus ppa00210 1m.g) derived from phytozome v7.0 (chr-ID scaffold_5; pos 16422107 to 16422590 reverse strand)
gtctgattttggtctgtgtataggtgagcaagcctacacttaagtttatcatattacatattttaaagtttagcaaatagaattaacgattcccatcaatattttattcattttaacttttggcttggttctgtttattctctgcagaacatgtcttctttttttcgcttttttggtagcgtgttttctgcagaatgtgattgtttttgcagaatgtatttgtttttttctctgacttctttgtgtctttggcttgccctgtgtgcattagttttattcttttggtgagcggctttgttggcctctactgtttttgttcttctttttagattaattactgtggttgttatttacaatggtagcagtagcttgaaagttttgttcttctgtcatataattacctttggctgttacatacatctacatctttaaaaatatattagctccttctttgataatatactttggttcatatttggcaggc

SEQ ID NO: 69069 - DNA, 750 bp, Prunus persica
  Intron number 1 from transcript ppa007521m (locus ppa00752 1m.g) derived from phytozome v7.0 (chr-ID scaffold_2; pos 17474390 to 17475139)
agacaaggtagagtttttagcttctttttttaggctccttgtgcaattatgcatattattctcgattgtttttaggacttaggaatataaattcatattatgttaatagtataaatgtgtggatattgatttaaatgtttcatttctggaaaaaggaaaccttgcatatatattcaattggtttgtaaggccgtctcctgtccccccgccggtggggaatccgctcccgggtcgtcgctctgctgcgtctggcccgtcctttgacataaaaaacatggtttttaaaactcagagtaagcgttttttttattctggaatcggtatgctgttcatccattgttgcacatttgtcaagctttgaaatttttatttctcagtgcaattcttttccttttttagatatgtaaaaatgagcaggacagacctattatttaagttccgtctgtttgtggtttatttgaagtgtggatgaatctagatggtgatgtttaatggaaatggggcctcattgattgaatccccacatgggatgttacccttttttcacatcatatttgtaatgcaaaatttaaaatgcaataagttggttaacgttagttatggttgccatttgttttgaatgtgattatctttacatgtggctaatctttgtgtggctgtatgccatgaaagtacatataactatgttttttttaatatatttttttttactgcaacagtgtcacaaagcatctggagtcagccaatacc

SEQ ID NO: 69070 - DNA, 1045 bp, Prunus persica
  Intron number 1 from transcript ppa007868m (locus ppa00786 8m.g) derived from phytozome v7.0 (chr-ID scaffold_1; pos 22011030 to 22012074)
acggagagagagagagggagggagagagaaatacagtgagagaggtagggatttttgtttgtattttgaatttttttacaagggacaataataatagtggtacccagaggcaggaagagtaccgggttgttgtatacttgctgtgtagtttgtgaagaaaagaacttgctttgttttgtgagactctgtgtgtgactgtctctaactttgaaacggccaagtttcaaaacttgccctttcttttcttcttgtcatttttggcgagcactttgggtcttctaagttcttcaatctctgtgtctctgctgatgagtagtgggggtttgtttttgttatttgtattttcgggcatgttgaaggggtgtaaatgaggggcttgaagagaaaaagatgcgaatcggtgacgaaatgattctttgcgtctttcttctgaggatttttgcgtcaaaaaattcgatttttatctgatattctcctctttcatgtgccccttgaagcttctctcatgggttctccccgcacttttccccactacttcaagcatttctggactgggttgcattttctgcgtctccaagctccatggagactaaagccttaagaaaaacaaagcaaaaatttgagctttgacgccaaagcagctgctactcttgagtttgtgtggtcaaatactcaagaaagatttgagctttaagattggttttgttaattttcatctgggttatttaacttcaagcttctggtttgcctactatatgtaacatgtgggtttcagtttggcttttctgagcctttgctctcactgtcttgcttttgagattcgtggctttctactctctaatggatagaagaagaagtacttcaaaatttaacagtaggcttactaggcttctccttttgctattcatattctgctttcgccaagaaactgtgcagtgccaagaaactgagcctccatcgtcgtcaaagcagccccacttcaagaaccagcttcaaagaatcattctcagcattgtgttgggagtagtgacaggactaatttgtg

SEQ ID NO: 69071 - DNA, 837 bp, Prunus persica
  Intron number 2 from transcript ppa012030m (locus ppa01203 0m.g) derived from phytozome v7.0 (chr-ID scaffold_4; pos 851140 to 851976 reverse strand)
agaaacttcagttaagacggctgcttctcaaagtggtaaggtcccattttattttggtttcttggttttccaattacataaaggatttgtatatttgatttgcgtgcgctcgcaactgtgtttttctttcttctatataattggatgctaagcagttgagctaaatgaatggaaagatcccaattccctactgtagctaaatgatgctgtttctatttgatcattgccacacacacacacatttcatttggctaaactcatagccattgctcaaccttaattagaataagttcacagctagatttggtctgaaagaccaacgtaacacttatgaacatgattacactggatggcatttcaatcaggtggatgcctaaaacctcaccctgcatatcacacacacccctgacctgggtttttggattaaggcatgcagttaaagaagataatatcactaaccctttttacaaactaatgtagcaaacagaaaatatcccagtaaaatgcaaaatatacagcatggttgtcagggataatgactaaaactcattatgcagtcataattacaatcattattgggtgatatgtacgttcttgtttttctgagaagattctgtaagaagtttgggtggatcatcatgactctatttgcttggccctaaaagtattaatgtgctgaaggaaagaaggtttaatttttttgctatatatgcacacatgtctattgctaatatgtcaattttgatgtgtacaagtaatattacatgtgttgtccattataaccttgcatttctgcatgcagctttttggagctgtttatcttggaccatttgggca

SEQ ID NO: 69072 - DNA, 825 bp, Prunus persica
  Intron number 1 from transcript ppa016040m (locus ppa01604 0m.g) derived from phytozome v7.0 (chr-ID scaffold_4; pos 6592677 to 6593501)
ttaatgttgtgacttgtgagcctgactggtgggatttttcagcggatgatgatgaggtctgcctgttgctccttttcgttttcttggtttttgttttgtttgatgggtgagtggtctgtcgtctgtgtgattctcgacaaattaccgactcattgattggtttgttggttggttgattcttggggatcggatttcatcatttctttttgtttttgtaagcttaattttgttatctctcttttgaataatcgatcgtttactggatgagatcttctctctctctccgatttttttacttgggtttatgaaatcagcctctgtttccaatcggatttggttggcaaagcagaaatgcctcagttgccatagaaacagagctccctgttttgattcctcagattcagctcgttgctgttagcagcagaaaaatggtctctccttcgcaacattcaaaccagctctttgttgaccagttccgttctctattgtgaatgagattagataattccctgttaacttccttgcttcatcttcaaaaatttcatctaagatctcgagctacgtcctctgtttcagtaacataaccatccaagccatttcctggtttggtgatagaaaattaacatttcaaagagctatttgatagaaatttggggtactgggttatgaatagttcatgtaatggctactaattgacattgaattgctgttcgatgttatgaattcagctgcataaatagatttgcatttggatttcgctaatgggttgctgttgaattgtgttttacaggtaccagagagtgagcccagattgtgtccctttga

SEQ ID NO: 69073 - DNA, 983 bp, Prunus persica
  Intron number 1 from transcript ppa003841m (locus ppa00384 1m.g) derived from phytozome v7.0 (chr-ID scaffold_6; pos 26899919 to 26900901 reverse strand)
agccaagtttcgggcttcggcgagctcttgtagtatgtttcagttatgtttcttctctgcaaaagtttaggtacaatgtgcactataggcaatcctttaaagggtgtcctgagttcaggattagtgtcaatggctgtttaatgtttttcgagaattagatcagactccttttctcaagaactacttgatagaggaatgcggattgtgttgaatggtatctacacagcttgctaatcaactcctcactttaaatttctatgttctcatggtttccttaaatatttccctcattggaacagatggtttgggtagccgaatgtaggtgaaagtcgccatggatttcattgggaaatgaaatgacaatttggattttgagtttaggcttgccacttagttaatgttactatttttggatcataaatgtttatgatcatttgatatttaatgacaccataaatcggctgcatatctcgtaggcttttatactgaataaagcttcctctctttggcattgcagaaggaaatgaatttgaaattttaatgttttctgttcggaagacttcttctatcaagaataatgactattgaattgaaagtttttactttactatgaataatttttgtaaaccttttgtagggtcgatgataaattagatcatacaccactggtcagatgcagcttatccttgtctcactagagcaatataactaagttgtagtaggtgtgcctaaattcctgtagatgaaaggtgcaatttatgaaataattaaagggtgtgatataaattgtagaagcagtttcatagcgttttgggataaactgcatatttcattatataatctcttctagttcttcttgaacttggagaaaacatgaaactttatattctgattgagctcattttgcctctatacaatttttttacttctttggaaatttgcatttgttaactcttcttgttttatatatagatctcaaaagc

SEQ ID NO: 69074 - DNA, 838 bp, Prunus persica
  Intron number 1 from transcript ppa006702m (locus ppa00670 2m.g) derived from phytozome v7.0 (chr-ID scaffold_6; pos 5078737 to 5079574)
aaggaaaacccacttcttgggccatcttcagccacgtaaagcttctcacttttttcagtatctcttttaaaacatgttggtatttgcagttcggtatgcaatgtgtgttttgtaatttattttaaagttatgtgaatgcataattgggtgtttgcatctgggaactttgaaagttttagttgttgatgggtatttggtgaatttatgaggaagaggaagtggaattggttttgatatgaaatcagaatgggataaatttaccttgaaactatgaaagtttggagtttatgttgttattacaaatgttttggtgaaacatttactttgagatttggtattttggatgtacagatacatttttgaactgtatgaaagcttggtgtatgcttgaacaaagaaaaaaaggtattagaaaagctgcaagtagagagtcttctctgtcagcatgtagtgaactaccccttgattgatttttgagtttctttgtaatatgttacaaactttttacattattgtatttttttaacaacttagtttcaaagtttttatttgactttccttgctctgtgaggccaatgacagaaagattatgataaaatggatgtattttgccttcatctctcttgtaagaggggtatgcatttttcgaggattgggagtgattcttcttaagctgtttaatgcgctaattctaatatgcgccatcctaagtctattaactgctaaaagtagcactttctatcttctgtgggtcaacaggtcttagttgtatccacaagaaaaatgtgcacatctaacttctttcccatgttttttttcatccttcagattagaaaag

SEQ ID NO: 69075 - DNA, 552 bp, Prunus persica
  Intron number 2 from transcript ppa017586m (locus ppa01758 6m.g) derived from phytozome v7.0 (chr-ID scaffold_6; pos 6843549 to 6844100 reverse strand)
agagtaagtggatataatgagatattgagattgcatatatccatatatgaatctcaaaatatatgtatctcaaaaagatggagcaaaccacttcgagggccttagatacatattagtgtatccaataccagaacctccttggttagggcatagacttctaatcaacttacacggtatttcgtttcacactgtaaaaaatgctagcgtcagtcacccacgtgcatacgactgataaccattgataggagtgacctccatcaaccgtttagagttaccacactctagctaagtcttcactcctcatatttgtgaagcttatagaaggttttcatgctagcctaggctccctcttaaatattgttcctcaagattcaagatactcaatcttgtgctgaaatatcgtacttcaatttgtgaaatagctattttgttttttgagtggaacacagatgttttttttatcatttggttatgtagttcagatatcaactttgataagaacaatgtaatctcaaaggcaattaaaaaaatgcttcttgttgtcacagttgg

SEQ ID NO: 69076 - DNA, 549 bp, Prunus persica
  Intron number 4 from transcript ppa023214m (locus ppa02321 4m.g) derived from phytozome v7.0 (chr-ID scaffold_1; pos 4970978 to 4971526)
gaatagtgagtcaactgctcagattcactgcagcttgtgcgattttctaatgattagtgcttcagctaataaatttgctacatctccaccttgtatagtttactaccccataatcttcatgtttccatgacaaatataatttaaaactcaagatatttattgtttttgaaatgtcgaaacttcaaatagagaacattagtgaaggctatataaatttcaatatgtaaggaggaaatatcctagattgcttaatccaactaatttaagtgttaattgacacaattttggcttaaaatctcggtttagatactggtttcattttttggtttctaacatgttcaactgaaatgaagtgttgttcgttttgcagttttgttcttgttgtcagccttctttgaatttgcttttgttttctgtggtttgtactttattatagttgtgtctgcttatttttactctgcaagatataaaaatctccaagctctagtttaccttttttctttttgagagaaatttaatgtaatgctgctgttttctaggggagcatct

SEQ ID NO: 69077 - DNA, 585 bp, Prunus persica
  Intron number 1 from transcript ppa006904m (locus ppa00690 4m.g) derived from phytozome v7.0 (chr-ID scaffold_7; pos 16711809 to 16712393)
ccattggtagatttgacgcttttatttttagatttttaatttgtacttaataaaataaatggatggttgataattgttggtagtttggcttaaattgtattatgtgtgtctgtgagctccaagagagctccaatgggtatctccagaccctcaagaattatgccgaacaggttttttatgcttctctgcattgtgttcccaatagaacattataaaaaagagtcattcatgtaaaagagggtcaccagatgagtttatgtgactcgacgtttcaattatttttggcagattttcctttcatttgcttggcggtgcttctgttatttgtgcagtattgataatcattttgcttgaagttctacatgttggaaaccattttgctccccttgtctctctctctctctctcactaatatttttatcatttcttcatccgtaatctgctttacctctgaccaaatttttgtttttgtttttctattgcagtttcacggatctccaaatgacagaaaaaggattgctcttgttgttgactattctgaatttcctggacccaaaaggttcaagcagaacatagagatcaaag

SEQ ID NO: 69078 - DNA, 617 bp, Prunus persica
  Intron number 1 from transcript ppa020398m (locus ppa02039 8m.g) derived from phytozome v7.0 (chr-ID scaffold_3; pos 17848835 to 17849451)
gttcaaggttagaaattctgatgactcgtaatgttttgcaagttactgttgaaattcatactaaatagaatggttggttcaaggtgcagctttacatactaagttgaaattcatatcaaaccaatatatgagaagttgcatatataaactgccatggtcaaattaactatccagtatatatgtggcttcaaactcggttgggataagtatgaagttcaatatttcttttataaaatcacattgaagacagtattccttcataaactaaactaaactttaagcattattaaccaaaaataagctttcttttgtttttagttgacaactgagtctcactgtcaaggtatgccggacaagaatgttaactgtaccatagcaaccgtggccttaatccctttctagtagtcacagaaaagtcgtaacacaacagaatctgcaaaattaaacttcgaacaccagaaaatgaatcgttagattatttctagaggaaggacaaagactcaaaacaggcaaaaaataatttgtaataacaaagagttcatggcgatataatcaattgtcttcttgttcaatgaaatgcaggaggtggagagtatagtacctctcaaagttcgtga

SEQ ID NO: 69079 - DNA, 706 bp, Prunus persica
  Intron number 2 from transcript ppa019119m (locus ppa01911 9m.g) derived from phytozome v7.0 (chr-ID scaffold_4; pos 5974911 to 5975616)
aggctcagctccattttaagcacctatctttctaagtaagttacactctggtttaaatatgtgagttcaaaattccaaaaatgaacagggagtggttgtaactatctatgttcatgattttcataaaaattaaattatgaagggagggggatttggtggaacatctaagtagaagaagcagggagtatgtttcctttcttttttcctttagcaagcattgtactttgcaccaattttgttttgtttaatcttgttctttaagaaaaaaacttatgaaggattgttcatcatttgtttcattgtaaaaaaaggagatttggaaaaccacataccagttaagcatagggtatgtcaattttatgtttctaaaatgaatcatatgctattagagcccatacatctactattaccatagagtcatagtggttttacattgtctattggattgaccacttattcaaataggttcaattcactctttcgcatgctacgtgctatgtgcattgttttttgcctaaccactaaaacgagcaagtacgtagtgtttccttgtgatcagattcttaaatgtgtatgtgtctgcttatttgtgtgtctgctttctatgcattattgaagtttttattgtttagtgtgtttatgggcttgtattgtttctagttatcactttatttgtatgtcttgatcctgcttgtgcatcatagat

SEQ ID NO: 69080 - DNA, 985 bp, Prunus persica
  Intron number 2 from transcript ppa009128m (locus ppa00912 8m.g) derived from phytozome v7.0 (chr-ID scaffold_6; pos 20932464 to 20933448)
ctttgaatttttgcttttggcctggtaggtggtaccaaccacgtctcgtatatcattttgttctaattatggatgccaatgagactgaattaaactatgggttcctttgctttttttcattttttgaacatgccaatctaattccttgtcaagtttactacttttactttgttgcttgttggtttaagaaactatgattaagtcaagtataatgacctacaatagtggattcaattctaaacaaaatgtagaggtagtcatatcaaagcataaattgtagaggtatttatgcttttccacctttccaaattttgttttatgactgagccaagctgttggccattgtgttgcaactaagtacttaagttatctgcttttgtttcattgtacaaaagagtattttaatttcccttgctgcccatgttataaagatttgaagtcttttcatgtcaaagtaatacttcaatgtgtgtttccatccccgtgtgagtcctttgttgtgcagtttcatatggttacttatggaaccatattttagtcgcttgcagtgtatgcagttgaagaaaaagatcatatatcaaataactttatatccctttcagcaaatactaaatgcattgaaaacaagcagctgattgttcattggcttaaatagcttacacatgacttgtgtttatcatattgaattgaaagtacccatgcttgtaagcaaacaaaaatttcggtttactttaagcactagaattaagaatgtaaaagcgaagaagatggatcctcaaggctgcaaaataaaactataatagagggaaaatgtttccaaacatcaagacttagtatgaaagtttgggcgagttatagattcattttattcatatctttgtacatatatttgtagtttgatctactaaatttctgtgctgactctttctttatttactttctcttgacagataaggacttaaattacgataatttggccgcaggt

SEQ ID NO: 69081 - DNA, 695 bp, Prunus persica
  Intron number 2 from transcript ppa009140m (locus ppa00914 0m.g) derived from phytozome v7.0 (chr-ID scaffold_8; pos 1545377 to 1546071 reverse strand)
ccaccattcgcgaccgtacttgtttctcattttgcttcgtgaatattctttgaagatggcgaagaatgactgtattttaaggtcatttcctgatttaacaaagtggcttgcttaatatttagttgacacttgatcagagtttgatggaatttaggtagagctacgaatttggaatttaggcactctttagtagaccaaagtcaattatgttagcagattcttcataatccttttagctcggggccattttttttaaatccattatgaataggcacccatataactttctccttgatcaacacaaaagcctcttagctgcttccgttcacatacataaaccttctgcctttcatccatggagatgccatctttgaacacgatatactgtatgtcaaaaagaagcatctagaaaatgctgcgcgcaactttccccctgcaaaactaagagcacttaatgtacgacatcttacaactacaatataagagatcaaacagtctccaatctcctttgaaacctatttgttttctaacattatccgaaaagcttatatggtcttgttgattttctaagagtgtaagtttacttaaaatttctaattatgctgataccaatgaatttgtttctatacaagcagcaatgcatataatgttttcctatgttatgtttgtgtcctgcaggagtcttctatctttat

SEQ ID NO: 69082 - DNA, 626 bp, Prunus persica
  Intron number 1 from transcript ppa011181m (locus ppa01118 1m.g) derived from phytozome v7.0 (chr-ID scaffold_8; pos 15672147 to 15672772 reverse strand)
ctgcaaagctcaagaaggcgacaacaaaagcagcaagctcttcaaattctcttttttttatttcaattttgttttgtggttcttatttaggatgtttatgaaccaaagatttgtgctttatgagtttaattccgacttgtttatgagtgttttctgtagcgaccaattctgaaccaccagaaagaaaaattggaaattggaagtaatccgctgtttggtttggttgagtagcatgcatggatagattgggggagcggttttgaatatgggttttgttattgtgtatgaaaagtgaaggagccaattttgattttctttcttatagtgataagaagtttatgttgccttaatgtttataaatgaaaaatcagtgatcagtttaacatttactaggaaaagttagttaattgctaggtagttaaaattgaaaaactaattattatgaattaagaacaaatgggaaatttttgtggtattttttggcaaaaaacaaccccaattgggagtaatttagtgggtcagttgcttttcttaaatgatgcgaagggaatggttgcattcatatgttcctcagtttaaacatatgtttcaaactttcaggtgaagaacctccggagtcactgttt

SEQ ID NO: 69083 - DNA, 632 bp, Prunus persica
  Intron number 1 from transcript ppa016698m (locus ppa01669 8m.g) derived from phytozome v7.0 (chr-ID scaffold_6; pos 24886293 to 24886924)
attaatctcatcctcgggtgtgggaacaccttgtatttaccattttttttttgttgtaaaaacacatgtattaaacatgaaaagcatttatgtaatgtttgcttctaaaaaaaatatgtattttactaagtctttaagacgtgtatgggaaacggaagtattattaaaaaaaatacatacttacatgtataatacaagtattaaataggaaaaatactaaattctttatatgagtaataagtaaaaaaatcaaaagggcacaatagagactccggtaatggcctaataatcaaaaggaaaatttggaaaaattttatttaaaaaaaaaaaagggggtacagccgcccggctataatatttattatttattattttttttttaaaaggacccgcctaggaggctgattttccgaaaacttgaatcgcattttttttttttttagatttcttttttcttggcgggtctggcatctctgcaaatacatcaagctagggttttagcgactcactctttctcaccgtttatcaacagtgtaaaggttagctcttcccaacaattcactctcaccgtttatcattgcagattagctttcttttagcaccttcattttaggaactacctgattggaaca

SEQ ID NO: 69084 - DNA, 391 bp, Prunus persica
  Intron number 5 from transcript ppa002230m (locus ppa00223 0m.g) derived from phytozome v7.0 (chr-ID scaffold_2; pos 19414236 to 19414626)
ctcagatcactttgcacccagaagcagatgtgagaaacatgtttttcttttttgtcttatttattgttttgtgtcaacttgctctgtttgattactaagaaggaggagaaaaaagatataaaatcaaaatgtataacccaaatgctgtgaatgttttggttccagaaattaatgttaaagtcgcttcaattcaattgagttattttcttaataaccaatactgaaattttcacgttttttagctcttttccacagtttttgtagtaaccaaaagtgcgtgtatagaattattagttccagctctgaatgaagtataattttttccccttttctttctactcatcttctttccgctggcactacagcaaagtgaacctaccagtcctgatcc

SEQ ID NO: 69085 - DNA, 1009 bp, Prunus persica
  Intron number 3 from transcript ppa020733m (locus ppa02073 3m.g) derived from phytozome v7.0 (chr-ID scaffold_2; pos 22819064 to 22820072)
gtgctgaaaatagggtaagttgattgcttgttattgttgtgtgctaaagttgcttcgtttgttgtacaatgtgctgggggaaaattggggcttcttgctgccttgagatttattcttcctactctcttcgatttggcgttcttattgggtttgtggcttcagacgaagacgttatcttaatgacattaatttggtagcctggtgaattaaatctcacattcgagcaagacctgtacctgttactatttctgagcttcgcgctctacttcttgctgaagaaagtgaatagagctgcatctatcatgaacacaccactccttactgctatgatggcaaagaccaagttaactcctgttcatcaaacccaaggttctccatattctcaggatcagagttatcagcatccgactccagatcacagttattctaatagtacttcaggttataatggttcgtcttctaatagacaatggaattccagaggtggttctcagggaaacaggtattacagaggctggaataacttcagaaacagatataataagagtagacatggtagcagttcataaggtaattccacttatggttcaggccaatttttctatcaacctggttacctggtggtcattatggtaattcaggtggttctggttttcaacaccctggttcttttttggcccatcagagtgtacctcatagtcaatattatgtccctccacattctggccctggaattcttggttcatctactatatgccctactgcatcaccgtggcaatctcctactccgtcctttcaatctactaagattcatttcgcagaaaaatcaaaagctctgagttttctatcctagttttctctcttcgtttctacttgatgtttcagtgagattgcactagttttatgccttaaaacagcattcaccggtgttattttggttttcaccttgacttgtgttgctcttaattgtataaaattagtcataatactggtttgaactctttgaagg

SEQ ID NO: 69086 - DNA, 614 bp, Prunus persica
  Intron number 1 from transcript ppa011210m (locus ppa01121 0m.g) derived from phytozome v7.0 (chr-ID scaffold_10; pos 372515 to 373128 reverse strand)
gcaggactgcacgtaatgccacctctgctttgcttttataatactctagtttttttgtctgtctctgtttttcttgttcatcagtcatacaatcaggctatcaagaaatagttaattggtagtataatggagcttcaatgattgcttagactgaatccacattagaaaataattactgataatccatacttttcagaattgagtatcaattagtatgtagctttcccctttgattggagggtttccattatactctaatttgtattttgattttgattatgattattaggactgttgtagaccaacttcttcaccatagtgcacataagtattattcttatttctgtcttattagacttgtataatcaaatgcacaagatatgggtggtttccactagtaagtggttcttattcaacatatactttacctggaaaatgccctgcctgtttattaagttgatgcttcttatgatgcttaatcctttctcagaacccaatgaaaaaccataagtagtatcaaacgagtgcttggagtgaggtctagcacctttctgctctaaattcgggcagtaaatgaaagccttactaataatgtgatcaaatgcagagtaaag

SEQ ID NO: 69087 - DNA, 695 bp, Prunus persica
  Intron number 2 from transcript ppa013434m (locus ppa01343 4m.g) derived from phytozome v7.0 (chr-ID scaffold_8; pos 19661753 to 19662447)
ctcgaaggttagctcattaagatcctaatgcgaatccgattgattcggtgctttgtaatttttcttttgctttggttgcagaagattctaaaacatatttacctggttcattcctattgagatctgtgtataaagtatggttttctctatggcttctggctgtttggtgtgtgtactgagtatactaactgagtgataaacatggagaattcttctctgtcttgacgctgcgagggatggtatctaatttggttgtttttttcactaaacttgaaatcccatttgactccggatcatgtttgcgttaggtgtttgatgcttgggtcagtcggtgcttctattaagtcatgtttaggctgttttggatgacgtaatgaattgctttctattttacaaaactaaaatgagatttatgtgggacatcacaaatcattgggatctttttcctattgggtatgcattggacatgctattgcctatttgggatgtgtttacaataatttgatgagaaaatggtttgatggatactgttacctctttaattactgaagcttttgttagattatctggatttttcccatgtttcatttgaaggaaatatatgttgtttatggtatgtttactgatcattctgacagtacaatgaaacctctttatacccagggactaccgtggcaacaaagttgctctttttg

SEQ ID NO: 69088 - DNA, 282 bp, Prunus persica
  Intron number 1 from transcript ppa010205m (locus ppa01020 5m.g) derived from phytozome v7.0 (chr-ID scaffold_4; pos 7227290 to 7227571 reverse strand)
acatttataggtaattttctcatttgggtatcttgaattttctttaatggtgcttgatttatcagaaagtttaaaacttcattaagaaatttgatatttttaggaaatacatggtactcaaaagctataccaatttaacacgttttcccaaaaagaaacattgcaatttgattataatcttctatgaaatttgatgagtttcctgtaattgttaaaccctttattgaaaatgtagagttatatttgataggattcatttgtgaaatttggtgattttcaggg

SEQ ID NO: 69089 - DNA, 756 bp, Prunus persica
  Intron number 1 from transcript ppa025840m (locus ppa02584 0m.g) derived from phytozome v7.0 (chr-ID scaffold_1; pos 27624469 to 27625224 reverse strand)
tttttgtgttcgggactgcctcttctgctttccaagttggtctaatcgctcttttgatctgtccttttaagagtaaaagttaatgaactactatttaatttcacatggatataaattttacttattttccctgttatatatcagtaattaattaattcatatttgtcatttctgttcatggttggattatttctgggcttgcattgcttgtgatactttgagtttgatgtttgccatgcatgatgtacctaaccaaacacatgcttcatcagtcatcactatgtacaactataaattactattatttattattattaatttagaataaaatgatttgcgtttcttctgattgttgtcagcatgaaggtgcagttaaagaggatggaagggggtcttctatctgtggcactttttcacatactattactaataatttattattttgttgttgtcttttttatattcatgttgtaattaatttaccagaaacttagaagggttcagatttctctgcctatatattcaaattattgagtttctcatgcagtgaatattattgtgacccctaaccttgcattctgccgcaggaaaaaatacttgatttcagtaatgcagacatttctgtggatcagtatcaccgttataattcaagcctactcaaaccatatattctcagaattcttttgttaagagacatgatgatgacattttgatctagggtattaacaaatgctaaattatttgcaaagcaggaag

SEQ ID NO: 69090 - DNA, 535 bp, Prunus persica
  Intron number 1 from transcript ppa021594m (locus ppa02159 4m.g) derived from phytozome v7.0 (chr-ID scaffold_1; pos 42484244 to 42484778 reverse strand)
gtaaatttaaccgaattacagtgtgtttattaagaactagttgggtattttgaggatctagggccccaaaaacctgaatgagaagaaaggtagacaaggatagttactcattgtttgaaatgtattataggacttgttctcatttgaatcatcaaaggggcatctcactagtgtgaatttcaggcacataacattaagacacatatcatgttctatgccagtggatgaaaattcaatggttagaataacagtggtttttagcatgcaagtagctggtatgttttgtactgactgctcaagttttatctacgacttagagcatgatatgtttctcattaagatacttaacattatgtgccttgatattcatcatctaaccagctgtaagattataaaaaaaaaattgcagtaagtcaaggatgagattctgaaaggaagaactccccccatctcctctcttaatttcacttttggtcatttagttgaagtgtctatctgtatttctcagggattgtcttaaagtttatcatcctca

SEQ ID NO: 69091 - DNA, 708 bp, Prunus persica
  Intron number 1 from transcript ppa011736m (locus ppa01173 6m.g) derived from phytozome v7.0 (chr-ID scaffold_7; pos 21115868 to 21116575)
accgaatcagaaggtatagatttttgcttgaattgttctcaatttgcacctcgggttattttgttcattcacttggtagaaggattatcttttagacagaaataatttgtactaaatattactgtttattactaatgtgttaagttttttataggatcagatacgttaattatgtcattgtttgtttagtctggggcagttgggaaatgatactagaaatactcatggacgtttggtggtatagttttccattgaattgacagagaataaacttttctttgctgtattgtttgtcactctagaaatgtacattgtttaggacacatgtagtaaatgtccatgttttgcagcttaatcacatttctagtgatacgcctcttcatttgtgttcatacaatatagtggaaaatatagcatgacaacattgtttgttatattaaatgaaaatgtggttttgatttagtgtatagtcattcatccatatgtttgcttaagatttggataatgtgtatgacaagcttaactatgctgttttgaaaagtcttgggtttgcagtggagggagcagcaggccttgcctgcatatatttagtagttgctcatgaattagatagtttattaactaatcgggattcatcaacattttaaagtttgcattcttatatatcttgtagattgcctttataccttggaacggtgggcgtggttt

SEQ ID NO: 69092 - DNA, 715 bp, Prunus persica
  Intron number 2 from transcript ppa005296m (locus ppa00529 6m.g) derived from phytozome v7.0 (chr-ID scaffold_3; pos 6222424 to 6223138)
ggtaattgtcgattttaattcttttaatttgtgaaaattttgtgggttggttgtttttggtctcatgggaaatggtgtttcttcaatttctttggatcaaattgtggaattaaagtttcttttcgtttctttctatgggtttccggaattataggatatcactaatttgtaggacaggccctcatttttgggtgattatagctttctttatccgttcgtggttaatttgctttctttcggttgttttcttattccttatttagcaagtggccttttggttttcttgggattttatccttgagtttgtaaattctaaggaggatactgaaagcttcatttcataccatagaattgttagttttatgtaatttcataacagaaactgtcgtaaagaacctagttttgttggtatctgagcgttatcggaatggcttccttggtggtagggtgtcttgatggagagcttgcattttcctttccagttcatgaaaagagggtgggtgcacatgtgagaaagtctcatgacactcattactgtttattcaagtgtttagaacaacgatatcgagttgttttaaacagcatctcttgagcttttattatgaatattcttgttccaagttccaattttcccgtaatcagactaaaacttctcgtattggcttttgttgtaatctcaggtggtgctagtctattgtcaataaaggaaattaca

SEQ ID NO: 69093 - DNA, 870 bp, Prunus persica
  Intron number 1 from transcript ppa005103m (locus ppa00510 3m.g) derived from phytozome v7.0 (chr-ID scaffold_5; pos 3275285 to 3276154 reverse strand)
gcggcgctcgatctggctctcgctcaaaggttagttggaagctgaggcttttaatgattttgtttgattctagttttggaagtctggcctgtttgatgtctgagaaattttattttacatacatttcacctcatgcagtggggttagttttaattaatcttagttgaagagattggtaaatgctactgattcttggatacattgaaattaccagttctatttttggatgcgtgcaaatgacgcatggaaccaaatgcccttgttgttttcttttgccacctattaaccgaacatcatcatttttatgggtgattgttgaaaattcaggatccataatgtaaagataatggttttgataaccgaaatttgatactgtccactctttctaatgaccgaagaagacaatgagagtgatgatccaatatcctctaacaggtcgatcaagataactgatttatgaagagagattatgtaacaaatcatgcaatcgagcataaagtactcaggtcatatccaattttacatttttttttacaaagacaaaaaatcacattgcaaagtacccttcttcgatacttctgatgatgagaaatccgtatctcaaaattgctaggagtttttttatggtgtattctaattgggaagaaggaagctaaggtaaagttgtaatgtttatgcgcacaatacggataacaaaggtgagataacatttttagtttgtcaccttaatctttctttgtgttcaaaagactctttgaaagtttcattcgaggcagacatcttctgttaaaaaattaccgtaacagtgatgctgcctgctatttatttgttgaaactttgactctgagttctcttaccatgtatatgcag

SEQ ID NO: 69094 - DNA, 645 bp, Prunus persica
  Intron number 2 from transcript ppa010787m (locus ppa01078 7m.g) derived from phytozome v7.0 (chr-ID scaffold_1; pos 39654983 to 39655627)
cccctgtagccgttccggcccataaggccgttttggtcagtacccatttcgccaagttgattgattggtctcgttttgttgtaaattcttggtgggtctgtgggttttgttccttttagtttgcgcaccttgtgtttggtttattgtctgaatgaaatgtgccatgtttacatagagctggaaaatggttagcttgagaagagaatgatatatggctcttttggcagggtattgttttaatgtgattgtcaacttgtgtgtcttctgtgtgtgatttgttagaaatgtacattcaagttcctgccttttactattttgtttctcctgataaattttttccttttcagtagttcaagtattttgaatctttgatcaattttgggtttttcatgaatgtgtaaatttgggtttgactattttcattaggtattaggcaaaacttgattgattatatatactgtgctatgaatccatgagcattggtcttcgttttgtgtttgttgttgttattgttcatgtagaaagactttcaatttggattagatcacgtgttccgtggaaatatgtccctttttggttcatctctgaatttctttaaacattttgacacttatccaggtgagccgttctccggtgttcagagcc

SEQ ID NO: 69095 - DNA, 673 bp, Prunus persica
  Intron number 1 from transcript ppb012805m (locus ppb01280 5m.g) derived from phytozome v7.0 (chr-ID scaffold_3; pos 4888093 to 4888765)
tatcaattggctgagttgcaggtaacaccaaattagaatagttcctaaggaaggtcaattttaattttttttgtcttatcaaatcatccctatcagtctcaacgtcctcattaacttaagttcaaagaaaatgtttttatactcttaactttgaactcttaataaggttccatgtctaaattttctttagacactcagtttttaaagcatcaatatgctcaagctttgtctttgtatactagtatacattgtgctaaatatggtttctggaatcaatttttgcgtattggttagatttcttgatttattcattgctcatttatgttctgtgaatactcaaataaagtaaaggtacaaatacatttgtctttcaacttatgggtaaaaggaaagtattatcttttattaacatagaattaaaattaactgtggaatggaggatgaggagttctggaccgtagtcctcccaaaaccaaagctttaatacctgcctgccttcctctctcccttctactctggttctccacatgtacctttcttctatatgaaggtttattaataagtaaccaacataaaaggcaaaagaaaagtcaggtttattaggcatatggaagtcttaaccatccatttccaattttgcagtcttgggaggaaaaactgcagagagctcaag

SEQ ID NO: 69096 - DNA, 575 bp, Prunus persica
  Intron number 1 from transcript ppa006682m (locus ppa00668 2m.g) derived from phytozome v7.0 (chr-ID scaffold_8; pos 10351636 to 10352210)
agtaagattgttagttttctatgcaattctttcatgggattgttttgcttctgctacctaatttgatttataagtatgcattgatgtttagtgtaatctaatgagaagaataaatgttgttatgttctaccattacgtatattgttacaaaaacgaacaaagtgcacaaaaatatgaaccttataagttgaatcaagcatctttgggcatacagatgatttaaggttgttcaaaacagattggtactgacattgacgtgtttggtggatttaaccttaagcaacttaattttgtatctggaggaaacggatgtttagatattaatggatatgtataagtgaagtggttggaaaattttcatttctttcttgcttataacaatctgttttggtgttccctgaggtttgagggtaacctgtggcggtcttcatggttcccctcgactgaaactcaatctagaatcttgttagttgtctttatctgagtttcatattcgtctgaaaaaaattctgagaaaggaaatctcacatgctcatagctcattaaatcaaggtggcagccgaaacagcctgcac

SEQ ID NO: 69097 - DNA, 928 bp, Prunus persica
  Intron number 1 from transcript ppa017695m (locus ppa01769 5m.g) derived from phytozome v7.0 (chr-ID scaffold_1; pos 27927583 to 27928510 reverse strand)
gaacagaggttttgtcagcagtgtagcaggtttggttcttttttctttttcttctaaattttccttattatgccatcactttgcttttcctgttcttaagtttctgtagttatcatggcacataatcattgaaagatggtattaatttctatcctaattatgtatttggaacgaaccccacggatgatcccagttgtttatttctgaagttaagtgatgaatttctttgttgacttatgagaagtaaaaatgagatgaagatatatgaaatctgaaaaagaggcatcccttttacatggggtgcagtgtcttgaagatgaatctgcattaccacaaccaccctgaacagagttaaagaaagttatgttgcagattcagcactccactttaaattttgctcctaggattggcacatagtaggatctcatattgatggtgagggatgaattccctcctgcattctttttgatggctgaaaaattgtaagaaatatatagttttcttttcaagaaagaagaggacgttttgtgtcttttcaattcaacttcaacctcaacctttttaagattccattttgatagtcaaataaagcttaagcaaattaattggacagtggtacgatttttttccctgtccagttatgaagttctttaacctttatttgctgtataaggtttttgctgagtggtatgaattaaatggggttttgggcttgaaaaaaatttctagttttaatagctctgatgttagttcttcaactttctcatggtttctagtttacatctgacaatgaatgtcaaacctattgaattcctctttaatttttataccattattcaccccaagctctaagtgctgagttgttataactggtatgaacaatggtatctttctgtgattaggtttcatctgcttgctgaatttgacg

SEQ ID NO: 69098 - DNA, 677 bp, Prunus persica
  Intron number 2 from transcript ppa005478m (locus ppa00295 9m.g) derived from phytozome v7.0 (chr-ID scaffold_6; pos 723957 to 724633 reverse strand)
gaggagcaccaattaaccaacaggttttttcatgctttcctttatcactgttgtcttggctttgtcctcatctagtgctctgtaattgatgactttatattgctagtgactcaacgtgagagttgtgtttattttgtccaactcatacagttttagaaaaccctgtgctctagcttgcaatcttatatggagctttagtaactaaagtggaagtttgtttcactttttgtgtattggatgtactctataagcataattcttaagttaagctgataaattattagcatgattgccaatgtagtttgcattttagatgtttggtgctgttatcttggtattatatgaacgctgcatagtttggtttaggatattttctgtctaattgtattttcattaagttcatccatgtaatgactgctaaattattctcagcatcttctttttgagatggtgagactaattgagcgtttgttggcgtgagatacaggatgtacacacatgtatggcatttgagtctatatacttagtcctgcaagttgttacaccgcttacatcttattttgtctaaatttcctcgtttacttcaccggcatgttatttttgagatacatagcagattttgatttaagtatttttggacagctgcgggaacttgaaagaggtgttgatattcttgt

SEQ ID NO: 69099 - DNA, 466 bp, Prunus persica
  Intron number 2 from transcript ppa000185m (locus ppa00018 5m.g) derived from phytozome v7.0 (chr-ID scaffold_12; pos 631031 to 631496)
ccactctgctgaattcctacaggaacatcatagaagtactttgttctgttttctgcttttctgtactgtttcatttgaatttactatgactggatttcttttctcttacaaaatagagggtaattcttgtttccccttttctctgtaagacagtaaatgcaggatttttatttttattttcattaatcaaatgtgataggatagagcagtacatagtttcatgcttcaatttcgacgttcttcgatctggaaagggtagtttgattatattcaataatataaaatgaaataagcagcctctataggatgatagtaaaagttcatacttccaatggagatgaggctttaacctaatgtatctatgtgtctaccgatggatgacttttgtttacacttattcttcttttcaattttgtttttcatgtgaatagggaattcttggatttgttaagctattcccgtcaaa

SEQ ID NO: 69100 - DNA, 930 bp, Prunus persica
  Intron number 2 from transcript ppa001490m (locus ppa00149 0m.g) derived from phytozome v7.0 (chr-ID scaffold_1; pos 31328704 to 31329633 reverse strand)
ataagccccctggatttaaggaggaggtatgtgcaattacgattaatttttaggttcaaatgatataaacttttgtgaaatttcagtttgcaagatgccttatcttggattgaccaccaaatgctgttgcaagattactgtatttgagatgcagattgaaaatcttttgaggtggattttgttgctgctgcatcatttcattctgcgaccttgaatttattatgttcctcctattaaatagtatttttattttaaccagaacaccttgttgtgtccacattccaatataagtggtgagaaagtggaccatattcttcttcatatccctgtaggtatggagctttggtccctactcttctcatgcgtaatttatgacttgtgtctaggttgtttgttgatatgttggtatgctagtgcgatgtggaatgaggttccttgtgcattattatggaaaactgcaagtgctttcggatgatatggatctttcaggataatcgttaagcttttcgtctgttcagacaaaaaagtaaaaagaacttttgtttctgaatttgcttttgttcttgcagtgtttcctattgcagaccctgtggtagttttgctgtccttttattacttatagaaaaattgcatcctattagtcttaattggatcagagatggcattgctttgaatgctatgacaatgagaattccattctacaactcttttttttattataaaaaatctcattcttatagggatttataagataaggatagagaattattagaatctaaacttcagtgcccctagatctggttataacttataagtaaatgcttgtttcctttttctaggcatcacgagtaactttagccttgccaattgggttggtgttatgtctgactaattttgaactgctgttttgtgcagcccgataaggtctct

SEQ ID NO: 69101 - DNA, 763 bp, Prunus persica
  Intron number 1 from transcript ppa013077m (locus ppa01307 6m.g) derived from phytozome v7.0 (chr-ID scaffold_4; pos 22201723 to 22202485 reverse strand)
tacttcctcgttcttaaccttcgctgttcggcactgtaagtaatgttttagggtttgtttttcatctcatggttctcttccattgcagctactctaaaatgtaaaacgatttggaatatttagtgcctgattcgtattcttgttttagtccacggtcgattcgaattagttagctctgtttgattgtggcccaaaatggcactgtaaaagggaattgattgtgatttgtgtgtgtatgtgagtaagatagttgaacatgttcatggggttttatgtagtataaatatttgtgtgaaaaagctggaagcaccgttaaaggaaattgaattgtgactatgtatgatgaagtttgtgtggtaatattgctttattttaatcatgagagtaaaataactttgggttcgaggaattaggtttaggagttttggatctgaagtgttatatgttgtttatggtcgttgatagtggggttttcttatctgctattgtgatctttttcagtttgccagatactctaatctgctatgctgcttagtttttattaggtttggtttggttttgtgtaagatttatttaaatctacaaggccctttttgttttgcttttatttttttagtttctctgttttattttgtttattagcatcttagttaaaaagcttggttctatgggttacatcaatatcatattctctgagcatgaaatggatgagagtagttttgtattgttttcttagcattgcagaaagagctagttctgcaaa

SEQ ID NO: 69102 - DNA, 752 bp, Prunus persica
  Intron number 1 from transcript ppa016737m (locus ppa01673 7m.g) derived from phytozome v7.0 (chr-ID scaffold_4; pos 10370317 to 10371068)
tgcgtggtactctttcctcccctagggtttgtcccgtgagattttcctacgaaggttttaaagaggtcactataccgtgtctctctttgtatgcctttagttttatgaacgaaatctctttctataacaaagaaaatagcaatgtctggattttgattaagaagaaacaaagttgatcactgtactcctaaaacttccgacgacggtttccaagtcttctcaatgtcaatgctgccgtccattcattaatttacgaacgaaacaaagcgcaatccaaataaatatagacaagaaatttggaccgtcaacaatattatattttaactttaagaaaagtccacttgcaaacaataaaaatctaaaataaaacaagatacaagaactcaaacagagagtctctctgccattgcccaactgaaaattgattaacttcaaatggaatcgtttcgtttgcatatgtacaaggaccgcgtgccagcaaccaaacataaacaaataccatgtcaaactgaaaggtcaattgtttgctttcgaacactcccataaagaatgaactataagactcgggtcgtccaaggatatttgttctgatatgaattgctaaaacaaagaaagattataaatattaaaaaaaaacaagaacagcacctttggtagctttaactctgcagtgatctgcattctgcactaaataatatggttttcaataattatggaaagggatcatcccactacactcaccaccaaagctt

SEQ ID NO: 69103 - DNA, 701 bp, Prunus persica
  Intron number 3 from transcript ppa006272m (locus ppa00627 2m.g) derived from phytozome v7.0 (chr-ID scaffold_6; pos 5499269 to 5499969)
agggtcttggacctcttctttataacagataacatgtaagttttgccttgggacttataatttatttttcttttttactttgacaatttgaagaactttctctattgttgtttaatttgttcttattatgtaaagaatttaccagttttctactgcattgtaagcggtaagacgataacgtgatgtctacaagttccatgatttgtctagttcaataagtttcccactttggagaaagtaaaataaatgttacatttgttatatttgtctttaatattaggtcttgactgacttgtgctgtgctgccttggagttttagaattacagtgtgattactttttggttttttcttttctcatttttacatgggttctaaatgaatgaactcaaaggcttatatagcttagtttatcttgaggtaataaaatgggaactgtggttttttcctttaattatttttacaagcatgccctccctaagaggttgggaaagagatcaaacatgccatggagcaaaccacgtagactaggaacaactgcatctcatctgaattattgtccatgttttattgttttttcttggcaatttcatgattttatcaacgtttaaaagtttgttaagatggaatcctgatgtaattaataattgagatgcgctacatactcatttcagggaccttctacacacgaaagaacgccaag

SEQ ID NO: 69104 - DNA, 353 bp, Prunus persica
  Intron number 1 from transcript ppa008217m (locus ppa00821 7m.g) derived from phytozome v7.0 (chr-ID scaffold_7; pos 10347930 to 10348282 reverse strand)
tgcgtcgaccaacttctcaatttgcccaagaacaggtaaaaatactatgaagtttgcatcttttttcttcccatatatctaactagtacaaaaaagaagctttttgtttaaattctctccttaatttctatcaaagagtgtataatttcctctttttggtttggcttttgtttttccgatcgttttgatttttatttgggtctcttttgtaaaatagatttcataatttaagggaattttgaaagagagaagagtacctggttactgtccttaatcctaattgacttttttttttgtgtggttccattcatttcataggggggttacaacttgagagatagaaagaaaaataa

SEQ ID NO: 69105 - DNA, 571 bp, Prunus persica
  Intron number 1 from transcript ppa011781m (locus ppa01178 1m.g) derived from phytozome v7.0 (chr-ID scaffold_7; pos 17337152 to 17337722 reverse strand)
cctcggcgttcctcgcaccctccctcaaggtctctctttccctgtaaaacttcccttctctttttccttccttgttattttccgtttggttctcgagaaaaacaaacaattaaacattagttccatcaccaaccgacctatttttttaattaattcatgagacatctgatcgattgcggaactttcggttctcttagagaattctaacttttagggtttcggtgtctgaattctttcttcttttttttaaatttaaattttgtaaaccaggttttagcttttcacgttagatttgagattcattcatgaaagtttaggtcaggaaaaagtcatcatcttgagctgcagacagcatatatttttgcttttcctatgaaggatttatctttctttgctagttttgaaaatttgattttagaaccacatttattttttctggattatattgtttgctttgtgctctcctttttgccagttgaaacttttctttttatacgaaagtcgtattggcctacctactaatatgtagatttggtgaccagtgcctgactcagtagttgcagcaactgag

SEQ ID NO: 69106 - DNA, 470 bp, Prunus persica
  Intron number 1 from transcript ppa023720m (locus ppa02372 0m.g) derived from phytozome v7.0 (chr-ID scaffold_4; pos 21922640 to 21923109)
tcaaacatacccttcccaatcgtaaatctctctctctctctctccctctcatgcatgatcatgagggtgatcttcatgttattagtgtacatagtcataggccttgaccatatttctgacatggatgaaattcatgcacaactcatccgtatttggctctcacctttccgaagaaagttgtagtcataaaatatgatacatgtaacgttactcattgttccattacatgaaacacataaaataattgcatattcttacaaacaaaaagaaatttgcatattatttattttgaattttgctcttgatagtttgcgtttctcagtctcccgaatttctgatcctccgtttttctcatcctatgcatagtttcagtctccgaagagggggaggaaggggaaaatgtatacaaaaaaccggttgatgctgaaaccaaagagctgtttcttcccttccgttccttttgcaagaaa

SEQ ID NO: 69107 - DNA, 861 bp, Prunus persica
  Intron number 3 from transcript ppa006607m (locus ppa00660 7m.g) derived from phytozome v7.0 (chr-ID scaffold_6; pos 17946165 to 17947025 reverse strand)
gagaaggtaaaccaaaatagaagataaaaatatgttttttgtacttctcgcagacgtgcatttgagactaaactgatttccatttgcacgccatacgcacatacacagagtaaaatctacatttaaagatattttgtgggctatattgacgggatttatttagtttttaatctatgatgctgcacagattacaactgatatcatacccaccccatgaatatgttgtatgtgttgccacacttcctggcttgactgctacatcatggaataaagcaattgtgtagaacattatacacagatacaaatagattccttcctttttccattttcttgatagatacaagtgctatactttgaatggttgcctttagcttcctcaaattcgaaggatcgtattatttattgaagcagtttaataggctgggttcagtaggtgtgcatactacttggtgctggtgtttacacttcctactacatttttgtttctggagaaggtgtagttgggaatggaaagtattgaattgcacgcagaggattacctttgtgcttgtgttgcattcttatgagggttgagtgctagcagtttagcataagaattgcgatcttatgtgagatctttatattcttgattttcactcctcctaggttatgtcttcttactatgtttctgttttcttcttgatgctcattgttcattctctacgagctgatttccctcactttgtttggccttctgtatatatcctgttaacgaggacatcaccccttttacttgattttggtgtagattttctttaaataaacagatacaaatagctttacatatttttatagctttgacttttgctttttttacaggct

SEQ ID NO: 69108 - DNA, 299 bp, Prunus persica
  Intron number 1 from transcript ppa006607m (locus ppa00660 7m.g) derived from phytozome v7.0 (chr-ID scaffold_6; pos 17947216 to 17947514 reverse strand)
gtagttgctttcttactaagctcatcctcctcctggtaatctacaactaagcattataattgaagtcttactgtcaagaaagtaattttcttcttaaaatttggttctagattttcttctaattttaatttgtagaaacaaccataatttttttgatgcaaactgctttgtttattatgttttgttttgttttttgttttgtttttgtttttgtttttgtttttgtttttgtttttttgtttttttgtttttgttttttttctttctaaacttggaaatgctatgccaaaggtacaacc

SEQ ID NO: 69109 - DNA, 209 bp, Prunus persica
  Intron number 1 from transcript ppa001461m (locus ppa00146 1m.g) derived from phytozome v7.0 (chr-ID scaffold_1; pos 33812072 to 33812280 reverse strand)
atcaagttagatgtgagtaattaaagcttccaactttttcttctttttgcttctttttcagtatattcttttatgggttctctagaatgtgagttttctttaatgggttcttatagaatttctaatcaaacactgactctgttttttgttcatcaccatttgcgtgccatgcagcttacttccaggaaagaattttgttcctgacggtg

SEQ ID NO: 69110 - DNA, 798 bp, Prunus persica
  Intron number 1 from transcript ppa006351m (locus ppa00635 1m.g) derived from phytozome v7.0 (chr-ID scaffold_7; pos 17754876 to 17755673)
ctcgagtcagggtactgaatttttctttttattctttgttctttggttttgtttttcatgttattgttgtttttgttttactcatttgctttgcggacaaatttatgagtttgggttgcaaggaatttgtgatcttcattgaaattggaccttttagttagattttccttctttcggtgattatgcgctatccacctgttcatcaaaagtgctttcgggtgctagttgaagattgaactcctgaattttgctttactccgttgttggatgtctaatttactcaataggtatgctatctaatgttgaagtgataaagatcgcttactttgagtagctgggatgtctagtctagtcggtgctttagtcagagcgttagatgtttaagtggcatagatggcttattttactcgctatgacttttgttttccaaggatgtataaactgacatggattgggcactgaacctcgactggcagtttctgacatattggatcaccaaatcatgctttaaataaattctaagaatttgtcatttttgtttgtaattacgaattacagttagcactatatctcttcatcaacaagcatatgcttctccatttaccttttctttgtctccagatcacaatctattatctacattatgccccacatgtagaattagactaaattatttacttaagattgctaaatttgagctgttcctgctattctataaccgtttaacctgatttaagttcattcgttcttctcgcaactacaggagagactggaagacattgaaaaggatcaacgtga

SEQ ID NO: 69111 - DNA, 280 bp, Prunus persica
  Intron number 5 from transcript ppa005892m (locus ppa00589 2m.g) derived from phytozome v7.0 (chr-ID scaffold_6; pos 22736171 to 22736450)
gaacagtatgtgccactgccatccttgtagttgaacttgtgtttttcttgtcctttctgttcattttattcactcgttagaccccacaagtgtgatggccctagttttgttagctttcagaatacggattttgacacaatgcatcaagttttactgttccctcctctttctgatttctgattttgagtttattatgtgttttgaaattatgtgcctttataataatttccttcccatcactgcaggggggaagtactagcggcacaacctatttgttcag

SEQ ID NO: 69112 - DNA, 543 bp, Prunus persica
  Intron number 1 from transcript ppa009625m (locus ppa00962 5m.g) derived from phytozome v7.0 (chr-ID scaffold_5; pos 15432006 to 15432548)
ctttctctcttgtccgctcttctgttatactaactgtaagtctctctctctctctctctctctctctctctcggagagagatacataggtgaacaaatagctctgcggggtgtatgtgttcttgttcttggctcttttgaatccgttatgcttctagcaaaaacctgtttttacttacttggaatcttggatggtgttatgaaagatcaatttgaacttgtgtccattttgcattcaatcccgagttgtattttctctctgctttgcttgacatacgaattttaaatcactctctttcatgcctgcacgcatacagagatataaacaatagtttaattgccatagatgaattgaactttgaagatgatgttcttggtatggactatgggtcttgaacacgtgatctgaatagtttctaatgaatgaatcattgtgagattatttgatgaattctgtgtacgaatatatcgtaaaaattgtttatttctagaaaattcctgatttgcatctatgtttcgtgaaggtacaaatagtgaagagaac

SEQ ID NO: 69113 - DNA, 480 bp, Prunus persica
  Intron number 2 from transcript ppa009625m (locus ppa00962 5m.g) derived from phytozome v7.0 (chr-ID scaffold_5; pos 15432703 to 15433182)
agcaactggacgtgcgctgtgagaccaagacaaaggtttctcaattttcataagtagacttaatccatataatagtggtcattacatgtcttataaatgaatatctaatactttcattctccaaagttctcttacaagcaaaagatttcccatctcattttgtcatctaggctagtgcctcagtttatatgcatttttcacacatgaatccaagtagagggagcatatactcttttctaaatttgtaagtgttcacatcagtgcatgcttaagccgagcatgctaatgattaaaaaaaaaaaaaaattcaatatagagcaatactgggaaaggaatttagatgaaaattttttatattaaaatatcttgcattttactgtttacttagtgcatgttctcttctctatatgcgcctctttaatactttgatttatatgctctttaggacaacgtatttgtcaacgtcgttgcatctattca

SEQ ID NO: 69114 - DNA, 795 bp, Prunus persica
  Intron number 2 from transcript ppa022264m (locus ppa02226 4m.g) derived from phytozome v7.0 (chr-ID scaffold_7; pos 17418467 to 17419261)
gacctccacaggcaagtaatctcatcttctctctctctctctctcacacacacacacacacacacacacaaaccagcactgagtatattaacgttacagagaagctatggtcaacatggcatgggtttgaaacagcacttgttgacctaatatacttataggctatagctgattcagaatttcttatagattggagtttggcatcaattaccatcacttgctatacaaaaaggtttatggcaacactttctctctctccatgctcgatcgttcaacatcagatagtagcctctcacaaacatggttttaaaaaaataaataaaaaataaaaaaacttaatattgtgtgagtactgtagttttctaaaagccaatggaaccatctcatgtaatttgcatgcgtaagtcgtagaccactaatatatatgtgtgtgcattctcacttccaccaacacacgaaagtcaaaagttaaagcttttaaaagcgtgtattaatttgctttctgccaattcattttctggtgtggctttctcctccttcagtttgtcaaaaagaaaagttccaattctgttgcatggcctttgcctttagattgacatcaagctacgactctctttaccaaacagaaagaaaactccaaaagctacttaaagaaaatgcatgtctatgtataaaggtcaaaaggaaaaacattcacttttcccctcaagaaacattcccaacctcttttccacaacaacatgattagaaaaacaaaatggaaagtaattttatttatttatttcaggaagaagg

SEQ ID NO: 69115 - DNA, 471 bp, Prunus persica
  Intron number 1 from transcript ppa008168m (locus ppa00816 8m.g) derived from phytozome v7.0 (chr-ID scaffold_8; pos 19988865 to 19989335)
tatctgctggaaggtacgttgctcatacttctttcatttggtgtattttctagcttttcttaatcttgaaattgcaagttgtcatgtaatctgttgattgtatgtcaatttaaaggctagaaagaagtcttcgcctatttagaatgctatcagtgtccacgtctgtcaatttgagtgttattgaaggaagagttaaacattaatgtgaaattaagaagaaagtatcagtctgaattgtgtttcctaaactcccttttcattatggctgataggagcatctacatgcaagagttttttgggtttataaatgcatttgaatgattgaactcaaatatgtggtaataatctgcaggatgatattcagttttaattcatcctgagtctacacatacactctaactttcttagaatctttctaatgcttgcattttctcagcattgagtactggccagacccacagcgtggcatca

SEQ ID NO: 69116 - DNA, 975 bp, Prunus persica
  Intron number 1 from transcript ppa003298m (locus ppa00329 8m.g) derived from phytozome v7.0 (chr-ID scaffold_2; pos 2043308 to 2044282 reverse strand)
agggtattgtcatacccgacccctaccagacccgttgccatccctactctcctgtattaaacaaactcccagacccctctccctccctccttcctcacccactgcttagtaagtaacccctccccaatcacacactttttacctctctctctgttgcctaacccaacccctccccctcctcctcctcatccccaccactcaccttctcaaaccgccgtagcctacccacctataaattaacagccccaaaattattttattaatttaataatttatctttatttttatgttctactcctctttaatttctgttgaaactaattgatagaagggaagaagagggagagaagagagggcgtttgttgagcagtgggtgaggtgggctacatgggatttgagtgtggggttgtttttgtttttaatttcttttatttttttaagtgcatagtgattgacaaaattgcccttatgtaacttcatttaacagagattttatgttaaatttaacggaggtggtagatttgcactaaagttgaagtctaggaggtaatcaatcaaattttattctttgggtgataaatccgcacactcttattagttcatgtggtatttatataaattttccaaaaaaaaaaacacttgcacgattttgagagatcaactagtacgtgccttgtttttttttctacctttccaatagcagcaaaacctcaaagtgttcacgtctcttttgtgtccgcactttgcttctcctcctctcgtttgtttttttgtcttttcaaatctgttctttttttcagtcaacatcaattaaatctgattgagcatctactttacataaaatgacatgctataataaataccaacagagtttcctaagtactacttgtatgtatgtaagtgcacttagaaaatactcaaaattgaacctcaaacttcaaccgagtagataccaaatccgttcaccaatttgtt

SEQ ID NO: 69117 - DNA, 791 bp, Prunus persica
  Intron number 1 from transcript ppa014439m (locus ppa01443 9m.g) derived from phytozome v7.0 (chr-ID scaffold_6; pos 8187666 to 8188456 reverse strand)
tatttctttctgggcagcaattggaagtgactcaggtgattcaatcgttcaatttcaactttcttctttgcgatttcgaacttccatttctgttttcatcaattcattattcatagtttcgttttcaaaattagggttttcttcgatttttgaaatatgattggattaacttttttttttcctcactcgttactcaattcattgtaaaaaggttgatctttctttgtgcgaatgcctaattatcagtttggatcaaaatatgcgaaaaattcaatccatgagatgagaaacagagtgatagttttcaatttcttaatgtgaattggagggtttaatcaagattcatgaatgtgaatatttgagcatacttcttgtggagaactttagttggaactaccaggagtaaaatgtatctttgcctttcttttctttagtgagatttgaacctaagatttactgtttgaattgaagttagaatctctatagccttctttctacagtttggaggttagatagcaaaagataatgtctatctaatttatggattgagcatttccttgccttgttttacagtcggctgaacattttctttgactgaacttggcgtgtgcattggttatggaaatgaaacagaagtttgctcttattgtaatacactggctataattttcgaggcaataaccatgaaatttttcggttggaagcataccaaaatacatagtttcatattcactgaatataactgttatgtttcttgtttacttcatgtttagtttgctttggtactctca

SEQ ID NO: 69118 - DNA, 802 bp, Prunus persica
  Intron number 2 from transcript ppa021641m (locus ppa02164 1m.g) derived from phytozome v7.0 (chr-ID scaffold_3; pos 10873276 to 10874077 reverse strand)
aaaggttccctccttttttcatataaaagcttacttttgtccttgtagttgcagttttgtggcatgtccacagaagcaatcagaagaacaaatgcatgttgaagaaaaagaaaaaaaaccatatttgaggttgaagtctctgaaatggcatgtcaaatttcatgcttacaagttacatggagaagtcggaggtgggtttaattgaaattaagaaataaaaagaaaacacaagagttcgtttgagttttttttttttttttccttaaataaataaagaattaaatatcattggaacgtctagccggaacatataaaaatttctcaacaattaattattatgtgttcaacaaattgtcctaggaaatattaatgatcaagctcattatcaaattgcacgttagtcttccttttttcaaaactcttatgccttttataaaaagatttaagtgcaactttgctttgatcttatattcttacagaaatgttttattaaattaattcgattgttcattgtctatgctatataaagtaaaatatgtagctgtaaaatcatacaggtgcaccaaaaattctcgtatgaggacatctggatgttattattgtgcaaacaccgtatattttgtattacccattcatgctttcctctctgtttactatgacgtttgcacaataataacgagcggacatccagatgagagaataactgcagctgcacaattaataattaatagggttttattttatctgttgtgtataatattatttaggtgtaaaagctgtggaggtgaaccgaaaacaaagc

SEQ ID NO: 69119 - DNA, 865 bp, Prunus persica
  Intron number 2 from transcript ppa025697m (locus ppa02569 7m.g) derived from phytozome v7.0 (chr-ID scaffold_1; pos 10086257 to 10087121)
cagctgatcatacttcagtttatactgttaatttgagggagcacaatgaagagcaggtcatgctgctctgttaatggatcttgaaggccttgtgagactgggagtgattggcttgcgggcatggttggaaaatctgaagcaagttgctgttgctgctggctctgttttgaaagctctgcaaaatttgagctcaagaagaaatcagagaggaaaacagagagaaagagagtgtatcagttgtgtttttctgactgggtttcatcataaaagtcagctggtatctttagagatattcgtgctgataacgtgttataaaaccaaagtattgaggagagaatttagaagcagaggaaacccttggattggttactctcttcaatatattcattgaatgtttgttctatctattacaagtgaggaggaagcctctttttataggaaacaaaatctggtagtgtttggctctaaagagatgtggttggctctcaagagatgatggcaaacatgcttcatcattactcttcaatcaatcatgtagtgggctttactattttggaatccatccttgactttacaacactttttatttttccttccttctgcttacagaaaaggagggaaaaaaaaaccctagcatgaagctttagaaacgtgtatatttcataatttataattgataaaatgatgacgttgataaagaagaagaatgaagtgatgagtgtacgcatgttagtacaatattaaaacacaaaagccttcataatatatagtttgctctttatacttgtcatttgtgttgtcgctgctatattatactacgaaaacatcagatctccaaatcttttgcttttgaagatattcctgt

SEQ ID NO: 69120 - DNA, 387 bp, Prunus persica
  Intron number 1 from transcript ppa008658m (locus ppa00865 8m.g) derived from phytozome v7.0 (chr-ID scaffold_8; pos 2388134 to 2388520 reverse strand)
gagctctctcttattgatccgaagagagctaaaaggttgcccattttttgtttttcttgtggctgtcttcttgaccccttcctcaactggatcatcgtttttctttttgcttttttttttttagggttttttctttctgcaaatttgagttaaactcttttcaattaattgaggggatttggccttttttaatgttcagaatctaatttgatacgtaaaatgggatttcttttgcgaaattttgaagaaagaaaacttagtttatggaaatgttggtttttttttttttttttggtagatgttatttatttggtggaatgagaaattgaattcataattatgtggttgataggattttagccaatagacaatctgctgcgcggtcga

SEQ ID NO: 69121 - DNA, 516 bp, Prunus persica
  Intron number 1 from transcript ppa021015m (locus ppa02101 5m.g) derived from phytozome v7.0 (chr-ID scaffold_2; pos 7267198 to 7267713 reverse strand)
ttcatctgcctggtctgtactttacccaactttatcactcattttgtaaataagaatacacaatattcatgggtagatatgggttaggtcagttggaaaaggtaacgttcccgccccctaaaccaagttagatccccctcccaatacattaaagtagtttagaatattgccttgtgaaaaaaaaaaaaaaaaaaacaggtttttgtcaaaactagcagaagttcaaaaagttaagtttccaaaagctaatagcgaaaaatgtttcaatgcttttgtgtgtactttgttacgttggaacacttgtttgattcatattgattcagatacattcataaagaagaatttagatgcacccacaagatgtaagattataggagaattttgtattttaaagaggaacctataattttgcgaagctactagcataaaattcctatacatgttacgttatatgtcactttcaatttgtttgtgttttcaggttttgtgaaggagcaagtaaggattacatttgcg

SEQ ID NO: 69122 - DNA, 330 bp, Prunus persica
  Intron number 1 from transcript ppb011560m (locus ppb01156 0m.g) derived from phytozome v7.0 (chr-ID scaffold_8; pos 11598463 to 11598792 reverse strand)
ggtacacttagaacaaatcttccacaaaagtaagaacacaaattttgtttgttctctggctctctttcttttctttctttgattttgcattttctataatttttcaggtttcgacagaatatttgcgaatgcaaattattagtgtccaacataatgcactagaggtgcatagattttgtagttaggttttaaaaattttgttgagaatattaggaatagatgtgacaatagtgctactgtttatattgtgtgtgaataattgaatgtaatgggtacatgtttgttttctcagcaggagatctgggttgtcaaggtactactccggcaaat

SEQ ID NO: 69123 - DNA, 622 bp, Prunus persica
  Intron number 1 from transcript ppa005809m (locus ppa00580 9m.g) derived from phytozome v7.0 (chr-ID scaffold_6; pos 19048851 to 19049472)
gtctcaaggttcatgatccaataatctctctttccatttgaaagcttatgaaacttctttcttcgcgaatcacaacaaaacgactaattaactctggcattgatcacctacctatttatgtacttgcatttttggttatgcagatacacattgttaattagttttgatgtataattccgcagtgtacaaatttcaaatatatgtttataatgtactctagctgtttgaattttgtcaaattgtacgtttgagatgcattaggtaagggtcttgtagctcaagtggttaagagcaagtactcatacacccgaggtcttgtgttcgaaccctcctccccctatatcactttataaataacaaaaatggaaagaaaaaaaagatgcatttacataaactaaacacaaatggctcactttttggcatcactttggttgatcagtatttaccatggatgacggatttcactctgatcaggtttcatttgttgcaatttgcaacagatatcacctagattaatcattgttgttgttgttgttattatagttagatcattaattgataagaatgttttgggccgctagctccttcctaatatgttatttactggaaataggtactgcat

SEQ ID NO: 69124 - DNA, 608 bp, Prunus persica
  Intron number 1 from transcript ppa014302m (locus ppa01430 2m.g) derived from phytozome v7.0 (chr-ID scaffold_1; pos 41136181 to 41136788 reverse strand)
cgaaggcccagttcctcgcctggaaacgccagaaggttttttttctttttctttttgcaaatttctcttgcttttgatttttagggcctagggtttgtttttctctcattctttccctttttgttgttgaattgtatctacattacataatttggaattggaagcttcatgtgtgattaaataccactactttttgggtacaaatacaatataagatattgcttagaatatgcaaatagagaaaattttctttcttttatgtgtaatttgtgtgtgatggatttcaaggtttgtattgattggtaattgtagatttaaggacttccttgatgtgtagaattagtgtgtttctgctagcagcattgcaaggtataaattgtcacggtcttcccggccttgtagtagattttaggtactgatcacttgttattcttaagaatctaatgttgtcttctatggttataggctcttgcctgtgcctctttcagacttgcaatatctattaagagtcttgttcttgtttttattttttagttttgtttgggttggtggaagtaacgaatgtaacgaatttataatattctcatatgtatacatgtttttgtagg

SEQ ID NO: 69125 - DNA, 473 bp, Prunus persica
  Intron number 1 from transcript ppa001060m (locus ppa00106 0m.g) derived from phytozome v7.0 (chr-ID scaffold_8; pos 20384440 to 20384912)
ctagtggggttcttctctctgatcaaggtaaatcttcattcttcaactcattttactacttgggttgtgaaaattttgatatatatacacgtatttgattaatcaagtgaatgaagctgcctcggtagaagctactattgtgagtgtgacttaatcaaacagctggaacaatcagttgctgtatagtatgcaacttcttatgtggcagctttcctctttgtttgtattcatctttgatacttttaagattataatttgctgactcattgtgtttttatattcccgcttagctaattttaacctttatgagctatacaacctaagtggatcatattgaaacaagaataatctgattcattttagtattttttttttagtttcattacatttgttattgaaaatcccatgactaggtcagtgatgtgtttatttcttattacataggtcttcctaccattgttgcaagaggcaca

SEQ ID NO: 69126 - DNA, 840 bp, Prunus persica
  Intron number 1 from transcript ppa004923m (locus ppa00492 3m.g) derived from phytozome v7.0 (chr-ID scaffold_1; pos 42573059 to 42573898)
tacaactgggtcgctttccgtcccgggaagagaaggttagggatttttagcgaagtttctgtttttggttttacttgaatttagacttgtttagctgtttttggtttgcttaaatctgctatagagaccgtaaaatggggaatgtatgtgtctgtgggtttgctttagttcatgttatcaagtcatggtttgtcagtaccttagtttaatgctacttggaattgcgcgagagtagtgggtgggttgttctaattgctcccatgatattcataaacatataatcgcaaatgaaatacgtgttttaaccttatttttttatggcgcttgcagcttattgttgaatgtatcattcttttccaattttggtttcttaaatttgatttattatggaaagaaaacagtgttatagttggcatcaccaattgaacgttttttcacatatctggttgcacgattcagaaaacagtgcaatgtttcacagctactgtgttttggcaacttccaaaattcttgcattttttcttttattctaagggtctgcttccaataagagtcctcactctatatgtgatgtcctaagaatcctttattctgactgtttcttctttgctgggggatttattttttacttttataaatagcagggatccttgttctaatctggaaagttccatttatgggttatctctgtaatcatgatggtataagtattattgttgtcatacttgagcttttaaatgtttaaagaagattctgcaggatagacgattatctaatttattttttcttgaattaaaattttcagccaaaagaatccgtcatattctagagcctacattg

SEQ ID NO: 69127 - DNA, 648 bp, Prunus persica
  Intron number 2 from transcript ppa006161m (locus ppa00616 1m.g) derived from phytozome v7.0 (chr-ID scaffold_4; pos 17905941 to 17906588)
tgaaagacagagttgctgtgaaaatcattgaagaggtaagcttctttcgtttcttctaggatctcaagtgttttctttgttttgggggtggggtggggtgggggttctgtattggaagttaattcctagaatatgcgtaattggtaccactacatagcttagagaatagataattctctgaaacgcagaatttgttgaacgtatataagttcacataatttcaactctgttttctttttcttttcctttttttcttccttcctgagcatcttgttaatgcttttcaaacagtcgtacatttgttgaagaaacgaactttggatttaccgtgctacttttgttgtcaaattatccaaatattaagaatttacaaaggtccataagtttggtattgtacatattttctctgcaggtgatacatattttgtagcatttaagttgacataagattgtagcttctgaatttgctttcgtttcaatgaactaggcaaatttatctttttttatattgttcttgccttttagtagtttagataatcagttgcaatacattgttgaccgtaattggtcggtcttttgagtcacttgtgttctggtttttggttctatacaggctttggaatctggagaccttgctccaggtggagt

SEQ ID NO: 69128 - DNA, 397 bp, Prunus persica
  Intron number 2 from transcript ppa024100m (locus ppa02410 0m.g) derived from phytozome v7.0 (chr-ID scaffold_1; pos 40416753 to 40417149 reverse strand)
ctgatttgaggttggaggctagattgaaagccgaggtcagtcattctgttttctttttctctgtttttattgagtcttttttctagttagttttcttaactgctctgttgtttctgccagttacgatttacttcatgctcttcctgattaaattttctccattcaactcaaatcagcatcaaaccccaactaattctttaaatttataatctttgttattttagtggttggattgtaccattgtaaattgggcttattagctatgcctgtgactggaaaaaagcactcattagctccttttttgtgccagctttggtgtctggtttgtcgctctaagtttcttcctttttatgtttgatcaggaaacttcacggatattctcagggaagcaaataca

SEQ ID NO: 69129 - DNA, 794 bp, Prunus persica
  Intron number 1 from transcript ppb024689m (locus ppb02468 9m.g) derived from phytozome v7.0 (chr-ID scaffold_1; pos 35821868 to 35822661)
tgatacgcgcgaagacagaaaaatcaccagtcactgtgcgcataagacactcaaaagcttggatgaataaatggaaagaagagaagataaaaaagaaagagaaaaaaaaaacacatcgggaaggcgctcagggcgctcaggctcagggctcctcacgcatgatttgaccactgaaatcgtgtactttaagaaaaggcacaaaaatgtctggttcttactttaaaagattgtattattattattgtgtagttccttattcttatcacaaccttttgcatgaagaaggaaagtcctagtctttggaagcatatgatttcacgcggttttcaatgtggctaaaagcaacagatatttccaggcctagattaagcaggctatctatcgaagcataaccttgactcttccttccaaagccgacaagcacaaccaggacaaaagaaatttgcacaagagccaacatctctataccactctattcatctttaaagtgtaaaaagcaaaacatgaaaaagagttctcgtgaagcacaaagaatattatttaaaaagcaaacagaaaaaatgtgttctcgtgggaagtgtcccttgtttgcagggtgtactcaattgcaccacatcacctttttccctctctctctctctctctctctctctctctctctcacacacacacacactttcaaacaaagccatgtgtgtgcctgcctgccttttcaaacaacccccatcaaatcccctcctctctctttctttctttcagctttgttcttgtctggcttcaacctgaagccacaa

SEQ ID NO: 69130 - DNA, 219 bp, Prunus persica
  Intron number 1 from transcript ppa014618m (locus ppa01461 8m.g) derived from phytozome v7.0 (chr-ID scaffold_5; pos 14580987 to 14581205 reverse strand)
agaagatcaacaagcctgcagtcaagactatccaggcattttccttttgtctttgatagtgaacttctatatgctgcaaaagttcatcttcttcttgtcttcttttttctgtttttgtttttcattttttcgaatcgatcaataattgtcctccatgaaatttcaacccagcatatttaatggctttgattgctgtttatttctgtctgcagagccctg

SEQ ID NO: 69131 - DNA, 973 bp, Prunus persica
  Intron number 1 from transcript ppa009897m (locus ppa00989 7m.g) derived from phytozome v7.0 (chr-ID scaffold_6; pos 2717866 to 2718838)
gtaatttcatcctatttgttttaaacttgtcttgctcttttaacctctatcccattttttctctttcaaacacatacatataatgtgtctactctctctcctctctcaaacatgaatactgtgcatcgagtgaatatatctcgattccacggagtgacacacactagcagtggcggagccactcctagacatggagtggccccagcccccttatatttttatcacacctttattatattaatatgatatatataatttgtaataaacaacttagaatttaagttgaaatttcttctaaacaaattagacatgactcaataagaaatatttagctctaaacatgtaaatattaaatatttaggtgttttatatacttacattttctacttcggcggccccccacccccacttttacaattctagcttagcccctgcacactagtaccccccacttttacaattttagctcagccctgcacactagtagtgggatacgttattgtatatatgcctctttttctcaatgtctaagaatttgttataactttttcattccaatccaccttcctctctggacattgcggtagctttcattccttgccaatgcaccccttctcataagcaggggaatacaccaaaccctcaatgtccaaattcttttctaccctttattctgctcatatcatatataaatgttgtagtagtagaggagagaaattgaggagagggatgaagaaaaggaaacctaaggcatgggtggattgggaaagataacatttttaattccaaccttatatttcttcttggataatactttatctttttttttatttttataacaattcacttttatgtaacaacaaatgaggcccaatcttactaaaaacaaataagacccaactctctttaaactctatctcatttgtttttaataaaagcaaaactatagctatccctctcttcctctttcgtg

SEQ ID NO: 69132 - DNA, 576 bp, Prunus persica
  Intron number 4 from transcript ppa000715m (locus ppa00071 5m.g) derived from phytozome v7.0 (chr-ID scaffold_6; pos 15592322 to 15592897)
gtcgtatgaatttaatctctctttctcttacacacaccatggttatgcttagttttttggccagaatggttatgctaataaacatacagtttaatcttgaaaactacacacttcgaagttttcgtttatttatttgttttctgcaataatgtggctacgagaagacaattggtaaattgaaatgcgtgaccgtctttaagcaattcatctgggcagatcagtttcaatgtgggccgaagttgattagttctcactttttcatattctagggttttctcacgattttactttacctgaaattgtattttacttgttgagttagtttcaaatttaactacattatacttaaaaatgaatatagtcaaaccacatgttctatttaacctttatagcttggttgacatacaggtctgatttctaggtttatcatgcattttgataaaaacttcaacataaatttttgcttgcaatagtgtcataatttacttacaacactatgttacaattgttcttcccagttctctcatttgcaaaaagtacctttatgaagtcttatcaaggctttttgatttcagg

SEQ ID NO: 69133 - DNA, 459 bp, Prunus persica
  Intron number 1 from transcript ppa024462m (locus ppa02446 2m.g) derived from phytozome v7.0 (chr-ID scaffold_8; pos 17587440 to 17587898)
ggtgagtacgtaatatttatttattttttatgacgcgtttgattagttaagaataacctaaagtccaaaaattatatgtcgtcaacgaaaaagaaaaaaaataatgcgaataattgtcctccatcaaatgaaattgatgaactcaaatggggaagttttatcacaagcaaatgttcacttaagtgaataaatcagatacttgagcattttgaaggttaataggttcaacattctctctcacacacacacacacacacacaagatttgtagattagtttctactaattctttctctttctctttctctttttttccatgtgttttcagcatggttttcgcggtctatatttttcctcattcaactcattgtagattaaatgtcatattatttccatgagaatttacaattttaacaatattagtcccgacatttattcttcatattgcaattgtctaggc

SEQ ID NO: 69134 - DNA, 623 bp, Prunus persica
  Intron number 2 from transcript ppa024653m (locus ppa02465 3m.g) derived from phytozome v7.0 (chr-ID scaffold_6; pos 11848286 to 11848908 reverse strand)
ggatacctacacccacaaacatccaggtggtgtttctaggctttgttttccttatccactcttaatgttctgtttttcttttctttgaagtcttaatttccctctcaaattcggtttttacccataccgtcactaaacttgatttctagatttgatttttttcgacgttaaaagttgttgctaatacctcacaaatggctgagaatagtgaaacattcaaaataccaaaaaatgcctttagttaattcaaatattaagaattgaaattattaattaaatgaggataatatggtagattcacatttttttatattaaaaaaaattaaaattaaaaacaaaatcagataataggtcctacttttatggaacataactacccatgttatcttttcttaattctaaaaataaaataaaaaataaaaaataaaaccaattggcatatgctcacgagctagtggtataaaaatgtggtaagcctagcattaccctttaattattaaacaatggaccaatgtttttttttttttttttttctaatgagagatagggcctagttagttatataatagtcgtgcttagataatatttttgttttgttttttaaattacagaaagaatccaag

SEQ ID NO: 69135 - DNA, 472 bp, Prunus persica
  Intron number 1 from transcript ppa011760m (locus ppa01176 0m.g) derived from phytozome v7.0 (chr-ID scaffold_1; pos 32393680 to 32394151)
tgcttatttcctacaccagcaacacctttcctacggtcagtcccattttcgtaaatttactgccttcttcccatttaagtacaattgcttatgtattttcatatgctttagtttttgcttcttcctccggtaacttcgggggtaaagtgacgtaatttctatattagctgctcatttggccaataaagcttaataatatttcaccaaagtccaaaccttgatttaggtcaagaatgacattaattttgcttcatgaaattgtatgcgctcttaattgttgttaatttttgttggcacattatgatgcattgctttgtgtgtggtgtttagggttcttttcttttagagttgtgatcctgctacttcatataggcgaacttgggttgcatatcattgacttagtgtgcctttgttttgttaactatcacgcacaacaggactacgtgccgaccgttttcgacaatttcagtgc

SEQ ID NO: 69136 - DNA, 512 bp, Prunus persica
  Intron number 4 from transcript ppa011760m (locus ppa01176 0m.g) derived from phytozome v7.0 (chr-ID scaffold_1; pos 32394565 to 32395076)
cggcgttccaataattctggttggaacaaagcttggtaagatcttgtttcagcccttattctataatgcattggtatattgttctggtgcatgataattttgctatgtttgtgctggtgtctggtctggtgcattatggtccctgtaacttttgggactggctatggactatgaacttctcatttcttccatgtaaagatcagcatcaaggtacagcagagctgtattgctctgctcttgttaatcttctcatttctaaacttcttttggtgagtgtgcattgaatactagttcttaatttgatattttattcaatactgcactgttatcaaggttgatcttttgtttacttagtcctgcagcaattgatcactttttttcctgttcttgagtcaatatttcttatcattatttggagcatttgttactatcatttattagttactactgaattttcttactcttttgatgaacgtgctcaattttgtgattttcattcacagatcttcggg

SEQ ID NO: 69137 - DNA, 764 bp, Prunus persica
  Intron number 1 from transcript ppa009114m (locus ppa00911 4m.g) derived from phytozome v7.0 (chr-ID scaffold_1; pos 26164138 to 26164901 reverse strand)
taggtcagtttctttttattttttctttccttttctgctttatgcttcttttcttttacctttctattttatctttatttatttttttgttttgatcgtttaacgtttttccgatcgcttttaatctatttatggaaatgaatgaggctctggaattggtttactgggacatttttggcttctgcgtgtcttgtttggatgcggattgttgtagaattactcaatttgtgttttggcgttggtattgagttgcggattatccttgttatgaatttgaatcacatgtgcggtactatatgctatgatccggttttccttctttgtttgatgaaaatggatgtatgtgtaatttgatattatgtcctcgatcttgacttgctttcccccttggtttcgttaacggtttatgcaatataatggttgagttggaatcactgtaatatattcaagcttctctagggtcaatcttacttcaatagtgatcatgggaattggttagctgggtttctattgcttctataattttcttatgtatctaagatctgttgaaatgtgaaagaataattttccctaagtggaaaaaattgcttgtgctgggctttatgtgttgtgttcttcagcttaggtcagggttaacattgttttagactgtggaacatgcgtctatttgatgttttacgtttacttatgtactattgttttcttaacgtcttggccatacaaatgcagatcgtgggtactattctgtggagactgtcacactt

SEQ ID NO: 69138 - DNA, 845 bp, Prunus persica
  Intron number 2 from transcript ppa013262m (locus ppa01326 2m.g) derived from phytozome v7.0 (chr-ID scaffold_7; pos 15242914 to 15243758 reverse strand)
aagacaccctcgttttccactgcgttcttagccaggttctttgatctcatttcatctgtccttttcatctgtgagattattgcataacccaattgaaatttcagtaaaaaaaaattcttttgattttgtgctgaagattgtatacttgggttgcccagaaacagactgatttgatatctgttgtggagttttgatttcttaattgcatgatcagagtgttaaaagcataaagcaagctctaatatgctttttaacatgcatttcttggcatgttttgaaagtgaagacaagcatcttgaaaaaggatttgttgggtcaattctattttcgcttcaaaccagcaaagtgcaagtcctatatgaaacttgctgatcagcttgctatgctcttgaaagtggaaaccttgtttgatatattttgtacctgtaactctgtatgtacttggatgaggagtcagctaattgttctagtagaaagatttagtcttttccaagtttaagatttttctaattctatatatctcataaattactaaatcaggactgtttcttgaattttagaaaagccaatgtgattcccttttataccacagagtctcagaagactgaactgctttcatacaattaaaatctgccctttagacttagtttattgaaggtcttaactgcttctacttcccttttctgttattgggttaaggaaatgagttaagggctttcttgatactgatttctctctcatgctcactctatcatgcttgaagtcttgaaagatatatgtaatgctgcaagtgttgtgatggttttgtaggtccgtggcccatcttgtgcacgaaagtttgccaa

SEQ ID NO: 69139 - DNA, 658 bp, Prunus persica
  Intron number 1 from transcript ppa007420m (locus ppa00742 0m.g) derived from phytozome v7.0 (chr-ID scaffold_7; pos 14992612 to 14993269)
tgtcgtacggcccttacatcctccaacaccaccaggttttgtaattttatatgctcgttgacacaatctcactcgggtgtcaattgattttttactgttttgttttgtttaagattaataaagtaaaacttggtgtaattgtgtgttttttttggattttgtttagtacaagttatagtggtgtattgaattaggattgtatatgattttgaattttttttttaagtgacagattttttggaaatatataacttttatagattttatccggattaaaaaaaaaaacttgtatagacttttattataaactttcttacttttctataaacttttttatagattcatatgtatttacatagactttagtcacattttcttcccaacacttttttttttggccaaactatggaagaattttcaacacttcctgaatctaattgggttcgcggtggtggaggaactggattgaaaaaaagagagcttctagttgtaagatatctgatgaaaccgtcgctggaattgagatctcattcaaattttatgaaaatataattttgtttttatgtttaaaaaaattaatataaaaaattattaatctatgatattatccaaatttgatgaatattttcataataatgttgaattttatttttgaagg

SEQ ID NO: 69140 - DNA, 445 bp, Prunus persica
  Intron number 3 from transcript ppa015481m (locus ppa01548 1m.g) derived from phytozome v7.0 (chr-ID scaffold_6; pos 27633699 to 27634143 reverse strand)
gagttgtggaaagtgtggctgcaaatagttttgtggtaggttgttcttcataatctttttctgttatagaagtaaatgttaatgtaggttctgcagagtatcaaaaactgtgattctagtcttggtttttctctttggcattatgtcattttaacaaaatcatatgtaaattcaaaaacctagcagttcagtagatttttgaaaattctgcagtttttttttcttctgatttttgtggttcacttttttatgcagttcaattacaaaacccgggttcagggtgtggttcatgggtttttttctgcttgaactggattttacaactataaatttgaaagtattgttcttttctgtgtatgaaaactaattttggttgattaaatcttgtccatttttcttttctacgttaggccaaccatccccggtttgtaggagagaacataga

SEQ ID NO: 69141 - DNA, 495 bp, Prunus persica
  Intron number 1 from transcript ppa011529m (locus ppa01152 9m.g) derived from phytozome v7.0 (chr-ID scaffold_8; pos 231701 to 232195)
aaggttttgcgcctcttgtcctcctccaggtaccaactctcttttatttcttttttctttttttttttcattttaccttgaaaagaaaaaaaccctttgtttattttccttaaaccctgaaaatatagcgtgaaaaatctaccttgtcgagaaactgagcttgaatcgtatgaattggctgctaagaaattaaggatttcctttttatcagtcagtcaatgtaaatttcctgtatatataggtgtgttggaaataaaggttgaaactttgagttgcaatgttttgttttgtcaatatgggtatgtatattatttgtattataaaaatacgttatgttcaaattctgattttcactgtatggtatggtacccacattgaacttttactttgttctaacacacctatagacttccacactcgcatgaattggccatttcattgatgtcgtcttatttcctagttgactgttcatttgttacactgagaattaacaag

SEQ ID NO: 69142 - DNA, 955 bp, Prunus persica
  Intron number 2 from transcript ppa006156m (locus ppa00615 6m.g) derived from phytozome v7.0 (chr-ID scaffold_1; pos 37684743 to 37685697)
gatcctcaggtaacagatgtttcgacattcttatatctaatggagactgggaattttttattttttttttggttctctaattatgcatataaaaaatttgagtgtgtaagtgtaggctgcctggttactccattttgaagtcttgttttttttttttttttttttttttttttttttttttttttttttttgaggaccttttctattgaaaggggcgatagcatattaaactcacacacacaacacgaagtctttcagctggtagaactttgttatagactgttggtaatcttattgagtcaatctagtatttatggtgataattatttctttagatgggctccatcagggagtctttaataccattctctctatacttgtccatcagggttgcttgcgtccgtgaattaactcaaatgcgatgccaattatactgatgtttaggctataatcacttctcatcagaagcatatggtgaggctacagttacgccacatgcatgtacatgcagcaaattgttgcccttgacgatattttacataagtatgaggattggatgtgccatgaccttcatgaggatttaatatttaggacagttgaggatggactgctgtacattgcctatcatgggctcatgtggggttgaaaagatttgaatggccccaattatgatccccttgttataatttatatgaacctgtgactcgacttctggaactaggcttagttatctattttcttttcgaaattaatgcccgctgccaacaatgtctgtctgcttcattgaagttctaggtgatattgtagggtgaatgaaaagtttctaggcggaatgacatacatgattcctatgttttactggttgcatcatcattttaaatgtttgtttcatttaattgattggagtagggctatgacaggcaagtctgaaagctgaagacattttaaactcttg

SEQ ID NO: 69143 - DNA, 600 bp, Prunus persica
  Intron number 2 from transcript ppa000123m (locus ppa00012 3m.g) derived from phytozome v7.0 (chr-ID scaffold_5; pos 13374730 to 13375329)
aggcaaccggaatcagggctatattggggagaaaggtatgtgtacatcagtaccttgtgatctagcgtgtcaatagttaatgtcactgctgatttttttttttatagctttaggccttccaaaaatgtatggagcttcacaaaatttggtgactttactcaaaatctaccttctcaacatgcttggttaagctttattttgactccagaaacaggcatatgttatatagcttctccaagaatattggtcataaggaaagcttgtattacctaccaatcttgacatagagatcagacaataaatccattggtttacatttcccatgactggagagatacgcaataatttagtgattttagtagattaaggaatctgttaaactcacctcacaagtgcatatgattatgaaatacccataattgtctggatcctttaattaagagggttaagtcagttttccatttaaaaggtcaactattattcttaggtgaaagatatatgggtgttctatttgaagcaatgatgtgagttataagggagtaaagtttgaatcttctatctgcaggaattggtttcaagagcgtgtttctgatcacagct

SEQ ID NO: 69144 - DNA, 712 bp, Prunus persica
  Intron number 1 from transcript ppa018849m (locus ppa01884 9m.g) derived from phytozome v7.0 (chr-ID scaffold_1; pos 40209669 to 40210380 reverse strand)
aacacctatttcaaatcaaccacccagaccaaaaggtagtatgtctgtcctttgtcatttttcttataaattacagactattaggaagaagatgttataagtcttttatgtcatttgttagaatttaggagttgtgtgagtgatgctctgtctgataccattgttggaagactacggagccatgttaaagtaggaagagttcatggtaattagagccaattatctgcagaaacagaaaatagaaactgctgaacttcacagatatacaaggttaaacccttatgagtgttcatggtcattttgatcctacggtacatgcatcaaattggaagtcttgatggtgccagtcaacattttatggacttcaacaccctgcagtaatatatgctccaagcagcctaagaatacacctacctttgttgactttgataattcaatgaaacatcacaaaatacttagagtttgtagtcttggcgtcataactggatattgaagaagaatatgaaataccatccgaagaaatcttatgatttaaccttttttctgtgcaggttcaaaggctaaatatgtaataggtgcgtatatatgacaaatatatatcaagtaccacaagtttcaatctttgctttctttcacatatcaatcaaatgcataacttgaagaattgttcaatataggcatttcggctggtgtttcggggatcctcacaatc

SEQ ID NO: 69145 - DNA, 549 bp, Prunus persica
  Intron number 2 from transcript ppa005229m (locus ppa00522 9m.g) derived from phytozome v7.0 (chr-ID scaffold_8; pos 21027164 to 21027712 reverse strand)
ggtgccgttacaaccatcctcgtgatcgtgctgcggtaaatccttgttcattgtaaatttgcattgcaatcagttaatgagcattttcgatactgctttaatgtgggttttgaatcttgatatgtgaatgagtcttaagctttcagtgataggtgactgcatcaggaaatataggttgttttgaattttcataagtttgagtgttttggcgctcatagcttgttgtccctttgcccgaaactagatgattgtttgtttgctgagaaagagggggaaaagaaaatggggaaatttttggaatggcatgtttattgggttttatacctagtgaagtacagtctataattgatgaaaatagtatttgtgttttgggctcagtggagtgggcgattttgcttgagcgactaacaataaaaactcattttctttgcttggattttaccaataactgaatagtcttattggagaattttgttttcttttatttatgattttggtttgatgctgcacataggttgtggcagctgtaagagctacaggggactaccc

SEQ ID NO: 69146 - DNA, 490 bp, Prunus persica
  Intron number 1 from transcript ppa006070m (locus ppa00607 0m.g) derived from phytozome v7.0 (chr-ID scaffold_6; pos 26742330 to 26742819)
gacgcctccatctccggtgagtaactttttacgcagcttcttcaattgatttcaaattttctctataattatacaatcacatttcgctggcttgtgtatttaaattgttgctagcaaaagtaatttttaataaaacaaatctgtttttcatattttgtttttactcagctgagctaaacgtgaaggggcgaatcaaatggaaacaaaaggtttcaaaattttgggtttttgtttttcaagtaagaataaaaatcgaacctttattgggtaggcatatggaatggaagagtttgtataactgacgttgaatctgccgtatataattgtttaattgtttaaaaaaattccaatgtaggaattagttgcatttttgttctttttgcagattagatattttaatgttccacgtaagttgtacttagcagagcatatgttctaatcttttaattgctcaggactgcgtgtgaagcagcaccgggaactagaaagc

SEQ ID NO: 69147 - DNA, 696 bp, Prunus persica
  Intron number 3 from transcript ppa010247m (locus ppa01024 7m.g) derived from phytozome v7.0 (chr-ID scaffold_5; pos 9782697 to 9783392 reverse strand)
attttctggaagtattatgtttctatctttgtatctttatttctggactgctcttcttttttccccatatcttcactttgggcctgtagtactgtttgaaatcgcccttgcaaattagtgaacttagaatgaaaggcaaatggtgatatcccgttgaaaataatttaaagctgaacttaggacttgcttgttgtagtatgttaagaaggtacgggctttaaatcattgagagcaaaaaaagaaaaattttttaaggaaaatgtttattttgatttactcttgttgaaattgttgaagttcccagccatgttttctagtctctctccctccctccctccctcccaaagtctcttttctaaagttgtgtaaacattattgggaattgggcctgggggttaatgaagctgaactagctcactgtagcttaactagagtactctagttttgctcactttattcataagactttcattctgaatgctctgccaaggaaagttcacatttttcattttttaaaatctttatttgtaatgttatatcttcattttacttttgatatttaatcttatttgtcatgttaaatctccatcttaattttgataatttaaatcgtaaatctgttctgctgagaacgatcttgtcatatgttattggaatattgtctctgataattgtacttcttgttattgcagtctt

SEQ ID NO: 69148 - DNA, 835 bp, Prunus persica
  Intron number 1 from transcript ppa004695m (locus ppa00469 5m.g) derived from phytozome v7.0 (chr-ID scaffold_3; pos 5798352 to 5799186)
ctgctggtcacaacaagcgcaagattattcagcaagtaaatgttttcatacactctcaagcttttgttcttttttatgttgtagttgcttgattgatgacgagcgtttagaataaatttggtgtttttggatgttattaagttggtattgaatttggggcttagttttttttttgatcttatattgagcttatcaaaatcatgcattttaggaaagtttgggttagtagcatttgcaagcttgtccagtaaatggaataaaaacttggcaattcgatgcattgagaactttagacatacagacataaacaatttcaccctaaggtttagcttaatttaattagacatacagacataaacaagttcaccctaaggtttagcttaatttaacttttctcaagaaaataacaataaatatcaagtagatgttcaattgtttatcatgtgtagcctacaacgtgtgcatcaaggtttgcttaaaaaaaaaatttaatgtttgtttttagactcgttagaatggtaaacggttttaaattgactagaagatgcagatacgtacacttccaacagctgggctttgggatatattttcgtggaaacctttatgttaagcactcattttactgtgggggattctttctttgctgttcattgaaccccggcttccctcaccccctcctccatcccttttttttttttttttttgtattcagtttgcagcaaatttcatatgttgatgctcgacgatctatttaattttttttttctcttcgttttctgtgttttctaatgaagtgcttctttttgtataggctatatttaacgaactttgcaaa

SEQ ID NO: 69149 - DNA, 801 bp, Prunus persica
  Intron number 1 from transcript ppa011830m (locus ppa01183 0m.g) derived from phytozome v7.0 (chr-ID scaffold_5; pos 3467179 to 3467979 reverse strand)
cctaagcaccccaagatccgtcaatttgctcacaggtatttgtccgttaatttctctttgaaatagttgtgatttgggaagagtttgatgtatttaatcaaatccataattctagattgtcctctcaatatgaatataatttttggtttattttgcatgatttttctttcctttatctttgcatccataaaattggtttaattcatgttttgcatcagtctcattcaaatgtatgtgtgctctttcttcttcgtggtttaggaatttttgtaatcttaatatataatttgttgaatgtttctcagatcttgttttctttgatgttttcaatttccttttatgaaattagctgtggccagtgatttccccattctttcagtgttaaaatatttctgttgggtaaatacttaaccttacgcataagtttcgatgcatcaaactctgcaatttgttgttgctgacatctctaaacccttcacagttcctcttgcaatcttcatgtaatgtgttcttcctggattagataaacatttgattattatcctggacgtttttatttgaatatttagcacaaattcatagctcatcagaacatatttagcattcaaactatcagacgtgtttaatcatcggtaggatcactgcagtttgtttgttcctacagtccaattttacttgtttcctgtgatactgcaatagttcgttaaataatgaccattaatcatttgttgttgtattagtttataactgctacggccattgtgttttctttcattcaaaggcgaacacgtgctgtgtttg

SEQ ID NO: 69150 - DNA, 728 bp, Prunus persica
  Intron number 1 from transcript ppa016213m (locus ppa01621 3m.g) derived from phytozome v7.0 (chr-ID scaffold_6; pos 11574329 to 11575056)
gacataaggtatgaaaaaacctaggctgataaccatttttttttttttttttttttacttttttggataatggtgtgtgataattgttgggttttcttttccttatttttttgtgtttaggatttttttcatttttcatttttgttcttttttaatttccatgagtttggacttactgcagaataaattaactcgtaagttttattacatttgggcttcgctagctcttattgtatggtgtttgttttttcatgatcataatgttatgaaatttattaaggtttaggatttagggtaaaagtgcaatttttctgattaatgtgcaatttatttaatgagcaatttgtctgattatatagatggaggtaaaccagggggtggaagaaggttttgcttctaatcagcccatcacctatgactgaatctgcaccagcaattgtgacctctgaagctcatactagtgcatctgatcaacttccaccattaccttcccaaaaaaagagaaaaccgactaggaaaccaagtgaggtatggaatcactttgaataatatcaaactggtaatccttctaacctattagggttagatgcaagtattgcaaaactgttgactataagtatgattcagcaacatgtgggacatcaagtttgagaactcatattattaatatttatgcaaaaaatacccatatagggtgcctggttcaaaccaaaagctcctaacttttg

SEQ ID NO: 69151 - DNA, 393 bp, Prunus persica
  Intron number 1 from transcript ppa002269m (locus ppa00226 9m.g) derived from phytozome v7.0 (chr-ID scaffold_1; pos 36755653 to 36756045 reverse strand)
agggcttagctcctattcccgagaaggtcagtctctctttcactttttccagtttacgtttggataatgagtacgctgagaaaatgaagggaagatataaaattttgtgtatttttattctcgttgccattttttgaactgagaagtagaagaaaaattcaaaattcaaaatataatttttttgtttattagtcttaatttgtcgatttgggctgtgaactctttgtgagtggggcgtggcaacaacgtgcagtttctttcttaacattgtgtttgcactgcgaactatttagcattatagcatatcatggttttttgctaattgttttatattcattcttcgatttattgacaacaggtccaggttggtggttccccagtatacaaaataga

SEQ ID NO: 69152 - DNA, 997 bp, Prunus persica
  Intron number 1 from transcript ppa002788m (locus ppa00278 8m.g) derived from phytozome v7.0 (chr-ID scaffold_2; pos 2948669 to 2949665)
gctccttcaagctcattaacttcgttcgctctcaggtcagtgactgagatgagatataaagaaaggaaatgaaaaggagataaattttaatagaaaaatggagtgttttttgtactgtaatttcatatggaagtggtgatgggattagagttgtttgagtaactcttttctctttcgttttcttttttcgtcagaaagttttttagaattcaattccatcatatagtttcttcggctgaaaatgctaagaaatgtccaaaatggaaaatttggttctttatctacaataaaataatttaaatgatttcggttgttaggatatgaattaaaaactggtgagaaagaacaatctttgaatccttattctctacagtgatggcttaagaggatcggcaacacgaaatgcccaaatcaaatagtagtagtttgctgagtttgtattgattgttgcgtttaatatattatcttaaaagaatttttattcttttgttaagtttattatttttctttcatttgttgctatgtgtggtgtctactttttgttttccgggtgcatgatggcttattgttctgtcttaggaatttgaatgttaatgtgcagagcaaaatgttttccttcatgttatagttttggagttattattttcttattttctgttgataatttaggaaacacgaacgacaagagatagagagcttttgttgaactgaagtaaattctcattgactgaaacacagcttaaataacacgtacaaaataattgactcagataaagaaggaacaactcaacatcccactactaccaatactaacagaggtctcccacgactaccaatactaacagacttatcccacaactagaacacccctattgaataggtagaacccaactgatttcctaaaacataggaaccaacgtttattgaattacaaataacataaataatttctaacattttctgcttgtttaatttgtttccaggttgtggaaaatag

SEQ ID NO: 69153 - DNA, 795 bp, Prunus persica
  Intron number 1 from transcript ppa006890m (locus ppa00689 0m.g) derived from phytozome v7.0 (chr-ID scaffold_4; pos 9755153 to 9755947)
aaggtactgtggatgtctttgttctgctgttcctttattcaattgtgaacatactttctgtgtcaatgttagttgctttggcacaatgccagctgtcaaattagctgctcactgcaattgtgaaatggatgacttttctaagtcatacatagatctaccaaatcaggtggagcttttttctgtgctaagtgatttcattatattaatgttagttactgttttttataaaccgataatctgaagcatgaatggaatcacctttattccgaagagttctaagtttgctgctattcgaagcctatttatcaatttgcttccatccagataaattgttctctttcaattctttttattgatgaccgggcctcttttcagaatcttgagaaccctggccttctcagctggccacatggtcatgctaaatggactgtgatccttaattttgagtctgcagattgctttctattttactagattttgcttgatcttgggtttaggtgtgcccgttttggccgttctcttgaataactttagaacaacggcacaaatgattagttttgcttactttctgcacaatgtatgcactcaagatttttgatgcaatctcgttttgttcactttgattctattgcgcaaaactttgttaataagtccttggcgtttaacttaaatttggatgtcagcattttcaacaaaaaggaacctagcttctttcagaggtttagcattgtatctttatcctacctaaaagcttctaacagggtcctatgggtacagtggtttcaggcattttaa

SEQ ID NO: 69154 - DNA, 337 bp, Prunus persica
  Intron number 1 from transcript ppa005941m (locus ppa00594 1m.g) derived from phytozome v7.0 (chr-ID scaffold_5; pos 11967225 to 11967561 reverse strand)
attggttcggtgcatacttatactggcttgaactggttagaagctatttgcttttgattatttttaattgttaattttatttaggccaatctttgaatttgtgaatgatcttaaatggaaaagaatttagcccgttttatttgattttctgaagccaatttcagaaattgtatgttaattgggtgaaatgatttgcctacacagaacattttttgttttgtctagcagcatatatagtggttatgattggttttgatattgtattacattatgaaggtattttattgtttgttacttttcaggtgggctgccatagcaataacaactcttttgattc

SEQ ID NO: 69155 - DNA, 577 bp, Prunus persica
  Intron number 1 from transcript ppa018345m (locus ppa01834 5m.g) derived from phytozome v7.0 (chr-ID scaffold_7; pos 10996318 to 10996894)
gtggcccttcttcttcagtcgcggttcactcagctgtaagctttttttgggtctatttcttttcgtactgatgggtttggtttagatttttggggtgcatgctcaatttatttggtgggttctattttattttggttgcttttgagtatggggaaatgggtttgtgttatctaatgagattaagcgttttgcttctgtataatttataattggggagaaatttggttggcctcttcattccgcatgaactgttacctccatatgctccattgcataattcaaagtttaaactttgtggatattcctgtgaatttattgggtagttagaactttcttattcttttcccccttttgatatttgagttgtcatgtctagttattgaaatagtaattgatagacgtagctagagattttgacaggacaatggtattgtatcaagtcatctatatgctttactacgacagtgcatgattataacccagattgagcatttcatttgtactttttaacattttcttttcatttattatagcctactgtgctttatgaattgaatttcgattcctatgaagggca

SEQ ID NO: 69156 - DNA, 337 bp, Prunus persica
  Intron number 1 from transcript ppa021189m (locus ppa02118 9m.g) derived from phytozome v7.0 (chr-ID scaffold_5; pos 1277737 to 1278073)
taaaggtcaagcgatctttcaaagaaataggcaaggtgggtgtttccctttgcttcaaaattttctactaaacttgaactacattgttctattactaataacctacatttatgttttctattctctccattctacacccctataggaataatccaagaatatgcagattttggagagaagaatcataagtgcatttattgtggtgcacttttttggttacaagaatccattaaacaaagataaaaaaacaatgagcctctctttactctttgttgtcaacaaggaaaaattaaacttcaaagtccaaaaccaacaccctggttttttagaaaatttg

SEQ ID NO: 69157 - DNA, 857 bp, Prunus persica
  Intron number 1 from transcript ppa025305m (locus ppa02530 5m.g) derived from phytozome v7.0 (chr-ID scaffold_6; pos 21827982 to 21828838)
cagccattgagcttggcaaggaactggtatacaatggctttttcgaacttcaaatacacagttttctttgggttctgttatgtcacttgaggtttttcatacttgggttcttttaaaaaagatcaaaagttgaagttttatcccgtttggttttgttggagtttacttttgaccatctttttgcttttgtttcttgtttatgtcagatgggttttggtaggaattagttggaagttgctcaaacttgatcatcttgtttatgtttgtaacatatcatgttgttcttgttctagttttttggggcaagcacattatgattataacttgtttgtcacttggttcctgagattttttttcttcgttttttttaaattaggatttgatttcttcaaactggaactttcttcctaattaagtttgtctctagcagaaggcatgcaaatgttgctctctctctctctctctctctctgtcttttctttggtaaatgctcctctctctgtcattatcagaaaactcatcaacactaaataagcccatttagagatggaaaatgatgccacttttgcattacatgtgtttaagttttcaactttcagtctgtcataattccaaactgaccaactcaatcacttcaacgctttgttattttggcatttgcacctctcctcgcgaataaacagatatgaacttagtgtactaaacgtacaaatttgttgtatgagcattgaagaatccttccattctcaatttattagatgtactcaaaagtgcactattttttccaaatgggttcttgaaaagtacaatttgttttgctaatgtcttgaaggtttcgaggaacattgatctggtct

SEQ ID NO: 69158 - DNA, 514 bp, Prunus persica
  Intron number 2 from transcript ppa004359m (locus ppa00435 9m.g) derived from phytozome v7.0 (chr-ID scaffold_1; pos 34917352 to 34917865)
tgactgtggaacccttttctctaggtaaggtcatagacaaagattatacaataatgagattagtttgaagaaccaaaacaactttggaataacttttttttttatagcaaataattgttcgtagggggagagattagctggtattaggtaccaattatcgacgaaaacattcatggtcagtcataccatccatgtacagtaaattggtacccggaactaaacaatctttttcaacccttaataatgcaataacctttatgagagaatcgagttaacttttgatgagttgtaagaacctttaatgggttacacatctgctaatgtcttttgtcctcaaaaaacaaaaagaacgaaaatacaaaaagggacatgagagagagaggacagtgtatattactgtttatgttactttttgatgggtttgctctttttgtattcttgtggttgtttttgataatcgtgggtaactctgcgcacaggagggacagtttcatcacccacagagccttctgtg

SEQ ID NO: 69159 - DNA, 812 bp, Prunus persica
  Intron number 3 from transcript ppa003376m (locus ppa00337 6m.g) derived from phytozome v7.0 (chr-ID scaffold_6; pos 28036802 to 28037613 reverse strand)
tgcttcagctgaaaattcaagctcagagatcatcagtgagtcaatttttcctgataaaatcttcaattcttgtcttctttaaagttcattgttttaatggacgtgggtcttttctgctttttcttttctctacttgccttgcttgctttaaatccaagggaaaggaaagttgggaatgaaataattatgcaagggacagaaggcagagaaataaaatttgccaacatgaatgagtttggtcgttcagaaacttcttaatgaggtttaattaaaaggtgtattcaaagccacttaaagttagaatggcttcttcatcaacacattttcttcacttcaatatttgactttgactttacttgctagttgaatttctgctttgattatgaagataagccctcccgtgacgaggtgtaaatctgatgcctttagattctttcttttttggtgacccttgacattagttccaaaacactcatggcacctctgtgacttccagattcaattcacacctgcattgtagataagaacagtgcttttttttttttttttttttgagtaaataccacgaagtgtccctacacccgaagtgtgggattaatccccgctcggggttcggcttgcccttagccacaaagtgcttccaatgagttacgaaccaaagaacagtgctttcaatcattggcatgcatcgaatagtttaataatatatatatatttttttgaagcaatctatcaaagagattaatttctggttttgaattaaaggtatggttgcaggcacaaactgcagttttaaaccgataatcagaaca

SEQ ID NO: 69160 - DNA, 698 bp, Prunus persica
  Intron number 1 from transcript ppa003376m (locus ppa00337 6m.g) derived from phytozome v7.0 (chr-ID scaffold_6; pos 28038096 to 28038793 reverse strand)
ttgagaaactcaacaaattcacacccacaaacaaagtcacaaactctctctctctctctctctctctcaaagtactgtattgtattttcttggttttgctgagagacccatttcaattttgttcttttttctcaattactcaaaggtacacataattgaagataaaactctttccaaattttctgttttggtgttgcttttggccatgctcatctctctctaaactgtttgctgcttcttttgtggcgtgtgtctctctgcatgggctctctttatgcgttttggttttgttacctatctgttgcttccgtttctctttgacatccaagtgaactataccttttacttgatacaagaagatattctgcgattcatggtattctaatactttctctctctattatttctctattttttactttaaaatgtaaaattggtccctgtgcttctgcaatttctatcttcatttaatggtgtctttactaatcttatattaaccagcaaaattaaatttgatttttttttttttaaaaaaaaaggttttcgaatgtctatcttactgaatttgctgatttttcattattactgcagtgatgatagtaatattttattttccatcactagtgcaatattctggctcgagttctgcatttcttttctgataggaaatttcatttatttttgcagttggaaggaag

SEQ ID NO: 69161 - DNA, 700 bp, Prunus persica
  Intron number 1 from transcript ppa007144m (locus ppa00714 4m.g) derived from phytozome v7.0 (chr-ID scaffold_1; pos 16060599 to 16061298 reverse strand)
gctctcctgttctcgatctccttttccacggggtcagtacctcttctttctcttcctttccttcttcttttagtttttggtatgctctgtttggttgcctggaaaatgggagagaaaacaaaggaaaatgactatgatattctacttgcattttcataatgcataattagttagtgggtatataattattttctctggtgaaactttttgttataatcctacttggtaatgcctttggccttagttttggtataagatatctcgcatttgatagacaatagcaggcgtagtggacttactatagtattgttacatcacatcaaaactgacagctgtaattagttctaaggttgttcaggttctaagaatatttaactgtactcattgattgagtcagtacaaatattcatttctctcaaatacctaacagttttcagtcaccacaagttataaccattgctctagtcgacttcctaaactcttttccttgatatttacactgcccaatgtgtgttgtgggctgataagttatttttgatatggaaagcaattttcttttctctttttcttcagattttgttttgaatgtatttgtttttttctttctttctatgatttcattacattagcgtcatatgttagaagtaaatatcttgctttttcaggctcaagttcacagacacacgcataattttaggga

SEQ ID NO: 69162 - DNA, 633 bp, Prunus persica
  Intron number 1 from transcript ppa002605m (locus ppa00260 5m.g) derived from phytozome v7.0 (chr-ID scaffold_10; pos 255499 to 256131 reverse strand)
cagcaccggcatcgccctcaaccacgtccccgctggtaaaaataattaattttattgttttttgtttatttttattattctttgtatttttgtgtttgatcttcaccgggccctaaattggaaccctagtaaacagattgcccctactgttttttgtttttcttttgcttggcctgcgtatgttttttaattttgcgattagttaatatcaagggttgattttcttgtctttaattttttaattcaaataattatatgatgagtcaagttgagtcgattgaactctaatttgatggtatgatttttatttatttaaaagggttactttgatattgattttagttaatcttgacaactgttacttaaaagtagcaagtgaatcaatatgatgctatttttgggtaattcataaattgattcagcaacttcttgttttgttcaacatgttttccatcctagattgatgatatatcgccttattttcattcttctttttctttttcttctgttgtgataattgatgcttgtaattcattctctgttttctttgtcccctcaaactctgtatattcttttctttccctatcattatgatcttcattgacagctcatggtctgaaacaggtgtgaaag

SEQ ID NO: 69163 - DNA, 594 bp, Prunus persica
  Intron number 2 from transcript ppb019049m (locus ppb01904 9m.g) derived from phytozome v7.0 (chr-ID scaffold_2; pos 7617624 to 7618217 reverse strand)
gatccttccttggggtttgagtataaggtaagaagaaattaccttcatacatttaacgtcgttttttgtattatcaacgacggtcatgtaaaattaacgtcgttgaatggatatactacgtcggttatgaaaaatatcgtcgtctgtgattgaatttctttttatttataaaccctaatagtcattgtttatgcaatatgccaagggaaaccaggaagcttcatacccccaagaagccattgatgaagtccggaatgaatgggcagagtttgttttccaaattattaaacagggcaattattgaacacttgatatttatgtataatgtacaaattttctctataatatgtaatgtaaaaatttgttgaggttttcttaaattaaaaaaaaaacaaacatacaaattgcttaaccgacgtgtaatacttttccaacgacctaataaagtcaaaaaccgtcgtattttgttgtttcgtgttttaaacaaatacgacgtaaaaatataggtagacgacgttctttgaacaattgagtcgtttatggtttacaacatcttcaatttcttaagggttcagggtatcatcgacgacgttt

SEQ ID NO: 69164 - DNA, 888 bp, Prunus persica
  Intron number 2 from transcript ppa006364m (locus ppa00636 4m.g) derived from phytozome v7.0 (chr-ID scaffold_2; pos 15218288 to 15219175 reverse strand)
agaatcatccagacaaaggtggagatcctgagaaggtaggccaaaacactccctctttctttgttttgtgtcatatatgcatgtgacatattgccatgtggaggcactattggatgctgttgtgtggaaccaaaattgccctattaaggatcccatatttggcacaaatatgtggcctagaccaccttcatgggcttggtgtcaggtgacataaggcttgacatgttgatttgtttataaatggatgtggtatcttgaaatccgtcaaaattatacaacattttctcaaagcttcacctgattttctttgttgttttcaaagaaaagggtatccttcattacatatatttttttgttgttgttgagcaattgttatccacaatctttctaattatttattaatgtatggaatgaaaaaaatgttgtgattggttttttctttttttgttgcgatgaatccttgacaaattaaaattttattgtctttgatttgggaatacctttatacaactaaaacttttttgtcttgacctgtgggctaaatttatggaaagattgtctgtgtgttcaaattgatagttaccttttccatctcaagaactggtttgttggcaacttattatgtctttatgggagatgctctggtggccaatctattgactctcaatcttctattccattagttttgcagtctatgatttgaacatgtaactttcaagtcaaggggtttttgtgatcagctacttcagaaatattacttcttatgcttcataacagatattggcgtcagttttgatcttgtgctcttttttttagtgtaattatttctcctcagttttaccttattctgcttgatcgtgaatcagttcaaggaattagctcaagctt

SEQ ID NO: 69165 - DNA, 307 bp, Prunus persica
  Intron number 3 from transcript ppa011171m (locus ppa01117 1m.g) derived from phytozome v7.0 (chr-ID scaffold_3; pos 16008462 to 16008768)
ctatacccagccaggtaggccatttaggattcgttatttgcattctgcctgattttgaaatttgattatagtttttagagatgccaaagaaatcattagtgattgtaaaattctactctcataatggctttaaaattctactctcagaatggctttaaaattctactctcataatgcctttgttcccctttgctgatgtggcaagtcttgggagcatatccccactggcctgtttgttattgttgttgcttgctaatgtatgatgatctagtagcattcctctacttctctttttcttttcagggtt

SEQ ID NO: 69166 - DNA, 693 bp, Prunus persica
  Intron number 3 from transcript ppa001273m (locus ppa00127 3m.g) derived from phytozome v7.0 (chr-ID scaffold_7; pos 14596946 to 14597638 reverse strand)
atttggaaaggcaacgtcttcagcaaccaacaagggtaagtggagttcaagttaattatggatgtggattaccatctattgaattctgacctcctagtattaattgtaagcatgtgaagtgacatggatgcttgtctttcatcttccttgctttattttctaccatttatggtggtttgttaaaattgtgcacacaaaaatattgttagcagaatactatcctgtgatgagcctttttcactgggcgtgaaattactaaatgtaacagtatttagccatgtggaaattataagtgaattttagaatcatcttatatcaggttgtaaaatttctgtattggtctttgttttcagaatgtttatgaacaaaagatttgcttgtattcttatattttagagtgatcttatactttccagcagcattttgatcctatacctgatgatttttatctgagaatagattctgttttcatgtgaagactagccatttgtatgggtcattggagttactacatgcaaccttgatcttaccatcttattaattacgaagagatgagtggtctgaattaggttttcatgcttctggaattctttcttcttttcctttagaaactgaagttggaattgaagttatatttgatatattaattattattttttcttttctgctggttttgatatgaagacaaaagga

SEQ ID NO: 69167 - DNA, 776 bp, Prunus persica
  Intron number 2 from transcript ppa004000m (locus ppa00400 0m.g) derived from phytozome v7.0 (chr-ID scaffold_8; pos 16879201 to 16879976 reverse strand)
cataacagcttgccggagcctttccttatttcgtgcgattttcttccaaactatttcctttctctttttctatatgttttccaaacacttaaatgctaattaaatcttcatatttgttaaattagcacaatttaatagattttaaatatttggtaaatgtatcaatctttacaaggcatggaactaaaaaatattaattgcacggatttatttcataaatagtaatattgcatgatataaaacgaaacttaggtaaaataaatgaggtaatttagttttcattgtcaatctaatctgtagattttaattcagtgtgacaaaatatggtaatataatttagagaataataatcaaaaaattcagacagctaagaggtcatagacttttgtacatgttattaatatggccgcggtgacgtaataaatcttccacgtggttgacaataacaagtgacaacttgccatgcatatactatgatcgaattatatgctggcaaaattgacatatatagccacacgcatttattttggtttgatcgaaagaccaaccaaacacacatggaatttttttattgagttttaattatttcctaactcttgcctggcccatgataacattgtgacggtggttagtatgtgatcggtttgaaataccgtctaagagtatacgtgttgcatgcaatcacttactttaattttgatgtgaaactaaaacggaatcacttactttaattttgatgtgaaactaaaacggaatttggaaaaacaaaaacagga

SEQ ID NO: 69168 - DNA, 1028 bp, Prunus persica
  Intron number 3 from transcript ppa013639m (locus ppa01363 9m.g) derived from phytozome v7.0 (chr-ID scaffold_3; pos 21434585 to 21435612)
aaagctctttgcaggtattatactacttttttttttcttttctttttttctgttttgaggtcaccactattgcccagttactttctttacacctaaactccttgacccacatctgcttctaaaccacgaccaatgagaatgatatggcattgttatgattggagaggtttatggtgcaaaatgacttttgtccgataacaattacaattctgtgatcaattcataacgagtgtatggaaattcagtaaaaataaatttcgttgtttgataagtaatttcgagggggagttatattttatgatgtttgtggggaccctcgaaatgaatgaggaacctgaagatgcagaacaattggaagtctctttgcacaccctcactggatttatgatgccacaaaactatggcccatgttattaaaaatcaaataaatccagttacagtggtgatcaatttggccagcactcataactttaggtagactcttttgccatacacttgaggaagattgttttgagctcatggtggctaatgaaactaagctcacttgcaaaagacggttctgagggttgctggttactctacaagactactaattgaggctgatttccatgttcttcctctgggagattgcgttatggttttaggggctcgatggtttcgtaacctggaatcttgtcttcgggatttcagcagcttcgtgatggaatcctctatcaatggtcaacgctgcatagtatatgggaaaatgaaggaaccaaatggctaactaagctattggtgtttgattatatagttgtattaaaaaactaagtgttctagttatgatgtttgcgaatagaattggatgctaagatagcctcagccatgagttataaatttgaatagtgcgaagttgtttctttatgttgaacataaggtttatatgcactcaaccaagtgtttaccatcaaggttgctaattggacatctttcaacccatgtgtatcttttttatgttagggcgtttataaagaaaaaagggaggaaca

SEQ ID NO: 69169 - DNA, 657 bp, Prunus persica
  Intron number 3 from transcript ppa009515m (locus ppa00951 5m.g) derived from phytozome v7.0 (chr-ID scaffold_5; pos 13787938 to 13788594 reverse strand)
ctcttcgttgggaaggtaattacttcaactttacaaagttcagtttagatttcttattagacctcaaagcttaacgaacggttgtcaactaagcatgagagttcttgctaatatttgggttttgtactgatgtgacttttgacacccttgtgctttaggtgtaattcattatttcagataaacaagttcaatctattccaaattttgcttgaaaatggtgttcccgaataaaattgttgtcaacttactgtcatttctcatttataatggggtattcaaaataacattcaaaactttcaatttgaaaaaaacaaaacaaatgatggttaaattaaaagttccaccagcactcaaattgtgttactaactcttctttttgctaagactcacaacttattttctgtcattgtctacaaaacttcatttatctcttgaaattagttgtactttgaatctaatttgtatctaaagataaaaagaatatacgagagagtatatatacactgatagaaccgtcatatggtttagcattggaaagtccaatagaatggaatgtgtcacccaatatttgtttttttctaaccatttttttgtttctttaattttttgtgagtgattgcaggcagatagcagcttgccttggaaggatcgttattg

SEQ ID NO: 69170 - DNA, 937 bp, Prunus persica
  Intron number 1 from transcript ppa012799m (locus ppa01279 9m.g) derived from phytozome v7.0 (chr-ID scaffold_7; pos 12517503 to 12518439 reverse strand)
tcaaagccaagatccaggtactgtatttctctctaatttgagttttcgtctcatgtatttatttgattcatttaaaggaacaactttattttatggaagcgtttcttcgcgatataattagggtttcggtttctagttaagatttggttgttattgtattatgattttgttattcggtttggttaatatttgtatcagagtttgtgattgtgtgtgtatatatatgttggaacaattctatagcgagggttagggtttctaatttgagctgttggtgcactggattttattgagtacaaaatttattgattttctgagtttgtttagttttattgttcttggcaagtaaaaatacaactgaagattttgcaaaaaactaggcctttgctgtcatccaatgggttgagtagttcttgtttatttgtgttccgtctttcccatagaacttttcgttcctaattgtatgattaagcctttatgactttagttttgtgaaatgagattgtttctgtaaggttattgcataattctgttactatcattaccattctgcagtacaagaaatccatataagcagacttgcagagtgtcctctgtcttgaactgatactaatgaactgtagatttatctattaaagaacaacttttcatcacgaagagctaatcaattatgtatttttacggcatcatggaaaaataccttaatcacccagacagcttagtagaaatttgtaagcgaattggatttaaaatccggaaatcatatgatgtttcggtctttgatatgtacttttctttttgcaatttttctttccttccctttacatttatatgcatcaaagagatttattattcttttttgtcatggaattgcatggtaactcatagatatttggtttcaggataaggaaggcatccctcctgatcagcagagatt

SEQ ID NO: 69171 - DNA, 602 bp, Prunus persica
  Intron number 1 from transcript ppa006644m (locus ppa00664 4m.g) derived from phytozome v7.0 (chr-ID scaffold_1; pos 1742300 to 1742901)
aacatcaccaggtatccttttgtcaacgctgcttaactttctgtttgctttataagaaaatgaaaggaaaaaaaaaaataagaagaaaagttttctgtatagagctgcagttgtatgtcctaataaagagggaagcttttatgagatttttggggtcataatgtcctatgaatttgtctctgttttggtttttctgattaaacaattggaacgaaggttaggttgttgattgggcagttatcagtattgttgttaattagagttaaattttatttgatagttgttgaacttgctttctgtgtttggtttggtggctgagaaattggaggaaaaagaagtgctgtatgttcttattaatttagataatcaccgtccgcttgattgatcttttgataagaaaccaaagggaaaagaagaaagttaaatggaaaactgtagattgacttaaaaaagaaaaattctacttggattcattggttcatactttattaatacattattctttcttttatttcatcttattttatttatttatttatttattctccttttctctgcctgaaacagctcttcggggtctccattgggcgaagatactgaat

SEQ ID NO: 69172 - DNA, 534 bp, Prunus persica
  Intron number 1 from transcript ppb014875m (locus ppb01487 5m.g) derived from phytozome v7.0 (chr-ID scaffold_4; pos 11360063 to 11360596)
aacgtgagttcttgccatcgtaagtaaggcgagctcaagtattatatatgccattttaatttagttctccattgttaaaacatattaagtttttttatgggaataattagaatattatctgaagttggtggatatatatatacacacacatattcatgaagttaagtaggatattggagaaagctaaatcagttggagttagatctattattatttttcggctgtatcctacaaccttttgaaactaaagggaaaatgtcaaacctgaaagtataattggattaagggaaatcatctattaggaagggaaacattttaactttgttagtagaactgaggacgctaaagtccaaagttgtgatacccacatcttgcatgaagatattttacatattggtgccatgacaaaaattgaatccactgttgtagctatatacatgaggtaacaaacaaatttatatgattgctatttcattttcacaattcaaattcagaacattgatgactaactctatttcgtatttaggtacctat

SEQ ID NO: 69173 - DNA, 996 bp, Prunus persica
  Intron number 2 from transcript ppb014875m (locus ppb01487 5m.g) derived from phytozome v7.0 (chr-ID scaffold_4; pos 11360698 to 11361693)
ggaaccaatctcttgaatcaacgtcttcaagcaacgtggattgacccttgacccaatggtgaatacttccaaggttatttctatgaatataatcccactgatcaactgaattgaaagactcatgcattctcatttgagaaaccagcccttgaccactccctgttaaaccctttgtcataggatctgccaccatagattgagtgtgtcaatatgtacaatattaatgactgacttttttgacttcattcttttttaatcaaaagatatttcattagaaaacttttttgacttcatcttgaaccataagaaatttatatgtccatgagccttgtggctgaagttctcctgttattccttgaaaagaaaacaacagctttattatcacaatatatcctcaaagatctttctatggagtcaactatgcccaatgaaattttgaagcacaaccttcctagtcgcctcatagcagcctataaactctgcttgcatggtagaagtttctatagaggtttgctttgcgcttttccaggaaattgcacctcctgctaggagaaaaacatagccacttgtatacttcctataatctgagcagcccgaagatactaccataaaagctctggttctctttcaataccttataacctttttggctgccacccaatgtgcttctccaggatttgcttgaaacctattgagaacacagacttgtgcatacatcacatcccagaagtgaagcatatggtttgtcctttgttccctcccttcttgatcaatcttggggctttgatctttattcaacttatcaccttttcctataggcaactctccattttgagcagtgctccatattaaacctcttgagtatcctgtcaatgtaatttttctgagataatcccaggacccttcaagacatgtcccttattatttctaacacacaatgagccagttgacatagtctaacttattttgatcatcatcaggtgggatatatctgcc

SEQ ID NO: 69174 - DNA, 623 bp, Prunus persica
  Intron number 2 from transcript ppa021989m (locus ppa02198 9m.g) derived from phytozome v7.0 (chr-ID scaffold_1; pos 42152609 to 42153231)
aaactgaacgatatcaaaaggtacatatgtatatatgtatatttatataggtagatttaaacaaaaaccaaaaacatcaagtttaattaggtctcaattaccattgatgattgagtcacgttatacccattcacaatcttcaactttacacacagatatataagacaaagtacagcccatatactttcagtttgcttcagaccaagaaagaaaaaataactttcagtttgctaaacctagcttagctagcacacaatttccaaatattagttttgaattggatcccgatcgattctctttcattcggggcgaataatttggcacgaaaattgtcaacaaattaatgaataaaattccagggacaagattgaaaaattgatcatgagtttccgtgtttgttgtataatttttatagggcttaatcagtccatcttaatttgctgctgaaattcatatacagcaaagtacatgaacccgtagctcgcaagtagaaaggaaatgaattaagagaatatgcagaatggatggatgacacagataatttcaattttcctttcttgctttgagtggattgagggatggttaattcagcttgaatttacttttcagggagaaatatctct

SEQ ID NO: 69175 - DNA, 980 bp, Prunus persica
  Intron number 1 from transcript ppa006672m (locus ppa00667 2m.g) derived from phytozome v7.0 (chr-ID scaffold_1; pos 8405428 to 8406407)
aaacgatttccactgagatatctcgcttcaaatcggtatgttctttagctttgttacgagtttgtatgaagaattagtgaattacttgctgttttcttttattggcttttttgaattgggatttattctatggctttgttttcttggatgtctattctcaagattagctatgggtttttagaattgtatgaggaaaatcaacattggttcttgaatttctgtgggttcagttagagtctactgaatagctagtccgtagggtttccttatctctttttggatgctataatgtttgtcattagtctgcaaagtttatttatttatttatttttctgatgagctcagtaattttttcgtggtttttctttacagtaaatcccaagtaagcttttgatttgtaagatttgttttttgatcaattgatttgagaattatttactctgtaaaatttctactgttcgcatattttctagtctctatgagccctctggattagatattgtgcagatttattgattagggctttaaaattgattgtattatatgcttttctctatgctggaaattctgtttaatgggtttgtcagaagtttctggacctgattggttgattttggtttttctttctataagaatttggttttatgctttttggttgggaaaatctgactgatgcaatcaacagctgtttaaatatggaatgcaagatgaaagtaaatagagaaattactctgtagtaattctaaaagaaactttatgagtgaaatcatgtatgctccacaacgtcagttgtttagttttggggatttgtttttttatcctttttatgcttgttgaatttcatatttctttgtctgcatattacaaatgcatttcaattcaggattattggttttgagatgcatggagcatgtttagtcacctacttatttgatcttttatcaggttgtgagttgcacagagaccattaataaagccgt

SEQ ID NO: 69176 - DNA, 572 bp, Prunus persica
  Intron number 2 from transcript ppa001424m (locus ppa00142 4m.g) derived from phytozome v7.0 (chr-ID scaffold_3; pos 21103325 to 21103896 reverse strand)
gctgagaaaggcaaacctgttgcagcatattacgggtattacgataacactttttttcttttcatctaagtgatactacatcaaagctaagcctgctcccatgataaactttgtaaagcatctgtttggaaaggatgttcttcgtaagggtatgtattagctgcagtcaggttttaccatacaagagcattttacgaatgccttgtgagttcactagtaatagttcataattgtcgtcaatgtagccaacctaaattagtttgaattaaaagggtggttaagtagagtattatgtttgtacttgacatgctttggaggttgaagtgaggttttctttgttcttgatccatcactgacatgagaagaacagaaccttgtcaatttcggaactgtagagatctcttttctggcatttgcataatatctttgtgaacctgttcttctgaggattttatgggcagtaaatgtattttgaacttattcttcaatattcctctttttttgcccttataaggactgtgggtatcaacatacattggtataatgaatttctccttcaggtacttggttgg

SEQ ID NO: 69177 - DNA, 280 bp, Prunus persica
  Intron number 1 from transcript ppa001424m (locus ppa00142 4m.g) derived from phytozome v7.0 (chr-ID scaffold_3; pos 21103998 to 21104277 reverse strand)
agcaggcaccccaagactggtgactggtgagtggttggagtgtgctttgttcctcacctctttcatttttgattggttttcttcttaatttggtctcaaattgggttttgaattctggctttgcaattcttgcttacttgttccttctatttgatgggtttggttaaggtggacagcattggattttctttgatgcagaaaagggaaaaaaataatggtagaaatgttttttgtttaattttcaggtaccctgctattaacaaaccagctggagttgtgc

SEQ ID NO: 69178 - DNA, 458 bp, Prunus persica
  Intron number 1 from transcript ppb024640m (locus ppb02464 0m.g) derived from phytozome v7.0 (chr-ID scaffold_2; pos 20257838 to 20258295 reverse strand)
tgatttctataagtacgagcctagggaattagctggtaatccattaatctgtctcactttctcttcactgcccattttctaatttccaaggtatgatgtttgtttatacataatcttgttctgtttatacatgatgtttgttggaacttacctgatataatccattaatctatctcacttcttcatcaaaacccattttctcattttcaatgtttgatttttgcgtatgcataatctaagatcttgttcagttgttctgatagaatccctaaccctaaaccctaaacctgatataatccttttatatgtctcaattttcttcactacccattttctgatttccaatttaaaatttctatctatacataatcttgttcagtaatttagttattcattacttcaagacttgaagtgggttggtttcaatatcttgttttgtgttgcattttgcaggactc

SEQ ID NO: 69179 - DNA, 505 bp, Prunus persica
  Intron number 1 from transcript ppa010547m (locus ppa01054 7m.g) derived from phytozome v7.0 (chr-ID scaffold_4; pos 23677506 to 23678010 reverse strand)
gcgatcttatcaattcatccacccagcaacatcaggtgcttcttctctcctgtgttctttcttcttgttcttccatcggaccagatctagttcatttttttgatcgatttatttatttttctgcgttttttatttatcgtaaccctgtgattgtttaccgggaaactgaggtcaaagaaaattttgttgggggtgaattggactttctggaatttctctctttctgtgttttcctgcattttctacgctgccaaatgccacaattttgactgtgtcaaactctgggtttgatccttgttttacttttcaacgcgttttctcagcaaccaaacatcacaaaaaccataaaatcacattcgttttgaaatctttgaattagatatttgggtaattatagaaggttagtatatgattccatgctctcatgcgaactgtttgctttcattggagttttgggttttcattaaatttgttaaactggggatttaaaaattttcagggggaa

SEQ ID NO: 69180 - DNA, 1001 bp, Prunus persica
  Intron number 1 from transcript ppa021258m (locus ppa02125 8m.g) derived from phytozome v7.0 (chr-ID scaffold_3; pos 5169345 to 5170345 reverse strand)
ttccttgtcattatccttcaagttcctcttttcaggtaatttcagttttgtcttatttttctctcaatttcagtttttttccccctttttctatagaacattaaatgcctaagagagaaacacattcaaaggcctgggctttaatgacaaattcttcctacattttgttgcagaacatatttaaattggaataaattgagtccatatgttagaaaattttacttactacttagtttgcttgttacaatgaatatgggttctcttctcatttgccctagttttaatgggttggatattatatgcaacaacagatgtattaagtcatacacaaatccattatgaaactgctttattttcatttgtgaaatctgggttgtgggttctgctcattcagatatttctttgggttacatttgcacaaatgtcaaactacctactgcaaaatgatcataaagaaagcataactagcacaacctcttttttttttttttttttttttgaatttcctgaagtgggaaccatttcaaaaatagtaatcattgattttttctttttctatttaaattgtaatcattaattgatgtgggagttcatatgttagtgttttaattgctaaagtaaacaggttaaaatgggaacaataccgcctcacttggtatttgaaatcttgggatttattgcagacatatgcttagccggacgtgctccccactttgcatcggagtttgaattcccctccccgtagtttagattagtttaaagtagaatattgcttgtatttaaataaataaaaaatcttgggatttattttggtggctttagtacttatgccactaaatttttcctgcttatcgtcatttatactcttcttgatatgaaaatatgcttccatccaagaactaacaaaaggaaacaaacaattatgttaggcatccaatatatttgcaacactgaaacatattgttctccttgctccacagggtcccctgcacagctggaat

SEQ ID NO: 69181 - DNA, 398 bp, Prunus persica
  Intron number 1 from transcript ppa022491m (locus ppa02249 1m.g) derived from phytozome v7.0 (chr-ID scaffold_8; pos 19890327 to 19890724)
gaaaggtattattgccttttgtcgagaggctactcttctctctctctctcggtctcgctctctctgtttcagatctaggggtttatcgaacagatctggttacagcaatggagtttacagaataaaatctaaaatgaagaaatggaacacgatctgaactctgagtttaataatattcaaatgaaattgaagaaagaacaaacagctaaaacgaaatggggtttgataaatgcaatgaatagagcattataccgtaagcatttgatctattatgatttgatccacgcagcattgatttcaaaaccggcaagttacactgtgaatgctagaatcaaataatgttgaaaatggtgcattgcatttgggatataatctttggataatttgctgttgcagtg

SEQ ID NO: 69182 - DNA, 819 bp, Prunus persica
  Intron number 1 from transcript ppa006613m (locus ppa00661 3m.g) derived from phytozome v7.0 (chr-ID scaffold_1; pos 16219447 to 16220265)
ctagtcggtttacaggtttgctttcatatatggacttattttccttatctttgtagtaatcaatttttttattgcaagacaaagtattcaaattcaagtagtgaagtttattatatttgaaatctggaatttttaaacatgtatttgataattcagttttccaatattttctgcatgatttaacaaggttgagcatgttttctcaactaccaaggccgctaccaatgtcatcattgtcagcctacaagagctgttgttattcttctaccaaccctcaaactagcatcagcaccgccactaccatcatcattgccatagctgtggcttctgccaccttattactgttccttgcattgccatctatatttattgtcatcacctttaccctagtggctaacattatgctaacttcctttgaccgctgcccccactgttaccatttcaccaccctgccatgattatgatgatattactgttgcaaatgccgtatctgtttctactgttgttacttccattatctttaccattcctgccctcagaaactcatgtaacttttgttgaatttgatctgatttaacttatcaatttcatttgtttgttttggactatgaagatagtttaaatatcaaacatgttagaaagcatataaagattggaatcaagttgattgatcatattgtagaagcaataacactaacaactgtttcaaaaagtcctttagtcgatgctataaattttttgtgcagttcttcatcccaatttttttatcacctgacatggctatttttttactttctctaccagcctattctggtttat

SEQ ID NO: 69183 - DNA, 481 bp, Prunus persica
  Intron number 1 from transcript ppa001531m (locus ppa00153 1m.g) derived from phytozome v7.0 (chr-ID scaffold_7; pos 19142940 to 19143420)
ggcaagctttcagttgcagtacttggtatgcaattttgttaattggttgcttattttatttcttatttgtgtatgcaattcagaaattgattaatcaagaatcaaagatgattttttgttttatttttcttgtttacattggaacatctttcacgttcaacagctatacagctatttctaattacagttgttacttcatatttttcttttaaaatttttagaatagaacaatttaaggaaaaatgacaattatatatgctcgctgtgagtttaagggtcatatgataccctgagacatttttgtctgatagttcagcggtcatatgataacctgagacatttcttcttaaaagttcagggtttctgtattgttagttttgaaatacattcacatatgaaacaaaaatttcatccaaagagattctgtaacacctctgctatttaagtgtgcaggatcataggtctttaaagctgccgacaa

SEQ ID NO: 69184 - DNA, 552 bp, Prunus persica
  Intron number 2 from transcript ppa010297m (locus ppa01029 7m.g) derived from phytozome v7.0 (chr-ID scaffold_3; pos 7822283 to 7822834 reverse strand)
tcaggactggagggctctccacattcacgtttccggtgagcttatcactatatctctcaatttaaacctaattataatctagattagatatccaaacagctgttctaaaatcttttattcttgtaatttgacaactggtgattttcttcccatatatgacgttgcttggtcagttcccaaatgatatttatgtttgttgcactttggtccgtatgacaatgattgctgtccatgtgaaactaggaagattgatttttaattggtaccaaatttgaaaaataataaagtaaaaaagttcttttaacttttagttagcaaaagattaaatctaaaaaaagaaattgcgttttatgatttgtactacatgacggatttgttttgttaaatttatatgacgattgtcaattgaaagatagtttaaattaatctaatttatagaaaggggaaattcaaatttcggtacaaatttaagcagtgggctcactgacctaaccaactggcctaatccacatttgatgcaggaatacaatcttaaagtgttgttctcccgca

SEQ ID NO: 69185 - DNA, 810 bp, Prunus persica
  Intron number 1 from transcript ppa009259m (locus ppa00925 9m.g) derived from phytozome v7.0 (chr-ID scaffold_4; pos 5257687 to 5258496)
gtggctctgctcttttccaagcagcccaccatactgtatgtgtttataatttgatgtgttttttattatgtttattttccttgcattttaatctattacattctgattgtctgtttagagatattatgagcgtaagtgttgatgtgttctgcactttctcatcatttgtacagtgaaatatgtgatggacttcagcttaaaaaatctgttttgattctttcttcttattcttactttttttttagtattctagggcataacatagagaagtcagtttcttttacttaattttctcaacaacttgatggagggcaaattgatgttagaaacaaatttcttgaaattagtaaaaggagaaagagctatataagatgaaatggaagaaataaaggtgaattattaagtgagtgagtgtgagctattatattcactttctttgctaaaatggtgaattattaagggcaattgtagcacatgtgttgattttagggtatgtctcttctaggatttcgttgctctctatttcatcatatttgcatttgagtggaaaaaggaggcatctttcgtgagtttgggccaataaggttaagtatggtttgttagtttagtaagaaagaaacatgaaaatcaaaattgaagggaatatgaaaggctgacatagcagtataaaggtacataaaaaatttgacaataataataatggtatattactttcttgcttttataagttgtatgattgttatgtgtaggaactaattcaaggaatattcatatttgactttctaggtggatacatacattaaaagtggt

SEQ ID NO: 69186 - DNA, 534 bp, Prunus persica
  Intron number 1 from transcript ppa002408m (locus ppa00240 8m.g) derived from phytozome v7.0 (chr-ID scaffold_1; pos 9499728 to 9500261 reverse strand)
aaggtacccctttattagagttgcttgaattgtaattctctctctcttttgggttttgcttcatgggatttcttcaatcctttgggtgatttcaatttcctgtttcaaagtatgaccttgttttccttttgggttgatttagtgcaagtgtttaccacttgggttatcgtttcttgtgtttctcaagctgatatttgggggattgggaacctgctgtagaaaagggaacaaatgttaagatttgtctatagtttgacattttgtacactttcagttataattgtgtttagattcaaatcatgggttgtcttaaagtttgtgacttgttcttcatggtttctacagcattaatttttcatcttttttcttttgttatttttttaaagagttaatcttattgttccaaggataagcttgagttttgatttgcgcttttatagattcatagctctgtttatttatgttgttttatcatttctgtgatcaattttttgagagattgattcggtttgtttgggattttctagttacgaa

SEQ ID NO: 69187 - DNA, 174 bp, Prunus persica
  Intron number 1 from transcript ppa019615m (locus ppa01961 5m.g) derived from phytozome v7.0 (chr-ID scaffold_1; pos 36431712 to 36431885 reverse strand)
caaccatcctctctttcctcgaatccgaacttcaggtattatattattcttcattttttcaggtttagtgtcacttctcttcagtttgttcgaagatgtctaaaactcaaatctcttttccttcaggtatttatattaatgttttttatgttttgcagaagctggacggtgagg

SEQ ID NO: 69188 - DNA, 516 bp, Prunus persica
  Intron number 1 from transcript ppa002389m (locus ppa00238 9m.g) derived from phytozome v7.0 (chr-ID scaffold_7; pos 17146994 to 17147509)
tctcctcctttcttttcttggaaaactaggtagcttctctgtcctctctgggtcttttccaatatgattattactgttttgctgtattattttagaggtaaagtattggaggcaggaggttaatatcaaatttatgggtttctcttgtttatgaaatttgatgctagtttcttatggatgttgcatgattgcttcatagaaaatggcttctaatggtttagaaaagtttggggcagaatctgattaaatgattgttcttgaagacaatatttatgatttagttatcttacattgcttttgtgatttaaattttttaatttaaaagctcttttagggagacttactattttgatttgattgaaaactggtatccaggatcattgtcgaccttctggttttaatatttttacttgtaatccctaccaaacatatggcttacattttacatttcgctattctgttatggacaagcactaaatactttgttctgtatgattaggctggttgatttagcaa

SEQ ID NO: 69189 - DNA, 956 bp, Prunus persica
  Intron number 1 from transcript ppa011260m (locus ppa01126 0m.g) derived from phytozome v7.0 (chr-ID scaffold_4; pos 2651562 to 2652517 reverse strand)
aaggctcagatttgggacaccgccggccaagaaaggtttggatccacattttctgattcttttaaattttgggtttttttggatcttggaatcgcattttcatttctttttctgggttctcttggctgcctgagaaatttagctacatgggtattatacagatttgattatctaagtctggatcggaaaaggatcattttttatgcctctgtttggttaatgtgtattctttgaccctttgtttggttgcttagaatgctgaggaagaaaacatgaaattgcaaatgaaaattttgcgattttaattctcttattgaacttctgaaaaactgactggttagtggactttgtttataatgttaagctgaaattctatacagtttctggccttttaacttctttttttgctgacttagctctggtgcattttgtagtgttctataagtgattaggtgcctttttcactctgttatagtttttaggatgtggcacagtttgacgacctttccgcaactgcattttcagatagctatgttctttctctgacttcaaactaaatccgaagttgatatgtcattaatattgttattaacatacatgttcgaacattttgtcattctttcgatttcgaagtggcatgttgtttcattttatagatcatatgacttaatacaccactgcaactccgtgaaaagacaccttagcattcttctagtcctctatgtctattggtgctgtgtaaaccaatcctggcaataatggtaatgaatcagaatgcatcttgtttggaaatgctgcaacaataaatggaaaagaagggtctcctacaaatctagcaaattatcttccttcctctgtttccgcccctaagagggatggtttgtaaacatccatctcacttttccttttcttttgtttaaggtatcgtgcaatcacaagtgcgtactatcgaggtg

SEQ ID NO: 69190 - DNA, 628 bp, Prunus persica
  Intron number 3 from transcript ppa007133m (locus ppa00713 3m.g) derived from phytozome v7.0 (chr-ID scaffold_3; pos 4469124 to 4469751)
aagttgaggcagattgtggaactatagtttcaaaggttcttatttttgtttcaaatatatacaattgactcttgtatgatatttaattttgcttccatatagaatcattgtttttagtcaacactgatggttcataacttaaggcaggctacaatcaattaagtgacaatttcatggccttctgacttttttatacaagcacttgttggtaacttatgccccgtaaagacaatttttaaagaaaattggcttgaatctaaagtaaaacttctatggtatatgctttgaactgtggcatgcactgattacatattctgtagtattattatcttgtcccaaaagataatttatcttcagatattgacttgtattgttatttgttgctgtaagtttaacttaagttagtatgttctcagttttgatattatggtttgattagcttaacatatgctgtcttatacaagtccaatctcatgaaaaaaagggcaattagttttctctaataagctcaacactgatgcttcagcaattattttaggaatggtaatttaatctttgtaattatctaatggtatcttgtttgttcatattaggattggatatcagagtgttacacacagaagaagct

SEQ ID NO: 69191 - DNA, 599 bp, Prunus persica
  Intron number 2 from transcript ppa006277m (locus ppa00627 7m.g) derived from phytozome v7.0 (chr-ID scaffold_3; pos 17851067 to 17851665)
ttacctatacaataggttgtaaacccagaacaagagtgagagcataacttttttgcctttttatttatgaatctaagttataggtaacatacgctttaccacttatcttttttatgtgccggagatatatgtagcatatactgtccgacttatgtttttatgcacctaagttataggtaatttaatattctgcttgtttatttttccaccttacttataggtaagatgttttgtggtttgttcagcctatgatgtaaatatattatcccatggtatagatatattgtcctattgtccatcgtataggtataatatgtgggtttgtcttttattgattaaatggtatatattaggtaaatattaacaaggaaagaattcaaaattcaatttcaaggaaattatgcattaaatttagattttcaatatgtttttcttatttatctcaaatgataaaattgacacaacaaaaaaagtaaataaagtccaaggacctacatctaaaactaaaacgcgtggactaaatccaatactagctaatcattttggacctagatctaagaactatttttttgtttgctaagaaacagggcataataata

SEQ ID NO: 69192 - DNA, 1054 bp, Prunus persica
  Intron number 4 from transcript ppa006277m (locus ppa00627 7m.g) derived from phytozome v7.0 (chr-ID scaffold_3; pos 17852380 to 17853433)
tcgcctaagttgttggcagcgcttgatctataacagttagtattttgtattctattctctcttctctttgtagatcaaactaaatttttcatgttaaagttatatatagtgagatgtagcaactaaatatatatgtctgatttgatttattttgtattgcaagaataatcgatttgagactgaaaaaaaagtatatattaattatattaatacgaaatgaaccttacaagagctttctattttttctctatatatattcattagatttcattagatttattatgtatatatgaaggagtgcaagtctgaatattcattggctttcattgttcacaagacagtgtcttcacacacacacaaatattcagacaagtaggaaaatgtattgattggattgtgttgctttctctttagatatacacgtacaacaacctcaacctgttcctatcaactctgatgtttgcgtaaattttgaagaactagaagatgacaaaagaaatcgaagggatctcatttcctcaggtacgttaccattttcttcttggctttcaatattgaatcctttgttatattttatattaaaaaaagcacattgaaagtacactgtgttcaaaatgttcatcatacacgtaccactagtatatatagagtatagcagtcgaagtaaaaaagttctataaacatttttgtatgtttttctttcttttttgtttttgttttgccaacatctactgatttcgcaatgcagttatcggtccaaggagttgttaagaatcttctcaaactgttaggtacgctaactatatgcaacattattgatttttggtttaattctcacttttgtaatacgttgtagattaatattgttttcactgttaacctaggaatccatgacttgcatgaaatcagactgggccatgaccgaaatcttcaaattctacggctcgtgtgtgacgtggtaaaacgtacaaatctttaccggaagcaaactgacttcatggaaacggcaatcttccgagctgtagaacgaggaaaagtggagtttattagggag

SEQ ID NO: 69193 - DNA, 981 bp, Prunus persica
  Intron number 1 from transcript ppa001614m (locus ppa00161 4m.g) derived from phytozome v7.0 (chr-ID scaffold_5; pos 8067792 to 8068772)
tcgttatcggcctcatcgagaacagagctaaggaggtacggtcttccatctcacacttaaccgcttcttttctttgattgtttggttttcctagaaagtgcaggaaagaaagagaaaatggaagataacatattaagtacctcagtatctggcaccgagaaagatgttttggctttatcaatccggaaattgaatttaaaaaacgtaggagtcgaatttagcgcttggattttcaattcttggttatgttttagctgaactcggactggtcctgcttttacttctctctctctctctctctctctctctctctctctctctctctctctctctctctctctctctgtgtaggaacttgtagatttgtagtggtgataaatgttgaactacttaaaaactgttttacatcctggaactttttttatttgaataaatgcgttaagcaattttgtgaaggtgtgatacagtgaatatcatcaatgaagattagtcatgtgatcagaaaaagaaaaggaatattagtcatgtttaatgaaggcctaggtctgcgcctacaaggcttgagattgctggtaaaatgaggatattttgtataggaaaattgtatataattattttacataaagaaaagaaaaaaaaatcctatggctgaaccaaatatggtaaacctaccttgaacgtttccttatagactatagttttcagactcattataactggcatcgttcccacatctttttcttgattttaagtttataattggattgaagaaattggtttgtgacattgcacccaaaatcagaaaaaaaaaattgtttttgattatggttccttccagctgatgagctgaaggttatcttgtggagatgaactaattttttttattttttgttacatagagatcaactaatttagaatacctagctgacccaaagtatcctgacaggtgggagttgcagcctttgatttaaggttggcttc

SEQ ID NO: 69194 - DNA, 533 bp, Prunus persica
  Intron number 1 from transcript ppa022268m (locus ppa02226 8m.g) derived from phytozome v7.0 (chr-ID scaffold_2; pos 21872143 to 21872675 reverse strand)
aaagtaagattacccatcccagcttttttctttcttttagtgttgcatatttatggcttgccatattgatgagcacccaacattgcttctgagttttgcttcaatttatttgaattttggctctgtgtgcatttttctagagaatttcccctacattgttcttgattaattgcctggtttaatttgtatcgtgtaaatggttttttcctgaagaatatgttttataaattgtcattataaccaccgggtgttagttggattggctcaggcctttgaggtgctctcaggtcctgggttcaaactctcatgttacaagtgtgtgtgagtttctctctactccttacgaacattggcaaaatgaaaaaagatttgtcattataaattggtaaataatcacatataataattgcaccctgatgcaaagattttgattcaaacttcatcagattccaataagcgttgtatcctcaactgattgatgagcttgatgaaattcaggccattgcaagagaaggccgctactcttaggagtg

SEQ ID NO: 69195 - DNA, 572 bp, Prunus persica
  Intron number 1 from transcript ppa018450m (locus ppa01845 0m.g) derived from phytozome v7.0 (chr-ID scaffold_1; pos 17295758 to 17296329)
ggaaacatcaggaagaaaaggtaacatatctgaactttgaattctctgttttttaaaaaccattagacgtcgttattattaataaaaccgtcgtttgaaatacataccacgacgattttaaaaataaaccgtcgtttgtatttcaataccacgtcgtatttagtttacttgttttacacgccattaaacgtcgttatttttaaaactttgtggtttttagacgacggagttaatcattcccgacatcatagatgaagagaataaagaagaaaaacaagatgaaaagcagaaagaagatgacgaccaggtatgttcacataactttgccttttttatttgtttttcaaaattccagacgtcgatatttttctttagaccgtcgtttgtttacaacttagacggcggaattgttttctaagacataataaataattcaccacgacggttttttcaccgtcgtttaaattgttttcagacgacgttttattccttaaaccatcgtttttattgaattaccacgtcattttttttatttctttaaacaggttaataaagttgttgattattcaaat

SEQ ID NO: 69196 - DNA, 530 bp, Prunus persica
  Intron number 2 from transcript ppa010845m (locus ppa01084 5m.g) derived from phytozome v7.0 (chr-ID scaffold_8; pos 21570585 to 21571114)
ttaccaagatctgaggacagagccaactacaaaaggtgaaaaatgggtgaaattaagtttgttttagtctcaatttttgtagcagaaagtctcctgactatcaactcataatgctaattgaaataacagaaaaaataatatattcctgtatatagagctgttatcagaaaaactataaggtagtttttgtgaactacaatgatattttcttatatcttccattctgtttcttgttagcttttgtcaagcagttatacattcctcttctttagctcacaaatgtgtgaggtttctaagaatcgttcttatctccttgtcgctagatacaactgtttagatgtttttgtaacaataatatgaatatgatcatcaaatgaaattttctgaagccatagttatccttttccctccctactgtttttctttttctttctctgcatgtgccttggaagttttcattggtcagttcatcattttgagcagagatgtttactctagctctttgcagaaacagaaatccgtgttgaaac

SEQ ID NO: 69197 - DNA, 546 bp, Prunus persica
  Intron number 1 from transcript ppa003390m (locus ppa00339 0m.g) derived from phytozome v7.0 (chr-ID scaffold_8; pos 20525985 to 20526530)
ggttcccactcagtctctctccccctatctgaacggtcagtctttatgttcttgttatttccctccgtttagttgcccagaaaggataagaatcgcagagaaaggattgtgaaatttcgcgtctttctttcgttttaataccaggtttaaaaaagttagaaattttttattctgaattcttttcttttcgtttttagggtttttttttaatgttattttctcggcagccgaacagagcgattgtaatttcgatttcatctcatgcgtatttccccgttgtgatgaattttgtattgtcggctctcaatttcgaatcaaattctgattttttcttaagtttaaaccaaacggagaattaggtttacagagtgaaggaaaaaaaaaaaaagtcatcttggatcttgacatcattttcgttttcttgtgtcaaattattgctctttgttgtttctttggcaaaaaaattatgtttactaatatgtggagtttggaactctcaaatggatgaatttttttttggtatgtgcaggtttgtagctcttggat

SEQ ID NO: 69198 - DNA, 406 bp, Prunus persica
  Intron number 2 from transcript ppa003390m (locus ppa00339 0m.g) derived from phytozome v7.0 (chr-ID scaffold_8; pos 20526553 to 20526958)
gttgcttaaaggaagtttttccacaggtaccggtctttacctcaaaaggcattttttgattaaattataatgttatctttggtattgtctaattagatttccttgtttgcctcaatttcctttttgccttttatttcttgttttttagtttttattccggcagatgctaatgattactactagttggatttcatggaatatacacattgtcgtccctaagatcttaagcaaaagatttgtacagttttctttaatattccttaatgttagagctgtaagattagggaatctatgtgtcctaggatgcttgaattgtctttttggtgttgactctgctgactctccatgttatttcttctaatgctgcacaggtggattttcgccttctgagggctgttgctattga

SEQ ID NO: 69199 - DNA, 1031 bp, Prunus persica
  Intron number 1 from transcript ppa017798m (locus ppa01779 8m.g) derived from phytozome v7.0 (chr-ID scaffold_4; pos 26140706 to 26141736 reverse strand)
ctattgaattgtcaaaagtgatatcagctgaaaaggtatgtctacctgttgtgcactgtaatactttatgggtattcatgccatgcccccataacacaaagacatggcaacatgtcaatattttcttctgccatactcaattttatgtctacatgttcgcatttgaaagaatatttgagatgtattctcacacatgtacaaacatatcatatatcatcattaattctttgcacaatgttcatctacttttggcatatcattggtgtgacttttgtgttgtatggaagtggtattagaagtctggtatgtgcaattgggttcgaccactgatttcaaactgcagcaatactagtgttttgttcaagtcatagacaacataagtcgatgcaagggaaacacattgatgccaagaccaccatccactttatagtcatatacgttcaatatttagtgggacaatgaataaacccatactcagtcccaattcagttatttggtttactgagaaagttgcacattaaatgtgaacggggccaatggccaatggccacaaagagactggtttcagaccaattggtggtgatctgaaccttatgtgatactataattaaatccttactatcagcaatttgatatcagaataggttatgtgactcaattcactaatataattcagataataataataattgaactatgaaattctctggtttgacattatctctaaaggtctgttcctcttcttcaagttatagtttagattatgaagactgagtgctgctgtagaaaacaggcaaataataattaaaaagttcattttacaagtgggagtttgtggatctgtggtttctttgctgagcattaattttgaatagtagtgcaggattttgttcactccggagttattgattatttgaaatttgtggcaggcatattatagatctgttagcatatttgtccactaatttatctttaaattatcatcaggccattccttactaaactttgttcttttttatgttaggaaagaa

SEQ ID NO: 69200 - DNA, 998 bp, Prunus persica
  Intron number 2 from transcript ppa007988m (locus ppa00798 8m.g) derived from phytozome v7.0 (chr-ID scaffold_5; pos 11494027 to 11495024 reverse strand)
tggttaaaaaggattggggattcactcttcgagaggtcatatttccttgttttgttactttattcaatgagtttgaatgtctggttgttcttgttgtagtatgtacaagaagtggatagtaaatagtttgtagaacatagagatttttatcaaagttactattgagatttttagggggttggattgaagtttgagtttctgacatgttgattaactgccttgtatcacatgtacatatatgtgtggtagttcaaagtagaagtgttaaattgattataaaccttaccattgaaatagtttaagaccatgaaacatcacttgatctgacatctgaatgataagtagcattttttattcaaggattttcttaagagtaggctgaagatttatggtgttcaagactatggcaatattcactgcattgcctagatgaagttctttaactttcatagttgcagttgacttatagtatggtgaatgataaagttcatccagtatgaacatatgattatttgatggaaaatttaggcggtaaccaccttgagtagctgttttcaataccacaagaagttatgttgtttttccggtatgtgaattttggtaagtgaatcgcgcccatctgcctatggtggtatgcttttaataatcagtagtatacatctgatgtttggttgattgaatgggatactaggttgtatgattaggacaaatcatgatcttgcatttgctttacatttaagcttcaattgtcaggatgttgaagggagagaaaatggtctagttttacctccatcagaaactaggatgttggttccattttcgtttttgctctgctgtttaagtgaatttaatgatatacacacacgataatggaatcttattaatacgggaggaaaatcctgtaaccacttttattactttgatctaaaaaaacataccacaggctgcatcgaggttctcattttttctttcctggggggttaaatttcaggctgcag

SEQ ID NO: 69201 - DNA, 966 bp, Prunus persica
  Intron number 1 from transcript ppa026149m (locus ppa02614 9m.g) derived from phytozome v7.0 (chr-ID scaffold_1; pos 782034 to 782999 reverse strand)
gtgacattataagtgagtttaatttttttttttctttttccagtttcttcttcgatttcctctttagtatgattttagctaaaaccttacttgaatatgtcttacaaggtttatatctaggattaattctttgttggcgttttgatgtgaagctgtgaatttggtcatattcaagtaagaatcacacatatagaacaaattcgtagtctctcaacatataagcattcattttaactgtatatatttttttgtttctttggaattttcaaatttaattaattgtgtggtatatcactcatatttctaattgaataagaggatttaataacacgaaccgaaaattataaggatctagatcctcttcttttcttagctatggttactcatttgaatcccaatagttcattagaaatccaaggatgtaattcatttttgagttgtgttactaaaagagaggatttctagaacaaggagatgattgacatccaaaattagtaaatgcaaaccctttgtttggttctccatgatatgcccctgtaaaggacgcaattttttttttttttctataacctaagcgtgccttagattggataagtcactcgattatgcaaggtatgttgaagaaaaaaatgaaggccaacttccaaatttgttcaagttgaaggtagaagatggattagtcacaaaggaaactggagagcaatatacccctttgtggacactcccccagtcctaacaatcattctccaaaaattcaacagcagcaaaccccactatattgcatttcacttcagttgttattatgaatgttcctattagaatcggtgaatggttatatgaaacatgtaggatatgagaatgagaagtaaagaagaatgttcagttgtttttcattttcattttatttctatctcgcttccaacatggctcaccattttgcagaaattccaactcacccacagggct

SEQ ID NO: 69202 - DNA, 799 bp, Prunus persica
  Intron number 1 from transcript ppa012893m (locus ppa01289 3m.g) derived from phytozome v7.0 (chr-ID scaffold_5; pos 2946163 to 2946961 reverse strand)
gcagagctgctcatcggcggacccagagtgccattgtaagaactcttctcttctgctctctcttttattttcaataattggcttgttcttcaaaatgtttgattttgcacttttttagatgtgttcttttatttgcaatcctctgattgttgttccttttgctgggtctgtaatcgttttgaggtagttattagatattttagactgtcttattttgactggggttgacttttttttttttttaattgcttctataatttgtgaaatggggtttgatttagtcttctgttgtggaacttttctcaggatctgaccatttcttttggttttggatatgtttattttgaaataccatttcttcaaattcgactcttttggttttgggttatgaaccctttgatccttgaaatatattgattagtttttgcaaagctactgtgtcagctgtttgttgaatttcattattctgttatttattgaataaatcatatgactgatgatttctgtttgactgattggggataaatctttgttaccatcaaggcctgtgattaatttaagtggtttgctttcttcttattggtattgaccctctttttctttcttttttttccttttttctttggttgtgcaaagtcaatttacaatgttctgtgagttacattgaattccttaacagcaacagattttctgacagatttaaattcggccgcttgctgattgtgctacacattgcaatggaatttatggctttgatacgtgcattcagaatttcgtgtaatttgctatctgttgcagg

SEQ ID NO: 69203 - DNA, 664 bp, Prunus persica
  Intron number 1 from transcript ppa008739m (locus ppa00873 9m.g) derived from phytozome v7.0 (chr-ID scaffold_1; pos 25283214 to 25283877)
attcgtgacattctttgggtaaaacccactttaaagtaaggaatctctctcttcttcttttcttaataaattcatgagaaaccataacagtccttagctccggtatctgggttttgcctgcatttgtatttggaatagttcagctataaaattatactccattcattctctgtttgtacatattcaaatccaaaaagttttgggttcttcacctctaatttttaagtactttgcttgtagattttgtatttgaagatatttttctttatatttgatttgtactttcaaatacttatcattacgtatttgataaaatgtttatgttttgttacagcggactaacaatgaagcttaccttaatactgggtctaagtttccaactgagttcaatttatttatttataatccttttaacatttggaactgcttttggctaacatttcacatttcaactgttgtcacatttgaattgttttgattttcatgctttctgattccactttctttgaaaaaatttcggcatagacttgttcatgatcatttaatttaaacacatagcctttgaatccaaattgactaacataatttgtggagcaactacaagtgaagtgagtaacttatgagtttcttaacaggatcttcgaaccatacttggcagcccgtc

SEQ ID NO: 69204 - DNA, 722 bp, Prunus persica
  Intron number 1 from transcript ppa000684m (locus ppa00068 4m.g) derived from phytozome v7.0 (chr-ID scaffold_4; pos 1167777 to 1168498)
gcatcgccgacgccatctgcgcccggattctcgaggtctgtttcggtacccgcgggttgcttctacctctttttgattattgggcggagctttgctgggggttctctgtttctctgcaccccggatttaactcgtgtaattgtttgagttctaggaattgtaaaaaatagtaatctttactctaaagttctaattgctacgacgcagcccagcttcatctttttctcttagaaatttaaattttagatgctcgatgtcactcaattgggaataacaacttcaaaagttgtagtcttttctctctctcgctccttttttgtttttgttttttccgtttatatatgaatattatgaacagaatgacccgcaaaaaaaaagtttgttacgcctgggttacaaagaagcttggttttgatgaacaaacaagaagtgaaatttcccagtgtttgtagctatgattgaatcaacaaccttaatactacacacgcatggtggtaaaaactaggaccagaactaattttgtgataatatttttaagattccatcatagtttctctctttaattgaagattcaactccagttgaattggaatatgtgtcaggcctgcagcaaaagaagtcgcagtgctgtttatatgttagccagtttgaagtttgcgttaattgtttaatacttgtctattgcaggtcccagttgagcacaaactgccttcactatatct

SEQ ID NO: 69205 - DNA, 673 bp, Prunus persica
  Intron number 1 from transcript ppa008641m (locus ppa00864 1m.g) derived from phytozome v7.0 (chr-ID scaffold_7; pos 21082907 to 21083579)
tctcctatctctgctactattcctcgccagatttggtacattttcgtgctcattttatctgggttgtagtcggattgatgatttatcgctcattttcatgttcagtgtttctttttcttttcattagcgtgctattgaggtcattcttgtggcgtgcttaattgggtttcttgaatattggatttggattggtgattttgaatattttaagaaatgggttttgtttgtggtgatattttgtttatgcatttcaaaattttgatattggattatggtttattataaagcacagggctcagtttgtgattgtctgcgtgcttatcgaaaactaatttggatttgtttgttcaggtcttgcttcttggctgattagctatgtatttggtttgcatctgcataccagtagtttaggatgtttgtttggagtaatggcatcatattcagttttgttgcatgtgataaacttacatgttctaattcacctaccatctttgcaattgagtttcctaaggatgaaaggtttttcatttttttccttgcttatttagttagggttcaatttgttttagatggtctgcccatactatcaagttatttatcattaagggtttagggttcagggtcttcttctgtattgagaactaggactcttttctttcacaggtttatctag

SEQ ID NO: 69206 - DNA, 482 bp, Prunus persica
  Intron number 1 from transcript ppa003627m (locus ppa00362 7m.g) derived from phytozome v7.0 (chr-ID scaffold_7; pos 18461724 to 18462205)
ctcaactttgattctctcgccgtcgttttcaacaggtaggttaattcaactctcctctcctccaattattattatttttcttctaataattccattttttagctgcaatttgtaattataataatcaatttcttactgttaaaaaagttggtgagttcatttttctccttttttgctatttgtgagactaagtcaacaccttttttcggggagcgcatttgaggtgtagggtgaactttatttgaataaatatttaaataagaatctgtttctagtataagtgaattttattctgttcatctaccgtctctttatgatgttgatgccttgatgtttgttttgttttaatttatttttcctacatgaataattttacgcaattttcatacttaaccaaaagaaaaaaaagtttgtttgttgactgcatctgcatgccctgttgttcagatctagtagattcgcaaggcttcaaaggatacaat

SEQ ID NO: 69207 - DNA, 625 bp, Prunus persica
  Intron number 1 from transcript ppa008776m (locus ppa00877 6m.g) derived from phytozome v7.0 (chr-ID scaffold_1; pos 40879775 to 40880399)
aatctcatctagctccccgagactccgttcccccagtaagtacgcttttcttcattctctctagtttcttgttttcaatttttgtttatattatttgccttattcatctcttaattaggggaaattttccaaattgttatgtgctacataaaattaatggtgatggactcatgggtccaatgggtttgcaggatttgaaatcatagtatgatggcatttgatttcataggtatagtgtaaatgtgcaacaacttttctggatgttttgtttgaaatgaaagaagcatgagccgttaattctagttactttgcttccagtcaaacaatcaagcatttcctttggacttgtgtatgttaaggcagttctaagggcttgtttaaactccaatcctgtttgaaatgttctctctccttgttctaaattttctttttgaagtctaagaatttgcttcttccatatttatatctcagtaatttaaccaagtctctaattttcagttgtcaacagactcacactcttcaaacttaaatatgtatacttattttctcgttatttggttgttcctgtatgtagttatctgtatttagattgttaatcttatatatgtactttatgtctagacga

SEQ ID NO: 69208 - DNA, 808 bp, Prunus persica
  Intron number 1 from transcript ppa012248m (locus ppa01224 8m.g) derived from phytozome v7.0 (chr-ID scaffold_3; pos 19405936 to 19406743)
gagattggctctgtaagctcctcttttctcagatccactttgcatactaacttcttcattttcttctgtcattgttctctgttctctgttagtcattcatagctcaaagcttctatttttagctcaattttggttgatgttgcagctgagtaatttagatctggaaattgcttaatgggttttgcttatagttttcttatgcaaaattgtttccttgaaaaatagttactatgttcaaaattgttacagagagtttgaattttttcagattaccaaatagttgttctgaatcttgtttattgatgtttaaagcttatgttagaactcagttttgccaaatgaaatgatgcatgtaggaaagaataaaggaaaaaaaaataaaaattggttattcacgtcattgaatgcgagttagtgtgtttctccattaccctcaaatcccatagtatacaaggttttctttttaggttgatgttttagtattttccatgtatcatcctggctgattcagatctgcaacttttttctattgctttcctcttggcttttggtgtgaggaagaaggggtcaccttcttattttatgtttcttatacaacaatttactttcatattttagtgtatcttttggttagttcttaaaaggtagaagtacatactattgtatatgaaaacttcaaagatggaatcttggtatcttttcatgtcattggactgttgaattttaaataagcaccaaatattaatttgctactatatagctagttggtaattctgttttttttcttctcttcctccagtttttgttt

SEQ ID NO: 69209 - DNA, 789 bp, Prunus persica
  Intron number 3 from transcript ppa015149m (locus ppa01514 9m.g) derived from phytozome v7.0 (chr-ID scaffold_3; pos 3039483 to 3040271 reverse strand)
ctcacattctaacaatttaagcttttaggattagtgtaaaccaacaaacttatcatggtgttagagaaggagatcctaagtttgaatccctgtattttcatcccttaatgtaagttcaattccacattgggctctctattggtgggaagaggtccacatgtgagtgggactgtgggagtgattgaatatgaaataatcgttggttcatatcctaatagtttcaacttttgaaaacattggcgaaccaacaaaatttatcaattggtagactgcttagcatcaagaaactgcttttaactttttatttttgctagttgaagtgatagtttggttgttctcagttggtttgtttgaaaagattctcagtttttcttttaatttcaggtttgtatcaatgtatcatcacttaatgctcatttctccccgtccatatatgctgcaattctgggattaattgcttacctagttgctctgcaatcgagctctgaatctgtatccttggaaactactgattcatttaatgtcgcatcaaagggatcgaggagtcctgtttgcatcaaagggatcaaggagtcctgttttcggtttctctaccaatgtcaaactggagacagtcagctgtcgtgtagaacttgaaaatgagaaagaaaacagttcatccattatgcaatggaattttgggtgtgccttgtaaacaaaatgagagacaggcacttctaatgttcaagcaagatcttaaggatccttgaaataggcttttatcttgggttggtgagggagattgttgca

SEQ ID NO: 69210 - DNA, 491 bp, Prunus persica
  Intron number 1 from transcript ppa015149m (locus ppa01514 9m.g) derived from phytozome v7.0 (chr-ID scaffold_3; pos 3040436 to 3040926 reverse strand)
tactttgtggtttacgagtttgagctagtttatttgcacattgcattttctttttctttttaatcatcgtccacatctctggatggcgcatcctattaggaaagcacatagtacatgctaggctggatttctgaccatgactgcctgaactaaagttagacgaatctagttaatttgaagtagaatgactcactgatccaggcaagaagaagcttatacaagaaaagaaaagttcaaaggttaatctatataggacaatggtttgatttatggttacgtaatggcatatataacatgcaggctagtaaagtcctgttgtaatttatgtttgtattttgaagctgttgttttagttttgcttaagttttctcaacactttaaaattcagggatgatctggaaaattcaaaatacgctagatgcagtgtacaggtcctgcttatgtatcatactgtagccttctactcttcgtagtgctaccagtgttagttt

SEQ ID NO: 69211 - DNA, 473 bp, Prunus persica
  Intron number 2 from transcript ppa010070m (locus ppa01007 0m.g) derived from phytozome v7.0 (chr-ID scaffold_8; pos 16115146 to 16115618)
aacaagttcaacctcacagaggaccctgactccgtgtgagttcatcttcttctttcatcctcaagcttgaatctttttatgggctactttcaatttttggaaaatggttcctttttttggttttgtttgtgaactgcccccattaccaaacacgaccttggttcaaagttcaaagttcttgctttgcaaactatattctacgtcttaactgtggctggacatggccttgttgtgcctaatacacatgttttgttgtggcatgctctttgtgattgttacatttttttgtttccttccataggctatcatcttgtgtgcaaatatggtttatttctttgaaatgtggagatcatcgtttagaattttgagcattatatatcggttcaaagattttaatcagttggtttcaatttttgatatgtcaatgtatgaatgatgcaggttcccaaaaggggtcccttgggtccggtatc

SEQ ID NO: 69212 - DNA, 508 bp, Prunus persica
  Intron number 3 from transcript ppa010070m (locus ppa01007 0m.g) derived from phytozome v7.0 (chr-ID scaffold_8; pos 16115644 to 16116151)
taatttagtttggcctggaaaagattcatctttaggtgagtttttgactctcacgggttttggtttctcttgtcaggagagatagaaataatttgttattatacttcccttcattgtctatgaccttgtcatatctcaccaggacattattgaaagggtttacatggttatcagacttaaatgtgatataggatctttaagattctagaactaggctgcatgaacttaaggatatttgtggctggtttagtgtaaaaggtttgaacttttctgtttcaacgggtatataaaagaataggctttcagtatatgctagggatggaaaactgcttgtgtttgaattgccgctcctccttcaaaagcctcatatgttatggttgtttcttctttttggtcactattgtttaattagagcacaaaaaaagtggtttttgtttcatggtcgtgtacctcatcctcaaattttctttcaggagttgattgtgtaggcacagtttctgcgtctctt

SEQ ID NO: 69213 - DNA, 881 bp, Prunus persica
  Intron number 2 from transcript ppa007553m (locus ppa00755 3m.g) derived from phytozome v7.0 (chr-ID scaffold_4; pos 19597218 to 19598098)
tagcagtgttttgcttttggcccctgttaaatttggttggtttttaaccttgggcaccatgctatttcccattgtggcaaggccctcttgatcggtttcattgccgtctattgaatgcaacacttcaattcaaaaaaacaagaatttcttattttaaaacttctacttttttggaattttaaaaatgataactgtttagatagaaagtcaggatgacttccaaatttcatatgttatttgcacgtgaaatttctaaatttctatgttttttttaatccaaacacggaaaattggtatatatcaatttaaaaattctgacttttgtccacatcccaacccaaatttatttccccccatcaaaacactacaaaagttagtttttttttttagtacaaaagttagtttagttagcactttagactttttatagttcaaaagtaaaaaaataatgatatgttcatttaagctctgattaaatactatggtttcacattaatataaaaagaaaatttagaagaagaaaatgtgacttttatttttatttttttatttttgatatgtgatattataaactatctataaaaggataatttgaactcaaatgtcacgaggcagatacactaccatcatacctcttctatttgcggaaggccatcatcaaggtgctaggttttaatgtcggttattatttttattttttcagacaaataattatttaagaaataaccatcatacctcttctaataaaattatttatataaaaaaaaaagagaccgccatcgagacaaagcccaaggtaaacccttaaatcccaacccaaacctttgtgcctttcctcatctacagagagagagagagagagagagagaacaagcacattc

SEQ ID NO: 69214 - DNA, 809 bp, Prunus persica
  Intron number 1 from transcript ppa008497m (locus ppa00849 7m.g) derived from phytozome v7.0 (chr-ID scaffold_1; pos 18053435 to 18054243 reverse strand)
ctctaaggtttctaccttcactccctctctgtctctgcttttcctttctgactttcccctttctcaatctttattttatttttgttcatttctctggtaaattgtggtctcgtttgttcctatttatatatatattaatgctcatattttttgcaaatgaaaatggaccattttctagtatgcttctatatcatatatcatatatatatgtatgtatgtatttctgtatctgtttatctctgtatttcttctttttcctcttattgttagggcttacagtgacctttctgttttccgttcctcttttctttctgaagtccaaatttttcaacacagaaatgtgattgtgggcagtagggacaaaaccagatatgacctggtaggcaaatgcgtttttcagttttgtactttttgctaaatctattttgggatattttgtttattttgaagtctagcggcagagtattgcaaatggttttgtaaaagttagagcccgcttttagtaaactgataagaatgtctcgttttttttaagtaaggaagatgtgaatgccaaatttggtactcttgtacaaattcatgcgtcatctaggaaaatgggttttgctcttttgtaattttggcctcaaaatctatatatatgtagagggaagccttcaaagttttctgtttgttgtttttttttttcttttactcttttgagaagggcaggaagtggctttttcttgctgatctgtagataataatctttctgctattttgaatttgaaaccctttttcatatgttaggggaggagtggactctgtgt

SEQ ID NO: 69215 - DNA, 606 bp, Prunus persica
  Intron number 1 from transcript ppa017025m (locus ppa01702 5m.g) derived from phytozome v7.0 (chr-ID scaffold_2; pos 393676 to 394281 reverse strand)
ctgtctgagtctcaaggtattcttattttgtaatgattctgtttttactttttactattacttgttgaacccacttatcagaattacacatttgaatttggttttgtatagctgatgggtattcttctatttctatttagatttctctttttaacagagtctgcaatatttgaagtgtattccacattgctctgcttagatgacattaactatagtgtttcatacaacgtacctttcaatgtttaaaggtatatggtcattgatcagtgatcactacaattagcaactttcattgttctctagtttgaattttcttcaaatcttattgctcattgtacgtgacgcaaccaagaggactaaattggtgctgttgtagaaatcttatctgttcctctgaaaaaacccccttttctactaatctttatgcatgctttggtccacatgcttttccttctacttttaatagtagtgtatgttgttttaggacagttatcaaattacttttcatagggggcgagagggggcgtggaactactactacgattctataattaaccttttaatgatacaggagggagcaagactagaatcagaaaggttcagagt

SEQ ID NO: 69216 - DNA, 896 bp, Prunus persica
  Intron number 1 from transcript ppa017214m (locus ppa01721 4m.g) derived from phytozome v7.0 (chr-ID scaffold_4; pos 1739247 to 1740142)
acttcaagttggaaaggttaacaatattttcataggagataaaatatttagttagggattaaattcttaaaaaagaataccaaaatgagttaattcaaaatcattttaaatattatttcctaccgagtcctaagaggatgtgcttttcataattagaaatctaaacgaataaatgtttacattcttcttcaatgacaaaaatagcattttggcataaataaaaatgtcctgggttgattccaaaatgagtaagactgcactagcttgccatccatgcttaagcacctagattagttttgagaaaaagccattaaagcttatgtataaaatccacccactcaaaacaaagggcaaacaagacttttcatcactaacagtgggacccaccaacaacagccaaaaacccaatacgtttaacgtatggtcataagctggaggtcccgccacgtcagcaatttcgcctgacctttttttgccgttctttggttcatttcatgtcattgctcctgagaaagccagaaaaggcaaaaccagcggaagctgatttttcctcattcatttacttacatactaaaaaacaatggagacacgctctcaagccttagagccaccaaaaccctcttcccctataataactcagcctccaccagagatttccacacactggctttctcttcctccttcctcaaagaaaaattaattccagtttttctttccttttcactcttctagctgctagcttctcgctcaccaaacaataatgttcccagtaaacaagaccagaagagacacacggaaagtcgtctacgggccgccgctgaaacaactaaggacgttcctccgtcctgtcgttggatccagctccagcagcggcccgtcgcacagccgttctgtcc

SEQ ID NO: 69217 - DNA, 445 bp, Prunus persica
  Intron number 1 from transcript ppb008343m (locus ppb00834 3m.g) derived from phytozome v7.0 (chr-ID scaffold_6; pos 28723801 to 28724245)
actcagtaagtttcaaattcagttactttacactggtttttgaatttctctctcaatttcaattacttatcttgaaaaaaaaaaatcaaatatttgatcttgattgtctgtcaattgggttttccaatttccttttagtttctgggtgtgaccgtggttctactgttaaacttattcttgtaatcttctttttgtctttgaattattgaatatggctttttcttttcacattgtgtatttacgttgttcgtttcaactttcatatgctttatatcaatctgcttaaatatgacatgatatgatagtgacttgttttttcttggttatgaataccactgacactactgaatatagaaaaaagaacaatttgcattgcactaggatcctcatgattgattccatgaatgttatattgcagtggattctgaacttgatataaatatta

SEQ ID NO: 69218 - DNA, 1024 bp, Prunus persica
  Intron number 1 from transcript ppa009686m (locus ppa00968 6m.g) derived from phytozome v7.0 (chr-ID scaffold_2; pos 22867023 to 22868046 reverse strand)
gcaggacgctggcaaggtaatataattattctttaattattgatcaattattaaatgtgaattttcgtgtttatgtttaattttctcaagcacttgtttaagttttaattttttacgttcctcaaattaaattttcattaatctgatggttgtttagtattattaagatcgagcgcagtgcaatgtgcttgcttagcttagcttaatacgcatattgcacgtaaatcaaatagtatgaaaaataaagttaagagtagaatgaaaatggtagtaggcctttttgtataagataataccaatatcatgaatgaataacataagaaaaatacttgtagcttgagagtatttaaacatatatagcttagatttgtatccaaattcttttttcatcgatacaatatatgtgtataacaaaaaataataacgaagtataaatagaaaatctttctcgattgaaaaaaccttaaaaaaaaaaaaatcattatagtatacaatctttgagaatggagtggatagagataaagatgtgtgtagaagtagaagtaatatttgcctcactgtccatccccattgaagttgtatatttatttatttaaatttgaaggacacataggccgtatcttgtattttgtatgtatgtaaggaggtacgtgaatataagcagccacagttttttggtgatcgtgtcttcttattatccatgcgaaaaaacatggtggccctaactcctaaggtaaggtccttattgacgatgaatttggtgatagcaatgatgaaaatgatggccaaagagatcacgccaaaattcatttttgttctctacctcgctttaatttatttacttacttgcccattagacccaaagattacacaaattaatatatctacaaagaagagagagattcgaatttgaatgcaatggaataggctcactgtctcgactaactagttaaaaatgttataatttgattattgtcgtttaaaaacaggttgaactgattgaaggatcatcataccttgggct

SEQ ID NO: 69219 - DNA, 830 bp, Prunus persica
  Intron number 1 from transcript ppa010113m (locus ppa01011 3m.g) derived from phytozome v7.0 (chr-ID scaffold_5; pos 16437610 to 16438439 reverse strand)
ttgaacgcagagtgacagagagagaagcggacaaggtacggtttgacgaggcttctcactcatcgcttatgattgttattattgtgcttgtgatacttttatgttctttgtttaatttgttgttgctattcgctgcggatttttctttctttgttttgaagtgattttacattgtgggtatttggtctatgatccataaagacatgtatatatgtgtgcgtgtgattattgtttatagggctctgttaaagatgagattttgattgctggcttttgtggtggatatttcggcaacgttctcttttgatttgtcgaacaaggggtgaaaaaacaaagttgttatttgagattttccgtttggttttgtagaaactcttcaaaatggtttttttccctgcatctttctgagttctgtgaaaaatgaagttttgatttctgagttttgaaccttttcggaacaaggaagtgcaatatatgcttatcaaatgaatattgtttaactatatgactgagtcacattcttattggtttgttttgtttcagtagtagtagatgacagagcatgcgcatgatgtttataatcattgttttgggtagcttataaatggctctcttgttatttattagtaaagtattagcatcctgtgtgtacttttaacacaattttagattaagggttcttatacacagacttaattcgacatttctgttgacatgactataacatgtgtagtcttcaaccaacagaattgattgctgtatccactcttattatgataaatatctgttcattgaacttgtttgcttgtgctttgttttaggttattgca

SEQ ID NO: 69220 - DNA, 699 bp, Prunus persica
  Intron number 1 from transcript ppa004814m (locus ppa00481 4m.g) derived from phytozome v7.0 (chr-ID scaffold_1; pos 37717007 to 37717705)
gtgtagatattaggtaaatagcccatctttctctcgtccttatctatgctatgtgcatatttacagatttaagtttattttccaaacatgtgaatgattaaaacaagtggttaatgaatctatgtattgatatttgttttggagagagagagagagagagagagagagagagagagagagagagagagagagggtgttattttgaagctattcacttcttggtgtactctggccaatatatgcccaaactgcttctaggaaattcaaattcttcagctgctatttaattcactcttcttgatcaaaagatgatctggaaaagcgacaaccttgttcatttcgtctagctagagtcctctttgatttgtccttggcattgagtgtgaatttttttctaccgtttctgataatgtggttcagttcatttgcatctccatgtgaaagtagatctgtatcacatgttagcaaacaagcttgtattgaaacttcagcaaagttcccaacttctttcagaagtctttcagaagagtattctgaaatgcttgacaatcaaaagtaggacttctcttaactagaaggtgtttttctgcttcattgttagttgttactgtttttgtcatactagttttccagttctgatcagatgcgcaatctatgtctaatttatatcttacctatttcatacattctctgcaaggt

SEQ ID NO: 69221 - DNA, 1015 bp, Prunus persica
  Intron number 1 from transcript ppa007358m (locus ppa00735 8m.g) derived from phytozome v7.0 (chr-ID scaffold_8; pos 11216850 to 11217864 reverse strand)
ccaggcttcgcgaacaggtcgctaggcaacaacaggtactttcataccaatcctaatcccaccagatcgaattttatttaatctctttcaatatctgcacactattctgaatccgtatttgatttttcttattttaaccaatttccccttgatttagctcgactttctttttctttgttggtgaaatttgcaatcttgttctgcatgtaatgcattatcttccttgggtttgtgattttcgatttgtttcacattgtatgatccaacacaacgcatttgcttttcaaagtcataaacctttttatgaattttaatgattgacatttgatgtgcaacataagagtgtaacacataattgaggagaggcgatattaattgtgttctagcggccttaactggtgaatttctcggggatattcttggcatttgatggctaatcttggaaattttattgggtgaattgagaaattggtctgtggaagaatgcaaaaagaatacatgggtagaacaaagatgtatatttgttggcccatttgccttaaaaaattagagcctgcagtgtgttacggatacaggtcaggcttgttcatccaatgaaaagtaaaagttttacatagatatactcccttaaaagaaatggataatcagttaaattaaggtatggtttcactcaaaaaattcaatagaaatttgccatttgagaagttttgccaacgaatgcatcaagggatttcagtttctgccgtaactttgttctccatgtcttgaaaagtatatggtgcatcttcaactacattcccttaatttgaagctcctatttatttacatccctctctgttattaataatgttttctttctttttttattgaataaaattacatggctaaattagattgcattcttgcaataacaaaggtttacttacatttcaattttcatttgagcaaaaccaatcattctgactacattgggctttacttcaggctgtcctcaagcagtttggagctggaggat

SEQ ID NO: 69222 - DNA, 984 bp, Prunus persica
  Intron number 2 from transcript ppa013247m (locus ppa01324 7m.g) derived from phytozome v7.0 (chr-ID scaffold_8; pos 17915246 to 17916229)
cgtcaaggtatgaatctctgggtcatttcatttctgttcctttttttaaaaaagtaattgaatcgtatggattgtttgaaatttcaattttagtgtaagaagtattatcaattgttctgcttgatgtaacttataatggggtctttcagtacgatttacaatgtcttaagcaattaggttttgggataatttaatttttccaatgcttgcatattttgtggtatttgcaaggcaatgaagataattttagttaacagatttgtatttgcttgtaatgattagggtccataaaatttggttaagcattgagtgagtaggtgtttcgaattgttttgctgtttcaaatatagtagtagcaagtgtattcttcacagatgtggagagttgcatatgtttattggcgttacacgaaggcggatttatccattatttttttatttgtctgtttggctaagagtgtgattagaatatgagaacgattttaaaaatgacttgcagcgaggtgatgaatctcattgttcattattttgctgcttagcaaggagattcttgccctggttttatatttggaatggtgtatatgtttaggagttgcgaaaagtcgaatttatccattattttgttttgatctatttgtctaagagtgtaattagaatatgataacgatttaacaaatgacttctggtgaggtgatgaatctcattgtgcatcattttcttgcaatgagattgttgctctggctctatattttggatagataatttggcctgctagagttcaagtctggatagtagatgctttctgggtgatcaagtattgtaattctcatcttatttgatgatgaatgttgcttgttttgtttggtctcagaaatcctgacttctttgtgcttccatgcatcctggggccctaatatgaaattcctgtggttggatcttatttatggcaggaaagctggagaaggcccaagggtattgattcacg

SEQ ID NO: 69223 - DNA, 891 bp, Prunus persica
  Intron number 1 from transcript ppa010320m (locus ppa01032 0m.g) derived from phytozome v7.0 (chr-ID scaffold_3; pos 19731975 to 19732865)
accttgacaaggttctgtgacctgtctctctctatctgtgctacgtatgtgtgtgtagatatctgtatagacaatgtatatgcataagtgtgtgtatatcataacttatatgtgtgaatttggcctttatctgaaatatgatatggttgcgtttttggggtttgcttgtttgaataaggatggttagagtcggtttttttagttattgttttgtgattgcaatggagtttttggttttctttcccttctgttttctggtttggttgctgttgatatccgaatttgaatttgtcttttcttttgttggtattttagaagaggtgaaggcaattcatatgcatatttagcttatctatataaataaataaaaattgatctttggggttttcaaggtttgggaattatgaaaaggacaatatttgttcatgtgagagtcttttaggctatttgggttagttgtacgaactttttctttcttttcatttgttgtggaaggaaaaatcacggataagattgagaattttgttccctttttcatcagatttgttaaaatctctttgtaaatttgggtattatagaagcatgtacaatttgcagaataatgtagttggcaacgccagtaggtcatgtcatgacaacgttgataactgaaattcctacaaatcattccttctatattggttgatttgtgataaaaagttactaaagaaattaatgggggaaataaaaactcgtgggatttctaaatatgcccctgtatgttagatttatgcattgtgcacttttatatgtttctcttagaaaggtttggttcattggatactgcttaagatttatgattggtatatgatgctgatgaagcttgaaattgcttgggtgccccacaggtta

SEQ ID NO: 69224 - DNA, 769 bp, Prunus persica
  Intron number 1 from transcript ppa006460m (locus ppa00647 3m.g) derived from phytozome v7.0 (chr-ID scaffold_6; pos 25819923 to 25820691)
tcccgccttgagctttgccaattattgcttaatcggtacaattttcttcctctgagtatcttctcctataaagctccttttttatctttccttttttgggttttttctgtgatatatttggtggtttttgttggtttcgttttgggtatttggatcggcttgttttggtattcaggattaagtgtctgaactccccttttctctattttttattattatttataaataaatgttttgttttgtttttttttttggtggtagggagagaatgattatgactggatattcaggtagttcatttgtgtgaattttgggttgtattgtttggctttaattgttggatctcgggtttcatgttaatatgtttatgggtatgtatagaaggtcaaagacttgccttttatttgcttcatctcatttgtggggttcatttattgttcttttttgtgctgtacataaaatttccgttgtggcctgtggtttacaaattttgatttcttcctgtatttatctattttctggtaaatatgagtttaattttcagctaagctgagttgatcggctacaaatttcctgttttctatatttcataaaactttacgtagctcttagtatggattgtggataatgggtaaagaaatgctactcagattgtacatattgcagtttcatagtcgcaattttaactgtcactgcttaattgattgcagtaggttgatggttggtttaatcagggaaaaacaataaagagagcagaacaggtttgcaa

SEQ ID NO: 69225 - DNA, 940 bp, Prunus persica
  Intron number 2 from transcript ppa026078m (locus ppa02607 8m.g) derived from phytozome v7.0 (chr-ID scaffold_2; pos 20640 to 21579 reverse strand)
tctatccttggagaccttataagtgtggatttgcagtttgttgagggtaaacatagtatgtttgttagagctcgtcttgtgcttgacctaactaggcctctgaaaagatgcctagtgctgggtgagtatcctcaggaaattagaatttttgtgagctatgaagccctttttgcgatctgcttctattgtagtcagaaaatggaacgtaggcatatctgcccggtcaaaatctcaaaaaaaagttatctataggttgaaagattggagaatgagccaaatgttttccctagagacttagtccttgaggttgaagatcaacaaaaattagctaatgatgtcatactggtgtttcctcagcctatcaccatagattcttttgcggaggaaaactctgaccagggtgagaaggtgccaactgaggtgcatgacccggggtggactgtggtggctaaacgtaaaggcaaagccaaactgcaagaaagggatgggagaacctttaaagaagtagccaaaggcatcaatattgttgaagctagaggttcccgtgacgctgggggtcaagttttccccagctgattataattataagggcaggggaaaagctggtgtggttgcccctgcccagtcccaagaaggcagtagtgccttcactggtttggcgtataagagccccaagaagagagcccgtgatgaggtgggcgtggaagagaattttgatccaagtgtggagatacaaggagagtatctgagggagactgatccctcggttggtaccacctctagccccattccatgaagctgttatcctggaatagccgaggcaatgcttggcctggctttattttgcaagccctctattatactagtactttaagtttaaatgtcttgtgtattttggattctagagcctctagggttagagctgaggttattgctcaga

SEQ ID NO: 69226 - DNA, 677 bp, Prunus persica
  Intron number 2 from transcript ppa012044m (locus ppa01204 4m.g) derived from phytozome v7.0 (chr-ID scaffold_6; pos 4340121 to 4340797 reverse strand)
cgggggattcagaccactcttctaaaccatcaaaggtattgatttatttgattctgaaggtatgcctgattgcaagaaaatgtggcattagatagagaaaggagataagtggtggccattgtttatggctttcatgtcattcgcgcatatcattaggatgaattttgtttgatgattctcaactcaaagtgctgctgaacttcgttcatgctcttaatgataccacttgcttttgccttctatttatggtaaaaaatgggctattttgttcacaagagatgattctccatgtgaaattgatggctttagttttttgttcaagacaagataaagccttttgcattagttcttctgatgcaaaggggcctcaactttgtttgaggcatttcttttgatgtattctcagtgtcagtaacagagaattttttagtggatacaaaatacgtcttttatgtgtatgttctgttttcttagaactttttgttttccaagaattcaacttttgtagattggtgtgatacattggaacttctgaaataacttatttgtttaatcatatttttttataaggtatggtaaaattcaatagcaatggctttttactttcaacaagatatagttataaaggttcagtgaccacaggaatctcaggcctcaatctctcgacgacagtgtct

SEQ ID NO: 69227 - DNA, 852 bp, Prunus persica
  Intron number 1 from transcript ppa012044m (locus ppa01204 4m.g) derived from phytozome v7.0 (chr-ID scaffold_6; pos 4340834 to 4341685 reverse strand)
ccactgtgagctctctctctctctctctctctctctctctctctaaaagttagtacccattaacgaacttaatgagacctgccaatttctcgtcatttccatgcacagtccttaatttcaagtagctgtattttgccttatctcattcttcatcacatgtgtgcatgaggtctcggtttcttgttgcccactatatatgcatatatattttgtatagctctcaaccagcactaaactcatggtttgtggataagaagtttacgggcaagtttgcttttggccctccgttcaccaaattgttaactacttggttttgctttgtctatattgctatgtttttatttttggtttacttttggggtacccaagtttcattaggggaaaaaaattaaaagataagggagaccaatttacctaatgttcgtccagatttcatgaataatgggtcttttctggtctgcttttatggttttgttttgttctcaattcaaatttgggggctttgcttttcttttgggcacaaagatttcagagactaatattatttgtagaattgaatcaaggtaatatcatgaaatcttaagccttaacatctactcagaccattaactgcttgatgataatatgtaccattggatcagaaaaagaaagatgatgaatttcaacattcaaatgtgccctttcagttgtagccagtgaacattttgcttttagctctatctgtcatgcagcacatgactgttgcaaaaaccagattcatgtctttgatcaatgattggtggaagggcgatggttctaactatcatttgtatgtaaacaatttggcagtcaacacaaagtcggttgggtttc

SEQ ID NO: 69228 - DNA, 771 bp, Prunus persica
  Intron number 2 from transcript ppa004629m (locus ppa00462 9m.g) derived from phytozome v7.0 (chr-ID scaffold_1; pos 3444078 to 3444848 reverse strand)
ctcaagctttacaagtaagattttttgttgaagcatgtgttttttttgctagtatcttctttttttccccaattttggttgttcaatttataatgattatcacataaaactgaaagagctatatagttaagaaactgatgcagatatccaattttcgattcttgattctggaatataaagagtttatgttttgtgtccaatgaatgagcaatcccaacaattttttgtgcctgattttctaatctccattattccagagctaaactgtgagttcaaatctgcatcacaatagtggttgtgtaaggcaaggtgtaagccttttctagtttctgtttctgctatccaatctttttgtcgaccattggctgggctgcagacaaataccctgcctaagactcaaagagtgtgcttgcaactgttgctgctattgttcttttcatttttgtggacttgtagctctagttgcttcggctacagattttgttccggtcctgctattaggcttaattattatgaaggttgttattcgcattgaacaagtcttcttctcgtctctatcagggagaacaaaatgttgccttttaaccttagttatatgtgacttgagttaaaacaactgaatagcctgatcgttctgactaaacttcttcccgattaagtgacttgggaagaagctaaattcatacctcccttctatacagaataaatcttgatttctaatttttgtgcaatgtacttctatcctttcatggtagtccaagggagatttcc

SEQ ID NO: 69229 - DNA, 901 bp, Prunus persica
  Intron number 2 from transcript ppa001595m (locus ppa00159 5m.g) derived from phytozome v7.0 (chr-ID scaffold_7; pos 10132593 to 10133493 reverse strand)
gatacagtggtcagtactattttctctcatttaatttaatcgaatagaaaattgtgaataagtagttgaaaagagaagtcggcttgatgttcaatttcatcatctcttgaataagaattatgattccgttgacagtaagctttttattccatgatatgatgtttatactgattgaagaatatatgagaagatatgttgctctagaattctgttatgaactttggtgaatagcagactgatttttcgctacttgtcaatgtttcaagcttcttattattcaaatataagaaccacacaaccagactaagatgtaatcatatggcattatctctttaattaagtctttatgctgagagtttatgaatcacagatctagattaaagaaatactagatcttaaagacaaatatttggttaaatattgcttagtgaaatggcagagttttaatttttgacattcatggttctttgatatgaaaacacccactgaactaggtagggaaaaaataaataaataaataaataaattgaggcatgtgtggcatgcagaggtcattctgttaaagagatcgtatgaagaatactcacacagatctcctctagagccaaatttgggtgtatttcagtcttgatttaatctattatcattgttggtcaatggttgtgtggtcactgtttattttgtttggctctaattgttgtcccttactgcatcactactaatggaaactttgtcatttcatcacttccatagagttcttacattcttgtagctccataatctcccccttgtttctaaatgaacactctgttctgatattgcagaaaaaccagaaatagtttgctattgtatatgagtcatattctataaatataatatgttctaattatgcaggggaagg

SEQ ID NO: 69230 - DNA, 443 bp, Prunus persica
  Intron number 4 from transcript ppa018614m (locus ppa01861 4m.g) derived from phytozome v7.0 (chr-ID scaffold_1; pos 25936388 to 25936830 reverse strand)
caagatcatgtgagacacatgcctaagtttaaattttgtattgggaggattctgttccgatatgggtttgtatatagaggaggatttgctagttctttgaatatgttttgtgtcaagtacatgttactaggtgcactttgtgaagtcacaagtcttatgatattattcttactatttatcggcgttttgaaatttagtatggtctatgcttccatcatgaagagatagtcgagtagaaattgttttcagttacttaaactataattagatatcagtcagctacgtgagagattatatttcatttggagcttcctattctgaaagtatgcatattcctctctgtgaggaatggtgaattcttcctactttgtccatctgataacagaagcttttgatctgtgattgcagattcaggagatcgtgactactgggaagttatccaa

SEQ ID NO: 69231 - DNA, 627 bp, Prunus persica
  Intron number 2 from transcript ppa014861m (locus ppa01486 1m.g) derived from phytozome v7.0 (chr-ID scaffold_4; pos 11091798 to 11092424)
gaatcctgcggattttctgttggaccttgccagtatgttgttcttgttttttaataattactagcttaattcttgatttcagttttcaaaatcattataaatgcatatattttagtttgaaattctgcatgcatggttttttggtttgatgggtcgtgggttcagtaattgcatgtaacttaggtccatctcttcgttcaatgactaccttgactgtggtgcatagttaattactgttcgaacttccaaattgggttgtaataaatttctaggaaatccaattaggatcagtgagaatttattcttatgcttggggcttggaaatgtttgcaacattgtcagatatgcctggggaatttctcttattcaaattcatgagaaaatgtattcattatcatcagttttttattgcaagtttttattattcttaatgccatgttcttcttattcaaatgcctggggaatttgttcttcttattcaattcatttttttattattcttaatgccatgtttgatataggatttcattgccagttgtttgtctacaagtgtatattagatgtttgtgaaattgtctgtctgagtaaatattttgttacattttatatatgtaggtctggcgcctg

SEQ ID NO: 69232 - DNA, 651 bp, Prunus persica
  Intron number 1 from transcript ppa001551m (locus ppa00155 1m.g) derived from phytozome v7.0 (chr-ID scaffold_5; pos 11568191 to 11568841 reverse strand)
cattaagacagccacgagtcattgctgagattgttgtaagttatttcttttttctctttgagattaaatttgatcaaagtgcagttggttttgtccatgatggtattgctatatgtacactcagtgttaattcttgggagtagttctgaggaggagctgtagcccttcagtgttgaatttattgcctttgaggtttgatggcttctaactttctttgctttgaaagttcgggggtgttggattctaattcatctgaaaaaagaaactgtaaatcagtgccttctgataattcaaaaatgtttctgataaagattatataatataatattttgaatttgaatgatttctaggctcagtaaacctgtatttttctttgcttttttctctgagctgcctgaaaatgtgtacatgatctttaggtattgatattggaagcaggcatgtttccttaggaaaccttttggattttgtttttcagtcccctgctgtattgaaattcacttggcagacaggagaatgttgtttaatggttccacagaattgatttttcagaatttaaccgaacctgaaaacagaataccatgctgattgtgaattgtgatttctgctttggcagggaggaatactacttgggccatcagctctgggacg

SEQ ID NO: 69233 - DNA, 532 bp, Prunus persica
  Intron number 1 from transcript ppa000832m (locus ppa00083 2m.g) derived from phytozome v7.0 (chr-ID scaffold_3; pos 17499844 to 17500375 reverse strand)
cattcgacacgattttggcctcggcgattcatgtgcgtaattcttgtctatcatttttctggcattcaattccttgaagatttacacacaccacgtgatgagaaaatggaaattcaatttcaattagtgtttttttttttggctgaaaatctttgagtaactgccaatgtcaggatttcgaatatgagcttatgccaatgtgatgagataaagcttttccgagctgaattttgacttttgagctttgagctttgttttccaactagatatgaatgcttaggaacagtttagttcgatatttatactgattctaagattgcacagaggaaaatgtttggctttagttactgaattctttgtgtcaagcagtcgagctaggtgggtatttaaaactcaataaagccccttctttgattgggttaacttgattaattttgcattctattctatgtaagatcaagcattgcttcatggttacctgttcttttgagctatagatattgatctctccgcgggtcgtcctggggagcaa

SEQ ID NO: 69234 - DNA, 717 bp, Prunus persica; identical to SEQ ID NO: 68673
  Intron number 1 from transcript ppa006473m (locus ppa00647 3m.g) derived from phytozome v7.0 (chr-ID scaffold_6; pos 25819923 to 25820639)

SEQ ID NO: 69235 - DNA, 973 bp, Prunus persica
  Intron number 1 from transcript ppa016293m (locus ppa01629 3m.g) derived from phytozome v7.0 (chr-ID scaffold_1; pos 27152533 to 27153505 reverse strand)
cagagtgagccctgttgattgccctttatgtcatttcattttgtgttggcatgcatcacagagagagagagagagagagagagagagagagagagggagagagagaaggttaacttatcatcacaattgaattcacaaaagaggttaactaataatattggttatgtatattaattcaatccaagtgttaatgtcaggtttttctttgagcatgatcaatggacagaattatatatcagaaaaaaggaaaacaggaaaagtgtgatgagtttttaggtccatgaagcaattatacttgattccttacctgcctgtgaaacatccaaggcaggaaccattgattgatgtaacctctagtggcatttagtgctgtatattaaccctagcaatataggatgtatgaccagcttcttatgaaactcagccaccaagattctcctgtatttatttggatccaaattttaatctttatttcatacaagactcattttaatttaatttaatttctggatggaatagaaaagtaaataataatgtaaagttcacatagaaatttaaagtatatatctttatttcactaaaaattgatgatttgattcactttttctggaatacttctttacaagaaaaatacgttatggtttggggtcccaaaatccaaccttagattctttgattcctccacccttacaaagaacaaaaggaatctgccaatcacaccacatcctcctcagaaaagaaacttataaataaataaaagggagataaatttaaaaagaaagaaagacccatttccctttcagtcaccaaaagaaatatccattatgacgttcccatcaacttaattatttctttattcatatttttctgcattgctcctcacactagtaggaaagttgcacccattattcatcatggtggggtttcttattcatcagggaatcaagcagagagagagagagagagaggtggg

SEQ ID NO: 69236 - DNA, 905 bp, Prunus persica
  Intron number 1 from transcript ppb022847m (locus ppb02284 7m.g) derived from phytozome v7.0 (chr-ID scaffold_1; pos 1635827 to 1636731 reverse strand)
agcccatccaagtgaaggttgctccgcaaaagaaggtaggcatatataccacatgtttcgtgattatagagcatagcagctttcacgcgttatcctcattttattttgtatctgtgaatctacgaccatttaatttagtggcattcagcttttacatttttggagaatgtccggagttcaaattttatcgacgacaacatttgagttttgtttttgctataatattgtaagcataaggttgacctccgttgtttgatgcattcacgtgcattatccaccaatcaccatgcatacagacagcggcggatccaggaatttttcaacggatgtgtaatttttaaaagctaagagctcaaaacccaaaaacaaaacaaaatacccaaaaaaaaaaaaaaaaacaagacaactaaacatccttataatttaaacaatactaatgttattcataattaattaaaataaggattaactccactttagtccccggaggtttagtgtcagtatcgaaatgggccccaaggtttgagtttgatcaatttcgtacccaacatttcgaaatattaccactttacaccagctgttacattgaccgtcaaagtcagacgttaaacgctgacgtggcagtcgtgggacccacatcataaccaaatagctgttagaaagcgacgtcacgatgggcaatttcggaagaaaaaaatcgaaggaaacgaagagttggcacgcgttccaaggaagagttcgattacctgagttggaaaaattgaaccaactcagtttctgagttgtgttcgtactgagacagacatagaggagaggttggagaggttttgagggtttgttcgtgttttggagtgcaaaaatttgaaatagactgcaaaaatcataccgaaacggaggtttccgaa

SEQ ID NO: 69237 - DNA, 654 bp, Prunus persica
  Intron number 1 from transcript ppa003738m (locus ppa00373 8m.g) derived from phytozome v7.0 (chr-ID scaffold_1; pos 33540213 to 33540866)
agagtctcaggcctgaggctccgacgagtaaggtagccataatttgtagcttcgttgtaaatttatcgacgaaatttgactgtgtcattgtattctatcacaattttctacagtttttcgtttcttcaggttgatttttttgttttaaattttcaggatttttcgaagtaaaattcatttctttttttttgccaaccaaaaaggaagcccggttccttcttggttgatgagaatgtgattgtcgtgaagtttcgaaaaagaaaaatgtgtctttttagatgattaacagctcgagtttatattcaatttgcagctatggttttatctttgtaagtgaaattcaagggaactatggaattgattcaaatttacgtcaacagagtcttacataacttactcccgttctcctcttaaatttgcagagtcaacagagaattgattcaatttttttataaatatactttgaaagttctcctcttaaattcagttctattccttatgctgtctgatttcgtattaaaagttgtggcttctagttctagtctcaattattgctttcagtattttatgcttatccctctctccttcttcatttatgacctttactggtgtttgacaggttatttcaaaagaatctctcttggctgcacaggt

SEQ ID NO: 69238 - DNA, 723 bp, Prunus persica
  Intron number 1 from transcript ppb023829m (locus ppb02382 9m.g) derived from phytozome v7.0 (chr-ID scaffold_8; pos 7521593 to 7522315 reverse strand)
ggtttacagcgtcttcaatttcttaagggttcagggtagtactttgtaacgacagcggttaagtcaaggaatatatattttacgtcggatagttaaatatccgccatcgtttctcatttaaacgacgtcattttaacaacttagtcgtctcttacaatttacaacgtctacaatttattaacaccgacgtggtttgttgttgtgataagaatattttattatttttatatcaaaatattcaaaataaatttaaaataaatcagaaaaatgcaaagtcaactcctatgaagtcattgatatattttcttccccctaaagcttgaaaaaattcattttgaataacaaaaatttaaaatgaacatccaaaacaaaattgttttgatgagtcataaaatcacttctagttttatggtttagggtttagagtctagggtttagagattaaggttgttatttattggggtttatttttaaagtataatttttgggtagtctagggtatatattaggctgtaaaaccataaacccttttataaacttaatttttaaaattatataatttagttttaagggtttagggtattaattgttaacgacggtggttgagtcgtggaatacatatgttacatcgtgcagtaaattatccgacatggtttctgcgttaaacgacgtcattttaatatgtaagtcgtgtattattatttacaacgttttcaatttctt

SEQ ID NO: 69239 - DNA, 564 bp, Prunus persica
  Intron number 1 from transcript ppa027134m (locus ppa02713 4m.g) derived from phytozome v7.0 (chr-ID scaffold_4; pos 12840919 to 12841482)
atcctgatatccaaagggttttcaagtaagtttctttgtatatgtgtaccgacacatgcattgccagtctttctcttgatgatcacttctctaagtattttatgaagttttagtcgatgtcatcatttttgcaatggctttcaccttttttgttttggttttcgtttgggttttttcagattaatggaagtgtgtgcacgatcagctgggaagatgactaaggttgagggttactgcgaatccgggttagatctatgggtcgatttaaaggtaatgtaatggggattgtgactgaacagaaatacatgttttttcatatatttgtgtgcaatatctgtatatcttcttttggtttttttggctgggattatcggatgtgaagaacgtggcaaatcttatagtatcatcttgatctactttgaatttgtgccatgttaacctcactcttacttctcatggattttgagttttattttactttaaattttctatttatttatatttttataaaactcgatatcttcttccttttggctaattttcagatagatagcaatccagaaa

SEQ ID NO: 69240 - DNA, 988 bp, Prunus persica
  Intron number 2 from transcript ppb012676m (locus ppb01267 6m.g) derived from phytozome v7.0 (chr-ID scaffold_8; pos 14476581 to 14477568)
cggtaattgatttgctaattcttctgtttttcttgtatattgggtttggttggttccttttctggagttgttcaaataacaaagatcctattttattttattttttttcaaatgatttttcttcagaaaaaagaaaagggttttgactgaaatttctatgccacaatgctgcagaccatcaatgatgttcttgtgggggtggtttcagcaacagggacgaatccaagatttcaaaatacactgggttggattttccttataaacaaattcgacggtacgagtgaatttcattgataacaaaaattatacatctaatcagggggacatatgaagtcttacctgttggaaattaggaatgttattaaattgttatttagtttccttttattagttgattgtaattgatttggagtagtctccaactaacctagttttcctagttaagcttgtaatatctctataaatacttagccttttggctctatcaataacaactgagaattattcttcttaacaaaatctctaatttcacatggtatcagagcactgattctagggcgtctcttgaaacttttttacaaaccttattttcttcacaatccgatgtttcacaaccctagttgctaatctttgaaatcttttgccaaattgagagtcgttggcgcttttcatccctcacccatgatgggtattcatcttctacagttgtcttgttcaccctctcctcaatgatcaatattttattcctgctaccaaagccataccatcccacaattcctacatctaactaaaccaacagtcgcacccttctttggcgctgcaatttccttatgtttttcatacaagtattgctctctatacaaatcatattgagccatctctagtcatgctctctgttgcaatcagatattgagcccatgttttgatgtctactacgcttgccacaaccacagcatcttcggccttcatcgagcctacccatcatttt

SEQ ID NO: 69241 - DNA, 626 bp, Prunus persica
  Intron number 1 from transcript ppa016561m (locus ppa01656 1m.g) derived from phytozome v7.0 (chr-ID scaffold_4; pos 9310560 to 9311185 reverse strand)
ggtagtcgagagaagtcgctggaaaagatcgccgcgtgaggcgcgttctcttcatcgcatgaggcgcgtggcgtttcaagctgcatcgtgtgttgtcgatcagaaacgtttatctattagtctaacatcaatctacattttatctatttcttgatgtggggtcatttagttgacggatggaatgaataaatagaaaattttaaaaatattaagcactttaaccccccaatttcgacgttctgctcaccacaattcaaagctttctattttcttttcaaacgccctatagagaaggcttctattttaatgactgctacatgtctgccatgtgatatttcacaggtaggtgccttcatttggggaaggaacttggaagattaacatgatgaaaagaaaataagttgcccttcgttgctcctgtgtgtgtgcgcgcgagtacgtaagttatgtgctgtgagcaatataaatacaagaagaagcaaaagctagccatacaaccttataacccaatggttcatacttccttctcatcctctttttctcttcgactatctctacatatattcatgcatgcaaccaaattgagcgcagctccctcttgtccttcaccctcacattagcttctc

SEQ ID NO: 69242 - DNA, 606 bp, Prunus persica
  Intron number 1 from transcript ppa016470m (locus ppa01647 0m.g) derived from phytozome v7.0 (chr-ID scaffold_1; pos 46222005 to 46222610)
gcaaggctttcgtcacctctttcaggtagtgtgtaattatcttcaaaaaaaaattctttgcgctggatttcctatatgcatggttggcccatttgatttgattttcaaaattcataatctctagtcatgtgggggtgtatggaaaactcctattcttgaatcagtgaataagattttggttttaaaagtgaaaatgaaattgtttctaaaccacaaattttcttcttcaataacttttgccagcgtatggtatgaagctggaaactgtgggtaacattatggttccttgtgtcactatcaaattattttcttcgttggtgtgtgctggaaaagatttggccctttttgttttaatttcatttcactgcaagtgtcatatacttatccaaatagaagtgtagtcttgtaatatttgatgcatgctcggattgctttcttccaaccaaaatattgaacacttgaagttcatcttagttatctgccttttagtttttgctttcctcttgattttggttttcttaatttaatttaggaggaccaaggaaccctgaaatgactgctcctccatcccatcagtttcagagcaattattcactagataagaga

SEQ ID NO: 69243 - DNA, 530 bp, Prunus persica
  Intron number 1 from transcript ppa002175m (locus ppa00217 5m.g) derived from phytozome v7.0 (chr-ID scaffold_8; pos 6730606 to 6731135 reverse strand)
tctggccttctattacctctcccgaaacagcagaggtattttcctttttcaagtttcatttttgtgtgtgtgtttaatattggtttgtttggttcccgggaaaatgtaggaaatgaaaagaaagtagttagttacttgtcaatggcggactttatttggctggtgagacaatagaggaaaaaggatcacactgtagtttgctttttagttgatttcctatttcctatctaggttgaaagatctgtgcatttgatcttgttatgtttcacttgaattttgattatttaatgactttgcttgattgttgagaagataaaggaaaaggatcattcccattaacatttcagatacattttaattgtttgattcccttttccatggttgttggaactttttttttattttaattttttgttatgaagaaaaagtggtatacttaattcagcagcatctggtactggaattatatgaatcctagtttagcatcaagtgattgctttcttgtgttggtgcagaactaaatacttatc

SEQ ID NO: 69244 - DNA, 761 bp, Prunus persica
  Intron number 1 from transcript ppa011265m (locus ppa01126 5m.g) derived from phytozome v7.0 (chr-ID scaffold_3; pos 12257649 to 12258409)
cttcttgcttttgccattctcagttctccctcaaggtgtggcttttcctaagcttttcaatcttcatgttctcttacaatttttttggtcctcagccttgtattcttttaaatttgtatcttagttgattcatctaggcgttcttagttcttttatttgctgatctttagaaggaaggggaggggtatatggagtagtttgaaattagttgtattttgtccaacatagaaaataggagttgacatttcatagttctattctggtaaaagagtttctgtgggtgctaaatgggtgtattctagtgtagttctatggatttacaattgggtaagcgggcatcgtctttcttggtcaaggaaattgttcttcttcctttgcctttcagttgaaaagttcattgaattttatgtataatttgttatcaaatttgtcttcatgataaatgtggcaagtcgaacatggcagcaatattgtataaaatctggaaagaggcatttcaccagtttgaactttgaagtacaagataacgtgcaacttctttcataaataatctcatgtcatgtgtagaaactctctataattttctgagttgggtagcttctcatagaactaaatattcgtttcttataggttgactatgctaagaagactataagacattcgagtaactatagaagcatcacattttcactccgaagttctcatactcaagtcttcggtcaacagcttgagacagtgggagttcagttacacagggactg

SEQ ID NO: 69245 - DNA, 948 bp, Prunus persica
  Intron number 1 from transcript ppa000072m (locus ppa00007 2m.g) derived from phytozome v7.0 (chr-ID scaffold_3; pos 888699 to 889646)
aaacgtcatcgtctccaccagaacaaagaacagtcttctctctcacttatttgttttaatttggttttgcagccagttcgcttaatccttgctctcaggaagcatacttttccgaaaaatgctaaacacagttatctaaagaactttgtttattcattattgctgttaattttgcttggtttagataagataagtaaatagaagaactaaatttaatgacagcaatgccgaatttgattggcggcttagtaaatggatttctgtgcaagatggaaaatcggatttcttttaaagtggagaaaagaaagtaagggaaatggagagtttttgtttattatgttacacgaggcctgcatgcattggcattgttgttctaggtatgttatttatgttaagattcttatttacttatgcagaattgctattccgataactaaatgcgatccttaatgtagtgcaagaagtgaactacattagcatgtttgtttctgctgatgatccacatcaatttcttcgcgtatgtggttaattttattatcgtttattgtgtgggcttcttcatggatatgtctgacctaggaagtcttaggcacaaagccttttttgcagttcaaatttcagttttaattgttaactctataaaattactgtaaagaattataaacctagatttattatgtgagacttaagcaattgaattcatctaaagtttagaccttttgtttctctttgctgtgtaagattgaatccaagaactaccttaacctgagaatgcactcatgcatccttcttgatttatttgttgtcttttatttatttttatttttttggggtggttatcttcaagatttgatggtttactattcttaatcagctgactagactctctatgtgtttgtttagttctaacgtttagtattccattttggcattgtgtcaggtttgcag

SEQ ID NO: 69246 - DNA, 775 bp, Prunus persica
  Intron number 2 from transcript ppa012380m (locus ppa01238 0m.g) derived from phytozome v7.0 (chr-ID scaffold_3; pos 5219711 to 5220485 reverse strand)
agattaatcccaaggataatcatatttctttccaggtaattatgttttttaaattaaaaaaatccatatagataggtttgaattcttctgggatttaaatttccttgttttggagtacgacttgataatctttgtatttggagcttatcttaaattcatattgtttgcttctaatgttttctaaccttggtttcttcacttcttcgtttttcaatgatttccttttcaatggccaaaaataatattaattaaattaaatatatgtttctaaattcttttgggtcctaataaagagaaagttttcgatgaaacgtgaatatcactattttgttactccagatcaataaagttgtcgacaacattttcacgtagcatagtattattaatcgagaataacaaaatagcgctatcacgttgcaactaatgaggacaaaaatacaagtaaataacgtagacgaagacaataaggctggctccagctgataattaacatctgcaattttaacttattacctaatgtgccactttcaatctgatcaattattattaggttcttatttgacaacgcatgcctaacatgccaaagagtcaatattatacgactattactcaactccctcgtttgggaaagataaacaaacaaatcaacctaagatttgtcttggatttgatagatacgatgagagaaagaagataagaaaaatgagatcattgatttgctttcctgtgtattattgcaacttatttttaatttgtcatgccttagtgtgagagc

SEQ ID NO: 69247 - DNA, 702 bp, Prunus persica
  Intron number 1 from transcript ppa019356m (locus ppa01935 6m.g) derived from phytozome v7.0 (chr-ID scaffold_3; pos 21526174 to 21526875 reverse strand)
ctgatcctgtttccaccaggaagacatttggtgaggcatctgattctgtttcaaccaagaagaaaccccataaggttgggttcctacaactagatattcccagacccacagctaaacagcacgtctgatgtctctgcatcatacacacacacacacacacacacatgtatgtagatgtgtacatacatacataaatacatcattgcattgcaatgattgtatcagtgctatcctagatacagctaagtcaaaaacaagaatttgatgttatcaaagatctgattttcaacatctagaccaaagaaacattaatggtgagagatccaattacggtgttttgcacacacaaaggatgtgaccctgacaccagagataaattaattgtgtgaaccaaaatgtagcatgaaaatcgtccctgctagcatgcttaggtcttaggatgtgatttatacactcaaaagaaggtgttgtttccaagttaccgatctctgtaaaacccagcatccagccagaaaccttatttatccaaactaatcagtagagtttccatgagatgtcttcatcagacaacaatctctcttttaataatttgacgaaaaccaccaggtgttgccttcacttagatttgggaaaagaaaaaagtggataacacttcacattcaactttttcgtttctttttgtgtggcatgcagatcttacgt

SEQ ID NO: 69248 - DNA, 959 bp, Prunus persica
  Intron number 2 from transcript ppa001047m (locus ppa00104 7m.g) derived from phytozome v7.0 (chr-ID scaffold_3; pos 20702185 to 20703143)
tccaggtacatttattgtgcatatctttcctgttactcgaacatcagtagcatatatttggcatagcaccaatcactttaaaagtagaaaatggaaagagaattgtggcaatgcgtctttagactgaggatcaccacatctactggggtacagatgttttatgtgaaaaattcacctcagtatagtacttttttcttggtaattaataatgtgttgtttatactcttgacgcttttaagtttatctagccattatctacttgtctgcaacctgaatgtttaatgcaagtacttagagggagacatgatgcatgtttctgtattatgattcagtattattaatgttttattgacattctagcttaacttaaggctttatttaaatgtaatgtctgcaccattaaccatcttctttcacattcattatgcctgaatgtttagttttgtactctatatgcattggcatgtgcaggtcataccttggttccgaaatctttaggctgtgacttgataccttttgtttttgttatatttttttgtataatgccaatcagtttgtgcgtgtacccacaaacacctgtttctgctggtctgttaatggtatcctcgttattgaatgtttattagcctttggatgtttctgtgttaagagatcaagctttttactttaggactttctgcaacaagatctaactccctgtgtgctagccattttttctttttgtgttacctaacttgccactggtcaaatgtttagcagggggttgggatgggtatatgatatatttgattcatctgatcacaactcatacatgcatttatttatcttgctgcactttctcttggttggatatttcattctctgtaaacttcattctttgctggcctgtgtttttacttaagtcctaatttccctcaattacagagtctttctcagttcaatctccctgtatcaagtgc

SEQ ID NO: 69249 - DNA, 852 bp, Prunus persica
  Intron number 1 from transcript ppa020735m (locus ppa02073 5m.g) derived from phytozome v7.0 (chr-ID scaffold_6; pos 20394453 to 20395304)
aatctttgcttagccgtggtcaaaaggtaacaaacttggtttgcttctaaattccaaaatttatatttcctcatgttcgttagttaacaaatgtatttattatattacttgacacctcttgaaatctcacataaaactaattcccacaataaatattttctctctccacacctgagaatgaaacttgtctaaagagagaaaatgggcatgtgtgggagcaaaatttactccatatgcaataacccactactcatgcatcctaaatttgggggaatagagaaaatcaagtaacgtaacatccattatcctgaatcatgaaaaaagaagaagaggaatgtgggagttggggcccaagactccactgcctataaaaggccaattaacacaacaccccgaaggatggaacaaatcaggttcaatattattctaatttctcctgcgattatactcttactgacttgagcatcggagtgtttttttgcaagtactcccctcattcattgatggcaattgaaatggtgtccgacttctcaacatggaaatcaaattacttgttggaggacatgaaattttccgctccaacagactatcgcgccctctaaatatgaaaggttcaaaaagaccccaaaaaaaaaaaaaaaaaaaaaaacacctagattccaagatgctaattaaataccccaaaagtttcaagcccatttggaaatgctttaaaatccgagtacactccatagaactttgaagactctctccagaacctatccgccttgatttgaatttttacaacggcacaccatttgattttttaaaaagacataatgagttcgggccggagcagccggaagaagaagg

SEQ ID NO: 69250 - DNA, 513 bp, Prunus persica
  Intron number 2 from transcript ppa011822m (locus ppa01182 2m.g) derived from phytozome v7.0 (chr-ID scaffold_7; pos 22265387 to 22265899 reverse strand)
cgccttcaaaggttagtctttgctttttgtgtatatatagtcaagtaatctgggatcaagttcgctttttggtctatctagtcaaagttgtatatatttttaacataaaggaaggttttttcgtagcaaccttttagctcaactaactaaacataacctcctattttaacttacaacttagccaacttttctcaaccccaagcatacatggaggttgattactgaacatatggaataaactgcaaagaacagccactgttttcttatgattctgatgcatcatcttaccccatagaaggctgcactttatgcgtttaattcaatcaacatctctagttatacatgagtgtaacatgtgggtgtgcctgttagttggttccagtattttggttatattttctgtaattctaaatatgtatgtaattatgattccagtttcatactcccatcatctgttaattaaagattaactttaatcatgctaattgattttaggcaggagttcttggaaac

SEQ ID NO: 69251 - DNA, 796 bp, Prunus persica
  Intron number 1 from transcript ppa013169m (locus ppa01316 9m.g) derived from phytozome v7.0 (chr-ID scaffold_2; pos 16667874 to 16668669)
cattctgggttatcaggtaattctttcttaattgtatgcccttttgtttttcaaaacatgcatcaagttctataggcttatagcagtgttgaatgcttgattcacaacctaggcccatctgggtttgttattttatgtttataatgtaatgttttttttttttttttcaaagtcaagtatctgttcgcatatgattttcggtattttcatgaactttttccatgaatttagagctttttttctctttgaacacgagatttttttttcctttttgcaagactcggtttttgatttgttcttttgacagtccccaaactctgtttccctttaatgtaaagaaagtatgttatagagacccgggttgggtttatttgtttgcaaaatttgcagaaaggttttaccttttgttgctaaatttgtaaatgaataaataagtgtttgaatttgtagtcatgcatcccaattctatgtttaaattcttatgcagaaaacctgagtttgtaaaataaataaaagatgcataagcttattgataatgaaaagaatattgtctaaattttttgcagaaatctagttaatgaaggtgaacttgtttttggcctaaagtggccgtcaggcctatttttgtatagtagaactgctcctacaagccatagatagttaagtcacagaaatggtcttacattgtctggtgaatctggttatttagaagtggttcctgaaatgcttagatatatgaccactgcaaatgttgaatgcagcttgtgtgcttggtggacctcgaattcgattacat

SEQ ID NO: 69252 - DNA, 787 bp, Prunus persica
  Intron number 1 from transcript ppa000559m (locus ppa00055 9m.g) derived from phytozome v7.0 (chr-ID scaffold_8; pos 3225187 to 3225973)
aggtttcaagagtaagacttttacgttgtctcttctcccttccccttgtgccttttgcatttcctctcaactccatttctgatactggacatgttgagagccttcaaaatctgttgcttttgttcactctttgtcccagaaatcattcctggaccctatgtctacatttggaagatacccatttgctcatattgactctctctctctctctctctctctctctcccctaaatttgttagatcttgaaataaagacagtacatttttccttctctttctacaactctgtttatgctgtttcctacctattgatgagcaaaatttgtcttctatgttttcctttacctcctctctgatttcaactgagatttaaagtttcagttactgaattttggttcacggtttttagtatattggatttgacttttctcagccacaatctctttctgggttctgtgcattggttgtggtactctgtggtttctcttgaaacggcttccgtaaaattactttttttttgggtgtcttgttctttcttggttttcagagctggtcaatgaaccggtgcataaggccttcaactttgcttctgcaaaatttatttcatagttttctagtaaattaactagtttcctttccaagcaattcagatgtgtgttataggatttctttctcttcttctgatgcttttggtattattttagtcttcgatctgacggagattggtattgctatggtaccaatgaattgcaggtaacatctgtcaaagaactgagtgggcagatttg

SEQ ID NO: 69253 - DNA, 484 bp, Prunus persica
  Intron number 3 from transcript ppa006533m (locus ppa00653 3m.g) derived from phytozome v7.0 (chr-ID scaffold_1; pos 34067899 to 34068382 reverse strand)
aaggtatgatgttgttccgtgcgaaaacagtttttgggtttaagggcatcatgtttttttttttttttttttcttccttttatcagattatttaacttcttgcaatgtgctgagaatcactaaaaaacacacactgtagaatcatggggcaggagggtccttgaactcaactcactatagatttattactgtcgcgccacggcaattgcacctatcaaagcggctaaaagaattatcgaaacgaattcaaacagtagaaaaaattcgttgataaatgaattccaatttgttgactaaaactattagccctatatttaagttttgagaacatgtagttacctctaattttgaataaaatgaaatattatgatgattgcatcagaaatatctaatttattatctctttgagaaagacttgctctgaggtgctacttgattttttgcgttttaaagggtagtgggagggccttctgctctggtgcag

SEQ ID NO: 69254 - DNA, 320 bp, Prunus persica
  Intron number 3 from transcript ppa005516m (locus ppa00551 6m.g) derived from phytozome v7.0 (chr-ID scaffold_6; pos 8005149 to 8005468)
cgcttttggagaccaggtttttctttttgggataagaaacaaactttcatttaaggaaaaaaatagtgaaaagaagagaggacataagacttgactataggccatagggcaccttgtcctctatttgtgatctttcttttgttccaaagaccgggttttcaatgattacataaaaccactacattgtctcaactgatgcttggttattgttatgtagattttaataggagttgatttttaaatatctactaggttcataattttcgtttgactttgtgattacagaaaaccccacctcctctatcttttccagagattaa

SEQ ID NO: 69255 - DNA, 491 bp, Prunus persica
  Intron number 3 from transcript ppa003631m (locus ppa00363 1m.g) derived from phytozome v7.0 (chr-ID scaffold_1; pos 10617407 to 10617897)
aaatcaaaagttcaatcattcaaaaaattaaaaaagcaaagtatttttctgttattcttgattgtacacctgatataagtcatcaagaacaaatgaccttgatattgagatgtgtggatgtttctacatatccaataaaagtagaagaattcttttttggaattcttacaagttgatgatacattaggagaatgactctttgaagaattacaaaatgtgttaaaagatcttaaatttaatattgatcatgtaagaggacaatgatatgataacggatccaatatgaacgagaaaaactaaggtgtacaaagaagactattagatataaatcctagagctttgtacacaccatatgcttgtcattgtcttaacttgacactttgtgatattgcagactcttgtaggaaagtatatgatttttttggtgtgatacaatatatttatactttgttttctcattccacaaagcgctgaaatttttttaaaagata

SEQ ID NO: 69256 - DNA, 960 bp, Prunus persica
  Intron number 1 from transcript ppa009130m (locus ppa00913 0m.g) derived from phytozome v7.0 (chr-ID scaffold_2; pos 25582489 to 25583448 reverse strand)
tcgagaacctggaggaccagctcgagtttttccatgtaagttcatggctttctagggcttatcttgttaatttccgtttgcttacttgaaaaccgtaggaaaatagaagaataagcgacgaaatgtttgattgcgtctagtcgtttgagctgtattaattatagaaattagacaagtggatatataaatgcttgcataaaataatggctcattcggatttcaatattttaaagatatttgttagcttttttggtggtggtgcgtgtaatttggttagtttctgtttggttgccgggaaaatgaaagagatgaaaaattagtaagcaaaattaatgtgtaatatatggtttatgcagttgcagtatctgaaattctgtactaattagctaagtgcttatgtagtatgaaaactgttcagcttgggttccttctttctataggatatagatttgtgcatagagcaataaaaagcagaacactagtgcagaggcaaatgtaattccaaatatgatcggtggacattagagacacgtaggtttgttaatggtttccatagagcaaacgagattatgataagtaagggattaaaaaaaatggtgatgaagattgctgaccattacgtggcttctctgttacattgtacatgagtaggaagttttcatgggacaaacgtgttgcattacctaaagagtgcttaaggtcaagtggttgaggattagtccttaacttcaattttgaaaaccatgatttgaagttatattgtgactttgttgcgtgttgctgacagttgcatcgctcaaaggacgaaatactctgtttctgcaactgctgcgtggttttgcttgtgaaactctctgtttggattgcactttgacattccgcatgttaccagctcaggtatacttatgtcaatttgttttcttgtctagactgtgcaggtgcagcagcgggctgagagag

SEQ ID NO: 69257 - DNA, 535 bp, Prunus persica
  Intron number 1 from transcript ppa003713m (locus ppa00371 3m.g) derived from phytozome v7.0 (chr-ID scaffold_5; pos 15486408 to 15486942 reverse strand)
gccttgagctggttcagttcattaaacatctcaaggtatgataatctgtttcctgcatcaaatatggattttggttcttgggtttgttttaaatggtaaacatatatctgggttggtgttgctttgaggattataggcaatttagggtgttgggttttcttatatctcttgatatctgtctgtgtgatgcaaaaagaatcgagctttctgcattccattatcaacgtttaggatgattgattgatgtccatgagattttatttctgtttaatttaatggatccatgttctcatcccatcgacttctggaaaatgtaatgcatttagattttaattcaagacatgctgcacattcatgtaatttttgataggggtggaatatctgtatctgatgatgtatgtttctgtagtaactttgatttctaccatctaactgaagagttttacaacatattttgtatgtcttattcataatggcctttctagtgataatttttgacaatttcgttttccctccttttatggcagatctgttc

SEQ ID NO: 69258 - DNA, 870 bp, Prunus persica
  Intron number 1 from transcript ppa005346m (locus ppa00534 6m.g) derived from phytozome v7.0 (chr-ID scaffold_5; pos 16472861 to 16473730 reverse strand)
tccctctctctaaagctcagatcacttccaagcaggtactccagattcttctcttgaatccactgtcgctatgtttactgcctctactggttaatttccatctttaattttatttgttaaatactatgctggtgattgatctgtcaatatcatgcttccatggtcaatatcttcattactttggatggcagtgttgatatatttctgggattttcatatttttatagggctttacatcaaacacaaatttgtaatcagatattgttttcgttatcatcctgatgtatttaattctcggtctgcttcagtttttagctgacccttctttttctgaggttgaaatcagtcggtctgctccattggggaatttgctggggttaacatgaataaagacttttgggtttgcaagattgcttttaattgttcgagtatttctgtgatttgagcatatatgtaggaattgtttcctaatttatggtttgtgattttgtacttctgatcgagtactcaaaaccgttttagctcatagtacttgttcttccgagctcaaaggcaaagcctttgtgcattatgctggcacttacagtgtgttcgtgtgagcttatctggctattggagcttcctagagtagtcatcattactttgcagattctcttgttacagatatgacaatctcaatgcattattggattttgtagtgattcgaatttgtttaaaaataaacttcaatgcatttgttttgtcaagaattattaaaaatgtactgcttttggctctcttgttgttattatgtttttctttgacatccagttggtttcattagtttgttcctctactaacattacaagatttgaacttccatagatagtc

SEQ ID NO: 69259 - DNA, 941 bp, Prunus persica
  Intron number 2 from transcript ppa1027229m (locus ppa1027 229m.g) derived from phytozome v7.0 (chr-ID scaffold_1; po s 32601477 to 32602417 reverse strand)
ctggtaactactgtataccatacatgctaattaatatatatgctatgctacctcttaataataatctttttattattcatttcatgatgctgaattttctttatatttcttttactgtttcatcattaccaaatttctattataccattagacatttttgttaatagctaagggccgtttagtttttattttttattttttatttttttgcgctatagtataaaggaaaaaaagggagaatgaaagtgaaaatcagagggaagatgagaggagaggatgagaggaaggtgtaacaaaagtgaaaacaaaaacaaaaactaaaaactaaaatctatttgaaattgttttcactttttttactcctccttctcatgatctcatcctatctctcaatttcatcattactcttatttttactctcatttttctccatattctaacaccaaaaattaaaatttaaaaaaaattaaaattaaaatagttataaaatgaggcctaaaacgttttcaatagagtttatagcttaaaatctttttataggtctgaatacttagctccaacaattttgatataaaaacaattgatagatttgtaaatttaccataacgattgattgcacctcataatggtagtcaacttcatgagtacaaacctacagctgtccatgcatgaccgaataaatgacactctgatatgtaaggtggcctgtcttaattcgggaagaaagactgccccacttttctgacgttaaaactcaaccatcctgacgctacctatattttcattaattgggtcttttacaaaattctataaattagttttaattaaacaaagattccattataatttataagaaaataaaggtagattaaaaagtaatattatcttaattttgtattcgcgcagtatcggagctgggagttgaagattccggccgaaac

SEQ ID NO: 69260 - DNA, 927 bp, Prunus persica
  Intron number 1 from transcript ppa011951m (locus ppa01195 1m.g) derived from phytozome v7.0 (chr-ID scaffold_1; pos 4857513 to 4858439 reverse strand)
ggtcgctcaggttcctctctctctctttctctgtgtctattctatgtatctatacattacatgggattttatttatttatttgataaccggaacctatacatatatgtgtttctatttactattgttgcctttttggagcatgttcattgtttctaagcagtggcctttgaagggaaattatgaaaatggggaaaagtttgagtatttgagaaattgagaatatagaaagaagtaattacatttattttgagtttcaagagaaagaatacaagaaaggaatggaattttgcttaagaaatttaatgggtatgatcaaaatttgttgaactctggaaatgggtaatgacatatggcatctacacaagttaacataacacagtgtggttggttggagttgggtagacttttattgatttgggaaatgagagctcttgtacttgttgtttttgtaggaattagagttgaagttaaactatcttaccaaaagagaaaaaaaagtgtaaactataggctaaaggtcccctgctttgtttaagagtccagaaacccaatttttgtttaatagttttggatagcagttcatctctctctgtctctctcccagatatgcttgtttttacttcttgttatgaacaaaaaacacacacacacacaatattagtataaaaaatctttccggcatcaccccagttcgaggactcacagaaatggctcggatggtgccacaatcgaagaaatgtatgatcattttgaaacaaggtttggaaaaatgtcttgaagaaatgggaggacaagttgcttctttcaaattatttatgctgtcaatttgccttggattgttatccaatctatacaaatgatctgatatatgagtttatttgttgtactcaggaatacagagacaggttaacagttgttaagattga

SEQ ID NO: 69261 - DNA, 936 bp, Prunus persica
  Intron number 1 from transcript ppa005884m (locus ppa00588 4m.g) derived from phytozome v7.0 (chr-ID scaffold_1; pos 37949303 to 37950238 reverse strand)
acaccttcttctccctctcactctgcttcaatctggtactctctctctctctctctctctctctctctccatatatgtataattgtatatgcgtaagcagattgggaatcaataatttatgtgaaaaatggtttttgtttttgggtttaggtttcgaatttgaaagtgggttgttgtgttttcgattctttgagtgttgggttgttcttgaagaataattagcatatttgaattttaggatttcgattggtatatattattgaaatggtattaatcaactgttgaattgaaggcacagtttacccattgggaaattcttgaacgttatgctatagagaaagaaagggtgaactgatacctgctgtttggttgctgagaaaatctaggaaaagagtagggagttgaactgtgagtagaattctgttgttgaacaataatattttttattattttaaaattgatggattgtgccctttggaacctccaatatttgatgcttaatgcccagtatgttagttctattatagtttcatatttttcaagtgaccaaacaaataattttttacttgcaccattgggtagattttgatctatgtgactgtcaatattacctctgctttctcagtttgcatgactaatctaatattgataatactttagtatctacatcatttattttgaaatttgttctaatactttagtgttttcaaaattgatggttttcttttagcatattccctgattcgagttttttcttgattgtttccactggttgaactaacaaagtccttggattcttattttcccattgtacctcttataatttttctatcaaaagcaaaatgttgctttgagaatatgactaatacaattctgattttaatattttgctcttgaacaggattgatattgttctcgtggtgccacataatctat

SEQ ID NO: 69262 - DNA, 632 bp, Prunus persica
  Intron number 1 from transcript ppa011852m (locus ppa01185 2m.g) derived from phytozome v7.0 (chr-ID scaffold_2; pos 26433259 to 26433890 reverse strand)
agagtactccctctctccctctctctctctgttttttttttctttttctttttttttttcgtaccaattttgtagcattttcattattttcccttttctgtggtttgacaattgtagctgccagggatatgtagggctcatgtcgtaatggtttctttcttgcctttcttttagcttttactggttaaaattttcaattgctcttttgaatattgtgatatataggaggccggacttcatattgtcattataatcatatgcatatttaatatcgttttctgaatttgctcacctctctcttgcctctttcgtttttttttactctctttcattatcagttattgggggacagtgtaattccagcatatttaccatttgattctcaaattctcagtgattatataatattgtatgatcacattaataccttaccctccccaataagttttataggtttctacttacctgtaatggaaaagtgatggaaaagtggcttattcattaaattctaaatacttgacttcttgcttcttctttttgttcttctgttgctgacctttaatttaagagcatgatatttacttcactttccttatttgccattttcatttgcggtggtgccataggttgta

SEQ ID NO: 69263 - DNA, 898 bp, Prunus persica
  Intron number 1 from transcript ppa013494m (locus ppa01349 4m.g) derived from phytozome v7.0 (chr-ID scaffold_4; pos 6463310 to 6464207 reverse strand)
ggtatgctccaatttcccttttgtgctacattcacgttcccatgtgctgtgttttacttaatttgttggaaattatgtatttagtccctatttgttgctagttttgtttgaatttgtatacacccacttggtttttgtcatgccttttgatgattgaaaacggttatacatgttttgtgatggattattctctttacaaagtatattattggagttattgtgaaaaatgatcttttggtcgtaaaaataactagagtaggtgtgtatttcagaaagatactagtcaagaagtgagttgtgtacccgggattctcgttgtttaccggcgtaaacactatctagaaggttttagtatggatttgatttcagcttaaagcatgatccgtatgcttggtttatacaggtagtctgaatttagagttgattatgtaaaatggccaagtacacaaacaaacaagcgaacaaacaaatagaattagatgggctggaggccttgtttcagtaatttatctccaaacgacatagatttttagtttctgtacctgatgttttcataaaatgtcttccctattgttaagcaagatataagagtagtcatttggctggcgggaatcagtggcaccataggtttgttggataataaataatatattatgttgaatatacatttggtgcttttcattcatgtttaggttgtattctggcattcatattcataattgcaattacatgatgcctgccttttggatgattatataatagaggcaagaatgtgatttacgaaatttgagttttcttaatgacctgtagcattttcttgccaatcagcatcaattaatttatctgttggccatgttcaagtttactgatctggatgatgtcttttttcctttaatag

SEQ ID NO: 69264 - DNA, 619 bp, Prunus persica
  Intron number 2 from transcript ppa012515m (locus ppa01251 5m.g) derived from phytozome v7.0 (chr-ID scaffold_7; pos 17406681 to 17407299 reverse strand)
ccggtgttaggtaatttggttttccctccatttttggtttttgtttaagttttgtatggatgaagctatgtttttttttgtgcgttggaagagaattatgttttgtctgagtaattgggtatttgaataacttgttggcattgttatgggatttgattaaggttttagactggcagaaatacgtggaattttctaggcaatgtgaagagaactgacctataaatgaaaattagtctacaatgtttgttgggttttgatacaattggattggatgagtgtattaatgggaaggaaatgtgatcacccttcttaatgtttcttagtgactcttacagaagaaagacaaaatcttttccatgttggtagagtgataatccctagtcttcctgtgtttgctgccatgactgttgttccacccagtttttaattggatgtttccccgaagggttttcgagatttattctcccgattttaggtgccgtgtttttttggttcttggctctgcaggcattacatttggattgctccttgttttcttcttgtgcaattgatcttttttcttttctgtgataggatgtttagtatgttcctgatgtaataggtttattccgcagggcga

SEQ ID NO: 69265 - DNA, 336 bp, Prunus persica
  Intron number 1 from transcript ppa008025m (locus ppa00802 5m.g) derived from phytozome v7.0 (chr-ID scaffold_6; pos 27641921 to 27642256 reverse strand)
ggttaaattgggcggtcacgtcaaggacttgaggggtaaatctcacattccaatttcatctccttttattccaatttcagctttggctgtgctcaaatcagatattttcaagatcccaccaccttcataatttaagaaaagttgacttgttgggagaaaaaacaatcaaaagtttgtaaagtgtgattgaattttcttgagctggaattgtagcagagttgaccctcagaccatgttatattttgacacggccagttatgtccactgaagaatgacatattattattatatgtattttcagttgccagaattgcccggagattataacacagcagc

SEQ ID NO: 69266 - DNA, 441 bp, Prunus persica
  Intron number 1 from transcript ppa003484m (locus ppa00348 4m.g) derived from phytozome v7.0 (chr-ID scaffold_6; pos 27791050 to 27791490)
tcgtgctgctactatcatttctcctcgttacccatgtaaatatgcttatacttttgtgtgtatttatttatttttgtttttttgcaattttctacggttttagtttcgtattttcttcatttgtttctgtatatcaatcgttcacgttggtccgttattggggtttttattattattttgttttgggattctagggctgttatttttattggaagaatgttcttgttcttcgtatttttattaatcatgacgtgctggctattatattgtgagagatactttcactaatctatggttctgtgacgagtttttcgattttagtgtttttctctattctctttttgctgtcagctctatttgggttgtttcatattttttttcttgaagattctttctctcttttatatcttgatttatgtttaataatgcagaaaactattt

SEQ ID NO: 69267 - DNA, 377 bp, Prunus persica
  Intron number 1 from transcript ppa006830m (locus ppa00683 0m.g) derived from phytozome v7.0 (chr-ID scaffold_6; pos 27776582 to 27776958 reverse strand)
aaaaacgcggtgtccgctccaccgtttttgacacggttggtcactttttttccttcaaattattagctttctgtacttggtaacgattaatttaatgtgggttttctgaattttatacattcagtttgtctggatttttatatattttacttttgatattttactctcattttcatgggtggataagatattgcgaaaaagcttacccctttactatgctagttagtatttaaagagagagaaaaaatcttgcggagaacccacaatcaaattaatgcatgcttagttatgattgccaaattatgattttgaaagttggatttgtcttccaatctttccagtgccacataacagtgatttgctatcatagggtgttc

SEQ ID NO: 69268 - DNA, 735 bp, Prunus persica
  Intron number 4 from transcript ppa015578m (locus ppa01557 8m.g) derived from phytozome v7.0 (chr-ID scaffold_6; pos 19661349 to 19662083)
tgcaacgaatttgattttgggaagccattggagaggtaatttctaagcgggacgcgtattgattggtttagcattcaaagagtctccaaatcttgttgcccttcatgaccattgcgccacattttaatctcaatttccaaggtatgctactgttgtcttatgttttcctgcctagagatatacttataggatgtgacatatctggttagtaaaattatatgcatgccaattggtttttcacaatgtcaaactagctttgttcattgtggagacgaattttcagtgattctatgtcatgtttatgcgtgtgtacgtgtattttatggtgggaccagtacagatttcatgaaattgaatgtctttggtattcatttttgcagcttgtgcgaggaaatgaaacaattacatttaaccttttatttctaagaactgtttataacctctttgatcttaaaaaatcaaatgagattgcggccggatgttgtaattctcttagtttcttttctgtttttttaatggttcttgtatattttaagaaaatctgaatttgagtcctcaagagttgtcattaagactccactacttggcgtgtaatgaaactaataatccataaggtatttttggtggccatggtcatatggtttgttttcctttttttcttccttttcgtctctttttctctttttaagtttgatcatacattatctccttcttttggctgaaaatacagaactg

SEQ ID NO: 69269 - DNA, 324 bp, Prunus persica
  Intron number 1 from transcript ppa022336m (locus ppa02233 6m.g) derived from phytozome v7.0 (chr-ID scaffold_1; pos 44625791 to 44626114)
ggtaaaatcattaatttccttggccatttcctgctctctctttgattatgtttttttgctgaccgtgttttagtttgttgaagcctctatttttgaaaatgtcattttaaaccccaaaaaaaaaaaaaaaaaaaaaaacgaagcagctgaagttgttaggttgtgggcaacattgtccaatgtcctaataagatgaacaactgtgacatgagtgatatttgtagtagacagaatctattgtcataaggaataagttactgattcagtttatcttctagtttcataatgagtcttagtttgttcttctgagtttcattaacaggc

SEQ ID NO: 69270 - DNA, 555 bp, Prunus persica
  Intron number 1 from transcript ppa021986m (locus ppa02198 6m.g) derived from phytozome v7.0 (chr-ID scaffold_1; pos 40741782 to 40742336)
gtcaagaacatcccttatcagtttgggtaaaacccccccctctctctctctgtgcagcatttgggtggtttggcgtttaaacttcaaaggataaatttacaaactttgttaaatatttggtccagatatcaaatattttagctggttaaatttatgttctgggttttctgcaacttttgacttctcaaagctcatagcgagtaagaggaaattagcaccttttttttgggtttctcttcattcaaagtttctaccttttgtcccaaaaaaacctttttctgtcaataacgtgaactgaaacaagtacatgtgttttgtttttgcccatgtgtttgatattcatcaacaacgcatatgtaaactattggaacattgaatacatgaaatatgatcgtccaccatttgcctgaaaaattgttcatccatatgcaatttatttatttatttatttatttattttcactgttatgttaacatgcttactgatctgctcagccctattattctaatatttattcaggaggaatactttactggaaatactgagctggcatt

SEQ ID NO: 69271 - DNA, 542 bp, Prunus persica
  Intron number 1 from transcript ppa013601m (locus ppa01360 1m.g) derived from phytozome v7.0 (chr-ID scaffold_3; pos 18251306 to 18251847)
gcctgcctaattcgaaatcataatcatctgatcaggtaatttgccctttgactccgaccatttctagggatttgttgatgtctctgttctagggttttgatggttaattcgcaatttttaataattctcatccaaatcttagggctttttttgtatacaagtttgagatcttgtttattctcgaagggaaaccgttatttgttattcaggagatctacttataaacttccagattcagctgaaaaaggagacctttttttttttttttttctctcaaattatctaaatatatgagattttcagttaagggctaaagtttttgggtccttaatgtgaaaaagaatacttcttttagatgggttctgcatttactaccctagggacagttgacataaagattagatgggtacttcagttttttaaacgatgtgattttgctatgtaatcttcttgagatatttttgtcagggagtatgctgattttgatttttcttttatgtgatccaggtctaagcattctggttgcaaggccctattagtac

SEQ ID NO: 69272 - DNA, 228 bp, Prunus persica
  Intron number 1 from transcript ppa012560m (locus ppa01256 0m.g) derived from phytozome v7.0 (chr-ID scaffold_6; pos 23527356 to 23527583 reverse strand)
gtctcgtacccaactctgggcccaatctggttctcgtaagttcataaagtctcatcctttttatgtatatatagctaaagtttaaagctttaaatcaaatcaaatatcaacttgatctgggttttttttatagctgaagattaaagcttgaaatcaagtttgatctgggttttcttttcttttctttttgcagctctgattccattgacagagttcagagagcccgag

SEQ ID NO: 69273 - DNA, 842 bp, Prunus persica
  Intron number 2 from transcript ppa000089m (locus ppa00008 9m.g) derived from phytozome v7.0 (chr-ID scaffold_1; pos 7684614 to 7685455 reverse strand)
ttgaaacaccagaggactcgcaagtcaccctcaaggtatgaatgaatttggttttttcagaaggaaaaaaactcagttaaatttgcatataatctcatcgtatgcggttgtttttttccatacatgcatggtacaattccaaaatctctctctctctctctctctctctctctctctctctctctctctctctctctctctctctctctctcaaagacatgagtagtagcaatgaaattcattttccatattcttccacatatctgattcggatcaaaattagtcaagagatattgcataagtagcaacgacattgtggttgctgctaatataatcatatatacccgcaatactcatctaatataatgcatcaacttgcttgtaattttttttttttaatttgttattctagtaatcgaactaatgacaaatattctctaatgagaatgagataacgagatgcaaggggcttgtagaacccgaggttttagttttgattcatctctttcttaatatcgcttgaataaataaaaaaaatctaatgaaattgaatttagaatatgaatcattttatacgatcaaaatgtgcatttaagattaacactcgagtttgaaaatagaaaacattactttcaaatttgaatttgttaattttaatcacaataactcatttgatgataaatatattatttcatgtatgtttatgttatgagactgaatttaatttattaattaaaatgtgcgattcagattcatattgctcttaatttaataatagtaatcgtaatggtgaatgagaacttctcttgctatatagggtatctctacggacaggatcctag

SEQ ID NO: 69274 - DNA, 1021 bp, Prunus persica
  Intron number 1 from transcript ppa001566m (locus ppa00156 6m.g) derived from phytozome v7.0 (chr-ID scaffold_1; pos 39983842 to 39984862 reverse strand)
ggtgcgttcgaatgaaaacgatctaagccgactcaacacaaatcaagtggattctagacatccccaaaacatcatcagtaagtaaggaagctacccaaataggagcagtatcataattacacagacccatatttttttcttcttttcttttcttcctttttccttctttcttctctctgtttctggtttcattattttttgcttttctttttttctttggaactactacgaattggactcagatggcgaaaagagatggttttggattctgctagttgctggggtgcaaagagagatcgttctgagaagaaatccagggtagagcgatgagcgttgggtttcattgattggatctgtggtggggttttgattcaagcgataaggaagtcggactcgcgtgttcaaaatagcgagcgtcctattttgcgaacccaattttgggctcactatattagctgtgcgagtccgggcttttttaaactattggactatataatctcatttaagataatcccctcccttaccaaacatgggtttcaagtattgtttaatccaatccagtccagtgaggcatagtgaagcataccaaacatggccgaacggttttgttgaactgaaattactaattcagtgcatgaacgccacgcgttgcgagcactaacatgaaattttatcgaaactactcatttagtgcatgaatgacacgcgcggtaagaatataaaaaaagaaaaaagaaagaagcgaaaaagcaaaaagaaaagaaaaaaaaggaggaaaaaacctgaaaactagaatttgctcagcaaagcaaaacacacagttgaaaaacagagaagggaagccctacacactctctctccctctctgtctcactctctctctgtcccttgtctgtctgtgtgtgtctctctgcctttgattctatttttgcgccaatcaaagtcccagcaagtctccaattccttctctctcctaaaaatgccagcttctccttcattcccttcaggtaactcaaaccta

SEQ ID NO: 69275 - DNA, 581 bp, Prunus persica
  Intron number 1 from transcript ppa011371m (locus ppa01137 1m.g) derived from phytozome v7.0 (chr-ID scaffold_4; pos 8412293 to 8412873)
ggtcaaggttctgggctgacttcattgataagaaggtaattagcttgtctaagttgtctcttgccttttgttctatatataaagctgctatatatactgattgcaattcaactccagaaaaattatagaaaattttgaaaatttgaagttttcccaggttaaaatttacttatattagaccaaattgaaaggatttacataaatgagaaactgttttgtcgtgggtttttcaatgggtcactctgttccacaccagaccttgaaactatggtatgctcaattacaacatgatcttgcttgctatctgggaagattgtataaaaaaataaaataagtccacttcttaaaaatatcttattaattctgtgtgtctggataaatgagtggaatttttttgaaaatagaaactgattagtgttagaggagcaacaagccttcaaccttggcaaaaacagagttttaatttcaagttttggaatggggactagaaaaaacagtttaatccaattgaataatttctaggagttcattttgatgtaatgtttgcaaaaattgcagctatacgttgcttcgaggaaaat

SEQ ID NO: 69276 - DNA, 875 bp, Prunus persica
  Intron number 1 from transcript ppa004850m (locus ppa00485 0m.g) derived from phytozome v7.0 (chr-ID scaffold_6; pos 21952051 to 21952925 reverse strand)
gctcctccttcttcaacctctggtttcagctctaggtctgtttcactcactctttgatctatatcttcatgccttttgtttgaatttattcattgatctaatgcttcatgttaaattccgcactttttttaagttgggtggtcttatttgttgcgccaaatttgaaagatccttgctttgtggttgtttagggttagcagtgttctgggctttagtgaaaattaaactatatgttgcattcattgcgcttgtattcttcaatggttccgtaggtagccattgtactagagagagtacatggtggttttgtatttgtcaattttgcattctgggctttaactagattgcagcatagccatatcaatcaaagaatcaatgtttatacatgggatgggaacgaaccttgtactatgtgtagcccttttagaagggtattgctctgtttgtttgtgatcctcttttggcccgttttaggttgataagaagttttgtatgtaaatgagtgcagcaccctaaattaagtatactatggttgaataagggttagagcgacatgtttaacagtaggaatattcacttttaagaattattttttttcacataatggaaatggtaattatattggtggagaaaaaagaaattaactccccgattctacagttttagtagaaaatcgggaaaatggaagtctagaggaatggtgtcttaataagtatacaatattgattcgtatggagttggcatgttagtttgaatattctgtgactacacagatgccaagcctgctatgttttttgtttgttaagtttctatacgtggcttggtacgtacatgtgttgataatggcttacataacgtgaatctcgcatgtgcag

SEQ ID NO: 69277 - DNA, 956 bp, Prunus persica
  Intron number 1 from transcript ppa012132m (locus ppa01213 2m.g) derived from phytozome v7.0 (chr-ID scaffold_7; pos 21015384 to 21016339 reverse strand)
gttcggcctcggaatctttcactctggtattgaaggtgagaattctttcctttttgttctttctttcgttctgctatgtgttcaggcgatctgggtacggttgcattgtgttatatgctgtgctttcttttttctttttagttactttgtcgattcgtttctttccttttctgggcattccgtatattttggattggattgtatatatttattctaaagattggcactttcaagcttaaatggatacgaaggatgtgggatttgtgggcttgcatgtttcctgtttgcagttttgaagtttacgtttttgtttatgtatatggtgtttaaagctggtaggtctacatctggttatgtttcactgatttcagacccaaaaatgaattaagaatttagttattgaaaaggtatgaatgtgcttgcatctaatgctaagttattattgtactacgtcatatagtagttagatatgtagcagcaagaattgaaaatgatattgggatgtagtctagactcatgtcgttctataccattttgtttgcagttatgctgatctagttttacaaagtgcattaaattttccatatgcttttttttatttgtttacgtttggttatgaaggaaaagatctgccaattggaaagtactggatatgtgggtgggtgggttgggttggctgtgggtgtgtatctctgtattgagagctctcgatgtgggagatgattttctggttgattaactaaaagttactaactttgaagaaataacaatttctcgtgatataatgttattataagcttttttgagagtagtttttacaaaacaaactgaaatcctctgttctgaaaattgctctgactgatcactgacttcttttaattctcctttatttcctttattaaaaaaggagaagaatctgtttaacaatatcatctttctcttgtatgtaacagtcc

SEQ ID NO: 69278 - DNA, 790 bp, Prunus persica
  Intron number 1 from transcript ppa009770m (locus ppa00977 0m.g) derived from phytozome v7.0 (chr-ID scaffold_8; pos 246741 to 247530 reverse strand)
tcctgcccaaggcttctattggagagtttcttcaggtaaatctgtggcataaaccttttttcgatctgtttggttgatgagaaaattgttcaaagagagagcatttttctcttacaagtccttccaaagtcagaccagttgttggaggggacttgaatttttcttcccttcttactatttatcgataccaaacagaactagaccagtcgttgaccttcaattttcaatatattgcccctagatctttgtgtttttctgaagctgtgtagttaggtcaatctaaaattttgattttctctctagtatttggtataacttgtggtccctttctttcattgattacactgaacgtttgatttcgtgggtctcatagcatgtattttttgggttttgcgatgtcgttatttaattagaaactttcaatttcctgacttctaacttgtgctgaagcctgaaggtaatgactgatgaatttttgtgggtgggtttgttaggaatcttgttgtattttcattgattgtctatttctctttgttctgattacagattagggtcctgagagtagtttcttttcttgctcttgtaggtggtcctgaaaagccaaaaccaatgcatggtggacttacattcttgactttgagtacttagctgaagaactgctcttgtatttcttggacgcttttgattttgtatctgagttgtttacataattacatttcgtttggtactgacgatgcttggcactgaggttcaccagtagaattggttgtagactacaattgaatataat

SEQ ID NO: 69279 - DNA, 747 bp, Prunus persica
  Intron number 1 from transcript ppa019683m (locus ppa01968 3m.g) derived from phytozome v7.0 (chr-ID scaffold_1; pos 12246488 to 12247234)
ttcacttagaccccttgacgtttggcattattacggtcagacaccccagatttgatttattccacttacacccctatttttaatagatgttaactcacactaaaaataaaagaccaagcctgtcatttgaatagtaaaaacttaaatataagattaaaactaaagaaaaaaataaaattaaagccaagtcatcccaaagccaccaacccaccaacccagcagccagagccaccaacacgtctctcttccacggccatcaaggcacaccttgagctatttaggcccaaccaaccttaaattccctcaatgaatctagacgaacaaaaacgaagaataccccaatgccagctaccaatccaatcaagaacctcattagaagaaaaaaaaacaaaaaacaaaaaacaaaaaaaagcaaacaaactccaaaaatcgtaaaaccctagctaccaatcaattctataaaataaaataaaataagtgaaactttttgcccaaaacatacaacccaagctacaaatccaattcagtctccttttatcagataaaattccaagagttttaggtgtttgttaaaacaagtaatataggggtctaaatgaaatgctccatataattatagtcaaatttcgattaaactacctaattgtttacttcttcttttttgtcattagtaaatttagatatacatatcctaagtcatgtgtatcaacaggttttgggaggcatacttcgttctaaaaatagtac

SEQ ID NO: 69280 - DNA, 694 bp, Prunus persica
  Intron number 1 from transcript ppa001649m (locus ppa00164 9m.g) derived from phytozome v7.0 (chr-ID scaffold_2; pos 26389259 to 26389952 reverse strand)
ccagtgtgtatgtctcatagtccttccctaaatttttcttaatggtggcttttgaacccatttcatgttactgtgggcgtttttggttgtgattggatatttatgtagaaacgagaaaaataattactttactgagtgtcttctccgttttattgtatacatgagctaaaatagcgcttttgctgttttacttgaagaaatcacaaaagcttaggacaacatgttggagcagaggtagaaacccataccagaaacttactgcaactcagtggtcaaactcgtttatagggttttagcatcaacggaaattttaaatcctagcactgaaaccccattatatcacgttttgctatgccattttaatcaatcaagtttcattgtacatacaattggttggcacctaagaactatttagcagaatcatggttcaggccttctgcccctttgccttatccacctagtggcacaaaaatttagaaattatgtaccatggaatttattaaaatgttattataagagggtcgtcttctcatttcaaactggagagttgtaacgaagtataactcccattgttcatacttactgattcttctacttacatgcctactttgattttgccaactattttagtaatgatattccgtggtatttcttctcagtgattggtacaatttggaaaaatccaagcgtgtta

SEQ ID NO: 69281 - DNA, 938 bp, Prunus persica
  Intron number 2 from transcript ppa003365m (locus ppa00336 5m.g) derived from phytozome v7.0 (chr-ID scaffold_6; pos 13375301 to 13376238)
cttccagcactgggactacccaaaggttaggatttgatcctgtacattagttctatttctttttaataaattccgtttaatttatttatcatttcttgttttgttcggtacgtttatgatattattctttgcagattcggaatgaaaattcaaaatcatttctattgtttacttattactattgtatcatacgtagctaaacaatgtgtttggcatagtttgtctgtttaatatagtgggtcctgcttatgtaggctgatcatgtttattctaggtgagtatgaaattttgaaataccagtaatttcgaggaagcccaaaattggttcttggtgcataagctaatccactctgtcatctttccttggctgaaaggaatttagtttttctgttttttgtgttttttgggtatttcaatgggcttagaaacacaaattttcttacaatgaaaaaaacacactagaggcagcatgaacaagaaatccatcagacaactgaaacgtaagccagaagacaaaagcccataaagcacctagtggaaaagtgttccccaatcaagtagaattacactgaagggaatgctcttgaaatattttttctgagatgaccaaataatgtcataattttcgagcatgagtttatctaaggctgtgaaaaatgatatcataattttcactttaccaatagtgaaatctaggtgctctcttttctatggttatatagtgaaataaaatgaatatcggagggtgttgttttagttttgttttgtttaattttctttttaaatctgttttgctctcccttgtctttcaaattgcaaattcacattttgaaaattttgattgtttatcgcctcactttattcaatggaagcttggggctattttattttcacttagaaatgtgacatactgaataatatttttcagagaagggtta

SEQ ID NO: 69282 - DNA, 488 bp, Prunus persica
  Intron number 1 from transcript ppa006571m (locus ppa00657 1m.g) derived from phytozome v7.0 (chr-ID scaffold_2; pos 26384834 to 26385321 reverse strand)
gagagagagaaagagagagaaagggacctgaactggtgagttcgttttccttcataccgtaaacgaaacgagaatgccatgtttcttgaaaacacttttataatgaaattccattgcgattaaagggttagcaggttctcgattatttcgggttttcaaaagtaaattttatttcttgaaccgtgaataccatttatcatacggcatgttaggccctcggtggtaaacattatcactttcttctttcggcagtttgatagaaaacaattgattgaaaaaagaggaacttcataaattgtgatttgtttaacttaaaaactttttttctttggcttagtatcacagcaagattctttcttttctgttgtttatgtttgttttcagaataataatgcttctgcaatctgcatactcggatttatggctttggtttgattaatgcaagaaaaaattcatatatatgtggcaggaattgtaatagattatag

SEQ ID NO: 69283 - DNA, 628 bp, Prunus persica
  Intron number 2 from transcript ppa007921m (locus ppa00792 1m.g) derived from phytozome v7.0 (chr-ID scaffold_8; pos 15282987 to 15283614)
cgtggtaagtatttttttgggattggggtttgtggtcaattttgtattgtaatgtttaggctgcatggtttggttgttttgttgatttgattataatcacagtgaaagtattcttctctatattcatagggctgaattggacttatcaataattatggcgctggatggattgaacttaagttgagttatgcatgagcatttgcattttacatttgtgcatatacatacaagtaacttgtgtagggagagagaggggagagagaggagagagagatgaacataaattcatgagaaaagcaaatgataacatacaatatattaatatctaatagatgtatgggttcaaaattttagaaacttttacttgcatgagaatataaaattgtttgacccttttgtgcccacttaagtacttaatatcttttcagttttaggttggtgtggaaggcctaggtatgacgtagcagacccttggccttggctcaagttctagggatggggggttgttgccagttttcttagtttctaacaacgaatattataaagaattggaatttatggctcttttagggcctgatctgtctttatgatttcttgtaggttcgtacttactcagagtgggtaatag

SEQ ID NO: 69284 - DNA, 459 bp, Prunus persica
  Intron number 1 from transcript ppb018217m (locus ppb01821 7m.g) derived from phytozome v7.0 (chr-ID scaffold_1; pos 5642480 to 5642938)
cagggacaaacgtgccttaaaggtaagagttcaaggtactaaatcaaaattaatccatatattaatgtaggaaccaatatagaaacaatttttaattggattgtaactaatgacacacgttgaatttggaaagatctccaaatggatgtaggaattaattgggaaacttttttaaaatttaacaataaattcatatttaacatacctaattggtttatttaataaataaattatttttttttaataaattacacgtgattaattatctattataatattgttttgtaacccatatatatattcttagaaccgcattgtagtattcaaaaatgagtccctcaaaattcattgtgacccttctttttcttccaacaataacactagttttggcacacacaaattttactgataaaactgaaggcatactcgaatgtttggactcgaacacgttcacaggaa

SEQ ID NO: 69285 - DNA, 590 bp, Prunus persica
  Intron number 2 from transcript ppa006517m (locus ppa00651 7m.g) derived from phytozome v7.0 (chr-ID scaffold_3; pos 3514165 to 3514754)
ctgcgtcgtttcagatcgcaatttttgcttaccgggttagatctcttgctctcactaagctcttctgtaacaattttcgtttgggcagtttttgttttagttctaagatcattgtatgaatctgcgtaaacaagaatttttaatttttaatcaattttgtgcgtctaatctttgctctaatcgattagagtatctttgtattgttgtttatttttatctcaattcacagcataattttattgtgtaaaaatctgggatttttcatttatgagatcgcactgctgatacaaactgattatattgcgtctggttatttggttgtttgtgttccagtattgttaatcacatacgtaaacgcaagactcattgttcctttctacattgtattatattttttctccaatgtggtcagcaactaaacagatgggtttcagagaaaaacaaaaaattaaaatttcataaccagattatttgggatttcctggagtaacccattataatttagaagattttattttgttttgatctcattttgggctaccttattgatctacaatgtttgacacagtatatacatcatagtgtgtgaa

SEQ ID NO: 69286 - DNA, 971 bp, Prunus persica
  Intron number 1 from transcript ppa003863m (locus ppa00386 3m.g) derived from phytozome v7.0 (chr-ID scaffold_7; pos 18103504 to 18104474)
gatcttaaaggacgatcaaaccgtccaaagctgtactatctatttctgattttttcaccacattaaacaatttcgtgtatgtttgtattttggtgtgtgttttgtggtacagaattgagatgggttttcatttcactgctgtgattgaatcaatgtgttctctgatccatttgtgttatgttttctttccactatagatgcattttcaagttacttagggtgctagttcacattacattgtggcagaggcttggtgatatagttgaagttcaatcttcatccaatgtgtaattatggattatacagataccagaatgtgtaatgttgggtttgctccttaggtaatcgacttgaaccctttgatattatggttgagagaattagagaaagcaggactaaaaacttgaataatagggctggtgtcactaggagcagagaactttcctcatctcacacgcatagaatctggttgcatctcttttccccaaaaggcttttgactatgaagctttgctctgaagttaccgggctataatttttaatttttttttttgaattcttttagaattcttttttcttattgataggatgccagaatctcatttaaagaataatttctgggaaccttgcttgttttatttgtctttgtagttgctggtagcgttgcctggggtgcatgctctgaaattttttgtttagacatttgacaattcccagcgaagaattctttgtgtcatgtagaagacaacaatttaggcttaaattatttggtaagtgaagcttaagatttataatggagcagtactggttacattttgcagactttaaagatgttctgttattaagataagtcttgcttaactttaaaaaaaaaatagaaaaaagaaaaaagaaaaagtcttgcttaactgtggcttctgttctttggtatcaataggtttggaggcagatcacactgttcacttggttcgt

SEQ ID NO: 69287 - DNA, 339 bp, Prunus persica
  Intron number 3 from transcript ppa003763m (locus ppa00376 3m.g) derived from phytozome v7.0 (chr-ID scaffold_4; pos 8212400 to 8212738)
tcgtgcttcctcgacaacaacaagacttgcagacggtgtggattcgtttctcaatttctcttgcatttgaatttcgatattctaatgttatagtaaggaaacatgaaaagctccacaactcattatagttatgtgaaaatttagctgcagaatcatggaataagaataagatgaaaattgttgcagtatagttacagtttttttaagttagtgccataatattaataagattgtgaatcagcagagcaaaaggaaaatcagaagagtgaaattcatataactgcatcatataatttccttatggtacttttgcttccctcatggcaggtattacctggc

SEQ ID NO: 69288 - DNA, 1036 bp, Prunus persica
  Intron number 2 from transcript ppa004649m (locus ppa00464 9m.g) derived from phytozome v7.0 (chr-ID scaffold_8; pos 20113101 to 20114136 reverse strand)
tttctccctctgaggaatacgacgacgtcgttaaggtcttcttcttcttcctctctgtttcttcagagtcctagccttattttaatggtattttgtttaaatttccacaactcttgtccaagaaggaaaacaaacaaggagaccaatgtgacgatacccctcagctttctctgttttcctgtgtcacccacacaccatctgatgatacatctctgtccttttactccgtaatctttgtgttattttattgcattaatgttttataggcacagaaaaacgcaggagatgcttttctcttttttttcttttctctcctttcaagatagaagaaacttttattatttccttaaaaatctgtttcggatgtcttatcaacccagccttattttcttcaagtcaaaataactaaaccaaaatagaaaatgaattaaaaaagaaaagggtagggacaaaacatggatgccagttagcttggcaccagtctaggctctgcctagagctcagacatcaagaatcaagatgagctgacagcagctgagcatcaaattgggtctcttgaaatgaaaagaagggtggagtgtaaaatagaccaaaccagagatatgcttaagttggtaacttcagctcttgccttgtcttgtttctctgcacctttgcttgttttggtaatttgctgcttgtaagcaaccgggcactgattctaagcttgcagagctcatcactacatcccaactaacctcaccgttcagcccaaaacacaaaaaaactaaaacaaatagagcatgatatttgatctgccaagttcgtggtgcttttgaatgatcaactccttctcaaattcatggattctttttatggaaaattttctcctaacatgtcgtgttgttacaactcaatttgtaccattaatcaggtagaattttctttaaattataacataagttttgtaaatacccttttttttcgcttgatcacgatggagttgtgtttgtgaaacgcagtactttcgaacccacaacagcatccacaacctatt

SEQ ID NO: 69289 - DNA, 894 bp, Prunus persica
  Intron number 1 from transcript ppa001198m (locus ppa00119 8m.g) derived from phytozome v7.0 (chr-ID scaffold_3; pos 13773083 to 13773976 reverse strand)
cccgaacgaggccgttcagcgcctcctctctttaggtttccacgccaccacctttttatttgtctgttttatttaaaattaaaaaagattttgatgcttttgttttgcgaaaggaatgaaacttttttagtttttatttaggttttttttgtgtgtttggatgttgagaaacattaggaggagataggaaagttcaaagctttgaatgtcgtgggccttgtggcacagccgttataggtattggaggattttttattttttttattttttatatagtgtgcctatggactttttaccaaggaaaaatctgttttggctttagaatatgtttcctgtgaaattttggatttatttaaaattttgactcgtaacctggagattttgggagattcactctgttctattcgccttattctttagattttcgaccaaattttcaaacgcaaatgaaaattgtgatgttttgttgtgtagtcctagaggtctgggtacttcatccaagtgatgcattaggaaaaatttaattctgtattctaatacttacgaatgcctatatgtagaatttgaaggtaatttttgaaaatttaattatgtattctaatacttaatgtatgtattcaaagcactttgtaggttgttgctcattcaatattgatttattaaagctattttttcaaagcacttactagtactaatcatcaatatatgctattttttcttttacataaaatgtcttccttgctgttctctttagtgcattgagtttaaaagtatctattcaacggaattttcttccgctacctttggatctaattaatattcaaagtcatcattgatttagtattctgtaattgtgtagatacttttcacgaagtgaagagcaaacgtgaaaga

SEQ ID NO: 69290 - DNA, 795 bp, Prunus persica
  Intron number 3 from transcript ppa000605m (locus ppa00060 5m.g) derived from phytozome v7.0 (chr-ID scaffold_1; pos 32674007 to 32674801 reverse strand)
cggtacgtcctcttgtggatgctataggtgggtcctccatgtgtttgcacgtgaagggcttgtatttttcttgtaacttctcattcttctataaagtaaggtttgttcatcacaaacaactgagagatgaataaatctgcccatatatcttgcctttactagtaactgaacaaacaaaagcagtttgttcccttggcactacaaaatttcctctgtagcttatagtggagtatctgtaggagttgaaaaaattgcatcttataactatttctagtgttatcatcaattgtgattatatgcatattcttcgctttattagttatgtttgtttagttattagtgttgcagtttgtgttatttttagacgacccaacaacctgttccttctttgctcataactcttgtggtgcttgtttcttgagtggcccatggacgtttcgattgcttggcagatattctcccatgattctcttttcaaccttaatcaaagataccttttgttttggaatgtgtatttgccataagaaattatatttgggggatacagagtcttgaaccatttatacgatgccggggcatgttaatctctattcctctctctcctctccttctgtgaatatgttttattgatttcttgaattcttgcttgtaacatttttttttcagttaggttttccaacctccattggaaggggggaagaaagtaagagaacaaaagctaagcatatccattttaaaatttttggtttctcttttataggcagctgaagaagaacggctacgtgaggagtttga

SEQ ID NO: 69291 - DNA, 720 bp, Prunus persica
  Intron number 1 from transcript ppa000839m (locus ppa00083 9m.g) derived from phytozome v7.0 (chr-ID scaffold_1; pos 34353651 to 34354370)
ctccaaccaaactgttgttggtgcagctgctgcaggttctctctctctctctctctctctctctctctctctctgaaccatgcatgtattctaattgatcatcattttgtatctcctgttctataataatgaatcataatttaacgtcaaattctggaagatgtatataattattacatgtgcttttatgctttttatttatggattcattaatcatataatttatatacattcatcatgtttccttccttgtaaatttgaacaaaatgtaagggtgtgtctgcaagtgtacttggggtttttgcatactttagactactaaaatatctcccacgctagtaagacaggggcttgtgacaaaaaaaaaagtttaagaagggtatgtttgttatgttttgtcttttggtaagctataagataaggatcgataatttcatctcattaatttacacgtctcatgagaaagaaaacaagtcaaataaggtagcctccaaaccgtgtgagcctccttcaagctttgtaaattcttcaatggcctacctaattaatgttctctatatggtggatttgtgtattttaggtaccgtgcctggtggattcctatatcatggccatgaccattttaataagcacaatgatttttaatctgatcaaattaagcaatcacaatttttactattattttttttcaacgaaacacagctttggatctgataaaga

SEQ ID NO: 69292 - DNA, 280 bp, Prunus persica
  Intron number 1 from transcript ppa004891m (locus ppa00489 1m.g) derived from phytozome v7.0 (chr-ID scaffold_2; pos 23748460 to 23748739)
actcagtggctccggtgcccaatacgctggttctggtatcaaaattttgatctttatgcatttctgctcttcttcacgcatgtaacatgctttttcttcatcaaattcttcattcctgctttgttttatgtttttgattaaccaaaccaatcagttggtattttaaatgtactatggggttgtctttcttgttacttgttagtaaatcttgtgtgtgcgtgtgtgtgtgtgtttgtgtgtttgcgctctgactttaaatctccaccagagcaattgctgg

SEQ ID NO: 69293 - DNA, 1049 bp, Prunus persica
  Intron number 1 from transcript ppa002489m (locus ppa00248 9m.g) derived from phytozome v7.0 (chr-ID scaffold_5; pos 12348043 to 12349091)
cgggtctctgatcgtgttggcgatcgttacattcggtgagtgtttcggttattcagtgttagatctgcttactttgtttctttaacgattaatggattgttgttttcggtcgagaaaatgccgtggatctggctgtgatttgatggtttttagtgtgttagaggacgttcgtagctcaaaaccgatgagatttacgaatcaatctgaaactttttatggtttttattattggttgagtgaatttttgtgcataattgaagtagtggaggataattttctgcatgagtacgttgaagtgtaggtgtagatctagttagattgaaaaagttattaaagtgtgtgtttattggttgaattatgtgaccttttgagatctataagtgactggtttgatatctgtgcctctggatctgactaagtgatttgcagaactaagcatgaataagcgatcagaatatatagaaaacatatagtttttttgcagtgttttgtttgtgtatgaaatttatttgattgattttgtttccgtcaagctgacatgaaacaaaaggtaagaagaatcacaatatttactcttactaacagctgttaggattaatcaacagatactttgaagaattttgtttaaataaaaaattgccaaacatgaaggaaatgtagatcctgctcccattatggtaccattataatcgcaatgttatagaaatggttgttacataactaggaagtatacgttttaaatggcatgatagtgatcaatgaacagctgttagtagtgtttgttaaatattgtatgtattcacaagactcttctggaatctcatgctattattatgccaaatatgttataatagttacatccaaagtttcctttcaacgaggattacggtttcatgtactgattatgcgacgcgtgatgcttgacgagccaatgccttgtttgaatgagattcatttcatcatttaccatatgtgcttcatatctgtactaacatggaaagagctttataacagggtgcctttttgctatttcgatcgcaaaagaagaa

SEQ ID NO: 69294 - DNA, 537 bp, Prunus persica
  Intron number 1 from transcript ppa003865m (locus ppa00386 5m.g) derived from phytozome v7.0 (chr-ID scaffold_4; pos 2292208 to 2292744 reverse strand)
cgcggttttcgtctgggttttgtacgttggaaaaggtttgattcatagtcctttgcatgcttgatttcttaagttaataatttgattctggattagttttctgttttgatatggatattgggtagtttaagttgatattagatgatttagatgaaactattgagttcaattctgaagacggggaagagaggtgggtgtaacatactttcccaattgaaagtaaaggattagtctagcacattgattgggctaatccttagcttaggctattcttccttatgtttctgctaactgtatttaacttgatatccatgtttctggttcaaaattaaatatttgatttgtgtgaggaagtaatatatgcgtattggctcatatataggtgaagatgaacaaggcgtcagtgtcgaaaacattagtgttaacaatagcatcactataagttatcttggatccttgcaaacacatggaccgcaaagtaacaacgtgactttttcgctagcattgcctcctcctccccctgctgtatttctgggt

SEQ ID NO: 69295 - DNA, 629 bp, Prunus persica
  Intron number 1 from transcript ppa012525m (locus ppa01252 5m.g) derived from phytozome v7.0 (chr-ID scaffold_6; pos 1623383 to 1624011 reverse strand)
ggtatggctaaagttctttcctttccctcattttttggattttctcacattggtttgagttttttccccttattctatgtttgttttctgagaaaacgtgggaaagttatgttcttttttgtctcttgtctcgaattagattgttgtgggtttcagaatgtgtaaaagtcacctctgtgtagccttgttcttgtgctagatttagtcgttcacaagttcgtttattcatagggttgtatttatgaaaggaaaagaaaaagaaactaaatttcattgatttcatcacctcgcattcgtttctctgcatttgagttgagtgttggggtttgctcaatttagcgaactctaccacaaggtcattacattggtgttgtattttgattttggctgtgaaaaacaattaatttgaagttttgcatgtatttgtgcagaacttaatagtaggtgttactggaaattgattctgttttatttgccatgttgtttcttaagcaaccaatggtataaatgtgtaagtatgttggtgtagatgtggctgtatctaggctattaggatcttgaaatctaattatactgatggctaattctttgaatgttgttggaattctgtaggtggtgggcttggattg

SEQ ID NO: 69296 - DNA, 296 bp, Prunus persica
  Intron number 1 from transcript ppa019164m (locus ppa01916 4m.g) derived from phytozome v7.0 (chr-ID scaffold_3; pos 20424551 to 20424846 reverse strand)
gcaacatttaccttgatccggtactcttctccattttcgcttttgatgcccccattgtgttgaggcgtgcgagtttggattatatattttgcttttgggattcaaaattatatatatatatatttatttatttatataatgggtttttgaatctataaataggaaatgagttattttgaagattatggcattgttattaatgttttgaaattaatgaaattgaatggaaaattattaaatgtctttttgttgttgttgcagctctctgtgaagttcatcgataccgaggagtttca

SEQ ID NO: 69297 - DNA, 755 bp, Prunus persica
  Intron number 1 from transcript ppa013627m (locus ppa01362 7m.g) derived from phytozome v7.0 (chr-ID scaffold_6; pos 2699367 to 2700121 reverse strand)
aactcagccaacaacctctcaaaagaactggtaatctgagctcagcccactatttcttgtcttggtgatcttcattcttttgattttttggcaattttattgaggcatattcatacatgtagggtcaacaggtcaggttttactacaattacttgaaatgcgtttagataacatcctttttcgattaggtatggcttcgaatattcctcctcaagcccgccaattagttaaccatagacatattttagtgaatggtcgttagaatttaagaaacagaggactatgatggttcatttcatttaattgggtagaagtgtttttttgttaggtatgattggcggttgaggaagcacaaaaaaaatcagtggtcctaaaacctgaagatgatacttgtgaatctttatctccactttttaatgtctctctcaacagaagtttcagtttcatggcaaatctggacttagctaatatagatattttctgaaccaatgcttgatttaatcttggctttcaaatgttcttaacttttcaacaatttggttttcttgcactttctgctggattgtaatagaatctgcagaatgtcataaagatttggaggctaattttgtatatgaatttctcttggctttcaatataatttccatatctaaaatgcaccttctgcaatttgggctgtttttgcactttctgcagaacctaatttaagacttggaggctgaatttgtaaatgatttgttatgtataggaaccat

SEQ ID NO: 69298 - DNA, 939 bp, Prunus persica
  Intron number 2 from transcript ppa024026m (locus ppa02402 6m.g) derived from phytozome v7.0 (chr-ID scaffold_1; pos 35732896 to 35733834 reverse strand)
aggtatgttctctcctgtttaggcgatttgcaattatccgaatattttgttcatgttgcatttggagttgatgttttgctagttctgctcatgtcattttcatgatgagttacatcttgcaagaatcccccttcagtaattgcttttgatcattaaaattatgattcgaagccaatccacagcttgcgaaaagctggaacattagccgattaacccttgaaagcaggaaacatatcatccatgcacctgaaatttatcagctataccatcatgtcctgttggttagaatatcttgtctttgtagtcgttataaaggtaaactattgataacacaatttgaaagtttaatatgtaattggctattattagtcatgtttcattcaaacaaagggtgtggtacgttcgttgggaatttacttttaactgcagatgggactagattgaagcctggcaccctaataaaacaaccaaaattttaggcttattatttctaaaatttcagtgaagcgcatgagttttatatccaaggatcacatgatggattcttgtaattgaaggttatttagattatccttattcttaatacgcatccttctttttcatatttacttctcttatcaacggtgttcacctaacttctaacaaaacatattttgttccacataatattttgacatttctatcctcttcccaaactttttattttaaagtatccgcataagctaaccatcaaatgtaagttgacatgcataataaagagatcaacgcacttggtgataaaatatttggtagtcaacaagcaccaatctttctaggttgcttacaccaacgtttcagaagccctttgtaactagtccatgaatccactttccttaagtacaaggcaaaggtgtagtatcttgactttctggcaaaaattttgttggcagcatcttctgc

SEQ ID NO: 69299 - DNA, 562 bp, Prunus persica
  Intron number 1 from transcript ppa020820m (locus ppa02082 0m.g) derived from phytozome v7.0 (chr-ID scaffold_1; pos 26436955 to 26437516)
agaacttgtcaaaaagagcatcttcccattaaaaggtgtatatgcatattatttcaataatattaaagtttttttttaaattacttttttttaaaaaaaagtaaatagtatacggggtaggttgaaattttttgtgtttcggatttcccaaaataactcatgaacgtactgcctgaaagctatggccgtatggatcaaatttacataccaaaaacggaaaagaaaaagaaattgaaaaggccagccgaagcctaaaggactgcacctaaagattatacagtatgagcacgtaaaagaaacagtttatcttaaacaaagtattcctaattaatctgtttgatcactcgtaattaacttcccaagtaagatatctaaacctaattaaggattaagaaatttatcatggagctataactttctttgtcatctgcatttgaatctttttattgttatcatgtcctaattaacccaagattaacaaaatatcatcgccctaatcgcagatgtgaaagacgtcagcaatggatatctggaagacactgccctagagtggatcccaggg

SEQ ID NO: 69300 - DNA, 981 bp, Prunus persica
  Intron number 1 from transcript ppa023529m (locus ppa02352 9m.g) derived from phytozome v7.0 (chr-ID scaffold_8; pos 19822836 to 19823816)
gtggaatagtatgcaaagctatcagtttctgaattagcttcatcttttagatttaacattgtgttatttcaacaagtttgtttggttggattcattatctgtgtctaatgttcaaaattataagtgcctttgtaaacttttctttagagtttattctgttgtttcttgtgcgacatctgcttgccccttgctgattgtatagccgttggctaaattacggcagtcgtgtgataacagtagggtggggatctcaacttcttgatatgaaaatttaaacatccttagcttacgcctgaggggttttctgaagacccttggttttgttttcttgttaactgccgcgctaggacactgcgactgattttcaaaaagcataccgattcactgtaagaggctaatgtgagttgcacaagaggtagacataataaggaaagtagaaagctgcacttggaaactggttctaaatgaatgaatattgtagtttggcaaatcatcacaggttcttcttctcaaaggcattgattttctaatctggttaacaggggacaatgttctttatctgccttgttatcgtcagtgattatgctacttgttattctaagaatatgatagatatggcatgagtggtcctcgaataacataaacctgtgtggtgagtggatgctggaacttcataaagagtatagatgaactcaatttactttgcattgccaccatttttgtttcttgtaagttgaacttcatgtagtttgcattgctaccaatactatagaaagttgtgttgtaagctgaaatagtacgagattattttggaaacgtgtgatcgtgatgaactaaaaaggttattatgttttttctttgtcaatttctatgctcgaaacagaagcaagaggcacaacctggtgagaagccagagagctagtttggactctcctgcgcaacatgatcattgtaccggagatgatttgtagcatcattaca

SEQ ID NO: 69301 - DNA, 893 bp, Prunus persica
  Intron number 1 from transcript ppa016585m (locus ppa01658 5m.g) derived from phytozome v7.0 (chr-ID scaffold_8; pos 912974 to 913866)
gcttcttcgcagtatccacttcttcctccttccatttgtctctattttcactccacttaaattgccaactaatcacgttttagaccatattaactgataacatgataccttaagtttatatacacttattacatacacaaactatatgtatatgcatgtgcgcgcacacacacagagagcttcaattggaggatctctcaaataagtatattaagaaacacttttgtagcgcacattatgcattgtatttcaataatccgaatcgtctatttcttaaaacaccatgttcatctattttttgggtcaaaactagatgtcttaatgattttcaatttacttgaattttttgcaaggatgatcactgaatgatgacttaaaaaataaacgttttgatattgtttgaagtaaaatttgtagtggaccacacaacgtatccctcaaatagtttttttttttttaaggatctctcaatagaataggactaatgtatagagagcttcaatggacgaatctctcgaataattatttgtggggcacccttttagtgcccacttcacactttattttaatgattcgaactatctatttttttaggtggtctctcaaatatcatttttgaaaaaaatacttgaacaagagaccatttaacagaaaccactcaattaaatggttgttattttttgcataggagaaaatctgtatagcagttcttctcattcggacgtccgcacgttattaccatgcggacgccatttaactaaaaagccctaggtgtttcttgataaaaacgaatatatattgcattggaagaatgagtccgattaaccatttggaatgtttaatatctctttctgatgtttgagtggccttgatgattttgtaggtgacaaatc

SEQ ID NO: 69302 - DNA, 323 bp, Prunus persica
  Intron number 1 from transcript ppa026597m (locus ppa02659 7m.g) derived from phytozome v7.0 (chr-ID scaffold_6; pos 4408778 to 4409100)
tagcgtatgcgccttctttgttcaaattgtttaaccttttctctttttgttgcatcactgtgcaatttggagcatgtagtttctggcattcttatgcaccggttattacttgaaagatgttttatggcagtacatagaaccaaatgctagataagaaccaaaaatggatttctgagatttgcatttgttttttaagttctatctgattttatgttaactagttagtcattctttatgctctaccaaaataacctttcctaaacacaggtatattattactcatattcgttttccttcttttgttttcagcaattgtcccttgg

SEQ ID NO: 69303 - DNA, 917 bp, Prunus persica
  Intron number 3 from transcript ppa008432m (locus ppa00843 2m.g) derived from phytozome v7.0 (chr-ID scaffold_6; pos 26143940 to 26144856)
cacattcccaaaaaccagctgggactgtaattctggtatatgcgtacatttcttccactctaaatccattgctcctttttccttttgtttctacttttaagtgcagttttcctgagatttatgggtcatgctgtttttgctcatgacaatgatggtgggggacagacttttttctgggttttggttttttttttcttattcttggcgctgaagttgcgcacaggcatgcatatacatgtatttgttcatcagtccaaaaggggtcgcatgtaattgcttctgttttatatctgaatcatgacacctgaaatgagtggtatttttcatgccctaaaagcagatatatctgacagtgacttccataagaaagtgttttttataaataaaaaaatataagaaatttcttagagaaattagttttactggtaatatatatactcccctcattttacacataaaaaccctagtttctataaataacgtatataagttaagtattcctaattgctaatagggtcgctctacaaacgcatggcaaaaccaaaagaaataccaaaacactctacttttgccggaccaacataattcttgcattcccaaatttgttgttacttggacaaactttgttaaatgatatggataaagacattttaaattgtaatgacaagtctaattacggtaatgttatgcgcctgaatcattctgtgcatgcttagacatccttggcatgttttgaactgatactggtgatttctttgagaagtattatgagtagagtttggctactcatgcatcccaattttgatatctattaatttactagtttgagtagaattagggaataatgggattagttatctagattgcagttatatgcttaatttaggattaccgaccaactgttggtaccattgcag

SEQ ID NO: 69304 - DNA, 615 bp, Prunus persica
  Intron number 1 from transcript ppa005719m (locus ppa00571 9m.g) derived from phytozome v7.0 (chr-ID scaffold_1; pos 45358639 to 45359253 reverse strand)
agaagcaccggcgaccgaggcactcaaagatccaggtattattcattttcctcttttttttccccaaattttcttcgtctgtgttagggtttcggtataattattattattttatttttgcaaagaaaaaaagtagattctgtgtttgattcgagattgtgaatgcgaatgttttgtgtaaaagtttgatactataattaaattagagtagtgaagctcacaattttgttcgctttacgacgacgttttgcaattgaatccttcaagcggactctgatcccattaaagctctttacgtagattctaagcccattttttattaaccaggtccctgtttcatttccggagcttttacaaagttggtttactgtcgattaatttttattctcattttgcccctttcatcttcttaaatttactttttcttttttttaaaataaatgttttattatattagattctctgtgtttgatgcgttgtttaccagttgcattctaaattgaatccttcccattaaagctttctacgcaggttctgaattgattttttgtttattcccattttgcctctctgttcacaggtctttacatttggaccacggcaactctcgaagct

SEQ ID NO: 69305 - DNA, 858 bp, Prunus persica
  Intron number 1 from transcript ppa017220m (locus ppa01722 0m.g) derived from phytozome v7.0 (chr-ID scaffold_6; pos 5640618 to 5641475)
ttacctcataaagcttctattgatcggcgacagcggtgcgtcttttcttcttcattttcttttcttctcactttctcgaccaacaaacagaccgccattatttagatcgcttttgtgtttgtattgtacgaatttctagcatgctatggtgtgtggtgtattcagaagttgtaacattttgccgttgagatcacaagaggctggctttaggcttaaagatttgttgactaaggaggtcaatcaaaaagtatatagaaaaaaaggggttttctttttagatctggtttgattcagaattgaaattgattttgcctgatttatgagctcctggggtcaaagcatgtggagcatttgaatataagttaatcttagtctgatttgtgaaatggctgtttgagcatctgaatcaaatattttggtcgaaataagtcgtccatttgtgtttatcgttttttcattttttaattattctttatggtgaggttctaacttctaatgtcctgctagttgggtcacatatgtgtgtagtaacttatcttggatgattcaattatttgtcatagattgctgaaaacaatgtggaggctattaacctgtttatctatcatatatggagctctttctgcaatatgtttagactatcaaataccaactaagtattatgtgccaataagttgaagactatagttcttgtttgacgcagttactagatgatgactgcatcaattggttttacaattttctgtattacaataatgtacttggtagataaccaatgcttttgatatgtgcctttcgtgaaaatggaaaattatttttgcaggtgttggtaagagttgccttcttttgcgcttctca

SEQ ID NO: 69306 - DNA, 790 bp, Prunus persica
  Intron number 1 from transcript ppa010931m (locus ppa01093 1m.g) derived from phytozome v7.0 (chr-ID scaffold_1; pos 43829790 to 43830579)
cccaagtctaagcgcgatcgaccaggtctgccttctctcttctttttgtttggttccccagaaaacttaaaggaaaaacaaaaactctaatccttttccttttgttattaatcgtattttttgacgttgcgaactgtcagctgaaactttctgtaccttagtttttccatacgtttgtcttggactaaagtacaagaagaagcacagataacaatccacacttgggttatttgttcattgttaaaaataaaaaactcttataaaaaaaaattgaaaaaaactagaagactgtgattttatctgtttgctattacatattgtatccttttgttttccatgtagcagattttgggtttgaaatgttgaaatttgtttctaccagtttcgaatatgaaagtgaaatgatatgctatgggatatacccaatttcaggaaaattagcttattgtgtatctactgctgtagttgaccttcattgtaggaaagggaagactttgggattgttttcagtgttttatttttattattattttcgtttgtaacaagcttttggctgcttgaaattggtatagtgttagaaactgaaaattttaaaagtttaaaaatttagacttgattgatacgatggcagttttgattttttttttttctgcttttacttctcgcaagcaattgagtcattggtctgattcatcggaggatggtatgaataatgttatggtccatttcatgattggttggggttgtggctgcagttacactttccaagacaaagaagaaaggaagggaa

SEQ ID NO: 69307 - DNA, 431 bp, Prunus persica
  Intron number 1 from transcript ppa002474m (locus ppa00247 4m.g) derived from phytozome v7.0 (chr-ID scaffold_1; pos 33413247 to 33413677)
ccctctgcggcttcttcactgtccagacaattcaggtaccatagaatcttgagggagaagaaatagaatatgtttgagtggcagctagtaattggtttaatcttttgtttaggtccttttttctttaatcgattcttgtggctgcaatttttgttcattgtaatttggtatacttggctacttcacatcactcttctaccaaatctgttctggctatgaacacacttccatgttttgtgttctgatttgcacatgatgtttttatgtttttgggcgttatacatgatgttttgattacctcaatggctctaaatttctcagcctgcctaccagattaaccaaaggggtggacctgccaacaattggttccactagtcgtactacttccctttctagattttcaagccactcaatccaaagtcctgaggatt

SEQ ID NO: 69308 - DNA, 536 bp, Prunus persica
  Intron number 1 from transcript ppa019218m (locus ppa01921 8m.g) derived from phytozome v7.0 (chr-ID scaffold_5; pos 9263550 to 9264085)
cgattactttgcaacaacttaaggccttgctattggtacagtattcttatctttgatttggagtgtagtcagttgaccacacacgagtaggaggtgattctggctattgatacatgactttagctttacttttgacgccacttaagaaaatgctttagttctggcctacaattcatcaacggttagaattttctattcatacccgtaagtgattcatggctctggatacatgactttagcattacttttgacaacatttaagaagatactttagttacaactcttccacataggcatgcgtgggagactcactgtataacatctttcttttgacactacataaacttttgctgatatgcctatgtgtgtacattctcagtttattttcaagggcaaaatttgatttacaaatactaacacaagggatacgaagaagtaatttgaaatataacccatcctttttttttcctaaactcttaacagtttgactattttgaacaggacattgtggtgggtgggactgacaccacagcaac

SEQ ID NO: 69309 - DNA, 876 bp, Prunus persica
  Intron number 1 from transcript ppa007359m (locus ppa00735 9m.g) derived from phytozome v7.0 (chr-ID scaffold_7; pos 18031854 to 18032729 reverse strand)
aggttgttcctggcgtcgttgaaagccttaaggtatatatatcaaattctgtttggatttttagatttcttaatgtttgaataatactgtttgggtttttgttgttatttggtttattgtttgattattgattgggttttgtcgttttctagtttaatcatgtggaattgaatttgtttaaggttaagtatagggtaatcatattcagtacatggtaattaactatgtttaacattctgattgcatttatttaaaaaagtgagaaaatgtgacacatgacacatgtttggcaatggtcctacggtagtgattgaaattattctctcttataattcattgttaagattgcactgactgttgaccaaaaaaaaaaaaaagattgcactgactgacctatgcggtcccacactatgggaaccattgcatgtgactgttgtatatgacctccctctgttcaacatgtacgtgggacccacttttagatggcactgggaccggcatgcgtgtcgtgggagtgaggccatatgtgaggatgacacgcaaaatattctcgaatgcatggaagattgtgatatgttcattgcaggaaatgtttgttcttcaattgcaagtgctgttaagtggttgtatgttgattgagtttgtgatattttagcattcaatctatagaaagtgatctagtaattgtagcaggagtatcactttgtttgatgggtttctttttctgcttataaacttttcccttacatttcttgcaatttgaaggaatgtttcttgttatcctctccatattgcatagtgttggggatatttttgtcacttatacctactcttttgctaggtgatcacaaagttctgttcagagcgcattgctaa

SEQ ID NO: 69310 - DNA, 657 bp, Prunus persica
  Intron number 1 from transcript ppa004828m (locus ppa00482 8m.g) derived from phytozome v7.0 (chr-ID scaffold_1; pos 41840958 to 41841614 reverse strand)
tccccaacttctctgaccccgtcaagctccccacggtgatcccccaacccaacacctctctgttttctctttctttttctcatgtgcacagaaggcaaaaacaaaatctttcaaaatcattcgtgaaaatttaatatttttgaaagttggtttttaccttttccacaatcagcgggatttagattttgatcatcaccattctttgttcttctatatattactgttgggcttgttagttatataaaggctgtggatttttcagtatgtatgtatttctggatctttgactcaacttgcgaatagcttttgagattaggtgtgcacatcaatatcattgattcgactgatacttatatgattgctgataagtgtgacaaataacaaaggtaaagaagaaatttgaatatatcaaatacagttttttttttttttgaaaaggaaatacagatacatttggtcgaggtgtttttatttggaggaaagaaaaaaaaaagataaaagaagcgctatatccttttagttaggagttaggacataggtctgagccttatagatttagatacgtttgttaatgtgaaaaagttatgtatctttcatgttttcactcccttatactcgacagttggacgattcaagtgggattttggaaactaaaaa

SEQ ID NO: 69311 - DNA, 719 bp, Prunus persica
  Intron number 1 from transcript ppa006284m (locus ppa00628 4m.g) derived from phytozome v7.0 (chr-ID scaffold_6; pos 962458 to 963176 reverse strand)
accgcttgaacaagcccgccgtgaaaagcatcaaggtttcgtttttctctctttctcttttactttacattattctttcctcattcaactttcttgcggtgcgtttgatttaaaataaaaaggggctttcttgcttttgttgttctccctctgttagattgctgggaaagtggaagaaagtgaagaaaaaaaatattttttctgttgtttgttgcatttggtataaatgttgatgtgtttaattctgagaaggtgtttattcatcgttttctcagtaaccaaatgggggtgtaaatgcaaatgggtttcttctgtgcttcactctggttctaggattttcactatttttttattgcggaagcttggtattaattttttaaaaaaacaaagcaatgatttccttatcgtttcctctttcctctcactctacaatgatttccttttaaaaggagttgaagaaaaccagcaaaatgaaaagaaaaaactgaagcaatattgtaaaattaggcctcatttgttatcaccaaacattgtttcactgagcaggcataacataaatgcaactgactactttgctttaatttagttttctcagccttagaaagtttctctgtcatcatagatgtgcactgcttttgttttaagatctaacatgctactcttctgatttttgatggatatcagagcccagacggggacataatagactgcgttcatat

SEQ ID NO: 69312 - DNA, 644 bp, Prunus persica
  Intron number 2 from transcript ppa003151m (locus ppa00315 1m.g) derived from phytozome v7.0 (chr-ID scaffold_2; pos 12714988 to 12715631)
agtgcaagaggaccttccaggtttgtgctttttcagtattttgttattaaggttttttcttgaactactcgtgaacattgaattgctctgtctatttttgtgtcgtttttaaaatgaaaaattaaatttagtgtgtatttttgtgtgtttatccccagtacttaatttcaaacttgaaaagacaagaaatatcgaaaatctgtacaagtatatacaaaaaaggaaatggaaagaaagaaaaataagaatgcaataaatatatctcaatatttatataagattatatataactagctaggcaatcataacatcatggataaaggaatagttttaaaaggctctgcagtcattgagaataatggaaaaacatcagtttggtgtgattttatggattcccaaatggatgttgtagctttgattgtaaaatcataatttatttttttgatatttatggggttaactgcggtctatgacttagtcatacgattttgtttccatgtaatatgtaatgcataactctataattacttttccccactcaaattcatgaatggaagttgaaaagtttaagcatttgtgttcttgcagataggttttatagtgacattttaatgatcttgtttccaggaaactgattttaaaga

SEQ ID NO: 69313 - DNA, 692 bp, Prunus persica
  Intron number 1 from transcript ppa001134m (locus ppa00113 4m.g) derived from phytozome v7.0 (chr-ID scaffold_1; pos 2161848 to 2162539)
agatattagaggtttgcttcttatgatttagttacagctttctgtttatgcaattttgttttaatttctttatattcgacaaatttacatctattttatcatattttgagctgtaattattgattagatattaattgaaaggatatataggaattttgttttgttgtcaaaaggatatataggaataaaacacagaaagtataaaacaaaacttttatattacatctctgcaagaatttcatgtccagtagaaaatggagggctgcctccggttcttaaatgtatgccacagaatagaaaatggagctagaatttgaagctcaaggaattttctttgctgttgaactatgttgattggtcagtggaactgaacacaaatatctaaacatttatttgtcccttagttggtggatgttgaaggtagagattcttgtccaaattgtttgacaaacagcttttgtaggcttgaaatgatctgaattaaaagctttcctttttgccttttcacttggtatttattttctgtaatgaaatctttcattaagcaaacataaagaaagaaaaaagtaaaagtttttagaatagcatatttgagaatttctaggttgttcctatccaatttgtttatgtaattttgttttctgttgttatgatcagcgaaaaactggtggtttggtgatttggaggtctgg

SEQ ID NO: 69314 - DNA, 630 bp, Prunus persica
  Intron number 2 from transcript ppa011956m (locus ppa01195 6m.g) derived from phytozome v7.0 (chr-ID scaffold_6; pos 10142306 to 10142935 reverse strand)
gcgagtaagtatcatcagttgttttcttttataatatatatctacttacaatagttaatggttgtttatcgtggcctttctaccgagtaaatccttcaatttctattgtataattttcttctacttcttttatgtcatttcttgaagtccaattgaaggaaaaggctcatttctagtgccaatttagcttaacttttgcattgatttttggcaataatagattgcagtggctaatcttgcaaggatccccactcatttgattcaagtcttaatttatatgttatgtactctggaactacgtaaattgtaagggccatgtagttgtgtagctctcttgtaatcttggaaagaaacttatctgaacacatttgtatagtcgtattgattcaattcaccaccatatatgttctacgtatggttgttgtggaacttaatagaattttgtcatacactgccaatctgcaatgccattttaagcagccagagattcagaatgctgcatgactccctacttgtttgttcatagaaaatgctttcagatgttatatatccgttccatgttctctttgccatgagttgtcactttgaattattaactaaacctgcacttgcagggcatatttgagaaat

SEQ ID NO: 69315 - DNA, 471 bp, Prunus persica
  Intron number 1 from transcript ppa011956m (locus ppa01195 6m.g) derived from phytozome v7.0 (chr-ID scaffold_6; pos 10142944 to 10143414 reverse strand)
atcctctccgagttggtgagttcttgtttttattttcatcaaaatggcttctttgttcttcaggattcattggatatgattagaaatttgatcccaatttggaaattagaatgcttatttgttagacgggtatcatttgatttcttatagatgtaaactatgaattcttaccaaacttgcatatatttttcaaatttcaattcttagctagaattaattttggtttctctatttattttctaaatgccaacctgaattctggctgggaatgttcttgtgtttattattatgtgtacaccaacagtcagcattataaattctttgacctgataaaaatgaattgtgggttgctgcttgttagttgtttccgtttcgaatcgaagcatcaatttaactagtcccactttattaatttcctctgaattttctgatataggccccaaagagtttgctgcactctggacttgtctt

SEQ ID NO: 69316 - DNA, 489 bp, Prunus persica
  Intron number 2 from transcript ppa020644m (locus ppa02064 4m.g) derived from phytozome v7.0 (chr-ID scaffold_8; pos 19733448 to 19733936)
acttgtaggcctctgcttgctttggtgtatcctctgtaagcctctcttctcttccacacattcatatatctagttcttctgaatgagatatactctgcgtacctctgctctaggattttttggggtcaaaaatcaaaatgaggcttcattaaagcccccagaaagaaggggaaggaagtcactaaaggaaaccaagtactagatctaaagactgagaaactagacacaaacttaaggaatttttttattgtgttctgcataatttttgtcaaatacaaatgcacggaaaataaaatggttgtaatttttcatattagttattttgagaatgatgatgagaggataataatattaataaataataaagttatctttgatttaaagattttgaaatggggtttttccatagacttaagattgtaatgttcatgttgatacaatgatgatgatgatgatgtattctttcaagattgttttcctttttgacag

SEQ ID NO: 69317 - DNA, 608 bp, Prunus persica
  Intron number 1 from transcript ppa005777m (locus ppa00577 7m.g) derived from phytozome v7.0 (chr-ID scaffold_4; pos 27600963 to 27601570 reverse strand)
ccccaaatccggtgaaattctcctcaaaaccaagggtatattatatatgacttcaaactctctcgtctttggattttggaattgttattatcatttgttcctcatttccctgtttacctttcagtgattgattttgaatctgtcatgctggttttgattcttgacttattttttatttattaatttatagttctttgatgaaaatacccagaatttttttttgttttaaagatgattggccaaagaaagaaaaagaaaatcggaaccacatgtggatggctgataatgcgccatagacgttggagctttgaatatgatttgttgaaatgtgatgtatgagcattcttaattaagcttgattgccttttctatgtattgggtgttgccatttcaattctctaatctttccgcaagtaaattctcacttgaccttttttttgttttagccaatgataggtttcttctccgtcccttcttgctccttttcggttttcactaaattgtggatgcacttctcatgtgttcactactcttcacaaaatgttgtctgatattgttactgttttcttttcttgttgtagcctgtggagtttgccactctgatctcc

SEQ ID NO: 69318 - DNA, 712 bp, Prunus persica
  Intron number 4 from transcript ppa001667m (locus ppa00166 7m.g) derived from phytozome v7.0 (chr-ID scaffold_6; pos 26976104 to 26976815)
gaggtgaggctggggtatcacagtattattgagatgattgttatagatattgaattaattaagcttacgcatagtaatgtttgcatatttggtgcaggggcctagcatactggtatgtgatgagcagaagagaggattacttccaagagtagttgagggactgtttgattgcattaaatcttctggaggaacaatgaagcactcaatcaaattgtcaatggtattaagatacgcttacctttaggggttataaacacaggttgcaagttgcaatgtctctactgatgtcattttctgtatctgttcgtttctctttcaggtagagatctacatggaaaaagtaaggtatgtagaagtggaatgactcaatttgactcaaatacattctctttggggtataaagtaagctgaatatggtggaactctgggaaggttctaataactacagtttcagttagtgttaactacacttcttactcagggacctttttgatttatcaaaagacaacatacagattaaggagagtaaatcgcaggggatattgttgaatggagtaacagaggtatccctagcttttgaagaaataagtgcataattgtatgcccatgatatcaataggagtaattatagaggctatttttcatataggttatcatgatactatatgctaaattatacacctagacaagctggcaacgtttgttggcagca

SEQ ID NO: 69319 - DNA, 435 bp, Prunus persica
  Intron number 1 from transcript ppa017328m (locus ppa01732 8m.g) derived from phytozome v7.0 (chr-ID scaffold_4; pos 13147360 to 13147794 reverse strand)
gcaagcaacaagtaaaagtaagttattcctatcaagaactttcagtgagaggatttcaaaatagaaagaaagttgaaaggggttttgaaatgatataactttacttcaaatgccaccgtttggtgaaagaagagtttaccctgttgttcaacaccttttttttttttttttttttttctatcagatcttttcaaccatgtttttctgatcttaggaattgtggcagccaaagccattttttctatccacctaactgcatcctgtccctagaatgtgtgaaacaagagttacctagcagaaacctccctgtattgccttctgctcctgttttttcttttaagattaaaaaagaaaatgaactcaaagcaacaaacaaagatcaatgtcaattaacgaaggtttctaaattctattgcttgataggccttgcccctg

SEQ ID NO: 69320 - DNA, 610 bp, Prunus persica
  Intron number 1 from transcript ppa015941m (locus ppa01594 1m.g) derived from phytozome v7.0 (chr-ID scaffold_4; pos 10347831 to 10348440)
ggacgcttgcctctcgtgttcagtctatataaaaggtatttctggaaggttttgagttggcttattagcagagaaactctcaaatctgaattctgaccacttccaagccttatcaatccaccaggacaaaacttatactagtctctcaagtccccacaccacatcactcgctcgcctactctttatagcagtacaagcttcccgccgaccaataccacacaaaacatacaaagcaataaattcacaagcaaatttagaccatgtcaccaagctccctcttgaatgttggtgcactattataataaattgaaaatgactaaataatttgagagagaaaaagaagaagaagaagaagaagaaatacaagagtaagcgtcgaataggtctcatcaagtcctcctcaaactagatttttcttgatttgaatcggtaagcaaaggacttctgatcaaagcactttgaaaaattaaactctacagcctctgctctatattagatcacaatttgatctgtaagctcacccaaaaacaaaaaacaaattagaaatggctttccttcggctgcttttgtttcagttagcccttgtgtgacatcattagacttcaatttc

SEQ ID NO: 69321 - DNA, 308 bp, Prunus persica
  Intron number 4 from transcript ppa013127m (locus ppa01312 7m.g) derived from phytozome v7.0 (chr-ID scaffold_1; pos 35447291 to 35447598 reverse strand)
tgcaggtcaagaagcgccacacaccacttttaaaggtttggaattttctttgagtttttctattcaaaccatacacttctttcttcattctaatatttaaattattaagcatttaagttttataattgtgtaaaaaaacaaaaaagtcatccaacttagtacttaaccataatacatctatatacataccccaccattcttcatgtttgatgatgataacttacatatcaatttagctgtcaacatttctctctcaaaaccaactagtttattctcaattttttaatacagttacacatttgacaaca

SEQ ID NO: 69322 - DNA, 376 bp, Prunus persica
  Intron number 2 from transcript ppa014895m (locus ppa01489 5m.g) derived from phytozome v7.0 (chr-ID scaffold_2; pos 11909155 to 11909530 reverse strand)
ttggtcttggcgccactgggttagtgtgtttcatttttcaagactgcttattcattaatgattcgtttcttgattggtttaaattttgatgtttttgtttgatcactaagagaatagtggaaaaactataattagattaaatttgcagcactgaccatttggtctaatgatataaggtaatcacaactttgtgctggaagagtttctaagttcaaatctgatgaaacacagttgtttgaaacttggaatcctgatttatgacgactcagaatgacaataaaggagaaaaacataagaacgaaacaaaaagaaaagtcttggtagtcttccatttccactaacttttgaactgtgtgtgcgtttgtgtgtgatagag

SEQ ID NO: 69323 - DNA, 533 bp, Prunus persica
  Intron number 2 from transcript ppa019587m (locus ppa01958 7m.g) derived from phytozome v7.0 (chr-ID scaffold_3; pos 3770186 to 3770718)
gtttgatcagaaatcatcaacggcaatatcaacatgtaacttgtaagtactttgatcacatgtttttatgttttcaccgtctgaacaagccttatacatcttcactttcaactcaaatattattgatttgatgaaattccacagatttacagtttcagtcacccccaagaccaaccaactttctaaaactttagattcaagtgtcatagttgtaagaatttctagctttctctgcttgaatgttatgcattagcttttattgggtgtgtgatcaaatccctaatgagttctggacatgtttaatgaaattgccataatgcatcagtcatttttttatgttttgttgttccaaaactgatgcctaagtttacatcctgataggtttaatttgtttttgccttaattatgtgtatgttattagttttaattggtcttataagttaatacatagaaaaattgtctgttaatttaccttttgctttccatttaaacaactgtaggctattttgaatgttctgtctggttggtcaggt

SEQ ID NO: 69324 - DNA, 910 bp, Prunus persica
  Intron number 2 from transcript ppa010585m (locus ppa01058 5m.g) derived from phytozome v7.0 (chr-ID scaffold_2; pos 21336564 to 21337473)
ttcttgacggttttcctcgaactattcgtcaggcggtaataccatttttttttcccatcaaaattttgcttgaaacatacattggatgatcttgcttgggagatagcaaatagggacaatatgatcatgcaggtgtagatgaaaaaatgtatttggaattaaatttttagttgaggttagtagagttgaactatgcacataaataataaacttatggtctttgaaggcacacaattttattactctactgcctcaaaattccagcatagcagtacttctgtcttgcttcttttggtttcaaaggttattgctttatgttttttttgtttggtttaatttcatgtttgggtcagcaaaatctgaattcatctgtgttgtctttgataatatgtttgcttatgggagtcacttggttttgggttatatagattcatgagcaggcgatgttcattgagcatatttgtataagaactttgcatcccttcgggacttatgttcattgaaattctgtatgattattagactctgaacatctaccatgttgtgcaatttttcaaaaatcctgaattagtgggaatttccaggtttttatgacctctggaggacagtccaaaatttgaaattgatgttaaaggatgctcacttcaccaagtagtttgaatttcttttcttttataatggctccagtggctacacagagaagagtaggcattgacttagtgcccttaaattggcaacagagcttattgtatgataaaatagtatattctcatgtcccattaattcagcttccctaccgttctccctcccctcctctcaaatatattttacctctgtggttataacttgccttctaagttttgtttggtttacaggaaattttagagggcgtaacagacattgacttggt

SEQ ID NO: 69325 - DNA, 679 bp, Prunus persica
  Intron number 1 from transcript ppa011062m (locus ppa01105 2m.g) derived from phytozome v7.0 (chr-ID scaffold_7; pos 16462368 to 16463046 reverse strand)
gtaacgagactcgatcaaattttacacaccaaaaggtaaattttagttttttttctttctgtaatttatattcaaccagttgttttattaccttgatttgattattactattcccttttcttgtttgggtttgaatgatttctagggttttttgtttgtttgttggattttatatactgaataaattcactccacttttctgatctgtgcggtccttttgcttaagtttttgttcttttctctgatctgaccggttataatttagtgagtcggtttgggttctgaatatttttatgatcttatatttctccagattttgtatgtttattttatgtgaattgtttctgggagatctaatcttgctcagggattcagtttagggttttcatcgatttcattctaaatgataaatatttggtgtttttctcaatttatttgttttttggaaattgaatagttcatatgtttgtgcttaatttatttattggtttgtgatagtttgagcatctctctgaacaatctgaatatgctctgtatctgtatgtattttatgtgttccatctgtatctgaatctgttttcttgtggtaataataatcgatttctatgattaatgaaaaaaaaagtggtatttccataaactgcaggtatttgctgtttgaagttttgtgggtactgag

SEQ ID NO: 69326 - DNA, 697 bp, Prunus persica
  Intron number 1 from transcript ppa008181m (locus ppa00818 1m.g) derived from phytozome v7.0 (chr-ID scaffold_4; pos 200107 to 200803 reverse strand)
ggtcgagcgggtaccatcttcattttttacttttagcttcaatgccatgcttgcttattttcaattcgagctcgataatgatgaattgcttcctttgttcatgaaaacgagagaggacctcactcagaagcaatatacaagtacagggaatagtggggttgcatcaaatacatatataagacagatcgtattgatttcaattttgagaaaatgctacataaaaaatttcacaatctgtggtggaaactgggttgtcaacattttacatttgttttgctcacatcactagtattagccagcataggaaaagaaaatcccagggacaatgtcaaatgcagaaatcgaagcccacttgcatttggatgtgaataattctgctatcccagagaatgcctagacatttgaggttccatacattagttatacagtccttttgccccatctacttcttaattgcatctcctagaaaccacctaggaggaatcacatgttgatgccctcctacattatcactagttccccagagtaattttcatttttacatctttggttggttgctaataatttggtatagtaacttttggcatacagatgggttcctctgcattgcgtgtgtgtggtgcgtaagcattatttcattaatatatgtaccttatctttggttcctgacttcccaatttacttttttctgttacag

SEQ ID NO: 69327 - DNA, 798 bp, Prunus persica
  Intron number 2 from transcript ppa010696m (locus ppa01069 6m.g) derived from phytozome v7.0 (chr-ID scaffold_7; pos 13626517 to 13627314)
gtggttccgctaagttgcccaagcaggttttcacttttgccctcgtagtttcaacacttgtgctttctctttgctgaaggttgctttattttggcgtaatgtttaagttattcaaattctaggctttcatcatctgcaataaccagaaccataataaaacctaatcattcagaccaaaaaaaaaaaaaaaaaaaaaaatctaatctaatcattctagcaaaatgaactaaattggcaagttttttgcttgtaggctgttgtgcccttccctgatacaatatgggtatatagtgtgaatcaaaatcatattttttcttggtgggttggggagtaggtacgacacttttggttctccacgttttttttgaaccgtggatgttgaaaactttccaaccaatgcttgtaaacttataaattcttatcatgcgtagctctgttgaatgttgcatggatcatgccttagtttcctgtgtttggtttatgagcgagtactgcttcataatctatgtgttgtctaatgaactcaaattgaaacaaaagcaaggattatctatcacattggtttttcattttgatacgactcctgctgtcaaatagggccagcttagtcagttgcctagtgaattctaactcttgaatttatagctaaaaggaaacaaagaaatcatttaaaagcttatgatcctgtgtgattgaaagctcagttcacttgcacttaaaaatatttttgtgctctttgtactttctctgtgatccagaacagctgtgggtattggattccattccaggagaagtgat

SEQ ID NO: 69328 - DNA, 357 bp, Prunus persica
  Intron number 1 from transcript ppa020855m (locus ppa02085 5m.g) derived from phytozome v7.0 (chr-ID scaffold_8; pos 13304882 to 13305238 reverse strand)
cctatcaatcagctcttaccagtgttgattaagaaacccccattacttatttttcttcataaatgtatgataattatggattgaatccaacttttaatcaataagccgagattttattaagaagaagtgtctagagcatatcaaattatcaatcttgctattgtactaatgccagcttgtttcgaacttccagtgatctttttttgaacccagcaaaattctattgcttttcttgtgtcacatatacattctttaccttatttaaaacatatatagcaaaatctcattctatttagatgttatttcttccttaaattggcagccgtgaaactgaatttattcagaacattgtcaacg

SEQ ID NO: 69329 - DNA, 816 bp, Prunus persica
  Intron number 5 from transcript ppa010437m (locus ppa01043 7m.g) derived from phytozome v7.0 (chr-ID scaffold_1; pos 30110714 to 30111529 reverse strand)
atagccacagcaacagtagtaagtcagaaaaattccttgaataaataatagttggtttcacactctttattatcaacatccatgaagttgtttctggatgatgccaaattgctttagtcaaaattaaattcattaaaaagattgtaatggtgattcttcactcaaacatgaatgtatggaatgatgcatctgaattagaattgttagcgcttaagagggcctttttaatttataaactgaaaatatttctcttctgagtgtgaaggtgagttggtcgataggagtaactcctggatttcagaatttttcagcattttttggttttctgcattactcactaagagtctgagatatgttgcttgttcacctcatctctgaacatttttctggattttgttcctctgaagaagctctaggattaatttgtacatactctactcatctttggcaagtttacatggattacaccttgtcagtgtcatgagtcccctaactcttaattatctgcaatgtgacctttattttccaatagaatgaatttgctgcaaaagcctacttatcatgataatcaagggaaaaaaaaaattcaaggaacaaaaaccaatcagaccaccaaaagaggttcagaaactaacaccacaatatatgatttcttatatagttttcctacatgtttaatttatttcatatcttcctgtacaaagtattagttctatctgtgtattttctttcttaaaagttactcagttgcccacttgatataatcggaaatggatcaactcatatttttgcagtgtctctcaagagccctcagaa

SEQ ID NO: 69330 - DNA, 947 bp, Prunus persica
  Intron number 1 from transcript ppa010437m (locus ppa01043 7m.g) derived from phytozome v7.0 (chr-ID scaffold_1; pos 30112424 to 30113370 reverse strand)
ttccccagctccaccaatcttccacatcttcccaggttctctctctctctctctctctctctctctctctctctctcaggattcgcacagtttgttgtgatgtttttttaaggtcaatgttggtggcttgcttgcttgttttttacttaatgaaccactatggaatttttgttttggttcggaattcgggtgtattttatcggtggcgaatttaatatttgctttctgaagaaaatcggataatgggttatggttgtgattcggggttttgttatgcacatggatgtgcttataatctgtttgataaaacaccgcttcgtaatgtgaactgcttctgggttgtcgtccagttatgttggattttgagctcaaaatatctgctttttttttttcttttttttttttttggagctttggagtatggagtatgggtgtgttatgcattttgattaaaattgtttctctagtagaagctaggggagtgtgtgtgtgtgtgttgaggaggctttctaaggagggatcttacaactagccaaagggaatgccttgcaaattttagggggctggttgaaatgtagagggttcttttgagtgtaggacctttgtcgaccccctccctccctgtagaatgggatctcacgccatgaactgttcgatttaaagaaatcaaacctctccctttggatttcccatgctaatggagagttgccttttccagttttcctagccaaagagggctctttcagtcagagaaagaattaaaaccatagatataaaaaatcattatatatgggatgcaaatttcgtggttttttatatatttaaattcccttaatttcaagcttcaatggttgctcaacattatcatgtgctctgctcttaatttgtaaaactattgttgttgttttgtagtggtacccttttaagaggcatattggctcgcagtt

SEQ ID NO: 69331 - DNA, 585 bp, Prunus persica
  Intron number 1 from transcript ppa006015m (locus ppa00601 5m.g) derived from phytozome v7.0 (chr-ID scaffold_6; pos 1703711 to 1704295)
ggcatttccctgttgacttgctaggtgactattcttttctctattcctctttgaaatttgtgaaaaaggaaattatactgctatcttgttaccataagattttattttatttattttatatatttcattgtaagttgagttgtttgattgaatttccgttttattacttcaatcaggtaagaatattataaattgcctgaatataaatgtagctacatggtatttctataaagtcatttctttcctttaaaaaaaattaagccattttttatttatacaaataagagtttgaaggtggcaaatttaaattaggccaattcattaaggcagttttctggtaccgagttcgatccccatctcataagaataactctttacaaactagtgacactaaattacaataaatgagccaaacaatattctttcatattaatgtacgtaagtgtgtattgagagtaacattatcaaaattcaattcaatcttattaccttcttttgttttgtattgtttttattttttgactgattttttttttgtgttttgtttttaatttttttactgctatccattaacagagaggggca

SEQ ID NO: 69332 - DNA, 579 bp, Prunus persica
  Intron number 1 from transcript ppb003056m (locus ppb00305 6m.g) derived from phytozome v7.0 (chr-ID scaffold_8; pos 18282377 to 18282955)
gaatcactgctttgcgttgggagtccgctctcaaggtcagtccattttcgggttttttttagttcgaattgggtttgggcgaattgggattttggaatttctatctgggtttgcacttgttctccgtttggttgcttagatatgcagaaagagaagggaggccaaggttttaaatactgagttttggtgttttgttcaagcaatttagttgctggttagccattttatttattcaactttggactctgtttgcttcagctcgaattttgtttggttgctgagaaaatgtaggaaagcatagaaaaggctcgatttttagcttatcagaaacctcggatcatcagattgatgttagttccagaagattattttgattgttgtcactaatgatatagtcatagaggtagatgaatgaacaaataaatcccagaagcttattctgatgcaacctttataattatttatttagcattttctttttcaatttaacattgtaattgttcataagcctaatacattgtgagtgtctcctctaatggccatcttatcttttatgttttcaggtttttgaactactac

SEQ ID NO: 69333 - DNA, 868 bp, Prunus persica
  Intron number 1 from transcript ppa002454m (locus ppa00245 3m.g) derived from phytozome v7.0 (chr-ID scaffold_4; pos 8912094 to 8912961)
tgggggttggtcgattttgatccaggccaaaatccgtaagtcagcttactactctgttttctgcaaattgcgtgttttatttcatgtagccaaagaattgcatttctgcattagtttttgtgtttatgattttggtacttgtgaattggtggatctgtgatagatatgtggaatttcagtgtttgtatactaattagctttgatttactatcatgacattgcttatttttttatctgggatctgtgaaacaagaaatgggttctcatgaatggggatcagatcttcatgtgtttaatccaaatgggtgggtgatttcgtattgtcatttatgcctgaatatgcatgatctgatatttgatatattgggtctgttagatttagtgaatgttgtcctgaattttggtcttgcttgttgtctggtgtttgatatcgatttgggtctgtttacttgcttgtaggtgaaggaaaaaacattttaaaaaaagttaatgctagcatatcacgttggtaacttcttaggatactgatgagtcatttctaagaaattcattgtgcaggatgtgcttgatttgatgctttagagcttttaacgaccaacttaaagtaaatgtaatgcttgatttcacttttcttttgctctgttttgtgagaaaccaaggggatctgtcattgaactgatctgttacctgtggtttgacaatgtcctactagtgccattttaattgcagttagggttatgggattttttaaagttgtttacatgtttgtcaaactgtgtggtcgattttcacctgtttatttgtttttatgtaacttcgtgttctcattttagtcttctcatattgcttctgtagaaggttccttgac

SEQ ID NO: 69334 - DNA, 1005 bp, Prunus persica
  Intron number 2 from transcript ppa009725m (locus ppa00972 5m.g) derived from phytozome v7.0 (chr-ID scaffold_6; pos 2289414 to 2290418 reverse strand)
caggcctaggtggctggaacggccgacctcacgatgtaagtacttgaaatcatgttctcttttatgtaacacccatagtttgcatctccggtcttccatttttctttatctattgcacagtagtgtattgattatttttcttgctgtccctttttctgatttgtttaaactgtgtatgcctaaatgaatttcctgctagatttgttgtatcttgtatgtatgtctctgcctacctgcttaattggtatgcgaagcatgaacgtctgaaaaactagtttaaataatcgtacatggcaatgtggaactgaacaagaggaaagcataatcaggtcctgagagatactgagtagtattctactgacgtggaagacttggatcttgcctgaagtggggtcagaatgggtaatgcaatattgggagtttggaagttgattatggtggtcttctatccacaggttgagagacagtattgcttactttttgtggacttgaagactgccaaaacactcttatgtatcagcctacgacatggtttccttctgggtcagttatccactgactttttccaaattcatctatttccattaggtggctttctcaactgtgaattcattttgatccaggacatagtcaaatgtgattaaggcaggggtgtcagtaaatccactggcttcatataccattaaatccattattatatggtaaatagtggaagtttcagctttataatatggttgaagtttattaattgattttatatacttcgaagctattttatgttagttgactagcttggatatcccactacgttgaatgttgtgtattttgagctttttctatgtttattttatgtggaataggctacggttcccctatctctttctcagtttatctttttatcattttgttcatgctccattaattcatcttttttcctcttggtatagtttcaatagtttgcctttggttgcataattgtaacagagattaggtggtccacaaggg

SEQ ID NO: 69335 - DNA, 677 bp, Prunus persica
  Intron number 1 from transcript ppa009725m (locus ppa00972 5m.g) derived from phytozome v7.0 (chr-ID scaffold_6; pos 2290513 to 2291189 reverse strand)
cggccgactcttgaatcaaggtttctcttttgcccatgtttgtttttggaccaagtccttttttctgtgttatgattgtgatttggatttgcttttgggtgtttttagggcccaaagttaaaatctttctgcttttttctatgaacccaattgagatttctgcatcttaatagctgtctgctgttcatttctgtatatgggtgtggggtaattgacgaattatgaaagccatggaaagaaagatcagaacttgttgatacaggagaaaataatgtagatttctctgccttgcgtagctaggatgtttatttggtccttgaattacttattatgagtatgctctgcccacctttggtggttcaaagtagtctttcacacaacctcctcatcaaggagtgggatggagattaatgcttttggataaaatggaacttctttttcctcacaatattggagttgacttgcatgttctatgtgttatgttctttttcatttgctttcatcactaatctctccatttcatctgtgttctacttgtcatattgatttattaaactttgccaagaaactgattcaatgctctatattcttgtttcattatattatatattgaggaagggacatgctaaagtttggtgctcttctattttttgatagagataatacgggtttctgga

SEQ ID NO: 69336 - DNA, 417 bp, Prunus persica
  Intron number 2 from transcript ppa002525m (locus ppa00252 5m.g) derived from phytozome v7.0 (chr-ID scaffold_2; pos 23159905 to 23160321 reverse strand)
gaaaagttgtggtgttgtgagtaattttctttccttctttttccattcatatattgaatgataagttgagactatgaagatataattcttaagttaggaagttttgagatagctcaaaaacctttcttcttctcttttggcccatgaactggccatgagtacatgggattttcattgtgtttttaattcaaggacataatagaagctctgaaaggaaaaaatggacatcatgaattctatcacaaatcaatcaaaaacttgaacttgatgactaatgtcaagttttttaatatggtagtactgccattgttataaactcatcattcattgttttgctactttaaccgttttgattctaaagttagatgtatatgatgcacaggaacttaaaagatctttgtcttggtggaacgttaa

SEQ ID NO: 69337 - DNA, 821 bp, Prunus persica
  Intron number 1 from transcript ppa011536m (locus ppa01153 6m.g) derived from phytozome v7.0 (chr-ID scaffold_4; pos 7141815 to 7142635 reverse strand)
ccaaggtcttctctctctccccttctctaagtgtagttagggtttcgaattggttccgtgttcatcatccgaatgcataatttttttatgcctgtttttcaattgctgttacatctttacctgtctgggtttcatttcatatatggtgaaaatcaatgattgattgagaatgcacaatgtcatgtctcgagcttttgaatttcccgcagaacaataatgtggtgaaaatctcagagttctcaattgcttgtggatttggtactccctctgttgcattacctggacgatagaatactataggcctagcttggtggggggtaggatttaatccaataccaggtttggtgttcaaaagaagcatggataggataatagataagcccattatgtgcatttttgtaggatatcttaccctatcaagaatggtgggatacataatcctactactccaaccccttgaccttagaccaaggcgcaaacccgggacactagtggcaatgaagaataagagacatggtcactgtattcttaagtttgattgtccttccaatcagtgataacatccttctttatttggaggtgcagctgtgggcaattaccagttactcatctcctcctatctttacctcttatgaagaactttagaaattgttttactttatttaaggatcttgatggtgaatgaaacagttatttgagttgttcatgaaagcataccattatttttggctgtacaagcaagccccaaagttacttatgaaattttgtctatctttgcctgtgcaggagtatcttcaaggcaacccactgtggctgcagta

SEQ ID NO: 69338 - DNA, 314 bp, Prunus persica
  Intron number 1 from transcript ppa010173m (locus ppa01017 3m.g) derived from phytozome v7.0 (chr-ID scaffold_4; pos 11506730 to 11507043 reverse strand)
ccggctcgaccccgccaacaaactctacttcccttgtacgtcgtcgtttttctttcatttctacgccctcgctgacttcgagcttttggtcacttctatgacttattttcaattgggtttggaattttgacttttccttactctaccagcattattttaaaagcgcttcttaaaaaagcatttattttatgactttttctttcctcttcacatgctgctgagataagcggtaactttttttttttctttccttttttggaattattttggactgaaactgaccaattgtgtttttatggggtttaattttaaag

SEQ ID NO: 69339 - DNA, 446 bp, Prunus persica
  Intron number 1 from transcript ppa019865m (locus ppa01986 5m.g) derived from phytozome v7.0 (chr-ID scaffold_2; pos 20250389 to 20250834 reverse strand)
ttcctggtaagttgtaacccattaatctttctcacttcttcttcactacccagttcctcatttctaatgttactatgcttttgtttgtataaatttatgatcttgatcagttctgttgttgggtagttcaagacttgatgtgggttggtttcaatatcttgttttgtgctgcatttcgctttcaattatctggaaagagccaacccatttcacatttctaatgttctatatttaaatttatgatcttgttcagttttgttgtgtgaatacttctggacttggagtggattggttttaaattttcgatttcgatgctcttgaaatttgtgatcatgttcagttgttctgttgagtacttgaagacttgaagtggttggtttgaaattttgaatattttgttatgtgtggcatttcagcgttctttgaagagccagactttcctgatc

SEQ ID NO: 69340 - DNA, 629 bp, Prunus persica
  Intron number 3 from transcript ppa005925m (locus ppa00592 5m.g) derived from phytozome v7.0 (chr-ID scaffold_3; pos 11294804 to 11295432)
ctttattagctctcaaaatatttgtttgtgaacaggttaggcatagaaccttaattgcatataaagcttcccattttggaattacacacagagctgcagcaaggagttccttttggttttttggttactcatctattttttcccttgtgtattgtatgtatttttaattattctcgctactgaaaactgttagagtctgatgattgggtcattttatccctgctttcgtttggaattttctgttcaactgtcagtgtagtcatcactctcccaaatgtgacgtcaggaaatgttctgaagcctgcttattagctagttccctaatctccttaccatccctgcattccctcccttattgaggtcttcgagcagtgttcccatatgtctatattaggacttttcttgttctgtatcaattaactggattagtgtgttctatggttagcttgatatgcactgtttcactaacatagtattaaagcctattcccggtgtttgaatcttggaaaccctatttttggtatctaagttttgttttccttggattttttctttttcctgatgtattttgattgagaacagtacttttgataggttgacgttgctattattgaagttggtcttggggg

SEQ ID NO: 69341 - DNA, 326 bp, Prunus persica
  Intron number 1 from transcript ppa025931m (locus ppa02593 1m.g) derived from phytozome v7.0 (chr-ID scaffold_10; pos 646736 to 647061)
gttttaggagatcggtactttttcattcccaaaatggtggttttcactctatcttggatagtttttaaattagattatagtgaagctttttctttactctcttgtagttgttagatggcagcacttatgttttgaaagttcattggcttaatatcattcatttcaacctatgatatatatatcaattctcttctataaaataaaaataaaaataataaagaaataagtttctttttgttgaaaagaaataacttgttgtgccttgtgtgttttgatatcaataatttataggtacgagtcgcagtttgtccaagatatagttgaaa

SEQ ID NO: 69342 - DNA, 650 bp, Prunus persica
  Intron number 1 from transcript ppa022437m (locus ppa02243 7m.g) derived from phytozome v7.0 (chr-ID scaffold_1; pos 2261331 to 2261980)
aagttcagggacagcttgcggaggaggtgaagtcatgtcgaacagttaaggacatgttttcgttgagagacaaatacttggtgcttcttcaggaccatactaacaagaggatgaaaggttcacatgttttggagaagggtgaggcaaaatgtgtctctacctcaccatcaaacctaagttttgaggatagtgtttgggtagaaccaatttcaaggcataaagacatatgttctagttcaacattagatttcgcacaacaaaatcccaatcctaatcccaacccgaatcccaataactattacagttacttagaaaacctttgtaatgaagatacaacttttgattatttattatgaagttagcactatttaaattatttataattataagttgcttgtttttttgtagtgtttttttcttttttggggtcacttttgttttgtaggatatgagaagtaacttctaatcgtttcccagaaagaaaaattgaaggagaaacttttcatcacatgatcaatcagaattgtaatatgtcctaggaaaacgtttaattgaatcaattgtgctgtgctacacacacacacacacacacacacacacacacacacacacacaaaacaaacaaacaaacttcgaatcaacatcaggaa

SEQ ID NO: 69343 - DNA, 909 bp, Prunus persica
  Intron number 2 from transcript ppa015548m (locus ppa01554 8m.g) derived from phytozome v7.0 (chr-ID scaffold_1; pos 32195321 to 32196229 reverse strand)
gaactctgggctcattttaatcgcctccccactaggtacgtacctccaaacgctagcctgctctgtgtgtgtgtgtgtgtgtatttatgtctgtatgtaatcggtggatggaatttcaagtgcctacttactctcgcgtttattatttactttcaatttgtttcttggtaacgggtcacgcctcctttttaattcccgtgtctgtttttgttgcatattccttgttgactctgcttcatcagaatctttgattcttttttattctctgtaaaaatagatagataaaataaaatatgtcaccgtcgtcacatgactttagtaaaattaaaagtcttttgaattgtgcaaccggaatctttgaatttatattacactccctataaataaattcgtcctctttctctgagaatgtgttcttcttcatgctccatggggatggatggatttaagttggccacagattgattgctgagaaagagaaagccaaaggttaaagggcagagaaagatacgtttattattgaattattattttgctccgtatgtggactgcaccgacccacctatccacccatgacccacccacccactcaaatacattatataggataggtgtccaaatttggtataattcgataatatgtatatatttttgcttatgactcaaaatggagaagttgtttctctttgacaatctttcttgtcttgatcgaaaccagactagtattacagaatgaaactctctgtctttttttcctttttgggttctatatgacttaatgttggctcctatttgatgagatgagtgctgctacgtttacattaatatgcattataagctccgatttgaacggttgcttgcactgcgtaattacatttgttgacctgattttctctttgaattgaaggt

SEQ ID NO: 69344 - DNA, 642 bp, Prunus persica
  Intron number 1 from transcript ppa016681m (locus ppa01668 1m.g) derived from phytozome v7.0 (chr-ID scaffold_2; pos 22705191 to 22705832)
gtttgtagagcaaagttcatgctgcacatctttcagtagaagataaatctttctcaatggcagatatatattaatcagtaatttatggaacaacaaagtgtgaacttaattaaataattagataaacagatatagtagtttaagatggtattaatcccaaatgttgtaaattcctaagttatgccttggagtatcccctggttaagctccaacccctatgtcttccataggtaaatccaaaccattaattgtattacataggattccttcaccaaatactatggatttcttgattgagaaaccttctgatggggtgggcatcttgtggatgatttcatgcctagaagggtagttcccgcaatcaaattgtttgtaatctaggtgaatctgcagacttagtttgcagttgaagtaaacgtgacactgataagcatggtatgaattccacattttcttttcaattttctcgataaatgaaaggcaaggcgatttttatgtctccgtcataatatgtaatttttcgacatactaacctaagatcattttattccaatgccatttttgaaactccttaaacttttggtgaaatcatataagtcaaagttaccattttcttcaggcatctgaggccggaattgcaaa

SEQ ID NO: 69345 - DNA, 681 bp, Prunus persica
  Intron number 1 from transcript ppa019618m (locus ppa01961 8m.g) derived from phytozome v7.0 (chr-ID scaffold_6; pos 28071644 to 28072324 reverse strand)
catattttgagtctcaggataataaggtatttcagttatttttttaattactttattaatttatgcctttgttgggaactggaagattaatatatatactaatgacagtggttaaaattgggaacaatgagacttaaaaaacttaagctatcaagaaatgtgttattaatatatatctacttaaattcttctccatgtttaatttatggttacatgctgaataaacgaagaataaattcaagttcatcatatttcttgtaaattaagacatttggcaatggggatggaagattggaggattggagaaccttttataattataactttgatgttagatcacattgaatttaaaagcttagattgttagaaaatgaattaaacaaaaatttcaattcaattgtagttgatttaaaaaattcacgttgaaaaccaacctccctctgtttttggtgggacatgctagttgctttacaagttacatcatatatttactggacatatgagttgtcccgtcacatacgatgtctaactctagtggaccaagtgcacagctagtgtaactatcttttagctcgtatactagttgcaataaaatatgcaattgttgaggttgccctttacccttttttatctttttctggaatagggagaagaagataagacagaagttgatacggggca

SEQ ID NO: 69346 - DNA, 487 bp, Prunus persica
  Intron number 1 from transcript ppa010102m (locus ppa01010 2m.g) derived from phytozome v7.0 (chr-ID scaffold_6; pos 22411941 to 22412427)
ctgcttggatcattctggcttaccttttcgtttgtgattgcctcttttgcgttggattttgttgcccatgtgtttggtttctgagaaaattgagaaggaaaagaaaagaatttgaactgattggtctctaccctttttcatgggtttaattaccttttgaagcatgttgattggttggttaaattttttggtttttgtagaagtagaggtctctgaaagaaagatgtaagaaattaatactctgcttcagtatagaattctacagagacaaaagcaattgaatttcagaagatacccagaaaagatggcaaaaaaaaaaaaaaaaaactatttacattgaattttaaatggattttgatatgctaggtagcacttctagttctttttattattaaatttcactttaattcttgatctctatttcatgagcttatgtgattgttgccctgcaggtaactgtggctggttacacagcaggccaaagggc

SEQ ID NO: 69347 - DNA, 779 bp, Prunus persica
  Intron number 1 from transcript ppa018142m (locus ppa01814 2m.g) derived from phytozome v7.0 (chr-ID scaffold_6; pos 2366067 to 2366845 reverse strand)
tcctaaaccccttctccgcactattgcttcaccaggtaatttctcaacctcccttcccttctactcttattgatatggaaaatgggaaatgtttgttttggattgtctttctgtgaagtttcaccaaagtaccttcatttagttgttcttgcggctttggggttttttttattacttgcttttgctgcttcttgggtcctctagttgttaaaacccgttcccttagcatcccatcattagttttgatcttttgctctattaacttgttagtggttgcagtatgttctgctattgatagtgatatacaaagtttgcttaatttcttcctttttggataatttttgttaaagaaccaatgacaaaagcttacactttatgaaattagccaacaatgtgtgtcaaggcaagcctatacaaaatgcagacataaatagaacatttgcctacagcctaactctaaaccttgtaattaacaaataagtggggaatgggatgggaggtttcgaaccacaccagcaaccagaattttgagccaacattgtatagagaggcaacaattcttatccaccttttgccctattagatcactcatgaaatgccatcctctgtataacatttatatgtgctgcgtttcagcatttttggttctttctccttgttttatgtgatggtttgatgggacctgtttacaagtgttccattcttcatcttgaatttttttttttttctacgttgttggcacagaatttagcagctttgagcattgttttactactatt

SEQ ID NO: 69348 - DNA, 503 bp, Prunus persica
  Intron number 1 from transcript ppa000967m (locus ppa00096 7m.g) derived from phytozome v7.0 (chr-ID scaffold_5; pos 15520878 to 15521380)
ctttgctcagaaagaacttaactttccaggtccttctctctctctctctctctctctcttattttttgtgggtagttttagcttggtttctgaaaactgagattgaatgcagaaaacgaagaagaagaaaaatcaaatgaagagtattctttgcttttctccttatgtttattttcttttcatattcattctctcttttttggcacttatccgtgagattcttgattgcttgttgatcaagcggttactttttccttcaactttatctcacagttttaccttctgggttcattttagttagtaaaattatgggttaatttgtgccatttgatttatttttggttcgggttaagttgtctttcttttatatgagtgatgggttgttgggtgattgtgattttgtgagtttgcaaataatgttttgtataaaatctgatgataataacatatatacgttctcttatgcagaaacgaaatatcaaacagaatattcggctagtttc

SEQ ID NO: 69349 - DNA, 499 bp, Prunus persica
  Intron number 2 from transcript ppa015459m (locus ppa01545 9m.g) derived from phytozome v7.0 (chr-ID scaffold_1; pos 35227029 to 35227527)
gggaaagaggcagcaaggttttattggagaaaaaggtaaactattaacaagccctatttcattttaaaacgcttatattactttttaactttaagttgcgattccttatgatgaaatattgcaaggagaaaaacagagtatgtatttcctgcatttcacatcttgatctagaaaaatgaacaggaatgaaggaatctccttattgacttctgcctctgtgaattaggaagtttttgaagtctagatcttctactaagttgttgccttcagatgcacacttgcagcatgtcttgaattcataataaatgttcccattgtaatcagagctagctaaattcttttgataaaaaaaaagctaacattttgagttgcatgcttaccttcttattagttggagttaacaataggagccttctgaacattggttatcaagttgaactcataataccaatgtttgcttgcaggaattggatttaaaagtgtgtttcttgtgagttca

SEQ ID NO: 69350 - DNA, 981 bp, Prunus persica
  Intron number 1 from transcript ppa005706m (locus ppa00570 6m.g) derived from phytozome v7.0 (chr-ID scaffold_2; pos 21157456 to 21158436 reverse strand)
gtcgctagggttttagcacagcgatctctctccaggttcgattctctctccttttcttctttgttatgcttctaatatcaatggtatttgatcgttgttagcaatctctctcgttgtttttatatgttcgtttctgatcttgaaatcggtttatgctttgaatctttgtgttttggttagtgttggaatgctattgctatttagtgatttggattttagattttgtgttgtggatctgatttcgttatggttgatcttaataatcaaactctgaatcgtctgtgagcgtgttttgtttgcatgttttgtcctgtaatattttttaaatagtagatctgactcttttgagaaggactgcacatttttttatcaatgggccttcctttgcttctggttttttctgtcctacattttcttttagtatatctgatctgttttacattggtgaaattttgtgttctcaattttgattttaatctacttagatttaccaactctgcttcaggtttttgtcattcatcattttgttttttcttcgctaaccaatgcaattggatttggttgatttacaattgtttgccaaatatatgattttttttttttacgtactctgtttcagttttaatatgctgaatcttattgattgttcctactgacaattaaatttttgctatcctaaattcaattttaatatgctaggatgtctgactgactctgcttcagtttttcgtaaatcttttttattatttaaattctgttcttaaaatgtttgctctgttaaccgatgcaactggcttcggttaatttactgtagtgatttcctttgtggtgataaatttgtattttgatattgatatggttttcaggcctaccttgctttgtcattgaagtttttttgtcagtggtggcttttttctgtaatttgtgactgggtttcttacattttttttttcttctcttaattcataaacagcttttata

SEQ ID NO: 69351 - DNA, 674 bp, Prunus persica
  Intron number 5 from transcript ppa011174m (locus ppa01117 4m.g) derived from phytozome v7.0 (chr-ID scaffold_1; pos 43511626 to 43512299 reverse strand)
ccgcagttggtgcatcaggggcagtctttggattagtaagacattttattgttttttcttagccggactctttttctggatttcctagatgcaccatataacctgccagataatcttggtttaatttatttatggcaatagagtagaggaatccagtaaaatcaggttcattgtcatgcagtcacacaaacaaagttgatattcctgcaattattaccttgttgtttatttttcccccatttcttattcatctctcttcagaagatataatgttttccttttcctgtatttcaccatttaatatataacttcatcttttacagttttcatgaaatttgtcagctgcaaacttattaaatttgtttcaaaataaacctctgcaacttctgaatatcattttacaggatttcctcctccaaaagagaaacaataagtataaatgaaaaagaaacatttttgtgagtgacatgctgctttgaaaaaggaagattagttcatatctttatatattgaattttaaaaatctgcctatgtacctactcagtgttatgggatgccaagtgaatcttctttcaagctattctggcatggtattgctctttctcatctcctataattaatcaaaccgctggctctgatctttgatttaggttggatctcttgctgtctttgtc

SEQ ID NO: 69352 - DNA, 944 bp, Prunus persica
  Intron number 1 from transcript ppa001259m (locus ppa00125 9m.g) derived from phytozome v7.0 (chr-ID scaffold_2; pos 25959630 to 25960573 reverse strand)
gtaatcgtacggtctctccaagtcacttttttcaggtaattctatcgcttccctattcaaaccctaatttgttttagcgctaacttgggttttgaatactgttgtatgtttgatcttgattgtatctgttcgattcgcttaattagtattcggttcgttattttcttaagtaattttatggcctgtgattgctttttgtgatttttgtttttggtatgtgttaggatttggtgaaagtgtatgccttactgtatgtaatctcattcgatccctgattttccttttattcaattgtggtttggattttctgagtgggggatgcgttcgttatggatttgtttggtacaagtagggtttttattggattgatatcagtggggtagggtttttggttcgtgaatcttggttctttgaatttaagaaagttgcgctatatatatatatatatatatatatatttctttgattaaatttggtttctcgataattcgctcgtagtctacagaaacagccactatacgttttggtacgttatttgtggatttgggacaagtttgtgtgtgtattttccaactaatttgaatatgttaaatatttgaattgtttgcgacctttttgcagtgcttttgtgaacggttgtcagtttgattattttggatttgccaagaaaaattcatgggtttgcagtttgcagtcacatctttctctaaaccaaatagctcaaaaggaaaaagatatttccagccttctatttctctatgctcgtttcatttcattttctttactgccaatagttgtgctctaataatctagatcaatcaaaatttcttttggacagttttgtgttctctttaaaatgttatgattcatttctccttttgcttttatattgctccaatgtatctaagcaatgaaatttttgcactctcagatacaatacagcg

SEQ ID NO: 69353 - DNA, 873 bp, Prunus persica
  Intron number 1 from transcript ppa007411m (locus ppa00741 1m.g) derived from phytozome v7.0 (chr-ID scaffold_6; pos 25896299 to 25897171 reverse strand)
cctctccgacggacgcctcgtcatcgacctcctctgtaagtcgacccctccctttatacttgttaggatcataggattaggaaccgtacgtcgatgaaatcgatcttgtgagtcttgggggggcgtagttggctggctctgtgtcggcagtttggagggtgtgtgttttggagctaggagtttactgttgttatgcgaggaaacgacgtcgtggagtcaaaacgaattacattacatgacgacacgacgtcgtttgacccgaaataagttgcattatgtgatgacacgacttcgtcaacgtaaaagtcttgatgtttttaaagttatgttcttttaactacgttggttagttcttctgcacgtgcaattagatatgcagtgaaaatttgattgattcaattcgatccaaactttgggaagctgcacgatataatcaccttattaaaaatgtcaacaatgtgaatatagtttgacttatttcagaatatgtgtagtgaatttgaattaggtgcagcaagccatgtaagtatgctgccatggatatggggtcaaaaggacatcagtcaataccagtgatcaatctaatttggatcttgtccaaggattaaattctagttttcaatgagatctgattaatctaatatggggtaagtttttaagtttttttctgccagacaatctgtcgatacgggtatgggctcgtatcttttgtgattttaatctgtctcacagcatgtgaatgtgcagtttaataaactgaatactacagacacagcctagtcacccttgtggtcttatgacagagtgagaggagcatgtattaaaaaatggaaactaagataatgttgttttcttgtgcaggccagagtctga

SEQ ID NO: 69354 - DNA, 733 bp, Prunus persica
  Intron number 1 from transcript ppa000784m (locus ppa00078 4m.g) derived from phytozome v7.0 (chr-ID scaffold_5; pos 12913320 to 12914052)
tttggttctactaaccgtaagcttcttttctctatcttttacttgatccttgagtttgattttgcttcctcatcctaactgcattcatttttttttcatttcattccatatttgaataattgttttctatgtttttttttttaatcacacatatcgtttcttctgctgatgtgttttctagattttactgttgttttctttcgaacaacgtcaacgacgagtgtaattttatttgttctttccttcctctgtgcatttttgtgtgtgcttgctcacacatgtacttgtataatgctcaaaacttttttttaaaattttatctttctcccccttgcagttttctctgtttcagggcaactgttttttatgtcttccaggcccctaataaattgttggtgatagttgtatgaggactacccttttcttcgtgaaattctccttctggtcctatgaacttggtggtgattttaagactatgaattttgaagatgcgtatagggcctgtaatttgtcattcctgttttatttgtttcattctaagatgaacatgacatgcatttactatcagttttgggctatgattatgtgtatctgatgttctgttagtgctgcttttactccctgaagaatctttgtgattggtaattttttttcctcacgaaaattaataattcaatgtgtggaatattgtttagcagcttttgggcagtcatctagcagcccgtttgcgtcc

SEQ ID NO: 69355 - DNA, 1031 bp, Prunus persica
  Intron number 1 from transcript ppa012067m (locus ppa01206 7m.g) derived from phytozome v7.0 (chr-ID scaffold_4; pos 11026833 to 11027863 reverse strand)
ggctggctgttgcagctgagcagaggagaagctctgtaagttctctctctctttctttcacttcatattaagccccttcattgttattgcttgtctttttaaacattgattcttttgctgaacatattagtatataattgaagttttttttttctgtgtttgtttgttgatatttactgtttgtttgctaagaaaatgcaaggaaagacaggaaactcgatatgttgtattttaattgtttgggattgaagaagataagaagcaatccatttcttggatggacctaatacttcaacttaggtatttggatcaactcgccataggggtttttcaaaatagtgagaggcaagaaaattgtgttcttgctgacccggataaattgaatcaactctctatggcttgttatgtgttttcaagaaaatttgtcaaattaacctgttcatgcatatgagtttcttggagaatttgccatgaatacttctggaacaaattgtaatgaatgttgtgaaacatatagaggcatatgaaattgaatcatacaaataaatttgattccaagaataagatgggtgttctgaacttgaatgacaacttgttttgtgagattttccagccaaataagagaagttaacctctttcattcagagtggttagttaagcataaaagttgtggttaaaattttagtattacccaaaacttcccacttataaatctggctgcaatgatatttttttctcttcttatatttctggtgtgccgtaccttctatttggtgttctgataaaaactaaatttatagttgatttgttttcatatctcaaaattatacagttttcccctacccaccaaagtttgaattatgaaatcttgacgtgagccaatttagttgtacttagctttattgaaatacaggagttttgccttgggttgggaccttgacaatgtagtgatatataacagcttgctgcttgctatacaatagtaacaatccaatcgtgcccttaatgacaggcaaggatcgttcaggata

SEQ ID NO: 69356 - DNA, 573 bp, Prunus persica
  Intron number 1 from transcript ppa004532m (locus ppa00453 2m.g) derived from phytozome v7.0 (chr-ID scaffold_6; pos 3429267 to 3429839)
acattacgcagctaacgaaatctgtggaacttagggtttgtgataattgagctttaattaattaggtttattgaattttctgtttaattgttgtattgggtttgtttcaaaaatgaatctttagattttctcagtaataaatgttggtgctttgatgatttcttgcgtaattctttatacttatcttaacggttcttgttatggggttatcattgtgtgaagaattattaggggttctattcataattggaattttttttttcaatatcaattccctttggatcttgtaaaagcttgttttttaacatgtttaattttaaatttctaaatttaatagaggcctacagtctacttctaaattaacatatgattatttttactgattctgcttttggtttttgttgtattgtttcagatttgatattccttgagtaaaacatcaatctttctagtcaattgaatctccttaggatattttgttaaatgccgagcaacttcaattgatgaaacattgtttcctgaatctatgagtgattatttgtattctgttaccaggatcagctattatcaagc

SEQ ID NO: 69357 - DNA, 892 bp, Prunus persica
  Intron number 1 from transcript ppa000350m (locus ppa00035 0m.g) derived from phytozome v7.0 (chr-ID scaffold_7; pos 11239022 to 11239913)
ttagctacaatcagctccagaaggtactcaattatttctaatttattcagtttgtgcatttataatgggttgagattgatatggatcacttttttgtatcgtgttttatcaatgactttaatgggcacttcgagttggaattggatcttgcactaccaagctatctgatggaggtgttgttgaggttatatttgtgcgattgtttattggaggtctagttttgattggaattccagtgttttgtttatcggatccacgctacttgtttatatatatatatatatatatatatatatattccattagtgtagatataatcttatgattaattatgtatatgagttgagaattgcgtaatgtctgtcattatcagagagtgtttatcatcagcattttgtttccaaagtgctcttcatatgtgaggtaaggacgtataaagtagaatagaaggaaatgttatgattttgattattcctggtgggctagttataatggagaatatcggtataccaagtctaatgcacctgtggtgcttaggtcattgtaaaaattacaggcttgcatgctaagggaacctaaaacacagacacacacagaaacacatgtagactcttcatccacacaagcatgcgacaggaagaaaagttgcgtttgttgtgtcttgatatacttttcgtagttactggtcctaagactctggctcctttaataagttggtggctgtagttgggtttaataagaaatttccttgtagtaaggataacattgttcaatacacagattgcacgttattccttttgtttttgactattgatggtgtgaatagtctcttatgaagttctatttacttttgacagttttggagtgagctgttgccacaagctcggcagaa

SEQ ID NO: 69358 - DNA, 687 bp, Prunus persica
  Intron number 1 from transcript ppa007340m (locus ppa00734 0m.g) derived from phytozome v7.0 (chr-ID scaffold_3; pos 21721832 to 21722518 reverse strand)
caggtcctcttttcttcagatcccttgaaaagtttctatctctgattttatttcgatttgatatccttatcatacaacaactcattctacctgattagatctgtggtcttttatcttcgtatttgttcgtaacatttcatttgtctatgttttcatccatatattctgtctaagttctttgtctgcttaggtctgcgatttgttttccatggttcacaggttcttgccctcacgtatttgctattaattttgaatatctcggtccttaattccactgcatcatgatctgaactggatctagttttcaattttgtacagttttagagatttttatttcattaatatttctccactcatgattttccccgctaaccattggttgtttttttccttctattttctatgtattcgattgattaatttcattctcattctgtattgattgctttcaacctgccactctatattgatcgtttgatttagttatttcgctttgtaatgttctgaatgtaagatgtttgttctgttaacttcaatccttatttagtttatcatatcaaagacatctataactaacatatttctcactacacttagtggcggatgtagataatttaattgacgctgtggatattaattgttgtgtttctagattgacccagcaaagtacaaaggcatatcatctgg

SEQ ID NO: 69359 - DNA, 706 bp, Prunus persica
  Intron number 3 from transcript ppa021668m (locus ppa02166 8m.g) derived from phytozome v7.0 (chr-ID scaffold_2; pos 24323256 to 24323961)
tttttcacagcgttgaaatcggcctagtcttagcggtacgtacgactatatgtcacaccagtaaaaaattattgtgtgtgacaataacaccatatcaacaacttaacatcacttcttagaactaatgtttcttttttcttgtgtgtaggttgcaatatctgttacctcaccacaggttcatcactcatcgtacacatttaatactaattaaattaaaggtttaattagatgcatttcatgttgctaattaagcgaaaaaatttcatcaattttcagggccgttttccagatcagcagttaactacaatgcaggatgcaagacggcaatgtcaaacgttgtcatggcaattgtggttatgttcacattgttgttcctcactcctctgttccattacactgccctggttgtgctgtctgctattataatacccgccatgcttggcctcatagactatgaagccgcaattcacctctggaaggttgacacatttgactttgttgtctacatgagtgcctgtattggcgtcgttttttggcagcgttgaaatcagcctagtcttagcggtatgtacatatgtcacaccagtaaaaaattattgtgcgacaataacaccatatcaacaacttaacattacttactagaactaatatttcttctttcttgtgtgtaggttgcaatatctgtgatcagggtacttttgtttgt

SEQ ID NO: 69360 - DNA, 776 bp, Prunus persica
  Intron number 1 from transcript ppa016761m (locus ppa01676 1m.g) derived from phytozome v7.0 (chr-ID scaffold_2; pos 3843772 to 3844547)
gttaaggtaagcattgagaaatgtttggccactttttctttactaaaacttattatctatttgtcatgaatttcattattagtttctctctctcattttgttattactaggaacagtcttttgttttgcctctctttttctgtttcggccttgtagaaatatatataggagtatgatattgtattctgaggagcaaccctaattagacgtagcctcactctcttttcttctttttctctcctccaatctctcaatgtttcttaccttcatctaatctaacttctaacttggcatgagggcaacaaagcacattttaagttggcattaaagcacatctaccatgttcttctctccattctaccttttattgggttatgtttggttatgattgctagtttgtctggggccccgaaacaaaccctacaatcattgggaggcaggaaagtctagcaaatagcaagatagatactaggtatcttgaggaatcaaaaccccagactatgtggggctcccaacgtttctttgtaaaggtcccattccttttggcatagcaatttcatatacataaactggtgagaggcaactccaatgtggctgatcccccgtctttacttctcttttatcctccaatctctctacttttcttatcttcctcacatgtaacttctacaatttccatttattatcaattatggtttatttccataaggtattaggatatgtatctaatattgcttgcttttaataactcaaaaatgtgcatcaggacattttgg

SEQ ID NO: 69361 - DNA, 611 bp, Prunus persica
  Intron number 1 from transcript ppa021053m (locus ppa02105 3m.g) derived from phytozome v7.0 (chr-ID scaffold_12; pos 401879 to 402489 reverse strand)
gtttaaggtcagaatatatcattccatataattgacaactatcatttcattttcttatgaattatatgtggggctccttctaaagaccttttcttttatgtaaaaagtgagaatcacaatgttctacttcaattaccatgagaccattcacagtgggctctctaaacgacctatttatacaaattttagggagaaattagaaaaatacaactccaaaccacactccctatccacctcctaaaataaggagacctctaggagctcctaaatttgaggagagagaaaggactcctaaaacattgtgtgtttttagctaacttgaactgaaagatagggagcatgattatagatgatcttaggtattagcgcaaggaagaaaaaaaaacctaaatcggacatattgtttttcgtaaatattaaaatggtttaaacggtttccaatgttaataaatattcatatggtcatcatgcaagtcttcttgtacctcttcccttaatggtttgagtttatctggcctttcaaaattcaaggatttaaggcagtttcacatgaatcttttgttcaccaaaatgtaggaggtggagactattacatttcccaggagcaaaga

SEQ ID NO: 69362 - DNA, 964 bp, Prunus persica
  Intron number 2 from transcript ppa008445m (locus ppa00844 5m.g) derived from phytozome v7.0 (chr-ID scaffold_2; pos 13303034 to 13303997 reverse strand)
gatcgggacgaagagactgctcgcatccaatgtaaggctttttttttttttttttttttttttttgtagaatgttgaattgggtcgtgctgaagttgttcagaatgtgatgaaaattaacctgggtctgtttagatcatcaaatgtaggctacatacatggtggaaaacatgatattctcacactgctgtgttctttttgtttcgttttcactctgcaagatttgatttttgaattccatgaaatggtggatccaaattatactttccctcttctaatattaatttcaaatgaaaatgtgggctacaattgttttgctcaactagtctttcaaactcttgatatcttcctgatgataattaagatgacaaacttttgtgaagacttccaatagtaaagaatatatgccgtattaagatgacaaactgataacgcagaacctttgatctcccaaataaagctaaaggaaatcaaaattcagaagaaaaattaaatcttgacggagaaaactttgaatatccatatcctaatataaaaaagatagaggcatcctacagctattttgcacaatcttaactcagtattacttcaaagaaagcaagcgcagttatgatattgcttgtacttggaatagcttgatatatttatgttggtaccataagcacccaaatgctatatccttgatggactttttaagatagttttgtagagcatccttccgttctgctaccttttttatttagctacttattcttctcctaaagccagctggtatatccgttgactgtttaaatttccaaatttttcttagtatgtgggttatatatgatgaactttctattttgcactgtttttagtcatgtgatgggataatctgaccaagtttctcttaattgttaccataacaaatgatgaccttctgttttgcagatttggcagagattgcaaagtttttgggtattact

SEQ ID NO: 69363 - DNA, 301 bp, Prunus persica
  Intron number 2 from transcript ppa023700m (locus ppa02370 0m.g) derived from phytozome v7.0 (chr-ID scaffold_3; pos 21821700 to 21822000 reverse strand)
aggtaataatcacggtcctacacttacaggtgaaaaaaaaaaattgttaataaagtgtttgaagtggatttacaagttctggtggcaaattctgaataagtttttgttttggaacgtgttttgtcttccttaccaacttttctctcctgatgaatttgatggactggttatgctttagtttattttctctctttgaattcctatttatgtttgtgcactgaacattgtctcatgggttgatctaactaaactgattattatatcaggtacactatctctcagctattcagcatcggcatat

SEQ ID NO: 69364 - DNA, 768 bp, Prunus persica
  Intron number 1 from transcript ppa000241m (locus ppa00024 1m.g) derived from phytozome v7.0 (chr-ID scaffold_1; pos 31380102 to 31380869)
actttcacaaatccaagactctcgataacaaatatgtaagaagagagctcaattttgcaatctacactttctgctttccgacgcatatgtaatgtctaatttgtgtttggctggttgcaaaatgtgggtgaagatattagaatcagaatgtggatagtgtttgtcgattatatttcttctccgcattaattggcaactaaatggaggattagggttttgtttctacgactgtggttttaaagttctttttgaatttgatcgtattgatttatgaaggttttttgcgtatggtaaacatgaaagtagcttgtccagtgagcgacttagttgtgattggtcagttggttgttgggcggtctttccctctgatgaatctgtatgtatgtatgtatgtatatgcttctgaacactgctttgtttttctttccctgcaatttcttaattgagcattagagtcctaactgttttgaggttatgaattttgtggttttcagctgcatggtttgtggcttttaaatgacactcctctccatttagttgcttagaaactggaatgctgaatctagtatttgttgctcaagtagatgtctttgactggtagaaagtatttcaacatgttcccccgccccttattccaacttacttgcttctcaaagaattaagataaattcgtcaacaactagctatggtcttaagatatcaataaaatattttcaggttttcatgttttcggtcggaatttgaattatttaaataattttggtgtag

SEQ ID NO: 69365 - DNA, 528 bp, Prunus persica
  Intron number 2 from transcript ppa000241m (locus ppa00024 1m.g) derived from phytozome v7.0 (chr-ID scaffold_1; pos 31380973 to 31381500)
agaatattgctcaggaggatctcaacattatagttggaccagctttttctttgtacaatttttagttatttttacatgaaactaattaaaggaaataaagttgcatgaattttttttttttttttcaaaagtcattttcttaaaagttcatcagcttgattgcgcttaagatttcttctttatgttaatctctctggaagctgatttactgaaatagcacaattttttggttaatttctgtaaaatacatatgtatttatgcagatatggcttgtcttgaagtttgtttctcccagaagaattaatttttacatttttgcaaattcagcaatgtacatgaaatcaaaattatgatttctattcctttgtgttacttaaacataccatctcttccacatttgatgtttccaatgtgtactactttaatttggctcactgggtgctgtttttcatatgatcgcttctctggttgtacaatgcggtgacatcttagcaagagattgatttgctcaaggtacagtttttttt

SEQ ID NO: 69366 - DNA, 731 bp, Prunus persica
  Intron number 1 from transcript ppa002504m (locus ppa00250 4m.g) derived from phytozome v7.0 (chr-ID scaffold_3; pos 12743758 to 12744488 reverse strand)
tagctattgctgtgcatcctgaggtaggttaaatttctttttctggtatcctgtaggagtttagttatggatcgaccaggtgatgacaattttttatggtaagtaatgcttaagcaatttagacaggtgataggttcacaacttcagacatcacttttgatttttgggatcaacatctatttacctaatcttttatataaattccaaacctaggctttattgtgaagagctacattaatgaatagtgcttagtatttaaattccaaaccagtttcctccttcaacgtaccttaaatctagtgagttatccaatcctaggcaccaaatgagccctctatgtcgaaagcaagtgcaacctactccaaatatgtggcccaaaaggacaatgttggaacatatgtttggatgattcacttactgctttgttcgacttacaccaattatgaaaagaagaatagggcctcctctatggatcattttggctgttattcccttgaacaatgttggtctctataatatttggctattttctttttccatgctttgaaataatggagttttccttatcccatttcatagtttttctttcttttctttttagccaaaggacagtaacttgcatgtttctgaactccaattgctatcatagctgttagtctgaatgaaatattttattttgattttgatttattcttggtaatatccaatgtttgatgacaatgtcatgcagg

SEQ ID NO: 69367 - DNA, 565 bp, Prunus persica
  Intron number 2 from transcript ppa009560m (locus ppa00956 0m.g) derived from phytozome v7.0 (chr-ID scaffold_2; pos 17651290 to 17651854)
tcatcaaaacccagtttgggaaactcgatatcttggtatgtatatgatcatagctgcaggtttcttgaaaaagtttacgtcttttgaattgaactcttaatccgaacgcgatttaattgaaggagatgaaatatggaatcatatagaaaatgaaattggagaataaaaatagcaaaccaagtaataactagcgtaataatatcatcaacaagttaatctttgaaataattagaagtcttagggtttttgaataacaaaacaagtttcacataactaccagttgtggaagattttacttttaaatccctttctgtacaatttacaagtatcctagaaagatcagtggctggaattaaggggtttggcaaagtaacataattactgtgcttctttcaaggcattggcctttatggttggtatggttgtaaaaatagagagattgtcagagtactcagaggatctatcaactttcttttcatttcgttttctataaaaaaaaatctgttcttttctttactaaaagaaaacagaaagtgaaacagttgggactctgcacaggtgaaca

SEQ ID NO: 69368 - DNA, 858 bp, Prunus persica
  Intron number 3 from transcript ppa016510m (locus ppa01651 0m.g) derived from phytozome v7.0 (chr-ID scaffold_1; pos 4995256 to 4996113 reverse strand)
tgtccaccttgtgagagggtaaaagctcatcaccataaccaagcagctgcaaagaacacagaagatctcactgtggtccggaagagtaataaattgcagggcggctttgacggtacaaattaactagggagatttggaggctatagcttcatagccataaccataactttatatacaagtgcaagaaattaagcaacaaaagcattgatcatgttgatcaatcaacaactacccacatgactaaattgaatgcatgtgtttccaaagagggggggtccaagtgttctgctaattaaaaaatagggtagctagaaaaagaattaatgttatattataatttcctttacaaggatgtatttgatttgcatgcaccttttttttttattttttaaaaaccatatcaactccctcacaagcacaattgtaagctataggatcttggtattgatattcttttggcatgttttttctgttctctaatcattctaggaaataaggatatgtctctttcaatcaatcttcttttttgttatatatggtatttaatttttcaattcacatattgttatgatttgtatctgatctccatttatgaccaaactatgcattcacatattatatattcctcaagaactcagtgatacataaaatcgatctgcacatatatattgaactaagattttctagtaaagtaaggaatgccttttttttaagtgatgaatttttcacttctattttgtccacttacactctcttttattcacttacactcccttttatttttcaatacttcttttatattattaaaagcgatagtaattttattgataacacagaaaaaagtacagagtagttgca

SEQ ID NO: 69369 - DNA, 668 bp, Prunus persica
  Intron number 1 from transcript ppa005931m (locus ppa00593 1m.g) derived from phytozome v7.0 (chr-ID scaffold_3; pos 21919035 to 21919702)
acgccatagaactttcggtcgcaatatttaaaaaggttcgtttttattaccgattatcaccatagcttctttcactgctcgatttctctatattaaatggtagttgattgtgttggggagagtttctttttctcatagttgtcttcaactacgattcgatttcagagagtttatcagttcatcttctaaaatatgatttttttggaacatcttttacaatgccattaggtcgtaattgaaacaaagttagatagttaggttgagacggaactgttgggagcaatatttggacaatggtatttcctgtcctttggtccaaaacaagacccaatatgtttgatttttgaggttctgtcctacattaatttttgtagttcactcaagtggtaatttcagttcatgttaagaaacttggctttttttatttttaatataggatggaagttggagtatggtaattcataatttgagtaaatatatatggctacatgaacttaaaaaaatgcttctatgtctttttttgtttactcttttttattgattattagaagtttcttattgtctcattttattagagctctcatttgaactaactttcaattggagtgctattgaatgatatatgttggctatattgttgtttttgttctgtcaacagtaaactcgca

SEQ ID NO: 69370 - DNA, 833 bp, Prunus persica
  Intron number 2 from transcript ppa002372m (locus ppa00237 2m.g) derived from phytozome v7.0 (chr-ID scaffold_7; pos 1612571 to 1613403 reverse strand)
ggctgagcttgtaagcaacagaggtacttcccttactctctgaattctagctaatacaaaaagtgaaaataacatataggaaaatattctcttgccagaatgtttggcaacataagatgcttattatgttgctagattgtgaagctagaccatttcagaaaaattcgtgcttgaatgtgtggtccagattcgcattctgacaagaaagttcaaaattcatgtgtgtgagaaccattgaagcaactgtttgaatgcctttctgttgtcaatacattttcagagtttcttttcaaatctgatgtatgtagtatgagtcaagctggcagacaccattttttctgttcttatattttggaagtggagggttgtggtgtcttcctgaaacattttactgttggattaactcttcattgagatgtttaggattatcctatgaatgctttttttatgcaaagttgttgtatttgagttaatgtgccacccgcttgtgcaactgtgattgagtacaaaatagagaaatattctacttttttgtgacacactgatttccatctttatctaccttactctctgcatttaatatgcactaccagatccctcttcttctttttttttcctttgatttcttttctgtcttgtcagttttaagttcaacaacaggttgaatgacttcagattatcagtgcatggttaaaaagttctcttcggaatcatatgaaatgtggaattcactgtattgctaaatataaaatgttataggttttgaagctgagtcttgttaataacgttttcccacaggttttgaagctgggggccctaacgttccttccaac

SEQ ID NO: 69371 - DNA, 614 bp, Prunus persica
  Intron number 1 from transcript ppa021772m (locus ppa02177 2m.g) derived from phytozome v7.0 (chr-ID scaffold_5; pos 3233655 to 3234268)
ctgaatatctctgctgcaattctgagtccttatcggtaaaactcttttcctcatttggtgctctctgttttcctctgatctgttaataatgtcttcccattttttttggttaggtagggctttgccattctctttgtttttgaatgttacctcagtgtttatttctacctgcactgtttttgtcttctatctttttcttttcactgtgtcgaaattacgaaatgccttgtgctagtctaagatgtgctgtgttacgtagttcttgaactctgaaattcataacaaagttgtacactaatgtccaagtacattacatagtttaagcttcaaaagtatacctcggagttcattactactcttctaattagtagctttgaagaatttcctttttggtttgaattcagcttgaaagttaaccaatccttttttgttgcactctttcagctttctcttccatattgttaattttgatgctgcagaagtaattccatttaagctagttagagttgtttatacagtattgtccattatttgcttgaacaagttaattgcaagcttaattacatctttttggtgggtgggtgtattcttacaggatcctaatattagttcga

SEQ ID NO: 69372 - DNA, 592 bp, Prunus persica
  Intron number 1 from transcript ppa024172m (locus ppa02417 2m.g) derived from phytozome v7.0 (chr-ID scaffold_5; pos 16573534 to 16574125)
cttcagttttacttctacaggtcagtgcccatgtctgctttttggcccacggttccaaatttagtttcttgaaagtgtttttcttgttttctatttctgggttttagttatttacctgttacttgttttggtattcgaagaatttaactttcaaagatatgattggatggtaggtaattcctttatgaaatttgagttttttgcggtttttttattcttcctaaatttggagaggtgaagcatggagtgattgatatttcctattaaattcgatctcttctagtcctttattattgctttcaccggagggaatggaatctagctgaatttcagatattagctagagataaaagattctaacaattaagctacagaagttacagagtgtactaatatcgacaagctggaaatttttgttgatatgtagtgaagcagcagtataattgccttgatatattttttttcgtaattcatatcatagaaagaaaatttagaaggactaaagttttgacaagtaaatcgtgtacttataataaatttttgaggattgatgtattgagctgtgttttgctcgatgtttctgcagaagcct

SEQ ID NO: 69373 - DNA, 737 bp, Prunus persica
  Intron number 1 from transcript ppa013584m (locus ppa01358 4m.g) derived from phytozome v7.0 (chr-ID scaffold_4; pos 7844124 to 7844860)
tcaagatctcaaccaattgcaacttaatacctcaggttcgcttctcttagctttctgagattcttcttttattattattttttcctgctttgctttgcgtttgtgggttgtagtctgttttatagatctgggttctgtttagctgctgagaaaactgagaaaatttaaaccgtgaattggttattggaatttgctactgattactataagccaaaaggaatagtgtggattgttgaattcaaagggttttcggccaccctctgttgtgttgttcactttggtgtttggactctttttgatgcgttgttgtttaattgtagctataacctactttgtttttcatattaagctttgaataagttttggacggtgctcacctatattttgttgcagttaatacttgaaagtataaatatgatttcagtaatgtctttcaaatgaaaagaatgttagtaagactcagagtcaatctgaggtttccatacttcataatagttccttaaaaataagaaatccccaacttaatcaattatgtagttaattgcatacaagtttcaattctatgtgtaaatgtgttttacgcagcaatatatttttcatgagttgtttggcttgttgaatatatagtggcatggtgctttattggaaaggtgattttttttcctcctccacgatgcaattatttggagcatcatttaattcttcttttgactttgagttctttctttgtgcaggag

SEQ ID NO: 69374 - DNA, 820 bp, Prunus persica
  Intron number 2 from transcript ppa013584m (locus ppa01358 4m.g) derived from phytozome v7.0 (chr-ID scaffold_4; pos 7844984 to 7845803)
atagagaacaggttaaacctttttcttcactgatttttatgacaatcgcttcggaacaactttttattatttttgggtattgaatgtctttatttagtatttggaagttatatggacttgatgtcatgaaatcatatttctttttttgtgacttttttcaaaattttaggaatttcctctgcttcaaaattgcatgatagagtcttagaccttttaagtcacaacagtacttgttgggagatttatgaaagatttcatttgtattcaattaaattgggttatgcattttgattaagaaactcatttaggtttttttgggtgtggatctattgcttcctttgcatgctgttacttatatatgtttgatgttataacctcataaaaagatttagaagtgtggctgtcttcgtttctatactttcaagaagtgttgcttctgtcatcatgtttgtgctgagagatgaatacccttttttgttgccttactggcctctgcttattcttcctttctggtctactactccatttattccttgctggaaatttgattagataagcttttctgtgaatttttatagttgtgtagattttcattgttttttgcaggagatttaggtgtttcctttgtttgtggaataaatgacaaaagaaagaaactcttctcttcctaaattttcactgtagtaggtgttcaatggcaggaagggggcgggtgtaaattttgatattgattgataatgcccaagtgcaagaaattccaattggttgaactgactgttgttttcttattggcagggtgacgtatctctatctgatattg

SEQ ID NO: 69375 - DNA, 757 bp, Prunus persica
  Intron number 3 from transcript ppa003557m (locus ppa00355 7m.g) derived from phytozome v7.0 (chr-ID scaffold_1; pos 42694961 to 42695717)
cagattctgttaccggattgagtcagcaagaagtggtatgtcaaatattcctgttcttagtgttttaactttcaccttctctctctctcactctctctttctctgtctgatcatgtgtgtcccctccctcttatcccgttaaatctatctgtgcttgctgttttgtaaatttatttgatgttgttgtccattagtaccaacttagctaagaatgcagtcattgatgtgcatgaagcgtgtttcacatgcttaaagtatgaaattttcagactgtaagtcgggatgtttatacctatggtgctgaaaatttgttctcttctgtgtgttatagagaagggtagagctttagagggaagagtttaattttggttgttggaagtatagttgttggtctaaatgattataagctaccagctgggattcttaatcttttgtacctgaagacctgtatgaacccaaacagattgagtttttttgatttgtattttcttggatactttatggtctgggtctgaatacaactgacctgacttgggtttgtgtattgatttttcttttggattgttctatctcattcaaaaagataggtttttttcttgttatatatatatatatttgtttttacttttgtcggtgagagctcaagtttaagttaatgtgtggacttttgctcaactataatttttttctttgccattgttcttcttgtatttctcttgcaggtatctggaaaagacggaataccatctgatccaat

SEQ ID NO: 69376 - DNA, 278 bp, Prunus persica
  Intron number 2 from transcript ppa015290m (locus ppa01529 0m.g) derived from phytozome v7.0 (chr-ID scaffold_8; pos 18032217 to 18032494)
gcctctcttcccaggaaaattccctcaaatacctggtaattctgttttgactctggtttgtgattgtttttgtttttgttgacatttgtaatgagtgcataatttttcagtcttgtgcataaacatgttggcaaacaggcttctgcttatcccaagttacagttgattctgaaacttacgcattgattttcgtcttcttatggtgaaacacatgacttgttttgtgatttggttggtttgttcatgttgactggtggcattatgtggaacagcaactg

SEQ ID NO: 69377 - DNA, 900 bp, Prunus persica
  Intron number 2 from transcript ppa026640m (locus ppa02664 0m.g) derived from phytozome v7.0 (chr-ID scaffold_3; pos 12878008 to 12878907 reverse strand)
ctaatcattaggcttcacaagcttttaggaaacaggtaccaataaatgtctctttccttatcccacatggttctttcatcacataccattcaaaaaaacctaaaatccacaattgccgacatgcatcccgtgttgttttctatattatatcttctcttgtttatctcagtacgcatgcacaaccacaaaaaagcactagaagggccatgaagccatgcatgatgtatcttagtctctgtgaatcgtaaaacatagtgatcatatatgttacaacatctacaaaaagctttttatcacaaatagccctgaggttttgcgaaattatcgtctttcgtctttaatgttttttatgtgatattaatggtccttaaggttatcatccacaaatcaaaatggtctctatcgtcagtttccgttaaattttctattaaaatgatgatgtggtatatatatggggcaacacatctaataatatagtgccacgtagctttaataaaagatttaaatcccaacccggttctttgcttgcctgaccatcaccctcaaatctgatgagagagagtgagtgagtggagggaggtgggtgccacggtggggcgacaggtttgaaggaagagggcgagagagtttttttcaaaaaaaagaaaatttaagttttaatcttatcttttttaaatatattaatactttatttaaaatcacgtggctatatattgttggatgtgtggctcacatatatgccatatcatctttttaatagaaaatttgacggaagttgacggcagggtttgatttatttcctactttgtgtgtgtgtatcatagcacaaatgtattgatttattttctcatgctatctgtcgaaggtggtcattgattgctggaaggcttccaggaagga

SEQ ID NO: 69378 - DNA, 473 bp, Prunus persica; identical to SEQ ID NO: 68546
  Intron number 2 from transcript ppa008055m (locus ppa00514 6m.g) derived from phytozome v7.0 (chr-ID scaffold_5; pos 13473787 to 13474259 reverse strand)

SEQ ID NO: 69379 - DNA, 610 bp, Prunus persica
  Intron number 2 from transcript ppa001442m (locus ppa00144 2m.g) derived from phytozome v7.0 (chr-ID scaffold_4; pos 16497548 to 16498157 reverse strand)
tctttccatagacaatccgctgtcacaaaacccaggtaaaatctttggatcctccaaagtgcatatgtgaactgtagaagctccagaagaacatgggcgagcatgttaaccagctattttgctaatgaacactcaatcctaaaattttcttgagcttgactttcctatgttgttttgtctgctgtgttttttcacttattcattattagctttctatatgtagctgctttgttgaagtgatcaaatttggaggcctgcaccatggtttgcctcattattgcatatttttcaatgaaagtaaactgtactttctaaaggaaaaaagctttcccttgtagatgtgtcaaatgtgtttacagattttcctgtatgctacaatctaaaactactaatgaataacagtctcagactgtattgttataacacccaatcaaatctgtgggtggcacgatagttcgtcattggtaataaattcaagttgacctttaaatataagaatggaaagttaaatggagattttactgttgcaatatgtgcctaagtgaggttacctactcattgagtgatgcagttgctaatctatgctgtacatcttacatgcagatagcac

SEQ ID NO: 69380 - DNA, 690 bp, Prunus persica
  Intron number 1 from transcript ppa001442m (locus ppa00144 2m.g) derived from phytozome v7.0 (chr-ID scaffold_4; pos 16498225 to 16498914 reverse strand)
gatcttcgtcgggtcacagctgattctagaaggaggtacctctaacatgtctcttaatgatttcttcaactttttatgcgtagaaggttgcattaggattcttgtgtttcgttcttttttggttagaacagtaaagtctcaatttggtgatgtatttggtttttgttttaagcttttgctctgagttgataattttatgcatgggttttgctagataattctatttccttgacgatttccctttttgaatttttatattttttgttctttgttttttttttttttttttcatttttaaactcatacgagggtttataagatacggtttccgtggtttagttaatggtcaatggattttctacattttgttgcttatcagctgtaaattgttgtggaaacaggcgtgttacttatatcttgataaagcaagaggtgtgtcaagcgacttgaaattatgtttcttatgtctttatgaatcaagaagtggcttcttgaattttgtgcttgtattgggtacatgcagttgattagttgtgtcgattgatttgactctgaattatgaagttaagagcgctgaatttaaacaagtctaaattttttttcagtatcatattagactgcaatgatttggtggtaatttttaagtttgtgtaatcttgtgctgagtttaccttgtctacattattagat

SEQ ID NO: 69381 - DNA, 421 bp, Prunus persica
  Intron number 2 from transcript ppa024369m (locus ppa02436 9m.g) derived from phytozome v7.0 (chr-ID scaffold_2; pos 15762777 to 15763197 reverse strand)
ggtccacctccgctgctcatttcagccaaaccattgtaaagagagattccttcaattctccatttttaattttaattattattattattattttttacatttcctctttggttccttagaaaacaatgaaattaatgcagtacggaagagagtctctaaatcgtttatgcgaattttattttcaatttttgatattttagattcgtggtgccagtagaacaaaggaattgtttttttattgaaagctacaagaaagaaagaagattgccatttgtaatctctaatgaaaatatcaaatagtcaattcaaatttcaaatgtttagattgtcaattctgcaattctgtgaagaaatatggtcattgtttccatgagtttgaatgtctgaatgcagaactctttggaagatatcaagtctgatt

SEQ ID NO: 69382 - DNA, 1013 bp, Prunus persica
  Intron number 1 from transcript ppa005339m (locus ppa00533 9m.g) derived from phytozome v7.0 (chr-ID scaffold_5; pos 15823834 to 15824846)
aagaagaagaagaggcagagacagagcaggtagagtttttacactgagagagaaggtcttgtggaactcgtttatttggacccttatgttaaaatgctgagacaagttttttttattttttttattttttatttttttatttcactttacatttggtggttatgagctatgacaatcttgttggtttttccccttttttatttagaggcagtctgatttggggttttgagatgtttgtttgattcttagttctattttgtttgattttctgatcctatttaaaacggggatgattaacttttattgatcatttgagaattggaaaagcaattttttttcgccttagaggcttgtttccttcaattttgttaccaatgaaacgattgtcagtcaatgaatttcagaccagcttttggaaagtataaaatttgatcacttatgttacttttcttttttggttacctaaattcaacttacatatgccagtagctaattaatttttttttaaagtttgtgtgtagatttaaaactgtgaactgttcatgctgcttgatatctttcagagtcaatagtcttcatctgtgtcgtttaatttatttttctctcaatatgaaagggtgtttcctgttgattttctaaatctgttattttcattaaattttcagtcttcgtggtaataattttctacatatctgggacttcatataacagagtgattgaattctctaattgtgtagaagtttcaacagatttgattgtgtcaatgaaactatagtacaaccaaacttataattttaacaaaaaaggaggcaaagattattgcttttcattgaaagatgaagaaaactccttgtaaacatataaatttacaatatttcttcttgcttgattttgtttgaagctgtcatcacactgattacttatataatgattcaagtttattttgcaatacttgttcctaaagctaattgtgaaaatttcaggatccaccatcaagaaaatcccctgagagc

SEQ ID NO: 69383 - DNA, 650 bp, Prunus persica
  Intron number 3 from transcript ppa009203m (locus ppa00920 3m.g) derived from phytozome v7.0 (chr-ID scaffold_1; pos 33627529 to 33628178 reverse strand)
aatcgaggctttcttgaaggacgagattatcataggtatttattgaaccattttgtttttgtttaatttgattagctgtacattttcactcctttgtgtggttatttagtgcttgataagtgaaatgcatgactaggttagaaaatagtataagttggtttacttttcctgcaccatattacaacctgttctttgtttcagaagctaaatcaataatgtttatcactgaagatggtcttctatggcttgttttctatgatttatagtcaacgtcctattttgtgaatgatttgatttaaaataatcggataactattgtgataagtatattcttccttccaaattctagcaaagagcctgtctctgctaattatgtatctattgatgtttattgcgattgagaactttatgcggttcaaattgaagtttgtggaaaacttttaactgtttggtgaagtatctacttgtttgtacacacaagtaatgtgccttttcttgtatgtctagtacttaaatctcttgatttattgatagttttatctgtaaaggagtgtatgtgcctgctttcatatgtctatatttaaatcacaagataaaacacaccgctaatcactttgcttgtaatgcagaaatcgtgacttcattatctt

SEQ ID NO: 69384 - DNA, 409 bp, Prunus persica
  Intron number 2 from transcript ppa003722m (locus ppa00372 2m.g) derived from phytozome v7.0 (chr-ID scaffold_1; pos 4308127 to 4308535)
tgaggattggtatggaaaccttttgattattatataactttttgattgtgttttgtttatacaattgaattgccaatactattttgaaaatattaagtaccgaatgcgaaaagaattccggttgattattttataagttggagagaagagagatacaaatattttggtgaagcaaaatttgtgcttgattcataatggtgttgatggttgctcaattggggccctttagatgaaattagctccgtttcatcatattgttaagttgttaacagagtgaaacttgatatcatcttcagaggatggtcatttagttacctaatgagcacctagaagatgataagtggaacaaaatatgaagagctctcttctttgttgtaggtcttaaaccaggaacaaaatattattacaa

SEQ ID NO: 69385 - DNA, 748 bp, Prunus persica
  Intron number 2 from transcript ppa014833m (locus ppa01483 3m.g) derived from phytozome v7.0 (chr-ID scaffold_2; pos 20763081 to 20763828)
aagtcagcaacatttggtaagacaccaaaacttcttcttttttcttttttccttttttttttaaaaaaaaaaaagaaggctaaactgttgatttccccttaaattagtaccaaattttttatttaacccttaatcctttttttatttatagaaaattaaggatctcctctaaacttgtcaagacgcccatggggtacatgggcacattgagtggaggtttgcggggtggagaaagtggggatcctgggtttgggggagtatgatgggctggctaggggaggatgggcttggtgggagcgggctggggctgtgccatactctcttttttttcttttttcttttttttttataattatttaagtgtcacatgcaaggaatgtgaccatctttaacagtaaattggattaaatatgagcaaatttaatgatagggagaaattggctaaaaaaattgagatccttaattttctaaaaacaagggataatggatcaatcaaaaattaggtacaaatttaggtagaaatcaacagtttagtcttcttcttttttcggtaattcgctagggaaggagagtagaaggaagagtattaaattggattgcctcaacagtttagctttttaaataacatgtttgagtcctgaacctaaatgtgtcaaaccctaatgttctatttaattgacactccatacaaccaattattattttttgtttgtaatttaaaaattctgtgaattgattgcttatgtag

SEQ ID NO: 69386 - DNA, 474 bp, Prunus persica
  Intron number 3 from transcript ppa007648m (locus ppa00764 8m.g) derived from phytozome v7.0 (chr-ID scaffold_1; pos 36328649 to 36329122 reverse strand)
gatatcttccaggaataaatataaaacaggtattaattacttgggatacaaaatagtcataattcatttacccataatatcatgtttacacatacataagagcttgtgcccgttccaaagcaatatgcgagttttctggatttgccaattgtgtggtttattcttattggcaatatgatttttgattcctgccctaccatgtcagacgcaagctacaatgaactttgtgaacaatgtgccgatcaccttgagcgcacttaagttgttctgaggtggccaagcccatcttcctcgtatgaaaatatgacaaaacctggaagagaagaaatggaaatagacccaaacccaggacaggcatatgccctcaagactaatttgtgaacggcaacactcaacattatcatttctgttaacatgctatctaatgtttgaaatataggttgtggcagccttagctgaacttctgtgggatca

SEQ ID NO: 69387 - DNA, 513 bp, Prunus persica
  Intron number 2 from transcript ppa007648m (locus ppa00764 8m.g) derived from phytozome v7.0 (chr-ID scaffold_1; pos 36329227 to 36329739 reverse strand)
ggcttttgagctaaggtattctcctaccttgtaaattaatccgcaatgtctcaaatgctcttctcttaaattatcatttgtgtagattgggatctaatgtaggaaggttgctttcaagttaatttttgtgccaatagagaaaataaattatctttctggcttcttatgctacaaattgtagtgttttttgtacttgagtattgcctatggcaattggtgccctgatgcatttattaggtgggcaatgggactagtatttttgtatcagaaggaattgcattgttttctttgagcaattgattgacttctggacttgatgcctgttatttatgaatcagtttcgacataaattgtagtttaaagttttgagatttccctttgatttattgtttcttagttattaatttgtgggcacgtggttttgtcttacacttatctcttagcttatactatttgtattgttgttgaacatctattttgtatgttcttattcacccattttattgttcttag

SEQ ID NO: 69388 - DNA, 294 bp, Prunus persica
  Intron number 2 from transcript ppa011276m (locus ppa01127 6m.g) derived from phytozome v7.0 (chr-ID scaffold_2; pos 21649845 to 21650138 reverse strand)
ggagtccgttgagttcctcagagagatcgttacaggtaacggacttcttaaaacacgtgcttaaagctttgactagtcagaatttcataatgtcttagcctttattttataattattcttttctaaaaccattcagaatttcataaaattagttagggttaatatgttgtcttctggatatgatgtgttactctctatgaaaaacaaaacaaaaacaaaacttgaggtacaagttataatcttgattatcctttcataggtccatttgagaaattcacacaggtgacaacgata

SEQ ID NO: 69389 - DNA, 705 bp, Prunus persica
  Intron number 1 from transcript ppa007189m (locus ppa00718 9m.g) derived from phytozome v7.0 (chr-ID scaffold_7; pos 18223963 to 18224667)
tgtctcaaaggagacaaatttagcaataagatcaggtatttttttgcttacccttcatctctgttttgatcgttgtattgaattttgcagaattatcggtaatgacgctgaaacttgcattgatttgttgaattctggtgaattgagcttgtagcattatggattggttttgattctcattcgtttgattgtctgcgtccgatcttgtttgatgaattcagattggtctttgaattctgttgtgcttgtgatgcttgtaattcagctgtgttgtttttgttgttgttgaattattggatgttgttgatgaagctttgtttgcttcctggtaagagtttgacggttggataagggaagatgatttgcggttttctgctgttcgttcgtttttttaagttacttggatgattgaggaagaagaaaagaaactcaatttagctatgtaattacctggaatttagttaagcttgttgtttttcttaaggttttattagaaattgaaggcatccaaacctggatgtgaagttctcgtctttccatctgggttctgtgtatggtgattcaatattaagaatggtttaattgattttggattttgtatgccacaaaattatgggtttacctaatcatctgtattcatgcatatgaagttcttgccttttcatccaaaactgatgcttaatgttaattcttattgttttgcag

SEQ ID NO: 69390 - DNA, 885 bp, Prunus persica
  Intron number 2 from transcript ppa006415m (locus ppa00641 5m.g) derived from phytozome v7.0 (chr-ID scaffold_2; pos 20524633 to 20525517 reverse strand)
aacgggaaggcctattgcgtaatacgaacctttcagttctaagaatgtcacttgcttgaataattgttatcttgggaattgtttcttctttgtaggcgttatcccctaaagcttaatttggcatagaagtaccgtactaaatggatttcgaatttgttttcatgcgggaatgtggcatatcttgctcaatgatttgtctgaaccttccaactcagtaagaaatttgaaatggacaaagttatgaatatgaagatcatttatgggtgattaccaattttgtatctgatgatatagaaaggccgtgatcactgtctatgtaattgcgactttgatgatagtaatgtcgaagcattgcaagaagtataacaagtaactttcatatcccttgtttagaatggattgaagttaccgaggaatataatttatgacagattggtataagaataagtcattcttttaagtcgcctgaaatggaatgaagacaacttaaatcgttatcattatgatcccttttccatccataagcataaatgacaactctttttttttttttttttttcttcttttccttttgagttttgagaaatcaaaaaaagggatctttactttcacttatctaaccaaagttacctgttggaatgcaaataatgttgcttatctatttggttaatcaacctttaagtgttgtttgtttctatttgtttctttttcttctcttcccttacctagtattgcctacttttctggatgcatctcaatacttgagcagaaaatgtatcgtatggagccatatattttgttttgttttgttttgtttttttgtttttgctgaataagagccgtatattttgtttgagactattattaaaacttttttcataatag

SEQ ID NO: 69391 - DNA, 707 bp, Prunus persica
  Intron number 3 from transcript ppa009392m (locus ppa00939 2m.g) derived from phytozome v7.0 (chr-ID scaffold_12; pos 655172 to 655878)
gcaacattgtcaggtatatttgaattcatcgtgcctaatttcttcaattaaggggttttatgagaaaattattcatgtattgagagcttcaacttcatgtttgggcattcagtttctgtgaatcataaaaatgccgaagatattacctgttgtcgaggaaaagtagacctatgaatttcagacttttctcttgagttaatatttctttttggactgcattgtagcttcgagttgtagcatgttcttcttcctatattcattcccctttaaatggaaatttaacgtatcaaagaatccaaaatataacatgactgagctagttaatcactgtttatttacttcactctgagcatgttgctttgcccggcttgtctgagcttgaccaggaaagtagcgtttcttttggtgcctaagcatgagcaccccaaaaaataaattagtggaacagggatcctcatagagatgtttaaacacagtcattgggtgtgtcctaaactcagtgcttctagaatgtattttaaatagaagacaaaatttaatataatgaaaactttttaatctgctttcttaggcatcttccatatttccttatggcttgtttacgttgctagatattcatatttggtgcgtacacttttattgtctatcagggaagaagatatacttaacaaattcttctaatgggtatttgcttaacaggctgcagg

SEQ ID NO: 69392 - DNA, 603 bp, Prunus persica
  Intron number 3 from transcript ppa009319m (locus ppa00931 9m.g) derived from phytozome v7.0 (chr-ID scaffold_8; pos 17192560 to 17193162 reverse strand)
acatctacgctcactacaggaaaactgaggtatatttcattagctatagaaagcgtacactatacaatttgtattatacgaattactccacataagttctgttttatcttgagggttagcaatttaaggcataacctcaagttttaatgaaaacacatctgtttggtcagagctccggattttgaaaacgttgcatttttgtgtttcatctgacttcatgtagccaaaccccaaatagttggatatctagtctgtttgagatgagctcaaacatgtaaaaatgttccatttttgtggtctcatatggcttagcacattaggatagaatggaacaaagaagcaaagttcatgcaactggccccaaatagttggacaaggctacgttgttgttgtatatgccaccacatcaatgtggtcttctgattgagatgactccttggttgataatcattttctgccttgcatttttgtggggtttaattttgttgggttttggttttatggtttctctgatttttcaatttggcaaagaaatgctttcttctttgctgaaaaatggttatcttaatcatgcagaagtcaagctgtatctcccctatttac

SEQ ID NO: 69393 - DNA, 794 bp, Prunus persica
  Intron number 1 from transcript ppa010725m (locus ppa01072 5m.g) derived from phytozome v7.0 (chr-ID scaffold_5; pos 12059315 to 12060108)
ctctgctgctcctaagagctctcgtttctactctggtaatgtttcattgctttcatttccactctgtttttagctttgctacgtgcttgtttggttttgatgaaatgtttggtccttcccgtaaatttggagctagatcgatggtctgtgaaatcaccatctgtttgtttatatggaaacgaaaattcgagcttgaccaggaaatgagtagattggattgtttggtttgagcttttacttttcaacatgaactactttccaggattgcttttccgtcaaaactgaaaaaatatacttttccatgcaatcattgtttttgtttattgacaattacaattgggtttttgcaattccttctcttctttgatgattgatctgtttctggatttgacatcatcgatccacgtccggcatcaagcggccgatcttgtgggtcccacctaccaacggttgatatgtcaattcttagattttgattttatgattgataagtctggatcttttcatattatgattgattaggcagtagctacatatcatgatcagtactctaacaatccaacggttgaaaaaacaaaagtttgatcgactaattaaatagcacccttcctatataagtgttagatttatctatatatattatgatgttgtgcttttgttagtacctttatatgtgttgggtttttcccacttgtttatttttacccacgacaatttgggatgatatttgtgtttaatcgtgtaccttgcattttgcagaagggcgagctgtagctgctgctgcagcagtaacc

SEQ ID NO: 69394 - DNA, 741 bp, Prunus persica
  Intron number 2 from transcript ppa010725m (locus ppa01072 5m.g) derived from phytozome v7.0 (chr-ID scaffold_5; pos 12060180 to 12060920)
gatttcaggagctcttgcccttcctgctgcaggtgttgaaaaaatcaaactcaatttccattttccttttcttctttttaccatggtatgattttttgttttttaaatttgctcatctagaccaagatcatgcgatcttctacaataattattttaattgtcctaaaagtaacgatataaaatatttatatgctgatttgtaaacaggatcctgttttttggattgttagatttgcttttgaaagtgggacctctgtttttgtgatgctatataaacatttcttttttaaagtgagagcaaaagggaataggaaagaagacgatggtttagcagtaaaatgtatctgatctcaaaatttgttgtccataagtttgggccaacatgaagaggggccttgtcccttgccaaagtttcagtattgtggcttcccggtcctcttcaacaacaaccatactgtgcttagcttaagcatagaaaagggttggaatatttttgcttgggatgttttcttgacttgactttcttccttagtttctcccgacccgacattgcagttggatccccgaacatatgttatctgtcatcaaacttctgcactgatcaaattttatgtcattcttccattattaaaagaatatctttgcaatagcattccctgatgtattcttttgattgcagtctttacaaactataatcctaacacttcctttggtttcttttttctaatttctatagcttac

SEQ ID NO: 69395 - DNA, 890 bp, Prunus persica
  Intron number 1 from transcript ppa015171m (locus ppa01517 1m.g) derived from phytozome v7.0 (chr-ID scaffold_8; pos 5615540 to 5616429)
atactggctccttggcggtatgccaatttacttcatctttatcattatcatcatcttcttctctttttttttattattattagtttctacttcttcctcttggactacacatatcaccttgagttcatgatgaccgttatatatattatatttcaacagtccgaaaaatctagattagaacatgtaattattattaataaaatagtgctttaagaaaacactaaaacgagaaatgcttatttaaatagttaaataatttcgaatttgagtgaaatacaatgtaaaccggatccactaggagaaaaaaaccctctttagcaataaccggccaaattttgctattattaacccagaaacattctatattagcaaaaggaaaaaacaaaaacacagacatcttccttagaaaataaaaagtgatgtgactgagttaatgacaataatgatctctattccagctgtgaagcttaatttttgggttacttattccttcgaaagtgatatgtgaaagctacatttttttggtcgtagttgttggatatgcaagtgttgtatcacaaaagctagggatcctatatactctatgagccaaccttttacatgcataatactattttaaattttatacatgggttaataatgttcaaagttctagatttatcggtagatttacagtctgacaatatatgtattttttaattatgatattattattattttaaaaaagcagcaggggatttgaattctagttgttatatattttttaatatattatgttttcatgaacccaaagtaagcagaaactgatggctaacatctgatctgaccatgtgtaagctagccatgtctaaattcaatttgttgaaatggggtttgcaattttcagggcc

SEQ ID NO: 69396 - DNA, 731 bp, Prunus persica
  Intron number 1 from transcript ppa013756m (locus ppa01375 6m.g) derived from phytozome v7.0 (chr-ID scaffold_6; pos 8604335 to 8605065)
ttccacctgctttgacgctctctggttttgctattgtaagcttcctctttgccttctctctctcgctctcgctttctttttcctttctgttgttaaatatcacataagctgttcccatttcatttctgttgacacaatagtttcgcaattacatgtggtacgattccagtttctttttattcaattttaatttaaaagttacatgggttttgggtaattgttcatgaatctaatgtacaacatggtagatttaaactcggattttattgaatttatggagaagatgttatttaatagttgctgaaacgaaaaaacaaaaaaacaacaaaaagcttggtaatttgttcattttggttactgcccacttaagaagcttcaaacttgacagtcactagcttctgaaatcagttattggtgggttttcttttgcaattaaattttcttgatgattctttggtagttttcagtgactgtttctttttcatgttagactgctttatgctcagttgtttctatttatgttcatctttaaatcttgttgatagctgctcgtgatcattgcacacagcgataaagtttcactataaatgtcaattatttttaattttgttttctggatgtttcctacctcactcattctatttttgtgattgcttttaattgcctgtttatttctatttcttgcttttaatttcatggacactcatgttctggcagctccagtgcatcag

SEQ ID NO: 69397 - DNA, 820 bp, Prunus persica
  Intron number 2 from transcript ppa016531m (locus ppa01653 1m.g) derived from phytozome v7.0 (chr-ID scaffold_2; pos 20932228 to 20933047)
gggtaagaaacagttccttcggagttttaacaaattaagctcctattatgaaaaggagaggaagccatggttgagtgacttatgaaaccatggaaattttctgacactcactactgtaatcttgtcttgtctctgcttttttttcaaattatattcgatgctttatatattggaattggataatggaaatcatttgcatccaaatggaagttagggactatttttagtcgtctatggtcgtgttatctagtatagaagaaagtcaaaatatacttttcgttttaaaatgcaggcttcaccagcttctgcatcaaattgaatggaactagttaagttattttccaggcatcaaaagtctttgtgcatggatatagatgttcaattatggtttttcaggtcactagttgtgcatctgggaggcaccttgtagaagaactaaatttctgatggtatgattcaaaggtccgttgaatgtgagagagggatactatttgatagcctttctcactaattatcatttgtaaacctagcgttacttctgagaattgatatcgtagtttcgaatggatgacgagtttaatggggtcaactccctttgtttgggataggtaagagggaaatgatttccatgttctttctttcggccttgaaatgatctctctggtcagaaggggccatatagctatggctttaggaactattgagccaacgacaaatgcatgggcacatgctgtttgcataattgtatcaactcatttcttacattttcttaatcctaactgcagatcagttccacaatcacatttgccgcagcttctgc

SEQ ID NO: 69398 - DNA, 516 bp, Prunus persica
  Intron number 1 from transcript ppa007070m (locus ppa00707 0m.g) derived from phytozome v7.0 (chr-ID scaffold_1; pos 23917594 to 23918109 reverse strand)
caaagttggagtctttaattcaagccgtctctcaggtataaaatcaaacgcctttggtctcaattttcccccccatttttgaaccaaggcatgccaatgatgtgggtttttgtcactcaaattgaattgggtaaacttaatgttgaggcctaaagttgtacgtttgggttttctttgtttcctcattgagctgagccatctgcatttttttgtgttcgagcgttttgccacccacatagggttggcataatgcagtgagtaggaaaagcattgaattttaagttccttctttgatagaaggatcaatacttgtcctgaaggaggaagaatagaatatgcttccctttgagtttttgattaaggagaatatcactgcctgtttgtgtaatgttatatgtgtccaacagcttttgtaaacaaatagctcaatattttgcatatgaaaatttaaggaggtttcttcaactaaactttcaagcagtgtgtggcttttgcaggacctctcgtccaaacaaa

SEQ ID NO: 69399 - DNA, 251 bp, Prunus persica
  Intron number 2 from transcript ppa002939m (locus ppa00293 9m.g) derived from phytozome v7.0 (chr-ID scaffold_5; pos 11939901 to 11940151)
gagaggtagctttccattcaagttcataacttttgcccttcctccaactcaaaaaaaaaaaacaatttttttttaatgttctgttaacttctggttttagttagcatcacttgaaaaagaacccaaattttagttttttattatttgtttgtgtcttccctccaatgggctttttatttttgataaatgatatttatttgtaaagtgatgttaattttgttggttggtgttaatctgtgattaggtgggag

SEQ ID NO: 69400 - DNA, 524 bp, Prunus persica
  Intron number 1 from transcript ppa012797m (locus ppa01279 7m.g) derived from phytozome v7.0 (chr-ID scaffold_5; pos 8907353 to 8907876 reverse strand)
ttgagaaggaacagcagtggcatagaattgttcaggtacaatcatttctttgtctttcaccatggcttaaaaacttggaggacacttaaatagaaagtactcaatctgggaatacttttctttaaagtagtattttaatttgaagcagaataatgtgacgtaataatccttgaggagcttttattttatgcacttatgtctgttttggctgagacttctccatcattatcaaaattgttgcaatcctttgtagcaaagaaacttcttgaaatcatgggaaagaaccaaccatgagaagaagatttgcatttttttggagtgcataagtatttggggaaactactttttccaacaggagagatttgaaaacataattatccaataatttgttgcgactaggaaattttgagtatgtaattatttttaacttacgcttgaccctggaaagaatgagtgagtcctattcattattttcttttgtgatctataaaccatggttttctccaactcatctaggtaattaa

SEQ ID NO: 69401 - DNA, 627 bp, Prunus persica
  Intron number 4 from transcript ppa001525m (locus ppa00152 5m.g) derived from phytozome v7.0 (chr-ID scaffold_6; pos 23121647 to 23122273 reverse strand)
catcagtattacttaatcctcaacaagcgaaggaggtaatcaatatgattacagcaactagttgttgaatagatggataggttggttaaggtcgctgtgtatgtgaattgcaatctattttcttatgctagataacatttgttttgttagcatcttcgtgcattcttcttgttggtgctaacgaaatgttgttgcattacgttcacctttatatactgttgaggatttctacacttgggacttagaaagattcatatggtttgcgggcttccgtgcattttagataaattctattctgttgcattcatgtcagaaagcataagtattatgcatatggtatttcttcaacacagtgagtatgaacttgcatcttgtaggctatctgccaaacaagttctagtagcctagccatttcatgctgttatgttatccgaaaaactgcttagaggatcatttgatgctatagtttgttaaagattaaggatttatgatattaatacttgtggttttgcgtttctccctacaactatggagaaattttatccgattttctttaattatttctgtttaagctgattggtatatttcccagataagtttccaagaatttaaaaacaaactacttga

SEQ ID NO: 69402 - DNA, 583 bp, Prunus persica
  Intron number 1 from transcript ppb023801m (locus ppb02380 1m.g) derived from phytozome v7.0 (chr-ID scaffold_3; pos 11833302 to 11833884 reverse strand)
cctggggtagaaattgattgatctaccttatggaagagagctagacaggacaaacatggtaacatcccggatccaaaggtggcagagaaagcaaaattaattgtaagcctactcactctgctttaaatttttattaaactgtgaataattcttattacgtcttatgttatattttgcttcgtgtgaatgatattaccacgtcgaaattttttaaaaaacgtcgttaaaggtctaaatcaggaatcactactctgttttctgtaattatagcataagatgtcggtggttcattttcgcgtcgtttgtattgaattactacgtcgaaatgttttaaacaaggtcgttaaaggtgtgaatattgaatcatccctctgttatctgtaaataaagcataagacgtcggtggtttattcatttcgtcgttttaaaaactaaccacgtcggtataactaccgtcgtgataaattataataacgtcgatttatatgttattgcgtcgtgtgaaattatataatacgtcgttcgtatataaataaccgtcgtgtgtttttgttcttacttttttatatatctttgttttagg

SEQ ID NO: 69403 - DNA, 585 bp, Prunus persica
  Intron number 2 from transcript ppa026000m (locus ppa02600 0m.g) derived from phytozome v7.0 (chr-ID scaffold_5; pos 2009003 to 2009587 reverse strand)
acatagtacgatattgtcaggtagtgtcctccattttaagcatcacattttctgcaggccacaagcttcaactcagctttaaactgatgcgtcatagaagtgcctgattattgtcaatattgaaacgaatctgaactatccacaaaaaataaaaaggaaataaaaatacaggtggtgcttgccaccaaccaaaatactcattccatcttcccttaaaaacaagtaattataattttaccctttctaaaagtacgtagaagacaaaaaatacttattttaccctttgtcttgcttgaacaagcaccttaatttatggatctgttcttctgatgttgaacatgtgatcctttccacacaaaaaaacatattctctcttgatttgaatttatttttgagtttacatacttatgaggactgaataacaattacactcattgcatcatgatgagagagtcatacctcctttagtttcctaacatttctagccttgggccggatacatttaaatttctgcaatacttgtgcttaatctagcataagatgtagtcttatcgatttctctttactcttgcagtcaaaaagaca

SEQ ID NO: 69404 - DNA, 582 bp, Prunus persica
  Intron number 2 from transcript ppb024320m (locus ppb02432 0m.g) derived from phytozome v7.0 (chr-ID scaffold_6; pos 7910111 to 7910692 reverse strand)
gtggaggaattgaaattgaagagaactgggacaaggtattgcaaatttgtgttttttcattttggtttctttgagtgttggaattaggatgttgttttctgcttggttttgggtgctaattgctgtatctatgtttgttttgatgttttataggtgaaatgaggcttgtgctccactgattgccactcttccattggaggtttgcttcattctcttctttctcatgtatattcttgttgaagttatgttgctgcaaatgcgttggcatgtagtaaagatgagcatatagctcaagaaatgaagaccaaaccaaaccactggactatttcaaattgaacttcttgactggctacagcagcattaagatatagtggtagatgtcgaagtctgttagcagaaagagcatgagtttcgtaggtataattcttgtgttttgccctttaatcatgttactatgtttctatttgatatcatcattttatttctctttgacaaactgttttgtcggtattgggacttctgtcttatctattctggtgtgttacaggtcagggacaaaattggggatttcataaagggcgt

SEQ ID NO: 69405 - DNA, 799 bp, Prunus persica
  Intron number 1 from transcript ppa012854m (locus ppa01285 4m.g) derived from phytozome v7.0 (chr-ID scaffold_1; pos 26715747 to 26716545)
ctgagctgccaaattctctcgccgtcagccaacaggtgtttttcatttttagcttaatttttccctgtattatattacgcatatcttaattgaattgtgctccgatttgtggtctgtatggaaactgatttcgaagaagatctagcttcttaattgcattacaagaaaatgaaccctaacttttgttttgttttgttttttcaaattgtacatcatattagcttcttgcgattcgcatattaggatatggatctcgggttttgatatgaacttgtgtttttttcgttttttttttttatagctcgaacttgtacggtagcaaccagtttgactatagttttggggtctaatactgtaacttttggatccagttactctcgaattcagtctaccatagaatatgtttttttaatgagttaattgaatggtttagttaggttcagtgcatgtgttcaaggtatcttggaaatggcacgatttgggctttgaggtccataagtgcagttatttttgctctaatatcggtttagattgtagaggttacaccagcttttcagaatcaagtatgtgaatctttgttcatttataggtttaatctttagttaaatctcaattatgttgcttggatgcctatacatgctgctttgttggtagtggtacttcctggacctctgtgttgatgaaagttatcaatttcatttttctttcaacggtgcctgcatgttttcgtctgtgcacaaatgtatttgactatcactaagtattattttttggttggcctaatatataggcggtgagg

SEQ ID NO: 69406 - DNA, 470 bp, Prunus persica
  Intron number 1 from transcript ppa014603m (locus ppa01460 3m.g) derived from phytozome v7.0 (chr-ID scaffold_1; pos 13533189 to 13533658)
gaaggtttggacttacatactagttctagactaattcttgatcatttttcatcttcattagtctaacgttataatattggtctcatagaacttttgagattgaagagattgcaaattgtaacaatatagttggtaggaatgtaagctaacagcaactccgtactagtcgtttttttaaggtgaaaaactattgttccatgttttgaattttcctcttagaaaaggatcactgattacatataatactatttaaagatcccaattacatcactgtatgaaaattcctccttgagagtgctctctacacttgtgtaacggaaatattgaactaatactaaattattagttacaacgttaggcattattctttgttccatcaagctgcttatttgatttttcatgcaatgctgtttgattcccttggttgctgaattttctttgtgtatgaacatgtcaagttggctcctatc

SEQ ID NO: 69407 - DNA, 570 bp, Prunus persica
  Intron number 1 from transcript ppa012315m (locus ppa01231 5m.g) derived from phytozome v7.0 (chr-ID scaffold_7; pos 16939592 to 16940161 reverse strand)
aataccactctcaactcacaggtcagctctctctctctctctctctctctcactctctctctctctcaagtttaaaacttttttttttgtttgttcatattcttgaatcaagattgatattttgttggactttcgggggatttgtttagttaatggaactgggtttggcttattttgagcttttaatttataattctattggtttcacgatttggtttgggtgccgaggaaattcaggatgattggaataccatgcttatgtttctaagctgtttgtattttttctctaccgagcaaaaaattgcaactagggaaagcttcaagctctttgattagtaaaacgtccaggttcattgtattcgaagtattgttttttaacaatttttcaaagccaaaaaggtactgctttttaagtattgatttgtcatttcataacccaaaaaaaatattcacaaaaagcaatgatttgtcgtttcgaaccaaaggaaaagaaattaaaaaaacttgtctttgcattctctaactactaccacaccaaacccacttcccagtttaaactcgcgcgtcaaa

SEQ ID NO: 69408 - DNA, 676 bp, Prunus persica
  Intron number 1 from transcript ppa017997m (locus ppa01799 7m.g) derived from phytozome v7.0 (chr-ID scaffold_6; pos 11072415 to 11073090)
tgaaaattcctttcaaatttgtcctgaaaggaattgtgctaggacttagttcccttttaatgtggtggtcgccaaaagtttcataaatcctaggcctgcctgtcagctacttttctccataagtaggagggtcatctcgagatgagtaattgagttaacaaacgaaaccttaaacagagagtgaataaatatgaaataattatactaaacaaagaaatttgggactagattgaacaaggtaaaagaaaaacatttatatcagttgcaaggattgaaactaacctgacggtgtgttttgaaatcattgttaggacttacgagaggagggataataggagaaaagtcgaggaataaatctctagttttcccctgcttatttcttctctagggacaaactctcagcttctccaaatattccacctttgagagaagtaaaaggtatgccctaagagaaattgctgctttttgctttcttgtttctccacttcctagaaacaattttttagacagcttacaaccaatagtgctgatagtttatttttagacatttgtttatttaagttcattctgtttaattaatttgctatagataggccaagtcaagataattctatactcaataaatccaatttgggttctagagtcactttgttcaatctttgtaatcaggtgttaa

SEQ ID NO: 69409 - DNA, 561 bp, Prunus persica
  Intron number 2 from transcript ppa010028m (locus ppa01002 8m.g) derived from phytozome v7.0 (chr-ID scaffold_3; pos 13225153 to 13225713 reverse strand)
cacaactggttattggccctgctggcagcggcaaggtaatttcacaccatgattgacattttttaattttttttatgtacccaatacatgaatcagtcgatttcttgctctaatttgcaccaaatgtttgaatgtgggatacatcataatcacataggcaatcactatgattatatatttttttttatgtttttatgtacccatttcttgttttgttgagttctcttcttggaaccagtcgattttccgctgtaatttacactaacactgtttgaatgtgagtgtgggatgcatcataataatcacatgggcaatgagttttgattaatatgtttgcattttttatgtactcactttgatgagttcgtttgcaaccagctgactaattgctctaatttgccccaacactgtttgaatgtgggatacatcataatcacatgggaaatcactatgattaatattttctttgaggtcttttgtttacccattattatttttgatgaatttgtttgcttcttgcaaccagtcgacttattgctctaaattgcacgaacactgtac

SEQ ID NO: 69410 - DNA, 781 bp, Prunus persica
  Intron number 3 from transcript ppa022497m (locus ppa02249 7m.g) derived from phytozome v7.0 (chr-ID scaffold_6; pos 164981 to 165761 reverse strand)
tgtttgaacgccagattagacctcgtgttcctccagtaagcctcaagtcaactatctgcttgtgttttgtgttagctgagattttattggttttatagttgcagcatatggatatgatccggaaactgtgtagttttaattttgttggataccgcttgtctctaaagcaattggtgttactagctcggttgaatccatgacaaggaactcttggtgctttcttattggtttcgcttgtgaaattatcactatcatgtgaatcaaacgcaagtgagcatgtaatgttttggtgatattatgtttttgcatttgttttcatggaaactaattgtatggcaaagtttgtataatttaacactatagtgaattattcgattttggtgcttggttattgaaatttgatgttaacagtgttttgaattagccatgatgcccccctcctccttagtatatttaactttttcttgcaacttgaagtggctgttatatctgtattgccccttttttcctggtttcttggcattgtttctgtgtataaaatttatgcatttagagattaaattccaagatgagtaattttgttcttcattttgttattgttatagatccttggtgtatttcaggatcctcataaagttctaccattgatttgtatatattttatttctgggatactatactgcttgttttgggcattctctgttgccattggtgtatttgttatagtttctattttcttctgatagatcaagccagcatttgtgatcccagatcaagtaag

SEQ ID NO: 69411 - DNA, 293 bp, Prunus persica
  Intron number 2 from transcript ppa004185m (locus ppa00418 5m.g) derived from phytozome v7.0 (chr-ID scaffold_7; pos 16213027 to 16213319)
ctagtctagcatctgcttttgataccaatttgaaggtattctactccacagtaatatttggtcagaaagaccgtcttcaattgctttcatatatttctctatggcatggaatttctttatttgaggttgttgtaagcactgtactttcgttgttttatcaaaactaaacaaagtccgaaattctgtaatatggactccttgtgcattagaatgtgatagcttcagcaactcatctatcttctgttttttcatttgaagagagttaggttttcaacatcagtgctattcagttt

SEQ ID NO: 69412 - DNA, 964 bp, Prunus persica
  Intron number 1 from transcript ppa007375m (locus ppa00737 5m.g) derived from phytozome v7.0 (chr-ID scaffold_3; pos 19008359 to 19009322)
ctgctgctgctcaaggtattctcatttcaatttgagattattggtttcagctgttttctctgtgtatgtgttttattttattgttgaacattaattttcaatgatttgtgtgaatcaaatatcaccttgaaattggaaaaattggatcctttaggcaggttttctagtaggattttggttcatgttatgtagtttgtaaatgattgtgtggtgaatgccatataagtagaccggatggctcaattcgaaaacacggtctttagatttggaactggccaagaagattatctttataacctatagattttgcgtttgtaggagaatgtcagtctcatcatggtttgagaattcccccttcatgtttttgacgtttttaaatgaaatagaaacggcaagccactcttgagagtgacccttccttttgctctggatcgttctgaattgcctcccccaatgaaccaatttagtgcgtgctgctagccatgttgtaaggggttcatgtgtaaccaagcgagtatatgctggtccagaaattgatgtgccccaaacatgtgttccaagtgttctattgagtaagaactgatctaactttaactactctgtagcctaaattttcaatgggacctcatgataatgataatgtttcgtttaagtagaattctagattaggtgtgtcgtgtgagcgacactgtttgggggcctttgacattcgatagagggcagttcaaccgtgctctcccagatccctctgtattgctttactgcccccaacaccaatgctccttattgtcgatgatgtaatagactcatttgatgttttgtctcccagttttctcatgccatgccactggcttgcgtatcatcttatggaaacatagaacctgttaaaagctattttatgttctagtgtcgaagctcttgtgctcctgtgacattttacctcttgatatgcaggagcgcacaa

SEQ ID NO: 69413 - DNA, 1002 bp, Prunus persica
  Intron number 2 from transcript ppa025979m (locus ppa02597 9m.g) derived from phytozome v7.0 (chr-ID scaffold_4; pos 2378964 to 2379965)
gtgtggcggaagggaaggtggtgggtgcggatgttgtggaacgcaggcggcgtgctgccaatcctgatgggaagaaacattgatgttctgatctgtgaatctggttattgatggtggatttaggttcaaacaatccagttttgacttctccatatcatcagcgagtttatctttttgtaaaatcagaaagaactgataatactccattgaatcagtttcttgatcacagtgacatgtgttagactttatatgcatttacaatataaaaacagcaaattgggtcttttccttcaacctctgctaccacctttgaagcactcgagagatattcttagactagttggctggtaaagagacattgtaattgattaaagatgggatttgaagtgccaatggtgtttctccgtaaacatggaatatctgccaacgcagcccattgaaaattcattataaactcattttctaattactatagtgtccactaaacataattagtcactaaaatatttcaactccatgcatttatttaattagtctcttgccatgtcatcacctagttaggtgaatcaaatgacttccagcagcagaacgaaccataaaaccctgtcgttttgttctgtcccttaatccagacgacatgttaaaatggccaaatagtgtcgctggatttctataagtaagtgatgtgttttaatcttcaccgttggttggaacctgaaaccaacgatcaagatgtgcaacagaatcccgcctgtttataaaccacctcgggctctgacttcaggcgccaaaccaagaaccatttaacgaactaaacagtcgatttttcccattacaccgtagagttgtaaattctttctccaccaccttcagagaatctaaaatcaagtatcgatttcttttcaagggttgatagttttcttggtaagaattatcatggaaaacgacaacaattctgatatgacagaagaaagtggagtcacgaatcaagattctatcagt

SEQ ID NO: 69414 - DNA, 813 bp, Prunus persica
  Intron number 1 from transcript ppa006488m (locus ppa00648 8m.g) derived from phytozome v7.0 (chr-ID scaffold_8; pos 20597577 to 20598389 reverse strand)
tggtgggttggcaaatttccagttcttgattttgtctttgtgggaatcttggtttccttgccttgtgtttttatgaaagtttatgagtttgtaaaagttggtaacttgggttttccattttcaaaaagaagcatgcttttattttttgatctgtttttgtttaggtgcaatgtttacatataacagatccagaagaagggtattaaagttaggtttaaaaaatcttgaaaatctgttaatgtaattaggaaatgtgaagcaatcagtgggttcgggattgaaaattttctgcaatttggaaaggtcttgattgcttgttgtttttggctttttcgctaatcttgcaacctgcaaacctttaaatctctatgctgaacctgattcgaacatgtgtatgatatttatataaatgtaacggcttttctatgtggatacaagtaggaaagttaaaggcaatatgtaacatcgggcagtgagagaataaattcattgttgatcttgttaacctgtcaatgttccatttgatgttttaaaagtgtctgccagggagtttagttgattacttcttttgatgcatgccttggagtgattatatagaaatttcatgtcatttaaatatgacaaggcatcgatgttttccatgcagtccattatcctcaatcatgttgtgtgattttcttggggtctagcttggtttcagccttgtatcctgtacatatccattgttgtcactagtttgcatatgggaagagtttaatggattcttgggatgctgcaggggttacaagcgtttcttcaaaagaacttctctgg

SEQ ID NO: 69415 - DNA, 354 bp, Prunus persica
  Intron number 3 from transcript ppa005650m (locus ppa00565 0m.g) derived from phytozome v7.0 (chr-ID scaffold_6; pos 224721 to 225074 reverse strand)
tggagaaggtacttagattttcacgctagatttcagtgaagagaaataaatagattgagacacttagattcaaatgcatgtcaacataaattcatctacttcctttgctaaaagagtttctttcttccaaattactctctcttttgcttatattcttttttttttcccttcaaagttcttgttcgctttttcctccatggtgaaacaagatatttgcatcctactccatatgtagaactaggagaattaggtaattgcaagctttggctgtattttgatttgaacaaaataggatgctaccttttgtgagtataaccatttttatttcttaattttgtctactatagaaagcac

SEQ ID NO: 69416 - DNA, 474 bp, Prunus persica
  Intron number 1 from transcript ppa006285m (locus ppa00628 5m.g) derived from phytozome v7.0 (chr-ID scaffold_2; pos 3081644 to 3082117)
acattttcttgtacaagcgtaacctctgggattaagatacttgatttaatgcctgtaggaaaccatgtagtttcttaactgccttaatttgtgaagatcaattgtggcatcatagggaatccaatggaaattgaatcgctccattgtgttttcatgtcatttctgcactagattatcttggggttggtgccattacagaagatggcatcgaccgcatgatagtcaacagtagaaaagcataataacaaactgattctatacccccattctttgcaacatcctattttgtttttgttcctattttaaaatatcaaaattttatcactggtgatgcaatagagccattcaatatccatatgatttccaatatgcctaaattctatgtgctttactttaatcaaatgtcaccttatttttgcttgtgtttggtttctcatcttctggcttttccttaatgcaggagttccttacttg

SEQ ID NO: 69417 - DNA, 645 bp, Prunus persica
  Intron number 2 from transcript ppa011728m (locus ppa01172 8m.g) derived from phytozome v7.0 (chr-ID scaffold_6; pos 5450774 to 5451418)
tccttgtccgttccttcaggattatcaatttactggttggtttctcattaacaaatttacttgatttatcttcttcatgcatgtagtatactaatacataacttcttgtctggcttttgcttgggacttcccaaaaggcacctgttgaggaacatgaacccgctccatccttttaatgtcttagagtccttattctttctgacaagggctttaagaatttttggatttggtcttagatgtattgtggatttattgggtttagtgtttttattaaaggtccatggttttggcatttaatggttaaaattgtagagacagctttttatgaatgaattttgtgcgttcacactacaaatttttgttgctacagtcagtagtgctttgatatcatactgtaaaaaccaatcattccaactcattttcatttttatttttaatttattgttctccgtgtggttgccagcacttccatcttaatattgtattgctttccttgacatgcaatctatcgagggataaataaaatgacttctattttctttgcaagctttatctggtctggctttgaaagatgttgaatcaaagcgaccttgtttacccccattgtttatcagttgtaccatgttgtttacaggttcacaaaca

SEQ ID NO: 69418 - DNA, 721 bp, Prunus persica
  Intron number 1 from transcript ppa008919m (locus ppa00891 9m.g) derived from phytozome v7.0 (chr-ID scaffold_8; pos 17208693 to 17209413)
agctacggtaatgcttcttcccctttaccttggattggaatttttctcgatcaagctctttcttttcttgctcgagtcttactctgttcttctattttccttctgtttaggcgtatgcatatattttgagacgctctatttaggtgtgtggttgcctaacatgatcaaaactcaattgcatgactaactaatcgcagtaatttcttgcctaaagttaaatcgatcaaatgggtgctccttaattttcgatttcaatagaacccatgtcttaaattgttaaaattcatatgaacatgcattgatctatatcagggtcattcgtttattgcaatttttcttgaattttctggggttacaacattcaatccaagcatctgaagtgagaaagttatatgatcatccattagcatttaacctgcttttagtctggaaatggtatgcatttgttgggtcattggcagctaaattggtattttcatgatgctaagtttggctctcctgtgtatcaaaagaaacttacaatgtgttttaagatcatagttccaaacttgagttttcccgccaaaaaggaaagataaaatgtcgagtatacaatagttaatgcttttccgaagttttgcttatttatttatttgttacacttattagtaccctagttgttttagaaattgtaatttgctacttttgactgatttttccatcacaaggttaattacttcag

SEQ ID NO: 69419 - DNA, 469 bp, Prunus persica
  Intron number 1 from transcript ppa002368m (locus ppa00236 8m.g) derived from phytozome v7.0 (chr-ID scaffold_1; pos 31400031 to 31400499 reverse strand)
ttgcgtcgtcgcctcttccgggatcgcctttagcagtatgttttcaaattcaattcattcattcattcatttattctcttttgttattcatggaatggaatgaaagattccagatctctataatcatatataatactaatagcagagagagaattaatattatatgaatgaatctaacaagaagaacatcaaaaatttcaccttttagaatagtgtatctttaatttggccttgcatgtggaacttggataaaaacaatataataataatactattctgtttgttcttagacgactaggatggatgttgagagaggagagtcagagtcaagagacgtgttaatataatattattgaatttgggtatgcttttttgctgcttattgatcatctagttaatttaatttaatttaatttaattatatcttgtttgacattaattaggtggtactgcaagttacatactgggg

SEQ ID NO: 69420 - DNA, 925 bp, Prunus persica
  Intron number 2 from transcript ppa010346m (locus ppa01034 6m.g) derived from phytozome v7.0 (chr-ID scaffold_9; pos 1259510 to 1260434 reverse strand)
gcttctttgttcaaggtaaagtagtcttggattttattgatcttcttctcaacttggactttaatttagtactagtgtcaagtttctgtctgatggagtgaaaaatccaagtcagtgcactaggtttttcttttcagtttgcaatgtaaactttcaataaatataaatgaagaggaggaaggtgtataatattccattttggtaatatgagggctggagataacattacaagaagaggagaaaagaaaagaaactcatggtgggtgagagatggaaattagaagttaagcccccaccccttttattttcttctatttgagaactagacatcgcaaaagggaatgtttaagttctatcttctcttttctttgttgtcgagccaaatatattggtgtttccattttatgatacatggtcatgcagctgcctttttcttttcttaaaaagatgttgtcgtataaaagctgtggttttcgatttggttcaaatcaatcaaatgtgtgaatgctagagaagttctggaaaatgtttaaaaagatttgttcatagtaattacttaacaagatttgtttatttcttgttcaagtaccctgtacatgtgccgtgaattgttttttagaactgagtgggtttttttcattatgatttcttagattcattttactctattttcataaccgtttctattatagaaaaaaagggaactccagtggccatattgtacatctatgcatttgttaagtttgccagattattgtatggtacttcaagtctcactttgaaatactgatgaaaatacagcttatcctttgtgatccagcatgcattgtataaatgtgttattcctctctgcacttacctcatctttcatcattttcttttttcattaggatcaatcgaagctttcacaatatcgggatagaag

SEQ ID NO: 69421 - DNA, 384 bp, Prunus persica
  Intron number 2 from transcript ppa000850m (locus ppa00085 0m.g) derived from phytozome v7.0 (chr-ID scaffold_3; pos 15307082 to 15307465)
gaaggctgaagtcagggtaattttgcaatctgcgcaaagtagcacatgattatgttggttatttatgaagcatgaaatgatgtatgaatctgtcaaacatcaattttatttatttgttgtggtagcttagacaactgaaaacaaacaacaaaatccaatcaaaggtttctaatatgataaaattagtagttgaaggttcccctttagacatagcactaactagagatacttgtccagggaaaagaataaagatagacagagagatactctatgcggttgattttcaattatttattttattgtgctgtaaggtcctgtcctcccttattcatcttttactgcttggcagatttctggtggtgtaaatttcaagtataactattt

SEQ ID NO: 69422 - DNA, 795 bp, Prunus persica
  Intron number 1 from transcript ppa024146m (locus ppa02414 6m.g) derived from phytozome v7.0 (chr-ID scaffold_5; pos 12286317 to 12287111)
ctttttctgaccgtcctcaattcagttcctgtgagtttttcatactgggttgtgttcttttgtttttttcttttctgggttgatcagttttctgtcttaccattgaatttggtttttctgaatcagaaatcttttagaaatttgtatgttcactgtgataatcatagaactcagctgaacaaatgctttcctgggcagtgttcgaaaaatcggcctaggcggctaggcggccgcctaggcggtcgtgtccttttaataattttttatatatatataaatagatttttttcctgactttaaacatttatttggtattgagcaataaaattgtactgttagaattaaacaacaaaatagttaagggtcaaaaagtgtttcctttactcgtttctcaattctctgcaactaaagagaccttgatatactgaaaaggttgcatttttacattcctgctgggccaggaattgaattcggagaccttggttcctctgaaatgagttctccttgttcatttatctttgtttaattctatctggtctgaatattcttagaatttgaagtcaaccatctaaaaaataaaaagtttatgggaacttttgtctttttggcctgaaattcctaggaattgaaaacaaatttcgttggcttactttctgatatccggttacaaaccaccaaacatattgcttcagttagcattttgcagttgttgaggttcagtcatttgagttttctctcttaaaatatcacaaaactgcaggtattcctgatccgggaagggaaataccaagagag

SEQ ID NO: 69423 - DNA, 790 bp, Prunus persica
  Intron number 2 from transcript ppa003168m (locus ppa00316 8m.g) derived from phytozome v7.0 (chr-ID scaffold_5; pos 1869653 to 1870442 reverse strand)
tgataagaaaacaaagagagtaatctacttgtgagttctgaatacctataattatgttctttatcactttatatacatatcgaactaacacttgtttcttgagatttatgttgatggttttggttttttctttgctttagaggacatcttgtccccaatagtgcaccgttgctctttattaataaggtcttgtctcctattagaaaaaaaaaagtagacttgtgtgtttatctccacattggtgtcaaatgtgtaaaaaaaagggggagaatgttcatcaaatcttttaacattgttctttcacaagacaagtatagtctcaattattgggggtgtttgacattttgtgggtttgatctcaaaattgtcatcttttgttggtgtatgatacgttgctagtagggaataacaagaaagcagtgactttttgaaagtgtgcgacttttgctcttcaatggactgtgtgatcgaaaagaaatagggagtttttgaatgcaagttgaagaggtggatttacttaggatagaattaaggtcatagcttctcttcaggcattgttgtttgacattttagagacattcccttcagtgttattcttctggattcggagaaagtgcagtggggcatgcttttgttccttggtccagtggtggatagaccttataattcattatcgagacctaatttcttttttgcataagaatgaaaattggtacttgcaattataagtttgcttctcatgacttatctggcaggagtcttgctggtcacaagttgagtggatctgtgt

SEQ ID NO: 69424 - DNA, 416 bp, Prunus persica
  Intron number 1 from transcript ppa003168m (locus ppa00316 8m.g) derived from phytozome v7.0 (chr-ID scaffold_5; pos 1870514 to 1870929 reverse strand)
cagagctatcagtcgtggtaatttgacatattgtttctctcttgtcctttttcttctatttaattttgagttgtcttgaggcatgccaaatattataactaatgaagaaatatcaactgacttcttaccatcaaaacaaaaccttggaaataatggatatgctgttttatttttatttgctgatgtatttgtattagcctatgtgaagtttggttagaaacactaatcaggtaatcacacaagtgattccaagaatgtgcctgtactagtgtgtacgtttacttaatctgaaaaagtagtctattcttgtgtattactagactgacaggcatgccctaatctgatatggttggtatattgaatgctgtttctaatttgcaggtgaggcacttctaagcttcaggacagcagttgtt

SEQ ID NO: 69425 - DNA, 874 bp, Prunus persica
  Intron number 1 from transcript ppa013889m (locus ppa01388 9m.g) derived from phytozome v7.0 (chr-ID scaffold_5; pos 18397611 to 18398484 reverse strand)
tggctttctgaggccaaagtaaccagatttttcaggtattgctttttttctttcctgcactatctcttcattgttagggttctggtttcgatttcgacagaaggtgctcgaattcgtttctgggatatttaccattttcctttaaattttgatagtaggttggttttcacttaagatttgatacctaagtctgattgtcagcacatttgtattgggtgttcgcggattatgtgtcttccattcataagttcccgacataatattctcaataataatatataccccgttttcgaaagtttattttttaatttgtagggattttaggttcgtttatttgaaatgcgtgcagttaatttaattcttcttgtgcagtgcagtccttagtttaattgtttgtttcagatgtacaatttgagggtgtttgagtcgcattgtggtctctgagggattaaatccttaaagtaaatgacgcaacctgttctaaattgcatgtctgacatatatgtaatatgttctgtttcaaaattttgagattttatttcttttactctcttttttgtcttttaatgttattttccccatggttgctgaccaataattactttcttatgttctctttctggttcctgcttgctttctctaactgtcttaataactaaattcttggaattctagctttctgtttccagcttttggaggtttgctatttgggtatgacagtgcttcacttgtagtggtttgttttttctattattttgatgctcattaatttaatacgatcaagttgttatattttgaatcttactcaatttgctcctgtggcatttgcaaacttgcagtctgtctcccaaagttcaccaagcatttatcaaca

SEQ ID NO: 69426 - DNA, 604 bp, Prunus persica
  Intron number 1 from transcript ppa003200m (locus ppa00320 0m.g) derived from phytozome v7.0 (chr-ID scaffold_8; pos 13024262 to 13024865)
ctcagtggattccgccgaagggcaccacaactaaggtcttcgattttatatttttcctggattttcagctcttccagcaatcaataagagttgaatttcaattattttatcataagttttgatgggtctgcatggcaatatgtgtatgttttgtttgtttgatttgagtacatcatccatgaatatattgggataattttattttcatgaaagggttgatggtcattctaagttgttcgtttcaatttgaatagactaaattttatgtgtggtgcattggaattagggttactttcattttatcaaatataatctttattgttgggtatttcttttatataagttctagctctgtatgtgtatggtaaagttatgaactttaatgggtggtaagagagaacacagagttgtatttgggcacaatctatcagaagcaaagatgatcgtagtatttttcctaacataatgtaaatgtgtatatcgctggagtatatttggattaaggtgctttattattttcccacttcaatacttcgttagaaattgactatgtttttttacccttccaggtaattaccaaagaatctctgttgtcggcacaggt

SEQ ID NO: 69427 - DNA, 906 bp, Prunus persica
  Intron number 3 from transcript ppa012894m (locus ppa01289 4m.g) derived from phytozome v7.0 (chr-ID scaffold_8; pos 17985796 to 17986701 reverse strand)
cacgcaaaggtgataaagtcagggtacactatcgggtgagcagaatttctgaaacatatgcttttaaatagtgtatgttagtagatatatgcgttaaatactgaagttaattgtactcggattcagataaccatgtcataaataaaatttgattaccaatcgtagcataatttttgtttttcttgacaagttcaagccttgagttcatgtacttttaaatcaccacgttgttacctgagctgaaaatctagtagtatggttgacgaacttttgaaatgagagtgctttccagtttcgaagaaatttgaagcattgattaagcatcctaacaaatctattgtttttcatcattccttgggtctagttttatttagattatgctgcctaaatatttgttgctcccaggcttgtatgtctttttgtatgttttgattacaatggagcctactcagtgaaacctaatagcatctggttacatccttgaagctcttatgagactgatgtatatgtacattttggaccttaatttgttttttttttcccccaatgtttattgtcagtcaaattgccattccccgctgtggtcagcttattaatcccaaaggcttcttcaatatgagctagtcatttgggaggaactagtaacagtcctcgtcaagacctcttgaaaatattcagcatgtcccatgttctggcagattggatgtgacatagtgcactttgacattaaactttacgttttcagtatctattttggtagtggtttaatgtattcaatatctaaattctacccgcattattctcgttggctcactatacattagatgaatgagccaatctctcatcctatagtgaagattgattgactagtttttcttccttgacctttgcaggggaaactcactg

SEQ ID NO: 69428 - DNA, 423 bp, Prunus persica
  Intron number 2 from transcript ppa008197m (locus ppa00819 7m.g) derived from phytozome v7.0 (chr-ID scaffold_6; pos 9960983 to 9961405)
acagagccagacccacttcttttcaactttttcaggtgggtttattgatttctttctatttttcttttcaattcatgctagttgtgctgctctgctatagttttctgaaattctgatttgtatgcaattgccatcttttatgttcagagatatgaacacttagttttagctttactgatataaatactttgatttgggtacattgaatgaaattacgtttaacttcaaaatagggtaaattatcatctgatttgagggattaaatctgtacagattcaactgagcaacttacctaatcttggaaggatatatcatgttttaccacttaccaaaaacgaatatcatcagttgattcttatctgtatatattctatgactgtgttactaacatgatatgttctatgttactattttctcccagaa

SEQ ID NO: 69429 - DNA, 686 bp, Prunus persica
  Intron number 3 from transcript ppa016865m (locus ppa01686 5m.g) derived from phytozome v7.0 (chr-ID scaffold_1; pos 44154622 to 44155307 reverse strand)
cagaggttccaatcatactaggtaacataggaagataattacaattaaaccctaaaagttgtgacaataatatatgcttgctattaaattggctccatttggaaaggggatgtcaaatctggagattttgattatatttttaaattgtttacttggaaagaaatatgtatatatagcagaagaaatccaccaacttcaaaatcattcattgtatataccaagtgatattgaattcatagcatatattgcgttgtattgtatgtagtaatttgaaatacattatatttatagtatttttatgacttttcccaaaaaaactatagcttatttgccaaattctttttctatccaaatcaaacctcatttcttttgatgctatagataggcttactttaaaaggaatttttttaataaatttgtttggggaatccataatgcagcacagattgacatagatagtactccgaaaacgctattaaaagtatgagttagcgtaaacaaaagaaatgtgtccgtcgacactacgaaacacaccaagtcttttcatagcatttttgaaacattattatccaaaattttagtcaatagcgtttgcaaagcatatgtatatggctttggccacatatattttcaaagcatcaaggctttcttcagtaaccctaatattcttcttgttgtataggtga

SEQ ID NO: 69430 - DNA, 798 bp, Prunus persica
  Intron number 2 from transcript ppa000386m (locus ppa00038 6m.g) derived from phytozome v7.0 (chr-ID scaffold_5; pos 17161299 to 17162096 reverse strand)
cttccacaaatctcagcctctctttgtgtctggaggttccaaatttatatatagtttttcaattgtctgatttttgatagatgcaatcggatttcgttattgttgtatctttttttgattagtttctgttgggaccctatagatctaggttgaatgcaactgtaaatagaaaatggaaaacgaaattggaattaattgtgaagaaaacgggaatttgttataacctgagccaagtactagtatggaatgctttcaggagtatatgatttatcaagtcccaattggtggagtaactagtttggatgattccactctgccattgaacatggtatatcccaaattttcgaaggtttatctaatgcaagaatgactttgagatagtattatttcgaccagtactgcctaatgaatgatcaaggagtcgaacctattagttttcctcttcttttaatgttgattatgttgttgggctttagattagaaagtttaaaatccaagttttctaattcgatgtcactttgagttttagtagagtcagatcattatgttagaatttagaaatggagtaataatgaaaaaaaataaataaatatatgaaatctcgttggcgtgcaagccctctttctattgatttatacccatgttacatctcatgacagagatttatattccatacttgcactaacagatttagccctgcggaaaaggggtttttgtccctacaattatctgaagattactaatatgtaaatgttacagttcatgcattaatcaagctgtgttgcattttgacagggg

SEQ ID NO: 69431 - DNA, 1070 bp, Prunus persica
  Intron number 1 from transcript ppa003139m (locus ppa00313 9m.g) derived from phytozome v7.0 (chr-ID scaffold_2; pos 20654920 to 20655989 reverse strand)
tcaagtcggtcaaccaagggagtaagctttatcaggtaccgttctgtatggtttgtgttttctgttttctgtttggttgccaagaaaatgaaggaaagggaaggaaaacaatataaagtttggtttttgaagcatttgatctaccttgcaattgtaaggaacttcaaagttcctagtttctggaaacacattatttagcctaataggagtgtaaatgaggaaaccatgttagtgttggaatatactatacagtcttagtttgataaggattaagaaagttttcactcctgatgtattgcgcaagttttgtcttgttttttgattatcagtcttcaagcatgatttttcattaaaggaaggagcagaatgctaaaatgatttttcattaaaggaaggagcagaatgctaaaatgaaaatgcttggttttttgagttgtgatttctgtttctcttttctttctcagggtttattttctgtctatattcagaaaagaaatgaaaatgtaaacaatagtttactttctgaactattggggtctcttactcttctctatttataatgatcaagtaatgtactacatatcgtgagtgaatactgaatgtaatgatcaattattgtactttttgttttccgtaaacaatagtacaatatttgtagtattgtacaagactccaatgcttgtgtgttcgtgctttcatttcatcaaattcttattgaaaatgtagaaagtaatatcaacttagaatgctggattttatgtagtcttctcttatctgtctttgacatcctccaagcttgattttaccagttacttgcatacttgaactgtgatgtagtagcactagatatgacatgttattttcttgaatagtgctgttgttgatatgaaacgactatgaacatcaataaaatgttttctttaccgagatgtatgctggtcgcatttgttgtatgactccgtgccttgtccttcttcttgccttgcaaacatattggtttatttaaaggtagacactgttttctttatgtaacaggctttgcaaagggacaagattattggtaagtttca

SEQ ID NO: 69432 - DNA, 592 bp, Prunus persica
  Intron number 3 from transcript ppa019809m (locus ppa01980 9m.g) derived from phytozome v7.0 (chr-ID scaffold_1; pos 14810267 to 14810858 reverse strand)
ctaatccaaaggttgcagagaaggcaaaattaattgtaagtctcactgactctgttctaaacttgtaaaatagaggtttaatttttcattcagacgtcgatctttttattaaccgtcgttataaatgaaaccccatgacggtttttatttaccgccttttaaaaaagatataacgttagtatttttataaaaccaacgtctgtattaaattacaacgacgattttgtgtttctgtgttaggttttttaaattaaattttgaactttcttcatattcacacgcacacacactctctctccctctctatttctctgcaattagtttgtacactatttttggatcaatgaatattttggttggatttttatctttgatgtcaaataaatgacggttatttcattgaccgatgttttaatgtacacaaaacgacggtagttttgggccgacgtattaaatatttttctccatctatttgttaaataaaccgtcatcataacctatttaccacgtcaattaatatttttattaatttatttgtttagtcagttttacaatctgttcactcactaaccttctctctctcacttttagg

SEQ ID NO: 69433 - DNA, 628 bp, Prunus persica
  Intron number 1 from transcript ppa022600m (locus ppa02260 0m.g) derived from phytozome v7.0 (chr-ID scaffold_3; pos 1988432 to 1989059 reverse strand)
gggaaaaagccatagacttggaagtgtacaaggaaatgagaacatatgtgtttccatttgaatgagtctggccgcaaaaaatatatagtttcccaatcaattctcagaggtctcacaaagaccaacaaacaatacacttgaacctaaactccattaattaatctggcacatgatcaagccaaataaaggctctagagacctggtctttcataatatgaaaccatccaaaagtgtttttttattcttcttatgctgtgaatcttccaagtcttgaagggaccaaagtttatacattactttagactcaggactgaacatgaaataaaatggtttcaacaatcatatattttattgtgtaagacatgaagatcagacaaaatggaaaagaagaatatggttggtttaacttatgatcatcattggatctttgacttctttttacagagtcttgtagaatataccttatatatttagctactcccccagatctttctctaatttaatccaaccatatggtttggacacacaaacaaggcttattttaactcacctgatcctgagaccatatagcctcagtaaaatatgagtctcagaaaactggcgctcaacttattgacaccaggttgtt

SEQ ID NO: 69434 - DNA, 472 bp, Prunus persica
  Intron number 1 from transcript ppa001341m (locus ppa00134 1m.g) derived from phytozome v7.0 (chr-ID scaffold_2; pos 9842574 to 9843045 reverse strand)
taggaacgacgaactcggtcgttggggcttttgaggtatgtatatttttttttcttcagatttttgttgcttgtgtgtcttttggtgatgggttgctgtagtttatcttgtttgggtctgtttaggtattgggaaattcacgggaatataatgaatgtgaagaattaagaaagtaattcggcttcatatgctgttctaatcattggaaaataaggttttcatatttttttttgacagtcaattgtggtcgtacaaaggtggttttggttatgtgtttgtggggatttgtatatagtctgtttggggattgggaaaatgaaggaaaaggatgaatcttaatggtaagtttgatttgtgctggtttgtttgagttagaagactaattcaatgaatccaaaaggaaaacttgttcaatgacagttatttggattcttttacttattagttcttcttaatttatagaaattgaagg

SEQ ID NO: 69435 - DNA, 556 bp, Prunus persica
  Intron number 4 from transcript ppa016984m (locus ppa01698 4m.g) derived from phytozome v7.0 (chr-ID scaffold_2; pos 21073557 to 21074112 reverse strand)
atgtaaatgtctcactgtggttagtgatcgtttctatgcgttggatcatatctttcatctttgttgctgtgtctgtatttgcttcttttcatcaagattagtgatgttaaacaactggcctcaagtagattcattgtttttaatactgttttaaacaactcattttacattatttaggtgaatgcaaaaaatggaatgtaaaaaattatggacttaacttccacaattgaaattatggaagttgtgcactgtgaaagatttaggtgaatgctatcagtgttactggtaattttttaaattttttaaatgcatgagaatttggaatgtacaggttcaaacataagaattattttctttgattctttaaaataattcaagatttgtttttgtctgagaattttgttttcatgaaataaagcattagagttatgtatggtttctctgcatataatgtttattgtctgttttcaaccatttttatgatgactgctgttgacgtgaagttgtactaatgaattcagattgctctaaataagccttctggcctgcaagtttt

SEQ ID NO: 69436 - DNA, 451 bp, Prunus persica
  Intron number 1 from transcript ppa023172m (locus ppa02317 2m.g) derived from phytozome v7.0 (chr-ID scaffold_5; pos 8770388 to 8770838 reverse strand)
ctttcgaaagggggggaaacagccaaagtatacaggttagttttttaatctttgttaaagtgtaaactacagcttgtctgcaaatgtggttgttttgttttattttgtgaaacatgtggttgtattttgattgtgcaatattttttaactttttatatttgtcaatgatatctttatgtttttcagtttggctttatctttggtgtggaccatgtttgttttaatggtttgagaattgttgagatatgttgtgtactactactttgtttaatagtagttatgtattatttattacttagttgttaggtctgtttttacctaatttttttaggtatgtgatgctgattttttatttttttttaaaaagataattaagttaaaagaaggcttttggcattgattaattatttcttcttgacagatcctgataaatttagtcttgagattcacc

SEQ ID NO: 69437 - DNA, 1040 bp, Prunus persica
  Intron number 1 from transcript ppa023450m (locus ppa02345 0m.g) derived from phytozome v7.0 (chr-ID scaffold_4; pos 9885403 to 9886442)
gaaggattttaagtctatcttaactaggtagtttatccttccatttgcaaataagaaggagaagttaaacgagcccccttacctttataacttcacagagaaatctcaatgggatgcctttgtagcttcaaggttatccccagattttgaggctgtgcattctgagcagtcatagagaagagagaaatgcgagtacaaccataggttgtctcgaaaagggtacgttggtttagagatcaattggaagaaaccatgctcagagaagaaatcgatcgatctctgctatggaagaaggcaagagaagataaacaaggaaacatccttgatccaaaggttgcagagaaggcaaaattaattgtaagtttcattgactctgttctaaacttgtaaaatttatttttcattcagacgtcgatctttttattaaccgtcgttagacatgaaacaccacgacggttttattcactgccttttaaaaaagatataacgtcagtatttttataaaaccgacgtgtgtattgaattaaaacgacggttttgtatttttgtgttaggttttttaaattaaattttgaactttcttcatattcacacacacacacacacacacactctctctctccttctctatttctttgcaattggtttgtctggatcaatgaatatttcggttaagtgtttttatctctgatgtcaaataaacgacggtcatttcatggaccgacttgttaatttgtacaaaaggacggtagttttgggccgacgttttaaatgattttgtgcgcctatttgttaaataaaccgttgtcgtaacatctttaccacgtcgtttaatatttttattaatttatttattttaattagttttattatctgttcactcactaacattctctctctcacttttaggatgatttgaaaaaacaagtcttcgaggcactctgattgtctctgggagcaatgatgttttgaccttggctttgggaacccctggcatggtgggagggttagacgtgttggagccgtggtttccccaactc

SEQ ID NO: 69438 - DNA, 433 bp, Prunus persica
  Intron number 2 from transcript ppa002831m (locus ppa00283 1m.g) derived from phytozome v7.0 (chr-ID scaffold_2; pos 25554150 to 25554582)
gtgtgatctgaagccacaagtaagtttttttttaatttgtcttttgattatagctgtgtatggtttctctgtatatgctagctcgaacattgttgggtttatgtgaaagtgatgggaatttaaaaaaagtacaatttgtgagagattttcttggcaacctaacagagttggtgaaacaaggaaagtatacacttctctttctcctaattcaaacttaacagctgcttttattgactggatcttcaaatttaaagcgtttaatgaagtcaaacttattagcagtactttcagaaattaggctgctctgcctactatgaccacagctcatacacagtttataatgtttctcatgataagtttttgaatttcatttatccaaattcatgtgtggttgggatcaagaaatcagtctgtgctttgcctgcaggagaag

SEQ ID NO: 69439 - DNA, 402 bp, Prunus persica
  Intron number 3 from transcript ppa006963m (locus ppa00696 3m.g) derived from phytozome v7.0 (chr-ID scaffold_6; pos 3112517 to 3112918)
cttcattggtggattggcgaaagacactacatgtgagtgctctttttctgaagtagaaaattctacattttttttttcatttccattgcattcagaaaagttatttagctaggttttttttttttttttttttttttttggaaaagaaagaaatttaaattctagtcatatggtgaaaatgtgtagcatgaaaactagtgagttatatggactacttatggctacttgttgtctttctattagactttagatgggattgaaattattatctgcggtatcttctgagatatgggattttggttggtgggtatggttttgttactgatgtattgcgttctattttgttttaattgcctgtgcaaatcaaataaatagctacatttgccaagcactttgggaaat

SEQ ID NO: 69440 - DNA, 438 bp, Prunus persica
  Intron number 2 from transcript ppa011339m (locus ppa01133 9m.g) derived from phytozome v7.0 (chr-ID scaffold_3; pos 20186072 to 20186509)
actatctcaagcgaattgggaggagcaccctttgggtaaatttttctattgcttattattcttatctatattcttgcgttacttcctcatctattagctgcttgtgtttcaagtttcaactgctgtcttcagatataataccaagtgctaattgcaagattagccccaaacgaaaagtgttttgctgggttggcttgaggcatgacataaaaatttcgtttcgtttctttgtttcttatttctaccccttaggaggaaagtgtttccataaagatactgacaggagagtgcgcttgtaatgcgtattgccattttcttcactctgtgattctaattttgatagattcattcattctgccttttcctccaataatgctccatgtttggctgaagcccttgtatgtaaaggtcaaaataataataaaaaccaatgcagga

SEQ ID NO: 69441 - DNA, 448 bp, Prunus persica
  Intron number 2 from transcript ppa004996m (locus ppa00499 6m.g) derived from phytozome v7.0 (chr-ID scaffold_5; pos 11188855 to 11189302)
cagttcttcttgcttctcaggttagaaattttgatggacaatctctcttaacacaaatggatggttgtttacatttgggtctttgtaaatgaaactaaatccaaaggggtagaagaaaaatgcattcttgttgtgatcagaatcatttttatttgaaggaagaattgaaaattgaaaattgaaaaataaaaataaaaaacagagcaaatccgtgacagcatgcaggacagatgtgcagagagagtcaaatccaaaaataaccttccaaccacatgttatttttcaaactaaagtggttgttgtaagattttttaggtcatcatttttgtgtagcatatgttctagatgttctgatgcacctactgtgcatgatgatgaacatgttttgaactttttttggtttttttttctttcttgtattttcacaatttttctaggaggagagtga

SEQ ID NO: 69442 - DNA, 676 bp, Prunus persica
  Intron number 1 from transcript ppa020865m (locus ppa02086 5m.g) derived from phytozome v7.0 (chr-ID scaffold_5; pos 18067499 to 18068174)
ttcagctacatatcaaggaagggtctcaaattgttgtgagaacgtccttaaaaacggaatagccgagcggctatacttgtaaaatattatatttatggtgtgtagtcactctaaaatattctttttatggagtatagtcgcgcggccataattttaaaatattctttttacggaatatagccgtgcggcaatactctttttcaaaatagagaatttatggagtatagccggctatactctcttttaaaatattctgtttatggcttatagagtatagccacgcggctaaactcgatgaagaatagttgttggacttggttggtaatcatgtgcatcatccattattaattaatcaagggaccatgctgactgatgtttgatttttgctagtactttcatggaagtatttttgctgatgtttgatcatgtgtactatattattattaatccacaatttcccaagcgagaacctcaaagtcatagctgcaactggagggagactccttaattacttaattagtagctagctaagctaggtatagcttaattagctagttaactagtactactgggtgataaaaacaaaactgaatctcttcaagatcaggagaatcagccagtaatggaggagaaaattaagaaagtcccagaagtggtactaaattcagggcataag

SEQ ID NO: 69443 - DNA, 823 bp, Prunus persica
  Intron number 1 from transcript ppa004704m (locus ppa00470 4m.g) derived from phytozome v7.0 (chr-ID scaffold_4; pos 6774119 to 6774941 reverse strand)
gcccggcgttcccggcgtcaaacgcccatctgaaggttcctcactttccgctctctgtcactctacttccgctttctgtttggttactgggaaaatttatgggccccaatttttttcacattttaactcgaatttttgttctgacgtaattgtttgttgtttgtttgataagaaagtgagaatcttgaatatgattatgattaaagttcattgctttaatacagacgtttactggaagtttctaatcgcagtatcatagagatcaaagagtgggaatgcacttgctgcctttgatgcatgcatacattgctaatttaagcttatttctatgttaatcttgtatgcaagtgtatttctgattctatgtgtgccttttaatttgcttatcagcaagtatgaatatgcttttttgctttaattagtaatgttagaaactgattagtatttcaagcttactttcatcaagtcagtttaccccagatttcacctcagagaaggaaagttgaaattttttttaataatatcatgacagatttagttaattaactttatctactatatggttcagctgggtactgtattttttatatgtctaataaactgcttaatgtccagtagtttagtgtttttgtattggcatttaggtccatatatttacaaaaatagaagcacaagaaaatttatatttgtgtttcttatatatgtactttcttactcaaaattactatttaagctatacttatatggtaacctatatgtttcctctggttttcttgtatatacgtttctactacgtacattagcactctaccatcagagtttt

SEQ ID NO: 69444 - DNA, 450 bp, Prunus persica
  Intron number 1 from transcript ppa013455m (locus ppa01345 5m.g) derived from phytozome v7.0 (chr-ID scaffold_1; pos 39847570 to 39848019)
taagagctcatcggtagctacactgctattctgaggtacgttttctgtttggttgctgagaaatgtgctcgcgctgaaatgaacctgcttttacaattgcatttgtttagggtattgatcagctgattttcattttggttgatcacacgaaaaattctgacgtacattagaaatctgtactcaatttattgttttgggcatgaaaaagtttgtatttttatgtaaatttaatggtgaatttgagatctggtgcggttttagtcccattttgtcaaaattgtactgtggaagataacaaattgatgaacgcgtgcaagcccattttcccttttcttttgatttaattggtgctttttatttttatttttatttttatttctctgcaactgagcatttctgagcttcttgttgttgttgttgactttgtttcttgtggtcaactaggagttc

SEQ ID NO: 69445 - DNA, 770 bp, Prunus persica
  Intron number 3 from transcript ppa013455m (locus ppa01345 5m.g) derived from phytozome v7.0 (chr-ID scaffold_1; pos 39848297 to 39849066)
agaaacaagtggcgtaaggactggctggggtgccggtgagtgtgtgttggtttgaatttgtttgttactgggagagtcattgtgaattggaatttcttaaaatgccaccccctatatatcgtacaattgagcacatttcgtagaatgtcattgctcaaggaagtctcatgctttcattttgttggatttgacaacatgcttgtcctagttgtgttctctcttttcttatctaagctattgaagtacactgtctttgttcgtatgagtgagccaccagtgatatggtactgtcaccagcgcactctctaggaacatatagaacttcatgcatgacctaggtgtcgccagtgatatgctaactgcttgctccatgacatctctaggttgtttccactgtgaccaaccctcccttttttacatatttctttgaagtttgacggaaaatgaacaagattaaaagattaaaaacaaaaggatgcttcatattacaaaaaacattttggccaaaatgtaaagaaaaatgattacaagaggctttgcaactcttatattatagtagcctactatatcagttttctcatgttcgggttttcctagttgggaagagaaaagaaagatggatgaaacatcaagctggatgaaagtttattgcaagattcaagatgcttcctattaaaggtgtctaaaaaccttttttttttgtggtgaccaaaattagctatttttcatttgcagttattatagcagaagcagttgctcttattgctgct

SEQ ID NO: 69446 - DNA, 786 bp, Prunus persica
  Intron number 2 from transcript ppa012046m (locus ppa01204 6m.g) derived from phytozome v7.0 (chr-ID scaffold_7; pos 16265960 to 16266745 reverse strand)
gaactaagtaaggtccagaaagagaacaaagcgaggtgggtcacttaacaccttgctctcttttgctaaacactgttttgattttaattaaggtcttgtttggtttttaaaaattgtaggaaattgaattcattgaattgagctgtcctgagttcttatgcaaattctaagttgagctgcgttgctcaattttaagaaaattaaacaacccaaattacaggaagccaagaactctgtttgttgtgctttatggtgttcgtcacctcaccagtcacagaacttatacaaaaggagtaggaggaagggctatttttattttctccaatttttcgatgtgctttaatttattatgatatcaaatttttgttttttcttcttcttatgcttcttgatactttgataggcttgaaatccatttaccagcatggaatagatataaggaattagttggatcacatggaagttatatccgacagttttttatggacaatgttttgtatgtttctgtgcctataagaagtttgatgctttgcattatcaggtgactcttaggaaaccttcaaaaagttgattcaagaagtgttactggattgtggattctctttcttttatcatttttgggggtgaatcaccaatttgtgaaacataaaaataaaatatgaaattagtttgtgtagctttggtatccaccttttgcatttattttgcttaagacataaattttaacggaaattgatattactctatatagggtggttcgtgaaggaaaagaacgtcgtagacaat

SEQ ID NO: 69447 - DNA, 907 bp, Prunus persica
  Intron number 1 from transcript ppa021508m (locus ppa02150 8m.g) derived from phytozome v7.0 (chr-ID scaffold_3; pos 1521804 to 1522710)
caggttagcaagcattaatttatatttttcttttttctcatgtgttcaataatctgatcttcttattggtttcatgattagatatatgttctgtctactatgaagaaacacttcactacattgtttcgcagattgaggaggctttgatttactagtttcatgtatgtgatactaaaattttcactcttattttgcttttttaggtgtggattggagttttgctacggctgtggatcatattggcgtcacagccaattttccagtcatgtatgttcaacagcttgagaactttataagccaaataatgaataggagcatcctttcagaaaaagaaatgtaatgggaggttttgatctttggttgtattttgggggttttctatgccatattatgtgataaaaatcttgactctacatcatgagatttgttgaaactattgcaatatgagatttgtgaggaaggaattgtagtcgctttttttggcaagactaattcataagatcttaacatcgatgatctaaggacaacatatccgctatttcgtaaactaatacttattaaattggacaacagtacaatgtattgtatctacatgggtgagactcattaaaacggacttggactcaactccaatccagtctatgttcaaacgatacctaaagggcaaacatatgaaatggacaaagttgttgacaattagatcaaagaaggaaaagaaaaacataattatctacccaaattgcttgcatctggagaaaatctgaataaagagttttttatatatatatatatttacatatgtagtgaatttataaaacataatctacattaacaattgtacccaacattgataaccatttgattggttcgaacttcaacattgtgtttcaactggcgcaaggctgcc

SEQ ID NO: 69448 - DNA, 631 bp, Prunus persica
  Intron number 1 from transcript ppa011615m (locus ppa01161 5m.g) derived from phytozome v7.0 (chr-ID scaffold_6; pos 3164795 to 3165425 reverse strand)
catcgatatcttctcctggttcaatcactccaaaggtacttaattcactcagctccactccttcgactcatcaaaatattcgtttttctggaaaaagagcttgaaatttgatatgctgcttctttttttaggggattcttatcccaaaatttgtattttaaaatttgttagaatttaatcgaggtctttcagtataatgaattttgtgatgcttgtgcttctgagaatggaattaggattctattgggaatttatctgcgaaagtaagaacctttatcaccataattgccaattttatgctggttcttctttttgcttatagttttgagtgtttttaatttaatttggtgaggtttgctttctctcagagaaaagctcctatttttggactgtttctgtgtggaaatgtggtggtctattattactaggaacctgatacgattatactcagtaaaattggtagcagtttttcaatatggaaattataaacggaactgttaattttctttgatgttaaaatgagaatatctgttgttctaacctgcaaaatcattaactaatgttgtgaattttgcatctgtgggttttctcctaactgtgtgttcgttctcctcagagcctctttacatag

SEQ ID NO: 69449 - DNA, 285 bp, Prunus persica
  Intron number 2 from transcript ppa014928m (locus ppa01492 8m.g) derived from phytozome v7.0 (chr-ID scaffold_7; pos 9076011 to 9076295 reverse strand)
ccatcaacaagattcaaccaggagcagtgcccaaggtattacatttgtatctcagattattatattttgattccctctccttggttgataagaagtgaacaaagcaaaagaaactgatatactgaattttattgctgatttatttttgaactgtaaaaattggcatatattcttgtataaaaagactcacatgtataagctcctaagcttctatttatgtcagtttcttactacttttttattttattttatcatcattattattttaaggttgtggagagccaa

SEQ ID NO: 69450 - DNA, 770 bp, Prunus persica
  Intron number 3 from transcript ppa013346m (locus ppa01334 6m.g) derived from phytozome v7.0 (chr-ID scaffold_5; pos 451518 to 452287)
ttcttcttcaccttcccctgttggctgaagataaggtaatattcatcattcctgttacatatctatgccactgaaattttagtgtcataaatggcgttgattctttgattgcaacatgggttttttttttctttctattggatgatgggagagtgttgtgttcgttttctcataagaggatagttcaataaattcaactattgctgcttttcacaaagacattctgaagttctatttttatttgctcaccttttgtggattaaatgtttccttttaggcttattgtatgtcctattatgattcgttctcctctgttaagagctacttactgtagtttccaagtgtttgatgttttacacgcaaaaatgaagtgagagaggtattaccgctttggttgtgtttgattgcatacttgttttgtgttatatatcgtggcactggttgtgttgtatttggcccaaagcagaccagttaggtgtttaccctagttggtaggattgtggtctatggctggacatagatgcacctaatcgcctatttgaaggttagccctggtgcatcccatttggcgcaagcatttcagtaagcaaggcttattggttgcagacatgaaagaccatgcccaagatagtagtttatgtttatttcttcatgattttttagtttattatattgaagcttcaaaatccttactttttagttggatgattctcctagtgatttaaatcaatttaaagcactttacaagtgttctatttgaatttggcaga

SEQ ID NO: 69451 - DNA, 610 bp, Prunus persica
  Intron number 1 from transcript ppb024947m (locus ppb02494 7m.g) derived from phytozome v7.0 (chr-ID scaffold_1; pos 40275350 to 40275959)
tgttaatttgaagttgtttggggttggaattataagggatcacttatactttaatggaattgaccaaagctataagaattggacatttcacggagaaccttgggaagcaactactaatgcttgagaagtactttcccccttcattctttgatatcatggttcatctagtagtacatcttgtcagagaagttcgtctatgtgggccagtatattttaggtggatgtatccgtttgaaagatatatgaaagtgctgaaggggtatgttcagaatcgtactcgtcccgaaggttgcattgctgagcggtatatagctgaagaagcggtagagttttgtactcagcatttatctgatgttagtacagttggagtgccttcaagccaaaagatgggagtttcaaagccattatcaggttgcacagtgagcgtagttgatcaggacctgttgaatcaagcacatctatatgtcttggagaatacggaggaagtcctaccttatatcgagtacgtatgagttttattctttaagtttccatttaaaattatttcttatgtttatcttatatatttgggaccgtaatgcttgaatttttcgtgtcatgtaggcaacat

SEQ ID NO: 69452 - DNA, 482 bp, Prunus persica
  Intron number 1 from transcript ppa008522m (locus ppa00852 2m.g) derived from phytozome v7.0 (chr-ID scaffold_6; pos 25130410 to 25130891)
caattgtcgctgccgctgcttcacaggaggaatcggtgagttgaatttgtgagttttcttttgttttatgataggactaagagtgtttgggtgttttcatttgtttgggtcgtgaacatgggggattgaggttaatgtatgccatgtgtttgattgcgtaatgctgttacttaggtgggattatcaagttttgatttttggcacttggaaacaagtatgaatattttctgaaatttgagtttgagaaatcatatatcatttaccctgttttttatttatttaaaaaaactctatgtttgatcatagtgtcgtgaagatttaaaggcctgctaaccaattagatttgataggaagagagttatatgcatggtctgggattgatttatcgttcattcggggtgcaacttgttcgcttatcatgacattgatttgaattttctttcctagaagcatccagagattgaggtggagaaagaaaagga

SEQ ID NO: 69453 - DNA, 610 bp, Prunus persica
  Intron number 1 from transcript ppa002840m (locus ppa00284 0m.g) derived from phytozome v7.0 (chr-ID scaffold_8; pos 11746096 to 11746705)
tcaggcccgctggatcggttcgccaggccttgtgagtcgtctttctctctcctcgctttgcttttttgtcggcgatatgctgctcgttttgcttcttggtgtgcttgtttcttgctgctgaatctgttagggtttgtgtgctcttgaggcactgtggttgtggatgtgttcagtttgctaaatttgggggttccgtttggttgctgagaaaactcagaagatgaaggagctttgaattttgactttttctttcccctttttgtgtgtgagaaatgattgcttgagtatacggctgttctttttcttgtgtcaagatatcgacctataaaatttgttgtttttctagttttctttttaatgttttccttttctatttttacattttatcagggaccaaaacgagcagtcttagtgaaatgcgctttatggttaatttgatgaatacttaggttaaatttgaagttttaaaagaaagtttcaatttttatgtgtaattatgattatgatggtcatatttgtattctcacatgtccatgtttttccaatgcatgacactccagttgttaatgtcgatgctattgttattgtgccacaggttttgaaggatttt

SEQ ID NO: 69454 - DNA, 713 bp, Prunus persica
  Intron number 2 from transcript ppa002840m (locus ppa00284 0m.g) derived from phytozome v7.0 (chr-ID scaffold_8; pos 11746990 to 11747702)
ttgaggtgctcagttgtttaccttgcgtcttcatgtaatcatgcatgcaaatacttgtggaagttcataattggatagatacttgtgccacttgagtgatatcctcatgtgatattaagatgaatgggtgactcaaactgaccccccaatcaaatcacacccatgctttagatcgattgggtttagttttagttttctagggaaatgggcaatggtaaaatgacaaaagtagaggtgtaagtctcttctgattctgctcctttgagctttagctcactcaagtgtcactttgccaatcttataggtgatacctaaatctggttcatctaagatataaggttttctgttgtagtttattgaaatatagttgccaattgttatattaatgtagtgtgcatggtgttagaagtcatataatgtattaggatagttgggagtgtatgtggaaatagtaacgatttcatatcatataacatgttggtagaaaaatgtggatggtttatcgagtaaactttgttcattgattatgattctattatcttggtcttaaacccatgctgctttggatgtgcttttaaagtgtacttgattgtttctatacttttaatttggtttatactatctcacttctttgttttgttttgtgtgatacgatttgccagttttaaacatgaagatttttactttcaggttcttgaaagcaaggaaatttg

SEQ ID NO: 69455 - DNA, 863 bp, Prunus persica
  Intron number 1 from transcript ppb014096m (locus ppb01409 6m.g) derived from phytozome v7.0 (chr-ID scaffold_9; pos 1174881 to 1175743 reverse strand)
ctctgacaaggaaaaaagacgaaaaggtttctctgggagattgaaatttttaatcgggtttggaaacagtgcatgtgtaagtcgaaaagttgcttacatataaaaccatttcaaaaaaataatacggcggttacatttaactacgtcgtttttaactaaaacgacgcaatatttttcattcgacgtggaatcatttcatttaacgtcgttaggtttaatataaccgacgtggattttaatttttaaattatgaatagaattttttttcccgtgacctttcagtttatttttcaattacagtgcgttataaatagagtttttttccggaggaaatttaaaacgaaggaaattaatattctgcaatatgtaaagtttcttttttggatgacagatttaaataaaataagaatataaaaacaacaaatgtgtaagtcaagtagacgaaaagttgcttgcatataaaaccatttcaaaaaaataatacggcggttacatataaccacgacgtataaattacaaaatacgacggtacatttaacttcggacgtggtaaataaatacgacagtagtttgtaggtaccgtcgtagtaaactcaaaaattaaagtacataagtaataactcgcgtcatgatatattatttaacacgtcgtttgtattaatttaccgacgtggatttctgtaatatacgtcgataataccgacgttgattttacaatttaaacggcggtttttttgttaggaccgccgttggttttaaaaatttattctataaatttgtcgctttcattcattttcggtttacatttaaggttccaagttcttcctctctcagtctctcatgtctcaaagacaataatttgg

SEQ ID NO: 69456 - DNA, 1016 bp, Prunus persica
  Intron number 1 from transcript ppa007034m (locus ppa00703 4m.g) derived from phytozome v7.0 (chr-ID scaffold_1; pos 23184374 to 23185389)
taacacacctttgtgaataatctcctctttttcaggtaatctccattgtcatctctgttaatctcagatttggtatgctttgcttttctaatttataggcttttctttcacatgagatcctcaacatgtcctgatcaggttcagcttccattttcttttttccttctgtttgtcatgtaatgaacaagctcatgaatttatgcttttatttatgcatggattatgcttgtttcactattagcagcttagcttagctaacccaaatgaacatagatttgattctgattggttcaacatgttggtgatttgtttattcagatttcattcagaatttgttgttataagagctgttttagctgccatgagctgaaattcttgcgtatgtgctcacatttcaagttctcaattgatggtttctactttgactggattaaaattttccattatgtcaccccatgataatttaattgttattagatctagttatctgagctccatttttgttgtttctggggaaggatattagatctggtctagctactaccctttttttcctattaaaaatagaaaatttaagttaaagaaaagaaatcaaagtagctaaacaaagtgggtgggtttctcccttggccctttcccaaatagttgtgctgccggaccggtggttgatcttttcatcacttgtatgatcgtatcagcctgtcatgtttttctctttgtttctgtggtgaatgggtcatttataatatatcctctcagaagtttaaccctttaaaggtataatcttcttatttttattctataatggtgtgcacaaatatgtaggacacttccgcctgaaagtggtgttcaaatggaatttgagtatggtgtgttttattgaatttcggttgctgctatctggatcaacgccttattttttttgaagtgctaaaattatgttatggtaatctttgaattgaattttcgtctgcatttatgatttgttcaggtgattatcaacctgtcctggatac

SEQ ID NO: 69457 - DNA, 494 bp, Prunus persica
  Intron number 1 from transcript ppa001803m (locus ppa00180 3m.g) derived from phytozome v7.0 (chr-ID scaffold_7; pos 16731345 to 16731838)
cagcagattccccgacttcggttctcgaggacgaggtttgctttcactaattttctaatggcggttgtttctatagcttctctctgtcggtctggttggttcttaggaatgtggcagagtttgaaggaaaatgtttgaagaacgagtagaaagacaagaaattcctcaaaataacgaattttgtagaaaataaatcatgtctgtgtgtgtctatgtctctcacgtactttttgaattaagaactttcgagttttggtcttgctgtgagaaaatgatgtttgcatgcatatgctcgatctattgtttctatgaaatatgttctcttatagtcctgacaggcttcagtgtgacaaattatagatgcctagtgtgtggtttctgttggattttataaatagggtctatatttgcttcgaactcctactaatgttacatttttaaccatgttttgttcattttgtaatgttgttgtattgaatcatgtttaaggaaac

SEQ ID NO: 69458 - DNA, 470 bp, Prunus persica
  Intron number 3 from transcript ppa001803m (locus ppa00180 3m.g) derived from phytozome v7.0 (chr-ID scaffold_7; pos 16732264 to 16732733)
gtagaaaaagaaaagccactgcaacctacaataacgtaagaaattccatgcttccttcatttttccaaaatgagatatcttgttcatttgagtctggtttggttgatcatgaatatatatggatgttcttgtatagttgtcctatcagatgtaattagtattgtcacacttatctatcagatggacatctatttattgaggttttgggtggtccgattgctcttgtcttctgtcccaagtggattaatcttttccaagggagaaaatttgcttgctgggtgacataataaagtctaaatattcttttggaatatagtgaatatatcttttaattatgttttaaatttcatcccattagaagtttattggatatttctatgtcttttttaagttcctggtatatttctatgtcttcttgacctttactatcttcatttccttagaagaaggccaagagggcagttcaagct

SEQ ID NO: 69459 - DNA, 540 bp, Prunus persica
  Intron number 1 from transcript ppa006112m (locus ppa00611 2m.g) derived from phytozome v7.0 (chr-ID scaffold_6; pos 16098920 to 16099459)
caactaagtatcggatttcatatatataaagtaaggtacttttttgatgctatcttcattcatgttaatgggtttcatctctctgttgcttttttttttttttttttgagtaatttttttagcttcttttagccatatgagtttcaactctctgcttgaaattctgttcttttatatggattttttaaaactcattgaagcctttatatgcagtataattatgtgtaaacacaacccattccatatttttttctcccacaaatcttaattttaaaccacgacttgcttttactcacactcgttgtgtatttgttctgttcaagaattttgattatgaagtaagaaagcttttgcatttgtaattttatgatcacttgcatgccatgtctccgagaaatctgtatctctgagttgttggtatattgtgtgcaagttatagacttgtcctggtagcaaagtgacttggactgaaaaagtttttgacatcattttgttacttggcttgagatgactgttgcttctatatgtttatgtaggaag

SEQ ID NO: 69460 - DNA, 467 bp, Prunus persica
  Intron number 1 from transcript ppa003322m (locus ppa00332 2m.g) derived from phytozome v7.0 (chr-ID scaffold_8; pos 21510612 to 21511078)
tctctagacagcggcagaagccaaatcttccggtaataaactattgctctttcatagtgagtaatggaatcactatcgccccaaatataccaagaggattttaagttttttttcttcacttgcatcatcttatttgcgattgatgcatatgcatttgggttatgggccattaatgtctgagttgttgaaaattttgaattttgagtgtatttattataaaagaatgtttattttgtgtataaaatttttgataatcaacgcgactattggtatgacccagatcagagtatctacttgtcaccacgtgggccgttttaattggataaatggaaacttagaatatgttatgtatggaaaattatcctttgcatttatgtgtgcatatttacaaaataaatgcattttattattcttagtctgttgagatcttttttgtaaacaaatttttccatagcaggaaaattcag

SEQ ID NO: 69461 - DNA, 940 bp, Prunus persica
  Intron number 1 from transcript ppb024412m (locus ppb02441 2m.g) derived from phytozome v7.0 (chr-ID scaffold_12; pos 76674 to 77613 reverse strand)
ctgccattccattgtcagcaggcacctccaaatcggtaccctacttatcatctgatgattcctcatcgaatgcaggggaactttgttcatattctgaatcactctgtgacatctacaaagaaaaacaaagaaaaacaaagggtcatgcttggatcaaactaagggctctaaggtctttaacacctatgtttcataatctaaatcgctgcaaattttgttcaaaatgcaaagttttatctcaaacatgagccactctcttaaatattgaaggctcgtatggttcatcttagttcaccaaagggtactaccatgatgagcaagcacgcctgctgcatttctaccacgtggcgtcttgcttcaataaatagccacccacgtaggcacaaaagtctaaacgtcaagtcactacatcaaatttcactttccgcaacactacataggcattggtgaaatgaaaaaccgatgctattagtatattaggcattgattttataaataataagactacagtgtataaaggcatcaacacaaattttttatttttcctacccatgctattgattttacttagactctataatgtgaatatattgatgcgtaaaatggttctgcccaaaacaaatttaagcataacattttgcacagacgccaaaagcattgttgaccgctacaataatttttcgctaaaaattttcagtcccttgttaatatttcagactccctctcatatttttggcgaaaaactaaagtccctctcttctctcttgcaatacccagtcagagtctctctcatccttctcacctacaagctccctctcttctctctcgcgatacccacagtcagtctaaaccctctgtggctatacccacagtcacagtcactctctcatccctctcaccttcagcatctctcttcttcatttctctcttctctgtcccc

SEQ ID NO: 69462 - DNA, 987 bp, Prunus persica
  Intron number 1 from transcript ppa002930m (locus ppa00293 0m.g) derived from phytozome v7.0 (chr-ID scaffold_4; pos 18576297 to 18577283)
ccttgaaacctctatttgcagccctagagcctacggtacaataggcaaatttcaccgacctgtgctttgtcaaccactattatcaaaacttgttatattccatttcttttacagatgattgcaggaaaatgccactcaaggacctttattttgattaagaaaactttgaaaacacaatcacagaactttgaatgacttttgtgaataaaaagaattttatttatttatttatttattttgttatctattgcagaacaaccactatttgtttattcatttataaaaatcaaagaaattattatatagatagtgttaattatctaaatgaatgggtatgggattatgtttgtctgcgattagtaagaaaaagaacccataattgtaaatcattggaattgtaggagtgactcccatatgaaggatcccatatataccttgatgatataaataattctcctgatttggcagtttgatttgaagttggatcaaaacattggttgtagagagaattgtggaattccaccatccagaattatagcttatccatgtcaaggtgccagctctgtcttttgctctaaatgaatgcctacacatgtaatatagtgtataaatctacatgttacaaaagatagaacaactagactgacacaccactagacattccaatatttgactttctctctgtacttcccctatatcacattttttagtatctagtggggtggagtcatgggggtggataaaggtgaaggaaatctcttgtcctccctttctttacaattttttaaataatatggaagatacttttttgacatgttcatctattctttttcagttagttaatgcgttacttctactggttctttgttgggttaattgcagaatcgacccttgtttctaacatgtcctgcatccatgaataccttttttctctccctgctcatttaaatgccatttcaatggttttatttgtgctgtaggttgtgg

SEQ ID NO: 69463 - DNA, 966 bp, Prunus persica
  Intron number 1 from transcript ppb017079m (locus ppb01707 9m.g) derived from phytozome v7.0 (chr-ID scaffold_5; pos 17546338 to 17547303 reverse strand)
ccaacaactccacttaccaggttctgtttaaacagcaaagttcctttcagttctaaaaaagtttaatcttttaatggttcatttgatacgaactgattaattgattgatctctttgcatacaaaattatgttgccaagaaaaactaagccaccattttgtccatctctcttctcttttccctttaatgtccctgttgaaaaaagtaatgcatatttgtgtagatataactacgcaattctacaaaactcaagaaattacaaactagattatggaatgtcggcaacacacaaatatgcagagaatattctagatgaagccacacacttgtggctggagaaaagaacaggcagtggagcatgatggctaaacaatagccacaaaagtatacaagtttctaatgaaagccacacacttgtggctggagtaaaagaaaccaagtcggtggacttgacgatgtcggcaaagaatgcctataaattggcatgcaatgcaataaagcaaagtggagtcaacaaaaacaactcccaaaccagacatggagtgaaccaatcaactcctaatctatgtgggagtaaacaagccaactccaaactattacggagccaagagctacccaaataaagctatgttgaggagccaataaactcaccaatctaagtgaagggccaaatagcctaaactaatctataaatcaagtgtggtggccaataagccaaaataagctaaggatgaagccaaatagtgagtgctataatcatataattgttgttttgagttcttgaaaatcactactcacaaatatatacaatcattttatgtaaagagatacccaattgaaaattatggatcgctctcatcaaaaaataaaataaaataatggatccccatcccctcaattgaaagtaacatgtacaatctcttattttgcagagaggaatcgttgacattgccaaagaacttctaca

SEQ ID NO: 69464 - DNA, 981 bp, Prunus persica
  Intron number 1 from transcript ppa006463m (locus ppa00646 3m.g) derived from phytozome v7.0 (chr-ID scaffold_1; pos 25977614 to 25978594 reverse strand)
gctctcaagtatgttaattttcatttgaattcatttttttctcagctcctgagttctgaggcactgttggacttgattttttctatgagtttgagcttatgttttctgtgtgtttgtaactatttctatttgttgtttaaaatttgagttgtagctgttctaattgagtatatcagtgtgtgaaattggctgcttagattttttaaatatcaatttgttgtttggggataccttattgttgcaataaatgctgataatttgcctaattccaagttcgacttcaaaggtgacttagatgagcacaaagacgaaggcataaattacataataaacgttaaggtttttctggaattattactagctggaagtggaggtttcttggtgtactgatgattggttgcggagagcatcttaggtttcctgatattctggtgaaggcttaggtcaaaattaaaggttttctgatatttgcatagatgtgttaattactatcttctaagctttgcaaagattctttaaggtaataatttgatagtctcagatttcttaagtgaaatctgtttgtaggcatgtgggacaaattcgcggggttcatattgccttctctatgttagataaatagttctgacaatagaatttcagatgttttggtgttcaatttaacagtagaaaaatataaatttctcagataccttgttcgttcagtttaatgcgtttttttggtcaaaatgtgattttaaatcgactattctttttatccaaagggataaggtactgcataataattccacattcttatatgttttgccttgataatctttttgctatgttcttgtataatgtcgaggattttgaaaatgtgctggaccttagtccaggtggtagttgggtgtcttgagtgggttcaaatcttgtagcgtaaaagagaaaaggatattgataatgctaacaatgtatcattcaggtaccatcccgataaaa

SEQ ID NO: 69465 - DNA, 456 bp, Prunus persica
  Intron number 1 from transcript ppa005299m (locus ppa00529 9m.g) derived from phytozome v7.0 (chr-ID scaffold_3; pos 2662312 to 2662767)
aaccacaacctcgtttggccttctctctcttgcaggtccgtactcgccctctagggtttccttcttcttctttaattgaaaacgttcgtattttgatctagttaatctcttgatttagcacaatgtcgacggtccctgcataactagtgtttctacaagcattaattacttcgtttttggtttttttactgtttgggtttggggataatgtgcgtgaagttaaagaaaagtaaattgttggggaaaatatgctgtcttgttgatctgggtgtaatgtatgcttcttgtaatggttgtgcttattttgagcttttgatgttgtggaatctgtgtgccttcgcaaaaggaggtacattgaagctgcttggtttgatgtattggtgtttcatttgtgattgttcacctttaactttaagtgaataaaagtttgattcattttagcctttgtttttgtag

SEQ ID NO: 69466 - DNA, 321 bp, Prunus persica
  Intron number 1 from transcript ppa000801m (locus ppa00080 1m.g) derived from phytozome v7.0 (chr-ID scaffold_1; pos 35418389 to 35418709 reverse strand)
gaggacgcttacgccagatcggtcactgaggtaattcattaattcagtaaattcacacctctgcatgacattttcctggaaaatcttacagtgaatgataaactagctccaatcacttcagtaattcaaattagggtggaagaattgaaatgcattggaagcttttggttccagcattcctttgggaatgttttattcttcttcttgtttttcctttgggttttcatttatacggtcagtttttcaaaatatttcattttttaactgtttccgtattcttggttaggttttggatttctttggcgtggacccgaaaagggg

SEQ ID NO: 69467 - DNA, 221 bp, Prunus persica
  Intron number 1 from transcript ppa023740m (locus ppa02374 0m.g) derived from phytozome v7.0 (chr-ID scaffold_1; pos 36976772 to 36976992 reverse strand)
cttcacctcaactgacttgatcatagatttttccggtaataaatatacaaatatttattcttttttcttctaatctcaaaaaatgtagattcaaacttaaaactttgtacaactaaaatgaagcaaatatgctaattaatttaggacttggaacttagttttaatttgtttttgtgggttttgaaggaaggagatttcgatttggaaccattgctaacaag

SEQ ID NO: 69468 - DNA, 427 bp, Prunus persica
  Intron number 1 from transcript ppa000753m (locus ppa00075 3m.g) derived from phytozome v7.0 (chr-ID scaffold_6; pos 27952537 to 27952963)
gctcgacccctccatcaaaaaggtaatatattgttttattattattgttattactatcacttttgttcagtttgatgtttggttactgaagaaatagaggagattgtgaaaacttgtaatgtggagttatttaggatttgtgtggtgcttctgaaaactgatttggttatattttgattttttcaatctgcttggtttctttcagttgtttaaatattccacttttttttagtttgggttaccattacactgagatgggagcaaaatatgaaatttgttattctatttggtatttagttgttttttccccttaccctaagtctatttcgcatcctttggtttgcctttatttttgttttagttagatggatttgtatgctgattcaattaccctgattcttgcagactgagtggactagagaagagg

SEQ ID NO: 69469 - DNA, 420 bp, Prunus persica
  Intron number 1 from transcript ppa010184m (locus ppa01018 4m.g) derived from phytozome v7.0 (chr-ID scaffold_3; pos 5728901 to 5729320)
gaccctcaggtattagtggatatggtcttcttgttattagatgttatttttggttttggattcctattgcctgtttgatttctgagaaaaataaggtattttggaatatgggaagtttgtaacttgtttctatttaatacatatgatagcgtagatttctcacatcgtttgctttggtacaaaaagatttgtcttctagttccgtggtaatgcggggacgatttactgccatgggtctagtggaccattcagttcatgtaagggctgatttttcataacaaggccgaacaacaatgtagaattaacgttttcaaatctaagtttgatttaataaaattttgtaatttcttggatgtattcaggaaaccattaattgatttgctttgaaaatctttaggttcttgagagagcattggaaga

SEQ ID NO: 69470 - DNA, 953 bp, Prunus persica
  Intron number 2 from transcript ppa010184m (locus ppa01018 4m.g) derived from phytozome v7.0 (chr-ID scaffold_3; pos 5729416 to 5730368)
attcggtagctcaaggtatgatgtattccgtacttcttttgctatactcagtttcattctttagtaatctctgtaatagctttttctttttcttttcacttaccattattactggtagcttaatttatacgtgttagtttggatagaacttgactggtgatgtatgaggcttgccattatccatggttacttttgtttcagggacggtaaaagttctgtcatgttttgaaaaataagaaagttcgttaacatgttatcagcaagattctattactcgtaaaaagtgttttatgcatacaactctctgtcttgcagatacagattgtcttgtttgtgtgtttatgcgttttgagcggcattactagttatgatgagcactaaactgtgctaatctgttcacttctgtcatcaaggttgtaatgaactggttcttgtttgtattttgaaagatggaataccattatgcaaacctgcaaaccactgaaatcagcaccttttcaagctgtttatgtttttttcttcagctagtttttccagtatttgggtaatgaacaatattcagtttaaaagaacaaagctttggttcccataagggaggaaaagttctgaaatttttgctacattataatatatgttttatgtttcagattgctgtaattttcagctcacaaataatatagaaaaagaaaaggaaaaggccgcaggaatatttgttctatttctgttatttcaacttgttcccgagaacagttgattgttgttacctgaatcctatcctttcaagtaaataattccgttaataatatgaacattcttcatcaattattgtacagttttggtttttttctttttttgggtcaggtatatttcaagctgcatttaattggtttgttttttttttccatgggtaagaatttgattgttgcctttttatttagcaggtatattgacta

SEQ ID NO: 69471 - DNA, 521 bp, Prunus persica
  Intron number 3 from transcript ppa001624m (locus ppa00162 4m.g) derived from phytozome v7.0 (chr-ID scaffold_7; pos 17715116 to 17715636 reverse strand)
ctggcaacatattgcccagattgtaagtcttaattgtgttaaaaactctacctaattgttaatcttcagttgcacatgtatcacttacttagtttttggcttcggtagttcattaagagtgcccaggatatgaccctgtttgtgaactatgctgcacataccatcttattcacctaattagcattgtggtcttatttcttcctgtactgtaattctgttagtttaaaatcagttaacatgctacaatttaacaaattcactaatacaatactaaaccttatccaaagaccctcaattagccgaaactgcaattgatgatttgatctagtatcggtgtctttgtaatgtagttttatacaaatgtgagttggttgatttgtcctttcagtttgttcctttgagtgtgttgaattcatctaacgtgaagaataaatcatagctatagcgtttccatggctaatatgtgagtttcatgatctctatcaggtatcttctctgtacagtaggatctgtgtacatca

SEQ ID NO: 69472 - DNA, 592 bp, Prunus persica
  Intron number 1 from transcript ppa006279m (locus ppa00627 9m.g) derived from phytozome v7.0 (chr-ID scaffold_7; pos 21181232 to 21181823)
gagtgcttccgattatcctttagtgacccaaggtaaatttaacggccttttaatagcaaaatgtgattttggcctttctgattctttgactgttagtctctgctttgggtatttttttttaattagcttggaattggttctttgaaggacctgtctaatgtgtagtaatttatgaatttttttttcttctgttatttttctttaatgtgggtaggaactggattttgcttattatgggtttgcattgactgttttgactaagttgtctcacatttatgcatcggattttgtgattttgttctgcatttatgcattggatttcttggtttcccaagcttatttttggtaagtacaatataactacttttgctcattgctagctgtactggcattcagatattgctcttgttttataacacaaagaagatgagggaagtggggctttactctttgcagtgttatctgtgatctctggcattggtgcaatttgttagtttctatgctgatttcatttgattgcccatttctgcccctgtcatatcctaacgccttagtttatacgtctgtctttcctgtaccacagatctgcttc

SEQ ID NO: 69473 - DNA, 616 bp, Prunus persica
  Intron number 1 from transcript ppa003534m (locus ppa00353 4m.g) derived from phytozome v7.0 (chr-ID scaffold_5; pos 15061891 to 15062506 reverse strand)
aagaagagacgcctcagagataaagtccacaaaatgtaatgtcaaatttcaccttcactgcctttggttctttttctttcagttccgtcaattcttcattatttttcaatttagtttgatggctgtctgtgatttgctcactaatctgagatttcagtttcgcttaatgagtaccaattagttggtctgtagggaaaaagaaaaaaatgggcttctttttattttaactttgaaaaagtatggatatttgataaaagtgaagataactgcttggtgggactgatatttgatgcttcatttggtatttggttgatcaaacattgatggaaatataaatttaagatcttgaagtattgagcttggggaaattaaggcattcccagctatttggtttgccccggctcaattagtttttttaatgtaaattttcgcatttttttttctttatgttcaagctttgaagggtgatgatcaatttggagcgaatacatgttatgaatatcgcctgaaaatttgtttataaattataatggtcaagctgtaggtgaattttcctgtgcatataacaaggttctaacaggaatgttgttttttttctctcctttcaggttttacc

SEQ ID NO: 69474 - DNA, 298 bp, Prunus persica
  Intron number 1 from transcript ppa000305m (locus ppa00030 5m.g) derived from phytozome v7.0 (chr-ID scaffold_6; pos 21795786 to 21796083 reverse strand)
ggattggtgtagtcactggaagagatcttgcgcaggtattaattctctcatgcagggttttattaatgcatggttagttgtggaggtgctgtgcgcttactctgttcgcattcatgcttttgagctgcgtcctaaccacgataccccttctcttcgcatgttgttatttgatttactatgtagttggctgtttgatctctctctctctctctctctctcttgcttgtacagagacagttgcatgcacacatgctccttgacttttttcttttcttaaatttcgtttatgtcaaaagat

SEQ ID NO: 69475 - DNA, 639 bp, Prunus persica
  Intron number 1 from transcript ppa010917m (locus ppa01091 7m.g) derived from phytozome v7.0 (chr-ID scaffold_1; pos 39639774 to 39640412)
actcctttcaagccgagggaactaagctggccgaggtaataaataccctaaatttgttgttttgatttttgattttgctattatgttattgcagaaggaaaacggaattacccaagtattgttatcttttgatttgaaggtagattatggggtttttgaatgtgttaatttgtttttgatgcgataatgggtggaacccagtttcccaatttaggctgccccaagaacaatggttattagaattgtggtgaagttttgtagctgcccagttgttgaagtaaaaatttatgaaacaaaagctgagaaatggaaagttatagctgccccaattggtaaaacatgaatttttttagttaatagcttcttactagcagataataataataatattgtggaagtggcgtgccatattatacttttgtcaataatttcttgctggaggaaatcatgccaattgcttctaagaaatagtaatacagccaaaaaaaggggggaatcttctcgttatgtacgagtaattataattatgatcatgatgtaaagtaatgtctgctgattcctgatctggatgacttaatggcatctttctcacatcaaccgatctttgaagggtggaaagtaccgtgaagcattgggaaa

SEQ ID NO: 69476 - DNA, 506 bp, Prunus persica
  Intron number 1 from transcript ppa025595m (locus ppa02559 5m.g) derived from phytozome v7.0 (chr-ID scaffold_2; pos 23265049 to 23265554)
cgtcgattgctgggtaaatttcttggcttccatgctgttcttgggtttatgttggtagagacggcaatgatattgttgccatctgaaatgacttgcacttatttacttgatgtacttagttcctccctgtattgtgacatgtaatgaagccccgctggatagtttgctctctctcgctttctgccttcaaagagaaaagagaaaattatagagatgtgacatggaatttgacaacttaaggttgcacttagatactgctagctaaaacaacttgaggaagagttatttctaaaatttaaaatctaaaactaggatagaaatactacgggattggaaagattatttttacagcattcaaaggttgggacgctttttgtccagttttcacatatagaaaggaaaagatagtaaaacttactgtccaacacaagtttctatgaaatatcttatttatttgattatcatattgagcattgcaggattgtggggggccatcacgctgtggc

SEQ ID NO: 69477 - DNA, 966 bp, Prunus persica
  Intron number 1 from transcript ppa012055m (locus ppa01205 5m.g) derived from phytozome v7.0 (chr-ID scaffold_1; pos 34129490 to 34130455)
gtttggggttggagtggtggtggtgagggtggctaggtttgggaggtggttgaggtgtgtgcgcgaaattagggaaggtgaaattaaaaaaaaaaaaattccattttcagattgaatttaaaaatttataatcaattacagtttttattttaattaattttaaatattttatattttatattttgaagggaatagaccacattgactaacatatacaaacacaaggaccaaattggccaaattgataacacagggactaaggcctatgagataaaatacatggaccattttaacatttaagccattcttttaacaacacccattggtaaatacccaaactgtcctttgcttgccactagagctgttgggaaagaattggaccaatcaatccacaatctccatttctttgatcgagtcattttatagtgaggcctaatatatgactattaagtgaggccatatcttttaatcgtttgattaaattagttagtcgttaaattaaattaattaatctaattcaacaattaaaagaaataagacctcactaaagaccatgtataagaccctcactatagaatttcgccactatagaatccttttttttttcggacgaattctatagaatccttgttttctgattgacttgcgtatttcgaacaaaaaaaaagaagaaagacttgcgtttacctgtccagcccaaagtctttcttcgtttcatttttaattgtttgtggtcggcaagccccaaaaaagtatttcggtttttcctttcctccatttttcagtttctagtctataatgcgagagaaagtatacaaatctaacggtcaattctccaccgaaagactacagaaatcagatcttaattgtctattataccctcaattctgacgaggatctaacctagtgggccacagtggccctgctcaagtcgtcttcaactctctctcttcctccctccctccg

SEQ ID NO: 69478 - DNA, 775 bp, Prunus persica
  Intron number 2 from transcript ppa009074m (locus ppa00907 4m.g) derived from phytozome v7.0 (chr-ID scaffold_2; pos 21582483 to 21583257 reverse strand)
gaaggtaagcaaaatgatttttacgagtcataggagttcctcgtgttttgggatggttatgttacatagaaaaaaagggttagacaattcttgattgttctgtttggttgaatgcttcatgaattttcacagttcaatggagtatacacgagtctgtccttttgtcattgttttttctgtttgcaattccatactgcatcaccttcatgtacaaatccttaagactcattgggacttccagttccattaaataagcaagcatcattgagaatatgtgtttgtgtatttacccattcgtgtctaactctatgcaattaacagtgaataaatcctatatttgtattcctatctgcttttgggtattttgccgtcttttactttctgttctggattagtggtcattggaggttgtccaaatttaagaatatggtttttaggagacaatgaaacctttgccaagccagtgcttgtgctacttaagtgtgtatttcttctatcttcgtgagaacatttcacccctccacgtgtccctttggtttaacttcaatgatcttgttgaaggtttcttggcttttgccaaacctggaggtcttggtgagaggtccaattggtggatttggcgagtctttctataatattattgcgttttttaatggaaatggcaacaatctcaaagtggtgtttagttgatctgtgaggggcgaagtatcatccctttgatgcttgtgtcatgatggccttactgtttctggaacccgtttacgcagagtacgtg

SEQ ID NO: 69479 - DNA, 846 bp, Prunus persica
  Intron number 1 from transcript ppa009074m (locus ppa00907 4m.g) derived from phytozome v7.0 (chr-ID scaffold_2; pos 21583361 to 21584206 reverse strand)
ctagggttggatactgctagcctcgtcttcttcaggtgcgcctctttccctctctctttttcttccctgcaacaatttctgagatttagggatttatatttccgattagatttacttccaacctattcaggctttttatttttccgaatttctgtgatcaatgagctaccaaatagatgaattccaggacacagaaaaaggattaagattcggcaatttttattgtatgtgtatgcatagtttgtgatttttttttaattttggtcgaaatatttttggttgaattggccatgaatatattgaagtatgcttgaattatgcatatgaagtattcaggttatatctttggcttctggattgaaacttttccccctcggtctgtttatactttttatttttgatgacctttcggctagcaaaataggaaaagagttttgtgggtctgtatctcagggagcataaatggcactattcatttaatttgtatgtctgcattctcttgtatagaaatctgtgaaattagtggtttgtttttttacaatttggtgtttttctcattttatttaaccaaaataaaaggtgtctttttttgtaattttgtttccaccaagaataatatggaactttgctttgctatgaatccaaacaacttattcgagtgttatcttttggattctgtaataagtttggttatttacctccttatatggtttgagatgcaatcctttttttttctttccatctttatttgcaagatgaatatgtaattccatatgtatgcttttaaaggtatgaaatagtgggtatggttgcgctcaaagatgactcatatttgttgcaggtaaa

SEQ ID NO: 69480 - DNA, 894 bp, Prunus persica
  Intron number 1 from transcript ppa002740m (locus ppa00274 0m.g) derived from phytozome v7.0 (chr-ID scaffold_4; pos 1723203 to 1724096)
ggccagccagataggaaacggcctgctctagccaggtccttttttgtttggttaaaaaaacttggatttccatttaatttgaagtaatttgttaattgtttgggtgtgttctgtaacgtaaaaatggatatgaaatctgttagaattttgtgttttgtgtgagaaatattggaacttgaagtgttgaactgataaatgtgctatagaaactcaaaactcatttatatgttgtgaataatatgtaaaaagtacaattaagaagcttttgctcacagtgcaattatgattaagaagctttttccccccgcaaaggtcttggtctcagttatatgtaattaattcatgcccactctataatttatgtgtgttcatgcccaacttcccatatatcgcaagtaggggcaactataatgttctggaattaatttttttatcataagggatggtggctgacatacaagtccgcattttctctacttgtggaggcgaaaagagtgttggggccctgtagtgtggcacgcattttctctaattgtgacatacaagtcgtctaatgactctatcagattcttttcagatgtctgatgcttctcttattcttaaacacaacaatttcattgtgttatctaattctcttagggattatgttgggcacagtatctggaaattaatcaattttggcttatattgttgtggattcatgttattcatttgttagagatggacttaaaaaactacttttagaaaataaaaataaaataaaagaaagaaagaatataagcctggaatgaattgaatgtcttgagcatgatgaatgcactcaaaatgttgtttatcgatactattcaacttaatgcagtgtaattgttgaagctctcaaggtggatagtctgc

SEQ ID NO: 69481 - DNA, 354 bp, Prunus persica
  Intron number 1 from transcript ppa019113m (locus ppa01911 3m.g) derived from phytozome v7.0 (chr-ID scaffold_2; pos 24535681 to 24536034)
ctggttccgattcgccggaagttatccgccttcgcgtaagcgatttagagaaacatttgtttgttattttgcttcatcatattcccaaacaatgaatttggataatcttcaatcaagaccgtttcaattgacgatcgttttctgcaatttgatttcaatatctacgtgtttggttaattatgcatcttaattactattaattttgtattgttttctttgtaacaattttggatgcaagtagattaatttcttacttgtattgatttgagtgttttacaaaagtctaccactaactctctgtttttctttcttaattttttgttaatttttttagctttcattataaaattgttg

SEQ ID NO: 69482 - DNA, 869 bp, Prunus persica
  Intron number 1 from transcript ppa018246m (locus ppa01824 6m.g) derived from phytozome v7.0 (chr-ID scaffold_8; pos 17347025 to 17347893)
aagaaccaattgactcctaaagcaaggtaattggaagataagcatcgtgcacgtctcttaggaaaaaataatattttaacttaaatcaaaatagagtccaactagaaaagtaatcttaagagataaagtctaatcctattaaaaataatattaacataaaaatacttgattgaaaaaataaaaaactcaaactaggaatcctacaatgaatgcatgattatgtcatgatttacctgaaatcaagtttctcatatcggtcaagtcatgcctcggatgtatggggttgaatgagttgtgccaaaacgttcagtaacaattcttcacacactaattttcaacctatgctagagtctaggaaatgacaacactatattcatactaacaagctcattggcttattcttttccacttttaaaacataattgtgatgtttattgaggcccatgattcattcagtaatctcttagctggtttgtctatcaaggttaccattggagaagggtctatgcaaaatggacttattttcaagcaaccttctgtgaatcaagcagttcaagctatcttcaaaccatgaaagtgccagttggtacatcgggaaagaatttgcaacaaataaatgaaatatacccttgaaagcattggttcactaaattgattgaataaacatctattacagattatccataattttttttttttcttaaaaaacaaaattgggccattgattgtatgttagaaaagaaaattagatgtgaccaacattgcagatgcagctttatgtatcatttgtgtatataaaactgtgctaagaatcacagttagaaatcaaatcaggtctcgagtgattgttctacacacatttgccaaat

SEQ ID NO: 69483 - DNA, 657 bp, Prunus persica
  Intron number 2 from transcript ppa001170m (locus ppa00117 0m.g) derived from phytozome v7.0 (chr-ID scaffold_5; pos 12738287 to 12738943)
acaacagccagacagttataaggttaagcaaaaaggtacaacaatcatccttttgtttttttttctccatgcatttatatccatgagaagtattttttagattgttttaattgcttgtagaaaatgatgtttaagaggggattgccatttagagttgcattagcgttgtttttattcgtctgaaggtgttgcgtggttcgaagcaatctttattgtattttgttgatgacctatccttctcattcatgaatgtgtcaatctatcttgtatttttttgtaataaataaaatactgttgatgtggtgcttctctttctgagaggattacctggaaagttttaagatgtagtactataaacctgttgtgttatttctttttgagctttaagttcttttcatctaagcttttctttctaacatgtttcccctctgattgacttagaagcattgagtttaagagttcagatgtctttgttttgatttttctaatgcaagcatgtaggttaatctttggtgtggtttttctttttccgttcttcgacatatgtaatcttgtggctggcatagatgtgatgactccatatgtagataatgaaggttctaacaaacttactctgtttcaggcttctgtacaagagctttacgagaaggtgtgcac

SEQ ID NO: 69484 - DNA, 983 bp, Prunus persica
  Intron number 1 from transcript ppa005513m (locus ppa00551 3m.g) derived from phytozome v7.0 (chr-ID scaffold_7; pos 21144253 to 21145235 reverse strand)
aatcgcaatctgctcctccgtgtacgcagcagctggtgattctttagaggatgaagatccatcagttgacggaactctttggcgaagcgagggttgatcggacggcttagctgaagccgacccagatggcccattggcagacccaccagcatctgaaccggactgaggattggaattgccctcaatcgacgataagagatcgtcgatgggtagcgtcggatcgagacgtcgagctttagttaggaattttagggcacgagttcgatccccagcttccaaagcttctttcccaattttgaagcatttcaaagcatcgtctttgtttccgtccatctcaaaaactttcacagaagacaaagacaaccaatccccacaaaataattccaagaaaactaagccgataaggaaccactatcgagtttcaagaacacgcaacccataaaaaaaatttcgatgcttgaattctgtttgctgaaaatcgccagaataaagaaaacgactaaagcaatgaaattgaaacaattctgggaaatttgacttacgaacgaaatggatctgaaggagacgtattctagggatcaatcaatttctgggaattggaaattttgatcgaattagggtttcattgtacgcgggatttggggcacactccaacccggtggggattttgagaaagagtgatttagcggaagtgaaattcttgtttttaaggacgtgtttgcgtggcaacggttgaaagtcgttacctgtttttttttcttcgttatgttaagcccaaaatacagtaagggcaaggcccaatatacgattgccaaacaaagataaaagccctattatcccaattctaggtttttacaaatataggtcacacacacacagagaacgaaaacgtcggcgtttggtcgttatacataaaccctgggagttgcttgttctcttcttctttagctttcaagtcccgagctgtacaaccaaagaggtcg

SEQ ID NO: 69485 - DNA, 471 bp, Prunus persica
  Intron number 1 from transcript ppa003845m (locus ppa00384 5m.g) derived from phytozome v7.0 (chr-ID scaffold_7; pos 17785296 to 17785766 reverse strand)
tcgcaggtttcttccttgaatctctctgatattgtttggttgctgagaagaacgtaaaatgctatatgatttaggctgatatgctatttttaagttgatttgactataatcaagcaatgcattatacttctctgcatttgaatggtgctattttatagtgagcgtgttcgtttgtgagaaaatttgggtaattgcataagtgacattttttcttattcattgagaaagaaggaaagtaagtggaaagtatatcttgaattactggttctgattgtttgaggcattgaaaaattatatttttaaagcaaatttgattaaccttaatggagggtattgtatttggtttttgtactatagtttatgttccctatatcagttaattaggttatttctatgtgcatatgtacattcatattccttgatgtgtgtggtataggggactggaaccacacctacctcatcaccgaaaca

SEQ ID NO: 69486 - DNA, 976 bp, Prunus persica
  Intron number 3 from transcript ppa024106m (locus ppa02410 6m.g) derived from phytozome v7.0 (chr-ID scaffold_3; pos 10155134 to 10156109 reverse strand)
caaccacgtgttcaaagaactttgaatcaggtatgcacgttaaattatcgcaaattttttaaactacttaaattaagggttgctgttaaattatggaagttagtgagttgctagatgagaactcagaatccggcctctgtctcatgtctgtctctcctttgtgttgtgtgaaatgtgtgcccttcttcttagaagcaacttacagcagagcatctgtcccaaacagacaaccctcctagagctaggaaagttacgtatataaatatgttcaaaagacccacaattgaaaacttggcacaatcatggttgacacaaccatatatatagagagagagagacagttttgctctaatgcgtacgtccgtattttgttaaactacggttgtatatatatatattgacaaatttgtggacaaccgtagtttaacaaaatgtggacgtcggcattagagaagaactctatatatatatatatatatatatatatataaatcagcacatctatattaattagcaaattccagctgaattgtaagaaagttcgcttggtgaaaatgaaacagctgaatagtagattcattatcttcctcaaccctcaccatcatcatcacgatgaatgtcaacaataacatattaaaattacacaagacaaaaaaaaatttagagttggtttaattcaagaagaagatgaacctggccgagatctttggatccactagagtctcccctttcagcttcaaccctaaagatttctttgtctttgtacctctcaaccttgaaagcccttggtatccaaaagcaaggtggttctatctaccacacaaaagaaactcattataaaatttaaatagaaacgtaccaacaaacaaaacccatttatccaaaaaaaattccagaatccaaaagacaaaaggaatagaaaaggcaaacttaactttgatattggaagaatcccaaatttttagggtttgaactg

SEQ ID NO: 69487 - DNA, 681 bp, Prunus persica
  Intron number 1 from transcript ppa007519m (locus ppa00751 9m.g) derived from phytozome v7.0 (chr-ID scaffold_4; pos 10233767 to 10234447)
ctcgtgccgtctccatcaatcccctcgataccagagtgagtcaaatgtcatttctttcgttaattgattcttctgtttaatttctaaggtctgtttggttgctgaggaaacaagggaaattaagtttttgattttcagctcctcttctccattttggtcttttccaattccaacaataacttgagccacaaattttcatatttgtgccaatcaacaattttttttaaaacttctttaattattcagctgcacctgtacagtagttatgattctgagtatgtttaacatttgagtgtttgagtgatgacattaggttggttagtctaaaaggttaacacatgttcgttgaagatgtatttatagttagtttctgttgcagtgaccatatagaaaaatcattttctaatccaaatatcattggctgtcaatttttttttttttttgaagcaagattttaacatgaatgcctgctattattattatttttcatgcatttgctctttcctcctgtgtcaaatagcccatagataacaagaatgccttgattcaaactctcataagattatttcattttatgtttgtcgtacggctgaggttgcagttcactaatactgtaatactttgcaataatgttatcattgtattcagtgttctgtgttttaattttaattttttttccag

SEQ ID NO: 69488 - DNA, 619 bp, Prunus persica
  Intron number 2 from transcript ppa004773m (locus ppa00477 3m.g) derived from phytozome v7.0 (chr-ID scaffold_4; pos 2185559 to 2186177)
cggtttctgctgtgccctactttgcctttgtgaaggtatgcttattgggtagtctgtacatgtctcttttttcatgtgatgctggctgattttgagtaatcatagttaggttggatgatgtgaggatatattgttttcaccttttaaatgcagtaacaaagttctgcaattaaataatcaggttctgtggatgtgaggtatttagtttgcatcacactttcagtatgttgctgctattggctagttattttctgtggctggtggtttcaaattgcattttggggtttgctgttgttgctaagtatatgataatagtggcagtatgattgtttataatggtatttaagtattaataggctcagattatgatgccaaactcaaaatgtgagagtgggtggtagatgttcaataggatcatctgtttgtttgagcgactggagaaggactaggatctgaggacaatggcctggactatgatgtgaacatcagatattaaaacttatgttataaacctgtatcattcgaatgactatccatggactatggtgcgaacatcctattgttctgtatctttttcttctcttcatccttttctgtttgtgctttttcttttgtcagg

SEQ ID NO: 69489 - DNA, 708 bp, Prunus persica
  Intron number 1 from transcript ppa004992m (locus ppa00499 2m.g) derived from phytozome v7.0 (chr-ID scaffold_2; pos 1783404 to 1784111 reverse strand)
ggaccgccaaggagttgcttgagattgctgagaaggtgagtcaatttgaaagctgaatttgaacatgttattattctgtgcatgattttcgtggattctcttgtttttataagttcccccagaaagttttgaaagcgcacacacctattttaactctattgagttaaagccaaatgttgagaagtatacaagatcgttgaccagggttgacctattgacctaacgagggttttgaactgctcttttttggggtgtcacgtggtgtttacacgtgcacagtactctgaagtaggatctgtgaggtatgaagttacaccatgtgtaagctgctggtttggattggacaaagctggtggcctaccccatttttattgtgggccagaaaatatagcctagttaaggatgaggcaaatctttatgtatttgcctaggaaaagagaagtttaatcctgggtttgttttttgtacttcaactgaaatagttgcattggtaatgacataatcatatgtatatgtcgattaaaaaaaatcatatgtatgtgattgtagccaaatttggaaattcaagtttagtagtgcagctacctttgacaaaatatttagaaatagaagagtttaattgggcagaggaactgtattcaaagaagaattgaagatcttctacatttgactgattctattcatttttatgcaggttggacctgaaat

SEQ ID NO: 69490 - DNA, 597 bp, Prunus persica
  Intron number 2 from transcript ppa012663m (locus ppa01266 3m.g) derived from phytozome v7.0 (chr-ID scaffold_8; pos 20220589 to 20221185 reverse strand)
ctcagaatcgtgttattgtggaaggaaaaaatctggtatcaatctagccttattattggtacactactcctttgatctgtttttgtcttacaatttcttgagctgtttattatatcaatttttttttctgagaaaacttgttaagaatcctttggccactcaaatcagattgatattgttgatattctataatatattataaatcatgtttttgggcttgttgatagtctgtaaacagtttgattatctataaaaacatctctaatggttgaagctcttctaatgttcatattatttatgaaattctctatcttgtgcaatgtatatgtaaggagttccgtcttgttggaaaaatccatgggtttgaacttcaaatgcaagacctttacactaagggctgaagggataccatccaagcaagaaccatgtaatatatgatgttctgtaaactacatgaaaaactttgatctatttgatccttataatttcaatgttcaaggtttttggctattcctacgaattatatggattttgtttgccgctgaacaagtactttgtctttgcaggtaaagaaacatatcaagcaaggccaaggcc

SEQ ID NO: 69491 - DNA, 976 bp, Prunus persica
  Intron number 1 from transcript ppa026720m (locus ppa02672 0m.g) derived from phytozome v7.0 (chr-ID scaffold_7; pos 22204226 to 22205201 reverse strand)
taagaagaggtgtgcttgggtgacgcctaatactggttcgttcttatttctttgatcctggtgaaaatatatgcttctggagcgattggttatttctttctagttagtaatgtgcctttcgtataattattctcatgatatattctttgccggtaataagtaccataaagatttgtagaatatattcccctcccggtattgttatatgattatcttgtgacacgtttcttgtgacacgtttcagactagcagtagactggcatgatttaattcacaattcaccagagtataggcaaattaatttttacaccgcatgcccctcgtaatctataatatacttgacaatgaagacataagttaatgacagttcaaaaccaagatgagtagcattgcagttcatatttccccaacaaaatcaaagaattctgtacctttgagtgaagagcttcaagttaagggagaataaggttcttattagggtttaacaggcaatttcaaatacgctgctgatggaactagtcatgtttaaggcttaattggattagaacttactctcctcaaagctgttgtataagttaacaaatgagtataaatgcactgttcttcagatgtccaagcaggaaattctacactcggcccttcgccattatattgattttgtctcattgtcaatttgttatgaataatttattgcacacttgtttgggtcatggatgatagaaaacggatatataactccagaaggcaacaatttgaaagattttcatttccatttagggagagggtggaggggtttctttcttttgatgggtgctagccttataaccatgcaaagtcttgtggaagtagaactacatgtatcttagccagagaaacatcttggatagttgaaccaaatataattttctacatgacttgatattcttctttcatagatttatattctgatcgagattgatatgttgtaagcagatcc

SEQ ID NO: 69492 - DNA, 667 bp, Prunus persica
  Intron number 1 from transcript ppa003290m (locus ppa00329 0m.g) derived from phytozome v7.0 (chr-ID scaffold_4; pos 5885635 to 5886301)
cctgatctggtttcgatattccaggttggtgttctgttattttgaatttctgatcaagatttttatcacattaagccatcagtcaactctagagttcatgatttctgtggagctgagcatgagtgaaggtccctttctttttattgatttctgttgttactaatggttgaaccattgtagtggatgaggtgattgaagtcaccccgcaaatttctaatggtttaaactgtttgactttattttttgagttcttggctacaaaagtgtagagcagttttgaaaagaattaatgttcttttttacctcaattttctggggcatgctagttaaactaaagtaattgatgccaccccacaaattgttatcatctcatgtacctggttccattaatccttcaacatctacatatcacttaataaaccaatttttcccttcaagcttacattaatgtagtggtaggggtataatgttgttttggtggctttttatgaaacatggttttgtaaatttagtcctattttttcttgcggtcaatttctacccaacttgtttatagaatgttaagatagattgctcatttttttgataagaaaaatggaattgttctgatttggttctctatgtattggcagcgacgccttcttaattttgttgggaaagctctggc

SEQ ID NO: 69493 - DNA, 814 bp, Prunus persica
  Intron number 1 from transcript ppb020639m (locus ppb02063 9m.g) derived from phytozome v7.0 (chr-ID scaffold_4; pos 2614187 to 2615000)
aggacaaaaaaacttgggttggaaaaattcttcaggtagagttccatatctattttttttcttcaagttcctgatcaaacaaatttgttgatctcaattttcttaccgtgttggtggctacagggtcaagatagtgctacagctgtcactgtgatttccaccaatacaactgcaactatttacttggcaacaatctctttaactctttgttctctcattggagcttggatggcaaaatccaccaacaatttcttcccaagagaaataatatatggcaacacaagcccatccattatttctatcaagtacatttgcctcttgacctgttttctcctggctttttcatgctttgttcaatcagccaggcaccttgtccattcaaactacctgctaagcactccaggagctacttctaaagctgatgtgagaaaagctaagagagcggttgaaaagggaagtgaattttggtcactggggcttagagcactatattttgctcttaattttctgctatggttttttggacctgtgcccatgtttgtttcgtctgtcacaacggttgtgatcttatcttgccacgacttcaagaggtcagataataatcaaaagtggcctgcctcagctgtggctgtaaatgaaagtgcattattaatttcttgagcttcaagtttgtagaattggatcaaatttcattgatcataaatgcattaacttccaggttttttatgtcctctgcaacatagcctttgtttgcttttctttttgggtttaatctcaaggttacaggaagtcctggaattgaaaaacttgaggt

SEQ ID NO: 69494 - DNA, 560 bp, Prunus persica
  Intron number 1 from transcript ppa008246m (locus ppa00824 6m.g) derived from phytozome v7.0 (chr-ID scaffold_1; pos 27456667 to 27457226)
tctcacgaaaccagttcgttgcatcgtcaaactcggtctggttctttaccccccttatttttatttaatcttattttgttccctttggtagaatttaatcgccacaacactagaacttaatcagtttgtgaagcctttatataccctcatttatagtttttttttcttcttctgacccagaaaactaattgcccaaataaagaaggtctatacgagtcaatttggtatacttgattaatgggcagctgataaattttaatcccatcttgtgtttatttcctgcttcaataatggaacttttaatggaatcaatataaattgaggaaacacatttcgttttgaatttgggcgaatcttatgttatgtcacttgtcactaaagaagctaatatggatgaatggttgttttgttcatcatagtaatatatgtgacatatattttactttaagaatatgaaagttacacaagaggtgttgcaaaggatttgttcatatagtttctataggttgttacaataagatttttatatagtgtaggaggtgcagcaattacttgcaaga

SEQ ID NO: 69495 - DNA, 1036 bp, Prunus persica
  Intron number 1 from transcript ppa006407m (locus ppa00640 7m.g) derived from phytozome v7.0 (chr-ID scaffold_4; pos 1791725 to 1792760 reverse strand)
ccagacacagaaaggtctctctccttctcttcattttacttatacaatctcaaagttctattcttttctctgttacatggttgaaagatttggtttttttcttttcttttcttgtttcgtggggatgaaatttttggctttgttgttggttgagtttgaagctgagcatgattaagtgttttgggctgatgggttggcctcaaactcaaacatatgtcagttattaactagctcgcaaacttatggtttcatgacaatctttttggggtttgcttgtacctggaacactgtaattggattccatgtgctttagtgattcatgaccgttatcaatgtttctttgagctaactgggttttttttcaagatgctaattgggtcttcagcaagacggttcgttacatcttgttctactttagcagtgttcgaaaattccgcctaggcggccgcctagagcctgggcccgcctaggaggcctgggcgggtcttttttttcaatttttttatttatttatattttttgattctggtgcaccttataaacagaattggttatctgacactgcctatgttgttcgtcttatgttgcattcagttatttcactgaaataattgaaaattcagccgtaatcagttcatgatcatatagtatctacaagtataattgaactgttgatggtgcaagagtggtttagtgaaggtccacaatgagttgtcacttggtcgggagatagtgataacaatagtttatttctgcatgtagcacacaaacacagctgtccattacattagatgtttcttttttttttaaattgtttttaatcaaagtatttaagtttctaagcatgtttagaacgctttttttgcttaaagctgattagctgagccagactgggtgttaattttctccttgtaaatatttgtgttttctaactagcatttgaaccagtttcacaattacctctgattttttttggtctcatctggtttccttgtatgtagatattggagggtcttcttaaacaaccagggaacag

SEQ ID NO: 69496 - DNA, 553 bp, Prunus persica
  Intron number 1 from transcript ppa009778m (locus ppa00977 8m.g) derived from phytozome v7.0 (chr-ID scaffold_7; pos 18888272 to 18888824 reverse strand)
caacaatccaacggtaagcacttattttagctagtcttaattcatgggagcttatgcatctgtgtttgtttgtttggttgctgagaaaagcagaggaagaaaatgaatttcattttttaatcttatctcatgcgtgcatatatatatgtttattcatttatttttcatatgatggaagttgaattttgatttcgatctttatatcgatgtttttatttcccttttttccttctttgttcatttaattttgtaaagttctttcttatttttgttgttgaattggttgttgtttttggagatccacgaaaatctcgattgaaattgattgattccgtttaaatggttcaaggatagaagaacgtgtcctttgtttcctccccagaataagcgtttttatcttcacacttgttatgtatctcggattgtgtcggagacttaaatttgtatttctagtagctgcccaccaaaggattttagaattttttttatttagttcctaaaatagtatgtgattcattgagctgatgctgctacagggacagggacacctgag

SEQ ID NO: 69497 - DNA, 453 bp, Prunus persica
  Intron number 3 from transcript ppa002435m (locus ppa00243 5m.g) derived from phytozome v7.0 (chr-ID scaffold_8; pos 19994155 to 19994607 reverse strand)
gcccaagtatgttgttttgttttttgttgaaccatttgcattatcaaattttacttatcttcctgaaaggacaaaccactcttgtgcctggcacaaatgtgttatggactttttatttcctgactgtccatttccttcctttaaatggctggtaattgtgttttatgtacagactttgctatgccaatacttaatcctctatcacaaagcttgtattaaaaatgcctaaaaaccagttttatcatttgctgctttgagtgatatagttttcaattatctagatgtggaagatgatgatgttataagtggagatggcgagtttttctattctctcctctatgattccagcaagttatttatttaccttgtaagtactaacatatacatgattgttcatctctctctctctctctctctctctctctctctctacacagggtggtgatttttcaa

SEQ ID NO: 69498 - DNA, 448 bp, Prunus persica
  Intron number 2 from transcript ppa002435m (locus ppa00243 5m.g) derived from phytozome v7.0 (chr-ID scaffold_8; pos 19994656 to 19995103 reverse strand)
taagacagcagagaattttagggccctctgtacaggtatttttttaaaatttcgattgcgctcatcaataatgaattaaatgttatgtatgttggggaaagtgttccgttttgatttctaaaaagtttgaggaggctgatttggtttttttatttatggatatattcggtagaattacaaagactgtaggatttgtcagcataagagctacattggggtggctgaagtaaattagttttgtaaacctctgtactggttcttttattggatttataattctagtaagcaaatccatgattataatgtttggttcctaactttttaatcttcttgttatgagttatctgttacctacatttttcatcgattaaatgatctatagtgtgacatttttgtgttatcttctgttataggtgataagggcattggaaagtctacaggcaaacct

SEQ ID NO: 69499 - DNA, 497 bp, Prunus persica
  Intron number 1 from transcript ppa011025m (locus ppa01103 1m.g) derived from phytozome v7.0 (chr-ID scaffold_3; pos 21887528 to 21888024)
ttgctagacgcctttccaacctggcacctgttcctgtaatgaaaatctccttttctccctttctctctcccttctcctctccctcttcccccccccccccccccccaaaatcactattttcattcataggttaatttaatattaccaaaatgtctccaatggtacgcaactagaacttaatctcaattagtgagtccaaaaatattatttctctaatgcatctagcatattgacgtatggagtgtaatacacctttatgaagttattgctagcaaagttttcacggtatagaatcattcttctttagaaattagaattgcatgctacatcctttgattgttgtctttaagaacttcattaagctggaataactttttctttttcttttgaatttttccatttaataaggaaaaggtgctcgtcttaatatgtgatggtattattatgtttttaaaattacagcacattcctcggataaattcctacatccccaacat

SEQ ID NO: 69500 - DNA, 731 bp, Prunus persica
  Intron number 2 from transcript ppa011025m (locus ppa01103 1m.g) derived from phytozome v7.0 (chr-ID scaffold_3; pos 21888033 to 21888763)
ctagtttggaccatcaacggcttctccagaggtatgttttatgattccgaaaaaaattatgtactggttatttcgtggttgagaactttcctaaaggtattgaaatagcttctttatcatttccgttttggttgatggtgagaaataatttaagtaaaagaagtcaaatttcaaaggtaacaacgtaaaagcacacacttggaaatggccggaggtattggaaaacctcactgtaaataagcatatttgtaactcatggaaaaccacatgagtactgcaaatgatagtcgtaaatattatgtattgaggctaaaacttaacctgtttgttgctaatgtagggggtagtttacccgtgggtggatggtcgtacaaaaatcaaacttgtattataatagttagaactattctcaacatggaagttctgagatgaatttatttttgcttttctttttacttttttttgttttttgttaacaggtgtttgagtgtctcatttatgcaattatgatattctgatatgaaccacatttggagtgaacttcagcccagacttgttaccccacatgaaaaacacatgtaccttgtgggcttaggcattgagtgtgatatacaactctcagtccagcatcttagtggactagaatatctgttttgcactctatatacgtctgtttaacttcttcttgggtgatagtttagtgaatctcttattacttcctcacaggttac

SEQ ID NO: 69501 - DNA, 575 bp, Prunus persica
  Intron number 2 from transcript ppa017074m (locus ppa01707 4m.g) derived from phytozome v7.0 (chr-ID scaffold_5; pos 12109353 to 12109927)
tgttccaatccatcttagcatatattctcctagtaagctaatggatcttttttcttttacttgtttgcttaacttaaactaaagaacactacgattttggaatgggaatgtgaacttggtatccgacctatcttgcagcaacatggaacaatgtgggtagactcaaattaagtttcatggactgtttagttaatagtttgaatgtgacaagacaatcttgggttaaatttcctttgtaatactggtctttgcccccctgaaaacatagtccacaaaagttttgcaattagtttcacatttcttttcaaaacaatctccaacagatagattggaaggtcatttctacttggactgcatttaaaatattaaagcaattgggccccaactaatagagttttaatctcggggaacggcgtccaaagttttctttcttatttatctgcatgataacattttcatataattttaggtttttgtatccacattttgatcatctcatctagtgatttaaccaatttataattatttgattcttggcagttgtcaacttgacacttattgatcttcccgggctt

SEQ ID NO: 69502 - DNA, 766 bp, Prunus persica
  Intron number 1 from transcript ppa004230m (locus ppa00423 0m.g) derived from phytozome v7.0 (chr-ID scaffold_4; pos 13141103 to 13141868)
gcagcgaatttggtggcggaactcttcatatcaaggtctagacgaactgaaatttcttgttctgttggcttgttttctttcattttcgaactgggtttgtgcaaattttgagttttgagtatgtgggttaatgggtattaaattatgttaaacttgtttcagtgacctcatatttcttctgctcgttttttagctgggtttgtgtaacttttttaagttttggtcgtcaggatactcagattaattttctgttcaaaagttgtcgataaatatgaagattttattggctagtttgattatgggctatacgagggttggttttcagtttatttctaggtgatttagcagaaattggaggtttgtggtattggagttgtggaatttacttgctgtttgtttcttcttagaatatcagaggactgctggatattaaggtgttaattacatttccagttagagcctctctggggtttcttttgattgttctgtggattttatgatccaaaacatatcattttggcttcattttctagaatataggtttcattaatgttgtacttatgaatttgaacctcttgcggttggttgatccctgtaggaaagaaaatacctaattaaggctatttgtgaccttacattttcattagataccgagttcttatgcttagaaaatctggggcattcatcagagttttcatacttttattacattagtttaaaattgaatccatgtttgtatccaggttgataaggctcatagttggac

SEQ ID NO: 69503 - DNA, 904 bp, Prunus persica
  Intron number 1 from transcript ppa006589m (locus ppa00658 9m.g) derived from phytozome v7.0 (chr-ID scaffold_4; pos 13439504 to 13440407)
ctcttctctgataggtaatttctactcacataaagcttccatttttctttggattcgatccatttgtttaagtatttagcatgtaactctaatttggtgaagtttgtagcttccttttccccttaattttagtaaaagatttggaattttggtgggtttgtgtatattggcatcaattgtgtcagccaatagttcttaaagaatattggtgagtgatgatggattttgaacggtcttctgggtttggtaattaaagcatctttggtgtatttgttaattgttttctgggaatcttaaagtggagattaatgatgatggccgtggtttttaaatgcagttttactaatcagacaatgaagcttatgtgtcctggaattctcttttttctgtattacaattatgagattgtgatagatctgaatttcatgtaatagatccaacttttgaaagtttatatgaatattattcatcgtactgcttgaattcagacatcatgcttggacatcagttgctgtcctaatcatttagttcaagagaggactctggtgtcccttcttcattaagtggtcctgcaccgtcttctgtgcggcccctccctcccttgacctttcctttccctctctttgcttctcattgacggaaaaccttttgatgggtttctcctgcatgatttccagattaggatatcggtttttgataacatcctctagcatcgcttatctgcttacacgtcacattccggttgctacgtgctatttctctgcgaaatgtgcatgcatacacatcaaaacatgttattacttggaacattatcagaagcgataaagtagtgtgttctgtggtagagtttaattccaggcatgttctatacttacaaaaataataaataaactctgccaacaga

SEQ ID NO: 69504 - DNA, 795 bp, Prunus persica
  Intron number 1 from transcript ppa004919m (locus ppa00491 9m.g) derived from phytozome v7.0 (chr-ID scaffold_2; pos 4958589 to 4959383 reverse strand)
gcttgttgttctttcagctggtaagcccttctgtcattttatataatataatgttgttcttgagcagaatccaattgggttgtcagattcttgttcatggtgttgtgtttcacttccattgttgttcttctgcatgctgtggcatgtacgtatgatgaggttataactcattgatttgtgggagtttcgattacgaaaatacgggtgctcagaaagttcaccacattatttgaaagtagtttcagtgtttcatagaagaaactaatcttagaattgatgttcgtagattaaaaacttaaaaagaaatcaggaatatgttgtgttttaagtgcctgatgcattcagattgctgccaagaatatatctgcggttttacaatgagttactgcagaatttgaaattaaagaaacctggttttttatttttttttatttttttatctgcggttttctaatgaactatagattcaatacttcatacaagactttttggaatttgattgattcagggcaatcaattgttcatatgttaccatataagagggtagcttgaaacttgtatgcggaatcatgatctgttcttatactttaattggtttgtcatttctatgaattatttatatctcctatgtagaatagttgctttgtaaagttggtatactgtagcactgtcagattttttatgattttgtactttgctatgtcttctaatctacttcaaatgttttaaccccgttctgttgttctgtggtaattttcagcgctgccgatatcgtctctctttccatttctttac

SEQ ID NO: 69505 - DNA, 758 bp, Prunus persica
  Intron number 1 from transcript ppa011027m (locus ppa01102 7m.g) derived from phytozome v7.0 (chr-ID scaffold_7; pos 20614848 to 20615605 reverse strand)
ctttggggctctttttcttcaaaattcctatcaaggtaaacttgctcttgattcaatgtagaagcttttagttggtattgattctatctgatgtttgcttggaacagtaaaagttaaagattgaattttgcattgaatccgtaaacttgtcaattttttgaacaaagttgcaaactttttgttggtgaaatggtcttcgtatctgtatgaaattcagtaggctgagttttactcgatgtcttatgagagagttgggggggtttatgtgtaagaagtgttgcatctagctaagattagcttcacacaatgtggttgttttcattttgttgattaatttcttctttgatgttctggagttcgtagtgtgtatgagtttatgtcaatttaagttaatcagtcatttcaaaattgagtgaatttaaagaacgggtacccttcaatttgtgatatatgcattatagattggtgcacagcctgtttacacccaaattatttcgtcttggataagaaaagtaaaatcttctgttctttcataccctgtaatattcctatctgctggtggatttatcactctgtagaaaaattacatgtgaaatgctgcaatgtaataaggatgagtggctgaagaggccattgattatggtgtgatccgctttctatttgacccttctatcatatgcatgttagtttcgatgtgaattctttcattggcaattttttctaattgtgatcacaaatgttcatcaggcaaaagcatc

SEQ ID NO: 69506 - DNA, 648 bp, Prunus persica
  Intron number 1 from transcript ppa009043m (locus ppa00904 3m.g) derived from phytozome v7.0 (chr-ID scaffold_7; pos 20736723 to 20737370 reverse strand)
ctagcaggccttacaaagctcggattgctgttaaggtatgcttgttgatgatcatgaccctctaagcaaatttcaatttttttaaatttgttttgctaattttttattgtttaggagttttgtgtaatctaatgtttgataataatgtatttggattattttaatgttattgaataaagtaatctattgggaatgaatgttatgatttttataatactctgttgtcaacttttaagtcacatcttagattattgaaattgaagctggtacttggcaagaaccactttttgaggtttggaggggtggtcaaagccttctttttgaggccaacgagggttgattgagttggtatggattgtcctattcattattgaggcctagattcgcgtttccttgccaacaattcctcttaggggttcatctgtaaaaacaaaacaaaaagggctaagacccctttgaatgttctggccctggaatgggatagactcccctatctctaaacttttgtttaccattagaaagaaaaaaaaaaaaaaaaaaaagccttgttcttgcttcactttctgttggtatttatatttcaaatgatcttcaatttaagttatttcttcagagcttcgctgtgcataatttttatttcggggaagg

SEQ ID NO: 69507 - DNA, 711 bp, Prunus persica
  Intron number 1 from transcript ppa002343m (locus ppa00234 3m.g) derived from phytozome v7.0 (chr-ID scaffold_3; pos 228732 to 229442 reverse strand)
cgccatacttctgaacagatacagcgacttgaagagtgagaatcaataactgcttttttttatacctcaactcatgttcacatataaaggacaacatcttcacttgacctgaatgttttttttacctttttgtttcagtatctaattagatcatcattttcctgagatgtgtttcttgaagattatgatttttgtgggatgatttttatttgtttatcaactttgtggaattggatttctataggatgatatacatgtccaacttctgccttctttacttcataacacagatttgtttttccaaaaagaaaacaaagagaagaaaatacatgtgtagatgttaaagacgtttctgcatgtactgtcttctgatatgtctgcactctcttctaaatcttctagttagagattttttttttcttctgaccctcgctagtaattgggtgtatatcccagatcagtgcttgttttgaaggttttcttcaaagatagaccttgatctgcattccaagaaattctctctcttttataccatttgcttgaagacatatctatctctcaaatcatttgatatttgaaattaatccttggtatcctcttttcaccaatatgaggctttttcgttttttctatccccttctttgtatcacttcttcaaatgataatggggttctctttggtgaagattattcaaggagtgcgcccaccccg

SEQ ID NO: 69508 - DNA, 362 bp, Prunus persica
  Intron number 1 from transcript ppa007627m (locus ppa00762 7m.g) derived from phytozome v7.0 (chr-ID scaffold_6; pos 19766204 to 19766565 reverse strand)
tctggtgttctctctcccttcagattctccagaaggttattcatgatttattccatcttctagatctccatccattttttgtttcatttattaatcgttttcttttcatcaatccagcattcgtgtgtgtttggttcctaggaaatacgataaacttctagtccgaaaaaagggtagttacattttcattcaatctaacctaaactttaaggaagaaagaaagaaagttattgaattcaaaatatgcattagaacaagttgttcatgtctcagttgtaggaccaactagatttatatatatctcaatgtcttatgatttggttgcagggcaacaggagagaacgacgtgacgttcaaagtat

SEQ ID NO: 69509 - DNA, 800 bp, Prunus persica
  Intron number 1 from transcript ppa005642m (locus ppa00564 2m.g) derived from phytozome v7.0 (chr-ID scaffold_6; pos 890123 to 890922 reverse strand)
cccaggtcagtttatatacttttttttaaatttatatatatatattttccataattatctacttgtttgtgtgtgtttgaatgtaattttcggtgggttttgtctaatggtagatgatgaatatgtttttgagtctgactttactattaatttattgattattgggctttcttggcatagttgtcttttaatatgtaggtgtttgagatcttcctgtgtataatatactaaggattgcagatgtgttactttatttatctctttatttgtcgatgaatctatatattgcattggtattttgttggagtttcggtgcggagttcttttgaatggatctaaactgaagaatgggattttggaaatgtattcaattgaaaactataagcagcataaaacaaatacaatagatttcacttcaatccgattgatggatggtgtgtatttgctttctttgcaaggttgttgtaactgatatgtcttcaattgagacagcatcaaggaacttagcttgatattctatggttttgtgagaggtactataatagtaatgataaaactttgttcatttaaaaataatagtaatgattaaaactctattgattttttttttcctctgagttcatggatttttttttaataacatcagacaatgaggcgcttgaaatgtgaactgaagcttttaaatttgttggcccattcaaaactgtgttttgtgttgtccatgtgcttgcaatttgaagtttgaatgtgtagataattgagtgcctaatggaaagttatggttttgtgtcttcaaagtg

SEQ ID NO: 69510 - DNA, 619 bp, Prunus persica
  Intron number 2 from transcript ppa009742m (locus ppa00974 2m.g) derived from phytozome v7.0 (chr-ID scaffold_1; pos 6004204 to 6004822 reverse strand)
tgctcctactggtaaatctctctctctggctctacttaatgttgatttgtttatgttggtttttggatgtcaagtttgcatctgaattggagatcccttaaactgagatctcttcttactttgtatgtgtactctgtctaatatcaataatgctgctgtcaccaactttgttatggtttctctatatgtattagtaccctgttagaaatggatgaggtctagagtgagcccagatttgagtaaatgagaaactgacacactttggtgaacaatttggtgaatgtagcagtgcttcatctataatagttatttttttctttcgtgcggtgcaagaaagtatagcatgttacatatcttcatacttgtatgtgttatctgcgtacaaattatagttattttctcacttaatgtgcagcatgttatgctgtcagattgtaaatcatgatggttgattagggagaatcatgtatgaataatgaatgtgcaatcttgattcacacttcggaaagatagcatgctagatatattggatatagatgattctcttgcagaataagaaactcaaagaaaagttgtgttttcagggtggacacataatattcttccagagcctgagtct

SEQ ID NO: 69511 - DNA, 412 bp, Prunus persica
  Intron number 3 from transcript ppa013209m (locus ppa01320 9m.g) derived from phytozome v7.0 (chr-ID scaffold_1; pos 42610389 to 42610800 reverse strand)
tcaccgctggtcatatccttcatattttgaaatcaaatatttgtcaccttcacctatctcagaattctatagtttctgatgatttgttatttgttgcatcgtgtaaatgttttaaatggtacaattaaagaactgcatatattcggaatttacgaccaatcctgcatacaactctttcgattttcaaaacaagaaagtatctcagcagatggcatagcaatgatgtcaaatgtatattcttatgtcgtcttcaatttccccaattcattactgttgtcactgttgtgattttttttctcaacttcagagaaggatgagtgaaaagtttttaaattttgttcccctgctgtactgtgttagtgtacaactttcagtttgatgctttccttgactagacacacatacacgactt

SEQ ID NO: 69512 - DNA, 388 bp, Prunus persica
  Intron number 1 from transcript ppa013209m (locus ppa01320 9m.g) derived from phytozome v7.0 (chr-ID scaffold_1; pos 42611022 to 42611409 reverse strand)
ctatttacgaagctgaagtcggatccgctgccaaagtaagtatcgttccttttccttttcctttgtaatttctaatttcaattgcatttttctgatttccatattcatctgcaatgcccattttggttacttgtgtgtttagagactcaaagattcagacttgttacattcaaatgcttttccattagtgtaatttttatgccaaaatgcatcaatttgcaattaattaaaatgggtttcttcatttcttggcaatctctgcatctgcaatgctttgttcaatttctgttatggggtttgttaataacttttaaattcatcaaaatatataatttctattgctatatacttatatggtaataatgggttgacacttgacagagagaag

SEQ ID NO: 69513 - DNA, 377 bp, Prunus persica
  Intron number 1 from transcript ppa014118m (locus ppa01411 8m.g) derived from phytozome v7.0 (chr-ID scaffold_7; pos 3522152 to 3522528)
acagcagcagcagcgacagcgactaatttataatattctggtaatccatcatcttcctgtgcattttgtttcatcaacttttgatgatctgatattttatgcagaaatatttattttataattttaataaattatttttgcataaattaaataaatgtacgagagagggttggctaaagcagatgtgcttctgcacccaaattcgcatcactttctgcgtaatttagattagattaaagtggaatatctttttttataaaaaaaaagagtgagatctatgaatttgattttctttgtcattgcttaatgaatttgttaatctctatctaattatatttgtgttttttaaaatttgccttgtaggtgtttggggcgcc

SEQ ID NO: 69514 - DNA, 822 bp, Prunus persica
  Intron number 1 from transcript ppa004344m (locus ppa00434 4m.g) derived from phytozome v7.0 (chr-ID scaffold_7; pos 20323529 to 20324350 reverse strand)
atctgggtgtttcaggtcagttcttttcacaggtttatgattctaaaataaaatttgaaacattaaattctcttttgatctgggtgtttgtaattcatggatatcagcatatcctgtgaagcaggtttgttagactgatgtttttcttgatcaagttgaaacctgttttatattgaaggaccaatatcatgatcattaaaattgtttttacaaaactaatttgagaggttggaggaatatgacagggggtgaaatttgaaactttgaattttttcaactagtttttcatagaaaaaaaaaaatacaggaaatgatgatagaatgctttgtctgtgttctcaaaagcatattatgacgctttaaggaattctaaatcctaattctgcatttcttctatgtaatttatggggcagattttttattcctgtactgttcattttccaaatggttgcaaagtctttcaatacaataccttaggtgcaacataccatcactgatgtgttgcctcacctaacaaaaatgaacataccttttctgtgatttccttatccacaaaaatggacagaagccttcatagataaaaaagtttctatgattttagataagacattgaaagcatacctgccatctgcaacaagcatattccataatgcttaggatttttgtttttccgtatgaaaaagaatgttacccttcaaggtttaagggaaggaaaatggaattatatactactgtggggaagaggcctcttttggcatataattccaaaatcaagataaagaatgttacttttgatgctaaatttcaggtggggtgacttcc

SEQ ID NO: 69515 - DNA, 771 bp, Prunus persica
  Intron number 2 from transcript ppa008160m (locus ppa00816 0m.g) derived from phytozome v7.0 (chr-ID scaffold_3; pos 10836026 to 10836796)
ccggtaagttgcattgattttattatcattcatatctgttgaatgaagaaagaaggctgaagtgtgatctgtctcaaaacagggataattgtatgtgtaattgcatacgcattgcatatccagggatattgattgactttgcagtagagtatttgatcttgtgatacaatctatgaaacctgagtagagttaaggtcagggcttgcaatatctgagatttaaaccaatttttgcgtcatataatttatgtttcaccaccacaaccagaatactgaatatcagagatctgcctatgctggcacatgtggtttgtgtgcccggtctttgttgcttgcactaatcagtcacaatcacctccttatgaatgggagcggtagcaatatgaaactcatacccctcactattattattttgcacatcatggaatcaaatgaaatcttgcgtctttgttgtactttgtattttctttttgctgtctatggggctgaattcatcttcttggtgtgctaactgctattatcatatctagagaaagttgcccatatccttctgttctgcttcacttataacctgaagtattgaatgctgcaaatttttttcccttttgttaaatagaattgtgaaagaattggatttgttaaatagcatgaacatctctttctgattgcacattccttacaggaattcttacaattatatgatgattcaaacttcttgcttacatgtaattgtacaggtggaggtgaaaggaattgatatcaacaactcaga

SEQ ID NO: 69516 - DNA, 366 bp, Prunus persica
  Intron number 2 from transcript ppa009782m (locus ppa00978 2m.g) derived from phytozome v7.0 (chr-ID scaffold_1; pos 7504217 to 7504582)
gtctctctcaggctgacgacgtcgtattgaaacaggtactttcttcggaatactatctttctgctaattcgtaatcgaatgtgaatcaattatttattgttacttggagctgatcagtgagttcaattttgtacaaattttgaaaaatgaatttttttgggtaaattgttatgttgtggaatctgaaatcttactgtgaattgcttacactaaaacccaattaggttttttctctctttgtatatgcagtgtttcctatgtgatcggtaatctggttttatagctacgattctcattttcctgttaaaataaatttgattgagtttttctggttgcatctgaagcagaaggcgtttgaacaagcaa

SEQ ID NO: 69517 - DNA, 898 bp, Prunus persica
  Intron number 3 from transcript ppa009782m (locus ppa00978 2m.g) derived from phytozome v7.0 (chr-ID scaffold_1; pos 7504734 to 7505631)
ttgttcgaaagtatgtgatgtggttaaaatcggtggaaatatcctgaaaattttcattgtttttcgtaatactttcatattttgtttacacaagttcaagtttttctattttttagaaaattcttgatggttccacttcatgttagacagagttgcacgcactgatgcatgcttcatgtacttttagagtttgtttaattggcctacaatttttctggcctctaatgcccttttgatgtccacatattggacaagctatgacaccaaatatgtaggaaaatttattttgatatacttgacatgatggtgcttttactatttcaaagtggatgctatttgccttcccaaccttattttcttggtagtctttgttggagcatgcaagttgttccggtaaaagtatgtgacttcaagtgattcatagattggtctaatgagcaaggatgtgatcaatttccttcatcatttgacttgacatttttattaatctttgaatttgaaatgatgatagatatgtttcagcgaaagtagctattttttgctctaaataaaatgaaattggatttattaggggactttcgaaggatgattagtttttaggattaagatttattgtgaaaggcaacaaattctaatattgaatgttttaaatgatgacaatggttaccaaatctgatgatcacatgtctccctatgtccagactgagtagaactgctgatatttattgtaagaagctgttcacttttagtttttcccctgtttacttgtcttgttatgtggttttaaaaggcttcttattcttttcattataactccagtacaccagtaagctcttgattatgcattcttaatactgaattattatcaatcttggaatcctaatatcacagggaaaat

SEQ ID NO: 69518 - DNA, 331 bp, Prunus persica
  Intron number 1 from transcript ppa021216m (locus ppa02121 6m.g) derived from phytozome v7.0 (chr-ID scaffold_1; pos 37539940 to 37540270 reverse strand)
cattcccccaagtaactttctttctctgagactaggcgctctcaatgcatattaagtgtttgattgtatgtctaaaagagctatttacacaccctttgccataaaaaaggcataacgtctgtttgtgtttttcagaagataaaaaggtgatgagtaaaataaacccaacttcagaaagtcttggttcttggggtttgatcccattaacatggtggcattatgcttttcttgtgtccattggctagatgggtttgtttgaacaattaattgcatctgggttttgcctctaattgaaaatggcagatgctaataatgcagtttcatagtgacc

SEQ ID NO: 69519 - DNA, 520 bp, Prunus persica
  Intron number 1 from transcript ppa009176m (locus ppa00917 6m.g) derived from phytozome v7.0 (chr-ID scaffold_5; pos 14879965 to 14880484 reverse strand)
agcggcgactccttcgatcgctacaaggaatacaggtctcttctgaatttcaatttcaatttcaatttcgacttaatttccattaaaattttctctttttctgaaattttaattttgattagctgagtaagtcaaccaattaattttgatttaagcgcttaaatcaattcaagccgtttggttgctaaatgccaaaaaaaaaaaattttcattttccacttaacatgagttaaatacagttagacctaaaggacattcattagaacataaaaattatattttcttgttgtctgttttgcttcagtttttaaaatagtgtttgttgcatatgtttagttcgtttgagaagcattgttaaatccaatgtgctcgtttattatatacttaaatggttgcgtgagtgaacatgtacaatgtgaattggcttcttgcaatttctatttagattgtacttttggagataatttgatagtgaagtgaagattatttgctgctgactgcaggtattgcttagctgtga

SEQ ID NO: 69520 - DNA, 969 bp, Prunus persica
  Intron number 1 from transcript ppa022692m (locus ppa02269 2m.g) derived from phytozome v7.0 (chr-ID scaffold_8; pos 6549801 to 6550769)
cataactctcatcacaaactcaagaaacctgcttggtgatcaaattgtctaccttcagtttttttttttttttggttctttcttgttttttttattataaaaggaatggggttatactagtgctgatttattgtaaataaattgataatatatatatatagactattgtctgtttaataaaaagaaggatcaggtgtcactcatgaccaagtcatgctttgcatatgatctcatttcagcgcattttctataatctgtaaggataagcttgtatttttattcccttctgatacaaagaaatcttagttttacgttataatttacttgcataataaagtgaattctcagtataataagtggtgaatgtgggttagtagttttagtgcaggttttgttcgctttagttttgtttttgtatgttagtttgttgcccttttagaattggtgttttgttaatttcagagagacgggtcagcggctcactactagcaacaccgatattgttcccaacttaaccatctttaaagcccaatatgtgtggggttttatcacaaaaggtctcggtaattttagtagcggaactattcattatatcttgtattttatttagtcaagttttcgatgtgggacttatattcttttacatgcctcttcacatggaaccaccacatggtgggctacacgtggggccaagtccacatcggagtcaaacattaaagcccaacacgtaaacataacgtattgggtaaaggtaaacattgaagctcaacatgtgcccaccacatattgggtaaggtgtaaaggtaaatgcccaatatttcaggcccagtcattcaacccgctctgatactatgttaaatttcagagagacgagttagcggccaactactagcaacaccaatattgtccccaacttaatcacttacaaagcccagtaggtgtggagtcttatcacaaaggcctcagtga

SEQ ID NO: 69521 - DNA, 289 bp, Prunus persica
  Intron number 1 from transcript ppa026888m (locus ppa02688 8m.g) derived from phytozome v7.0 (chr-ID scaffold_8; pos 19180121 to 19180409)
gagagcttgttccttcattgtaggtatgtaatgaactccctggtttttgttcttcaaatattgtaagggccccttagctgggagcagaacttacatatcccggaagtatacatctgtttgtaagtttatttctcttttcacgtgacttgtcgcgtaaaggagatactagattgagcatgtgttaaaaagtacaagtctcgtggtccaaacaatcctccgtctcagtatgacgaatcaatatgtatgaattttttgttgctgttgggtgtgtttgattaatttgtagggt

SEQ ID NO: 69522 - DNA, 580 bp, Prunus persica
  Intron number 1 from transcript ppa009393m (locus ppa00939 3m.g) derived from phytozome v7.0 (chr-ID scaffold_2; pos 24455283 to 24455862)
ggttttatcaggggttcagaggccacagcggaaaggtaagcatttttcatagccagtctcctaagtttcaatcttgaagcaaacttatttaagctctatacaaccgtagtcttttaatttaggcgtgagatgtaattcttcgttcttccttttttcctttgctgcttggctgccgagaaaattgatgcataagaggatggaaagatatcgcattttcgttttttttttttttttttttaaatttcctgaaatcccaactgtagtttttttgtgtttgaatctattcttcataggctgtggtgtgttaatctgatatttcaactttgattgatttgagctggaaataaaagaaatattttggaatttgtaatgattctgtgtttattaagattaagatatgtgatattgttaggtaggttataaatttagtcgtgcagcatagattttttttctattttgtttcctgaatgcattaatctgtttttggtacaaatcttttcaaatgtatgaactgatatgaagtgatttatcctgttcattagtctaaacaacttgcatcttttcctaatagatttactaa

SEQ ID NO: 69523 - DNA, 350 bp, Prunus persica
  Intron number 3 from transcript ppa027149m (locus ppa02714 9m.g) derived from phytozome v7.0 (chr-ID scaffold_1; pos 3988841 to 3989190)
gcagttataagggttgccttcacacattttcaactgtgagttactgacttgacttttaatgggttgtatgtacacacataaagaacaaacagatttcattattttggaaagaaaaaaaatagtttttcattctttgcattgccattgcacatgttagttttttgggttgtggcatgagagtatgaaaagactggacgtcatgtgtatgcatatgtgagtattattcttagatcattcaataccctcatatgttggattttgggataagcatctttccaggcaatgccacattatgagttcatatgtgggactctattgctttgaattgcaggggaattttgaagaggctg

SEQ ID NO: 69524 - DNA, 553 bp, Prunus persica
  Intron number 1 from transcript ppa009310m (locus ppa00931 0m.g) derived from phytozome v7.0 (chr-ID scaffold_5; pos 16427089 to 16427641)
tctgagaaagaaagcaaaaccagttatatacagcggtaattttcatttcagttttcctttgaattttttatcgtgtgttcttctccattttgattcttttgtcccctttcaagttttcgtttatgtataattttgagactgcttatgatgtttagccctctgcttgcttccagagaaaatgcaacgaatgaatatgatcttatactctttaagtgtgtctttcgttgcataacttatgtgaacttactagatttttgtgaacaagttttcgtttattaagttgtttttatacacgtttattcatgtatgtattatggacgtcgacctgcatttactttgcacaaaatatgttaaatttgacatttctagttactttttctctcaatatcgtttgttcaaacagttgggttgttgtctttctgttaattgaacagaaatgttgaatgtaatgtcaatattttttcaatttctttaaggtgttggagcctttgtgattcatatgaaggatatttctttatgattattattttttatttgctggacatagattttc

SEQ ID NO: 69525 - DNA, 493 bp, Prunus persica
  Intron number 1 from transcript ppa000759m (locus ppa00075 9m.g) derived from phytozome v7.0 (chr-ID scaffold_1; pos 27386155 to 27386647)
agaaacccaagtgtccaccgccacaatttcaccatgtaagtatcaaagccctctgctttttgctatttcccctttctttgcatgtttgttctttggaagtgcaactatgtatgcaatgatttctattttgttttctgtttttgtgaggatatgtttctttattcattgaggttatcaggaggacacactcaccaaaagcgtaggcagaaaaatggatatgatttttctttttctttttcaaagttttgttttttgctttcagttttacacatttggttcttgtccattcaatggcgactttctgatatagaactggatagatatagttatctgcaatgagaagaaaattgctaaaattgatgtttgttgccagttctaccatctactgttgatttaggcttaaaatttctcaagttctgacaatcttatgagtaaccttgttctctgttaaaaatcagcagcttcagaggggttccaagagcaaaccagttca

SEQ ID NO: 69526 - DNA, 352 bp, Prunus persica
  Intron number 2 from transcript ppa005065m (locus ppa00506 5m.g) derived from phytozome v7.0 (chr-ID scaffold_1; pos 6500462 to 6500813)
aggtagaaagacttatgaaacatttctcttatctttatagaccttttctgtttagaataatttcctcctatacacatgagattcatataagttacccattttttcagttaacttgattttgaggaacgattgcatctgaatatctttatgatttttcttaatcaaaaaaatatctttattgtttttgtttggccaaactttcattttgtttcttattaatttaagaaagttttcattacaaagctgtttcatttataaatgctgaaccttagtggttatcttccaccaaatatacaccatacatatttttcgtctttcagggcccgtctagcaagaaccccctatccttcaa

SEQ ID NO: 69527 - DNA, 874 bp, Prunus persica
  Intron number 1 from transcript ppa006022m (locus ppa00602 2m.g) derived from phytozome v7.0 (chr-ID scaffold_4; pos 6214598 to 6215471)
gctggaacttggtggcgtcaagattgctaaaggtaactttgaccatttcccaaatacgggttgctcttagttttgagctttttgctgttatgctgtgctgggtatgctgtggtagtgagatttttgtacttggcttgcatttccacaacctgagttggcccaaagctgttactttatttgttcaatatgttgtggcattctgcaaacttgtgatatatgagatggtttgacgtattttagaacctgggtcagttcatgttttattgtcattcattaactgctgcactgtactttgtttgctatgtaatttagttggttgaaaagtttgcattttgtttcgtatactcttttgggtattaggtgaaataaagggtcattctctgggagctttgaagctcatttattgattagatgtacgaaattgggtactggtttcggaggatgaattaacatcactgaattgcttagcggggggaaaagaaaccaacaacactgaattgttaaatcatagaacgcaaacctgaaaattttattgtcgtgctggtcttcattgtgtggacagagttccttattttggtttcttcacttgcctaagtgatggaatttttgttgcaaagttgtttgtgatacaactttttagaaagttgcatctcacttcaatcattgcattctggtattatactgttcttggtttggcacatttcgacatccatatctctttgacggcctaagcctaacaaccatcttcaagcatgctagaaatctcatatgttgcttccttactgtatcagatatatatggaattggaaaactgcagacctgcttttctgaaaaattgttagtggcttaatatgtttggattatgggtttgtag

SEQ ID NO: 69528 - DNA, 474 bp, Prunus persica
  Intron number 3 from transcript ppa014110m (locus ppa01411 0m.g) derived from phytozome v7.0 (chr-ID scaffold_6; pos 617323 to 617796)
gagtacagggttgagttgtttaacaagtaagttctctgcgtggtgttgttagatgtcacggtataccaatgtggttttttaaggaatgtggggtttgtgcaaggcttattatctgaattcttcaaactcagcttctgtagttagagcaattctttgcgcttgcctgcttcaattctattctcgtacttcgtgagcatatacggtggtgcacaaaagaaaaaaaagagcttatgattgatacttccaaagctgcctgacttgttagtgttgttgtgtaattctgtgagcattatagtacccttgtgttatacacttagctaagcacatctatttaggttgtgaatgtaaatttggtatatgcaattttccatctctaatacttcagctgttgtggttatccagttttcattaatgattttgatttttttttcatattcaggcttacccacacgtgtttcaacaagtgcgttgaga

SEQ ID NO: 69529 - DNA, 458 bp, Prunus persica
  Intron number 3 from transcript ppa020260m (locus ppa02026 0m.g) derived from phytozome v7.0 (chr-ID scaffold_6; pos 3470974 to 3471431)
caatattacaaaccctgtttgttatcatctttacttcttctttatatttttttcccagaaattttgattttatttgtgggattttaattttgtagttgaattggatcgacaatggcgcatttttgtatgaccaaccgtcaattggaaagtcagtaattatcctcatacatatatatacgtgtgtgtatgtgtgtctgtgtttttgtgtttttgtttgtgtttcatatgtagtagaaaagattgctcaatcagattttttttttcaggcaagggatatctgcacttgattttgacagaaaggtaaatacagttgcatttgctagtttggttttattttgtatgttgtgtgcgtgtgtgtgtgttgctcttacttttcacttccttttcttgtatttacatttcctcttttcccctatatattagggaatatacctggtatctgtgacaaaatcggggtg

SEQ ID NO: 69530 - DNA, 344 bp, Prunus persica
  Intron number 1 from transcript ppa016413m (locus ppa01641 3m.g) derived from phytozome v7.0 (chr-ID scaffold_1; pos 37654175 to 37654518 reverse strand)
aattattatcaccaattgtctcaagcctcacaagggtagttgatgcccttccctccttttctaattctactcaaattcttattttctgcgttgcattgcatgtaatctgatattatattcttgaaatttttatttatatttatttatttgggtgttttttttgaatttatggtcccgtggaagacgggattggtaggtggtgattaaaatttacaaatatgaatgaacccttttccaattttgtggtaaagttttgatcttttttgtttggaggttgtgatttttgtttcgctaatggagaaatcaattttttgttttggagggtgataggtggagaagcagtg

SEQ ID NO: 69531 - DNA, 943 bp, Prunus persica
  Intron number 3 from transcript ppa010724m (locus ppa01072 4m.g) derived from phytozome v7.0 (chr-ID scaffold_5; pos 3755455 to 3756397)
actgcggcactcagttggctccaatcctgttgttggtaagccacaaggacttctattaccattcaaatttttctttatgttcttttttctcaagttactaaaagttgatccttataattatttgggggtaatgaacaaaaaatgggttctgtaaatttgttgttgttcttctgatgtgtgtttgtgttaatgataaagattaggcaccaagggttttgtgctgtgtgatagaacatttatgagaaataagtaaaatatcgtcttgcagtagcattgttgacttatcccttgaaattcaagcctagttggctgactgattgtgcatgtaggtaaaattattctctagctgttagattatatgtagatagcttagatgcattctcatttgtcacatcttagtcgtccatgttggtgccaagagttgccttaactatcaccaaaaaatcgtcatggattacaacattttaaacttcccattcacatgccatgttcgtgaccacatgctaatcttccaaaccaggcgcaatcctcatgaccatgggcacctagaaacaaatcggaggcaagattgtctaaggtgtcattgtgacactggccaagtagtttgcaacgatcaagttaaggtgcaatccaaaatcaattttggacagattttgtagggttttggcttttggagaagttttgcaatgattaagctaaggtgtcgtctgtgtgatgcaaacatattatctgatgatagcatagtactcttaaagttatgtttcatattttctaacatcatcttcctctgttttggtaataccaaatgaagtcatgcgtctatatcgtatctattcacagtaccataagcttctggtctccaagcttgtttgatatgtgatgcagctaatacgtttttttttcttctaatattaatttttgtcctgtgattctttcaccatag

SEQ ID NO: 69532 - DNA, 748 bp, Prunus persica
  Intron number 1 from transcript ppa005705m (locus ppa00570 5m.g) derived from phytozome v7.0 (chr-ID scaffold_3; pos 16913457 to 16914204)
ctatttgtttggctttccaccaatgtacctttccctcactatttttcattgtcgcctgcacattcttcaggtgggcatgatgacaaaaaatgtcagttctatccggcaacagaattcgctttcgaaattttcgtgtgtctagcactggctctatcgatccaaaggcaaatgggattttcaaaatgtacataaagacttgtgaaatccaaaacaacagtaaaaccattgctgttttggtccacccatatttgacaatgtagaggtcacacacccaaatattttgagattaaatcgatatcagagaacaattaaaattaaatcaaatttaattgtttgctatatgtttcccttttttgtctttagggaattgttcttgtcctatataccaaaaaacattgttttatcattcgccatttattcttttttttttttttttttataacaaaattatgctcccatcttttaaaattaaatcaatcaattcctcaaaaacaggaatataaaaaatatatatatatatatattaaacgacattacgtatcaaaaacaaaaacgcgaggacattaccgttaatcaacgtgggaaagaaaagggaaagtagcccaagggatctggtcccacagtccttggcccaataataacgcgacacgtcacaaagtccctggtcaaaaccctactacgaactctatataaaccctctactgttgttgtagttatacactgaactcatcgatagcttacaaatcaa

SEQ ID NO: 69533 - DNA, 626 bp, Prunus persica
  Intron number 3 from transcript ppa009791m (locus ppa00979 1m.g) derived from phytozome v7.0 (chr-ID scaffold_4; pos 5133882 to 5134507 reverse strand)
aggtgagttcagcttctgggcagcacctccctctcctaccaccatctttccacattcagtttccctgatattcatttcatattactgtacaataatttttgaggtctttaactggacttgtatcacatggtgtatgtttgtcaatcatgaatagtggaatcaaatttggataagttccaactggttaaatgtgaattgcatccgtactattaatggctctttataatggaatattatgttcctggttcaaacaatgtacaagacagagtttcaatggtattaagactatatcatgagacctcaaatatatgtcttggtagagttgctacttatctttcaaatttatttatgagatgacaactaatagagttttttgcatcacgtgtgagcttgaatcaggataccaatatccttaccatgatttaatgtattggattttccatcagactggatcttcttatgtgtttgtgttacaaggaacaaatcagtgtcactttaacttaatagagcttattatccgttgtaacttctcaagtgagttgacacatttattctctttgattgtttatttctgttttcttgaaaccccaggttgatcttcttgagcctgtatcacatttcttgga

SEQ ID NO: 69534 - DNA, 519 bp, Prunus persica
  Intron number 1 from transcript ppa008869m (locus ppa00886 9m.g) derived from phytozome v7.0 (chr-ID scaffold_1; pos 29289746 to 29290264 reverse strand)
cagcttttcaacagaggcgtttttggcacaaagtggtaggtcatacccatttgccttggcccctgaatctcatccctttattatatgtttgtttctgttattcaaatccttattctttgcttatcatgatttgatttcgtataatttctgtcggtcaactttactttcaagtttgatcccataattctaagttttcgtagaattgcagtttaattagtggacaatatgttctcgaaattctggattcttcgaggcacccaatcattaatgcatttcagcatatgggtttctttcattaaaatatttttgatcgattttgtgcatttctcgtcaatatttttggatagtttttgctgttggcgctagatattcgttgtctctagtaatttggttgtttcttaactctgccgcgtgtgattatcaaatattgagacttggagtcaaatatctgtctacttgtttgaattgctcttgtaattcggtgaagtcttaaccttggtagttgttttgtagcaaaac

SEQ ID NO: 69535 - DNA, 913 bp, Prunus persica
  Intron number 1 from transcript ppa003932m (locus ppa00393 2m.g) derived from phytozome v7.0 (chr-ID scaffold_2; pos 5073841 to 5074753)
actctaacttgcagcagttagcaaatcaggtcaaatgactcaattctatgagtttcattaattaaaaaaataatttcaatataaaatttaatacttaaaaaaaaaccctaccccatgttctccttgttccaccatcagccccttctgcaatttgcaaatcaaattccaaatcccacaacttccaagaaaccaagaataagagaaatcacacactatgaaccaccatcttccctactcagcaaccctatcctcatctcctgaattttctctcagtcaccttcaaagagagtcattgtctttgaatcatctgagcaaatcttttcacaaagtcctcagccaaagcttgcaccctacaacgctccagtcctgctgtttgtttctacaaaaccgaagttgccatttctttctttaggttagtacagtctaattcaagctgatctgctctcatcatagcctctttaatatccctattttcttgattggattcatcagcctattttatattgaagtaattatttttaatgtaatattgaatatttttaaattaatggaattgacggaattgagacatttgacttgatttgctaatctttgcaaatgtggtgaccaaattctgaaaattaaaattatagcgaccgaaatcattttcgagcttaaccctaattaccaaaggccttttaaaaaaatatgacccgaataaaccgggtaacgtgaaagaaaattaattggggcaaaacccatgttgtatgttgtggatgtggtggttaaaatttgtcaaggtaagaactgggccgcccatgagtaaagactgatccataaactcattatccaaatttgccaaaagtaaagagattacaagaagattcaaaacaccgaagcgcccaaacaccatcgcgtcggtttacgtaaatcc

SEQ ID NO: 69536 - DNA, 754 bp, Prunus persica
  Intron number 2 from transcript ppa013699m (locus ppa01369 9m.g) derived from phytozome v7.0 (chr-ID scaffold_2; pos 6583367 to 6584120 reverse strand)
gactccttagggctacgaaggtacactactacacaaatttctttctatattaattttcttaaatgctattaaaaggagctttacaatagtagtataccgaaattcttaagcccatttttggtaagtgtgatttctttgaagcgtggtcttcgtgtcactttgagacgtcagctttgcatttctctgaagttctctcaaccaagttgatcagtaaaattttcatctaaattctcgcagatcatattgcttagactctaattggatttagaccaagctcctactccattatgagtcggaaataaaaaatcgcacatctcaatccgcaaatcgtaactcataaaatactatttggattctggaaatcgcaatagaaatctcagtcgcaatcttcattgcagtctcaatctcttaccaagattcacaaatcgcaagctctgatcaaaattcaagaattgcacaaggtcctttgtcatatgcatatgaaattgtattgttttgctttggttgtagagcttctaagcaagattgcaactcaaattaggtccactactagtgatgatgtcgatgcgatatgaaaagataaatttgtgttgaaaagataaaaaatcaatttattataaaactcatagacataagattttatgttttttataggatgtaaaatacctatgaaattaggtccactactactttggtgtatgcttcaatttatggtttgtatctgatatcatcttgttttattattcccagatca

SEQ ID NO: 69537 - DNA, 780 bp, Prunus persica
  Intron number 1 from transcript ppa014434m (locus ppa01443 4m.g) derived from phytozome v7.0 (chr-ID scaffold_6; pos 28701807 to 28702586)
agccgcagcctcgagatcaaacaggaagcaaagtacgttttcttttagtttgttgcactttgcttttcactgaattcaccctttctcttagtcaaggtgttatgtaaggtttcggtttctcagtaaatttgagaaaaaagttgaatggagatttagaatattagtatcatttgtgtgagcttacagctttcgtatatgtttgatgatagctaaaggaagtactttgaattgcatatatataccatgcagctgatttatagctaattcttgtttcccgatgatttgggtgtatattgaccaatttcaattttgatttgtggaggacatgatagatatttaagttaaaaactaaagatcaaaattattttaaaaggtttagtatttggttccaatttagaatgggcctcaatgattttgtgtgttggagctgaatacaaaagcagtggttcatacagttacgattctggaaaatgaacagcatgttgtgtgtttcatttgaagcatgtctgaccatggtttgtataatgttttttcctggtgtcccacccattgttcttgtatctttctggcaatatggatttaatcctcatgaaaagaaaaagaagaagaagtaattgacacactaataatctggtatagctgtgtcaagtgatggatggtagatgttaaaacatgcgaacatacaagccttgttggttttaaatttgagaatgttaatgtatgtactctgtctctgtactaacagccgaagcaaatccacgagattaaggatttccttct

SEQ ID NO: 69538 - DNA, 908 bp, Prunus persica
  Intron number 2 from transcript ppa025443m (locus ppa02544 3m.g) derived from phytozome v7.0 (chr-ID scaffold_4; pos 18761683 to 18762590)
acgttgtatattgtaacaacgacggtgatttagcgtcgtggtttatgagggaaaagatgacggtggattccacgaccattgaaaaaccgaatacacgacggtgatttacagtcgtctttttgcttttttgtagtagtgttcgatttgtggtgataaattaccgttcaaaatttcttagtgtgtatttttaataaattacatttcatttaattttttccatggatcgatattcagtcgatagtttaaatataatatgtaaaataatatagtacaaaaattaggaattttgtatcaagtaaaaaattagtttcattgtcaccctaaagcaaaatatatttcaatatatagggtgccccctcaatgaaaattttctggctccgccactgctattatgcatacctttctcatgtttaagagtttgcagttggagttggcactgatcagtccctagaagcataaccgaaaaattgtatggagtcatcacaatgttttgctttttgtttgtatcaataaaagagggtgttcaactttagaccttttagagcacttccaccactaaagggagcaagggtagaactagaaatttttcaacgggtgggctagctaaagttatttgcttaaaatctaggcttatttatgtacatgtcccatgtgctttcaaacttgtctcatattaccacctgggctttgaaacgtctcaaaatacccctcacacttttaaaaacagtctcacgttaccaattccgtcagtattatagacgttccgttatgtggccccacttcgtttcaatccttaacattggagaataaggatttttcagcttcagaaaagaagaaagggggtatttgggtgagaaggggaaatttgaagaaagaaggctagggcttatcgaaagcctgctcttgta

SEQ ID NO: 69539 - DNA, 636 bp, Prunus persica
  Intron number 1 from transcript ppa004282m (locus ppa00428 2m.g) derived from phytozome v7.0 (chr-ID scaffold_4; pos 23474549 to 23475184)
aaaactcttgtctctgaatttgcagtctgtgacaggtactaattctttttgctttttcattaaacttaatcttaactgattaattaagaaatgcataatttttattattataaataaataaataaacgatagattgtattcataattcaagccaaccaaatagggttaatacaaatacggaagttttgttgtatatgaatgaatttttcttaaaaatgtattaaaattaagagggagaaagcttttgggaatgaatgcgagagagaaggaatgcttagcttcaaagtatcattttgtttgtactcccaaattattcatagctgttaaaaaaacaagagattcttgcttcctcttttgtattttttttcattttctttcttaaagctttcaagattattctgaattttaatctcttacctcttcctttgctgctgccaacctgccatgcaataattgcggttgacacttgtatgggttgttagactacgacttctgacactgtcttttttactttttttactgttttacttttttacccctactttttttttttttttactgtcccaaacaaaaaacatcaagaattttgtgtatgcgttaggtggtttgcctcggtgccatcctcaacacagccga

SEQ ID NO: 69540 - DNA, 853 bp, Prunus persica
  Intron number 1 from transcript ppa004392m (locus ppa00439 2m.g) derived from phytozome v7.0 (chr-ID scaffold_3; pos 16004305 to 16005157)
aaggtcgtgcctctattcaggtatggctttgattgattataggctcattttacgctgtttcttttattcattttttttgggggtttaatttctgcaaatcgataggtgaaaaatgaactttaagatagtttttgatttatgcaattgggttttagctgataaggatgcttatatgaaaattaagttgctttattgtgcggcatgctcgaatggagttagtggtagataagaacatagttgccagagtatgattgcacttggtgctattattgttgtatagcttgtgcacccccaatttcatataaaggcggtgcttttgtttacataataagttcgagtattagaatgacccgttcagggaggctaggctagtgagagagtgatccgtgaattttataaaagtgattgcttaactttctttttcttgttattttgtttcttaaaatgtattggactttgagaaagatatgtttttgtgcgtgtacacatgtttattgatctgatatcatccaacttttatttatcaaaactgaatttcatccaaataatgttggcttttgggaaggaactggattgctttattatttgtgtttggcatcacggatatcattagtataatagttactggattttatagatacggctatgacatggaaatttgctcacttttttgatcattttaacgaatttgggtttctctttggaaattgaagtacatgcgctttgcatattgttgaaccttatccatttcaagtgtgtttctgttcattttgtgtcctttaacaaaggaagtttgatgagtgctgcttctgcttaaggttgaaggcttggaagttgggctcacattaggctt

SEQ ID NO: 69541 - DNA, 408 bp, Prunus persica
  Intron number 1 from transcript ppa005260m (locus ppa00526 0m.g) derived from phytozome v7.0 (chr-ID scaffold_7; pos 15542621 to 15543028)
ctcaatttcctccgaggttgctttgcttataactttcctctgttcataattactactcatattttggatgaatctagctaatgacttgaagtttagattgagttcctttttttcttcttctaaaattgcatggttcttttgattatgttagtagttaataagaaactatgtttgtaaagtatatatatttaatcagagtgatttgtttacatgctcttctctgtttgattataattacatatattttgcaacattagtagctttgtattaaaaaaaaaaaaagggaaaagtaattaggacagggaatgtgcagctctttcactatctttggtctttgcttcgattaaaatgtgacccgggtgctgtttttaagggagggcggtaaagccagataaaacatcggcaaca

SEQ ID NO: 69542 - DNA, 638 bp, Prunus persica
  Intron number 1 from transcript ppa001379m (locus ppa00137 9m.g) derived from phytozome v7.0 (chr-ID scaffold_1; pos 43164700 to 43165337 reverse strand)
gattcaagatacaggtacaatagtactacacaaccacaatatcttaccttttattattattattatttttttaatacataattaattaactatggaaaaaattagtgatttcttcttcatatccttctctttctttttctcccttttttttttatatatattttttcttgctgaagatgtaatacttgacccttgaacttaaatctttgttttgttatacaaaattatacgtaatataatatgcatgtatcggtaaccctaggagcacatgaacaggtatgagacctaataattaagtgttttgcccaactcataagctagcaattagaggttaatcaccaattttaggcggctaactataatccactaaattcattatctcacctcttaattagttaattaatatacaatattatgtaattaaccatggcttcttcttcttttttcttctttttttctaaacgcgcctacactataaagaaactttgagatatcttccaatgttgggaagagaaatacaattaagctaacaactagtttgtgtataacaagataatcgggcttttcgacaataatcgtctatttcaatatgtgatatttaattttttggctatgtattaaggtgttgggagacattt

SEQ ID NO: 69543 - DNA, 918 bp, Prunus persica
  Intron number 1 from transcript ppa009428m (locus ppa00942 8m.g) derived from phytozome v7.0 (chr-ID scaffold_7; pos 22012540 to 22013457)
aggtattaattatattctatttctccttcatttttccctttttttttccttcttcttcttgtgttgctttgctttttgcttgttttggaaatctattctggattttgatgggtcggcttggttttttattaatctgaaatgggccttttggttttggccaatctgtcatttgcaaggtagtttctcctttttttgcttacaaaaaaatattgattgaacacccctcatacagtatcttgaatttgttattggttccaaattttcagtttattgattattttcctcgttttgtttggattgatttctgaatttggatgaaatatgaacggtcatgtgcttgtttcatttgtttctctgcatatccggggatcatttcagcttttaaagtttgattaatggcaggcttaaagctgccggcatcataatcttttcatgttcgttccgtttggcgtgagcctgactccttcaaaaagagaccaaacagaaaattatctgtaatcctagtattctatttgaaatttcaacatgggtttttctggtaaacaatggaggcgagtacaaactcatagatacttgtttaagctttaaatttttgattggtcatggagctttaaatttttaatttcattttttggtggggtttgggagttggaatggatgcataggatgagaatgttactgtgccagcatttattacgtacttgagagtacattatttatttattatttgtaaaatatggtcaagcagccaatgagaatctttgaatgtaacatttaaaaaaaaagagaaaaaaagtcaggaactttgaatgtaacacgcaggcagctgatatgctatgagttttctgatgctctgtgctgcagtagttatgaaccctcccgtattatttacgtcagatatttttctttgtggcagct

SEQ ID NO: 69544 - DNA, 1045 bp, Prunus persica
  Intron number 1 from transcript ppa002551m (locus ppa00255 1m.g) derived from phytozome v7.0 (chr-ID scaffold_6; pos 16475937 to 16476981 reverse strand)
ctctcctcaaggctatcaagcaagcgttcattcctgtgagtcttgttatttaaatcttttcgttttgtgacgtgtgaatgtgtaatgcattttcgtaactagggttttggtttttttttttttttttgcttttgtggattctttgtataagaaattgtgttattttctgcctcaaaggtatggcctttgtttctagtttatctgttttgttggatttggggctttgccaaagttttgaattcaggatttcgtatctagttttttttctttttccgcattaattataagcttatcatttagttttctcgatgaattgtgacatagagtctctatagaatttattatcaggtattaccttcaaatgtttttctttttctctgcatgacaagtatttcttgatggatatttttttttatcaaacatgttggtagattatggtctctttgtttgcactttgctctttgctaagttcatgcatccgagttaatttactatgattgtttagtataatgtgttggtcattatttttagtttatttgcatggaattagtaatttgtatttttcttgtcattttttgacggaagtattattttttatagaggaaaatttaacttttattgtaatgccttgagtatagaacaatttttcagtttatttagcaagaagcttatggtatgcagaaattgtcgagacctagagactttcatttttattggggaaattggccaaatagtgaacttgagatttcaaaattttcttctattttattttcaaacctttatgtgtatgttagcttccttaaatagttaagtggaaatatctgcatctttgcattttttgaaagttattgcttcttgtttggtacttggtagctgcattttcttgtttatgtattaactgaagttattttccttgtttttgtgtggtttccttttccttttttttttttttttttttggttgttgctgatatttgtaccatttttttttttttttgtgttactttaaaaatcaggattgaaggtgaggttttagttgaacgaag

SEQ ID NO: 69545 - DNA, 658 bp, Prunus persica
  Intron number 1 from transcript ppa006745m (locus ppa00674 5m.g) derived from phytozome v7.0 (chr-ID scaffold_2; pos 14148278 to 14148935)
cctcgaagctgaaaccagcattctcaactcacaaggttcgatttttatctcacattttaagccctcacgctgattcttagtgttttgcgattggtactggtccttagggttttctgattcgattcttgctctgtgatgttgtttcttgattttgctagtgtagtaatatttgggattgggggtgtaaatattgataagaaagaagacattttgagttcactaatatatcaaaactatcgtttgctctgaggaaatactatagattgaaaactggaatttggtactgactttcttgggtatgtttgaaattgggtactaaaaatttggattggaatctgtttctgggcagtaaatgttgagatgcaaccctgtttctattgtgggaactgggatctaatgagaagtttcgttctttggttccggttagtaatatgttttaagcaaaagcatctattgtttatatacttaagcgaggaagcacctttttttctggttatgccaaccatgatgtcaactattgaatccaagtttcgtcttagttacaatgtgaatgtaaagtgtggatcttgtgttcatggaattattttgttggattgataaattgaattttgtgaattgaacagtgagaaagattaaggaagaagtccagctgcttcag

SEQ ID NO: 69546 - DNA, 661 bp, Prunus persica
  Intron number 4 from transcript ppa012551m (locus ppa01255 1m.g) derived from phytozome v7.0 (chr-ID scaffold_7; pos 13541194 to 13541854)
cccatcactgggtaatataatctttacccagtaatgtctagactttgtttaatcaaactggtctggtcctttttctttattttgtttcatatgtgttttctgcagtatgccaccttttgttttacttaatctgcataaaagtggcgcttagcagttaccagtaaatgttttttgctttatgatgggctaagtatacaatgtggttgggtgcacttctgaccgtaaatggctttatcgcattttttcccagaagttatttgcatgagacatcagtgcatcactgtgtgaactattgaaacgatcggaaactgaaaaacagttcttgccataataattttatctgtatggtactgggatgtttttctgtatggattccttaggctttatgtgacaataaaaactagaccaccgccgttaggattccgcttgagcaacactgtttacttggatttgtttgttacttaccattgagttatctccattcaaaaattcatgaaggggttttggtggaagagtagggaaggctctctctattcttatgttcagtcttcatcagtacaattttgtgctgtaaaaatttgtcttgcaccaataacacttagccttttgcttctgttttcatacaggaaagcacacaatatttggaagagtgtgcaaagga

SEQ ID NO: 69547 - DNA, 585 bp, Prunus persica
  Intron number 4 from transcript ppa011291m (locus ppa01129 1m.g) derived from phytozome v7.0 (chr-ID scaffold_6; pos 10222385 to 10222969 reverse strand)
caagatttcgagagatcattcaaggttcaaaaaaggtgagcttttgatatgaagatgttctgctttgtgattttatgacttaattaagattcaaccttattttcggtacacctttctgttttcctattgggttacaaaggttttcatgagaaaatattgataacttaaatagtttaccatgacaaaaattgacgataaataactgtagcttgtttcttgatttttgtttttatgttttttctatgacctatttggaatcaaaacctggtgtgttattaagcatgacataggaggataatggtttttagtatttgatgtggattctattcttaggattcatttctcctagagaagttctttttgtatcaaagttatgttaaagcgagaaagtggatgagcaaagttgtgagtagtcaatctatgattagagctagttatttccatacctaggcaattatcttattaagacaactaatggagtattggagtaaagcagaaggcttacatgttcttcgtttagtgtactttggttgaaattatttcttgctatgttcaggtggtacgtgacccacgttttgaatcttt

SEQ ID NO: 69548 - DNA, 843 bp, Prunus persica
  Intron number 1 from transcript ppa008972m (locus ppa00897 2m.g) derived from phytozome v7.0 (chr-ID scaffold_7; pos 9035934 to 9036776 reverse strand)
tctgataggtatgtgcttgttgctgcgatattggggggaaggtattttggttcgtagaaaaatccgaggtttctggtatttttaggttttgtaactggattttgggtttcctttcgagggttgaagttggatgagaaggatgttgattggtaatgggaaagtagaaatggcagaggtttgtggtagtttaaggttttttaaaactggatttcggtttcgtttgagggttgaatttggatgaggaggatgctgattggtaatgggaaagtagaaatgaaaattgaaaatccaaagctgaacatctaattagcttgggttgggaaatttttattacaatttgaaaccataactgttaatcaacttttcaagattaaatttggaatttggtttaaaatcaaatgagagttttgccctttatgatcatcatgtaatttcatgaatctaagttgatagatatatgaggagattgaaatattgatctcaggtatactgtaatcaattgcattggacaaattgaaattattaagctttttagtttttttaaaacaactaaactattaagttcaatcctacatatattagagtagagtggatattcaaatatcagtatttttaatactcataggtgattggttttttttggtacactttttcatctctcaaaatcttgcttcttccctattgtaatgtgtgatgatatttatatagtattagtatcaaaatttattcacttgatgtgttaaatttctcttacaatgagattatttgtaaactactataaagaaaaatagctgatgttgtgacattgtatttcaggttgggccttgttgcaaccatcaaggt

SEQ ID NO: 69549 - DNA, 954 bp, Prunus persica
  Intron number 1 from transcript ppa007236m (locus ppa00723 6m.g) derived from phytozome v7.0 (chr-ID scaffold_2; pos 22156293 to 22157246)
cgccttcgatctccttccgtcacattcagaaaaaggtcaattttctcaccctctctgtttctttctttgatgcaattttctttcctatccatctctggttagcaagtgctttagatctctgattttttttcctttttccttatgatttcattgctgcattgtttggtttgggagtttttggtgtttgctttggtacggttttgtgttttaatcacatttcagattcgtagcttttttttccccttttttatgttcaaaatagctaccacggattgcccatttgcgtttgatgaatcaatttgctttcctatacttagcagaaaacgtataaaaatttactatttaagaaacaaggaacacacaataaaataatgaatgaaaaatcatgatttttaatcaccctccctttctttttttttgaataacttgtgctcgttatagattgttatcagtatatttggttataagtttgatgtgtgatggagagctcatttaatctgttctctctaatctttttgttttcatcaaacgtattgcattgttttgttgttgcattgagatttggtggtacattttttgtctttggcaatttggtcctagccaattcctcggatcctttcataatggttttgaatatgattgttcatttattagtcaggggcatcttacaccctgcaaacattgtttagaagaatcatctgttcaatttctgttttgtggtcctcttttgtgttacatcacgctgttgtttgtgtgtcccactgttttatggtcctcttctataccgtttctttaactttgttatgtgttagactaatgctatcttgtacatgagcactgagttttaccatatatactcatttggtaaagcaagggtttttttttcaaatgggaaaattgttgttggccctgttggccctgttgtaactggttggtgtacctggcaggtagaag

SEQ ID NO: 69550 - DNA, 943 bp, Prunus persica
  Intron number 1 from transcript ppa010829m (locus ppa01082 9m.g) derived from phytozome v7.0 (chr-ID scaffold_1; pos 22931317 to 22932259)
agttggaccagagattgttgagaactgcggtggtggtttccaatagaatactgacaagcgagagcacttgggcggcgccgcaaatttgtctttgctaggagatcagtcggtactcggtagactcggtactgaaagattaatatataaaaacagttgactttgaccgcttcagagagagttttcaacaacttcaaaattatataccaacgaggtttattccaaattagaaaatttgtatcttggcttaacttatagctgtatgattttcactccactaaacttgtgtctttcttctaacatcaaactcaacctaataccaacttcaaaaactaggtataaaacttgaaagacgtagtttatttacattaatattaatcaagttagtgaaagtagtttgaaactttaaaacacgagtcacgtcttgttaatacattgaattatgttctgcctttaatattcgtgatttttaaatttgtctgctcttttaaaaaagatcatttgcataaatagttcatttcttaaaatatttttttttataaatttaccgtatgaaattcgtcagtccgattcagcaaacttaacatgtataaaagtgagacttgtgtcaaatatttgtcaataaaatttttaaaaaaaataaattaaagagaatattctttgtgcgttatccacttcaaagatatttttaccgtgatcgatcgaaattcaaaaaccatttggcatcacccacaagtcagaaacatgctacatgtgacaagaaatcaaatagtaacaagcaagtgtagaagtagcgtagaagcaagaaaaatcaaaataaaaaaccaacacgtccgcaaaattccaaaatccccaaagccctttaaaaatccaccccaacacacactcgcgtctacgtgttcaacttcaagcccacaaccatttatatttctcagaaattcacaat

SEQ ID NO: 69551 - DNA, 716 bp, Prunus persica
  Intron number 1 from transcript ppa020963m (locus ppa02096 3m.g) derived from phytozome v7.0 (chr-ID scaffold_1; pos 37188680 to 37189395 reverse strand)
gcgtcgcctcctcggtcgcgcatcaatcaggtttggctcccaattaaaattttgttaaaaaccctaggactcatagggttgatgtccaatttaaacttccaggtactctctcatatattcacgcacttatttgaagaattgtaggacaatttgtttggatttcgtgttgacgcacatttccttttgtagtttcattgttttagtcggtagaaatcgatggatttacaaacacattgttttccatgtggttgacaagaaaaatgagcaaacgaagagcattattgcatacctattatatgtgaaatacacaaaagactgagaaaacaatttggaagtggaagaatacgtgtccttttgatttttatacttttctgttgcataaggttacaagaatacataagggtccctgatttgtggggatgttagcaggtaatttgtatcttgtgctgtttggatgtccttatcgaatccaagtgatagacatatagatattgcagttttattcatctcttacacatcctcaactaggaaagaggcgtgatctttgaggaaagactgggatctttactgggttaaaaagtctagatgaatttataaatctttaatcatgaaattgaagtattttagaaatccagttttacataactcaacaagtttcctttcatttgtttgcatgttcagttttttgcttcaaagaaaaggaagcctttatcacc

SEQ ID NO: 69552 - DNA, 959 bp, Prunus persica
  Intron number 1 from transcript ppa021489m (locus ppa02148 9m.g) derived from phytozome v7.0 (chr-ID scaffold_4; pos 14739764 to 14740722)
agagaaaacaaaacatcacaagagaaaattcacaagtacccatcactgaaacgaagttgaaaaacagaaaatgaatatgaaatcaagaagatgagagtggtgtgagatgtacccatcttgggagaaggagagttctagggtttctctgctcctggagttgcggcaacgcggctagggtttgagacaagtgaggcagccgagctaggtctttagtacaaacgaagtgaacgaaattacgattttgtcctcaatagcccaaaccaactcttaacttcgaacaagtttggattgggctttcccaagaatatagatccccaatagaatttggcttgaagtgacgtcgtttagatctttgtaggccaagcggcccaaaccctaacttagttcatggccaagtctttggacacccacgttatatcctaaatattctttggacacccataacaaattaataatttaacagtggcatattgcgattttaataaattaaaaattaaaaataaaatttggggtccatttgaatggagtgattgttaatctagaaatttatgtgacattacaagtttaaattatttttttaaactattgcaataatttatgcacgttgagaattaagtaaggaaataaattctaatccatacgatgcaacatgaagataaatgagaaatgtgtagagcattgagctcaagacttcaatgcctatagaaagccacttataggcatcaaagtttttcttaaatacatactgacttgaacatcaaagttttttcttataggaacctcctcctcattcctttattggcaagaaaagatggtggcctcaatctcccacatggattagaattagaagatatatttatctgcttgaaagcttacaaatgcgtttttaaactgctgccaaattgcataactgctttatacttgcaggtttttctctgctaggaagcattggttggtag

SEQ ID NO: 69553 - DNA, 823 bp, Prunus persica
  Intron number 1 from transcript ppa001315m (locus ppa00131 5m.g) derived from phytozome v7.0 (chr-ID scaffold_2; pos 5637851 to 5638673 reverse strand)
gaatttgcgagaggggtaaactaaacttactcttctggatctgtttttctccctcttttgctttgttttcattatttatttgttttttttttaaaaaaaaaaattgaagaagctaatgaattcctttattatctaactcatacttcgtactaagtcattctcttcttctttttcttctattttttcttctatttttttttatgaaaagaaaaattgaaaatgttcgtagaggttctaagtttgatacccgaaacccgtctctggttgatcaggaaaaaaaaaaaaatctacataaaacccctgaacgttaggtgtcgtttcaaattgatatccaaactttgaagaccccacaaactcataccaaaactcacaaaagccctacacctaacatcctccgttagcaaggagtaccattaagaaatccgatcccctcccaaacatggcaaagttgtgtcttgagcagcttcctttattttttctcctccacaggccagcattcaggagatctgttgtccatgactgataggcatacgatatctcttatttcttctttgttttttcttgctttattatttataaagtgaagcgccatcacctgattcttgaaaagaaccaactaattcaatgtctcagcctccattaacagaaccgggtagaagaacggattactcatttggttctagctaacttgcagaccatatttataagatcgttatatatttttctttgcatatgaacccaaagttattcaagatattgtagaaatgatcgccaaacttaatcaaacaaccattataggatcgttatatatttttctttgcag

SEQ ID NO: 69554 - DNA, 396 bp, Prunus persica
  Intron number 1 from transcript ppa003497m (locus ppa00349 7m.g) derived from phytozome v7.0 (chr-ID scaffold_8; pos 1531374 to 1531769 reverse strand)
gccctcaagtactctctctctttctctctcttcaattttattttacttttcttctttgtttggccatgaattggttttgggattaataataattgctgatcgatatattgcatttgaatattgaaattttttttataaacaaaatagtaaatatagaggtgggcatatattcttgtatctgaaagaggtgtgtttatagctatgcattcgattgttgtggtgttagtgttatgcatatatgcagtaaactttagcttataacagtaatgcttttgtgcctgccttatagttgctctgtctggtggcttttgataaagaatgaactctagtgcattacttataatttttcctcccttttcagagtaaagcagaggtggtttttaagacgccagaagc

SEQ ID NO: 69555 - DNA, 689 bp, Prunus persica
  Intron number 2 from transcript ppa003020m (locus ppa00302 0m.g) derived from phytozome v7.0 (chr-ID scaffold_7; pos 21135371 to 21136059)
gtggggcaccaatttctcagcaggtttgtgtctttcttgagtgattctgtggcctaaaatcttgtgtttgattattaccattgggtatcttttacgatgaattattatgcggcctttttcacttgttgtatactgattgttgttaagcttatgctttccattttgtactactattttctcacaataagttgcagtatatttgtgttaaactgatatttaagattttggtacctcactagcttatgcatttgatagcatcaatatggtatcaagtctagatttctctttggttatctcttctgtgtgctcctatttctgtttttcctctttgccctatgaatggtgcagttggctacggatataaggtagctgacccaatttgtggtttgtgttgttgatgaaatctcataaactggtcaagtattggaaagaaagataagcgttctcttttgagataccaaacagtttatgtataagatttgttaatcggggtgagggtattgtgttttgctgttcctaatttttaagaatgattgcatttctccactcaatgatttagagaacacacacacacacacacacacacacacacatgtatatatacatatatcttgtttaatgataatgatgccttgataatgctcaattctgcagttccgtaatctggaaagaggtgttgatatcttagt

SEQ ID NO: 69556 - DNA, 543 bp, Prunus persica
  Intron number 2 from transcript ppa005692m (locus ppa00569 2m.g) derived from phytozome v7.0 (chr-ID scaffold_6; pos 21748300 to 21748842)
actttgggcttaatacatacagtggtaataatactaaatgctaccattcttgtttctagcgcccttattagttaaagtattatatcaagtccttttgttgtaggattttttattcctctaatttgaagtataggaaatttcccaagtgcctggggagcaccttgtgtacatcgtcatgaacagttttgacatgtattagtggatttcttgacctttgatccctagactgaaattcttccacccctgaggaagatcctcttgctgaaaaaagcaaaatataatagaagaaaaagattatattaggggtttttaacatctgacacttgcatgtaatgaaatcttgtttctttgatgatagaatgcattccaaatgattttattcaaaattatttattggtaactgaattcgagtgactctacaaaggtttttggtttcattttgtcaaataaatttttggaatcacttctgttatcattctaatcctgtatatttttttcccttcataaggtggattgcattctgctcatcctcgtggaagatac

SEQ ID NO: 69557 - DNA, 884 bp, Prunus persica
  Intron number 3 from transcript ppa011545m (locus ppa01154 5m.g) derived from phytozome v7.0 (chr-ID scaffold_1; pos 27703445 to 27704328)
tccacttccacttgtgtttatccttcaagtaccaggtaggtgtcatagtttttatgtctgatattgaatcttgactttgcaaattttaatgagcattttttcaatgtctttaaatgcatttttcccattttcccacctactggaaagaaaaagaaaataccaaaaaattaaaaaaaccttgcttttggaaacagagttcttagttctggtctgcaatatattttttttagtctgtcaaaactttcttgttctacatatgtggatttatttcctttgcccaaatattgttctcccgcaaaagttcctttgttgatgatgtttgaattgaatttcatcccattgtcaagaatctagctcccctgaattttcttataatttatgcgggggttgatggtaggtacaacctctcactctgtacttgaatgtttgttctgaataagcatcaacgactggtagagtaatgttcaagagtgttcatgagcatttttggggacagtcattaagaaaagtagatctaccaggcccctccattagttaacttaataatgtcttaggttgatttcacagactcacagctgtgagctgtatatcgtaagctctttgtcctctttcttcctatatcttgacatctcggtctcactgatctcagcttgacatatgttttactacacatgccactataattaaggtcccctttggcctttgcttactttgcaacatgtttaatctttcagcttgtatatgtaattagcagaaaattaaattcacccttaacataatttttatattttattataccatgtgttggattgaatctggattttgttgttgttcatctcttttgttcagccaagcaggaactggctctacaaactcaaccacaa

SEQ ID NO: 69558 - DNA, 784 bp, Prunus persica
  Intron number 1 from transcript ppa012983m (locus ppa01298 3m.g) derived from phytozome v7.0 (chr-ID scaffold_7; pos 13390736 to 13391519 reverse strand)
acgctaggttcaggaggatcgggtgtcgtgggtgagtctttcattacccatgtccttgtttgatcaaatttttctttgatcttgttgttttcatgcagtctgcaaatgggtttttactgattttgtggtttatgagtttttttatatatatgatatcacatgttggtaggtaagtttggcctttagttgaataaattattgcttttgaagctggtattttgtatatttttttcctgttcataatttgtgttattggaatcaaattgagctcatttctgattaatgttttacttgcatagtattacaagttggaaatgcaagattgcatttttggttgtctctatatagagtgcatttatgggggaataagtcaaagattgttttttcttttcttccagtgatttgtgtttcattacataaataccttcctgagccttatttgatgatggttcctgcttgttctttctcatcattgtttattaaccaatgtatgtttaattagaacttttttttcttctactgattctccattgaacggcgtactaaagagactgtttcaaatctgccaaccaagcatgatttggtctgtctacatgcaagtttctggttatgtttgtgtgtattcagaagactgtgaataaaataaatatataattcagaactatcgggggttgttgcttattttgtctgcaagattctattcatgttcccttatattgtcaagcatgcatgcatgagtttccttgcagtcccacgaaacttcagattgctggaggaacttgaa

SEQ ID NO: 69559 - DNA, 674 bp, Prunus persica
  Intron number 1 from transcript ppa007797m (locus ppa00779 7m.g) derived from phytozome v7.0 (chr-ID scaffold_2; pos 418766 to 419439 reverse strand)
aagggaaggccgcattgcttttaaagagggacagagtaagtcttttcgtcattatcttccgctagcttggttttcccaattttttggggcgaaatttgttttcttttttggttatcttgtttgtgtgtcttcattaaggctctaggatttaaatttcagaagttattgcatttttatcgaaacaagtatgcccaatgattcttgtattgttcttttacctttaattctttgttgttgaagactatcgatttatctagaaatgggattaatgggttttttctttcttatcacttcaaaaattgtgtcagaaaaacgcttcgttgaattctttaaggaaatatagtcacttacttatttgtaagttatgcttcttcagattctaaaaggattgattgagtaaagtaaggtcacgttattgtcttgaaaaagatactggttctacaaatataatacatacattcttcaagtttgatggtttttctgttgttagtataattctaaagattgaagaaacccctaaagttattttttgtaatttggttttagtttatttgtattcgtgcaatgtcctgttcttacattcttccaagatgtcagtagtgattcaaacgctcaattgtcttctgttcacaatgtcagacaaggtccaaaagattcttggaaattcagaaatt

SEQ ID NO: 69560 - DNA, 957 bp, Prunus persica
  Intron number 1 from transcript ppa005242m (locus ppa00524 2m.g) derived from phytozome v7.0 (chr-ID scaffold_1; pos 12895360 to 12896316 reverse strand)
gctcacattagtggccttgttgctgctcaggtatgtgccttttgtggtgtttgttggtgggatttgaatcttttgttttattggatttgctttgcgtgttgttagatctgatgggttttgcctagtttttatgttctatgaattgggtttgtgtagtttacttgatttggtttagcagatctggttttgacttccggttgtgatctatattcattcccatttgttcagaagatccactctaaatgttcttgtgatatttttgatgtacttctcaatgctttcattatgtatttgtgattctgtgtagatcttgatctttgaaactttgaaattctttttcttcttttttatttatagcttatagagtttcattgtatctttagtgcaagggcacagttatgttttttgctttgagaatttgatcctatcattattcacatgcaatgtcatgcaggttcggatcagcaattgagccatcactgagatgcaaataggaatggatgtagattataaaatgtgttcttgaggggatgaaaatggaaaactaattttcttttagttaattaaatatgaagtagatctgcactgcacgtttagttttggttttgcttgttttcaaaatttacggatatgctatggcagggctagtagtagtactggattatgacttgtgtcattttcttatatctgtttttcttttttctcatttttaataataaaataaaatctcataaatggttcaaaataagatctataggagggtaaatttcattttcaactctaaattgcattgaggttatttttgtgcttttcacctaaagggtgcagccttgtttggagtattaaattgctggcattgctgtcctcttaatagattgccttttcttactccgtttttcttttcctctttatttggatataggaagctgcaaatccctttgagtactgtgacattgt

SEQ ID NO: 69561 - DNA, 547 bp, Prunus persica
  Intron number 2 from transcript ppa000738m (locus ppa00073 8m.g) derived from phytozome v7.0 (chr-ID scaffold_1; pos 39797301 to 39797847)
tgaggatcttagagccaagggctgtaatttgctcggtatgtttctcccgaatttggctgattttcttgagtttgttgtgcttcggaaattctgtgtttgcttttcacttctgttaaacaggaactagggttttcgacccaaaaaaaaaaaaaaaacaggaactagggttccataattttgttgttgtttgtagcgaagtggcaaattgggtttttggcaatttgcttgataacataatgattatgagtaattaaaagaatgattaaaagcgatatagagggcaaatatcatgaaatgtttccatgttttttttatagtacaattttgtagtttagcagcctatagttggtattggcctgccaaagtgaacaattaagtcgaacctcaatagggtatcagttaaatcatgaaccatttgaacttactcacttaagaagttgtgattttgatggtatgaatggtcgaccactggaatttttaattcaatttcttccttgtgaagtgttgctcacttggatacgtgtttctgatgttgggcaggccctca

SEQ ID NO: 69562 - DNA, 780 bp, Prunus persica
  Intron number 4 from transcript ppa017279m (locus ppa01727 9m.g) derived from phytozome v7.0 (chr-ID scaffold_3; pos 8863672 to 8864451 reverse strand)
cagtggaccaacttgtagagattatcaaggtcaagcctcactatcgctgctgaactaagtggatcatgtaattgtgtaagcatacagtttaggtgtcttcttgcaggttctttgcactgcaactagactataaatttgatgcatggattccaaatcgtacagattttaggttccttcatattaaagctcgtccttggcataaggtatgcattttgattataacccttcaaataagttggttctcagggctgcttatagttatagagggcagactttatattcgcacatgggcacatgtacacgcgcatacttacatatgtgtctttgttctgtgtgcaaggaaaccttatgtgtacaaatttgggtggttttttccttttccttttatgtcctgaacacgtactgttcttgtccatgtccatacctgtaactataaaattattaactattaaaacacttagtggtatctgtgggattattttgtttttgccagtattcctatagtttatctgcaataatgctccttaattcaggtttgccacctgaagcagacaatgctccaactctgcaccgcagtgagttggacttttcttcccacggagctcttctgttgtttcgagataaaacccaagcaattatgccttgtcataaagattttagatgagttggctctatttggcaagtttcattttggtgctgagctgcttgagtttgatacttccacttcatgacatgcataatatccaaattctcactgatcgccccattacagctagaagc

SEQ ID NO: 69563 - DNA, 506 bp, Prunus persica
  Intron number 2 from transcript ppa010652m (locus ppa01065 2m.g) derived from phytozome v7.0 (chr-ID scaffold_5; pos 8617069 to 8617574)
tcgctttcaaggtgctcctcttttgtttttgtgtttgtgtgtttgtggtttcaaattcttctgcaaattgtagtaattacatcatagttttttttttttgcttatattctccatttggttgtttggaaaatgcgaggaaagaaaacgaaaaataaaaacaaaaggagaattgagaatgtggatattctatcatttgattttcttttttaggaacctgaaaagttactgcttccactcgattaacatgaattgttgttatctttttaatatttactgcatgctagtttgtaatggagtgatttacgaatgttgtaaatcagacagcattaaaagaaaaaaattcgaatatgacaattgttatgtttggtttgtttttcttccaaatatcagattgcaggtagaaatgaaacttatatttgtgaagtttgtagatttgctttggatgtttgatattgattcgattatgttcaggtcaaaactacgaatcccaagaagtattgtgttcg

SEQ ID NO: 69564 - DNA, 462 bp, Prunus persica
  Intron number 1 from transcript ppa006481m (locus ppa00648 1m.g) derived from phytozome v7.0 (chr-ID scaffold_2; pos 26700271 to 26700732)
ctgacgtccctcaccctcttcatcatcaggttcaggtactctctctctccccccccgcggctccccaatacacacaaactacgcatttcagcaatgcattcctaatagtaatccataacaattgcaccttgttcacttcttttctgcctatgcgtaagcgtatttatgtaaaacaatataaaccgttatttttttccaatttcaaactccaattaattattgctatcgttttcttaatttattctctcttttaaagaaagtcaacatataatttcaatttctttcagattcctatgctcttcccagtaaccaaacctatacacaaacaatttatgtagtgatttccatttaaaatttcgtatgagcccttaatttgggttcaaaatgctgatgtttcaaaattgttttttggaatctctgcaatggatcggtgaaattcaagagcaataaaagtttcgagca

SEQ ID NO: 69565 - DNA, 694 bp, Prunus persica
  Intron number 1 from transcript ppb020606m (locus ppb02060 6m.g) derived from phytozome v7.0 (chr-ID scaffold_3; pos 4727092 to 4727785 reverse strand)
taaaatacggaacgggaaaaataagaataaaatacgtacgtgttttattcagcaaaattttggcaagttacaactgaaaagttcggccactatataatattttaatatatattattttgattcaataatatgtgaaaattatgtgtataatacatgtatatgaagaatttacacgtgtatgtgaattttgtgtgtattattgaaaactttgtaaaaaaaaatgtgtatatgaaaaatatatacgtatgtctatgtgtacaatatgtgtactgtatgtttgcttttttgcacaatgtgtattttacccagtctctaagacatgtatgaaaaacataggtgttattgaaaaatacgtatgtacgtctataatacgagtattaaatggcaagatgttaaattctttatacgggtaaagtaaaaactcaaaaggggataatagagactcgggtaatgtagtaatagtaatagataatgctataaactaatcttatcgacaaaagaaaattagggaaatttttttgaaaaaaaggacctagtatagccgaatggctgtactatttattaaaaaaatttaaaacagtgtctcggccgaacggctgtactattcattttttaaaaaaatttaaaaaccacgttaattatatgcctcaatgactctttttgctttttctctttttatttctttgttgtaggc

SEQ ID NO: 69566 - DNA, 961 bp, Prunus persica
  Intron number 1 from transcript ppa013034m (locus ppa01303 4m.g) derived from phytozome v7.0 (chr-ID scaffold_1; pos 2755763 to 2756723 reverse strand)
gctttcagaggagtaagtttcaccttttacttgttcagatctatttgtatatattttttctctctcttctgggtttatagatttgtgtttctgtttttttggtgcttttaaagttctgattactgggttttggtttgcttttggcagcagataaacgcatgggcttgatttttaactgcaaactcattttctcttttgttttctgtagaaatttgagatttttttggtcaattatcgatctacttgcacttattaatgtcgttagttagtaatctgcttgttgcaaaccttttctctcctgggttgttcatacttcactttaatttatcaagaagaaatttaagaatttttttgggtgctaaaagtccagtttattttttttcgtacactggatatataatggtggctgtaacttctgttcttatttttgtcgtagcaattcattttcttgcacaaatttgatggctttattagaatttatataaaggcagtatctggtttgaggcttcttgtttgtggatgtgggtgtccgaatctgacaaagatgtgattcctttcattgcatgttatggagacttggggcttggactttgaattggattatcattgaagttttttttatttgggtttggtggctttggagtgatcatgggttttgttctgttggctccaaataataaatatgaaattcaatatccacagttggaattacaaattcaaatgttgttatgggccatcaatgtccgtgtaattccaaatggtaactttcaagtttgggcaggattaagcatatgtttgatttaatcctgtatagcgtcctggtgtttgttcttcttggacgggtttgtttaatgatatcttgaagtgaaattctgattttattatgctctgcaaaaaatgacaactggtagttaatgctgtttggagcaagtatttaacactgggttttcatttcagggaa

SEQ ID NO: 69567 - DNA, 734 bp, Prunus persica
  Intron number 1 from transcript ppa013607m (locus ppa01360 7m.g) derived from phytozome v7.0 (chr-ID scaffold_4; pos 12765249 to 12765982)
aatcgcctattccataaccctaactatcggatcaggtaattgggtcttgaattcccgcgattcctctttgtctctgttttagggtttttatggttttatttctgctctgaattttagggattttgtatataaattggagatcgtttcttagttttgtttgaatggaagtattaggaagcgaagatgttctgagagagtagacaaagttttattatttagatgatttacttctaagtcttcacaatctgatctgaaaaaagataaaagataacttttttcgttgggagctctgttttttctctaatacttgaaaaaaaaaatcattaaaaaaaaatatttgattaatatgaaaccaaaattttggtgctttgtcattcgaaccctctttttgttttttttgtttttcttttgttttcaatttttacttttaactaggttctgtttcttatcaatagggaagtcagaaatttagggaccaaagaaactgtgattttataaaattatatgtcttctgtattgcaattgcattcgatttagagtctgtttactcccttatgatgacaaagttgacaaaagtagatgggttataaatttttggattatgttatctgtgctttcttatgttgttaccagctttattcttgggttatcttggtcagataaaatggtgatttagattttctttttgatgtgatccaggtctgagcattctggttagcaggccctcttaggtt

SEQ ID NO: 69568 - DNA, 1047 bp, Prunus persica
  Intron number 2 from transcript ppa013607m (locus ppa01360 7m.g) derived from phytozome v7.0 (chr-ID scaffold_4; pos 12766000 to 12767046)
gtctgagctcgacgtacagattcctaccgcctttggtatgttcagtgttattcataactcattgtgtttatgcgcttgcagacatgcttgtaactctatatatgaattcttttggatatgttgtttgatagctctggggcattatattggttgacaacttggatacccaaatgcttaagggatcattttagacactaacatgtaagactactgcaatttagaaggactgttgtttgagcaattggtttttattgtatatcaaccgagtgtgtcaactagtactcttcagaaatctgaccaactgatcaacccaaagaaacctaaatggttaggttttcccgccaattttatgaatctgaagtcattggttcaggtgttgggattatgtactataaaatctgattaaaccaaccttgaccaatgtgtatgtgtggtgaaatgaaatatataaggttgggcatggggttctttgaacattacgcatgcactctcgctgccacttcattattagtctgttactcatttttattggtatacatttgaagcacagaataaaaatcttgttgaacatttcccacattgtctaggatagattttattatttttccttgaacttatgaaaaaagcggtggtaggctacccccttctaaatcagtggcctttacttcaaggtacataggtttgattctggatagctgaataccaaataagtaaacatcgagtgggaaaggattccatttttagaatctaaagcaaggagaacaaataaaaaaattcaccaaaaaataggataactttattttttctactggagaaaaatggcaccaatgagtcatttaaaaagaattatgcacttctacaatgcaaaccccttctgtttttagcccctcttaagttctcttgattgttgcacgaggtattatgtgtttgtagacttggatatcacccctccttagcttccttgtctctctcatcctttcttttgactcccttcattaatctaatttgaatactgatgcttgggttcagatccctttgctgaggcaa

SEQ ID NO: 69569 - DNA, 823 bp, Prunus persica
  Intron number 1 from transcript ppa007060m (locus ppa00706 0m.g) derived from phytozome v7.0 (chr-ID scaffold_6; pos 20859485 to 20860307)
ctgctttgctcccaaaaatccatcttttcaaaagggtaagtggtatttttgtttttgtttttgtttttccttttgttcttccgagaattgaattgaatgactggaaagaaatgggtttatgggttattgggttgtgatcttcttgagctcaaaagaaaagaacttgatgataataggtaggttgttttgaaatttttgaatccaaaaagaggaaaatttgatgttcactattgtattaatgaaagtgagatagaggttatgaatggtggtggcttcaatatttttgtccacttgcataattaaacttttgttggctctatcagatccaagaattggcaagttgaattgtctcttcttgggcacttgaatattgttgttgattgtttgattggttctttgcggccggcatgtcttttctgggagacatccaaaaggtcctgaactttccattgtatatgggagagatcttattgtgctgttggatctatttgtattgtgtttacttttttactttttagcaaaagatgatctggttcttatatgcttagtttcgtgggttatgtattacgttagaacctcaaaaccttgctctcctccttgaaaacaatgccttaactgactaatctcagaaacaggccatttctgatggtaattctctaatacaaaattgatagatactctcaccaaaaggggaaaaaaagataccacctctgtaaaatattttataaatatgcaattaattgtgcatattgaatccttttgatctgagatatatctcttaaactggttatcatacttctgcagatccggagcttagacacta

SEQ ID NO: 69570 - DNA, 870 bp, Prunus persica
  Intron number 1 from transcript ppa005466m (locus ppa00546 6m.g) derived from phytozome v7.0 (chr-ID scaffold_1; pos 44682376 to 44683245)
cggaggcagcccgggtgaggcttctagtttgattgggtctgtttgctgttggagaaaatgaatgagcataattgtcacagttgttagtggtctttttttgttgttggtaatttgtaaattttgggaaaatatgaaagaatttaaacggatgtattgggttttagttgtggattcaagttggggcattgcttggtgtctgtgaaaccgactaggacaagacagaatagaaatagaaaacaaaagtgagattgtgttttaatctgtaactggggactttgtaagctagagattttcttataatgttattggagagaagcttgttttggttttggtggttctttttagttaggttaactcgtagaaggtcaatggacatatgttttactggcaaataactcatcagctgatgagtattctgttgcataggattgtctgaactttttattcttaattggattaataattgcatggcctgtgaaataatggtgaaacatatgacacatacgcaccataaaaagttcccttcgttgagatgtacataaattttgttatgaattggggagtttgtttcttttatgcagtcaacagcccctggtggcctgccactacctgtgatgaataggatttagtgggttggtgtcaattttaaatcttctgtctttatttgtgcttctcaattcccaagggaagaaaagaaggaaaaacaaagcaaaaaagcattccttttctgcatgtagcattgtttttcatactgtttgtgagatttgaaaagtactagtttgaattggcaggttctgttattttagttatgctatttgtgttaatctaatcatccatgaggcaggtgggaggcaaatagttgtggctatc

SEQ ID NO: 69571 - DNA, 925 bp, Prunus persica
  Intron number 1 from transcript ppa017852m (locus ppa01785 2m.g) derived from phytozome v7.0 (chr-ID scaffold_2; pos 23231294 to 23232218 reverse strand)
gaatcgggtatgttttcttaaacaaaacttctctaggttactcgtgttttcctttccttaattttgtaaatttgtttgtttgcaagttgttgtcatgctatatttagtattgtaaatatgcgagccttttatattgtatcttgctattgcaaaaatttctagacaattcatgtgtcctactcctataaattgatgaatatttggtgaaataaaacaaaaaattatatcctaaattaaggaaaataaggaaaaagagaaaagcatgactctaatctaatactcagttgagttgaatttttggctacacatgttatataatcctatcatacaatatacgtggggaatcctttcgtttttgtcaactagtgaatgacacacccattttttttaggacttttcataatcaaactcatgaacttgtctgggagagcaattactccaaactagtacactaatagatcctttgcatgaaagacacgccctaaaacaccctaagcggccaccttaattagttttatttcaatcagtttttaggatgttgtttatttatatatattgttttatatcactgtgtgtgtaaggttacatccttctagatttgtctttagattttttgttctccatttgcttctgtaatttgattgtttttttagttgtaacatgcctatcttctaataaaagaaaaacaggaattaatgcaccttttagtttgaaattcttttttactggttttcttttttaatttatatctttgtatcgttccatcaatttttactttctatgtttcaaatcatacggttatttttataaagctatggccaagattaattacacatctgcttcttcttcatcgcatctctaattgatttttttttcttttttatttttagattgggaaagtttgcctgaggagcttttagattta

SEQ ID NO: 69572 - DNA, 905 bp, Prunus persica
  Intron number 1 from transcript ppa011303m (locus ppa01130 3m.g) derived from phytozome v7.0 (chr-ID scaffold_7; pos 18556790 to 18557694 reverse strand)
atctgcccaacaacagcaacaccaccaggtgagcttaatttatggcagatatagaaaatcagggctgttgggtttttctccatttgaatgaaaaagctttgcttacatgtgtgtgtgaaaagggtctctctctctctgtctctctgtctctctgtttgactaacttttgggtttaagagaatttgtctctgaggtttgtcaaactaatggaaaaaggtgtattattgtaaattgggattttattgcataagacaaaaaatttagcttcactagttttatctgcttctaaacatggtcaatttagctttgtgagcccacagtgcaaagcactatcatctttgttttcccactggtcttccaatgctcttcagtttgttgggtagcaaaatcctgctaaagttatgtgcttggttatggtttagttgagatctgatttgttggtttagcagcaagttggaactgttgtgctttctattttcgaaggcagaatacatagcagatgagttaataagtattgattttttcacttttcaaagcaactgtgtgaaacattgtgcggcttcttgagtaaccacaccaatttgttacaactagacatggtttgctcttcagagatggaaaaatcaaaacttctagtttgtgcttcatagacatgataatacctccttttcattttctttttctttaagttttaatcttggtttcatgtctgtttctccaaagctaccttttttatcctctaccactccatctcatcttggagaagatttccaccttagctaaaattgatttggaggatagaggtgatgggggtgtggagaggagctttccgggttaagctagatcatgccaggctgacatgaaatttggtttgttgttctttatgtttgagtgccagaaagatc

SEQ ID NO: 69573 - DNA, 565 bp, Prunus persica
  Intron number 2 from transcript ppa000569m (locus ppa00056 9m.g) derived from phytozome v7.0 (chr-ID scaffold_3; pos 21127664 to 21128228 reverse strand)
ttgtccactccattcacagggtctctctctcattattttcttccaattgcatacgaatatgacatctttgatcttttaatgcatcatattacatattctgaatattgccttaagaggtagcgttatcaagaattaaatgacacagaaatatgacatgcgcttctctatgttggatttccggtggaacaacattcaacagaaagtgttttataatgtaattatctatatttaagttccacgtttcagatagtccaaatgcttgttttcatcctctacatggtccaatcccgtccaattatgaggggtcacagaaactgtcaactttaaccaaataacaacaattggtgttgtatgctttggtaaaagaaaagggctttactgcgcatgaccatgttgtcaatttttctcccctcttggcactgcccagtctttgttttcttgatgacgtttaggcttgtggtttattcagttttctagaggaatgtttcttttcacaaatttttagtttgtaaaatgttcaacctgcaacctcatgtgcagattttggatcaatataaagaatctt

SEQ ID NO: 69574 - DNA, 758 bp, Prunus persica
  Intron number 1 from transcript ppa000222m (locus ppa00022 2m.g) derived from phytozome v7.0 (chr-ID scaffold_5; pos 5241261 to 5242018)
ctgtaaagttgtgagtacatactttttaatttgatattatgcttatactttctttagggagtgggtgatgtacaaaccggttcagacgcttggtgcctttttttcctcagtgggaaaagaaagttatgaaaaataacacaatggcaaaaggaggacaatagttgacctaggaaagagaaaccaagaggcataaaacaaagccacactcaataaaaaaatccagcccaatcaaggtgaattatagtaaggggaacatcataaagtgcttagaaaaagaccataagtatgaccacacctcttccacctctgccttcaaaagttgttctgttcccttacatccaaatcaccaaatttgaaaactcctcagccccataataccttagccctcttcccacctccaaagcccacatacctttcactcaacaggttgaacacagctgaaaatgctaatgtattggaattcatatagagctacattaatactgaagaaattgtttgtcatatttatcatacacttcaccttcagtttaaagttatatcagtttccaaatcaatgagcagttcatcagtaccttatgggattaacattctttcttcttatggtaaggaatcttgcattttttttccttgagaaagttgggggataaataattgaaacttttatgcatttaattactttgaagattgtattcaaactaaaagaacttctctgagtttcttcaattacttgcattttgtcctgtgacataggaagggat

SEQ ID NO: 69575 - DNA, 947 bp, Prunus persica
  Intron number 4 from transcript ppa009468m (locus ppa00946 8m.g) derived from phytozome v7.0 (chr-ID scaffold_1; pos 41483981 to 41484927 reverse strand)
aaatcaaggtccagaagccgcagccctcgtccaaggtgatatgttttctttgctagaattgcataattagttgtattctgatcctaagtagaatttgggttaagcgatgtcaaactttgtggtctaatgtagggttgctagtccttttgcaatactgtatatccaattgcagtttccttcttaataatttgtgagttggtgctcagagcccactgtgctttagtagatctaggcatttaattttagcagctgatggttctcattttccattgatgtggacacagcacgtgcagttcaaggggcattcttttgtagcatagggtctctttgtacttatcaaaattttctttttatttattaatctttatctaagattgttgtttttcatcttcctacatattttctattttttttcaagggtcttacaccctacatcatttttctttctctgtttgttttttccgaggggtgcggagtgttttggtgcatgaatactgtttttaaattttatcatttggttcctagcataattccagaggacccatggcctctttaacagggctcaggtcggctcaaccatctgaaattcgaaacacctcttatttcgatcccaaacacagttcgtttcatgtgttgaatagtaggatcaggtctttactactcctttatgctgtatgatgctatgggttgaagatgttgtgtttaagtgatttgattattgcaatggcacagtccacttaggtttctattctcagtgaactaaatttacctgggtttgaggtgtttatttgtagctgatacaactaaatatacttgtaactaattttgtgcttttgaaaaggtgtactactaacatggcctttttgaactgttaccgatttattttccagagtctattgtggaaattagtctgcagcaactgaccctatagattttcagatatcgag

SEQ ID NO: 69576 - DNA, 529 bp, Prunus persica
  Intron number 2 from transcript ppa013091m (locus ppa01309 1m.g) derived from phytozome v7.0 (chr-ID scaffold_6; pos 28066229 to 28066757 reverse strand)
tacttcgaaggtaatttattgtgtttatgttagataaagatttttttttctgttgatatgaacttgtttagaagaaacaaaagtgtttgattggttatgcgttgaattgaattgaatgctttaattgatgtggaagtaattggtgtgtcctgttaaatagttaagctggtttggtatgtttattttgtaatatccaggttatcgtgcatcaccatagtttttcttgatattgtttgtgcactggttgtgagcgattgtgctgttggaatttaaattgttgtttaggatggttgctctgaatgatcatatacttttctgtttgtgtttgtatgattataccaatggagctgaccattttgttttggactttgtagagagtttaaaattaagattttagacagatacattgcagttggagtttgacttatctcaaaaattgaagtattttgtagtttaagatctgctcttacgatataagtcattctgctcctcaaggtttctgaccgtgattgttcttgtgatgcagata

SEQ ID NO: 69577 - DNA, 901 bp, Prunus persica
  Intron number 1 from transcript ppa023819m (locus ppa02381 9m.g) derived from phytozome v7.0 (chr-ID scaffold_1; pos 44578649 to 44579549)
gcagcggatttgtgtgccggggttctcgaagacaggtaatcagtgatttccttggaagctgcggatttactatatgcatatattaatactagttactagttcagtaacgatgaaagctactttgataggatttatgtgtatagttttagtacacatttatctttatgtttagaaacttatatgcagatctcgtcaaaatatgagttcttttggtaattaccaaatttggtaaaaaaaattttagtgattcataaaaattgggtggatttgggtactttacaaaaccaaatacactttgagtgatacttttaagtttgaaaacatgaggaagaaaaaattgtctcggaaatcggtcaattcggcaaaatcggaatcatgatgatatgtttgtgtatatgttctataggtaataatttgatgtactatatgtaaatatactttaaactaagaatcaactttatagtgatctagattcataaaattttaaattatttggtgattaagactttatggttgaaaaacattgttgggaatatatattttagcgttagttgagttagggcttttcttttttcttttttaattattagtaaattgagtttttcttttaaagatgatgtgtcaaactttaatttcttaaattaaattttaatgaagtggagtgtggaaaacaaaagtcaagcagataatggcagagaaaatcaaaatagaggatccgaatcctatccttgcaccctagttcgaattctatctccgtaatttagaatatcgcttgtataagaatactaatatgataattgggacctaacataaatgcaaataaatagaaagttgacatttagaaatctaatgtttcatcataacgagtcttttgttttgcttcataattcaattttcagga

SEQ ID NO: 69578 - DNA, 335 bp, Prunus persica
  Intron number 2 from transcript ppa010698m (locus ppa01069 8m.g) derived from phytozome v7.0 (chr-ID scaffold_1; pos 1935032 to 1935366)
ggtaagtttgaaaatatattattcaatcaaattaactcttcgacaacaaacccaaaacacaaaaaattaattacttagcaaaacatgtacagaaaaagaaataatttaaaaagaaataatacatgtttaatttcctcctttagaaactgtagaattaccttgatttggatcttgagtagcaattgtttttttttttttagtggacatgatgaaatcgtttgttggtacatgatcattacaacctatagcttgttaattgtcacttcattattattattttattaactctttaattaattaattatcatattgggattgaatatttgcaggttact

SEQ ID NO: 69579 - DNA, 925 bp, Prunus persica
  Intron number 2 from transcript ppb023005m (locus ppb02300 5m.g) derived from phytozome v7.0 (chr-ID scaffold_4; pos 8667213 to 8668137 reverse strand)
tataaccactactacaaaaaagcaaaaagacgacggtaaatcaccgtcgtgtattcggtttttcaatggtcgtggaatccaccgtcatcttttccctcataaaccacgacgctaaatcaccgtcgttgttaaaatatacaacgtcatcaaaaaatacaaaacgacgtctttgtactgcaaaaagatctaaaaaagcagtcgaggatgagaatagacgaccaactctctaataaaaccgtcgttaaaaaggaaaaatatgacacatattaagagaacaaggccgcaagatagacatacaacgacgaaaataataatacgacgccgttaaatatcattttcacgacaataaaaaatttgacgtctttaaatacattagaagacgacgttattgatacctactacgtcgcatatataaaaacagcagtcgtaaaattaattttccacttcgatttttcgataaaagatgacgtgaaaatagttgtcagtgtcattatttacgacgtatgtatttatatattaaacgttgaaaaacgaaacaacgtcggttacaaatatatgagagtcgtattacaaaatttatacgtcatattttcagaaacaaacaacgacggaaaacaataaaaacaaacgtgtttagtctgctaaagttctagaaaatagtcgaggatgagaatagacgaccaactcaaacaaatcaccgtcgttaaaaaggaaaaatatgacacatgttaaaagaacaaggccgcaagatatacatacaacgacgacaactaaaatactacgccgttaaatataatttacacgacaagaaaaaatatgacgtctttaaatacatgagaagacgacgttattgaaatatactacgtttcttatttacaaacaaccgtcgtgaaataaattttccacttcgatttttctaaaaaag

SEQ ID NO: 69580 - DNA, 433 bp, Prunus persica; identical to SEQ ID NO: 69438
  Intron number 2 from transcript ppa002823m (locus ppa00283 1m.g) derived from phytozome v7.0 (chr-ID scaffold_2; pos 25554150 to 25554582)

SEQ ID NO: 69581 - DNA, 858 bp, Prunus persica
  Intron number 1 from transcript ppa011361m (locus ppa01136 1m.g) derived from phytozome v7.0 (chr-ID scaffold_7; pos 19081093 to 19081950)
aagtgcaaggtttaagggtcggcctcaatttggaggtatatgcatatattatattttcttcacggtttttaacggttatattatgtgcccagttcaaatggtttgaaattttcgataagccaatgctcaattctctgtttgctatgtttaaggagtatttactttgctgggttactctccatgctggccaccagatgtcctgtttttgtgaagactggtgtttgaataaagtttggtttggagaaagttttattttttatgatgtgtatgttttgaatttgcaaactttaaacaacccatgagaatgatgctattcaacaggggagcagacacagggttaagtggaagacaattgtggtggtgtaggatagtaaaactgtgtaaacacatgctacctttctggtgccttatatacaattctggtgtttgatgcatatgttgggatacacatcccgggttaatcatatatgtttaaaggagggtgctttacacattttgaagtgtcatgatatgacaaaagaaaaatattatatctagatggtatgattgtgtctttttgttgcttgtggattggtttttgtgtcctagtttgcaggttcttcttttcttttcttctctttttctcctgatgtttaaatactggatttctatgtgcttcataacgagtaactgcaacatactttataaaatcttaaaactttcatttaccaataaaaatgtcctgcagttattgtgtatacattttttttaaaaaaaatataagctgctatgcatagaatcttagctagaaatattaactcatattgagtgcttctgaaaactgattcattgaggtcattattttggttcagttctata

SEQ ID NO: 69582 - DNA, 916 bp, Prunus persica
  Intron number 1 from transcript ppa000508m (locus ppa00050 8m.g) derived from phytozome v7.0 (chr-ID scaffold_2; pos 2104723 to 2105638)
attcaattgaaggtgaggaactaaacccatttcaatttcggtctcgtatttggattaagagtgttttcatgttgctggaagttttgctttgtttcacgttgtcttgttaaattttggttaatggagttttttgttgctggaattttgtaaatgtttgggatataactgttaggtctgtttgattcagaatcacattcaatcttcagatgaagagttctatgaagtgggtttatgatcgtgaattaggggatttcatgtgataaaaataatatgaagtactcatgtagtgctagtatattataaatgtatttagctattttctttattataatttcaggttctatatgcaatatttattggaaatgatttagcaatgtcatttagatgtttcgactttgcaaattatacaaacacacattgagtataaataataattatgtataagcaagctcatcgattggcctgacacattttgaatttttgttggagttttgttgcattggtttttggtaaaaatgcattttctcaaatatgaagagtgaatagggaaacatggtatgcagttgtgaatatgtgtagaatctgacattgttcagaaactgcatcatggtatggtatatgagcttgagcttgacgttgcatcttgccatcaagatgagcttttggtataggaacatgggacaggaatcttgtacctattcccaatccttgaaatcacgaaacatggtctacgttataggcacatagagggattctaattggtataatggtttgggtccatgatgcggaacccccccctctctaagttctgtgtgttattttatcttatcattggcttggaatcttacttcttttctatttcttttagaagatatctgacgttcgttatgtggtgtaggatctcttaaatacttgt

SEQ ID NO: 69583 - DNA, 331 bp, Prunus persica
  Intron number 2 from transcript ppa008644m (locus ppa00864 4m.g) derived from phytozome v7.0 (chr-ID scaffold_7; pos 11281380 to 11281710)
ctggtggttacaggtacgttggtttctttacatctcttttcttttctgaaagctgctttgattatctgctttcccttttctttctttttttcgtttaaaataaaattgctgatcaagctactgcctagctaatttctcagccaaatcaatatcattttgactgatatttctcagctactgatctagctaattttattttgatctcagttttaatggttaaactgaatggttgaattttgttatgtttactgaaatgaaattagccttattttcaagagagacataaaaaactgtaatttgtgttgcaggaggctgtcattttacccaaatt

SEQ ID NO: 69584 - DNA, 587 bp, Prunus persica
  Intron number 2 from transcript ppb012753m (locus ppb01275 3m.g) derived from phytozome v7.0 (chr-ID scaffold_8; pos 810433 to 811019 reverse strand)
cgagtaagctcaatttctctttgagaaagacatccaaattattgtctttgagatgtgagagacagtgtctctgagagaggaagaacttggaaccctaaatgtaaaccgaaaatgaatgaaagtgacaaatttatagaataaatttttaaaaccaacggcggtccttacaaaaaaaccgccgtttaaattgtaaaatcaacgtcggtatgaccgacatatattacataaatccacgtcggtacattaataaaaacgacgtgttaaataatctaccatgacgcaagttattacttatgtactttaatttttgagtttactacgacggtacctacaacactattgtcgtatttatttaccacgtccgaagttaaatgtaccgtcgtattttgtaatttatacgtcgtagttatacgtaaccgccgtattatttttttgaaatggttttatatgtaagcaacttttcgtctacctgacttacacatgcactgtttccaaacccgattaaaaatttcaatctcccaaagaaaactttttgtcttttttccttatcagagcactgtcatagtatctcatcgtcttcctctcgt

SEQ ID NO: 69585 - DNA, 589 bp, Prunus persica
  Intron number 2 from transcript ppa015595m (locus ppa01559 5m.g) derived from phytozome v7.0 (chr-ID scaffold_4; pos 16296308 to 16296896 reverse strand)
ttgatcgaaaggttgcagagaaggcaatattattcgtaagtctcactgactctattctaaacttgtaaaacagaggttttatttttcattcagatgtcgatagttttagtaaccgtcgttagacatgaaaacccacggcggtgtttatttatcgctttttaaaaaagatataacgtcagtatttttatgaaatcgacgtctgtattgaattacaacgacggttttgtatttctgtgttaggtttttaaattaaattttgaactttcttcatattcacatgcacacacactctctctccctctctatttctctgcaatttgtttgtacactatttctggatcaatgaatattttggttaaatgtttttatctctaatgtcaaaacagtggtagttttgggccgacgttttaatgtatacaaaacgacggtagttttgggccgatgtattaaataattttttgggtctgttttttaaataaaccgtcgtcttaacctctttacaacgtcggttaatatttttctttattttatttatttaattagttttactatctattcagtcactaacattctctccctcacttttagg

SEQ ID NO: 69586 - DNA, 904 bp, Prunus persica
  Intron number 3 from transcript ppa008413m (locus ppa00841 3m.g) derived from phytozome v7.0 (chr-ID scaffold_6; pos 2432134 to 2433037)
ccaaaaggatctcccaatcactatttacgaaagtggtatgtcagctgcattgttatcttactatgtatatgagcttttgtgagcattgccaattagttgtacacctaggattttccccattttttgaattacctatgatatctagtgtcactgtgtcattatctctagctgatgtgtgagtttgcacgtgttatcttcctgcagtatacatgcagttcattcttgttcctatatactagcatggatcacttatttctgtttacactggttggttgttgtttgtttgaggtactgtattggaatcatccattttttgtgctgcctaagcagcaatgcttgagaaactttggcaaactaaaatgctatagtgccagtgccatttctttctagatactctttaagataaggttgcccattaaacttcgttgttgttcaggcttggtcgttttgtaataagtaggctgttctttgcgtcttggcatgtttagaatttccataaataaataaaaaccctcacattgatgatgtgctgctacaattttatcaattttgggctctcctttctcaatgttatataggatttttttttttcttcatttgttgtataactaatagttcttttaattctcattagttctgttaaagtcatggtcccaagtgaaatccatgtgctgaattttgtgattttttttactagtataattcgttagggtctctccccttttgtaaatgaagggtcttggaagttctttttcttttctccccccaaatattctagatttcattcttatgagaacttatgtgatttgaacagattgcttgcttcatatagtttctgtttatatgttcactgtcttaacttttttttggttttgtggtgttaacgttacaattctagagctgc

SEQ ID NO: 69587 - DNA, 504 bp, Prunus persica
  Intron number 2 from transcript ppa011597m (locus ppa01159 7m.g) derived from phytozome v7.0 (chr-ID scaffold_7; pos 7657872 to 7658375 reverse strand)
acaaggctcgtcttttgggttacaaggccaagcaggtaatgatatataatttcatggatcgcatcctatacgcaactcattgttgaaattaggtttatctaacttcatgactaaggttgacttgtattgtatatgcctatctgatgcatatctagaggggtctataattttcatgcattgcttaatgatacataattagatattattgtttcagtgagcctgcacatttccttttgtgtgttgttcattttgatgctttctaagactagctgtactaaaccgaacaattttcatctacctagggagatctctcgatgactcttgcttttatcctgatcggataaagtgcattatttcagtctggatatgatattttgtttcttttacgtgtaccttttgttccccagccatgtttaagttcagtaggttatgatcttctagctgattgttctagtaaaatgtgtttcagggttacgttgtttatcgtgtccgtgtaaagcgtgg

SEQ ID NO: 69588 - DNA, 722 bp, Prunus persica
  Intron number 1 from transcript ppa007756m (locus ppa00775 6m.g) derived from phytozome v7.0 (chr-ID scaffold_3; pos 18646421 to 18647142 reverse strand)
actgcttcgtaagtccgctgtttcctctgtttttcccatcttggctttgttttgtttttatttattctttttgggtttttaaagtctagatcttcttgttatttgatcttctgtttcatggttttgcgtgaaatttcgatgatttcattcatttggtacgttctgtctcctttatttttattttaatgcctctaatgtcgcaatgtttgaatgcatgtatgtgtgtttgatgcctagactggatcatgtgtagacctcaaatctaattaatagtttttcagtagtaagaatgtatatttggattgaacaatgtctgcaattccaaataaaactggattgactgagaccaatggtaccattccattccagggatgcaaaagccacagcctttttttaataagttttctacatttagcttgttttaacttctctattggaatagaagaaagaatgacattaccagatttgtttctttttgggtgcgagataagatatagttttggtgtttgttttatctgcaacttgcttctgtcctttcctctctcagggcatgcatctgcttggcatattttctcttttcttttctattttattttattatttgatgttataaaaatggtggagtcttaattgtagtttattagcgtctaatttaactgctcatggtttttttttttatgtgtatgctcaggttgcacaagacccagctggcaaacccgtca

SEQ ID NO: 69589 - DNA, 1006 bp, Prunus persica
  Intron number 1 from transcript ppa009731m (locus ppa00973 1m.g) derived from phytozome v7.0 (chr-ID scaffold_2; pos 23501995 to 23503000)
atctgggtcagtctcttccccatcttatatgtcaagcattcacattttgtagccatttttttgtaatttcattgtgcttttataagaatcagtttgtttatggatggttctgtgttttgttttcattttattttcatttcttgtgatggagttgtcatatgaattcaaagagtcttgctttaagtggacagtgttgtgggtctctctctttttttctgattagttggtttttttgttgttaaaaagattagttttttggtttgctaaatgcagtttattaacaacccatttgaaatctatgttactgtattttaatttttgttcctttatgtgctataatgaccagaacgaaaagttgtttgtagtgcttcctttcacatatttctagagtgggcgtgtatgatcccgatgacccagttgcacacttttgatcttttacttacttaaatggagtactagtgctttgagatagttactgattaacttttcattgcacctttttctttaagaaattcttgcctaatttaaaattcccttatggaagtgggtgccagagaaaagtttgcattgccgctgcagaaactgattttccttttctttccctcttttttggcataaaaaactgtttttcttttggggataagttcatcactttgctaggaccttgactattttagctagttatgatcacatcatgctcatatgtgtatgcatgttactacgatattaagcagcaaggaatgccattttgctgaggttgttgaggattcggatttccctttttatcaatcaatacggaaccggaaccttatgttgcattttcttgttctgaattcagaataactaggacaatggtaataggtcaagtttaagcgaacgggcttcgcttttcgacatgttaaagaaacaaacaaatcccattccacttaccagtagaaagagtagtaccatgtaattcattctggttacttcaactaatatgattgttcctgtccaatgttcaggc

SEQ ID NO: 69590 - DNA, 424 bp, Prunus persica
  Intron number 1 from transcript ppa000581m (locus ppa00058 1m.g) derived from phytozome v7.0 (chr-ID scaffold_3; pos 485805 to 486228 reverse strand)
gagggtacgtttgttatcaaatacgacattccaattcaaacacattacaatgcctgcaatggctatgcctatgccaatgcgcaatgtcctttgtttttgtttttgaattcttttttttgggattcaaattctttcacattaattaattcttggcaatgccgtagaatttgtagctataacaatagctagcattgtgtttggctgatttcaaagaggaaatgaatcggcattgttggtttggtattggaatttggattgggattcaaatcaaatcaaatttgttctgtttttctttttcaattctggaaattactgtcaaatgctatgaatttaatgaggaatgacgaggtttggaaatgggatattactattgtttattacatttcctaatcattttcttggcagcaagcggcactcgtgctaa

SEQ ID NO: 69591 - DNA, 749 bp, Prunus persica
  Intron number 1 from transcript ppa014698m (locus ppa01469 8m.g) derived from phytozome v7.0 (chr-ID scaffold_2; pos 10817343 to 10818091)
caactctgtacgaaaactggatcgaatgtcaacttttaactggacacacttgaataataatcatgtgtagcatgattattgctcacgtcagtgtataaaaatcaatgttggttttgacttctttgtagtttcaagtggtgttggttttctttgtagtttgaaaagaggttgacctgagtactcattttctaatgattttgaatcctcacatcggcttatgtgtgaatgtttgaatgctcacgtcagcatatgtatgtatatatacatgtattcatctgtgaataaaatttttgaatatgaaaattctcataattatcctagaaactgagactccatccattctcaactgagacttctataagaaattgtcgtctgcagaaagagtaaaatggacttcagattctcatcaactcttcaagggaagtgatcaaaggaagaataaataaggaagttagacacctataatttatgagtaggttttgctccaatggagaacaaaggccaagttcctttttttttttttttttcctttttctggggtcagagtccaagttctttctagagagtgaaaggggcagatgtgagagtgagggttggtggggtcagggataatttattttctgtatttgaattggggcagcatatttgagcagtgtttaaatatatatatatatatatatatttttatttttttatttttcttcttaaattcaggccttgggcagtgtttaccgttagttggtgaccag

SEQ ID NO: 69592 - DNA, 898 bp, Prunus persica
  Intron number 1 from transcript ppa000988m (locus ppa00098 8m.g) derived from phytozome v7.0 (chr-ID scaffold_4; pos 2081105 to 2082002)
gagaacaaggtatagcacaacaacattgaattaaactgctcccagaagaaaatgaaaactcaagaatgaaaaaagaagaagaagatataagcaaaagtaatcgaaacccagattcaaattgaaccttctttctaagaaaatattcagattagaatgaaccctatcccttttccttcataatgttattacagaactctgaacaatttcacaggggacccatgtgtaatttactgtaaattttgaaactttctttgaacccagtcaattttgccccaaattacatgagctgtctgaactttaactggttctgcatgttgttgaaactgttttgaactgaagttgtggacttatttcatagaactgaagttgaactttattcctcaacttactgagttatgtactatgacagaagtctttgatgctaagaatatactataggtttttttttgggtgacaatttcttattgatcttactgtacatgtggttgctggattctcttccatggagagatgatgattgcatgaattatcttttacaagaatggataatgttgatttgctgcaggtggatgttttgagaaagaactccagaattctgcaggacaagttttcagttctgttatctgttggaatgcagtttagagcgtttatgaaatggaagcatgcaattgctctcttgttctgttgatcatttaaatttttttgcgttaatgttaattggtttgtaatcgttttggtgttttagaatgtcaattttgttttgtgccaatgatatttgtcatattgctctgcacatcagtaaaatttatcctttcctcctcaagtttgattcttgtgaatggtagtttgtgcaaaccttgagaatgattttcatcatgcttatccacagactgcagta

SEQ ID NO: 69593 - DNA, 818 bp, Prunus persica
  Intron number 1 from transcript ppa020852m (locus ppa02085 2m.g) derived from phytozome v7.0 (chr-ID scaffold_2; pos 26136418 to 26137235)
gaaagtggtcaccttctctccaattccattcttcttttcttgcttgcaatttgcacagctgaggcttccctctactctctatgttctttttatatgtcccttcacttttgtcttggttggtttcaatttcaaacaagttcaatgaatccaagccaacagtcacagactcacagcatgaggagggctaagactttgcttcttcttgtttgacgtttaaagagaaacaccagagacagacagatagagacgttttgcccctttcttttggttgttggagaaataacagtatagccgagagcggcaatactcttcaaatatatccgaatattttaaacatatagccatgcggctatactcttcaaatatatatatatgaatattttaatagtatagccgagcggctatactctttaatatattagaatattttaaaagtatcgttgtgcggctatacacgttaaaaattgaatataaaaaaacgcatagccgctcagatatactcgttaaaattaaattcaaaacggtatagccgcgcggctatacgctctagaatataaataaataaaaattagtatagccaataggctatactcgtaaaaaataaaaaaaagttaaaaatagtatagccgttcggctatacgcttgaaaaaaaaattaataaataaaaaaaatatagtatagccagcggcgatactcctaaaaaattaaatataaaaaaaaaatagatacagtatagccgatcggctataccggttaaaaattaaatataataagggtgtagaggtctcaagtatcagtgggagctgccttcagggtag

SEQ ID NO: 69594 - DNA, 487 bp, Prunus persica
  Intron number 2 from transcript ppa001085m (locus ppa00108 5m.g) derived from phytozome v7.0 (chr-ID scaffold_3; pos 1962306 to 1962792)
atcaccctgagaaaagaatagtcttctgcaacaaggtagattagatttcattttttccattttccattttccattgatcatggtttgcctagatgggaaagtcaaaccgtcaaattttttaggttttgaatatctgcaagtgactgataattaagttggtacgtcagaaaagttgaatggttcatggctagcagcttaatattattgttattattaacttaattacctggtctattccccttctgtcatgaactttagtttctgtctgtcttctcccttgacgagccagtgattagttggtttaggtcatgggccccataattaaagcctaccgactacctaccatgatatgattccgtccttttgttttatacttgtgtattacagaactaatatttttggcagcaagtttaaataaatattgacttttcgtaattttttgttttgagcagccatatttgccaaaccagactcctgaggggctcag

SEQ ID NO: 69595 - DNA, 989 bp, Prunus persica
  Intron number 1 from transcript ppa012220m (locus ppa01222 0m.g) derived from phytozome v7.0 (chr-ID scaffold_6; pos 28512120 to 28513108 reverse strand)
ttataagaggactttctcttttcgttgttctgctggtacatcactcacccttctctcaatattattctgttgtttattgctcttatattctgcagtttgatatgatcttgttggttgcaatgtcggaggagaagtgttacagtttgatgggtatgcgctgataattgttgtcgaacgaatctaggcagattttctaggttttcgtatgtgggttatgtttattttggataaatttgatgaggttgaatggatataacgaaaattaggaagctcccttgttgggcgatgattactagaatgcatttctggtttaagtcaaccattgtgttgtgctgctgttataaagcagtattcacatgaaaagatgcaacatttctagcaatattcttgcagtatttgatttattgataggaggagtgtaagatgatcactggaaacgaaaattcaaatgtggaatcaaaaacttaaaacagataatggcgcatctaaccaacttgaggcatttttgaaataacaagaagatgttggatggtgtagtagccacttaaaaattattctcaattatcatgaggatcttggttggtgctatggtttcgtaaatacttctgtttaactgtaaacattaggttgtcgaataattcccaatccattgttcactattatctaaataaggcatacttatgtcaagtgatttgttatgctgcctcctatatgggttcactattgtctctactctagagtgtgtaccaaatgaggtcttcatcagaaattggtgctcacctggtagaggagagcacctttatgctccccttattttaaacttacgggattgtattattattaaagtctccacctttgttaagtttcacaaggtactgactctctctctctctctctcgcctatacctccttcctccccaccctctgtgtgtgagtatgtgtctgtctctgcagcattaactccagagctgaagaatacgctggacaaa

SEQ ID NO: 69596 - DNA, 726 bp, Prunus persica
  Intron number 2 from transcript ppa008941m (locus ppa00894 1m.g) derived from phytozome v7.0 (chr-ID scaffold_2; pos 26083008 to 26083733 reverse strand)
gtttcctcagtaaggtaaattatatatcgtgtacggttcgcactttatctagaatttttatgctttcttctgaatcgttgtgtaaaaacactagctcttgctatcttccatgtaaaagccgtgaattttattttgatactgctcttgttgtttttcttctcgttaaatttggaaatttttggtcttgcttttgtgtttatgggttggataggaattatggtttcaataatgaagaaaagcaatggcattggcagcataactttgtgtttttgttgatgtatttctgtagattatactttgaggcttagtattttctattttgaaaggaaaataattctatgttacgaaaaactcgttcgattagaggtgataatattgtgataaaacatgatgtgacgttagtgagtgcaccagtaaattgaaactaataaataactggttatgagcaaaagaaagaaacgtacacttgaggttaagggtgactggagtaaatgtttgatgtgtggctatgatccatgcatattatttttaggtttccttttctaattattaggtggtctcatgcttttcaattcaacagtaagctgtcttgtatcaaactttaagtaagcatgtggccatacttagtcttgcaagggcctagagagacatatgttaatcattcatccacttaatcttgccatgttttggtattttcgtaggtaccaattcccccgggccaggttt

SEQ ID NO: 69597 - DNA, 1002 bp, Prunus persica
  Intron number 1 from transcript ppa024131m (locus ppa02413 1m.g) derived from phytozome v7.0 (chr-ID scaffold_6; pos 8359832 to 8360833)
tggaggttaaggagagagatctccatcactacgatgtaagcctctttgttattaatttctatttgctttttgataagttttcccttttaatatttctgagtttatctccctcatgtccattttggactctcccttgttgttttgcatatgcttttattttttcgatatattttgtttattcctttttgtttctgtaaaagttattttatatttccatttaaattttgctctgctgtagttgtcagcttgaccgagaatggtgttttgggacccaaaatttgtttgatgttctcaaaactttctttcggaagcaaaataccgactagcaaacaactatttcatatttttctacaaaatttctttcacattcccctttttttctccactgttgtaaatttgactcgtaaaggtgttttgatgtttcgtagacgacttttcttagtcaaaataccgaatagcaaacaaaagctaatccagaaccttcttttccggtaaattgtttgttatattttctttttgttttaaattgaacggaaatgtgttttagaaatatttttatatttgaatgttactgaaacgtttgtttgtttcaaatttctttcatatttcctctactttactcttgtgctttaggaggttttttttaatcttcccgtaccacatttctgagtcagattactgaatatcaaaacacctttcatcggaagtgtcttgaaataggttgctattcagtattttgactcagaaaggtgtcgtgggaatatcggaaatgttttggtattttctgagtgacagtagtaagaaactttgttttagagacagttcttttcatctccagaaaactcaaattgttttgagagttgatgttctggcttatttttttggtccgtttcacaagattattatttgttctctgttttgtggttatgggtggggttgtcttgacaatttcatttggtggctttaggtgtcaattacccctgaaattacttcgaaaaagac

SEQ ID NO: 69598 - DNA, 1016 bp, Prunus persica
  Intron number 1 from transcript ppa020937m (locus ppa02093 7m.g) derived from phytozome v7.0 (chr-ID scaffold_3; pos 9636306 to 9637321)
cggttagcttgttgggccaggtgggttctctcttgctctcatctgaaaatgtgccatttttatgctcgttctgttgattaattgtgttttttcttcttcttctagtccaatgtggaaatgagtttacgatatttatgtggcaatattggtgtctcattatcttgttgtcaactccatatcttcttgaagcttatttgatgagagtagggtaagaatttgatttcatggattcttcgttaactgggttgaaatttatcaacaattttcttatggtattatattttggacattagagctggcaagtactttatgggaacagggcaagaaaagaattcgcctcctttcttccatgttggagaagtacttcttctgtcttctctctgtctcacacaaacacataaatagtaaagaagatagcgttattataatttaagaatataaagagataaaatttcatttcattttattacaagtgacaatttgggcagaaggtcagcatttactgctcttgtgcaaatggtgaattatgagtcacttgactctacagtagaatatgagctgagatattgaacgacttgaaaactaagtatgagatgcacttaagctgttgttgtaatctatatgtttccagctgacaaatggtattcatagtttaatttgagccacatgtgaggcgtaatctctctctctcactctctcctttttcccttcgttattcctctcataaaaaaattgtacttgactccaaaatgtaatcggatgattcactatgaccatcagacgacgaacttgttgtattagtttgcagtttgatatttaactcatgaaaaacgtttctactagcctattggctgacaactggaagtatgggatcattatggttatgacttatgagtgttaaaatgctatttttagggaagtgttattttgtaatgcaccattgacacattagcatatatctggaagctgcgtgttctgatttgtcgtacctcttctaattggtcagggtgaaagtg

SEQ ID NO: 69599 - DNA, 336 bp, Prunus persica
  Intron number 2 from transcript ppa008414m (locus ppa00841 4m.g) derived from phytozome v7.0 (chr-ID scaffold_4; pos 8582465 to 8582800 reverse strand)
ttggtgactctttgcaggtactgctacttttttttattcttttggctgaaaaaaaagaaactgtttaaacaagtaaaaacaaagattctaatttgcaaatcagttccctgtagaggaagattcctatttccatgtcagttccctattaccatggataaaatatgaatatatttgactcaaagaacattcaactgtttagtttagataaacaccacatccttgtttttatctttcatttatttctattgggtttgttccaagttcttctgttctctcattatcattcatattaatctaatgggggccttggtgggttggatttgcaggttttgacca

SEQ ID NO: 69600 - DNA, 1008 bp, Prunus persica
  Intron number 2 from transcript ppb013834m (locus ppb01383 4m.g) derived from phytozome v7.0 (chr-ID scaffold_6; pos 23324435 to 23325442 reverse strand)
aagtgcgtggtgagtgagcagaatttctatggtattatatatgattagggtcaccggcatagacctcgagacttttttgtggctaatttaaactgcatagaacttttgtttttggctaactttatgccaatcattgatagctaaagtttgtaaactctggaagaaatagtttgtgatgaattctttttgtattttggagcacgtggtttgcatgagaatgacttaatgaaatttctgaaaatggaatatatattaatatgtttggaagtgtatgagaattgaaatagtccatgcaaatgaaacagcctaaaaaaaaggacatgaatcacggatacattataaaatgcacaacggtaacgtcttaaaaaatgttgtttgaaatgtgaagcaattatcaagaacactccaactcagcatacaattctctacaacaaataatgtatgcagtaatagaatttagtagtacttcagagaatgaggttgtccaaagggaaaaattcccacacaaaaagaaaaagaaaaattgaactttcaaattgatttaccatgaaatttatctcttcaatatctgcttcggagatgtctaaattagcaaattaatctatatataaagcatatctgtaaagtataaactaatgcaactaggaggcacattttttttaatttttaaataaatcgtatagccgtgtggctacactcctattaaatataatatacttaaagcgtatagccgctcggctatactacgttttttattatataaaaaattgtacagcaacctggctatactgtttttgacacgtggagaagcgggccctaggagacaggtgggtcattctcatgcaagtcacatgctcaaaaataaaaaaagaattcatcacaaaccacacaaaaatatggaaaaataaattcaacataaaataagtaataaaataattttgtattttgctacttttcagtatgttctaagttatcagaattttttctttcaggtggacaactttattc

SEQ ID NO: 69601 - DNA, 800 bp, Prunus persica
  Intron number 1 from transcript ppa022061m (locus ppa02206 1m.g) derived from phytozome v7.0 (chr-ID scaffold_3; pos 13494823 to 13495622)
tgtcagtacgtgattagccctccatctttatgtaaaaggatgaagatgttgtgaaaaattatgtaagaatgaggtaagtatttatacaaaaaaatttaggaatttttttataatttttttaaaaacaaattcattaacgactagctaacgccagctagccgttgcggttgctcaagaccattgatgtgcaacgctaccatcgtcaatggccagaaatggctcatttcatccaggaaaaaaaaaaaaaaaaaaaaaaaaccaaacctgctaggcctataaatttttatagcccgggctggctaaatatggcctgatttttaggaatcggcctgatggatagccctcttcttcttcttttttgtagccttctgtgtaacccactcttggagatgggttttggtggttttggtcacttggagatggcctaaagctctattctctacagccaccattccctcccctacctatgtccaatcaaccactcaaaatacgaagcggcaagtctactttatatccaagcggcaagtcttaaaatgatgatgaaagctttcgagagtgctttggcaatgagcacaggaagaacctgtacatctttccccacttcaactcctcaatggaaatatgttgtcttcccgagttttcaaggtgatcataccagaaagcatttcacagcttcccgtacatcgttcccctcttcaactcctcaatggaaatatgaggtcttttttagttttagaggtcatgacatcccgagaagcgtttcagagcttcctgttcatcttcctccccttccaatcgtc

SEQ ID NO: 69602 - DNA, 392 bp, Prunus persica
  Intron number 2 from transcript ppa007202m (locus ppa00720 2m.g) derived from phytozome v7.0 (chr-ID scaffold_3; pos 21507991 to 21508382 reverse strand)
ctacttcacttccaacttcctgtccggttacaaaggtattaactgtttttttgttgttgttgcagtcttcaatttgattatatccagaacttgttttgcctaattgtaatcaactcttttgtttagaagaaccaaactgaattgagactgttcatttagctttgacagtaatttgaccaaattggcagatcataattttgaagagcttgtcttgcctagttaacttttcaaattatcaaactattgatcaagaactgctatgctagaatacccttttcttcattccttgggtaaccaattcatattgattatggactttgattatgggattgatatgcctatctaattaacattcaggtcccagaatcttgcaatttagtaacccgcagcta

SEQ ID NO: 69603 - DNA, 948 bp, Prunus persica
  Intron number 1 from transcript ppa006419m (locus ppa00641 9m.g) derived from phytozome v7.0 (chr-ID scaffold_7; pos 18882203 to 18883150 reverse strand)
tgtaccaacaccctgccatcttagccgctcctcaggttattattttcccattctctctctgtttgaataattttgtagtttaattctcgtctacatgtccatttattttgttggaaattttttataggtcaaaattgatttttgattttagttaaactgcaaaaatttgacaaaatgttggtttatttccattgttaatatgtattcgcgggcattttttggttgatctgcgtatgattttcttttacggtgatcctaaggattgaatttttggcagaaattttgtaattttttgggggttctgctactgctggaattatataaattattccgcagcttatttatcttgttgaaagtgttcgtgttatgttgtcttctttttgggtatttttttttattatccatggaggaatcacattgttatacgtataatatgacaagctctactgtttggaaacttgtagtttgtcctgcttgttattgtttccttgtttttattaatccattattcaacgagggaatgtaaagtttgcataatgaacagaaggaacaagatcagttttggtttgattaccattcacccttaagcaaaaaccttagttactattacatataatggttttatgtgcttcatcctatttaaaaaaaataacagggttggcttttttatgctttggatatgtattaaagcttatgttaagtctcgggagaacttgaagatgaaggggattgttattatatcaataggtttccatcttgtagatttattcaattgaagactggtcttcatttttctgtttcaaccattttgtttgcatatgcatctcgttaagtttttgtgaggagtgcaaattcattactctaggttttgttcttcttttttgcttgttttttttacatttttattttgcagatagagcctatcttgagtggaaatctgcctcctgg

SEQ ID NO: 69604 - DNA, 439 bp, Prunus persica
  Intron number 1 from transcript ppa023265m (locus ppa02326 5m.g) derived from phytozome v7.0 (chr-ID scaffold_8; pos 1744036 to 1744474)
agaaaaccgtacagtatcttattggagctggcgtgagtccaatacataaatatattttttcccttatttcgaattaattagctacataagatgttttttatgtgattggaagaaaagcccatttttccttaaataaaaagcactttttggattaaaataagcgtttttggcttctttcccatatatttgtttttattttggttctattgtttgattttaaataattaaaacagatgcactttttgctgttaaatgagccaatgccaatttcctgtttttggaaaaaaattaattaatttttatgtgtggcattatattataaaaataaccacgtttgtgtttcattaaggaaagcacgttttggctttttcagaaagtgcttttttgcttttaatttactgcaggagccagggacagagaataatccgtacttggggtt

SEQ ID NO: 69605 - DNA, 588 bp, Prunus persica
  Intron number 1 from transcript ppa020965m (locus ppa02096 5m.g) derived from phytozome v7.0 (chr-ID scaffold_2; pos 3032399 to 3032986)
tgtaagtgtatgcattttggaattttcttttggcttcctttgacaattttgtaataggacaatcattgtaatttctcaagctctaagtttagattaagaattacttctctaggtgttcttatctggctacattctgatggacaacaatgtgtttgacaaaggtaaattatgcataggaatacattgcattcactaaatttcagaagattatgactagtcatccttccttcgtatgactagtcatcctttgcagcagtaggatttccagctcactgtttctagctggatcctatccatccattttgtcctattctacgaatttctcagctgtcacgtgtctattctgacctaggaatttttgggtaaaaaccaaagaattcctcatttgacagccgtcacttttgatgggaagttttgaaaaggtttcttccatcattttgcttcttcttccttaagataaaaccaccatttcatctgtgagttttctaaattgattttcgaaaattgcttttgaaatatgaaatctgcatcctaggaccagtgacatctatgcaagcaggctttcttattaacatggagaccaagtta

SEQ ID NO: 69606 - DNA, 429 bp, Prunus persica
  Intron number 1 from transcript ppa020884m (locus ppa02088 4m.g) derived from phytozome v7.0 (chr-ID scaffold_1; pos 29666434 to 29666862 reverse strand)
caggaagtgaacattgagaaccaaccattactgaggttcatagtgatgggaaggaaatcctatactacgaaaaattatgtattatttttccccaaaaatcttttttatatgacccaaaattctatgaagtttgtatgaggttctgcattattaacatcattgtgcattcttcatcatgttctgacatggagagagcttactggaaagtatgcatcatgataaatgacttcgtggcttgaaatgcaagtaatatttgcattgaatgtaatacttcaacaccttaagaaggcagagatgccaaatatcagaataagttcaaatgccaagacaggacaaacataacaaacttgttctaaatcaaaacagagttgtaacaaattatggaacccttgtcaacaattgagagctaaacaacccaaattcaacatt

SEQ ID NO: 69607 - DNA, 541 bp, Prunus persica
  Intron number 1 from transcript ppa004046m (locus ppa00404 6m.g) derived from phytozome v7.0 (chr-ID scaffold_6; pos 25986942 to 25987482 reverse strand)
gcacccaaaccgccgtcgttttcgagaagagggtactacttcgttttattttatttttaaatcttcttggtaatactttgtggtttgttttttttattgagcttagtgtcttagggattttgaatcgttgtggttgtggggtttgtttgattttttggtttgaattgttgtgggattagtttgtatggatgtgcttggttgctgagaaagtgaaggaaagggaacggatttaaaaatgagaattaccgttttgtaagaaattgattataagggatgttgaatcgatagtttgcttaaggcaacggagaattttctgtttattcaagaagtaagttgtatagcttgattctttattcaagaagtaagttgtatagtttgcttcttttttgttcaagtcctgggggcaaagaagaatgttcatgcatgagatctttagaaagttgactctttatgttcctcttcttgcaatttgatcttatattaaaagggttggtcattaatttatgttagtgttgtttaacagttggaaagtattccctca

SEQ ID NO: 69608 - DNA, 883 bp, Prunus persica
  Intron number 1 from transcript ppa026777m (locus ppa02677 7m.g) derived from phytozome v7.0 (chr-ID scaffold_7; pos 20987571 to 20988453)
tcttcctttttaccatcactggaagaaaatctgtattaattaatctcctactctctctctcatcatcatcatcattcaacaactgggttttcaattgtttggcttatcatcttttctcttgtctcaaactttttaatggatattgcattcacacaaccatatctttcttttgctgttttttgaatgttctaaacaagttgatgaaatggtactgattaattaacatggttttttgagccttctcttcttcttcttcttcttcttcttcttattattattattatttttttcttttggaaggtggaatctttaaagcttctaccatacatgattgttcctttaccttggcttgtgatgatcagaatttgtggctttttgaaaggcttgtttttagtcttggtacttcttctcaagcctttttcaggcctttttttttttaattttttttttttctgagcttggatgcttgatgttgaagttcaaattttgttcttttccgcagccttcttttcctttgaaacttccatattgttaattaaaaacttttccagcatggtaataatcttgctaatgtcctttttctgcaatcaaagtgaagtctgaaaatgttcaacttttgcgggaagtaaagctttcatctactttttcagtttttcagttgtcttctttcttttgttttttgttttccgagggtggcttgagtttcccacatgaagttgtatgtttgtgcttggttgtcttcttcctactttcttttgtttttgctctctgttgtagggtctacactatccatcctcctcctccattatttataatttgctttttctttttctttttctttttcacaggtgcaacatttcttgtgtggtttggacctacagtt

SEQ ID NO: 69609 - DNA, 1023 bp, Prunus persica
  Intron number 1 from transcript ppa011238m (locus ppa01123 8m.g) derived from phytozome v7.0 (chr-ID scaffold_6; pos 24600181 to 24601203 reverse strand)
tctatctaaacaactctttggtcagtgttctgaacttttttgcacgttttggtattgaacttcatgtcatgtgcaccaatttgttcttatctatgttgttcccagtgcattgccatcttcaccttaaattcccttttaatgagccccaaagtattgtagcctgatttatcgaatacacaaaactttctgcaaataatgaacttttttgtctgttgattttgtgcactactactgctcatttcatgttatagttttagttttggggccacgaactcatgagatgaattcaatttctttcaggcttaccagctgcacactttctatatgtacagaacatttctccgggcttgccactttttctcttcaattacactgataggaaacttcacggaatctatgaggctgctggctatgggcaaatgaatatcaatccctgtggatggaccactgatggttcaaatactacgccatttcctgcacaggtattaaataaaattttcttcaaaattggtataattgtcctgattcaaaattttcttcaaaacaggttcttagttaagaaaaggattttatactgatatattatgtttctacattaaggttaagttccatgctcggctgcactgccggccactgcctgaaagtcagtttagagggataattgccgacaactactacaatgagtttcatttctggtttgagcttgatcacgctcaaacaaggaagctcacatctaagttagcatctggagcagttgctccaagtactcctgcagtacagatatataagggagcatctgtagcagtttctccaagtccttctgtacctcagaaatctcagttagcatctgtagaagttgcgccaaggacttctgcacctcagatatctaagttagcatctgtaggagttgctccaaggacttctgaaccacagaaaacactgaattggagaagttgttttgtggctcttccctcgcatgacacaatagaggaacctgagtggcttgaaaaacttacatcagag

SEQ ID NO: 69610 - DNA, 502 bp, Prunus persica
  Intron number 4 from transcript ppa024150m (locus ppa02415 0m.g) derived from phytozome v7.0 (chr-ID scaffold_5; pos 13301452 to 13301953 reverse strand)
ccacagtagcttgtaagatgtttatgataacagaatgctcatgtgttttctttatgccattaataacaggcgactgaaaagatagaagattgaaatggtttaattggtcatacttgcattgtatcagtttttcttggattctcatgttatagaacagtatttctttggcttggtgtatgagactcctgccattgggaggtttggggagggttagatgtatgcagccttattctgcatacttacaagttgttccttgttttgaattcctccaggttgtactggagtactcttgcccttgcatcatatttcttcgcagtttgtttgctcctttttctttttattggtctgagtaatctaagcaaattaagttgcatgattcttttatgtattggagattctatgatgtgtacttacaagctcattacgagttggaccaactgagactcatcacaggtttacacttccagggttgcgatcttagcattccacaaagcactgtccg

SEQ ID NO: 69611 - DNA, 568 bp, Prunus persica
  Intron number 1 from transcript ppa025657m (locus ppa02565 7m.g) derived from phytozome v7.0 (chr-ID scaffold_8; pos 6494386 to 6494953 reverse strand)
cctggggtagaaattgatcgatctaccttatggaagagagctagacaggacaaacatggtaacatccctgatccaaaggtggcagagaaagcaaaattaattgtaagcctactatcactctgttttaaatttttattaaactgtgaattattcttattacatcgtatgttatatttttcatcgtgtgaatgatattaccacgtcgagaagtttttaaaaacgtcgttaaaggtctaaataggaatcactactaattttctgtaattatagcataagacgtcggtggttcattttcgcgtcgtttgaatgatattaccacgtcgaaacttttttaaaaacgtcgttaacggtctaaataggaatcactatgttttctttaattatagcataagacgtcggttgtttattcatttcgtcgttttaaataaataaccacatcggtataactaccgtcgtgataagttataataacgtcggtttatacgttattgcgtcgtgtgaaattgtataatacgtcgtttgtacataaataaccgtcgtgtgtttttttgtttatctttgttttagg

SEQ ID NO: 69612 - DNA, 761 bp, Prunus persica
  Intron number 1 from transcript ppa019289m (locus ppa01928 9m.g) derived from phytozome v7.0 (chr-ID scaffold_2; pos 9929307 to 9930067)
ccattacacttccaccgacatcccctccaccgttggtccgtacaacccttttgtttgttttgcttagagtttgagttttttttttgtggtgttctgggtgtctcaaaatctgaatccaaagctactttcctctgttaaattttgagacttttttgtgaaaccgtcgcctttctttgagaaagtgttgttttttccttctttaatctggtctttttattaagttttgatttgtaagatgctaatttagatcttaaaattttatggaattcataatttttgtcatacattataaccaatccattctaaatttcgctgaattgaatccctttttcgtttttatcacatgatcagtccggtgaagatgggtggtacctgtaaaacccctttttgttttacaggtaccgcccatataaggattgccccatcaacagaatcatatacccatttagatttgcttgggttcaagttacttgttcttttttcgtttcattccccttttctaatttcctaatcaattttgggaaggatatgtgtttattgtgggctgtgtatacaattttaattggtcatacttttgaatttaacgatatctttctctcagactcatttcagttagaattctgtggtccttctcttaggctctctcttcttgtttggtgggtctattgtgcgcagtttttctcttgatcgtgtaaaaacttgaatgttgaaaaagcaattggctaacaatgttcatatgaatgcttttattagatcgcatc

SEQ ID NO: 69613 - DNA, 661 bp, Prunus persica
  Intron number 2 from transcript ppa025323m (locus ppa02532 3m.g) derived from phytozome v7.0 (chr-ID scaffold_8; pos 5062508 to 5063168 reverse strand)
cacaaccaaggattgtacggtctcacaattcattggtaacaacctagctaacagccccattagcctagctctagatcagaatggtttttttatttttttattttttttgtggctcactactagagaaaagctaatagatgaccaataaaaactgttgaggaattgggatacaacccgtcgaggttagcggtgacggatttttcattttttattcaatttctgacattgaccagtttgaaaataagctttggaagatactggccaaaaaagaaggaaaaaagaatataagctttggtgaaaaattatggatagttgatggctaggctaggtgcgtttggatgtatggattgagacaaagtctccacttggaatattcatatctttaggagagagagtgaataaaatagtaaattttgagtgcatggcgtgaaagtttgtgaatgacatctagaaaaaaaaaaaaaaaaaaaaaaaaaacaaggcgagaggaagctccatgttgtatctattcttgtgcatcctgaatggaactttcctctggctttaatcttttctttaataaacacaaaaataaaaccttccattttgtttttattgcttcataatgtaaaaccatgaaaagaaaagacaaacgcttttattttgtgtaatatttacaggc

SEQ ID NO: 69614 - DNA, 655 bp, Prunus persica
  Intron number 1 from transcript ppa006831m (locus ppa00683 1m.g) derived from phytozome v7.0 (chr-ID scaffold_1; pos 29697320 to 29697974)
ctaaggcctacaccgacgaactcatcctcaccgctgtgcgtcctctcttaccttatttccagttcatcactatacatacacagattttgttgttgatttcatcgctggttaaaagtttgaatctgatcatcactttttattaatctgttattttttgatgttttgatttgattttgtgtgtggaggatatgcatgtgtttcaagtttataagtttgagatttcactgctttatcgaattaaactgtttctaactctccgctatgatttggttaattaaattgattaatatgctggtttgatcttcggactagttgtattttatttttattgttttctccgtcacagctttaaaagttcttagctcaaagcccatgtgacagcatactaaaactgcaattttgcataacataacaacggatatttctatggaaaaaaaaaaaaaagaactgtgtgtttccataggagtttgtagattcaagtcatcagtggcaaattgtactttgtttttgttttagtaagcaatatatgtatacatacaatatgtatttatgtctgtggaaagcttaatatcttatttcattttctttaactgatttttgtttctttttggatgttatagaaaactattgcatctcctggccgtggtatacttgc

SEQ ID NO: 69615 - DNA, 750 bp, Prunus persica
  Intron number 5 from transcript ppa007179m (locus ppa00717 9m.g) derived from phytozome v7.0 (chr-ID scaffold_3; pos 20830533 to 20831282)
acaaggggaacaagcttgagttcgctggagctcaggtgagctatgtactgaatatagcctatgcttgcaattatcttacatggtgcagatcctgaaatagttattatgtgcattagctattgtattggttgcagttagcatgtgtttgtcaaattttgcgttgatgttcgacatatcctctttaatgtcaagtactggtgtcattcatgggaggccagctcagtatcttgattatcaagatttcatgtttattgcatgtgttgttgttctcatgttggcaattgattttttgcttccttcatatgtgcctgcttgcaagacctcatgataaaattataattccagtttgctttttaatttttttcttcagttggtggatgttgaataatagttccattatgggttgcgctagtttgttgcttagttcagtatagtacctgtagattactgaaagttcctgttgctttatttatttttgaagtgatggaataagggaccatatacaaatgcttgaccaaacaaaactgaggtggaatttattgtgcacaagaaaatagtttacatgtactctacagctgtggggtgaacagggtgaacatgcagttgtgggagaaatctggaattcttatatggatccaattatgtttttactagatgcatctttgatcaatcaagaggcttgatgatttagattttcatctctcatttcttgtaggtggagattaaaaaggcagagccaaagaagccaaa

SEQ ID NO: 69616 - DNA, 444 bp, Prunus persica
  Intron number 1 from transcript ppa023385m (locus ppa02338 5m.g) derived from phytozome v7.0 (chr-ID scaffold_1; pos 46858704 to 46859147 reverse strand)
ggattcaaaggacaggtatgcgttgcttattttctttctgctttcagtggccgtcttcttatatgatgatctgtatgtacaatgagtgagacttcaatgtttttaggaagggaaatacatccaattatattgctatagttgtgttattcttattttttatggtataagttactatttgaagggacataggaagtatgactcatctgcagctataaatgtcattagaagaatggaaaggaaaacacagagtacatgcattgttacataattcagctttggcttaattcaggtcccatgataaagactagtaataaaaaaaagtctagattttgtttctttgtcaattatatgtattttgatttaggtcccatgtgaagaacgtaattatattatctattctatgccataggtctgaatcaaagctcatcaaagatattgttgaag

SEQ ID NO: 69617 - DNA, 981 bp, Prunus persica
  Intron number 1 from transcript ppa005965m (locus ppa00596 5m.g) derived from phytozome v7.0 (chr-ID scaffold_1; pos 37973301 to 37974281)
tgggcccatctctaccacctctgatctgggttctggtcagtcactccccatttgttaaaaaactgtttctttttccccccagtgatttatttttttgttcatatatgtaaaagaaaaaaaacccagaccttatctcattttgttttccttaaatatggttgcttttatatgtttatttaatcagcttaaaaagtttttacctttactaatttttatttttggaggaggggagggagggggctcttttgtttcggatggctttgttatattcatggggggttaggaactttatcgtgtgagtgagtgagtgagtgagtaatgagtgtggacatgcaaaataagaaagatgggggttggtttctaacatggattagttagtgaagtcagtaaggagtttggttgctgttgtgggtttttcttttccctctatgcttttgatttgttaagtcttctttttaaggataggttgaatcaagggcaagctgttcacttacttttcctcttcccttttgggctctctttatcttttgtaagcatgttgccggagcatttggaattaggtttgcgaaaaatgatgcttaaatgtttttatccatgtattgtcattttgcaatgtggtgggtttttgtttttgtttttggtgttaccaattgagcaatggagaaagttgagagtgcttgtcaaaaatttatcattacaaataaagtgagacttaattaagtgtaagcacctcattctgatgaactttttttttttcatgacatgtttctgttatattgttagccttttttgtccgtgtatgaacatttactaccaattttgaagcttatctgttacgattgtattactgaaatttcgacacctgaagtgcttattccttctgatttaagattctgtatatttacatttgagtttgattcattgtcttgttccattaattttgtagaaagacaagctggaaatcatcttgagggtgttcca

SEQ ID NO: 69618 - DNA, 362 bp, Prunus persica
  Intron number 4 from transcript ppa015486m (locus ppa01548 6m.g) derived from phytozome v7.0 (chr-ID scaffold_8; pos 5733157 to 5733518)
cttactcgcttggtcgacaattacaaggtactttcctttgttgagttgcagataattgttcttgggcatcttctcattggaagatatacagttatagagactttgattattatgcaaaactggaataagcagctgtattctaggttttacaaccctttctgaaatatcctacctactgattcttgaatttatgtgacatattttcttcatagcaaaacattcgtacaagtgtcagtttgtcgttttatgcttttgattgtaaaacaacaacttcatttcagattagatggatcaataattgtacaaaactttaccattattattttatcctaatttcttaatattttcccatgcatttgcag

SEQ ID NO: 69619 - DNA, 514 bp, Prunus persica
  Intron number 1 from transcript ppa002385m (locus ppa00238 5m.g) derived from phytozome v7.0 (chr-ID scaffold_6; pos 25952038 to 25952551)
tgaagaacttccttcttcatacattgcaattgcaggtaatcattcacatccacttatcgaacttcgttcctctcaagcattgattatacatgttatcagttttttaatgaatgattaacccatatgaatagaaagtttggaaccttatttatcattggtttatcaattaacaagttgtcaaatattcaaatttcctttttatttcatttagacattgctaattttggatttcaaggattgacatcatgcatattttctttccaaaacatatattcctttgattttggtgaagctttacattcttctgtggtgatacgtatcaactgctatatattttaacaaaaatggttctccctcaagttattgatgttatagataacttcagtaaatttttatgtggaccacgctctttgctagtgtaccttgaattaattattcaggtttcttgaattcctaattatatgttgctttcatcttagagttgggagaaaactgttgattgctatagcccagg

SEQ ID NO: 69620 - DNA, 684 bp, Prunus persica
  Intron number 1 from transcript ppa009768m (locus ppa00976 8m.g) derived from phytozome v7.0 (chr-ID scaffold_6; pos 1403443 to 1404126)
ttcctttttatttggaccctggggtgtagggtacgaattcttaatcattggagctaccagcttccacaacaacaaaagtgcattttccacatacgccaacacgacttctgcaatcttctttttctaagaatttgagagttctagcatcagtcacacactgtcaaaaaaaatcacccgtatacaataatttctttattttttccctttaacttgattaatcaaattctttctcaactctttttcttttctataagacttattctcgactaattcacaatgatataactgcaaaaatcaccctttaatctgctaaaaccatttaacagctgtttattctcgattagttgctacacttcacagttgtttatttttacagcacagtaaaattaatttttttttaaagcacagcaatatcaaactaagccttaattctaaatgagccaaaatttataaggaaaaaaaaacaattaaaaaagaaagaagaaaagactcgggtttagggctttgggccttggcgttctctcattttgaatcgcgcacgtctttttgagcgtaaacctcacgctcacgctcacgctaagatcactcactcctacaaccactataaaaaccatctaaccctgaaatcttcgatacttttatagaccagagcccttcgtcccctaattttctctttcatttctc

SEQ ID NO: 69621 - DNA, 762 bp, Prunus persica
  Intron number 2 from transcript ppa025916m (locus ppa02591 6m.g) derived from phytozome v7.0 (chr-ID scaffold_1; pos 37235392 to 37236153)
gtattcattctaaatccgccttcagaacctctaaggtacgtacctaattatattcatttctataatacatgggatacttgtatgaacttgttgagttgagcacaagttacatatttatataatttaagaaaagataaaaggatagagagcatgattaattcaatgcgagatttgtgaaactttgtcgacagaggacagtccgtagtccatatataatatataattttgggttttacaaaagcttgctaggagtacttgcaagcaaataataattagatgactgattacccttacatttgagttaattaacgattgtatttgcaataatacgggaaactagggaaattacctgccgtggtgaatggtgatggtgggataatatgaaacatggaaatcaatgctgatagtagtaatatatatgggaaagagaagaaatcaagaaacaaaaaagaattcatatttcatggaggtaaatgataacttgtatcggacattaatttacaatatcaaatacattgtcgatatatgttttcaaattcaagcaaattaatgtggtaaatagtagagtattcacacaaaattgaccatatatatatcgacggtagcacgtacaaatatatcgatatctggtaccaaatagtatttagtaaaagaatattgatacccttcgtctttaaactatgtctttcattctatattatcattccatatagatttgattgtggattgaattaactaactgtaaatgctgtgtttaacagg

SEQ ID NO: 69622 - DNA, 749 bp, Prunus persica
  Intron number 1 from transcript ppa018901m (locus ppa01890 1m.g) derived from phytozome v7.0 (chr-ID scaffold_3; pos 10356214 to 10356962)
gtggtgagggaagtaggtgtaggtgagagaaccgttctcaatatatctcatcgtctcccaaagaaagatgaagctacaagcaaaaatgcaacaaagacccatacattgatgattgatttgataaataatcagcatgcagcccatatacactttccttacacgtctgattttactttacttaaatagaagtgtttattgtttagtttgggattatgtgttgacatgagtcgtaaattccttaatgaattaggattatatttattttcttttttattttagtcctattaaaattaggatgtatttcctattgtaactcatgattttggacatggctatataatcactattattgtaccctatcaatacattagttgcaattatccctaagaaaagtaaattagtagatcatccaattgagaccatttattagtttgttttcttggaactaatagataaaaagaggctcaacaaattgcctcaccacaacaactaaccaattggtgcacctctatataaattctctactctctctgtccctaaacaccacagttttgtacaacatggaccgaaaatacaagatgtccaatgtacgtttcttttccacccctatatctcactgttattttgtctaacaaattacatggaaaataataacaatatgtgttctttgttgttgttcttcttctataattacaggtctccggtgcaatcatttttatactgggattcttttttgtaagacctgcaga

SEQ ID NO: 69623 - DNA, 764 bp, Prunus persica
  Intron number 4 from transcript ppa018850m (locus ppa01885 0m.g) derived from phytozome v7.0 (chr-ID scaffold_6; pos 9124319 to 9125082 reverse strand)
gtggaccacaaggttttgagaaggtaatatgtcaatacctgttaaccattgttcttgatcttatcatggatatatgtttgatgcaatggaaatcaaagagcatacgtctaaagtggcagcaattatcataatggttttatccggtgtgaaatacatgtgaggaatttagtgaaattgtcaagaattactttgtgtaaagtggcaaccctattgctaaaggttttctgtcaaactttgttaagcgtgttgtacaaattaaatttactagaatataattgagataagagcgggtggctttttggttattcagcaagacatcccaaatttttggatttatggcaattaaacagtaggaagatgatcctctcctttttcttccacccgttttctctcctttcttcaaaaatcaaatctcagtttaactttatttaacttagaatccagtggctcattttttcataatattgcttaaaaggggagaattagagaactcccagaaagacataggaaaaagtagaaagaaagtaaaaccccaatccaaagcagttcaggtcacagccaagaactcaataaagaacaatcaaccattggattctgcttatattactttgaatagaagatacatgaagaaactgagagcaaacggggaggaagggcagaatttggctgcgtaactggtatcgcatgctaattgttcaggtacttttagagttgatactaattatgaaacatcatcatgttgcaggttttggatttacttgaag

SEQ ID NO: 69624 - DNA, 590 bp, Prunus persica
  Intron number 1 from transcript ppa007161m (locus ppa00716 1m.g) derived from phytozome v7.0 (chr-ID scaffold_4; pos 3113381 to 3113970)
gctgacgataaggtaactttctcgataattttttggtttttgtttggttgcctaagaaagaaactttctcagcttactgcagtttgatttctctttctttgatctgggttttgttatgagctagatttactctagctctagggtttgtttgggtttgacgagcagtgatgtttgcttagctccagatttttactcagatcatagtgatattagcttggttaggtttgattaaagtcggatgcttttgtgtaatttgggtttgatttgcaattgatttaatctgcatctcgcgtagcttatgagccaaccgatctgtttcttttctgaaaagaaaaaagaagaaatttgtggatgttctttttgggatttagtttcatttcatgaggcatatttgggactcagaatgtactttgtatagcctttatttacttttatattctttgcgtggtctgcggttgtgtatggctggctgctaatccgtgaattccacagtaaatttcatacactttatgggaaatttgtttctctcaggatctaacttgatgtgttatgcaggaaatttctgcacctgttgtagacggtagtgatcc

SEQ ID NO: 69625 - DNA, 602 bp, Prunus persica
  Intron number 2 from transcript ppa008633m (locus ppa00863 3m.g) derived from phytozome v7.0 (chr-ID scaffold_2; pos 24102360 to 24102961 reverse strand)
cgtttataaggctgctacagtcccctacatcccaggttttgctgcatttctaagattattattattattattttttgaatagaaacatttgtattgataatcaaggggaaaagctatcctcaattatacaacaaagagagaacccgctcattataagcagaaaggaagaaagattcatctaaaactactccaaccaaagataggttagaagctaaagcccaacttaagtaaacttatcttaagacagcacctttaccatataagattatgaagatacagttcaaccaagattgacttctagccaatttttgacttcatgttctttttaaaaactttggtttttcttcacagttttctctaataaacctttaccatgagagtatattttttgaaatatggttaggaacgattggagtgaacctaatacaacctaatacaagaatgcagagcatgacatcagataacaatttccattgttagatttgttgtatatatttatatatgaaacttttttgggctttgataatggatttacacaatttatttacaaatgaaaactaatttcaggtgttgaggcttgtggagttgtgacagctgtggga

SEQ ID NO: 69626 - DNA, 444 bp, Prunus persica
  Intron number 1 from transcript ppa008633m (locus ppa00863 3m.g) derived from phytozome v7.0 (chr-ID scaffold_2; pos 24103061 to 24103504 reverse strand)
agcttggtggacctgaggtctctctctctctctctgtgtttccatacatatgcttttatgtttgaattggccggctatttttatcagattatcaaaactcacttgtgtataattactggttacttgtctttatttctatcagtgtttaaaatatttgagattgctgaattcgattcgcagtttgtgtacagtgtatcaagtgtcttcataaataatcagtcacgtaagtcggccagtagatcagaaaacaatatatagtttttgacactgattattcagtatccattactttttttttggggtaaggcagtatcagtttatgtctagttttgcttaaagaaaatttatctttgacctcccatatttgtcagctaaaggccattattcctttactttcatcgtcattttatttatttttgtcatgtgatggtgttaggtcttgaa

SEQ ID NO: 69627 - DNA, 595 bp, Prunus persica
  Intron number 1 from transcript ppa014667m (locus ppa01466 7m.g) derived from phytozome v7.0 (chr-ID scaffold_2; pos 23815510 to 23816104)
atcagggtcagtttcaatttcaatgcataataacatgcatttattatatgataaacctcataacaatccatcatattatcatatataattattattattattattttcctaatactggggttttgctgtaattcatatgtataatgttatgttatgacatgatgtttttttgttttggcacaatgttatgatgtttttacacaaaggtacttgctcttctactcttgtcttttgatttgtgaggcttgttattgaatgtattcgatttcctcgtatgttttatctaatcagttttaaacttgtttggacagactaattcatgtacatatcttgaagaggttctgtgtttggtgtcaagctattgactattctcatctaagtggtcatgctgccaaataatcttttgttgaaatagagttatctctctagcccatcttagtttaacaattttggttctcattttgatcatatgaaggttacattcttgctgaatatatttatagttttcttttctttattgtgtggctttcagatagtttatttatttatttattgtgcaggggaatcagctgaaacaagttgcaaaggttcagat

SEQ ID NO: 69628 - DNA, 863 bp, Prunus persica
  Intron number 1 from transcript ppb013951m (locus ppb01395 1m.g) derived from phytozome v7.0 (chr-ID scaffold_4; pos 14891526 to 14892388 reverse strand)
ctctgacaaggaaaaaagacgaaaaggtttctctgggagattgaaatttttaatcgggtttggaaacagtgcatgtgtaagtcgaaaagttgcttacatataaaaccatttcaaaaaaaaatacggcggttacatttaactacgtcgtttttaactaaaacgacgcaatatttttcattcgacgtggaatcatttcatttaacgtcgttaggtttaatataaccgacgtggattttaatttttaaattatgaatagaattttttttcccgtgacctttcagtttatttttcaattacagtgcgttataaatagagttttttttccggaggaaatttaaaacgaaggaaattaatattctgcaatatgtaaagtttcttttttggatgacagatttaaataaaataagaatataaaaacaacaaatgtgtaagtcaagtagacgaaaatttgcttacatataaaaccatttcaaaaaaataatacggcggttacatataactacgacgtataaattacaaaatacgacggtacatttaacttcggacgtggtaaataaatacgacagtagtttgtaggtaccgtcgtagtaaactcaaaaattaaagtacataagtaataactcgcgtcatggtatattatttaacacgtcgttttgattaatttaccgacgtggatttctgtaatatacgtcgatcataccgacgttgattttacaatttaaacggcggtttttttgtaaggaccgccgttggttttaaaaatttattctataaatttgtcgctttcattcattttcggtttacatttaaggttccaagttcttcctctctcagtctctcatgtctcaaagacaataatttgg

SEQ ID NO: 69629 - DNA, 842 bp, Prunus persica
  Intron number 1 from transcript ppa026977m (locus ppa02697 7m.g) derived from phytozome v7.0 (chr-ID scaffold_4; pos 19973533 to 19974374)
caggtatgacatgaatgttttgttttgattgattgtttttgtttgttaaaattcattattagtcatttgctctagtactgatgattcgctaattgtaacgaccaatattatggaaacattgcaggaaaatatgaccacatttatgggttttactcaaactggtcaattaaatcagttgtatagagagtatgagataggacatatggctcatccaatccttcatgacaatcattttctggtaatagaaaagaagtttaatttcagaactttccgtactttttatttattttatattaaaatgttgaatttatatattgtttcctcttccctttttttttttttttttttcatatttaggatcatcaatatcaatattggaatgaagactacaatatatacatgcctagctttagttctggaggaagtggtggccaacgaaactgatcattggaagcaaaagaattgcaattgcagaagttgttgacacttttgaacttaaaaattccttttttttttgttaatgtagacattttgctgttagtgttgtaattgaaacgaccatattgcacttgagattgaatggttgtagtttgagattggattaaggttgctacaacctctgattgaattagggtgccacccttttagtttgagattggacctgttgtcttgttgccagaaatcatttttagaggtttgttcatatccgtcaatccctgttaaatcagcccattatgatcagaattagtcaaaaagcaagaaacctcatttgaaatcaaatacattctatatatcatagaagtgaagcatacaacggaaacaaatccagtttgcaacaggtc

SEQ ID NO: 69630 - DNA, 408 bp, Prunus persica
  Intron number 1 from transcript ppa001673m (locus ppa00167 3m.g) derived from phytozome v7.0 (chr-ID scaffold_7; pos 22036917 to 22037324)
gctgactttaagtaataacacctttttgtttactatttggagctaacgaattggccatttcaaaacgaaaacgaaaacaaaatcaataaaagaattcttcaaccaaaagttgatctacgctgcaaaaaagaaaaaagaaaaaagaaaaaaaagggcaagaaattgggcttctcagaagtttcatttgagtgaataaggccaatctcaagaaataatttgataacttgatattaactgaaccgaattatgagaggaaacaacaaggtttcttcaacatttgcaggaatgtctaaacgtctttgacttctatgttaactataactagtatcaagtcagtgtaatgactttctgcaactcatgattttacctgcaggacaagagcccctcgttatagctcgtggcgggttt

SEQ ID NO: 69631 - DNA, 600 bp, Prunus persica
  Intron number 3 from transcript ppa013144m (locus ppa01314 4m.g) derived from phytozome v7.0 (chr-ID scaffold_7; pos 22478513 to 22479112 reverse strand)
agccaaagtacaggctgatcagggtaactttactttctttttcaatagcccattagatgtatagtgcatttttttatgcatagacctatgtttatctatatagtcattcaaaatgtgcgttgattggattttatttatttatagcatgaatttgatacaaagcccctttgaggctgttcattaactgtagagatcaactgtggacaaaggggttatgaagtggggtgcatctgttttgagtctgctgattagtttattttgatcctctttcaccctatgtcgaaagattttatggaatttgaatgagtccatttggctgcatgtgaaatatatgacttctgcttcgggcaagtattggctttaaatgctgcaaaagcaggctttgcaatctttcccaagttaacagtcattggttatgcgtcaaatgatgatgctctgattgcagtgaattggtatcttttatttgttgcatatgcatcttcttggggtagtttaacaatcactttttggtttggcttgagatgcgcatgtccttaggggcatatctcttggatctttataaatctctctctcaaactcaaccctgggtacttttgcaga

SEQ ID NO: 69632 - DNA, 387 bp, Prunus persica
  Intron number 2 from transcript ppa013144m (locus ppa01314 4m.g) derived from phytozome v7.0 (chr-ID scaffold_7; pos 22479230 to 22479616 reverse strand)
tttccaaggtttgttttctgtctttgagctcttgctttctttttcaatgggcctttgattttctaatgttaatgttgacatttcactactcgaatcaaaactatagctttgttatgctaaatgtgctatgttattttgtaagtttaatgctgagacaatggtttggaggtttggcttgcactgtataatcaaccgtttttagcttcactgactatctataatcttcctttagacgatattgataccagcatcttgtgctactaatcttctttaaatactgtgagttgtacattcttcttgcttagtggattgttccgtcggttgacaataattttctgtttcctgtcataatgaaggcggagttgaaggagaaactagcaaggttgt

SEQ ID NO: 69633 - DNA, 662 bp, Prunus persica
  Intron number 2 from transcript ppa001898m (locus ppa00189 8m.g) derived from phytozome v7.0 (chr-ID scaffold_1; pos 42405869 to 42406530 reverse strand)
cttcaggaaaagtaagcctagcttctactgcattagtactatctgagtttcaatgcaatgtcccccctttttttaattgttccagttgcatccatctttgggttttgttttatgtgataacctaatcattgtagtttatctaaccatgacattgatattctttattgtttattgctatatttatgctattaattgcttgtcttatagatactggacttgtaatgtagtagaatctgttcagactctcatcactgaaaacagctaggtatttcatcttagtgacgtagtgacactttcactgaaatgaaatttgagtgcatgactagtcttcgtcaggatggacaatgcccattttaggagtgcaggacagcaaatggataatattgatgtgaaaagaagaaagggggaaactgtttaaccttttgggagacttttgattttttaagtatagttgtctcaaataaattttttcttgcatatttcgactttagcaaatttatcctctagtattgtggacctgtttaattaaaaattgctaaaaacgtaatcattaccttggtaatccttacggcatacttgtaatatatatttttgagtaactatgatgttatgttaactccagtgcaggtattatcaggcatttgcagcattcgcttgttgta

SEQ ID NO: 69634 - DNA, 419 bp, Prunus persica
  Intron number 1 from transcript ppa001898m (locus ppa00189 8m.g) derived from phytozome v7.0 (chr-ID scaffold_1; pos 42406710 to 42407128 reverse strand)
agtttgtttccttccctcctcttctcattttctttctctttctctttgttgtttttgtttttgtttttcaataattttttttcctgtttgcttgtccagccagacaatggtcatgttggattgatttatcatgggttaacttatttcttccatttccaaaaagtgtactttggatcttattacatgatttctttttactccccaacaaattagccagaaattggagaaacacagacaggaaagaagtgattttgaaacgtgttatgttctggcatcccagtaaatgaagaaagcaaatttataaacatatcgcaccgaatttcagtacagagcttttgtggatttaaaacataattgttaactatcttgtatatgttgcctcactgatttgtctctggtttcttgtagaatcatcgaga

SEQ ID NO: 69635 - DNA, 439 bp, Prunus persica
  Intron number 1 from transcript ppa006257m (locus ppa00625 7m.g) derived from phytozome v7.0 (chr-ID scaffold_7; pos 16929058 to 16929496 reverse strand)
gaagcccagctcggccgtggtctcccttctcccaggtaaagctttcagcttttcagcttcttcgagctctaagaaacagcacaagttaacccttttttagccctttccatatgtatttcttttgtgttgcatcgaaaggggtcttgtgctaattcataaccgtggtcctatttttgagtcaatagtttcttcggggtacttatatgttttgtatgtatgcatggccaagattaaccatgaaaatgcattttttttgtttttgtttttgggttataattagaagcctctttttaatggagttgttgatagttatctcgctaatgaaacatcatgggattttttagagtttttctttgactatttcctatcatgctttgatgtgtattatgaaatggtaagttactggatgttaagcttttgttattggtggcagagattc

SEQ ID NO: 69636 - DNA, 969 bp, Prunus persica
  Intron number 1 from transcript ppa1027186m (locus ppa1027 186m.g) derived from phytozome v7.0 (chr-ID scaffold_2; po s 25017923 to 25018891 reverse strand)
ggctacagttttcagaggtaactgattaggaatttgatgagtattcacaatgtagttaattttgaaattgcctgtggatgaagctttcaattataggattgtcatgcttcttcttcttcaaatgaaaaaaagagttacgagaatgattattcaatctaactttataggttctgtttggccgctatgcgtattgtgtattagaagaagaggacataggaaaattcaatctataattctcttgaattgttttcctatttttctgaaatttaattatggcaattgctaataacgtttaaagaaagaggaaaattactaaagaagcgactgctgattgattgattttagttgctgacagtattatttaagaactaagaaaatttataaatcctttttttgtttctcaatttctcattgcttatgctacaaaatgttgttatgagtacaatttttccgctatgtagtatgtggataccacgggacaatgagaagctacgtagatattttgttttattcatttttagtcttacttttgatgtatggaaatctaaaaagaaggctaactgcacgaagtatatattttcttctctcctttatttttcctcaaggtttcagtttgtctagttgacaacttcatagggaagctcttactttgatgtcaaagttgatagaagattatgaattctgaaactgaacttatattttaggcagttctggtaattacatttcgaagcaattcaaaagtacctgtaaaaattgtgctaagtggtattcgtataatattttgattaccttctgcagaaagccgaggtcctcaaaagggagaaggaattagagaatcagctcacttttgcttccggtcctctggagattgaaattcggaaagtatgacaatggcattttcagatttcacagctgtaatcatgtttgttctggtctgaacagtcaaacttatgttactgtagaaggata

SEQ ID NO: 69637 - DNA, 777 bp, Prunus persica
  Intron number 3 from transcript ppa008371m (locus ppa00837 1m.g) derived from phytozome v7.0 (chr-ID scaffold_1; pos 38340273 to 38341049)
gtggaacaggtttgcctcttcttttctctatggattcagtttcgttcatgatctgtatggtttctgtgaaaaatttcctgtgtttttcgttttgtctttgtttgtacaaatcgattcgttactgagctcaaatggagctaaatgcaaactctgtggcctgaacaaaatggagtttgattttaattttggttatcgagctttctgtgaaatagttcaaaattaaaacattatgcaaccgtgacctaaatgatataaactttggatttgagtgatcgggagttggctttgaatttcatgcactcgactataatcttgtataatgtttctgtagggtggttcctagtaatatggattggccttactgcaaattggttagagcaatcgaaatgaactataataaggctgagtctaagtgtacaactaaaccttttaactttctctagaattgggcctccagttctagaaccttgttacaattattcaaatctaaatgcagcctgaaacttctttcagatattttattcagtcagagcttaaggtgtgcaagcacaaaattttcctttgaaattgatactataatagtgaaattagggttttggtactggtgattgtatacatttttccgttggctttgctgttttcagattctggttattgtttataatttacatgatatggtttagttcttggtttatgaggccactgttttttccataactgagtgagttttatgtcaatgcaggaaaaactacctttgtgaagagacatcttactggt

SEQ ID NO: 69638 - DNA, 780 bp, Prunus persica
  Intron number 1 from transcript ppa012845m (locus ppa01284 5m.g) derived from phytozome v7.0 (chr-ID scaffold_6; pos 27245660 to 27246439 reverse strand)
ctctttctttgtttctctctaaggggtgttctgaggtaaagctcgattctttcctatctggtaacttcaaattttcagccttttctttttcttcctgaacaaaattatatttttgtgatacgggtttgattcttttatctgagcgttgtacacaatagctccgtttggattttaactatttattattgtaattctagttcgactttcttgatgatcttaaagatctgccttttattcttcataatatgcatgtgtttttttttttcccccaatttcctgtcattttttatttcttattgagaattggacgactgtgactgagcttgaattcttgattatctacttggatttagtgtttttattgtttgtctctgtgtttgtgagttccatgactgttcatagatctcatcagttctccctatgggtgagcaggatactggttgctctgatttgtttttacaaattttccgcgtgattatatgtttataataaatttttcttgaaagctgaaagctttgtggaaaatatggactgctattctgaggtcttactgtttggagtgtttatgcaacaaaaaatggagctggtagagcagcaatccatgactcatcttaaattgttaatgctatttttcaatttaagtccatttgaaagtgaaacggttcagggctatataatatgtgtgtttgtgtgtgtgcgcatgtactgctccattaatttttcaatcaggtctttgttgttgtttatctaatagttattttgcttagatcacgttgaacc

SEQ ID NO: 69639 - DNA, 688 bp, Prunus persica
  Intron number 1 from transcript ppa008690m (locus ppa00869 0m.g) derived from phytozome v7.0 (chr-ID scaffold_1; pos 40493820 to 40494507)
gtctttccaaggaacagttgcttgctcgtttaaaggttctaccttctctctctctctctctctgggtgtttcattttggtgtacttctctgtatattggactatgccattgaatttgatctggaattctttgctttgcgtcagagttcaatattggaggtgaactagaataatcacagtcgttgatgggcgtctttgattctttacaatttatgtgataagccatatattgagtgttaaccaaaggaacccagatgaagtttgtgaagaatagtgaaagttattacaatcccatatttttgctaagcactcttccatgccttgtttagctgtgatgataacaatttcatagcttgcaatagtttctatttactttggttgcttcaaggtctttgagtttcagagtatatcaaatcataagatataatcatctggtaacaatgtgatacttagtgtagcaactatttgggcttatatatattggagttgcatttggttcatcttgtgaatgaaaatctaaagtagtgaatttctgaaactacagagaaaattgttttctgatactagaatgtgcttgcattgtcgcgtatggctatgtttttaaacttgaactgctgcatctctttaatttcctggaactaacttatactgttggttttgttaggagcttcaaattggtttttcccagt

SEQ ID NO: 69640 - DNA, 685 bp, Prunus persica
  Intron number 1 from transcript ppa015767m (locus ppa01576 7m.g) derived from phytozome v7.0 (chr-ID scaffold_6; pos 24409560 to 24410244)
gagcttcaaaaggttaattttataggatggaacttcaaacgtattgaccaaggcagaagggttatcatatagtttaatttgtttgtgactccaaactttatttttcaataaattttcacgtaccggcaaagttttataggaagaaaaaaaataataataataacctcctcatggtaacattttcagttcgttttaactggatctatcttcagctatacaattcttccaactcagaaattcaacatgaacatttaacagcatctactttctttgacttggcaacctcttagatgccaagtcccaacccgctacatgtagattgtggcaccactcatgggaattgtgtatcaactttcttcagtgatggttacttgtcaagtcgttgcccctgttttatttctgtccaatttttcctagttacagatagagatgggagaagacttcgaagtcaagctagcaacaatggaggaggccttttaccaattcaaccctgcatactaaagacaccacaggcattcatatttcttcactttccctcgtgagtctctaaaactaaaagttcatccaaaatgaaaactctgctccaatatttcttccttttcttcatcactgccatctgtgttaatatcatccctgcagttcacagccagtgtattaaaaaccaacaactatcattgctccaatt

SEQ ID NO: 69641 - DNA, 376 bp, Prunus persica
  Intron number 1 from transcript ppa024499m (locus ppa02449 9m.g) derived from phytozome v7.0 (chr-ID scaffold_15; pos 415562 to 415937 reverse strand)
gaagattattttgagtacgacatgtccgatgcacaacggatccggttcgccaaactcaaactcgtaggagccgcaaaacagtactggaaggctactgagcatcatctccaacgactgggacaaacccctgtgattttatgggatgagatgaaattgaaacttcgggaacaataccttccatctttttatcgtcaccaattgttagatcaattatggactctttcccagggtacttcaacagtccaagactattattttcgctttgtggagcacaaattgcgttctgccgtacaagaagagttggcagtcacagtttctcgttttattcatggccttcggattgatatcaaacgtgaggtgagtaggtcacgtccgg

SEQ ID NO: 69642 - DNA, 503 bp, Prunus persica
  Intron number 1 from transcript ppa003505m (locus ppa00350 5m.g) derived from phytozome v7.0 (chr-ID scaffold_1; pos 44713532 to 44714034)
caggctgagagcaatcacactcacaattttgtaagtgctttttctgttttatccaaaacgttgtttgtattggattggctgtgggattgaaaatacagctttttgttgtgtgtttgtaagttcttagagtttgagcattataccaatcaatgcgcatgcttatttgttcagtttgatatgcattgttgtctactttctgttacgtattaggatttcttgatttgggtttgtataaaggacacttaatttaatcagcatagccaaaaatttaatttaatcagcatagccaaaaataacactgcagtcatcaaatcaaaatacctttgatacaaaaatttactgtctttatacgaaatcactgcaatctttagccctctagagtaacctcttctgaagggttagtatcttttcttatgcacttctgaaaaaatttcttaatgatgtttacagccaatgtaaactatgtgaattgactacatactgatatgaaaatcgtgcagttg

SEQ ID NO: 69643 - DNA, 706 bp, Prunus persica
  Intron number 2 from transcript ppa003505m (locus ppa00350 5m.g) derived from phytozome v7.0 (chr-ID scaffold_1; pos 44714070 to 44714775)
gaagccttgtattagcaaagatacaccaaaagaaggtttgagttttccatatgaggatcactgttaactgacaatgacctattttatttgacggatattttactggttacccgattttgcttagtcaaactcatcatgtagtgggtcttgcagcctctcttggcaatacgcgccctacactacactctcaaccatttttagatgaggctttataatttatatgggtctcaaatgccagataaagagaatatcaccacatgcatgctgtacactggtggagagatagggttggagggtgcataagaaaatactaaacctggtttattccaaaaggaaaaacactctgtctctgtccagtgcgcacacacacacacacacacacacacacttacatgcacaaatgtttaccaagatatcatgcttcatcttcacattttgtgtggaaaaatacttattgaaagatgttttgtagaaagatatatgacatgttttcgttaagtgatatgttattccttattatgtttagattgcttctattcgctcgtctatctttaacttaatgtggcaggaattttaatttgaatttgtgttatttgataattggcaaatagaatgaataattatgtggttgttaaaactaaatgaataactaacttctgttttttaatacttggagggaacgtaggaacagcattaccacagtcaa

SEQ ID NO: 69644 - DNA, 509 bp, Prunus persica
  Intron number 1 from transcript ppa004305m (locus ppa00430 5m.g) derived from phytozome v7.0 (chr-ID scaffold_1; pos 46217351 to 46217859 reverse strand)
tactccggccagaagacaaaacagacaacctccaggtatactctctccttcttttctcgctctctgctagggtttaaatttgagattcaatcaatttcactatatatgtctcttcctggttttatttcctaattttcatgaactgttcgctcccccgttctaaacccagtttacactttattgttgtaatgaaaaagtttttcatttacaatattttcttgcttctacatttatgttactattttgattcaaaattcctagcttctactctgtgtgctttcgtgtgatgatttccaccacaaaacaaagagttgggctttagtgattatgcgaataaagttttcatttttaacttttctcctttttttatattaaattttcttttatgggtttggagtcatggcttctacattttagtttcttatacttctagctactcataattttctgattatttgtttgtttgatttccagcacgaacaaagagctgggtttcatactgttgtcaa

SEQ ID NO: 69645 - DNA, 996 bp, Prunus persica
  Intron number 1 from transcript ppa1027198m (locus ppa1027 198m.g) derived from phytozome v7.0 (chr-ID scaffold_1; po s 7510447 to 7511442)
gaaatccaaagtattagtccacttgcctttgattggtgagtgacagccaaagtagctaactaaaagaaaaaagaaatgaagaaataatgatcaccatctctacttctttctttattcattctttaagtctacttgcattatttattctttttctttcaaccttttaacttgtatgttgagctttagctttattttaatattcttcatcacaaagaatattaaaaggtttccatccacctcatcattattttattcttctttgaatcaactcacttgtgatgaagtcccttcattgatgaagtaacttgattagcagctactaaatttcttctcatgacatgccttgatgcataataaactgggaatgctaggttcatccaattcctgccaatttcggatatgttgttctccacataagtaggaacaacatttatgaagaacttaattccatttgagcaatataaaatctgatttagcatggttgcaactgactggtcgtcacagactgctgtcacagtcagaaatcattattaatgccccgaaaattcaatacttgtgcaaatgactccaaatttcgatatgtcgtagtagacatccaaatgaacaactttcatgaagaacggatgttaatttgaggactggaagctggcccgaattgggccataattaggcccgaattgccactgtttttagctttcgctgttgcttgctggtatgcttctgatgtttgatgtcccgaggattccaaatttatccgaataaacccaaatttggatatgttggatgaacaactttcatgaaggatgaaacttgatttgagagctggaagttgaagtttgggcccactccagctgactgcagcaatgcatgtctagccatattttggccattttgatgttcatggaacattatcttccattttaggcaaaaatacgatttttggtacaaacactacctgaagtgttagtgttgcatcaattgggcaaacacttccta

SEQ ID NO: 69646 - DNA, 647 bp, Prunus persica
  Intron number 1 from transcript ppa021951m (locus ppa02195 1m.g) derived from phytozome v7.0 (chr-ID scaffold_5; pos 6687583 to 6688229)
cccaacacaggcgctctaagaggtgcaatttttcaatactcaaatcaatgttgttattattattgttaaagtgcatcttttgtttttctacgaggtggatatttgcatttctatctccttcatttcatggttggttatggacttttgtatgttgtattatgatatgatgatataatctgttaggttagtatctatttttttggcttttaagtttctagttgagtttttttctttttctatatcctattgtttctttaattttattacaaggacatgtattttctttacgtgctgcatcagggaaagaaaattccactccaaggggtttgactgtttgagttctttaggcatcctttatttgtttttcttacaagtttttattgtgttttgtgatttttaagatagattgttggcatatcttagaacaatgtgatcatagatgtgtgtgtattaggaagaaaacaatttgtgagtagtgaccatcaaaagatatgggtgagcctgttttgcagtgattgagtcaaagagattgatcattttctttcctcaaacatgttggaatcttcatgtttcggcctgtttccgtttcatttttgaaatttatgtggttcttccttttctttacagtgcttctgacaggaacttaa

SEQ ID NO: 69647 - DNA, 780 bp, Prunus persica
  Intron number 1 from transcript ppa006182m (locus ppa00618 2m.g) derived from phytozome v7.0 (chr-ID scaffold_3; pos 18495129 to 18495908)
cccatcaacttctctttgggttttcagctggttaggtatgtgtgctcttcatcaattcatcggtctttcttgattttgagaatttctgcttatttgtgtcttttggttggttctgatgcctgggctcatgcgttctggttttgattatagagcatgatatataaggttgtgggaatttggaaggttgatagttaatttcaatatatctatgttgaattattgcttcttcttttttatatgcaaataagagtctaccatttatgccaacttctgcgtcaagtcttggttggcggtacccatacaaagaaagaaagcatcttaacatgtagtaataatttagtagaaaaccaaaaaaaaaaaaaaaaggttcttttgcagtttttgagtttctctacttatgcccagttgatagtatgcttatcctatggctctatctttagagaagcaagcaagacacaatttttatggataaaaatggtggatatattatgtctactaaacgagttacacaatttatatctggaaagtgcactgagttcgttgtgaatcaggcaatgtgaggaagtaacagatcgtacatttatttcagaaagatatgtagcactctaactattgtggttttcatattgttaatcaaatattatcatgtttccattatcaataacccaatcagattttgaatttcacttgtcatgctaatccatcatttctggaacaagcttacataatgtgttttgcccatcttatgacagataacctgcggcaattttgccctgcaag

SEQ ID NO: 69648 - DNA, 775 bp, Prunus persica
  Intron number 1 from transcript ppa001598m (locus ppa00159 8m.g) derived from phytozome v7.0 (chr-ID scaffold_2; pos 25438270 to 25439044 reverse strand)
aaagttacatttgaggagtttccttattacctaaggtaatttgacaacttcttacccaattgcatagcttttatgttaatcgtttaagcaggcacatggaagatgagtgcgttgtatatctatttttcctggtagaatgttgttaaagttttaaccaattttgtaatcatacaatccatcaagaaatgatttttttttttaacttatcaacaaatgattatgccaagatcttctgcaagaattttcatttttttttttctgggcaaaattttgattacatgaatgtgttaccagttgactaattagcttgattattaataatggctatgttaaatttttctggatttttgttgttttaattaatgggttttttcaacgatgaatttttatcagccatggttattagcatattgtacttttgttaaattgctattgaatccaatctttgcttttatggatgctgagccttcttgatttttttgttttcctttggcttttaactgtgttttggagcaacccatcaagttctgtcttttaagttatcaaaacaggtcaatcgtagcaacgaaaattaagggtcaacactaccatccggctggtggaagaatatattgaagggcggaaaaatacttctaagatattgcatatataagtactcctagttatataaaatctgacttctgaaacttgaacttgtggtgacgcaacatttcttgctcttattataatttacatcttctgttttaatgatggcaatgacagagaaagaactcgg

SEQ ID NO: 69649 - DNA, 701 bp, Prunus persica
  Intron number 2 from transcript ppa017699m (locus ppa01769 9m.g) derived from phytozome v7.0 (chr-ID scaffold_1; pos 18204284 to 18204984 reverse strand)
gggacgcctccattcaggtatatggagcaacttagaaaggctattctttcttctttataaacttttttgttcctttttattttgctttgatcttgctttaatggcatttgaattatgaaccaacacataggattatggtagatgaggctgtttttatcctctttttttctggaaatttgtagttcacttctaattagacttgacatagattttatgcaaccaataggcctctgataagttgataacccttttggctagccattttctgtattttcttttcctcttgaggacagtgagaagtgaccaacgtggagtggcatgagctgtcttgtttccttaggaagcctcatgttggtttcttttgtggagttccaatcaatacgtcccataatttcatatcataagtcaatgtaacagatttgtaagtagaaaatgaaattatgatacagttaaacaaagtgcagttatagtgaactttttgtggtcaaactctgtaatgtgctgcagtatgttatgtgcgttccaagatcatcgagtcatgagaaatttccattgagcttgaattgttgaaaggaaagaggtagaggattggaatgaattaaactaagatacaatgttcttagcaaacttaatcttatttctccccaatttgtttgattttaccttgttaaaaagtggtgcttctgaaaaaggttgaaggt

SEQ ID NO: 69650 - DNA, 1008 bp, Prunus persica
  Intron number 1 from transcript ppa020624m (locus ppa02062 4m.g) derived from phytozome v7.0 (chr-ID scaffold_7; pos 20866103 to 20867110)
cgccagctttggccacttcaccacgccaacttctggtacgtgccagagacaaataaataaataaaataatgcatctccagtgtgtatcatctctttattttcatgccacacttctctaattgagtaaaatctactaatacaataaatataaaaatacctaacaatttcctttgctaaatgtcttcaaggatatattagtaattagatcatgttcgttatgatcgatgaatgaaaggccaggcttagggacgtcacgtggcgggatatgggtgatctagaaacttggcttccaatacgctagttttgtactggttcatgatccatataaataggctttgcccttcacttcacgtaggcctttttcgctcatgaatcaccatccaacccatacactagaatctagattttgacccaataaaaataaatatatttttatatttacatgtttgggtttgtgcttaaacatttttttctttttctattttccttttttttttcacttccttagaaagttatgtttgctttggatacgcatgacaaataaatatggtcgttgtttttgatgatttgaattgaagaccgaagtcgacatcaaagtgaatttaaaaattgagttcaattaaattcaacataaaaagacatagaacccactagagtcattaaactcacgaaagacataaagttcacaaaacacaacagagacttgaaaaaccctaagataaagaacagggaaatgctacaccactcaaaacccacgagcgacgccatcaatgcaagaccacaacccccgaagagaaaacgataaccaaagctacaaatagaaaatggtggtaaatatgattgttgtctgaatcttaatcctatatttgtccgtatatatttgtcggaatctcaatgtacttaatgtacttaattaatggttcagattgaaaacaacgtatttgtcggtatatctgtgtcctacttattaaaccaaatccatatcctgatcttactggtgatgcagta

SEQ ID NO: 69651 - DNA, 783 bp, Prunus persica
  Intron number 1 from transcript ppa004603m (locus ppa00460 3m.g) derived from phytozome v7.0 (chr-ID scaffold_7; pos 17029196 to 17029978)
ttcaggtttgttatcatgctctgtttaacttcagtcaatttcaagcgtttggagtctaccaatgaggtaccaggattatcaactatagtgatttccaaaaggtcataatttggctgctgcacctacacttgatagataattaattgtcaagaaattatttgcaaaattggggattttttacttacttgtctgctttagattttctattttgtttgcataacataatgggcagcacaatttttgtcatggtttttttttttttttcctttttttggcttttcttatattgttgggttgtcccattttcttgcttttcagtaaccaagtgaagtgccatggattaaaagtgcagggtgaaaaaatttgtgggccggagtgtataatgctttgaactgatcttgtgatttggtgaatcttaatttaggtttataatagcatctgattggttattttagcatctaattaccctagaacccactagctcagcactaggcatttcaacctcacaacctaaaaggcatacactttcactttcgcaatcagccaaccccacctcactctctctttgctctgctctttttgtgtttgttttttagctcaaagggggcagaacccacttggtcatagggagtttctttgttgctacttccctctgaagagtgtttcttgctactatgcatttaacaagaaacttcagattgagacacctcattgtactagagtttgactattatgtctttggcttcctgcagttgacactatcgggactgctaaacttcatag

SEQ ID NO: 69652 - DNA, 578 bp, Prunus persica
  Intron number 1 from transcript ppa016023m (locus ppa01602 3m.g) derived from phytozome v7.0 (chr-ID scaffold_3; pos 18969449 to 18970026)
gcttggaccctcctataccaagcaaacgggagcatgtaggagcaaattttcccaaaagaatattcgattggtagattcccttttcttcttcgccacttctttctctctgcaaaatagaaccaataagaggaccacacccggggagtgttggccaaaggccctccgatgcctaaattagttcaattgaattgtatagaaaacaatagctaatagggtacggagatatgtttatggtgtaaatcgagcgggcggagccatatgtgaaagagaaagagagagaaggtggctagggtttgagaggaattttcttcagagtttttagtagagatttcagacgtacctcaacccttatgtgtggccatccttttatagtggtctcggaggctagggtttcaaaggaataattctgtagatgaaaaggaattattcctccccgatttggaattgatttgattaattagggatttgattaattagggtaaatcaaatccctatcaaatccccaattgtggtaggaatcaaataaattcctaacttaattaggtaactcctcatttaattgggaattgtggtaggaa

SEQ ID NO: 69653 - DNA, 528 bp, Prunus persica
  Intron number 1 from transcript ppa006893m (locus ppa00689 3m.g) derived from phytozome v7.0 (chr-ID scaffold_8; pos 20984700 to 20985227 reverse strand)
ggggttcctcctctgcctaaggtatgtatgtttttattttatttttataactttcttataattgttttttcattcgcaactgtttttgtttctttaagatataaaggaaatgactttaatttttctaacaatttttattagtgaaggtcttatgttttcattaaaaagtaaaaagaagcaaatgttctatattgctcttttcctctgttcaatatggtgttagtcttgatgctttgctcgtctactaaaagaagtgctttctttcaagtaatatttctggatttcttttttgtttttcctccaaggttcctggtaaaaattcagtttctgctcaaagaaataaaaaaacaataaagaatccttttgttctcaaattgtctgttgtttctcactccctttgcttcattaagaatatgatttaaaaatttggaagaagggtttctttgcgcttgtgtatactgttgaaatcgtctattatttattgcaatttgacttggttcgggatattgttgttgaatcagaatcgca

SEQ ID NO: 69654 - DNA, 901 bp, Prunus persica
  Intron number 2 from transcript ppa005545m (locus ppa00554 5m.g) derived from phytozome v7.0 (chr-ID scaffold_6; pos 28634320 to 28635220 reverse strand)
agcgtacgtatgtcttttctgcgcctctagctaatttctttctctttttcaaaattaggtatatcactctactttttttgttcaaccacaacttctttttccttcttcttcttcttcttcttcttcttcttattttccattcttttgcaatgtttctcattagctgtgcctgtgtcaccactcatcactcaccactcaccactcaccactcacgggtgggtgctgattagaaattattaataattttgtttcagaaaacaaaaacaaaacaaaaagtaattggtttcactggagaggaggagagatgtgggactgtaattgtaactcataatacagtcttgtccatttcagctctaataaagtaaaagtagtagctagtaggcacatttggcaccacacaatcaaattattgtctttttcttgctgtctgctttattttgaatattattaattgaatatacatatgtagatgttgatgatgatgatgatgtgaagctagctagctttagtggttgaagtatattgtccatgagtttacggtcccagtgtttgtttgtagtcgcattcctatatatatatatatatatatatatatatatatatatatatgaaaatgaaactcagctcatctggtctggtctggtctggtgtctggctctggaattaatagagccgttaattttctatatgctccaaaggttggaagtctgctaattcatttgggagtttttgccgaattcctagctttcttgtcccaaaatgtgacaaagtttgacccaaaatataatgcgacattgatattggaaatccgaaactaacctctataaagtactagtttatggagagattaactctatcatatgcagggccattcaattttgcacaaggaccaccaaaagga

SEQ ID NO: 69655 - DNA, 789 bp, Prunus persica
  Intron number 1 from transcript ppa003854m (locus ppa00385 4m.g) derived from phytozome v7.0 (chr-ID scaffold_1; pos 6103560 to 6104348)
ccaaacttggacaggtaatattaaattcaataacgtctttaattgtgtgtttttgtgtcttttttcttcttgatttgtcatagctccctatgtggttgtagatcccatatgacatcctcaatcatgttttgcaaacttttagttggtgccaccatcgtccatttgggtggggcctatttttttagtgagagtaagacatgggtgttggtcggccgctgatgaaacttacttacaatgcatcaacaattgactatcattcacgaactcaaatgactgttttttatattattattcttgaaagcaatactagagaaataacatattgtattaatctattgagtaacgctagagacaaaacggttttagaccatattaattgtgtgacaatctggtttttacacttgttacatcaattttgtgataagttggtaattaattaaatatatatatattacatgtcatataatatggttcatttaacaaagacggattgagtagaactaatgatattgttgggttggatttagtcaagcatgttgagtgttaatttggattataatgtgtactttggatgtttctcgttgattacgtaggatccttgaagtcccagtcttataaaacgattttgcttatcagaaagtgattttgacattgtcaaaaccactcccaaatagatgtttttagttgtcaactccaaacgatgtcttagcaaaagtacatttgaatttagacaacgatcctacaaaatatgaaataacgttgtgtaatgtccaactttatattaggggt

SEQ ID NO: 69656 - DNA, 600 bp, Prunus persica
  Intron number 1 from transcript ppa000791m (locus ppa00079 1m.g) derived from phytozome v7.0 (chr-ID scaffold_1; pos 33327075 to 33327674)
gccataggtaaagtatttatgaattccatatttaattgttcatcattagcaaagagcatgaattgaggctgcagtttaagctatattacttaaagcagaaagaaatacttcttgaagataagctaaaacacaaacacaattaccttgtttgtacttcgtttgtgagagctagaagtgatcaggtgatgggccaatgaacatccttttaccagggctgcaagtaatcataaattcattgttgttgtagaagtagacatgtttggtgtgtttgtgttctcaaattgaaataggtaaaaaaaaatcaaatatttaggcactgcaacaaatttgacaagcttagatttctaagcaagctataactcagtacttttgaaatttgttaaggggttgggggtgagttgtattggatagtgattttaagttttatctaaacaaacagcaaagcaaaagaaggataaataggcaaaaatactctgtttttcttttgctatgttctacttctgagccaaagaaggtgcaacagggcagatatccacatggagaaatgaatgattgtgcttactcccatctcactctgtcaactttcatgtcttgatacag

SEQ ID NO: 69657 - DNA, 454 bp, Prunus persica
  Intron number 2 from transcript ppa003755m (locus ppa00375 5m.g) derived from phytozome v7.0 (chr-ID scaffold_8; pos 11263325 to 11263778)
attgctactgcgcttgcaaaaggggttagttagtttctcttcagatcccagatgcctctgtggtggataaatgtgtatgcttgtgttgataagaaaatgagtttgatttgcactttccaattttgggtacttttttgtcacactgattcagaattttcttagggaattaagtgcaactttgcaaggaatttaagagtattatatgaattgtactgtgttattcagaagttgagaaggtatgaactttcaaggctgctaaacagagtgggagttgttgccagattacgccattaagtacatttattgcaataaaaccacgtttctctttctttaaaattctttctttctatgactttcgaattcttgtgcaggattgtatgcaatgttaatcactattttctcttgcatgatttaggtatattgtttgattatctagtattggtgcaggatagaa

SEQ ID NO: 69658 - DNA, 440 bp, Prunus persica
  Intron number 2 from transcript ppa017655m (locus ppa01765 5m.g) derived from phytozome v7.0 (chr-ID scaffold_5; pos 944632 to 945071 reverse strand)
aacaaaaccatgtaggttcctttgttcctcttcttttcttttctttaattgtaatttttattttaatgataaattatggggcatgtaagatgacttatgtcagttggcctaatcacgtgttatgattatcgtattagaacgagataatggggtttatgtttatcatttaatgccgtgtcttcttcactgagtaagaatcaatcgataactctgcttttattcatgttgtaattcatgcgtttattgtatttaacttcaattattcttacagggcaaccacggtgctcatctgcatttaagtattcgcagtagtcatttttaaataggatttaaaatttcatgaaactgtcttaagcctgccattttgcaatatatatttcttttaaaggaagggagaagaaaattttgaatttatgttattaatttcagggaagagtttc

SEQ ID NO: 69659 - DNA, 467 bp, Prunus persica
  Intron number 2 from transcript ppa006398m (locus ppa00639 8m.g) derived from phytozome v7.0 (chr-ID scaffold_3; pos 275355 to 275821)
atctcttggtagagaagaacaaggaaactgggtatgtaatctctctctctctctctctctctctctctctctctctctctctctctgtttttatcttatttactgatgtgacacataccatcacttattatgcataaataaatggcattcacatggtaatcttagttataatggaatgaaatgttgtcacattagttggaattcaaaatattagaataagagttggtgctcttaaaattaatgacaaagctttttaaatatatatatccacaaattaagacaatatggatcacgtcgacgcatgtattattttttcgaccctctcttctcaaataaaacgggactcatttacacagacgggtcctatatctattactgactcagtattgttgatgcagtctaaataacattacacatgtgtataacacctaactttgattattattattatttttccgcttgcgtag

SEQ ID NO: 69660 - DNA, 429 bp, Prunus persica
  Intron number 3 from transcript ppa010356m (locus ppa01035 6m.g) derived from phytozome v7.0 (chr-ID scaffold_6; pos 3075397 to 3075825)
cacacctgaaggtattttcactttgaattcaattgggttcttttgagcttcatgtttcattttgctttctttttcacagatggagagagattccagcttctgttggattatcaaatgggaaaatgaactggttattgaaattcttaagctttgcaactcaagtgaattaacatgatgtatattttttttaacacaatattttgaccataaacttcaatactggttgtggcctttgctgcattatgagatcattttggaccatttatacgtttcttttcctgaatttggatacgcatgattagtatgatacttgggcctggatgtaagccagtattctatgaaatttcttatactctttttgatgaatttttttctgtggactcctgaatatcaggtgtagcattagtcctctgccaatcagatcctgtg

SEQ ID NO: 69661 - DNA, 551 bp, Prunus persica
  Intron number 1 from transcript ppa018374m (locus ppa01837 4m.g) derived from phytozome v7.0 (chr-ID scaffold_3; pos 14293250 to 14293800 reverse strand)
tctaggtaaacttctcacaatctaaatgatgaatttgtttttattttgaatcagagatccccatcaatccatattcatacatggtaaaccagtttgaggcaacggcctcaaaatgcagggctaatatctccactggttgcttgtttataattgatctttgctcattatttttcactgttctaccatttcgatattcattccttttccacttttctaattcgtttcagatattgatgagtgcgcggacccgaagaatagcccttgtttacaagaaaaccttggacctacttttacctgtaaaaatactgaggggagttatgaatgccactttcacagtcctccagagaagaagaaatctgcagttaaaccggtgcttataggtattgcttctatccttcagttgccctggaacaatttccagtgaattcaaatgggcaaaagttgtacttttccctgaaatttcaagagaggctaaagcatttgagtacttctttctaaatttgttgagttatgcaggtattggagcaagcttggggctattacttctactt

SEQ ID NO: 69662 - DNA, 353 bp, Prunus persica
  Intron number 1 from transcript ppa026371m (locus ppa02637 1m.g) derived from phytozome v7.0 (chr-ID scaffold_4; pos 3363044 to 3363396)
gtgggtggcagaaggcccaagcccagtcacgctacttttctttaaaaatgaaaaataaacctggttttttggcactagcccaagttggcccagtatcagacccatgcactcataagatttttgatcaatcaggcctacgcactcataattgaagacctatatccaatatagcctcctagttggtattaccatatgtcacaaattgtttggataatcctgggttaattaaacaaacaggatctaatcaatgctatttgagttgattatggtggaaaatattcaattatataatcatgggtttgatttgcgcgcgcagaggaagcactagaagaaatagcaaaacaactggggaa

SEQ ID NO: 69663 - DNA, 604 bp, Prunus persica
  Intron number 1 from transcript ppa011393m (locus ppa01139 3m.g) derived from phytozome v7.0 (chr-ID scaffold_8; pos 21468831 to 21469434)
gccaattctcgtacgctccctttctttcttttcattttcatttttttaatttgtttcttttgatctgtatgctatgctatatcatctgtttggtttgcttttgtctttgtctaaacctgagtttatacaccgtatggctgctgatatatcgtgaaaccatatgaaacaaatacagttatgttgtacggatgtgatttgagtatcatgttagctgaccgaagctaggttgagtgatggttgattttatgtgttttacatttaatatagagaattgtttaattcagtgagctgcggacatctatatcgaacttcggcttgtttgttaactttgtattttctccaaattagtactaagttgcatcgtacgtagttcttgaaaatatttggtgctcggaattgtatttgacgtatttcaagtttaggatatgaattggaagtttttttttacagtgacattcaatgcttaaatcatgttttgtttgcattttgcccttatgagatgcttatgaaagtagttcgatggttatgtttgggtgttcttgtattgttttttgatggctttgattgtcaagtgcaggccaaaacatacggaagttggtcaagg

SEQ ID NO: 69664 - DNA, 311 bp, Prunus persica
  Intron number 1 from transcript ppa026333m (locus ppa02633 3m.g) derived from phytozome v7.0 (chr-ID scaffold_3; pos 7166542 to 7166852 reverse strand)
aagagcacctgcagttcataaatagtaactacaagcaaacagatgaagaacatgacaaacaaaaaggagcataagataacagttggtttgataggcatgtagtggatgaagctgttgaagaaccatagagagaacccgatgatgtttcaagtgatgactacaattcagaggaccttctaagtgtttcaaaataggaagacgaagttgatgaaaatacgggtgtgaaaaaggttagtcgcaaaataaaatctcaaaggttcaagcaattcaaaggggagattaatttatttaatccagtatttcatattgga

SEQ ID NO: 69665 - DNA, 156 bp, Prunus persica
  Intron number 5 from transcript ppa016012m (locus ppa01601 2m.g) derived from phytozome v7.0 (chr-ID scaffold_4; pos 964843 to 964998 reverse strand)
atttagtattatatatacttttttttttacaagcggtagtttaaactactctaagaatgaattcaaattattataatataaaagaagaatatataatatcttatgttattgtttttcttgtgtgaaaaaacaaaaacaaaataacagggtttgggt

SEQ ID NO: 69666 - DNA, 502 bp, Prunus persica
  Intron number 2 from transcript ppa007426m (locus ppa00742 6m.g) derived from phytozome v7.0 (chr-ID scaffold_7; pos 3510878 to 3511379)
ctctgattcctcctctctgattcgcctcaacatcggtcagctccctctctctgttgtaatccatcttaatgtgaatttgctgtttcttgtagtatcaaaaatgtctttaaatcgattcgattgctctgaaatggaagtgtaaccctaaattttaatttgctccctagtctctgaaaagaacatgtttttgttgttttggtgactgggaaaaccaagcaaaataaggaaaatgaattgaatattttgattctacgggatgagattgggaaaaagttcggccatgtaaggcaattagtgcaacctttgaatggaagagctatgcatatgtgtatgtataacaaattgaagttgtaaatagttgatgatgtagattaattatgggaaataaacttttttttagtgtacctatactatagaacttgagaattgggtacataatttggtatgcttttattgtttgtcaacaggaggaacgaagttttgcactactattgatactttg

SEQ ID NO: 69667 - DNA, 1065 bp, Prunus persica
  Intron number 2 from transcript ppa005751m (locus ppa00575 1m.g) derived from phytozome v7.0 (chr-ID scaffold_7; pos 19895560 to 19896624 reverse strand)
caaagatacttcaagagcatcaccacgaattacaggtttccttgtccttctatttctagaatatccattttgtcgtgaagttggattttggttgatgtgaaccaattgtgttctttttactggttaattttatgggttgaagtagttacataaccttgaacatcgtgctggcatggacttttgacaatttcataaagcaattatacattaaaaattgtcatttcagatggggatacatggttcctgattcatctctgctgttacacaaaacatcagggaattaaaaaaatacaaaatcattatacatatgtgtcccatgtttgacaatccccatatagaagcatgcaggtaagctgattgagattatcaatcctcatatgtgttgaatttcttggctggatgttatgtggttgcacacattagcagtttgacttagcttcccagaagtttacttataaaagaagagcttagacccctaaatagtaattgtcatcaagttaaagatgtgactaccaaaagtgtatcagtaaatagatgacataataaggagggaggaaacatggtgatgtgaattgacttttggagtgcccactggaagttggaattgcattatgatgtagccagctaccagggtcgagcatagtacttagtctatagattgctaagtgtgtgtatttcttagtagggttattggcatattaagtacacttagcatcaatgacacattcaccgtaagttattttctcacttgcatttttgttaacttccctatgtcattgtagcgcaagcgttgtattcttcagtggattgtcaattttatgaaaatgtactttgaatgtagcataagaagttgcttgctcactaatgtttctacataaagagctctatctttcctttattgggatatttgattatagagctgcattattagatattccattgttttctgtcagctgaatagtggtctcatgtaatacatctcttatctccaaaagaaagttttcttagttatttgttatgtttcttatagggaacagttgttcttgttttccaaccagctgagga

SEQ ID NO: 69668 - DNA, 381 bp, Prunus persica
  Intron number 2 from transcript ppa009079m (locus ppa00907 9m.g) derived from phytozome v7.0 (chr-ID scaffold_5; pos 7894114 to 7894494)
ttccgagaacctcgatcccacttccacctccaaaggttcgttctttcttatcatccaatctctcatggtattttttctttttttcttttaaagaatttttgtttttgttttggctgagcctatggtaggtgattgagcgagacaataaaagtaaattcagtataatttacaaatatgttggttgaatctacactttgtaacaatgggatggaagtaaaaatgatttcttttttctgaaatatatcatggggttatgcttgtgtgtactatctatctaacttgttgtgctgaatggaaaagaagaaaggatgttgattttagttattttgggtcgaatgtgaaacaggtgactcgaaagagagtttttatatcggaccgtta

SEQ ID NO: 69669 - DNA, 864 bp, Prunus persica
  Intron number 1 from transcript ppb017438m (locus ppb01743 8m.g) derived from phytozome v7.0 (chr-ID scaffold_33; pos 25710 to 26573 reverse strand)
ctctgacaaggaaaaaagacgaaaaggtttctctgggagattgaaatttttaatcgggtttggaaacagtgcatgtgtaagtcgaaaagttgcttacatataaaaccatttcaaaaaaataatacggcggttacatttaactacgtcgtttttaactaaaacgacgcaatatttttcattcgacgtggaatcatttcatttaacgtcgttaggtttaatataaccgacgtggattttaatttttaaattatgaatagaattttttttcccgtgacctttcagtttatttttcaattacagtgcgttataaatagagttttttttccggaggaaatttaaaacgaaggaaattaatattctgcaatatgtaaagtttcttttttggatgacagatttaaataaaataagaatataaaaacaacaaatgtgtaagtcaagtagacgaaaagttgcttacatataaaaccatttcaaaaaaataatatggcggttacatataactacgacgtataaattacaaaatacgacggtacatttaacttcggacgtggtaaataaatacgacagtagtttgtaggtaccgtcgtagtaaactcaaaaattaaagtacataagtaataactcgcgtcatggtatattatttaacacgtcgtttttattaatgtaccgacgtggatttctgtaatatacgtcgatcataccgacgttgattttacaatttaaacggcggtttgtttgtaaggaccgccgttggttttaaaaatttattctataaatttgtcgctttcattcattttcggtttacatttaaggttccaagttcttcctctctcagtctctcatgtctcaaagataataatttgg

SEQ ID NO: 69670 - DNA, 395 bp, Prunus persica
  Intron number 1 from transcript ppa007719m (locus ppa00771 9m.g) derived from phytozome v7.0 (chr-ID scaffold_2; pos 22983683 to 22984077 reverse strand)
ccaggtacgttcccaagtcaaaatagacatcttccaatattagaaactaaattaccactagactcgaacccgaaaacagaaatactactagactaatagtttgttactattgttatcttcgtgattccaactttaattaagtgggctctctaagcttgtcttaatctcttgcttattattcctcattaaccattcctacttgctttatacttttcttgagttttgtctcacataatcctacatggtaattaaatttgtaggcacatgccattaaattcaaataatctaattgtaggcttggaaaaagagtatatatagtaagacagacgtatttttagtttctttgtgttgtgtgatgattgagttgtgtatgttttttttcaggcaagtaatag

SEQ ID NO: 69671 - DNA, 156 bp, Prunus persica
  Intron number 1 from transcript ppa004219m (locus ppa00421 9m.g) derived from phytozome v7.0 (chr-ID scaffold_4; pos 1782935 to 1783090)
gggtctcatttttggctacgatatcggaatttctggtaattttcttttcatttcccagatcacactttgatcactaacctacctttttatttatttatgatgaattacaattttgaaagtttcttttttgaattatgattaggtggtgtaacgtcc

SEQ ID NO: 69672 - DNA, 1051 bp, Prunus persica
  Intron number 2 from transcript ppa004219m (locus ppa00421 9m.g) derived from phytozome v7.0 (chr-ID scaffold_4; pos 1783365 to 1784415)
tgttgctcggtttcggtatcggcttctccaatcaggtatgccctacagattttcctttctgatctctctgtttggttctttgtgttgttttttttttttggggtcaagaaatcttgatatcttgcacatgaatcatgatattttgtttgtgtttaagtttttgttcaatgcaagttgtccgtaaaaaacaaggaatgtgctgtccaaacaaaaaaaaaaacaaaacaaagcccaatgattttattccttcctgttttttatgtctgagttttatttatgatttggcttgggttgttttctgggtttgtcgttttaccatgtctctctgtatttcttcagatctgacttgaaacgggctttaaacttagataactcagacaaacttggaacatgacaaaactggatatgaaatttcaaccctttttgtatgtgcgtgttgtttctttctctgctttctgggttcttcacgggggtctaataatttatagcaatacactgtttggttgccaagaaaatgcagggaagaaagatgctaattttttcagtttactcagcaaccaaacaaggggtatgaaaaattaaattggaaaaactcaaagtctgaaacttttgtccttagcaatcacttttcactaagttccaacgcatgctctgttttttctttgggcgtgacttcactttgcacccttttgaaggcctgcgtttactcttcgatgcaagaggggttgaatagaaaattcaaaattgcaatctgatagcggtttttgacttaatttaatacaaatgtcattttctttgaatcccttataaaaaattaaattcatgacatcattgaaatgtttacttccaacaaacatgacaacttgtcaaaccatccatgtggtcctggaccgtgaccgttttgatcactttgatcaatttgttcatatattaccattaatcaaacgtaaaagtttaatctaaacaggggataatcattgataaattaatttattctattgttgtcatgtttgttttgtaattacagtctgtgccactctacctctctgag

SEQ ID NO: 69673 - DNA, 552 bp, Prunus persica
  Intron number 1 from transcript ppa000224m (locus ppa00022 4m.g) derived from phytozome v7.0 (chr-ID scaffold_1; pos 26118212 to 26118763 reverse strand)
gtttcctctcgaggagagccgtaagttcttcatctccttctcttcttttttttcttaatatttttttgtttgctttagttttgccttatgttaatgtttgtggttgattatccatgtatattctgcttgatgatgatgtttgaatttgacgagtccctgcttgttgatttactgtttgtgcctgcacttttgatttttatattaaaatcaaatggtaatttcacagtaaaaagcttcgaaattaaacgtttttgtttggcttgctgacaaaaggtcagatttttgtttaggtctttggaccagttctttcagaagtttcaatcttcctcgggtgtggataaaggagacaccaaaaatagaaattattatccttgtcatgtgtgcagccttttcttatctctcctttttgtggaataaaaattaagatgatgtttaattttatgtgaaaaatatgttttccgggctattgatctgctggaagagtttggaaatgatacacgttaactaatttctaagtttctttctgtgcaatgaagttcggggcaaccccag

SEQ ID NO: 69674 - DNA, 660 bp, Prunus persica
  Intron number 1 from transcript ppa013880m (locus ppa01388 0m.g) derived from phytozome v7.0 (chr-ID scaffold_4; pos 13921250 to 13921909 reverse strand)
agtccgctcacatcaacctcaaagtcaagggccaggtcctccctctctccctatctctctcttagggttttggttttattcattggaaatttcgtcccgatcgtaatcagatagacgtttgcgatattgggtttttatatatatgtatttttatttttgtttttgaatttttgtgtttaatctaacttgtttgactttatctgtttcataattttgttccatttttaaattttctatatgagttagggtttgctattttgcctaattgttagaactcctgttgagatttgaagtttagaactcctgtgtttttgtgatgctctgtctgtttgggtatcaatctgtattttctcaggaaaaaaaaaaaaaactaaatacttttcgttataccctaaccggattttattttcttaatatcggagaataatgggttgcttatgttggtgtactttgtgcataacttgctaattggttatgaaagaggatttttatctcacctttgaggtggaagagcaatgcctttatattttctctttttacttttcaaatatttgcaaagtcacaagttgaccataaagtttttcggaaaatggattctctagtgctgtttgtatgtgacttactgctaatgctggtaatggtttggttatgttatatagg

SEQ ID NO: 69675 - DNA, 533 bp, Prunus persica
  Intron number 2 from transcript ppa010565m (locus ppa01056 5m.g) derived from phytozome v7.0 (chr-ID scaffold_4; pos 13751769 to 13752301)
gcatttgcagagcaacaaagcgaaattgcttctgggtatcctttgctttttctttttcttttcagttttcaattacagtctcaaaattcatttacttttacatgacagatatacatggtgtttggttgctggaatgaacattggaatgaaattcaaactaggaagagataaaagtgatttaatcagaattggaatagaatgtcccattgggggagagagtcagagttaaaattaaagtaggaaaatttgaaaattgggaaagaacccaacttttgataaattgttacagaatctcaaactcagaaaatattgcaactctttttagatttctgctgtttcatattgtgagagttgggtatcttggtttgtgcataattcaaacaatttgcaggttgttggctttatgataatcttataagttcagagacagagatcatatcctactttgaatcttatgtagaaattcttttaataatttgttactatgtctatatgcagctggagtcccgaatctggccttggttgagggcgta

SEQ ID NO: 69676 - DNA, 630 bp, Prunus persica
  Intron number 1 from transcript ppa020324m (locus ppa02032 4m.g) derived from phytozome v7.0 (chr-ID scaffold_3; pos 7798397 to 7799026 reverse strand)
acgaagagcgcctgcagttcatagatagtgacgacgagaaaacagatgaagaacaagacaaacaaaagcgagcagaagataacaagtgattttataggcatgtagtggatgaagctgttgaagaccacatagagaacctggtgatgttccaagtgatgactacaattaagaggaccttctaagtgtttcaaaagaggaagatgaagttgatgaaaatacaagtgtgaaaaaggttagtcacagaagcaaaacttctaggttcaagcaattcaaaagggtgactgatttatttaatccagtatttcatattggaatggagtttgctaacatggaacaatgtaggtaggccataagattctatgcagtttcaagtgctaggccaagtttgccactgcttcatggtttgctcaaagctttgatgaggactagagagataatcctaacatgtctgtttcaaatttcatgaagatcacgaggaagaattatgaaatagatatcactgcaaaccagttttacaaaaccaagagcatagctaaagagagaatacatagaagtattgaataacattacgtaaaattatggaattcttgtgaagagttgaaggcaaacaatccaggcagcactatatta

SEQ ID NO: 69677 - DNA, 784 bp, Prunus persica
  Intron number 1 from transcript ppa015773m (locus ppa01577 3m.g) derived from phytozome v7.0 (chr-ID scaffold_8; pos 20340842 to 20341625 reverse strand)
gcaaaaccctcccaaaaccctcctctccgttcgaggtacataacccatcaaccattttatggattcattgcattctaattagtggtaattgatgagctttatgacttgctctccaaatataaaagccaatgattcaatttcgaaggggcccttttggagttcagtaggaaaactgcatagcttagtgttagtgggctgagtttgtaacttcgtttatgtttgatggtcatttttgtttcgcatgctaaatgctctaaaagttgacatttttgcagactcctttggcggaggaccggtttgtaagaaatgccagcccataacggttaatgtatgctcatggagctcaactgttagttatgtaggatctcaggatggttccatgaagttttctggtaatcctattgttgtcaagaagcaattgttgcaaaagaggcaagttttatttgtgccaaagaattatactctggtttctgttgtcagcatgggactaaaagttgggatatgaatgcaattgttggcttaacatttgacaacaatacactcaaaatgaatctattctctgactctccatagtcattgatgttatccttgcaatttgtgaatgcaatggagatttgggctgtgtggtgctaccactatggtttatgtaattgctttgagttagtggttgtgtagtaggtatatgtttgccttccaatcaaaatttttttcttctctttcatatttcctttcggttgacatatccagagctggaactgtaagggctgccactattgaagaaata

SEQ ID NO: 69678 - DNA, 547 bp, Prunus persica
  Intron number 1 from transcript ppa002520m (locus ppa00252 0m.g) derived from phytozome v7.0 (chr-ID scaffold_3; pos 20872369 to 20872915)
tctgtctcttctctcctccaattcaatccctccaagtactctctctctctctctctctctctctctctctctctctctctcaatttactctctgcttggttgctgagaaagcgaaggaatagtttctcggggcctagtctgagtgtttgtgtttctgttctagatagtgaagcatcgaagatgcaaaatttcaactttttctttcttttcgtatcattttctcagcaaccaatcataatgtctaccttcatatcatttctctggtttttcccatttactctaagctgatttcctagtggaaaaaacaagtctttctagttgagcctgtcgtatttgttttacttgcggtatcatatagacctcaacagaaaagccatttgattttgaaaatctaaatcctttgttttaatacttaccagcaattattcatagagaaggatattattttctttattgacttcagtttatctacggattctcagcatccttcttacgttgggtgggtgattttgtctaatttagcttctttttttaattgtttacagaa

SEQ ID NO: 69679 - DNA, 357 bp, Prunus persica
  Intron number 2 from transcript ppa009790m (locus ppa00979 0m.g) derived from phytozome v7.0 (chr-ID scaffold_2; pos 20712377 to 20712733)
gcgcagcagctggaggaatcggtcgttgtcgtttggtacgtatctgggttgtgatgggattttgatttgttgaggtttttgggtttttgtttggtgggttcttttcatttgggtttgtttggttgctgagaaatgtagggagagaaaaagatggaggctttgacttgcgtttccatgcttaagtgaaaggaaatgcataaaactttattgggaacttgtgattgggttgtgattaaattttgcaagcagagcagtacttcacttcttccattgttcagaaattttatgatttggcattaagaaattggtagattttccttctttgaaatgaaacttcaattgaaatgtctctgtagg

SEQ ID NO: 69680 - DNA, 790 bp, Prunus persica
  Intron number 2 from transcript ppa012487m (locus ppa01248 7m.g) derived from phytozome v7.0 (chr-ID scaffold_5; pos 18329923 to 18330712 reverse strand)
aggaggtgggttaacttttaagcttgaaactccttttctctaccaagttgagtcacagaggctaaaatatcaagttttgtccttaatgattatgagttaaatatgtgtgcaattatatgtgagccagtttagtgcctaatatgtcacttaatatggttgatgctcatttggtctgcatgcattatattgagcacctgatgaagtagtttacttcatcaaattattgatttgcaatttgagttccttatgtgaagcagttagggatgacatgttgagtggactgttgtcttttgttgttttaccatgttttttttctcttcttgttcttgttattttttgaagactttcatagtctgttctcaccatggggaacagaaagttttctcttttattgatttgtataaccattgcagttgtactaatgaaccaacaaagaaaagtaacatgcactctttatgtggcgcactgtgaatttaaatacaataatttagtgtatgctgcatttggtgctcgttacaccagatggctccgtagtttaaggagctcataacagaaaggtagtctccaattggtgtaattgctttttcagtagagagcctactctggaggagagtgtgatgggtttttctgctcttctgttttgagtcataagtcttacacattcgtgcagttctttgtaattatcacttgtgttttgtatgatcttcatcttgtttgtacatgattttgtttatttattatgttcccaatttcagaaagaagaaggctgttcacaagacaactaccactg

SEQ ID NO: 69681 - DNA, 1030 bp, Prunus persica
  Intron number 1 from transcript ppa012487m (locus ppa01248 7m.g) derived from phytozome v7.0 (chr-ID scaffold_5; pos 18330776 to 18331805 reverse strand)
cacacaaaaaccctaggaaggccaaaacctcaaaggtgagctctttcgcactttcgttattctccttaatcatgtatagtatctgtatcgctttctgagttagggctcttcttctttgttttgattttgtttatgcttgttttctgggtaacacggatgtacaaaggtatgagggttatccggcaggcgcttgatcatcaactgaagtttcagtttctttgttattttactttttatgtatttcaaattcattcggcggccaaaaagactgcttttacttggtgggtaatgcaattatgctaccagtattgtagtgttagacttttctggttggtttattaattgtttgtgcagccaaagagtatgtttgaaatgctttacttgatgggattgcaattttgctacacttgtgctcgtattgttcacatatactattactactactttggaagtgtcttccattattatagattttgtatttctctgtgttcgagggtgtgaaaattccaaaattttaattctaagtgggtttttaccatgacagtgttaccggtatcatattatccagatttcgcaattctacttgtatcacagtcttgtatatatgtattgttctcttaaatttaattaagataaactcagtttcggagataattgttgatgtttatgggatttggatggtgttctgaactacatggttttggtttcattgccactctgtaaaattgtacaattgatgcattctttcatcagtttcatgttggcacttcatagatgcttggttttcttagtatagtatgagattgaagaaacaagataacagaaaatagaatatttgtcctttatttgagacattgtaaaattcgttttgaaaacaatttgagacattgtaaaacaaatttctcggtcgtgttgggggttttattgcttaaaatacagtctacttaactttagatgcaatgttttggatcttgaattattttcaattgaagctcatcccttcatcttacagtacccactttttatgcag

SEQ ID NO: 69682 - DNA, 736 bp, Prunus persica
  Intron number 1 from transcript ppa018507m (locus ppa01850 7m.g) derived from phytozome v7.0 (chr-ID scaffold_8; pos 1495459 to 1496194 reverse strand)
tgctttgtaagtttctgacctaccctcgagagatcttaataccatatgaatcaaaatgtaagctatataaaacaatcattggaaaattttcaaaccgaatacgagtagctgaagaagcttgaccatgtctatccataatatctgtcacttgattagatttcaaataggcatgttgtatgtaaactttattaaagcccttaagcagctgtcatatatatatatatatatatatatatatgtatcttgaataaaaataataattgctagttatttaattaattatttttcatttattagttagtactagaaaatttttgatccatgtgaaaacatataattttagaaaagtaggacaaattctgaatataaagaaaaatttctatgacagttttttctctggagaatttagatctttgaattgaagatgatattctgaaaattataagaattaaagagttgattttctagtagtttaaatatttattttacaaaaagaaaaaaaaaaaccataatcatagtaattaaagataaattctgcttttaaagtttaccttttgtttcttaaatcgacgaacaatttctcaattccataccaaatgggtccaaacattttatactttgcctgaggaattgtttataacaagtctggaggaattatttagaaaaactgggtccagacatatattttatatatttttgcagcgcaattaattacttgaatttgcagcattcaact

SEQ ID NO: 69683 - DNA, 238 bp, Prunus persica
  Intron number 1 from transcript ppa020836m (locus ppa02083 6m.g) derived from phytozome v7.0 (chr-ID scaffold_6; pos 13002163 to 13002400 reverse strand)
ttggactcggagccaccaggtaataagtgattctctgaaagataaattaaacaggattaaaaacagataatacatgaaagatatgattatttacttaacttgaaccattattcttcattccctggccttttttgataaaagtatttgacatacacagtggtaactttgattaatttgtatgaaaattttccaatatcttccagggatccggaacttgtgaagaagattggtgctgcaa

SEQ ID NO: 69684 - DNA, 707 bp, Prunus persica
  Intron number 1 from transcript ppa016270m (locus ppa01627 0m.g) derived from phytozome v7.0 (chr-ID scaffold_4; pos 6425306 to 6426012)
aggataatgtaaattcccattttttcatatttaaaattttaaattaaaaggaaaatcagataataaatcctatttttatgaaacacaactgcccattatcttttttaattcttaaatttttaatttttttttttaaaaaaaaaacctctcgcaagcgcggaagagcgtacggataagctagtaataataaaagatatttattatttctggcttgttcataaacggcagtatctccatttatttttcggtagataaagacagacaacccggccaagcagtggaaacttcacacaaaatggcaatgcaagtagccaatattcaagtcaacattacagtcttctgaacaaatcatatcacatataccaaacaacccaagaaaatcagcccaccagacttgtaagttaaaacaagcttttacaagtctcttaaatcgtctgcatcatttgacttatgcattgagctcacaacctcagtttcactatcaataattcaagaaataattcaggaactaggagataagattctaaatctcaggacagaatcccatattctagcattttacattgccataagagataagtgctagggaaggacacaagggaaaaatagaaaaatgggttccatgggagtagtgggtgaagaggttcagccaagaagttactggtgatggagcaaacaagatttcctaccagaagaatcctttcaaa

SEQ ID NO: 69685 - DNA, 620 bp, Prunus persica
  Intron number 1 from transcript ppa025649m (locus ppa02564 9m.g) derived from phytozome v7.0 (chr-ID scaffold_7; pos 22461254 to 22461873)
ggaggttggagaggtgttcatatcttaacagaattgtttgtatgatgtcagatgccatcttattcacctaggcatatggtaggatcgtttgggatattgccttttgactgatgagctttctaactgataattgggtgccttttagatcagtttggtttagttagctattccttgagctatgcaatcagttgagtggcaatctgcttttcttaaacatttctttttctctggtgtttgtacatggattgaaaagtctgtaaaaaatttgttgtctattgttttcttcatatatggtgtcagcgttactattaactgagttaataatctgataccaacaaactaggattgtttgcttggatgggcttgttttaaaagtcactcagttctgctcagaatgtattcggggggttttgttctgccaagattggttgatgtatctgtcctctacagtagctctggttttgcgaatccttactaaatgtattcgtctttcggtggcttgtgtttatgtgttgttacatttgtgttcgtttactttattttcttgactgtatgaatttgttttaacatttgataacatttcaggaggtgtaagaagttaagatttaggatagagaaga

SEQ ID NO: 69686 - DNA, 400 bp, Prunus persica
  Intron number 2 from transcript ppa010498m (locus ppa01049 8m.g) derived from phytozome v7.0 (chr-ID scaffold_1; pos 37652492 to 37652891)
ccctcttattttcggaggtaaatcccattaaggtgtggactttgtttctggagatgcatattacagcttaacttttgggctgaaatatcttcttttctggcattgtggccaaaactcaaaactctcagttcaaaattagtctcgacttcaaagttaaaagaagttaaaagttgaagaacaagcatccatatgacatatgattttcaactttatccaggtgttgaaaacaacaatgacaattaccacaactgccttggcatttgtttttgaaaattagcatgagcaactgtttggctctgtgtaacgtatttgataatctgctcattactattacatggtatgcatttctttgttgttgttggtcatatgatgatttaatctagtgctttcacagattggg

SEQ ID NO: 69687 - DNA, 638 bp, Prunus persica
  Intron number 1 from transcript ppa010141m (locus ppa01014 1m.g) derived from phytozome v7.0 (chr-ID scaffold_8; pos 8550565 to 8551202 reverse strand)
cctataaggctgctcaggtttggtttgattttgatttcatttggttgctctttgtggctatttataatataaattgtggatttttttcttcaaatttgaatacttttgtaaatatggttgtatattatgcatccccttgtttggttgtttctgatgaatttattagatcgaattttcatttgtttggttgggaataattgaaaaatgggtaccaaggcttgatttggttgaggatatgttcactgcttgcttatcagcgctggtttcagagatcatttctgcaatcttttggtgtccatgattttggaattgattttttgtttggtaaatgattctattggtaatggtttttctttgtgaccatgggaatagggaaatcaagtgatatttctttttcatgtgcttaattccaaatggtattagttaaggccaacctatagaaatctgtttcttctagttaattttgaatcacatgatttttcttgtcaattaaagatatatgttactgtgttattcatgctttgaggttacagcgttttaaattcattctgttcatcagttgatgtgatatttcccgtgtttgttataatactctgtttgcaggatatcgcgaactctgagctggccccaactcatcc

SEQ ID NO: 69688 - DNA, 514 bp, Prunus persica
  Intron number 1 from transcript ppa010094m (locus ppa01009 4m.g) derived from phytozome v7.0 (chr-ID scaffold_4; pos 6525954 to 6526467 reverse strand)
gggtcggcagccggcgtagttcacctgacaaggttcgtatttcatttttctatggcaccttcatctatgggttttctttgaatttgcataccataaattctagagcttgtacaattaaacttttagaagttgaataaagcttgtgaacccagttctgctgcttcttgttgtagcaattctttagggtccgaaaattgataccttgtttagagctgatttgtttttgttctggttagcccattatggaaaattgtttgattatggtattctaaaaggtgagaggagagagtaggcgaagacaagtgatgtaactgtaaaagaaatttgggcactgtatttgatcgaaaagccgtatggctgtatgtgaattattggatcttcatgtcattttgaatgtcatgcatttgaagtgggataatttgatttgtagacctatatgtgggtttcattttcttaattttatttcctttccacaacaggcgcgaggattgaagaagcatctgaagaggctcaa

SEQ ID NO: 69689 - DNA, 810 bp, Prunus persica
  Intron number 2 from transcript ppa015266m (locus ppa01526 6m.g) derived from phytozome v7.0 (chr-ID scaffold_4; pos 3783851 to 3784660 reverse strand)
cgaggaattcacaacttggctggactcgccaaaaagtaagtgatgagtcatgctttattattccttattcaaattcagattttatttgtttttcttcttgtgtttgtgtgtgtttttgtctatatatgtatgtggatatgaacataaatacatgcatatacacacacatacatacataccaacacacacagacacagacacacctatgtatatatgtatgtatggttgtgtgtgtgtgtggatgcatgatgtatgtaatgtttagaagatattgttagctggctggattaacctagttgtgctgggtctggttgactggttaatggatggactgagtttgctgtccttgatcttttcctgttaagtagtttgacatcataaggcttcctaggaatctgtcctaatgtgaagaattttgagcgactgttaaagaaaattatgctgtacttgaatacatttagagtcttagaatcagcagcaccttaggttgggtctcatataaagttttatctatagcaatcgttcctaaggacttggtcagaaaattaaattagccaccagaagagcaaataacttatgcttaagtctctcacatagaagagatggatagattgggaggaaaatgatgaatgggtacatcaaacatgtgcacgacggcttttaatgcaccctgctttagttttggttgaatccatattcacttatgcactgatggtacaattaattgaaatggaagctcactaaagcatgctgtcattgtaatgcttctctgcaggtttttcatctgttgattggctcttctaatttggg

SEQ ID NO: 69690 - DNA, 668 bp, Prunus persica
  Intron number 1 from transcript ppa008478m (locus ppa00847 8m.g) derived from phytozome v7.0 (chr-ID scaffold_8; pos 295607 to 296274 reverse strand)
ttttcttcttcttcaagctcaaacgctttcaccaggtaagctcttcttctatacgttttcttgtactaatatgaaaaagacccataagctaattttgacattttcattcatagatgtttgtgtttatgctcaagcgcatatgtatactgtatgtatctatgagtttattgttttcttaaagatgagaatgttggatttgataggggctaattggctgaaaacaatttatgtgggtcgcaatttgttgaaataatggctttggtttaattgatttgggcaaagtgacagtatgtttcatttgggttactcaacgtcttagaaaagacaaggagttcttaaatttatatttgtcttttgatttaataaatcttctctttttttgcatttcttggattaatttttgggtgttcgattctggttaagtagattgtgacgggaacaaactgattgatgcattctttcatggctgggcatatcaagttgtgtaatgtagtaatggtgcatgctcataaatggaaacaaaaattctcttatattcattgagaaaaatgcggcattttacttagataatgtgtagaacttataatatttgtcattgtagactcaaatatttactttgtaagtttcaatttttctacagacgcagttaagaaagtgtggctggctaa

SEQ ID NO: 69691 - DNA, 308 bp, Prunus persica
  Intron number 2 from transcript ppa010228m (locus ppa01022 8m.g) derived from phytozome v7.0 (chr-ID scaffold_5; pos 6431611 to 6431918 reverse strand)
gcctcataatcccacagatttcacgtaatccctacttctatcacttttttctattttttctttactttgtatatgaataacctaacactgattcatagtaacaaaaatgtatccaactcaacagcaactgagacatgagaatgcaaacgaagacaaagacaataagggggcattactgtttgattcttttttcagtatacatattttatgaattaggttttaaattgttccgctatatataatttgttttttaatgcgatctcacaattttaatatgatgtttttgtctagagaaaacttgggaaagt

SEQ ID NO: 69692 - DNA, 840 bp, Prunus persica
  Intron number 2 from transcript ppa007232m (locus ppa00723 2m.g) derived from phytozome v7.0 (chr-ID scaffold_4; pos 4503015 to 4503854)
gaagcgatttttctatcagaagatcagtgttcaaggtgcgcctttcctttgttggggtgttattaatttcgcatattcgtgtttgttttttaattggacacaagattgagggcttgtttggttactgtcgttataaactatgtggctttagagtcttgaggattttcaaatatgttgtaaaatgagaaggttccgagattctccttttcatgtagttatagtggaggattagctattgtgatattgataccatttcttgggttctcagctcggccttagaagcacttgttagctttagtttttgcagattgcagacttacgtgtcttcagggatggagcttatggaaaaaaattgcttgtttcatttttgtaatttcccctttttttcttaggatcttataatcttaatggcattgtaacattaagcctttagttttaaaggtacaaccaattgaagcaattaaagttaaatgtgatggtgatgctctactggtgttgctgttagaagctgttatcaataatgattgtcgatagttgtgactttgaaagttgtgtattaatttgatttaattatttgtaagtgcgttgattaatgattgtcatagggagatgcttgcaattgtagtaaatagaacttttgtcacatatcttgctgtatgcttatttcatctgattaagtttagagtactgctcctgagactaaaattttgtggtcttaatagatagtatgagtttagctgataatagagtacaaatttaaactgctttgtgtttcttcagtcaataatttcttactaaaattgcttgtaattttgctgcaggcacaaagcataaacttta

SEQ ID NO: 69693 - DNA, 693 bp, Prunus persica
  Intron number 2 from transcript ppa022740m (locus ppa02274 0m.g) derived from phytozome v7.0 (chr-ID scaffold_2; pos 24549143 to 24549835 reverse strand)
taggtgtcggcagggtttcttctgttcggatcgtaatttcatttggttcccttttgctttaagcatttgaacatgtccgtttttcatacttggtgtacaggaggttggttggttttttcacggaaatgatataattagttgcttagaataggtggacgaaactgtgtgcacacaaattgtaagtttgatatgactatgagaggttctaatattgccttctcattgttattttggtgaaaggtgatagtgattcaatctcggaagttaacagataaagatatcagtggtttggatatttgaagaaaataacaatattaggatgcgatataaggtgacttgttaagtttgaatacactgaaaacttatccttcgttatgtaactggggaacacaacttgggggaaagagtgaatcccttcttcaggttttggaatctgagaaggtgtaaaacacgacgagttatatgaattgttttcattctcttctagtatcttctcaatgactggggagtgccctctgtggaagctgattctctcactttgtcattattttttccctccttacattgtaactgaaaaaaaaagggctccatattccctaacttatccattttctagctgtttgttttgcattttaggttgaagcaagtgaatttattattattattttttttttaggttcacaagccaaagaa

SEQ ID NO: 69694 - DNA, 608 bp, Prunus persica
  Intron number 2 from transcript ppa006502m (locus ppa00650 2m.g) derived from phytozome v7.0 (chr-ID scaffold_4; pos 17862176 to 17862783)
ttttgaggagactatttctggtgtgccttttttgtacttcaaatttatctttgaaatcatggtatttgtgaaaatgtggtggggtttagttagtgctggaatgtctatggtacaacaaatcaaataggagtgtgttcgtcaatcactaaaactcatgcccatattcttttctgaatactattgttttcttttgatataaatttgcaaaaagaggcattgtaatgccatttgaaagttgaaatcggagatgtacatgatgacctagtttacatacacaagaagataaaattttgtacacatccttttgaggaagaaaataagtcacagtaaaatactgaaaagatttcaggttcaagtagtcttggtgtgtgtattctaggagtagcatggttagaaatacaacctgccttgagaaattcatggcatatgggtactactaaatagtcggatgggtgttaggccgtagagttggaaggtgacttatactttctgcttccttttggggaacctgttctcagtttggtgttgattagctatcattcaaaagcagtgcatagtttgatgttttaatgttatcggtttgtcaggtacctttcctgtgactgtct

SEQ ID NO: 69695 - DNA, 987 bp, Prunus persica
  Intron number 1 from transcript ppa024233m (locus ppa02423 3m.g) derived from phytozome v7.0 (chr-ID scaffold_7; pos 1045571 to 1046557)
tgcggtaaaataaattggtaaagtaaacgtacttgtatgggcactaattctgctccatacatttaaataaaagtaaaggcgtggacgataaacccgcacaacccttttaaataaatgtaaatgtgcggtaaaataaattcataaattaaattgcttgctgtatagacgttaattccgcaccatactttaaataaaaggcaatataaagtatgagggttaattccacatcatacttttaataaaagtaaatgtgcagcaaagtaaattcataaagtatgagggttaattccacatcatacttttaataaaagtaaatttgcgataaagtaaacgtgcttgtatgggcactaattctgctccatacatttaaataaaagtaaaggcgtggacgataaacccgcaccacccttttaaataaatactgtcgtatgggtaataatcctacaccatacagtaaataaaataaatgtgcggtaaattaaatttcataaagtatgagggtcaattccacatcatactttaaataaaaataaatttgcgataaagtaaaggcaattattggtgggttcttatcaacaccacgatcaaatagtatagcagataatattattatcgtttgtggaaggcatcatgcttgtctctcaaatcaaatgctttccacctgtaatctgcatacttgcaccaattggtttattaaatactgtagaggaataataaagtaatagaaagcataaaaaaaatgtgatatttttctttctttcggtggatttgctgttggatctccttttgctttcatcattgctgctgataattgcccaaaataatcgcaggtccaccattaccgcctggacctttgaattggaagaccaattctgggaagtcaactttcttcttgtagcatggacccttttctttacacaccagagaagtcctcacagtaccacccttggagtaccctccattcggacccccatacacgacaactcc

SEQ ID NO: 69696 - DNA, 637 bp, Prunus persica
  Intron number 3 from transcript ppa000954m (locus ppa00095 4m.g) derived from phytozome v7.0 (chr-ID scaffold_1; pos 42499011 to 42499647 reverse strand)
cattcactctaagtttaaaagagatcattcaggtaagtttgcacttttaaatttgaatttctatttaaagaccatagaagtcatatgattgcttgctaatatcttcaggtacaaatacttaactatgtactcatttggaaaaggttaacgttcttttgtacaatatagaatgtttcaagtacacagcgtgtgaacatgaacaaaagatgtatcaactggagatatttcgtatagaattttaggtctgggcttagactaaacatgctcaccttgttgacatattattgataatgtatattttcttttggccaaagagaaaatgattcgctatcccccagtttcctatttcattataagatgttgggtttgaatttcacctggttttccttggaattgatctacaatttattattaaattaaatctaaaatttcaatagtcggatatgtaatagttaaaaacttagattagataatcctagagctagacacttgttttccttaggccttgttgatgcagcatgtcaccgactgccattttaatatctgaccttttcgttctcttattgtttctgtcaacaatatttcctgttctgttttgataggctccaataggtgttcgcctttggcgtcatctacg

SEQ ID NO: 69697 - DNA, 808 bp, Prunus persica
  Intron number 2 from transcript ppa000954m (locus ppa00095 4m.g) derived from phytozome v7.0 (chr-ID scaffold_1; pos 42499686 to 42500493 reverse strand)
gagataaagaggattctgattcttcatttgacaaggtaggctatgtacacagatcatatactgtaactgtaagaagtaatttatcaaagttcccttcttatctgaaacaagtgcaattaaacctgttcttgatgtgtatgaaagattttaacttttaacttgtccttacattcttcgaaagatgttattatgtctacttgtttggctaattactgaatttgcatattctctccaaacacatgtgagtatttgtgaaattctggtttgtcatgagaatatgatgtacgcttgtcctggtccagttatacactgctgctgaatatgtcttagagggctagtttcggcatcactgtttcttgtgcatattagaggagaaggataggtgtgataacgtaattgtgctaaaatatgaagtaatgataataagtttggctcttcaatgtcttcaagtatagaaagtaaggctgattatcatttcaccctttaatattgaagacctggtgttcatgcctgtactcttgaagccatgaactgtcaaatatgaaaatataagaaaaaaacttagattctatcactggggaatgctggtatgtgccactatgaacattgtagatctttgattactttacaaggtgataacatagtcagtgtgatgtaattttgagattttgcaagtgacctaagactgttagttgacatttgtttgtgacttgaaagctttctccctttagatgctctctaatatgtaatttgttttgtatatctggattaaggttgaccctgggaagcctacgtcattgacctggaa

SEQ ID NO: 69698 - DNA, 904 bp, Prunus persica
  Intron number 1 from transcript ppa000954m (locus ppa00095 4m.g) derived from phytozome v7.0 (chr-ID scaffold_1; pos 42500534 to 42501437 reverse strand)
cccagttggagttccagtctgatacctgtcaggttagatgccattttgttcgtcatgcattttttcaagttgataattttgcattggtgggttggaagaaacatgctagatatatggttcatcttttttgtatatttatattgttgggttaatggcttcctttgatccgattgcatgctctttagactgcgtgctcatttgatatgtgcatgacacgcatgtgtctgtttttgtcatgcatgtttgtgtttctttgtcatgagagtgatcagatgattattcagtgaaatggattattcagtgaaatgggttattaaaaatagttaaaaattcttgaattttattttttccaattgggtttttatttatgtttgtgtgttgttgtttgtgtttttaaatttaaggcagttcttggttgcctaaattggaaatgtcaattctgcggaaccagcaagcattggctggtgtggaattgaggcctctggaatttaaaatcgaatttcagttcctcattgtctgttttactcaagaaaactgaccatgaatcaagttgaaatcaagttgagttataataatggcattgcagagtgctcacttaaagtcaaacaaacggggttccttctgtgattaaaaaaatgaccatctggttacaactactataattttgataatcttgaaaaaagtttctctagcataattgtagtaccttaatttgctggatgagataatggaaaagagcattgcatagttacaaacatataggagttaaatggtagctgcaatttcaatacttatattgatgttgttcattcaaggcagcacataataactggcagaaaatatcgagttactcatgtaaatgcgctctgcttgattgaataattctttgtttgatacaggaaat

SEQ ID NO: 69699 - DNA, 303 bp, Prunus persica
  Intron number 2 from transcript ppa020289m (locus ppa02028 9m.g) derived from phytozome v7.0 (chr-ID scaffold_6; pos 3191071 to 3191373 reverse strand)
gtcaccctataaggtaataataggatacggtaaattcttctgatttgttctttttcattactgtgtgtttgattaggcataatgacttaacatgagtttagactgttgtatgtggtctatttatgtcaattgcctgtgggtcaatccatgttcccatgttacctctttagtttcatggatatcttgtatttgccctgagtatttttttttccttaaaatagcttttactggtggttgacttgatttccacggttaatgattacctttgttttttacacaggttagagcatacttacagcgtca

SEQ ID NO: 69700 - DNA, 867 bp, Prunus persica
  Intron number 1 from transcript ppa009178m (locus ppa00917 8m.g) derived from phytozome v7.0 (chr-ID scaffold_1; pos 31712766 to 31713632 reverse strand)
cgaatacgtccgtatctttatttgtttctttcctttatatctagcgtttgtgttaaattcaaattggtttttgtgaactttctccccactactactcgccttgtatgataactttggttcctcgaacaaatcggaaatccgatttccattttgttttcttaaaattctgcgctataagatcaacaaatgaaacttccgaactcaatttttgtccacaaatgatttttgactgccctttggttgagcttgagtagctaatagacggatatgcttcaagattcaatacccttttgtttaaaatagaaagaaataaccttgttccccacttactgcctacatatgtttaggttgtctttgtttatcacagagagcatgctacattacatgacacagtattgaacgttctaaactctcttacgcttgctcaccagggtttaaacaatctttgtttcattacatgtccgtgacctaagtggcaaaaagttttatgatttgtgattttatgctcaattgttatcgttatttttcaaaaattagcacattgatttaatgatatggaatgtctcatgcataagtattagtcctggtgggccctgcgtaaatgttatgagagggaggtaacttatgatggtctcttgcaataatttttgcacacacacattaaaggtagttattgaaaattgtttggatcagtattattcttcagagtgtcgtatggaattcttctggtgctctgtttgcagggaaatatgaacattcccatgaataatttcaggttttccttgtcaagaggaggtttatttttttattgaccttatttatcattgtaactattacaggtaaaagagattcttattgaggagtcca

SEQ ID NO: 69701 - DNA, 504 bp, Prunus persica
  Intron number 2 from transcript ppa004090m (locus ppa00409 0m.g) derived from phytozome v7.0 (chr-ID scaffold_8; pos 1076340 to 1076843 reverse strand)
ctcttctgtctctgtgcctttgcccgaaattggaggtaattatactccaaccattgagcagttatcaattacttctatgtagttgtgattccattggtaaatcgtattgaaatgtattttaagtttttgttttttgggatttctttgttaggaatacttctgggattgcaaaggttatggtgttataatttttaatgacagtttcacttaaagaaaacataaaaacgaaaagaaggggtaaccttttccttggcatctgccagaatgctatatgctttgcgtattcatctttggaggttttgtaatcactactttcagtacaactgcagagtttcgttactcaattttttgaaagaaccatctttataaatgaaaaagccttttaaaaaaccatatattcggcttggatttttccaacttctgttgaagtattaaaggagtcattggttagtagcaggaattatgtccgacttgttctaaatttgattaattgatttacagccg

SEQ ID NO: 69702 - DNA, 404 bp, Prunus persica
  Intron number 1 from transcript ppa004090m (locus ppa00409 0m.g) derived from phytozome v7.0 (chr-ID scaffold_8; pos 1077029 to 1077432 reverse strand)
aggaagctctatcctcagcaaacctgataaagtgggtaagtttactattaaccctttgattagattattctttctgtttaaaagctgcgatcatcaacatattctaagtgtttcttctgcttaggaagacgtttctctttcgaattctcagccccagtcatttgaaaaagaagtttaaggagtcaaatactgtagggtgtgtgattttgtatgagaatgactactttccaaaccattttttgaactctttgcatagtttttttgtttatagaattaaagtgatatacccatgtgtgcatttatgcatattcgtttcgtttgtatattaaacttgtgctcgccgctcatagttttgtgtgaaatctgtaggagcttgtgcggcaggctagtatttggaagccaag

SEQ ID NO: 69703 - DNA, 697 bp, Prunus persica
  Intron number 1 from transcript ppa007072m (locus ppa00707 2m.g) derived from phytozome v7.0 (chr-ID scaffold_5; pos 15759223 to 15759919)
tcactgtgggtgaaaaatcttcagccccatcaaaggtcagagacccaattgtactttttctttgttcttactttgtcattttgcccatgggtttcaaagttgaggtttggattgtggcttctatgcttctacatatgtacgaatcattaaagtattggaaacttgagaaaattggatgaatttgaaaatgagctaggggaattcacaaaactaaccaagaaaaattggattaaagtgcttacatatctaaatgaaaaattggatttcggaaaagatttgaattagtttactttctgaagtattgaattgaagtttacatttctaccacccgagagaagagactcatttttttatcaatgtgaaacacaagttaatattatgttaaattccatgaaaaattagatggaacggttctattttattctatacatgtgtacctttgtgtatcagtcactgaaccaaatatcactaggagtggatgtcactggtaacaaactacattttggaaactaaaattttgttaattgcaaggatatagggatcagtttataaagaaacacattgattttaaaatccagtcaactaatgttattgtgtttgtcattttctttctaataatgatttgtcgagtccagtattatgtgttgtcaccttgcctgacaaatggttgtactttgtttcagagcaatagttggca

SEQ ID NO: 69704 - DNA, 936 bp, Prunus persica
  Intron number 1 from transcript ppa016358m (locus ppa01635 8m.g) derived from phytozome v7.0 (chr-ID scaffold_8; pos 12599154 to 12600089)
ggggttggggtgggggagaaaaggagagagagatctcttttttctcttttttttttccttgaaaatggaaagactaaaatatccacaaaaataaatggtaaattggatggtgttaaagttatatgacaaatcatagattttgataaattaaggtgacatttctcttaaatttttctttaaggtaacaaattgaaaatgaagtataagtttaggtgacatttctacaaaaattccatataaaaataatattggttttggcccgcatcaccaaaaaaaaaaaattattaatatttcatatggaagaaaaagaagtatacaaataatatgaatcttcgctctagttagtaaatttgcatattatacacatacgtatgtactttttttcaaatacttctgtttttcatacacatactatacatgtacatgcatattcttcatgtttaatgcaccatttttttaaattataaactattaagtaataaagtaaaattcacatattgtatatgtgtttttcaaatattattgaatacaaaatttaaataatgaaaaaaagaaaaataaacagacgacctcgttttggttcatagcagatagcacacatgcactcccctaacgacgtcgttgttgacgtcgtattagtcgattggttgcaccttcaattcaaaatacgcaggtccgtttgagatgggttcgctttgtctttaccgccttttcgcgcaaacgcgtttaaaattttctggttcagcaaacgccatccaagcggagggacagggataagcaacttgtatataaatgcagtctctaaaagacggtcttatatatcacgttcaagccataaaagccggttttccgctaaccattttcacttccaatcaactcatacatttgtattccagaaatggcctttttcgagaagcccagaaactgttcgacgaa

SEQ ID NO: 69705 - DNA, 901 bp, Prunus persica
  Intron number 1 from transcript ppa011005m (locus ppa01100 5m.g) derived from phytozome v7.0 (chr-ID scaffold_4; pos 12054649 to 12055549)
acctacctcaacactctcgctactgttcttggaaggtgcttctttactaatttatgctttaaattatgttctttaacggtttatgtttgttttaatagaaaatgtttctgggttctatttgttttgggccaaattttattgctgtggagaaatttttggtgaaaacttcaaggatttctgggttgcgtttgtttcgactggaaatagttcctagaatatgttaaggggagatataagttcaagttttgcgtaaatagaataatttgttcacgaattccaagttgagtgaaatgtgtttatatatttctttgatagtatatcaaggaaaggaaatgtttatgcaggtaattgggagtaatctgttcgtgtttatatagtgcagaaaataattaattattagataaatagaaaattactttccttctatgaaaggtccaagaaaatgaaaagaaaaataatgcagtgaagcttggaaagtgtagtatgtttgatcacttatcattaagcagaagattctcttatattctggaagtagtgtttttaattttcagagactggataataaactatcttctaattttgagtgaacttcaaatacgtttttatgtgggaaatcaagttcgttctagtataacaattatcataactagctagcaaaacaacttgatagtttgaatctgaccaatggcatctgaattgatgttagctgttgcgtttatcgaatggaatcattttgaactagttttgattgatgatgtggaaggctcttcttagatcagttaacttaagattgtttaactcagtctgagcctatgtgggttttgatactctcctagattacacacacttagtgggaagcacttagttatcaatctcacaacttggttttttatgttgcagc

SEQ ID NO: 69706 - DNA, 950 bp, Prunus persica
  Intron number 2 from transcript ppa019550m (locus ppa01955 0m.g) derived from phytozome v7.0 (chr-ID scaffold_6; pos 23124360 to 23125309 reverse strand)
gggcagaaatccattaagaatagcccaaatcctaggtaactatattagcatatctcattctttcttcttcccctctatggaattaagtattttaaaagctgtaaggttcggtattattgccgccatagtaaatatcatatgattgtttttttaagatgagagccgtagtttctctttattaggtgcaatggtaagtactttatcgctgaaattatatgaattttaatttcaaaatactaattattaaaacgttgagtaacttgtcgtgaagggctaatgcaagaagcttcaagagaagtgtgaacaacgatatatttctttcgtaacaagataatgtatgcatattagaaagggggaaaaaaaagaaaaaagagatcaaatctatatatttgtattcatagattggaatgctagttatttcaaacttgaaagaaatgacaagtgatgcatagaagtcgcatcatttgtttatttcaaacctaaaccattcaactttgcattgaaggcttaattagggtcctaaacctacttcattatagtatacgtatgagtccgaatctgcatgatttaggcaactttaatactaattaagcagactagtttacaaattgctctctaattagtactaccccatgaatccaaccgccctaatcaacaccttaagcaggtagattatccttaaatatgcctacctatatgcaagtagcttgacctaaatgaagtccaagcctaggcctaggtctaggccacactatcagccctgacaataaattaaaacaaagtttgacacagtgctacaatcatgcaattaaagtatatctcaaattctttttttttttttttggaattatttatttccattttcttaccaagcttttttttgggttgtgttgattaaaattttttgaaaaataggagctattacaggtgcacaaacccaaggtgcagtg

SEQ ID NO: 69707 - DNA, 268 bp, Prunus persica
  Intron number 1 from transcript ppa023469m (locus ppa02346 9m.g) derived from phytozome v7.0 (chr-ID scaffold_1; pos 11265599 to 11265866 reverse strand)
gccgccagcaaagtactactactccactagtctccaaaactaaattcgtcgttgaccaaaaataataataaataaactaaattcgacaattttttcaataaatattttatgaaaaatctgtcttaacgtgcctttctatctttctagtctagctcgtttaagtagcggggaagagtgtgtggctgttgtgcaccttttgattcagagaaaagaaaataatgtcaggacctcagtgctgctcacacccaccagtcctcaacccatccag

SEQ ID NO: 69708 - DNA, 424 bp, Prunus persica
  Intron number 2 from transcript ppa006029m (locus ppa00602 9m.g) derived from phytozome v7.0 (chr-ID scaffold_1; pos 33126841 to 33127264 reverse strand)
ctgtagtgaaggatttttacagaaatcatatcaaggtgaatcagaatcagattctctatcccactcatgatcatgaatatgttttttgatttatttgttttagttttgtcattactattactatttgcttttgggaaagcagtggttgggttgaatgtaaataaagattaataatttatttggcagttgtagatgaaatgttctcagttttagttggttggtttcctcttctagtataattaatttgataatgagaaataatttatactaattgattaccaatttggcaaagagtaggtgtgaaaggttgaaaatcgtggtagtagtttcagattgatcatctcagactaatttttactaatgtggcgttttctgatcttgtgcaatagactgtacttacgaggacaaacagtctgactggagt

SEQ ID NO: 69709 - DNA, 666 bp, Prunus persica
  Intron number 1 from transcript ppa000049m (locus ppa00004 9m.g) derived from phytozome v7.0 (chr-ID scaffold_8; pos 16138154 to 16138819)
ttgtccattcagaacaaagaacttgatcttcagaagtgagtgccttcctcttctttctccctgttttctactttttcgttgttttcatttgcttaagtttgtttggcttccgagaaagttattcaatcaattgattattccgaaggaagattagagagctcaataggcttgaaggcgcaaaaagttgattacattgagcttaataaatttgatatttttttcccatacatgtttctcagaacccaaaatggagcatttagttttaaatttttgtaaatgaagtgagtttaattcaaaatgttgtgatcaaaggctggttcctggctaaaatatttcgatatttacaagttgataaaaaaaataatgaaatggaaaggtgacaaggttagagtctttgtctttcaaaggaaaccaagggactataaccccatttaagccaaattggttgagttagactcaatgtattagatttgattttgtacttgagttcttgtgtgtctgtttctgtaaaaacaaagattcaaaatttcatcttgtcttcatttcctcattaagtgatcaaaaggagggttaagctttaattctgatgaatgtaatttctaatctaaaagaagatttaattctgatgaacgagggaatgcaaatgcaggaaggtggaactagctt

SEQ ID NO: 69710 - DNA, 673 bp, Prunus persica
  Intron number 1 from transcript ppa016880m (locus ppa01688 0m.g) derived from phytozome v7.0 (chr-ID scaffold_1; pos 33440577 to 33441249 reverse strand)
gaagcaaagtgcaggggaattacgtcttcatagaggtttttacctttcatttttgagtatatgttggtgaccatcattttccgtgcatgttcacaacaatgtgcataacccatgcaatccctggctattcattagtaatttagaatgtagatatgtgatataattgacatctttcttttctgtctgcgtggaataatctggatagcagcaagtgatatcatgatgtccaatgatgatttggtgcatcctcataaacagcttacttacataatttgtagttcaggagcatgtacttgcacacataatttccatcggtctcccctgtcacattcattttacataaatcagatttttatacgactctgttatgattattttgttgctcccattatctcatcaaactcattccttgccccgttttacgatcaaactatcaaattcttgcaatgtggtattcaatttatgtagtgttagctctgccaataccatcctatcagcttcctgaatatgtttttaaatgaaactttgaataagcaacaatttggtatatatttcattccttcaagtagtccttgaattgtattattctgttcacatatctatcttgagaccagattatgatttttacctttttgtttcttgtagacataagtgagttgaacctacccaaagc

SEQ ID NO: 69711 - DNA, 755 bp, Prunus persica
  Intron number 1 from transcript ppa023326m (locus ppa02332 6m.g) derived from phytozome v7.0 (chr-ID scaffold_9; pos 767473 to 768227)
acgtggtaaaataatattatacatcattaattgaacaaaccgacgtggttactacaaacttatgcggacagtagagtcggttactacaaacttatgcggacagtagagttatagatatcgtcgtagtacactgccaaataataagtcgataaatttatctttaccgtcgtggtacattgatttaatacggcgaaattttataatatatcaacttggattcctttggaattatacaacgctgactaagaaaatttggtcatgtttatttaggagttaacacggcaactgttttggtaaaccgtcgtctttactttctacattagtggcttcatagttgctgtcattgtttttgggctcagagtttaactctgaagaaaacctttttaataagacgacgcttttttaatttggtgtgtcgtttaaaaaaaaatatccaaacggatctcaatttttaggtgtttgagttacttatccacgacggttttctgttactgtcgtctttttaaacacgacgacggtttttttttatcgtctttttcactttttgtagtagtgttaaaccaaaatagaaacttttttttttttccaattgaaataaggaaacctaatttcactagaagaaagaagtcaaaatccaaagtctctctctctctctctctctctctctctctctctctctctctctctctctctctctctctctctctctctctctctctccaaccactccaagaagtactgccacttatatcacc

SEQ ID NO: 69712 - DNA, 929 bp, Prunus persica
  Intron number 2 from transcript ppa005844m (locus ppa00584 4m.g) derived from phytozome v7.0 (chr-ID scaffold_1; pos 40354725 to 40355653 reverse strand)
ccaatcgttcaaaggcatcaaaatctctggtgtttggctgttatcttcttcattattttaaataattattatgtaaatcatcatgtgggtgtaatgctttgaatatattaattttgaatttatctgtaagttaatatggacaatgaaaatgtcagcttgctaacattcggatattgggatttgggtataatagatgaatgggagctgtgggctagtaggccttgtcctttgtttcaagggaaggaaatgaggatgtaaagggatgcttagtgttggactactagtatgtgatcaggaacatggaagaaaaggaaggaaaaggatctagttggggtttttttatcttttgagtatgcgagttgaaggttattaaagcgcaagaaagtgaatatttagagacataaatggaatatgctctaaatatcaggactgatatagtgactaatattataatttgcaatgtagctaacggtcagatcttgggtgtatatgttggttataattaagttggaagctatctcatagcagtaggaaaagaagaggaatatgtgactagatgaggggaagcaaatatgagatttcttttgtactaactttgtattatttggttgtttcattgtggtgttaattcttgaatggacttatatgattgtattaggtttggttttttaataaaagattagaaatcagattaattcacaaaaccactgttctttcctgatttgagaacatgtccttttatgttcttcttgatgcttttgtttattttcattctctttaagatcattaattgaactatgcttttatagttgcatgaacatggatatttcttaataatgcttttactacaagatttgatttttagtctttagtttgactctgtctcgtgttacactttaatcagggtgaagatttgacaagtaaagacc

SEQ ID NO: 69713 - DNA, 446 bp, Prunus persica
  Intron number 1 from transcript ppa005844m (locus ppa00584 4m.g) derived from phytozome v7.0 (chr-ID scaffold_1; pos 40355853 to 40356298 reverse strand)
catcgtacgttccttcttggatttcctcaactcaggtctctctctctctctctctctctctctctctctctctctctctatgtaattgttaaatgtgattatatagtgaaattatatttagggtttgaagctgcttcatagttttttgttttctttttgtggtgatatgaaaattgtattgattgtttgattattttggattttgaatgcctcatgtattgatgcacttttatacttaaagctgtagactttacattcttttaggctgcatgttcagctctctgcctctctcttcaatatctctttttgattcaataccattaatttgtttgtttgttttttggatcagtttaatgtgcttgttgattatgcttttttaattactattatgggttgtttcctttggggcagttgaaccagcttctggtgtcgatcttgaaagcctt

SEQ ID NO: 69714 - DNA, 930 bp, Prunus persica
  Intron number 3 from transcript ppa004576m (locus ppa00457 6m.g) derived from phytozome v7.0 (chr-ID scaffold_3; pos 21321883 to 21322812)
aaggagcaaatacagtgaattttgttacttgtaatttactgaagggttcatttatgctctgtagctcaatcaatgccgggcaaccatgaaagcttattatgattgccaggggcggtcctacgcctagggcaaggtaggctgctgcctaccccaaatttttcataaagaaaaaaaaacccatatgtaataggccaacccatgtgaaacatacaaacctatgcccacccaaaaagcaacccacgtgtatgtataacctaaaatttctctcctcattaattctctcctctttaattatcttctctttaattacctacctccaaattttaagatgttgtatatgacaacattgaatctaatatattttaaataggttagaagttatgtgttctaatctattataaggtttacttaagaatgaattataatttgctgactttgttgaaattaattaggtctttgatttttggaattttgttgagatgtttgatttgttgttggtatgttaatgtttgattaaaggcattgatgctattatgagaatttatttgattttttgttggaatgttggattaaatagactatcttttgttatgtcagatcacaatttgaaccctaagaaaacaaagaatttgttggaatttaaaaaaaaaaaagaaaaagaaaaagaatagtttttttttttggggggggctaaacttttatttatgtatatagatgcatttgagggtaaaactcattatgtccccccctactaggtgtatatttttatgtttattaatgagattcactcattacgttgagtttttaatgtaagtttcgcccagccggatatcgaatcctgaatcagccactgatgattgcatattgacgttgaggttttattgccctgttgcagactgagagtgaaaaggaggtccagactttgcttga

SEQ ID NO: 69715 - DNA, 741 bp, Prunus persica
  Intron number 3 from transcript ppa025154m (locus ppa02515 4m.g) derived from phytozome v7.0 (chr-ID scaffold_1; pos 39480054 to 39480794 reverse strand)
cccagtggtgcaagctctacttcctaaattccggggtaagatcttcatgtttaatactttccctattgctttatgccctatttctctgtgcaggcacctttgcgcgcatgtctaaatgcaagcgcatgcatgcttatgtacatatgtgtagatgcatgggcacattagtgggtttgtctcccctctgtgtgtgtgtgtgatgcaaggaactattcctgtaggtaagatcacatcacaggtgtttactctagggacctcaatcatatccacttcaccaagacccatcatatacagtcctacttagaaacggaataaccattttctttaacattaccacaagcaaaatagtatttgctttaagtttatgaatcaggagttttacaaactcttttctgcctaaggtagatccaatggtgtgtaagtattcttaggtttttccacatgggtgcctactttcttacccttagggccttggattaagtggtaaaggggtgaggtgagtatgaaatggtggtgtttttcttgttgtatttgatagaaccatagtcattgagcttagaaatttattgccatgttgttagttacaatgctttgtccccatcttttgactaatttatcattgtcttttgaattgagaattggatttcttatttgcatgtgtttgaactttgaagcaacgacaacaatggatcgtgatatttttatgatgctttagattagggttccgggagatcggagtga

SEQ ID NO: 69716 - DNA, 200 bp, Prunus persica
  Intron number 4 from transcript ppa021179m (locus ppa02117 9m.g) derived from phytozome v7.0 (chr-ID scaffold_6; pos 24458337 to 24458536 reverse strand)
caaggatataaccgaagccacagtaccagcttcaggtaacaaacctcaataatcatgattacttactaattctgatccattcacatactaattaaactcaaattagatatatatattttctcatactattttaatacatataatgaggaattaaatttcacaaaaaagattctttctttctttcttgatcttcccaagat

SEQ ID NO: 69717 - DNA, 800 bp, Prunus persica
  Intron number 2 from transcript ppa007443m (locus ppa00744 3m.g) derived from phytozome v7.0 (chr-ID scaffold_3; pos 883976 to 884775 reverse strand)
accaaagctgttcttgctcctcttgagaccatcaggttagttttgctgttttaccaactctttaaaattatctcactagtaattgcatttgatacattatgtttatataagcatattagtttacatgctggagtaaatctgtaagtgaagaagtgcataattacccaaaaataatggtcaatgcaacttcttatgttcattcaacaattaaagacctgaagacaacaatattggctttatatagctttccttgttaatagagcactatatatatgttcacatccttgcctttttcatttcgagtcaacattaattgtaatcaacaatctcaggccaaaggatattggtaattgattcccagagatggcttgttgatcagcctagcttagttgtgttggatacacaaatagttccccatgttttaaccttatccttcagtaaagccacaaggtcttgagattgtgatggagatggacttgttttaagtctgaatgtctaatcatggaagagattttgtatgcagttatgctaagttcatattgtagtgcttaaactaagtttatatgaggatctctgaggcatcttgtattaactgtgaacaaattcttttgcacagtggataatcctccacatttggttgttttctttcatttatttgttagatttttcgactttaatcaaacatcttttagcaatcgtataaaattttgcagaatttagtagaaaaggattttaagtactatgtaactcttgacgactattctttaagtgttgttggatgtgatatgtgcaggactaga

SEQ ID NO: 69718 - DNA, 693 bp, Prunus persica
  Intron number 1 from transcript ppa003398m (locus ppa00339 8m.g) derived from phytozome v7.0 (chr-ID scaffold_7; pos 21907539 to 21908231)
tcagccgcacacttcaccctctgccctactggttggtatgttttttctttctctctttcaatccttttgctcatctgattgcttggaaatatggcttaatgggttctttttttcagtgattatcatgtacgatttagtgatgtttgaatttgactttgatagagcgacttttgcttccagattgttttcgttttgagacactactaggaatttcctcttctctgaaaaatgaaaaaacagttatgaagttcaccacccagagtggaatattctcgttgcaaattacaattcaagggttatccacttgtgatatgttaaatcggaactagttccaaagattattagctttctttatgggattgatgatgttattattaacatgctttcctgttaaactgttaattctttctaaaacttttgaacgaattggttgacaaaaattggtgtgcttgcatttgatctgaccttgcggggttgcttggttaatgccattccattaaagaaactcagattcattggtaaattgcaagcagctttcttttggccattcttttttgtctttttttgtggagatttgattatccaattaaatgattgcggatggatatggtttatctgcaaatacagaaactttctaagaattaagaattaagattataaattctaacttgaattttctttggtaatgcagtt

SEQ ID NO: 69719 - DNA, 699 bp, Prunus persica
  Intron number 1 from transcript ppa008549m (locus ppa00854 9m.g) derived from phytozome v7.0 (chr-ID scaffold_6; pos 26414514 to 26415212 reverse strand)
tggtcagctctctcatcctctctctctctctctctcacagtatttttcatgatcatgatggtaatttgaattgtccaattaccaggatcatttattcttttgtgctttcatgcttctggatgattatgtaaaagattggtattgaataagaatgatgtcggaattgataattggattaaattgggatgtaacaattttgcgtttctcatgccctgtattggataatgaacttttggagtattctgtttgaattttgagaaaaatatgatcgttcttatgctatgttcattagatgaattggacatctatttgagtgatcgagatgtcgcattgtatgtcattttgttaattagatgcaatttctgtctaataatgttcattttctgctcaatgatgaacatgaaaggcaaagaaataactttatttcgtaatggccagttttttttttaactttgtaaaaggatttgaaaacaacttgatttggatgttcctttgctgcattttgagtacttggtatcattttgttttcttggtcctcttgttgtacatcatgggacagtgtatcaatgatgctgtaatgtagcttgcatcaaatacagggcagaaatgatagttgaaagaaaatataacaattatctccttatatttctctgtgtccttggtgttcctaatattgcaggcgtcttacaggtgatatac

SEQ ID NO: 69720 - DNA, 871 bp, Prunus persica
  Intron number 1 from transcript ppa011357m (locus ppa01135 7m.g) derived from phytozome v7.0 (chr-ID scaffold_1; pos 3300847 to 3301717 reverse strand)
gcctacaccttcgaaaccgttcaagaattctggtggtatgcatcacataatctaaacctaatccccatctccgccccttttgttttttggttttcttatgcttccctgtattgttttttgctttgtgttttcagattgtttacttttttggtgatgtgggtttgtgctgatctttcatgtttgttgattggtaactgatatgcccttatcttctgtctggttggggaaattttggtgaaactttctgttaagccaagtaatgtactggaatataggtcaatttgtttccaaaaattagaaaacttgccagaatatctagaggaaaataaatggttgaatttttaatttatgcattgcttgatggagcttttgttcccaaagtgctagctccaacgttcttaaccttgttccctgtggttaatcttttcctgctttaatgtctagcttacaattctagttgatccggtcaaatacggtacccagttagtcttttggttttctagcctctttttgtttttggttttttttttttttttttttccatcctgttatagtttcatgctattaatttaaattaaagtttgaggggagagactgagaggaaagggaagagagaacacatatgatagaggtgaggaaggaatgattactttttattcatctctcacctcttacttaacttatctccttctctctctcctctctcttttccctttctccgttaatttggctaaacagaaatgctagcggattgttctaaatttgtaattttggacccacaaaccttggttgtatgattcaagttcgggactttaatctgattccaatccctcaatttgaatttgagatgcgaaatgtatttgcagtctgt

SEQ ID NO: 69721 - DNA, 254 bp, Prunus persica
  Intron number 3 from transcript ppa007529m (locus ppa00752 9m.g) derived from phytozome v7.0 (chr-ID scaffold_7; pos 19674149 to 19674402)
tgccttctcagctggaaatcacttaaaagagtaagtacttaattataaattatggatatatatatatatatatatatatatatatatatattacaaggattcaaagtcaagaaaaaagtatgtacattgtttatgggatttttcatcacgtaaatccgtattcgtagctagctataaatttatatatgtttccttgctagattaatttattctctttgttttttctttaataatattaatcttcgtaggtgcca

SEQ ID NO: 69722 - DNA, 511 bp, Prunus persica
  Intron number 1 from transcript ppa015349m (locus ppa01534 9m.g) derived from phytozome v7.0 (chr-ID scaffold_2; pos 22961867 to 22962377 reverse strand)
gggtcctctacttctaatatgtgctcatcatcaggtagttcaaagttattgacttggatcaaaattcagctactggttgattgctataaagactattcttatcatttcagtttgttgtttcttccaatgtgttaaattgaaatcggcgaaaaaagcaaaaaggaaacttgcgcattgctgcatggaacttcaactgacatttttttttgtttcctttgtttcctcacattttcttttccctgaattgtgctttagcaaattgtcttttagtcactgatgatatgcacatgaaaaggcatgctggaaaatcaaatatccatagagcacctataatatcagtaacttaaggcttattgaatttcagtctttgtaagattttctattgcttccctagttcttcagccaggaaacagaagatttcctagtgattatcttgccattgtttctttctgttagttgatagttaattagagaagtctctcccttttttatttcacagaatttacaaatc

SEQ ID NO: 69723 - DNA, 517 bp, Prunus persica
  Intron number 1 from transcript ppa018286m (locus ppa01828 6m.g) derived from phytozome v7.0 (chr-ID scaffold_1; pos 34962702 to 34963218)
ggtaattactaattttcttcgattatcatctccttacttgacaaccatctatcccttttctttttccatcatatcaaggatgactagtgatatgcatatgcgcggcgatcctacgttttggaggtcctaggcgaacatcctaaatgagtcattctccctctatatctatattaatgtgatttaaaaaaataataatataggtacctacatataagtattataataattgagggccctaggcgactaccttgactgcttgtggccagggcctcccctcgtcatataagaagaaaacattttgattctacaaggctgtgatctaatcatacctttgttgatcaataattgcagcactggtcgtgatgaactctgtcctcaattgaatgaacctctctgatctaaacttagataattgaggttgcacaggttctttagtaattacagataggattataaatttgtagtttgttgcctaatgaatgattcgtagttttgcttctgtgtttaattggcaggc

SEQ ID NO: 69724 - DNA, 914 bp, Prunus persica
  Intron number 2 from transcript ppa011927m (locus ppa01192 7m.g) derived from phytozome v7.0 (chr-ID scaffold_2; pos 25647241 to 25648154 reverse strand)
cgctcgtcaggcacatcaaagcccctgttcatcttgtacctctctctctctctctctctctctctctctctctctctctacatgtatatgtatgggatatatgcgtttgtacatttatatgtcggtctatgaagctccagtcttttgatttattgtattcgtttgatctgagattggtcgtttggtgatatgttaatatcatatatgtcacgtatagggaggaggtgtgtgtatatttgtgtgtttatatacgtatgtatctgttgattttcgtatagatagggatttgtggtttcagttagatgttgggtaatctgtacgcggaattgggagtttgctgtttttgttctttagagtttgtctatgacatgtgtgattggattcgagtgtatctgattttgatctgtggtatttcttttggtcattaatgtgtctgcctacactaatctatggtgtagatcgatgaggtcactgtctctaactgtatgcagttgcagagaaacttgaggagaaaatagaaacaagaaagaaaacttcaattgcttgttatcactgttcctgatgttcgttattattaacatgcaatagttggcttacttagagaaagcttagaaatgtttattactattcttcttaatgttctgtttccaaccaaatggacgaatagggtgtgccctagaggcatcctcactgagaattagtttgtgaaacaagggataaccgaaagtgattttttttttttttttcctgtaagagatattgggtgcaaatgctacttctttggagatttgatatgtaaatatttgtgagcagtatattcctgcagtttttgcctctttttagaatgtgggttaatccttttttcttttctctcatcaggtttggtcattggtaagacgatttgatcaaccgca

SEQ ID NO: 69725 - DNA, 786 bp, Prunus persica
  Intron number 1 from transcript ppa009950m (locus ppa00995 0m.g) derived from phytozome v7.0 (chr-ID scaffold_3; pos 20915278 to 20916063)
cctcctccttgcagccgctccactctctagcctctgtgagttcctcctcctccttcttccaattcaatttatgaatttgtttcttagttctaatttagggatttaggaacaaattttaatgcacttttgagtttctttttgtaggtgtcgatcagttactttcctaaattgaatccctaaattgggcattaaattttttttttaaaaaaaaaaaaaaagatataaattaaatccctaaacttggctgagcttattgtattcctataattcggttcttaaaggtcctaaggtatggatgtaaactttttgctgctatgcgtttgttaattgatcgttgttagcttatcgttttgtgggcttggctgattgcaaatcaatgtgcaaaaatgtcataaaaacaaaggagactgttgaaatttcgagggaatctttgtcctaaggaaaattggcttaagttcagcccacccaatttcaaatcctgggttcgtccgtgcatgcaattaatgtatttctcgtcttcttcttctcactgtgaatgttgacactgcatctatgctttgtgcaggcctgtaatggcggccctaggttcagatttaacttaaacatgtactattttatgttttttccccattagagaaatgaaatggttttccaacatattaaacacaaaatcaacaacaaatttccactttcctctgtaactttagatttcaaatcccgaagtttaatttgtttggttatcaaatttcagaatttgtttcgaatttggtgggagtgaaattttag

SEQ ID NO: 69726 - DNA, 242 bp, Prunus persica
  Intron number 1 from transcript ppa012631m (locus ppa01263 1m.g) derived from phytozome v7.0 (chr-ID scaffold_6; pos 26273876 to 26274117)
ccgatatccgtaccgcttatcgcaagctcgctctggtaaaattaattacgctcaaacgccgtcgtttctcgttcccccacatcatcctcttctttctttgatatcgcgtttcttcaattattctccttcctccgggtcctctgttttttgccaacaaaaaacgatgtcgtttcttctttctaaaaaatctgaattcgatttttgattttattattgtttttttttcttcgtgttttgaagaa

SEQ ID NO: 69727 - DNA, 678 bp, Prunus persica
  Intron number 2 from transcript ppa007544m (locus ppa00754 4m.g) derived from phytozome v7.0 (chr-ID scaffold_2; pos 18554255 to 18554932 reverse strand)
catatctaaggtctcgccttggtgccgattgcaatgtgagtttcttttctctctttggttatgacctagtgattgcgtatttgagcttgacccagtgatccaattctaattaactaattcgttggatgttggaacttgtcacccactaattttttgttactgttgattgtaaatccattgcttgtcttgggtttgtgccttggcaaccagtaagatcactcgggatttatttcttccacgaaatgtgtatttatcaactggtattatgcttatttaatttgaagggaaaacattctttagattatgtgatatgaattgtgcgaactcataaatcatgtatgcccaggaaattaaaggcttttttttttggtaaagcatttttctgtgttatcatttttcattgttgtccctcatataaaagggtgttcattatcgatggttctcccaagtactctgtggtttgaagaacctttcgtcttatttttttacttcttggttctttcttgtagtgaatttggtgatcgtgtgtgtgtgtctgtgttaactcaataggtgacattgaccatatcactctattcagtttattcatttgcagcctgtgcttcatctgttttgattctgtattgaggcacacttgctgaactcatatactttcacttgtttatgttatgggcagct

SEQ ID NO: 69728 - DNA, 943 bp, Prunus persica
  Intron number 1 from transcript ppa019004m (locus ppa01900 4m.g) derived from phytozome v7.0 (chr-ID scaffold_6; pos 20525535 to 20526477 reverse strand)
cattggaagtagagcactacatcttcggaagaaaggttggttccaaattccttcctcttctttctctattttttttgtatggtatttaatttgtatatcttttatttttatcaaatttaatttgtatatcataggtgttcttttgaattttttttgagtctttaacaacactagaaaaatttacattgaacttgttacaaaattttcattaatttttctcgtcatagagttgctgacttgacagatgtaccatttcttattgtatttggcctatacttagacaaaataacactaataatttatatataattaaaattaaaataacattaaaaaggaaaacgaaaaacaaaacataaaaacaatttcaattcccgatcctcaccccaggcccctctcctcctacaccgcccctctctctctctctgtctgtccatgtctctctttagatgaaaatccacccctatctgccccaaatttggaacccaatttcaaaagtcattcagattaattaacaaacccatggcctagccattcagattaatcccaacccgaaaagaaccccaactgcatcatcaacgccgcgttcgcaggcgtcgccacgccacgggcggcgaaatgcaccaccggaagcctcccaagctgcttcgtctgcttcataagatcgtacggcgccgcgattctcttcccaaacatgaacacctagttgttttgcaaaacgttaatgtaccccatcacgtgcctagagtggctggatggtggtttgggtgactggactggctgggttggtgtggtgtgggagggggcagtcgtgcttgcggtgctgaaaggaaggagagtttggggagagagattgttttgcttttaatttattattattattttaaaattattttacttagttttaatttgggtatgggattttaaattgtgattatgcagttag

SEQ ID NO: 69729 - DNA, 573 bp, Prunus persica
  Intron number 1 from transcript ppa017535m (locus ppa01753 5m.g) derived from phytozome v7.0 (chr-ID scaffold_5; pos 2885410 to 2885982 reverse strand)
cacctgattagtctggaaaggaaattcgagggaaggtatataacatactctctctcatttgctctttctgtattccagtttgattttgcaggagcgagaaacctctgtgattgtattgctgattgagtgatccccattgactctgctttttttaaaaatgattctactttagagtatcatcatttggtgttcatcatatgtctacaaggaactaatataaaaatatgtagggtgccatagcccttttacagaaagaagtacgtaaaaagcgttagcacgtatataaacaattattttctgaaaaaaggataaaaagaagagatgaacagatgtgattgctaatgtgccatccctgctaccaccgtaatgggttggagatttgaagagatgtgggttcacttaaatgtatatttgtgtgttttgtaaatgaagcaactaagttaagttttcctatctgccccttggcaatggaatgaaacatagaatatatatatttgtctgtgttctctttttgtgtgttcgcatgcttatcaactttgatttgatttttccagtgcactctactcagggtca

SEQ ID NO: 69730 - DNA, 919 bp, Prunus persica
  Intron number 4 from transcript ppa010146m (locus ppa01014 6m.g) derived from phytozome v7.0 (chr-ID scaffold_1; pos 22634636 to 22635554)
attcaaggaggggattttgacaaaggcaatgtgggtgctcttcctagccttgtagcctcattgtttctggtttattttatgaattgcaacattggttgactaaaggtttaacgatgatatatggtgtaggtttctagtataagattgattttacattggtaagattactttaaaagccaatctatcaaatacaaggaaactaatggttcacttatgctaaacactgattgcaaggttaaacagaagaaaacagaaaaacaattcagcacttgttaagattgttatgatagcttgaataggtctcttttctagcccaaaactttacatctaaacttatgagtccataagtttgcagtgggcatcgccattcactcataaaaacagctgtggagttacctcgcacatatggctggttgaccattttagttttcctgttttatgcatcttttctctgttctgtttcccaagccagctatgcgttttgaactttgtgaaattagttttcctgtattatttataacaacttcttccagtatatatttacttttgttcccaaaggtacataggtttactaaaggtcttctaatcaatgttgcctgcaagtaaatgagagcttgaattcctgagtattggaaggagttgactttttagggatttcgtgcttaataaactattgagagtaccctttttggcctatatctcactgcctcacttttccaagattttccccacaatttttttccatttattactttgaaatatgtaacatttcttcatgctttttaaaaaattatttttgaaaatttcatagtttgtttttgttaagaggtttttccttttgttggacataacaatgacattacaatgctggaataatgtcgcagggaactggaggtaaaagcatttacggtcgtacttt

SEQ ID NO: 69731 - DNA, 614 bp, Prunus persica
  Intron number 2 from transcript ppa008546m (locus ppa00854 6m.g) derived from phytozome v7.0 (chr-ID scaffold_5; pos 407315 to 407928 reverse strand)
tttaggggcttggccgaaaaggctcgaaaacagaggtaattttcgggtaagccattctctatttctctacggagataaaattatcatcaccagagacagttgttggatcccaattatcacttgcaatagtaggacatgcccatcgttgtagccagccaatgccatataaaagagtgtttgcactctgatggaaaaatgaaatcatgtgttctctctagtagtagtgacaagtctctcctatacaaacccatcgatgatttatggaagcatagtatcagtagctattgagcctatttttggtgcacatttctatctaagaattggcctaatcattttctgtatgtcatttgctcaggtctcataaaaatatgtcatcatatggaaaactaaccatttgctgttttcattgagtaccttgttttggggactaacaagtatgctaactattaactgtatattgaccaaaacaaaaacattgtggttttagaaataaaaataaaattattaatattattcgcgagcttatgtcaaattagaagatcagtatagaatttgtaacttattgtaaacactgattcactatatggtatattttctgtttcacagcttgtggt

SEQ ID NO: 69732 - DNA, 756 bp, Prunus persica
  Intron number 3 from transcript ppa015084m (locus ppa01508 4m.g) derived from phytozome v7.0 (chr-ID scaffold_1; pos 26957621 to 26958376 reverse strand)
gctctgattttcttaggaggcctacaagcaaaaaggttaatgagctaagtccttattgaacttatttgtcgtctcttattcatataaagcatataatcaaatgtttttggttaaatagtttattttcctctttctgttggttctgtatgaaatgggatgatgctaaaagaacttgccttcatcctgatattttgtttggctgataaatttttgagttagtaattagacccctttgtgtcggacaagaaaattaataggtgtagagttgaagatgatgaaccaagtcagaagatgtaaagtttctttcagacagctcttttcattagtttaattttatataaaggcagtgtgacgaggcattagagggcttctcaagtatggagataaaaaagcaattaagtgaagttgttatttcatggagagctttggtgctttctatggtatgactgcggatgagtttaaagtatgatttgattaatggccgagatacctgctgggatgttgaaggttgtgtagatgatgtcttatttttcccatgacctacttttgttctcaatcattatgttgattgtagattgataagaaacataacaattttttgcaatctggaaaactatacgtcctgaggaatactgaagtgtgaatatttatacaaacattagaatatttttgcgagctttctttcttttaagtgatgataatgtatcctcctttaatacagataagtgaatattccaagaaaaacgtttgttttgt

SEQ ID NO: 69733 - DNA, 760 bp, Prunus persica
  Intron number 1 from transcript ppa020172m (locus ppa02017 2m.g) derived from phytozome v7.0 (chr-ID scaffold_1; pos 43042944 to 43043703)
ttctggttgaaaggtcaatctacagatttggaagggtaagcaggttgagttctgttgttgtttcctgtttggttcctgcttttgcgttttagcttatatatttgctgatgtctagattgttcagctaagtttggagatgtttgagaggaaacaaaaagttatttgtagtgctgcatttggttgctgagaaaatgtcagaactgaatagaaaagattcaaagaacagaaagagaatttctgttttccagctatggtttttatttgtcaggggcccatgtagctatctggcatagtttactttggtttggagaggattgaaaataattatgcaataaaagatgatgctctgtttggttacagagagtgtttaagacaaatgctgatttatagattctttagccagctagctacattcttgaggaagacgtcagttgtgttcatgaactctatttggtctatgagaatttctgtaaaaatgaattaaattttttttttttcttaattaaaactgcatatctacctgcttagtcagttcacaactttcctctggttggctgctaagagtaaaggaaacaaaataaatcaaattcaatgttattgttctgatggaacacaatttggcttattttagtgagcttatgtcaagttctggaaggcatttatgaatttttggatttaagatttaagattttcttatatttatttgttttttttattgtgtgcagtggttaaagaagactaggaggaaagctctatttgc

SEQ ID NO: 69734 - DNA, 862 bp, Prunus persica
  Intron number 1 from transcript ppa007540m (locus ppa00754 0m.g) derived from phytozome v7.0 (chr-ID scaffold_1; pos 5396317 to 5397178 reverse strand)
tccaattgtaatcagacgagcccaccaggtattatatcatgtatgaatatattttgcctcacatttaattatgcattaatttcctatcaaataaatgattaaaatgggtaatcattaatctgtatctaatgtttcttattagctttgaatgcatttggagttttgggaccttttatttcgattaataaaatttgtgatcttatgttggtttccttccaaatgtatgatcacaatggaaattatgcgcagttatgggggaagggaaaaaattgggtgttcttgcatcatatcttctgaaaaatcaaagttgtcagtttttaccttttgtcatttgtcacattttctaaccaggtgactggatttgaagcatttattggagtttgtatatgtgagtaaatgtgtgccacacatagtttttttttttggtggacatctttgatgttggagtacattttatttttttcttagtggtgtgcttccgaaggcattaagttttgatacatgaaattagcaggttgttgaatttcttttgtacttcttaaatatagttctgataaatgtgaatgtttatgacagttattttatagcattctatgaatttattgcggccaatatgtttctgttcttcagtttcgatattttcaactttttaaatggtgtgttgtggttgctgaataccggttattataatgaattttcatgagagtattgttgagaagcaaccagcaagaaacatattctttctatggtaggctagtggctaattttaaaaattagtgatgggagcatttttggaagtaatggttaactgataacataacttctctctttttcttgtgaaaaaatttaaatgcagtaggac

SEQ ID NO: 69735 - DNA, 729 bp, Prunus persica
  Intron number 1 from transcript ppa012096m (locus ppa01209 6m.g) derived from phytozome v7.0 (chr-ID scaffold_3; pos 12655497 to 12656225 reverse strand)
ttaataaacctctatcactccctccttaccctgaggtacatcttctctctcctgcccaaatctcaaactaaaataattttctcttcacaactttttttttttttttttttttcatgttcagccattatttctcacatttctaacaaatattggtttttttttccccctgctgaatttcttaatatttcatgaccttggatttgagttttcatttttggattttgtgttatgaaaaaggaagacttagatgggttccaaaataatgtttaaaaaaaaaaatggagcgcttggttccatttaattctcaaactcctcatcagaaatgaacttttactgatctgaatacctctacctgttgtcctggtttttttaaaaaaatttatttttaatttgggtaaattattgaggaaaaataaaaaatattggaaattcctgaaaaaagttacccatttatttcatctaaattctgactacagttttaggattttcttaaaatttcacattgtttcatagatttgagttctgctactttgttcaataatttgatataccaggacccaaaaaaaaattcaatggtttttttttagcccttgaactgcattatgctgactgaaaagccttctatttctgggcattaagttcatccaaagagcattttctcaatacaaagaaaaaggatttttcgttttgtttttgttgttgtaaaatgtttcagttgtggtatttcag

SEQ ID NO: 69736 - DNA, 1011 bp, Prunus persica
  Intron number 1 from transcript ppa016288m (locus ppa01628 8m.g) derived from phytozome v7.0 (chr-ID scaffold_6; pos 20332527 to 20333537)
cgctcattgcctatattgctaagcttgaagctgaggtagtttctttttctctctttgtaatttgaattttgattttcaaatttgaatttcaaattctgccctgtacttgtttcttttacttttgggtgtttccagtagtgtgtttttctttaatggaattcttttcttggaatatttttgatataatttgtgggaggaatttcttgcttgaatgtagcatttacaaaacaatggaattgaagtttcagattttcaatatgcccaattaggagcaaaagaaaatatagatcaccgtgctgcatttcttgttactctttctgttcgctttgattgattatctggcaggcggagtttttaagtttgtggtgttgcgctggagatagacaaatgaaatagtaacaattttttaaaatcctttataatgaattttgattggtctcgaataagaaatggcataagtgaatgaatttggactggttcgtatgtatataatgcgttttgattgatccaaataagaaatcagttctgttttatcctgaataaggaatggcataagtgcatggtttccatctttattaagttctatccttttctacccatgtcacaaagaaccattataatgaatgaagaaaagttttgtttcttggaaaatatctattcaacattgctttcaagacattgttcttcaatataactacaaccattcctctactttttatcttttgttctttgcctttttttcttctcgtgtttgatgctcccctccctctgttggttcgttgctgcttaatgatttagttggggtctctagtacccatgctgtctgtattgagccctgtttgttgtttcttttgctctggtgttattttcggagtgttgccctgatattttttgaagtgataaacttgaatagttcatatatttcccatgaagtgtgtagtagcaaatttctctatttggtattccgctgaccaggttagcttaatttagatttttgatcaccaacaccac

SEQ ID NO: 69737 - DNA, 489 bp, Prunus persica
  Intron number 1 from transcript ppa013547m (locus ppa01354 7m.g) derived from phytozome v7.0 (chr-ID scaffold_2; pos 17147364 to 17147852)
caaagcttcgttgccgctagcaatcacaccattcggtacgtcaaattttcaggtttctttcaatttttcttcaattttgttgtttgggatgcttattcagtcgaaggttttacccagttctggaatttctttttgggtttagaaagattttcttattgttttcaatggatcgtttctagtttcttgtgatttttgtacatctttctgtatcgtttttgttcaactttaaaacatgatatgagattccagaaaccttgggttatagttttgttataatttcttgctgccgatctgcaactgagctttcatgaattccacttctgggattgttgaaattttgggtctacgcatgaaatattactgaattattgaaattatgttgttagttaaagccccttattttggtgtacttgctgcccatatatgtagatatttggtgtaatacgatgaattttgagttttttattttgctaattatgaagctaagtc

SEQ ID NO: 69738 - DNA, 801 bp, Prunus persica
  Intron number 4 from transcript ppa013547m (locus ppa01354 7m.g) derived from phytozome v7.0 (chr-ID scaffold_2; pos 17148258 to 17149058)
aagtgccacaagtgaggagtgtacggttgcttggggtatgcttcagctttcaaaccctactttcctcaagtttatgcgtatgctaatcatttaagactactatagttgatgcgcccttggtagctaatcacatttatgatatttcaccattaatctggctcataggtagcttaaaagttcactagtatttaatattttaataaattttttggatacctgccttgttttttatttctcatgttttctacccggacattctacataattggcaagcccgttctttgtaattctgtatctttgaagtgtaatagagggaagggaaagaattgtatcttagatcatgcaaagatggtggttaagactttttcttagtgtggttagtatctctgttaggtgcttaaatataaagaaaaagaacggaaaacttcattgaaagggagattttttcatagaaagaaaaaaggagattcttgaagtcgtattgcagaactgttcattatattttctctggcatatcagcttgcttgaattcctctttatgcattctatgtgtcctcaaagctgtattttatagtcttatcactcattcaccccatatcattgcctgaaattgatcacttacatcatatttgatctatctgggttaatgcttgaaacagatgttggtaatgatagtcttcttgtgtgtgtggggaccttggttatcattacttattctaaaattagtcagtcaaacatttactacatcttcattaagcatctggtgtttctttgtctgaatatctgtaggggtctgtaacc

SEQ ID NO: 69739 - DNA, 544 bp, Prunus persica
  Intron number 1 from transcript ppa002484m (locus ppa00248 4m.g) derived from phytozome v7.0 (chr-ID scaffold_6; pos 6772546 to 6773089 reverse strand)
ttttccaggtacccaattgctcaatttgaaaagctagggttttaagagggtttaagcgaagattttatttattgggttcttttgtgtgtgtttaatatgggaatttcgctctgtttgattgttgagaaaaggaaggaagaaagaatggggatagaagcttgagttgaatttatcagtgtttggtttatgggaaacaaaaaccctttattacttgctatgaaagtgtataaaaggaagaaggaaaaacaaaaacataaaaagactttcaaatttatagtttggagcttatttttcgtttgggtttttttgggtccttttaagacctgaatgaacaaactaaatttgcatagcatgtttgagcttatttattgaccaacaggaaattcaaggatttaattattcatattaagttttgttatttattaaagaacgaatttaaattagaagaatatgtttttagatctttggttatggaaattggatttggctatatattattacgtgtggctaacgaaataaactgccttgaattgttgaagggaaa

SEQ ID NO: 69740 - DNA, 839 bp, Prunus persica
  Intron number 2 from transcript ppa011829m (locus ppa01182 9m.g) derived from phytozome v7.0 (chr-ID scaffold_8; pos 13547584 to 13548422)
gcgttacccgtcatcgccgtaagattttggatttgttgaaatttaaattttacactatatgacatgttcaatcttatttcctcacttgagcaaaatacacagaatgggtgattaagctaaatacacagaatgggcaattaagctaaatacacagaatgggctattgagctaaacacaaataatgggaaataactttaaaaagtgtgtatttacttctttactgagaacatatgcctgaaaagatgcttaaagaattctggttaagtggagagaaacaacaggtaaacagcgtctttgctacacctctcaaactcaaatgcttgtgaattgtttacaccattgaacaaacgtgcagtttgggaactgcagtcttacataatagatgtagaacttcgaaactcagatgtttgtagtaagaatctggtttaaataaagagaaacaaggggtgaagggcttctttgctacacctttgaaattcagatgcttgtaagttttatactgttgaggaacatgaaggttaggaactatagtattgcctttttactggcgtcttctgaatggaatagataagtggtggttgactgtgttccttcattgactggattgagtggtctctcttagatgacataattctggaatttactcattgatctagttgatgttcatattgaaggtctaggcttcagaaaatggtgtatctgcatattctggatacttgtacgaagttacataaacagtagacagcatgtgtgtttttttatttgattttattacctaaggcagtgacctggattttatctttgaaattcagttccggaaattgagcagggactatctg

SEQ ID NO: 69741 - DNA, 714 bp, Prunus persica
  Intron number 1 from transcript ppa024981m (locus ppa02498 1m.g) derived from phytozome v7.0 (chr-ID scaffold_5; pos 16542573 to 16543286 reverse strand)
agagttccccctggtaatgtaaaagttttctgttcattgtcgaagttatcagtttgattaagaaaatcaaggaaaagctagtaaatccaacgacgatttcctagttttcttccgtaaactcattttccctatgatttcttctccgcagccttaacgtttgatctgtttttttcttcttccacaatatggaattcctggttagaatgtgataaattgtttgtttgaaatttccttttggtttgcattttcacggttgtttgttttgaccaatgagcaaaagtaagtgtgcctgcaacaggtcagggaaggacgacacgtatccaattgtgactggctgaccgtacaaatatttccatttacgtgcttcaagccattgcttgcttttattcatcacaaaggctcctgcattcttgactgcaaatgctattgcttggcatttcaaaagttgataactgcaaaacatcttctgcccacacaaattacaataataacatttaaaaaatagtgacttttgttaactgttatttaggaactcatcaagaaaaaatttacttgtttaaagtatcagttgtcctataattaacacgagcaggatgaatagtttaatatgccttcgtatgtgaaaaattgtcttcagatcatttgtgttcctgtttcaatgtatgtaggtttttttctgtcagtaacttaatgttttcctcttcgcaggagatc

SEQ ID NO: 69742 - DNA, 846 bp, Prunus persica
  Intron number 2 from transcript ppa013505m (locus ppa01350 5m.g) derived from phytozome v7.0 (chr-ID scaffold_4; pos 920528 to 921373 reverse strand)
ggacaaaaactcgttcaagcttgaccattctctaggtctgtttttaagtttttggttaattatgttgtttgtgcaatacacatatccctattttggttggtttcttttagtatggtggcagtctttgatgtctacttaatgaacctgaataatggaggctgttttgcagataaagtttgctttttttcctttttttcctttttcttttgataaacaaaagttcggctttttatccattgcttgtgtttggtattatttaaattttggtattatccattgcttgtttgctagatggaattaagtcgtgggattcttaatagtccaactttttttttgctaaaggctgaattttttgtttttcttctttgtgaaaagattgtctgtttaattgtttaattttttgaataattaggcccgtttgataaccatttcaattttagtttttggctttggttttcattttttgtgctagattataaaggaaattgacagacaatgaaagtgagaatgagattgagagagaagatgagaggggaggatgggatggagaagtaacaaaagcgaaaacaaaaactaaaaactgaaatctatttgaaattgttttcacaagtttttgttttcactttttttactactcccgcccatcccctttcatcctctctctcaatttcatcctcactcccatttttctctatactataacacaaaaaatgaaaactaaaaactaaaattgaaagtttttggttgtcttttttcaaacttttgtttttcatatgtttctgctctgatggtttggactaaactatttcagaaaggagacaagcagaagctggtcgtatcagggag

SEQ ID NO: 69743 - DNA, 320 bp, Prunus persica
  Intron number 2 from transcript ppa006202m (locus ppa00620 2m.g) derived from phytozome v7.0 (chr-ID scaffold_7; pos 9384517 to 9384836 reverse strand)
gaaccagaaccagaataagaagggaaagcaaggtctctctctctctctctctctctctctctcaaatatgcttatatacatgcctttcttctttttttgttcccatttttgtatatgtatgcatatgtaattgctgacaagatttgatttggactgtgcatggaactattggcgcgtgattcaatatgccagtttacttgggtaagttggtggctcaagtttttcttgaattccttaagaaactgctaattattgtgtaatgtattatgcatcgtatcaatcggtaatccttgagtagcatgtttaatttacaggggcgt

SEQ ID NO: 69744 - DNA, 898 bp, Prunus persica
  Intron number 3 from transcript ppa021028m (locus ppa02102 8m.g) derived from phytozome v7.0 (chr-ID scaffold_1; pos 37377601 to 37378498)
ggttcgtctcaggaaaggggaaacccacaatacaggttcccgcttgtctttctttggatcggcttgtgcgatgtttgactcctgcctgtgtttatttaaatggattgttttactgtgttattaaacttaatgattgtgtatatattttgaaaggattagttatgctttctttcttcttttgtttagtactattgaccctaaacttgttttatccccaattagaacacgggcaagatactatttagtcttggaaacatgtgatgtgaaaattccataagatacaaattgactaactctacaaattcaaaatggaagctaaattatatgttttctttgacatactttgtgttagtgcgggagtagttgtctgcaattcataagttaagatatgtttgatgagactaagttgcattttgtgtctgattcatattatgatggccaggtcatttcctcagtgtttaccacaacccttctccattcttgagatttagtataaggtgtaaaacactaggctttaaactttgtcatttagatttgtaagtactctcagcttttacaaaatagagttactgttgctgttgaagagtctctatgatgacgtctggcatcatatatggaacaaattgtcttgtgacacaattatgtttgtcttcataaataagttgatcttataaatgtagataaaggatgcttgatttcaaattagcacacatcaggagttattgttagaagtgcaaaagttattcatggaattttctagatgataaatataatgctaaaagtcctggcaagaagcatttttattactactaatttgacaatactgagttctatttgcccctttcctctctttcatgtttcaggtgtctctttcagtaatattgactgcaggaggggt

SEQ ID NO: 69745 - DNA, 1033 bp, Prunus persica
  Intron number 2 from transcript ppa022441m (locus ppa02244 1m.g) derived from phytozome v7.0 (chr-ID scaffold_3; pos 6700921 to 6701953)
tatattttgggactaagggtctctcccacgcactggttcctctctctctctctctctctctctctctctctctctctctctctctcatttcttgtactttatttgtcgcattaattcattattttgttttacccgcattaacatgcagatcatatacatttatagctctaaaatatgtcaggaagataattttcactgaatagttaagtaattcttatgcatgaaactgttttgtttttttctagatggtaatagtgaaagcaagaaacacagtaattaattttcacttctttattctttttggcttctcttgcttttgtactcccaagtttgctccttgcactactgagaacctgttttcttgcttttgtacttccatctctacatttcttaacacaaactctctctctctctctctctctctctctctctctctctctctctctcatgtgaataatcgtagcttgattctaatcccactcccaccccacatacacagagagagagagagagagagagagagagagagagagagattagattctagcgtaaagagaaacgtaatgttcctggtatcatggaaaggagcaaaagcatgcaagtagctagcctgtcatcgacacatgtatccaccagccgctacttttgctaaagaaaaaaaaaagatcaaatctctttttaatggaatgtactccttcctccccatcccattctctcatttcttccatattgtatgtacgatttgctactaaattgcctcatccacagagtgtgctccatgatccaccccccacttttctttattttattattcttatgttttcatccttttccttcttcgctatgtatctagacaaaacctccatggatgcatgtcaaagaagcatgcaagaataaattattacttgtgtacattagcgctgggaagatctagggtacttacgtaatattaactagttatacattttgattgtaattgctgtgaattttccatgcaggaggctaggcattggcacgaaactagtgagacatt

SEQ ID NO: 69746 - DNA, 781 bp, Prunus persica
  Intron number 1 from transcript ppa017608m (locus ppa01760 8m.g) derived from phytozome v7.0 (chr-ID scaffold_5; pos 5491333 to 5492113)
tgggagctttggagtttcgtccctcggttggactgctcatccctagacgcaggatagcacctagaaatcctgcggactagtcaaacgatcccccagttggattgtttccccggtacttaggtagtgtgatgagtatatcttatagctatgtatagttatatttatatatatatgtatatttatatgtatatgtatagttgagtgagtgaggaattagagtttttcagtggtttggcaggagtggtaagtttgagagaatgggatttatgaaggagatgatttgtattccgaagagtttaaaaagaatcttgttttgagtaattaaatattgaattgtgaacctgcatgacttgagcattatttttacacggtggggttactatattgtttttaactgcaaatctggtttttgtccactcacatgttttctgttttgcgcccctcagccagtagtcgctctaggaagcgtgcaagtggtgtacgaaactctaactgtgaaccttcctagttaggatttgagtaatttcttctactcaactgttcttgtaatctaaattcagtagatgctttgttatcgcccatagtagattttacttgtgaggccggaggccatttagtttgacttgttgaattgtgaaagcatgctgctggttgggatttgtattttatgtgtgttgcaagttgaattatttgttgggtttgcttaaattacaggggagactctgccaaaattttagtagaaagtctcggtttcttagtaagtgggcccggcatcgggaag

SEQ ID NO: 69747 - DNA, 887 bp, Prunus persica
  Intron number 3 from transcript ppa009207m (locus ppa00920 7m.g) derived from phytozome v7.0 (chr-ID scaffold_5; pos 17580633 to 17581519 reverse strand)
atactgcccgtggtcttggaagctctcttttaattgtaagagctatatactttcctactttcagtacttgcaaattattgataactccattttgcatgtatttcatggtcctatttcatactaggatgaattatcattgcatatcaagatgtgtgaactttcactttctaaaaatggattgttgggaaatgtagcctcaaaagtgaaacatcttcttctagatgttcatttgtaggttagcctgtcaccaaaatttgggattgaaggaatgtatgtgatctaaacttaatcaaagtaaataagtttcattgagttatcaaatatggctgcaagttatgtcacttgtaaataaaatttcccaggagttagggatattctagcgtgttgcaattatacctagggtagtggctgagtggcgtcacattcactgttgttaaggagattttaaaataaaatggttcagttttggagactaacttagtagaataagtatggtgaagcctagacacgcaattctgtttgagagtgtagaaaaggactgggatgcatttctagtgagactggatatccatagaggagatgaggtattagtggcaggggggtagatggtttccaggttgtctcaatctggaaataatatatttcagattactatccctgattactgcttggtgacagtctgattggtgctcactccctaaatgtaccattacatctgttcattttcccccagtaatttaacagacattaaggctgatttgcaacaccactcacatgttacttttactactggttctgaagtgaactttagacaatattactggttctgacatgttacttttacttctctgaatgtatatatttgttattactatgtttacaggagg

SEQ ID NO: 69748 - DNA, 722 bp, Prunus persica
  Intron number 4 from transcript ppa020040m (locus ppa02004 0m.g) derived from phytozome v7.0 (chr-ID scaffold_2; pos 20275714 to 20276435 reverse strand)
caagatagcaccgctgtgagtctctctcctacccatttcttgtatgcataacttgatcggtgcgttctttttatgcttttctttgagttatattctaataggtggatatttcatataaatgaaccctagtgtggtagagggttgagaaaatggtatatgacaagactcccattctggataaacttttttcactgtgaattgtcatgatcttgttctttgtcaatttgaaaatgaaaactatccctgaagttctattgaaaattctggtcaagggatataaaccccgagtttctccagtgaaagccaggtctatacaatagattaatgtgtaacctgacacacaaaagtaaatgagaaaaaagccaaaagcgaaaatagaaaaagaaaaaccaacatgtataacgttgagaattggacatttattgattggcttggaagttggcactcttggtttaacatttggaccttcactttgtagacttggcctagtgtggtttatgatctggtaggagggtatttagtgttgactgatgcttcttgtctgaatccaaagaaatacaactggatgatttgttatctgttcttgtttttgggtggtaaattggacactgaacaatctgcgcagttcacatgtactatttgtggccagacaaactgattctaactagttttttctttattttgtttgaatcatttggatggatagggttggtgatagagac

SEQ ID NO: 69749 - DNA, 720 bp, Prunus persica
  Intron number 1 from transcript ppa005852m (locus ppa00585 2m.g) derived from phytozome v7.0 (chr-ID scaffold_5; pos 14254075 to 14254794 reverse strand)
tctctctaagaggttccaattctttcttctttcttttttcttagcttgtgaagttttcatgtctttggtcttttctgaaaattgggtattagggattggggctatattttttatatatttgtcggtgagctctaaaaagtctgcatctttctctgactttgagtcaagtgggagataatataaaatgtgggttgtgaaaagtttgggtcttgttagataataattatgaattcgaagaagaaactagatatctggttttagggtgcaaaagatttctttgatttacattctttttgccctgaaaatgtgctgatatcttctgggttatgttcttacgtttcactaatcccaatatgaagttgtcttaatatttccagcattatcgaattcaaccccatttctttgcctgtgaatgaggcttgggatagatagttggccctggttatcttaaactttttgttcaattttcttgagaatattttatttcatttttttgtctttatttcacaattctgtttcttgaggttatattcaaatcagaatatgaagcaaatgggattgattgttttagttactttttccatatatgatccttttataatgattgttagattaatagaacaagcctttcaatgtgtgaactccatgggagattgatttataacatttacttaatttttgtttgttgaatgtgtagtgttcctgtagaatatacaattg

SEQ ID NO: 69750 - DNA, 149 bp, Prunus persica
  Intron number 2 from transcript ppa015698m (locus ppa01569 8m.g) derived from phytozome v7.0 (chr-ID scaffold_1; pos 28509107 to 28509255)
tatttcacagacacaagcactgtcttccaaagaaggtatattatctaactgcttacttcttattcttttttttttcttcgtcccgcaatgtgtctaatgatctgaaccgtttattttatcttttttgaactttgttttgatcgtagggt

SEQ ID NO: 69751 - DNA, 649 bp, Prunus persica
  Intron number 2 from transcript ppa006966m (locus ppa00696 6m.g) derived from phytozome v7.0 (chr-ID scaffold_3; pos 14538007 to 14538655)
ctccgcaaggtatgaatgtgatcatttctcatatctttaatgtggattgcacattgcttagttaggttgcgtttgtaggtaggtaggtaggcaggcatgaacccagctttggtggtattactaatgaagtagatgatctctaaatgagttcagcattttatgtcatgcttgtgttgaataatgcaaaaccaaggatatcaaagattgggaaaggtaaaggttaaatttggatataaatgtgtacgtgttattatgatgaaaactgttaaacccagaaaacataatttgacgggcactagattatgctcacatgctagaaatgatatgttgagattctgattacttccctttatgggttgattaacaatcagtaataatgatagttgcaatgctgataataatactagcagttgtgatagtagaaacaataataagattgactatagggataagatatttcttctcgtcagtttctggaaagtgttcagtcagtgatgtggtagagaagatgaggcagatatcatatcactaataagtttctttttcccttgtcccatgcttgaaagtttgcatttccttatatcactcgtgtataaataatttatgaataagaaagctctttggaccctgattcgtcacatttatgcag

SEQ ID NO: 69752 - DNA, 579 bp, Prunus persica
  Intron number 1 from transcript ppa007230m (locus ppa00723 0m.g) derived from phytozome v7.0 (chr-ID scaffold_8; pos 481408 to 481986)
caaggtgtctctactctcctcaaagtgttgccagttatggcctgcaagtaaatccctcatctgccatttttaattttttatgttacttttaattcttgaactatttggcattgaaatcctcacttttctattagatgtttcatgaaataatatcgactttgatctgtgtgtttctttttcaattctaggcttgtgttatgaggaaaattccatgaaatctaggataattgagtcactttgtagctatcaatagtggaatacatacttaagcccttttttaatacaaattttattggatctgtcttctgaaattattttcacggaaaattcagagtttatgttctgtatttcatctcggaaaaattagaccactatatctacatgttcctgagctccctaagtgctatttttgaaagctgcactagctatgttttccaaattagagttaatctaattgatctccattctccctcctgatctgctggacagtttctgtgactcaaaagaaaggccaacgtttttcatccatatcctacttttacaggttctgtccagaagtatacataggcgagaaaggcc

SEQ ID NO: 69753 - DNA, 777 bp, Prunus persica
  Intron number 1 from transcript ppa001304m (locus ppa00130 4m.g) derived from phytozome v7.0 (chr-ID scaffold_4; pos 3656684 to 3657460)
ccctaacgaagccgttaatcgcctcctcgcccaaggtctctctctctctctctctctctctctctctctgtgcaaacaaagctttaatctttttcttattttttgttttcaagtgttgggttttgtgatttttggtttttgctattttagggtattgggaaagttcgtaccggactggggcaaactgtactattaatgttagtccagtgggttttctaaattataaaggaatatatatatatattttttggggttgaaggaagttgttcatttgatttacgaagttttatgctttccctattatttggtatatcaatttcctaaaatgatttactcagccttttcatgtcatgtttttctgagctataacccacttttgggttttatttatttattttctgggtttcctatctctctcatacagagtcattcattcatcttgtttgacagaatcatacattggagcttcaggtttatttgcaagatatgaaatttcattgactcctctcagttagaaaactggaacacaaatgaaagcaatgaactctttaagaattttgtactcattcaactttaattatgtctttgaagcatgctactactgatgctcggtttgcaaaatctcagttgaagattgagtcttgtctgtaatttatcgactccttattgagtcgtttgaggtctcagagcatatatgaatgtgatactacatgatatatatgtttttgttgatatttgcttctaatgtaaagcttatatcttgtgtagatccttttc

SEQ ID NO: 69754 - DNA, 559 bp, Prunus persica
  Intron number 2 from transcript ppa012249m (locus ppa01224 9m.g) derived from phytozome v7.0 (chr-ID scaffold_8; pos 18767259 to 18767817 reverse strand)
aacttggtatgctttcttgctctccataaaatgccaacaatatgcaactttgtttttgttatcaaatttcagtttaggtgcttgatggatgaaaatgcattctaagtctttgcttgcttgaattctcgagtgtccagttatgtccttttagatttaatgtaatttgataatttagcctcagttttctgtgccccagatgtagtagaacagtttgaatggaaaatttgaagctgattatgcatacaaacgaacaaattgttgagctccattcaccttatgaaacagaaagtttctagcttgtgcaatgttcgagataatatgtttctagaattaagaaaagaagtgtgcttttgtacacaaaattcataggttttttgttttctccccaatttgatagggtatgtttctgtttggcttagtttgaatgttgagaagtattgtttgattcctactctgttttatcacttttgtctttagacttgatcgaattatgcttaaattcgaaagccatttctctctttcaggtccccaagggccacagctgcaaaaggtattggag

SEQ ID NO: 69755 - DNA, 678 bp, Prunus persica
  Intron number 1 from transcript ppa004269m (locus ppa00426 9m.g) derived from phytozome v7.0 (chr-ID scaffold_7; pos 20935829 to 20936506)
ttctgagatctggtggtgggatctgacgattaaaggtgagtttttttgttctgggttttgccgcattatgggactcgcggctttcttatgcatgaatatttggtctgtgatcgtttaatgcatgctttttgctgtgaaattttgttggaatctctgaaaagttcaatccttgatgtccatctgcatctgggtttcgtgcgattatcgttatcttccattagttctagtaatttttttgaagaatattttctttttgtggtaaattatgttctgggattaaagtctgaaaaggggggctttatttttttctcactatccttttaatttatatattcggtccttggatttaggttctgtaagtttattttgctttcacttttccatcatctcagtgatctgtagttgtaaatccggcagaaccctctcttttaaaaaacctatattgacatctaaaagttgtagaaattatgtatttcttgggaagggatttctggcccaattgcaattgaaattctatgcaaattgcctatatgcttaagaacctcgttttgcctattttttgtttgtttgttcttttggcagttcctcttgtgcgcttagaatctattaattaactgttgttatgatcttgtcgtgcatttgatctcatccatatggttgtatatctatcagggaaaa

SEQ ID NO: 69756 - DNA, 567 bp, Prunus persica
  Intron number 1 from transcript ppa016936m (locus ppa01693 6m.g) derived from phytozome v7.0 (chr-ID scaffold_4; pos 3779053 to 3779619 reverse strand)
ggtgtagcaaaacagaaaaccactcaaagcatttctatctgggttgggtgattttctttcatttcttaattgctttaactgccctcaattgcaccaacaaaagtaaaacaaaaacaacactttctttttctccaaaccactctaagcccattcaaattccaaataatcttcctcacaaactgtaaaaacaaaaataaaggccagtaagctcgtctactatgctatatatcctcattcaaatacgtactgccaacataaaaaaatttcactacagtgcttgcaataattaacaatccaaacaaaatcagttacagcttaatttcatgaattagtaagggcatgtgaccaagttcaataaaagtattttcaaagatctccattctctccctctttcaatggagcatactcgaaagaaaaagcaccggtgtaagggtcgcacttaaaaacaacagaaggataatatttcttctcaccgcttgggcactcataactcgtgttcaccttccttctcatatactgaacaactcttgaggattgcacgtccttggcttgacccacatttggcac

SEQ ID NO: 69757 - DNA, 495 bp, Prunus persica
  Intron number 2 from transcript ppa004784m (locus ppa00478 4m.g) derived from phytozome v7.0 (chr-ID scaffold_7; pos 17700924 to 17701418)
tccggacttcttgatcaacccgaacttcttcagaggtttcgattcttagcttgctcttaaaagtttcaaatgctcataatttaacattttgtaggtcgtgtgtattaaaattctgttgaaattgattatgtaaactcgtaatgttttcagtttctgagagaaatgtataagaaaatgaaaaattaaacttgtgaattaaaaaaattgtacttggagtgattggatttagtaacagggcaagctagcagctttctatgatagtaagttttcggagaaatgctggttctatcatctcttaatgctgacgctttaaattttctgagcgaaatatatacgaagtgagaaattaagatttgaatttttaatatttttacgtggagtgattggctttagtaaagggcaagctttcgtttttctttgaaagtaagcgtttttaattcttttggtttcgtggataccggggtgctcatagttgattattaatttaatataggc

SEQ ID NO: 69758 - DNA, 342 bp, Prunus persica
  Intron number 2 from transcript ppa012145m (locus ppa01214 5m.g) derived from phytozome v7.0 (chr-ID scaffold_1; pos 28681776 to 28682117 reverse strand)
cagacggagaattggaacggaacattccgaatacggtataataatgatgtgattctactttaattttataaattcgttgtcttttttttaatgtcgttgatttactattgcttgtggtaatttatccgaaaaaagggtattgcttttggtctaatttcaagatttggttctaaattatttgtgaatagataattgcattggtaagattaaataaaaatgctcagaaagttttgaggccaatgtgacgtgttatcatttcaatgtgtgtattttgctgttgcttgaatgtctttgctttcttctttgactcggttctgtttcctgcatgctctccacaaaagg

SEQ ID NO: 69759 - DNA, 899 bp, Prunus persica
  Intron number 2 from transcript ppa013992m (locus ppa01391 0m.g) derived from phytozome v7.0 (chr-ID scaffold_9; pos 1261586 to 1262484)
gttggcttccagaaggtagtctctcagcaatctgtttgtatttgctcgtactctcaagtggctctttgtatttagtgaatttgtttgcttttgcgatggaatgagtggctgttggctttatgaacgtttgcttgtgtcctatttatgttctttgctagtgactgcttttgtgcttgtttgagttctaatttcagtgtcaaagaactgtttcgagcaataggtttcagtgtcaaagtactgtttcgtgcattaagaatggaatagactaagatttatctttctgtttgttccgttgaagtaatggaatagcagtgagcattccgttccaatgtttgtgtttctaaagaaacgattggtctgaaaccaaatttgaatgcttcccaataagcgcttatacatgtaaaagttagtgtggatattaatagtattcattgcatatttttaagatcaatggaaatatctcacttttgttttttgttttctttctgtgggaaaagtgatttgtttgtacataagcacatgcatatgtatacgtatatgtacatgtgtgtatgtatatatatatatatatattttatattcaaatgtcctttttgaacccttgtgatgtctttctattttgccactttttatttgcttagtaaaattaacaaaagagcgaatgactcaaccaaatgggactatttcctctatccttatgcaatgtctacgtccacactgatttttcttttgctccttactcctcctcctgctaggattggtgagatttgcatatttctcataacaagcagccttgtttcattatgttcaacaaagaagtagttttgtttgttggctgcctaaccgatgggtttttattcttgaattaggtatctagcgaacatttgtagggtcccttg

SEQ ID NO: 69760 - DNA, 635 bp, Prunus persica
  Intron number 1 from transcript ppa014039m (locus ppa01403 9m.g) derived from phytozome v7.0 (chr-ID scaffold_1; pos 5918672 to 5919306 reverse strand)
gctgtgagtaatttcttttgtagatatgcttctccctcgcatattcgtattcgtaaattattatgtatattgtactgggaatttttttctggtctttatcaaaatggtttcaaaattttccagtctctaaaattataggatttctttgagagtttttagatgcttaatgcaagatttttggaaggtggttctttgcaaccaaatattgcgcctttagagatttattatctgggataattttgggttttctagtataacatgtggtttgccaggattctgagctgctagctaaatggtatgtgggaaacatggaagtatgtgtatttgcattaattgtatgatgttttggtttttaatgggagattataaatatggtcgcttcttacaagcgtagaacaatgttgaactagggaaagaaaaaaaagcacaagaatatcgttgcaataggatcttgccccgtatttgattagtgtagttgattaataatctgaacattaagctgtacaaaatatgttttttgtcctggtatatttaaattcagttgttgaaaataatgtcatgctctggatcttgatacttttgttgttttgtaaaatgcagacaataccagttaacccaaaacctttcttgaacaa

SEQ ID NO: 69761 - DNA, 977 bp, Prunus persica
  Intron number 1 from transcript ppa014929m (locus ppa01492 9m.g) derived from phytozome v7.0 (chr-ID scaffold_1; pos 7260489 to 7261465)
aagaacgcttttgtgcacccattccactcctccaagtcgcgtttacttcttcttcttcttcttcttcttcttcttctacttttccttctttctcttcttctacagagttttgaatcctctcctaagcctcatctaagctggtccttgtgattcatgaagcctctcctaagcctcatctaagttggtccttgtgaatcctcttcttttagttacaggttaatttttgcgcatcacttccgcttccttttgaatccccttcatctcatctcatctaagcctctcctactagttacagagttgtgaatccctaaattaaattttttgttggtaggttggggagattccaaaattcaaagtgtgggcttttattcagtgcaaaattggtccttgtagatatcagttgaaggtaattttttatgatttgatatcaattcaaaagggaaatatgattttttttgttttttgttttttgtttttgtttgtagatttgtgaactcatgcagttacacattctctttccaggaattcttttaagctctaattgattgcaaatttgaaaatatcaagtttgtttccgtggaggggatttctcaaattccaggttatgttgttctttgtttattctttgaagtattaaaattgcattgactttccttgtattgtttttgttttcaagtagcaatgttccctaaaaaaacacccatctggaaatcaaaaaagaaaaagacaaagacaaagagaataattaactcaatctcaaaagggagctttggataatttttttcaaaacaaaacaaatagttcacttgataactcaactgaagattgagtcaatgaatctaagcagcaaacttatgttgaagaatttgtaggaattgataatggtttagtcaatgaatctgaacaacaaaatcatgtagaagaattagtaggaactgagaatgattttaatgcataggtaggtgacttaggtgaag

SEQ ID NO: 69762 - DNA, 732 bp, Prunus persica
  Intron number 1 from transcript ppa012593m (locus ppa01259 3m.g) derived from phytozome v7.0 (chr-ID scaffold_7; pos 10746611 to 10747342 reverse strand)
gaaactcgccggcttctcatttttctcctgaaaaggtaattttcatttttcgcctgagcttctgctttcgttttggttctttcatggattcatatgctcctggatcatatgcatatacatatttagggtttagatttatcaatttttaaatttgttttgttgatggttggatcttcatttcgggcgttagcatttactcaaattagcatcgattttgtgttaatagtcacataatatttgggttttgtggaatttgtctttgattgcatctatgtggatgaattcttcttttttttatttttttttttctggaattgattaccaaacaatgccttattatgaaacaaaataattttacttattcttctgtaatttttgtttttttggcccaaattttcatgttaggatttatttttttctttcccaaatgcttagtttgttagtgtggaagaatttttttttttaaagaaatgaaatatgggttagtagaaatgctaaatgtatgtcgcttactgcccatcaagggaaatgaatgcttctatagaatttgaacccagtaaaacttatatgttaaaaacagagagagcaaaggaaaacacagtttccttctttgccttgcatggtagaagttgaaagattccctttgggaaaggttcagtgaggcctaagtgctgatatatgtattactttcttgcagtttttgtcagtgcccagttagtactagacagtcat

SEQ ID NO: 69763 - DNA, 863 bp, Prunus persica
  Intron number 1 from transcript ppa008210m (locus ppa00821 0m.g) derived from phytozome v7.0 (chr-ID scaffold_2; pos 20816705 to 20817567 reverse strand)
aattcttgacaaagtaagcctccattttggtatcttacgtttttatatccccatgctctggtactgtttggttgctcagaaaatggtaggaaaactaatgatgtgcgatctgttattaagattttcagttttcgtcctgcttaatttgatgggctttgcctccgttgtcaataacttgtattgggcaaactcgtgtagatagatctgaaacttttttgttttaagaaacagaggattatgataaagaaaaatagatctgaaggattttttttttgttttgttttgttttatgggcttaacccaaaacctcatcgtttccataatggtagcaacccagatgagcaatagttgagttcttgtagctgatatatatgtcactgttttggtttggatctgatctgattagatatagtgcaacaaattcaccttgtcactgatgattgggattgtgtgcttttaatagaacttcaatggtttttcttatcatttatgcgctttgatcatgctcacttagttaaagtggaaaaggccaatgtggttacttgcttgtttgattgtgtgattttttgtattcacggtatatatgactatgaaaaatccatttttaaccttcaatgaaagtttcttcatttcctctttaattacttcctttgtttattctttgcccaactcttcaattactttcaagtgttatagcctcatattagttttacttcaagcttaatttgttgttacactggaactataatcatagattaatgttgtatttaaatgtttctatatgctgattgtatttttttctctttctttgatatatgcatcatgccgtatggagaactgagttgacttatttgatgacagat

SEQ ID NO: 69764 - DNA, 785 bp, Prunus persica
  Intron number 1 from transcript ppa013210m (locus ppa01321 0m.g) derived from phytozome v7.0 (chr-ID scaffold_1; pos 42003787 to 42004571)
gtcgcactgagaagcgagcatttgctgcatttaagatatcctttcatgaaatttcttctagcctctctgcatgcatagtctgcacgtaagttgttggttatgagcattttagtgcatattcctgtagaacttaaatgccatcgtttatcttattcctctatgtgattcttttcaattaatcttaattgtcatgtcccgcctaacttaattcagtggtcatgtgcacattaggtgatgatgatttagggttgatttctgttcttagtgggtcgtattttacacctgttagaggactttttgtctaagtaactccctgtttgctcattcccaaatagattatcaagttgtctcgtagtatatgtttgctggggaaatatacacatatgccccctcagttggcaaagcgagagagaccctaaggtgagggggtgtgtgtgttacctacttattttatattctaatgtgatatcatctgtatgttttgcttcatattaatcatttaacatatataaatatacttactttcattaacactgtatgttaatgaccacttcagaaataatattttgaatatttcccagtcttggtaaatattattagctcccttggtgttgtcctcatgtcatgagaaactgttgcattagaatttgtgagattgaatggtgatatttgtcatgtggttccagacattggattattacatctctctcctctccctcttctctcttgtcttccttaaccaatgaacacaaagctgcaagtctggcagattcttcacctgcatc

SEQ ID NO: 69765 - DNA, 685 bp, Prunus persica
  Intron number 2 from transcript ppa003157m (locus ppa00315 7m.g) derived from phytozome v7.0 (chr-ID scaffold_1; pos 5654118 to 5654802 reverse strand)
aggaagaggagaagcggcggaaagaggaggagaaggcaaagcaggtacacattttcttagcatccttttgtttctgcttttattatttttattaattattattttctgtttggtcttttgaaaacgagggagaaataagtgcggaaatgatatgggtagtaaactacgtataggactcttccctgaactttatatagtccagtggaattattgaatgatggtgtgttcattccctaaatgttggtagataattgtcagaacattatttgcttatctgcaagtgttgtttacccaataatttggtatattttggttgttaatttgtcatataaaattagtatatgaaacatgaaaatgagttgatactaaatagtcatgatacatcgtagtgattttctttttcgtcaatttgacagtggcgtgcttaattgtatgtaagtattggtttcgcagaaatcttatatattttgatgatttgttttaagccataaatttagtattccaaccttgaaagtgaattcatactaaatagtcacttgaactctggatacacttgaatgataatgtgtaattgcttactgtccactaaagaagctcaccgtatttgattatgaagtctgatattaaataactttgcacttatcttacaggccgctgcaacagcaagttcacaggttaagaaaat

SEQ ID NO: 69766 - DNA, 1012 bp, Prunus persica
  Intron number 2 from transcript ppa010347m (locus ppa01034 7m.g) derived from phytozome v7.0 (chr-ID scaffold_1; pos 34735153 to 34736164)
agaggtcgaagacttttttcagcagtgtgaccctggtaatggatttctccttcattttttttttgtagtggttaattttggtgcgggcgctgtttggttattgacagaaggtgttttttttaaccaacactgaactgaataagggtttttattcaataatttctggtactttaaaaaaaaccaacacgtgtgtgaaagagatttttttaatttgtttaaagtaattcatgaaatttgacccaaaaaaaaaaaaaagtaattcatgaaaagaaaccctataattaatctcattttaattatatttttatctaacaattttctacttttagtcaattgtatctttgtttgcatttaattttcatttaaaaaaatatatttatggaagtagaagcttctaggcttaaaggtctgccctttctcgttgttgataatttgcatacattggcattgctttaggttatgcttagagatgcagtggttgttagagtttccgattaatgcattctacttattttcagttgggattggaagcatgtaccacacgttagcctatgtttgacctcttgtagtagttgaaatattgctaagactaataccatatttcttattgagtaccttggaagaatatgtgaagaaattattattctttttcaacgatgcattatcaacttgggtgggtgcaaatttagtaagtatttttataatttaaaaattaataataatgaatttaatttgtgtttatatatctcattaaagtttcaaagttaagttgaattacttttggcttgcttttaaagtaggttgttttaatttcttaaaaaggaaattatgaaccaagtttcgtactttgttttggtgaaaaatatatgtgaatgcaacagtttaatgcttccataatggttgatcctgcgtgtgcttctgtgtcataccttcattgcttccttagttttcatagagcatgcaatagtaccttaaacatccttcatgacagagaaggagaatctttgccttt

SEQ ID NO: 69767 - DNA, 912 bp, Prunus persica
  Intron number 3 from transcript ppa009340m (locus ppa00934 0m.g) derived from phytozome v7.0 (chr-ID scaffold_1; pos 46138594 to 46139505 reverse strand)
gtcagatatagtgtccgccaagaagttgcactcaggtttgtttctttttaaaagaagaaattgcactcggtggtgtaatctatgtaatatgcttctgcttgaatttatttggtataatatatgagcttattggagtaaacaagagaagttgcatgtgcctgcacaaccccagggttgggaaaatagaaattctttttcagttcctagtacctcaagttggggaaaccaatcatttcgtttcaaagtgttttaataactgactaatggccttgcaatatttggcatggctagttttttggatttagtacattgtatgattttatgttacaagtttaatttggcatctgaaaatttaacatttatatttgcaaaacacttgtttggggattttaatcaaacgtaatgcatgaaaacttagtaggttatagttatgttaataatttctctggaaagaggcgaaatgctgacgggagtttattatttagtcatgtttttctaggctagtgctggtatgtaaaggtcatgttcaaagaaactcctagtcacctgaacatagatgtccttttggtgtccatgctttgtttaaatctcaaagtgatgtcatgaagccaagccaaagcatttggcgttaagacttagtttagcatgacttgtgtgtaacacattcagttctcagattacaggttgtctaatttataaaaatatacagtaaaactacatcacctgtattggagtcttcatgcgtctttgatatgtttatgtactcaatggctccaaggaagaaagcatgatataatgagcttactgccttctattgttttgttcttttgttgcttatcattgttctagctctaccactttggtttgttttcactttccattcttgatttatgtatttctatctacatcagg

SEQ ID NO: 69768 - DNA, 588 bp, Prunus persica
  Intron number 1 from transcript ppa016625m (locus ppa01662 5m.g) derived from phytozome v7.0 (chr-ID scaffold_7; pos 7966209 to 7966796 reverse strand)
aatcttctggtccctcgtttttccttccatctgtaatagatccctcttctgttgtacgtaacaaattcatttacatatgcatatatatatatatatatgcacggtttcaagtgttaactagtttgtaagttaatacggtgctaactactcgtgtggcccactctacaatgccaactctcatgatcaaaactattcttttttttttttttagatcattgttcaaggaaaatctctgcaaataattagccaaaccgaaaattgtttaaccatttgattattatcgtgaaatttttcattgtttataataggttgtctgtttatttgatcatagttagatgactaaaatcttttctaatttggacacatttttgcaaggatgatctttaaatgttgatctaaaaatgaacagttttgatcatatgatgatgacattatacagcgggcctaaacgaaagtttagcgctatatgggctctacgaaaatgtcccttaacttcaaaaataaaataaaaggacatcattgagataattaatacatccatttatgcactcacgcagataatagcattgtacgtgactggatcgctta

SEQ ID NO: 69769 - DNA, 857 bp, Prunus persica
  Intron number 1 from transcript ppa017302m (locus ppa01730 2m.g) derived from phytozome v7.0 (chr-ID scaffold_1; pos 57862 to 58718)
tgtagaaccccttgaacctggctctgataccaattgttaaataacccgcacactagatcttgttctttaatgtaactaacggcaatagactaaactagcaaatattaaaaaacttaaaaacacataagaattatactggtttggcaaaaattttgcttacgtccaattgtgatttctcttctagagaaatcaccactcctttgattataatagagattacataacttttgcaaccctagaactaatctcaaaactctcggctgtctctcgctgtttttccacacctaaaataagccttgccgcactctatttatagatatagagttggcttacatgtctcaaggctgattgaattcctatttctaagtggattaggaaattacacttatccaaatccaaatagactaatagaaatcgaaaattaaattgaataaggaaaactgaaattctttcctaatccctctaggacaagaatcggtatacctctaattttcctaaaacaatcctaaaccaaataggacatatttgacgtgccacaatcctaacataaggaaaattagaaagactggctaatttgtggggatgcagagttggtttgtggcccgttaaatatttgggacttcctatgggagaaaatccaagagccgaaactttctggaatccggtcatcgaaaaagttgagaaaatattgcaaagatggaaatcaacattcctttgaagagggtgcagattgactttgattcaatctgtcctcggaagttttctaacctactttttgtctcttttcaagattccaaaaggagtggctagcaaactggaaagactgattcggaatttgttttgagaaggtgtgggtg

SEQ ID NO: 69770 - DNA, 490 bp, Prunus persica
  Intron number 1 from transcript ppa006795m (locus ppa00679 5m.g) derived from phytozome v7.0 (chr-ID scaffold_4; pos 12924343 to 12924832)
gacttctggaaggctctgtttcctgtaagttgaattgggttttattttggtttcctctgtttttgttcttttggttttctgagaatggaggagaatgatagaaagtgaagtttttaactggttctgctttatggtcattaagttttggtattgaaagtgaattgtgatttttgaatgtcttttattgtgaaaataaccattttgtttggttgctgagaaaattaaggaaattaaaaaagtgatgttttggtagtgaaaagaaaaggagtaattgaaataaataaagccttagctttagtggttgcctttgtttgagaggtctcaaatgtttgctgagttttacagttttgaagtcttttgccagatgacttagactttcgctgtttattatcattttgcttgaaatttctatgctttcttttttggttattggttgtgactttcttgttgctgttttcacaacaggttgctgtggcacatacaattgggc

SEQ ID NO: 69771 - DNA, 867 bp, Prunus persica
  Intron number 2 from transcript ppa016146m (locus ppa01614 6m.g) derived from phytozome v7.0 (chr-ID scaffold_4; pos 11957512 to 11958378)
ttatatcattcgcagaaagaggagaaagttcagaggtactagttcttctatgaccttcaactttgtaaaactattgccattttaccttagttttattcaataaaatattataaagagaggttgctacatccattctgcaatgtagtattctgagcaagaatatttttttatgtgttttcgttaatctcaactttcagtgctttagaaatgaattccattattgaacgttgtcaccagccaaaaataccaagccgctgtctgaattgtgaggctgccttgatgaaactaatacacacttcatgaatttcaatcacacaatgatcaaacaataaaaaaaaggccacccaggacttctttttatacagaagactagaggttggttcttgttattctagtttgtgttgacttcaaatcaagcatttttcttaattgataattatataatatttctgggttccatcctacgtctgcatcaagcgctgctcatttgactttaccaatgatctcttttcttaagatggtgtatttagcttccaaccatagcatggtgtactgaatcatgcgctatccactccccatgacatttgcttctgggcagattaaactcattactcatgtggatttagattccttaagtttgcagttatttgttgtatacgctctgttacctgagtggaacagtgacccttttaagagtgaatgcatgagtacaggataggaaaacacaaaagagacacagcttttatattttaattatatggtcattttgatttgtaattactctaaatgtattcatattttgcttctcattcatcatacttggggagtagttgatcttctttatttttttagagaaaattaggaaga

SEQ ID NO: 69772 - DNA, 1017 bp, Prunus persica
  Intron number 2 from transcript ppa026650m (locus ppa02665 0m.g) derived from phytozome v7.0 (chr-ID scaffold_6; pos 8967854 to 8968870 reverse strand)
tcacagctaaagatttcagggacttttccattcctgtaagtaatcccatttctgtttttagtatttatattgggttttttgggttattgtttcgtgtatgtacagtataggcaattcacatgcgcttacactttggagccctttacgtttttcactctgaccaacttctgaaatctcgatgataatggttggtataatattgatttttgtattgaactcgaggcatttgccaaattcttgtagatgcaggttagacattcttggtattagtctaatgtttgagacttctctagaaaattattggtgaggggcctaagacctagggaggcgaggcaagagttgaacttttgtcataggtgtgagggtaatagctccttctaactgggctgtgacgggtactttatcgaaagtcacccatcctagttgaattctttcctaaggctttgtgaagcaacatggtgttggttttgtttatattgttgagtaaattttcaattggttaatctgtctggtattgataaattaatgaagattatgtcttaatcatcaatctttataaaagtgaaatcacaaatactaatgtgaaatgtaattagaccctatctggtatggtccaatcttacaccaacatcattggaatcctgtccagtcaaatgcaatgttattagacgcaatctggtgctgtttgctagtatagtgattttaggtcaatgaagttcacaatgtccattttcttgacttagcaaacagttaatttctatttccaagactttattttctgtcctaggatatggatcagattggactgtagtcagcttctctctatggaaacaactgcagatgtagagttttagtgtttgaaaacatgtttgattgcatttgcgcattcgttgtaccgtcttatattttctgtttcattccactcttttccttctattttcacgttgcaaatcttcatcaatattgccgtctgtgtagttttgaaattgactcagcatatgggttttcagctcatcg

SEQ ID NO: 69773 - DNA, 644 bp, Prunus persica
  Intron number 1 from transcript ppa012309m (locus ppa01230 9m.g) derived from phytozome v7.0 (chr-ID scaffold_6; pos 27899979 to 27900622)
agcgaaatctcatctgcaggtacgcagtttctctgtcccaactcccttcatttttttctctattcaagttactacttcgtattgttctctctgtaatgccattgcatcccagtagtatatttctgaagaaaaacagtaaattaagaaaagcacatatcgaaggcttatgggtgctatatgaatgcccatgcgctcaaaatctgtgcaaaattataaatcgttcttcttttccgaatatcctcttgatattttgctcgaggattgtttggaagaacgatgacattgctaactcctgctgttgttattaatttttgtgttgttcgatggacttgtctcatttttattggtttccctgtttttctcttgaaagtttgtgtatttgatatgaatataggtttataaataatataggttttttattattcgaaatgtgagaatttggaaaaaagctgccccgattgcgttatcggatcaagtaaaatatgtgaaaagtataatctttcagagttgtttctgatgttaattgatatgatcaaatatatttcgttttaatgtggttgagactggagctgcttgtttggtgtccccagagtgtggagtttttctgacatttttattttatacaggttctcataaaagaaaac

SEQ ID NO: 69774 - DNA, 809 bp, Prunus persica
  Intron number 2 from transcript ppa003291m (locus ppa00329 1m.g) derived from phytozome v7.0 (chr-ID scaffold_5; pos 17168873 to 17169681 reverse strand)
aggacttggtggagtatttcattcctttggttaaggtcagataatttaattctcttcgattgtttaatttgagttttttgccttgtcatttggttttagtgcttgaacaatataacatttgttgatactaaggcagaagaaagttttaaagaaaaacttgaccctaggtgagacctcaatgtgatatattcttaaagtctttgcctagtttacaaatgcattgaaaatttataaacttgattctcagatcactgtaccctcaaatgtggactgctttgaagttataaattggagtgcagaagatattgtttgtatatgaaatggaaatccagcaaggagagataacgttttagaaattatgcttggtaaccagattaactataaatgtcacactataattttattatgttcacgaaggtttggtcagtgggatcaatttttcttctgcatgcaccttgatagatgttttacagtagtggaacatctatcaaggtgcatccagaagaaaaattgatgggacccttaccctttcgctgtggacacatgatcttatggtttgatctggtattcccatgcatagagttgtggaatgtctgtaaaagggtagtaggttcacaaagtttgattctttattttcttttcttttttcccatttcaataaatgtaacagttcccaaatctaccagaacttttttttttttatcacattttccatatgagaatgctttataccttggtgcagttagagtaacagtttctttctttttccacactatcatttcaaatatacagagacttgctgctggaga

SEQ ID NO: 69775 - DNA, 455 bp, Prunus persica
  Intron number 1 from transcript ppa000593m (locus ppa00059 3m.g) derived from phytozome v7.0 (chr-ID scaffold_2; pos 9351244 to 9351698)
gattagtgataaagatcggttctttttgaggtaaggtatgtttttgttgttggcggattttagctttgatcagtttttgttttatctttattcttcagctttatgttgttcttacattaaagataagatttggaaatgttcactgtgctgttctgcagcggatgtaacaaattacaaactgtttggttgccgagaaaaccgaggaaaagccgtattttaatttgccagagttgaataaactattcagtgtgattggcttcttaataatggaaactccgaagtttcaaattttacttccccttgttctcttccatttccgaagaaattttcacttttcagaagtgatctatggtgcagagattgcttgttgagtggtgcaaaatctgatttcaccttcctttttacaggtgcttaacccagatctggggattttgaagtggaaaaaaagtactgag

SEQ ID NO: 69776 - DNA, 439 bp, Prunus persica
  Intron number 1 from transcript ppa006197m (locus ppa00619 7m.g) derived from phytozome v7.0 (chr-ID scaffold_3; pos 21296345 to 21296783 reverse strand)
ccctccaagcactctctcggatacctctacatcctgtgagcgtcttcttcactctaacattaccttttttgtctaatttcattcatgtatttttctttttcaatgatcggtttcctagggtttagttggacggctttgtacacaatgtcttagggtttgattatcgggtgagagtgcgagctctaatccacatagattgaagttatatctgcgttgcgtttaaaagaattctggaaaatccttaatctaattctacataatctgcactaagaattctggcattggatgaaattgcatttgagtttagaaatttgattgtcaaaagcatttgtagtgtgcggttcttttgtataagattctgccaagttagtattcacgagcatttggaaatcggtggaaattgactctctttaatgggtatatgtgttgtcagagaggc

SEQ ID NO: 69777 - DNA, 741 bp, Prunus persica
  Intron number 1 from transcript ppa013331m (locus ppa01333 1m.g) derived from phytozome v7.0 (chr-ID scaffold_1; pos 12099398 to 12100138)
ggttcagccactctctcggagcaagtaggacccaagtaagtttcatctctcgttacttattgctgctccttatcgtcgtttaaatatgctttctgtttagcaatcgttcctgttctgtttcattgaacagttctgagttttttgcagcttaattttgttttttttgtttttaagaaaagatgtatgtagttgtttgttttcagataaaatgtttttcccagatgaaattcctttttgattgatgaatcaggactttagatggagaaattaaattttaaaaaatggggtgaaattttgttgagggtggtttggaagttcaatctgccccaatcttcaggaaagaaaagaagaaaaaattgtttttgaattggctcacttagttaagtctgctgtcgatcccaaatattattggaccagttattttgaattgggcattgatagtttccctacttgatagtttactcactttgaccaatgaaatttatagattatcaccagaaacatttgctagatcaatcttccttttgggaggcaagggtcagagttacctttggtcctatatatgttgactacaaaatacaagttattgtacactaattacaccttttcatttctaacaaacccaagtttttgttatcctgcttgtttttgcgtttctttttgtttttggtaaatatggcttgtcttcctgcttccatttgtgtaggaattcccgatccttttgcttttcattgcctttat

SEQ ID NO: 69778 - DNA, 311 bp, Prunus persica
  Intron number 1 from transcript ppb025593m (locus ppb02559 3m.g) derived from phytozome v7.0 (chr-ID scaffold_8; pos 17186518 to 17186828 reverse strand)
ggttcaaggtcaaagtcttgaaagacaaacacctcaaagggtttagcagcaaaaataattagtgacgtagttacttcgtaaatttgatttagttctttatctggacctcaattgaaaaaatgttgctttttgtttttgcaggagcatgcatggtcgagatggtgtggtggaagaaaaatatgttatttggtttattattaatgaagttatcatttagagacaattgctttgtaatattttattgtttgtttttattattaagttatgatttgagacaaactagtttgtattattaattagttgtgtgagca

SEQ ID NO: 69779 - DNA, 378 bp, Prunus persica; identical to SEQ ID NO: 69034
  Intron number 1 from transcript ppa013430m (locus ppa01343 5m.g) derived from phytozome v7.0 (chr-ID scaffold_5; pos 8712963 to 8713340)

SEQ ID NO: 69780 - DNA, 958 bp, Prunus persica
  Intron number 1 from transcript ppb020132m (locus ppb02013 2m.g) derived from phytozome v7.0 (chr-ID scaffold_2; pos 17410313 to 17411270)
tcggatttgaattagaagtgttttctattattttggtaggttttgaaattttgaagcattcaatttgttaattcaaatatgttacatgagataatcatgatttgctattaaacattttgaagctccaaaaaggtggcatccatagtcacatacgtgcgtcaggaaggaggatgatagcatctataaattttttgatgagtggcatactccacaaaaacatagcgaagcacacaaggggcaagtttgcttcattggttttttcacagatgaacatacgccactcagccaaatactagtggtctgagcatctagacagagggtagaggctcatattgaacaagcacttagatcggagtacgaaagtccaagacactagaaggcatacgattgagcaaataaacattcgtgactctaatatgattttggtttcacgtgtggccaactatgtagttgccctacataaagaggcatattaaagaatataaatcctacaaatattcccactaaatctaacctgtaattatccatctataaataaataaaataaaataaaaactaacgccgcgacactgcttgttgaaaaagatgaactaactaattaatcatgtcattttaatgctacagcactaacttaaatcccaacttatagatatgaacacgtggcaactattttgcatgtgagattttttctttgatccaattaacttcccaagaaaaaattgttctctgggccactacttttgtgagatgaaacaaataaaaaacaacacgaaaaggtttctttaaataaagcaaaagaaatggcaggttgattcttctgcatggcgtagagtacaatgtacaagtaactatcgtcatcttgggtccaagataatgatagctttcattgaccgatgctaacactgatatatatatatatataattattattttcaaatatatattatataggataaat

SEQ ID NO: 69781 - DNA, 947 bp, Prunus persica
  Intron number 1 from transcript ppa007666m (locus ppa00766 6m.g) derived from phytozome v7.0 (chr-ID scaffold_5; pos 7765650 to 7766596)
aagttcactttccgtaccatttatcgtgcttcgtaatttcctgctctctatttcattgttgccagcttttttctttttctttctatttaaaggatgtgtatttgtttgatgaatctgtttttgcatctgggttattgataatttttctgggttttggttgttattattttctggatatgatgattatccaagtgttgactaattggttgttgaaatatgctttatttagaaaagattttaagaactaatgagaacttgattattatcatgttattaaagatgttcgtgtagacgctactatccaaaatgtcagcatgtccatgcatggatttaatcttagtgtggaagaaaattcctgaagcgagtgatctccagtgaattttattttctgcaactcgaattttatgtgcttttatagaaacagaaatctagcatatccgtaattgtcttaactagttatcacagatcaaagaattaagaccctgtatatcaacttaccttttccacttaagagtataatgacataagtttgtcctatgttgtatcctctctgcagcagcggtaaaggaacatacttgagaaaagagagcaaacgtatgttgctttctgtgtctttactgtttttgacttagcagtagagtgaaccaaataggtcgtcattttttaaaatcatcaccaagaaaaaaactgaaattaagaaggttgatactgtggcaatatgatttcagttctgaaagtgttaccaattgaattatgaactccatcccttataattactgcatgatattgtagtacttcttttggcctccttttatatgtttggcttgtatttcatcctgttctcttatcattatttatcattctactcgtatgctctttctctactccagtcctaatgcttcgttgtggcaggcattggagatcagtgctctaatcgaggagttaaa

SEQ ID NO: 69782 - DNA, 1012 bp, Prunus persica
  Intron number 1 from transcript ppa008322m (locus ppa00832 2m.g) derived from phytozome v7.0 (chr-ID scaffold_1; pos 40607951 to 40608962)
taccagttctggcctaagaacccgccttcttacaggttaggcacgctttgtttttagtattaatgtgttgacaacatttactgaccatattactaacaccaattagtaatatgggggaaatagttatatatatatatgtatagatgatttttcgtaattacagttttgccacttcattgtcacattttgcaacgatgtgttaaattgtgtagaacatatgattttgtaatacttaattactaaatattttgttatttgattctgagtcgagattaactatttaattataagtatatttgattactctttttataggcagtagtattaagatattggttccaaaagaaagatcgatcttggctagaaatgacaataaataattatgtgcatgcataaatatcacctgaattttttaattataattcattgacggaaatgcacttaaatttaatgaaaacgtcaatactttacaaaatttaagtgtttaaaattaaaaattaaaaattctggtaataatagtacatatggttaaaatgtcaagtgacatttaagcaaatttccctaaataatataacctacctataagattattataagtaggtagccagaaaaaatataataataaaaagctaaaatgaaaattacgatgcaaaaaagaagtatccaacaaaaaaaaaccaaattgtgtgataggaccacacactgttgctttcgcttttaatgaaagaccgtccgaataaccttttttttcaacttacgaattctaagctactggcggtgcggcatttcatgactggctgcttattggaaagatctcttccacaaaaatacagacgtggcatgttgcctatctgaaaaaagaaaaaaaaaattctttcctaaaatggaaaaataacaaacccctttctaagttctaactacattttctcattttaatttatatttaataaaattctatttgtttaatttaatggttgaatttgttttaattttgattggtgcagggaagcta

SEQ ID NO: 69783 - DNA, 852 bp, Prunus persica
  Intron number 3 from transcript ppa009212m (locus ppa00921 2m.g) derived from phytozome v7.0 (chr-ID scaffold_7; pos 16035359 to 16036210)
agttgagcactttgagatacgggaagttctgcgctgtaagtttccaattgaatttgttcttttctttctgtatcaggttctttttttgtacatttgatttcaaattactcaatttacgtgctttcctactttatctgtgtattttatatgtgcgcatgtgttgtgtataattagtatggttatgcaaatcagttttgccaatggtaaactctgcagattaaaaattgtacagtgtagaacttgtttgagcaattcaactaagatacgtgtttaggtatatctgtttcgtgggacgaggaagtgtctttatgtagaataagctttgtttaagactgggagcgtgggcgttccttcagtttgttttggatttgcagtggccgttagccaaaagtcagcattttatgaggcaatgcgacagtgattttgaacaactaattctatactgcaagaatctgtgtttataatggcagtagaggacactgaattttgtttttttacatactttactaacttccgcaccaaactataatcaaacgtggggattgagaagtgaaaaataatgcttcaaagaattgagcttgcaaatgtgaaaaaatttcgttggtcatttcctgatacgtggtaaaccatagtatgatcaacagaacaaagggcattttttgggtctggtctatgaactcttgtgctggtttgtaaacaaatgtattatttatctccggtttgcctttaattatgtagaatacataatcctgcactcactgcgctatgattttatttgttttcatgtgagcttacagcagtttaaatttgagtgcaggcatacttcacacaatagtgtttcatcgggcttta

SEQ ID NO: 69784 - DNA, 700 bp, Prunus persica
  Intron number 1 from transcript ppa012630m (locus ppa01263 0m.g) derived from phytozome v7.0 (chr-ID scaffold_4; pos 6087511 to 6088210)
cagagaaggacatagctcactgccctgaggttctgatctttctcttagctatttgttaatcattcagagctctttctctctatttgtatgattcagctctctccccctggtttatgtttccgtttctgaaatttaatggaattgatgatctgggttttgtttttagagaggaatttgagattagatttggggttttgtataaactcgcaatttaggtgtttctcagaaaatatttgggaaatttgtcatgtttgtaactagattttggattctgggttagcttggccgttttcctgatcttgaatgtgttttgcatctgacttgatctgcttgtgtgcaaacgaagttctcttttttctctatggatgtaatgttagggttctcagtgctcagagctcagagctctggttgattgtggagaaatttaggaggaaaatgaaaatgatatgaaaccaccttgcaaatattgactaagaagctggtttggtttgactgctctatctagattagaaccttagtgtgtgtatgtgtctaaatgaaaacataggttaaagtttttaacttggcccttgtatgattctttttttcttcccctgagttgcataatattttttattatcaagaattgttatcttatgttgagactgagacagacaaagtccttttatagattaatattcaattgattgcaataattgaa

SEQ ID NO: 69785 - DNA, 541 bp, Prunus persica
  Intron number 1 from transcript ppa000249m (locus ppa00024 9m.g) derived from phytozome v7.0 (chr-ID scaffold_6; pos 25754366 to 25754906)
cgtctcttgcgtaaaattagaaataggattgacaggtaagccttttcttctcctttgcctcatggtcatttatgtatatgtgtaggaacataaatatataacaacgataaattcaaatggagttgatgctgcacttgcaggcactaattttagtggtatatgccattgatgcctaggcaaagcttaaatttcagacaaggatgttgctatttattggtttttacttactaagaaaatggatgttgttcctaatttgttttccaattttccgacgcattgatgcttctctttcccttttttttcaatgtttatactcatatcagttcctctgtccaagcatgtggtaactgtgagaacaggttccaccccaaaaccaattggtcatggggggagtagcccaactccttataagcccttgctaggtttctcaactttccaatgtgggactctttaccttcacattctcacagtaactaatatcttcttcggattcatacttcttgtagggttggcgtagaattgcccactgtcgaggtgaggt

SEQ ID NO: 69786 - DNA, 786 bp, Prunus persica
  Intron number 1 from transcript ppa012592m (locus ppa01259 2m.g) derived from phytozome v7.0 (chr-ID scaffold_2; pos 22191809 to 22192594 reverse strand)
tccgtcggtgagtcttgcttctttagcattagtttgatttatggttccatgtttgcgacccattattctagaatttcgaggaaatagattgtttgggtctagtaaagttattatgcattgattttggattgattatgggttccattaacactactcttttcctggggaatattcaaaatatgttttgcttcttttggctgccatagagtattgtgtgttttgttggaattctttatgtgagtcttagtatcagcagttatatgttaagagtttttaggtttatccttctacaaaaaataagacttcaagatgtgatcaaattagtcatgctttactgaacaattgagactctcttgccaaagtcactcaacattagttgttggaattgttggtggtgtttcattcagatgctatgcaattaaggaagtcatgagaattagggatgatcaggggtgataacaatatcactacctagatttcatctaaccactataaaagttgagggtgtaaatgataggtgtttcataattttctatgtaatgcattagttcacaaagctcttctgagaatcaaaaagcactaaactctgtaacccatatcagactgattttgggttttgatcattgccaaaagcattttacttctgtatacattttagttctcaatgcgtatttgatatgtttatttaaaaaaaaaaaaaaatttcatttccatttgtctaagtgaactcatgattttgttttgacactagaaaacttgactcagattttggaagcggagcgggag

SEQ ID NO: 69787 - DNA, 623 bp, Prunus persica
  Intron number 3 from transcript ppa026990m (locus ppa02699 0m.g) derived from phytozome v7.0 (chr-ID scaffold_2; pos 3813736 to 3814358)
cccttcctattctggtctaaacacctcgaatccaggtaagacatcaatttgaaaaactaatttattgagttttggattatgcataagaaaagatttaggcttttattttttctacagggagatgattttggcactcctgatatcacctcccactcctctgctctctctcacaagaggagagcatgagggtattttagggtgattttggagtgccaaaatcgtgaccctttcttaaatctggaacagtgtcaaaatattatgcaattttagcctattctgttgttttatatatctttcttggatacataacatatggtattatatgttccctagctaaattctttttgatttttttgttttttgtttttcaatcatgaaacagaaaattattattagtttttttttggggaaaaaactgggaactgttttttatatctttggtggctacaaattcaaatactggtatcactgggttgaagagtaatattggcatatatttcttgtatccttcacctatattccaataacgtcatcttgctattttgatctttatttttcaataacatcttatggcactccatccccaaggtggtaatcaaggccaatcaattgctgttcaatcc

SEQ ID NO: 69788 - DNA, 729 bp, Prunus persica
  Intron number 1 from transcript ppa025035m (locus ppa02503 5m.g) derived from phytozome v7.0 (chr-ID scaffold_8; pos 20205858 to 20206586)
tctatcaagtgttggcaaataaccaggtacgtagtttatgttatattcacatttacaatacacaagtcagattattcctcaaatataattttgattaaactttttatattattaattcaatttacactttgctattgattgtcagagaactgcaactgttcaagccatattctttgactggtctaagattgaaaagctaaacttgaatcatgcaaatttcgaaaaaatgtatcaactgagatggctacgtgtcaattaccctcggtttctcaagaacatcacattaattgattctcttgatcttcctaattctcttagttatcttgaatgggagggatatcctttgaaatctttgccatcaaaattttctcctgaaaatcttgttgagcttcatatgccgttcagcgaagttggggctcaactttggaataaagaccaggtatatatgcttattttagttcttgtataacatgtggcctagaaagtaataatctgcaagctacgttgttaattcttttcatttctatttaatttgttacagaatcttatcaacttaaaagtgatcagtcttcgttcctccgatcatctaactgaagttccaaatctctctcagagtcaaaaaattgagcggatagatctttatgactgtaacagattggttgaaattccttcgtattttaaatatcttaacaagcttacaaatcttgaacttgggcggtgcagaaagct

SEQ ID NO: 69789 - DNA, 868 bp, Prunus persica; identical to SEQ ID NO: 69333
  Intron number 1 from transcript ppa002453m (locus ppa00245 3m.g) derived from phytozome v7.0 (chr-ID scaffold_4; pos 8912094 to 8912961)

SEQ ID NO: 69790 - DNA, 839 bp, Prunus persica
  Intron number 1 from transcript ppa021113m (locus ppa02111 3m.g) derived from phytozome v7.0 (chr-ID scaffold_2; pos 11411132 to 11411970 reverse strand)
atattggtgtgttggcacgctccaggatcccacttgtggacaagaaatggtcccaaatccccaaggatataaaggagcagatttgggaagcagttgacatggcttttgtcgtaggccaagggggcaagacctctgttttagcttctgcttccaagaaatggaaggatttcaagtctacactaacgaggcattatatccttccatacaccaatgacagggagaaattaagccaaccccctgaaacatataaattgtaagcctacactaacgaggcattatatccttccatacaccaatgacagggagagctagacaggacaaacatggtaacatccctgatccaaaggtggcagagaaagcaaaattaattgtaagcctactatcactctgttttaaatttttattaaactgtgaattattcttattacgtcgtatgttatatttttcgtcgtgtgaatgatattaccacgtcgaaaagtttttaaaaacgtcgttaaaggtctaaataggaatcactactaattttctgtaattatagcataagacgtcggtggttcattttcgcgtcgtttgaatgatattaccacgtcgaaacttttttaaaaacgtcgttaacggtctaaataggaatcactactctgttttctttaattatagcataagacgtcggttgtttattcatttcgtcgttttaaataaataactacgtcggtataactaccgtcgtgataagttataataacgtcggtttatacgttattgcgtcgtgtgaaattatataatacgtcgtttgtacataaataaccgtcgtgtgtttttttgtttatctttgttttagg

SEQ ID NO: 69791 - DNA, 449 bp, Prunus persica
  Intron number 2 from transcript ppa001481m (locus ppa00148 1m.g) derived from phytozome v7.0 (chr-ID scaffold_7; pos 15088129 to 15088577)
aagtgagtgagacaccttatgcatcttcatttttctttttcttggatgagtgtttgatgctttcagctagttttttaattttaaatgtttatctatgtttacagtttatcaggcatttttgttgttgggttgtaattataagtattatggatgatatcattagttattttgattgactgagcaacaaacacatagtaattatttgttcttgccattttctgtcccttttaggaattgcccgttggatcttcttggacattggattttttcaccgaaatatttgttggaaagttgaagtcatatccttttagttagctgtgggatatttatgtcactttgtcatctactggtgtaaaaatgtaactccctgattttgttgaattccttatcaactatgctacagttggtgataagatttttggcttgaaaagcatagctgcataccgcag

SEQ ID NO: 69792 - DNA, 523 bp, Prunus persica
  Intron number 1 from transcript ppa025782m (locus ppa02578 2m.g) derived from phytozome v7.0 (chr-ID scaffold_5; pos 13227868 to 13228390)
ttccgtcaacaggtttttattttatttttctttttgttattatactgtttctgtgattattcagttataaatgcgatgaatttaggagctcaaaattcaaattgttggttttggtagctggttatatcatgtcggtttacaaatttcatatcttttgctgaatttctggttaatatggtgtgacattttagcttccattaacgttcctttgcctcctttttgaataaacgcatataatgaaccatcattggagaggggggaaaaaagaaaagaaaaaaaagagagagagaaaaaagaggctttgatcaatcttgatattttaatgatatttgaactcatgcagttgatggttcgttccttaagatgcagaaaggcattgctttttctatgaatttgtagtttatttgtttcaaattcgttattccttcctctgcacaatctggacacttgaagttggcttattgatgtgtattctttctttgaaacagatacagggcttggaagaaggtgcagagtcattgag

SEQ ID NO: 69793 - DNA, 378 bp, Prunus persica
  Intron number 1 from transcript ppa021814m (locus ppa02181 4m.g) derived from phytozome v7.0 (chr-ID scaffold_2; pos 13697824 to 13698201)
agaagatcatcctcaaaagccctgctcttctaaaggttcgttttcttttcctctctgtgtaccaatctggttaacacagatcatagaccgttgaatttatatttttaaaacttttttataataaatcagaaacttgttttcagctggttcatgattttatattatctttctactatgttttagttttgtttttagcatgttagtttgttgtccgtttaggatttgtatgttagacgtcatgttgatgtctgtgatgtgtaaaagcaaattactaaattaacctaaatttttagatttactttcccctccatgatagccattggcctttcttgtgttattgcagtacatcctcgacacaagctgctacccaagggaaca

SEQ ID NO: 69794 - DNA, 565 bp, Prunus persica
  Intron number 1 from transcript ppa007923m (locus ppa00792 3m.g) derived from phytozome v7.0 (chr-ID scaffold_5; pos 10040479 to 10041043 reverse strand)
gcatttgcgaggtttgttttaacttcatttgatcatttttgtttgttttgagattaattaattctttctattgttaaagtttgtggttgttcttggctagactctaaacattcttctatctgctttatttctttttaattttctttttgttaaagtttgtgattgtttaggagatcctgggaaagaaagttaattggaatttacaatcttagacgtcatgtttgtatattcttctaaatggttctacagtggtttttgatctttagaaatattaaggcgaaagaaaaatcttcattgacttttctctgtcatagacttttctgtgctaccaaactcagagtttggtagaatgtttggtatatactaaatacgaaccttcattgccatttcctggttatgatggtcttaaattccttgtcctgcttttagaaagaattaatagtaatacacatggattttctttctttccaacttgaaaagcagcctttatctttcttatatattaatttacatgtttaccttaatctcaggaatacgtgtataatcgtctccaattcaggttagt

SEQ ID NO: 69795 - DNA, 920 bp, Prunus persica
  Intron number 1 from transcript ppa002394m (locus ppa00239 4m.g) derived from phytozome v7.0 (chr-ID scaffold_1; pos 42309714 to 42310633)
ccgcctgctcattctctcagctgatcagctctgaggtacactctgctcacgaaacctttctttcaatggttaacttttcaaaaattttttttttggggggttttgggggtttggtctgtttcttacccggaaccgacatatgtgagagatccagagtttcgggctcttatttggtttgtgagaaaatgttgtaactgaggatatgaaatgcttcaatttttccttatacgttttttgttttgcgcaaatagaaaaatactgaatttttcttgttggtttacttagtagtggaagatggttctaagtgggtgtcaaagaagttacgctttaggatccaaaatataggaaaacttttcagtttttttttttccttctggaaaggtgggagcaatctaacgagactcatgttggaaaattttgaatccaagaaaatgcgttagatcgtatgcgatcaaaggcttgatgaaatttgctccattcctgctttcctctcttcagttctccaaaaaagtgcattttgaaatttactttactgaacaattgcccatgtttacgctaagaaaggttgacgaccccaaaaggttctccatttacgctttattgttcacagtttggcgctgaagcctcaaattccaaccttcttttttatttttttttgattttgttgccatttttaaggcacagagctggttcggctatcacaaaaagtgggtaaattttaaggctttaattatcaggcgctgaagctagttttgcattgattatggatgataattgatggtctttacttaatgggtttctcttagttggtggcactattaattgggcagtgttggttgtcttgtttctatacaaaaaaaccttttaacgcttgggtttccacaggaaaagcttcaggggtgggagaacatttgtttagt

SEQ ID NO: 69796 - DNA, 950 bp, Prunus persica
  Intron number 2 from transcript ppa002394m (locus ppa00239 4m.g) derived from phytozome v7.0 (chr-ID scaffold_1; pos 42310651 to 42311600)
agcttccaatcatccccaaggcagttcccggataggtttgaatttctcatttaccagagcttcttactattctgaaaattatgttttgcttgctattagtacgctatactgaagtggaatgtgaagttattgattaaccttgtctcttttggttaatatggtcttttacttactgaaaaagaagaaattgttgattatcctgggtgtctataaatcaaccttaaggatgcttatgataaaagtgtttgtttgtgtaaatcataaatgtttgatatacataaattttaagtttagtttgttgatggtgcattaatgtggaaacaaattttattgaggctttggctaagatttttgtgggtaattattttattgatgctttgactgaaaatagagtaattattttattgatacttttatggaattttaccataaatctattctaattttctagaggaattatagattcatcatttgtcttaacatttttagtgatggtctgtcaatgagcaggagtatatcaagtttgctgagagaagcctaaatactgcatctagtggatagtgatctatgtaacaagatatatccagggaatttctgtagtttaaatttgggatgataagataaaatcaaaccattgtaatcatctaataacccaaggcaaaaagaatgtaaagaaaaacatttataggatgctgagtgctgtaacttgtttcctgtttttcgggtgttctttcattttgttaatgctcgtctctgaattgaatattcttacatcttataattaaataattcttatcaatatagcatgtggtctctaaggggctggaaagagtgaaatgtctttgttggactgggtttatttgatgtctgtattttgggtctatagtacttcttccttgtccttggagaggctaaacttcgttgattcttgtttatagggacatctggtg

SEQ ID NO: 69797 - DNA, 916 bp, Prunus persica
  Intron number 1 from transcript ppa008543m (locus ppa00854 3m.g) derived from phytozome v7.0 (chr-ID scaffold_1; pos 2714752 to 2715667)
ctcctatcaagatttgtggtatttttacatgaatcccatattctcctttgtcttatattatttctaatttgctttttgtttgatgggttgataaattttgagtttgaatatgaaaactctgttctgggtataaataaatagtattctgcttgtgctgggtatggataatttttattggcttgaaatgggttatgatcaaatctgaagattaataagttgtgttccattccatcataaagtgatcaacaatcttgctaaaatgtgtcatctttatgctcaattctcgactaaagggaagaatcacatggctgcgaagatctttgaaaactctgaaaacttaggattcatattggattcgagatgtatggacactcgtaaatgcctagtggtatcttttgataatgctctattgttcgtcttctgtgtatttttctttcctgtaaaaccttctcttctgtctactttattactatttgactttcaatttgtttaagcactatacaacgttgagctatggaaaggttgaggccttgagtgcttgggaatatttgctggccaattaccactactaaccacaaccctataattctttttgtgttccctagttggcaccacttcagtttttgaagtgtagggatattcttctccctggagagcagaggtctatatgtatgttatgtcaacaccactagaaactccacaaaacaaacccccctcccccaaactgtagtgtaatttttgaaatcctccagtgtagggttgttatatcttgtgcagctgaaatcgtgcatgggatgagtccttgataatttcagtcgtaatctgtttatctatctgtaattacatctttctatattattaaaacagcaattcttattatctgtcttcacgtgagtttcttaatgtcacccaggtg

SEQ ID NO: 69798 - DNA, 611 bp, Prunus persica
  Intron number 2 from transcript ppb012597m (locus ppb01259 7m.g) derived from phytozome v7.0 (chr-ID scaffold_1; pos 7810329 to 7810939 reverse strand)
gtttcccaactaacgtttctgctctccaggtctcttcatttctttcttttgttctctttacatataacttgtctatggattgctctgtatgatctgtttgtgtctttaatttgattgattgggacaaatttcttgagaattatattctgataattatgtgtcatatttccagcttgattgggacccgtattgagtaggcaccagatttgacaaattgggattgaaggttttttatcattattttaggattgatattaattggaaatttgggaccttctttctaatgttccctttggaactttgctgtttgaatgggcctggcagcaccaaactgtatcgaaggcggttaggcaggctgctgcaagctttaaatcaccacgagggcttgtcagtaagatcaaacttgcatacaccatgctcactctccctccttggcagaggtatcatcttgttatcttccttgtgagttgtgaatggatgaatatatacatatgcttttgctgttattgatggaaagtgatattgtttctatgtatcatcagcttgaacatcactgtaaaattcttttcaacccagtacaccaaacattctgctggttgtccacgacttcc

SEQ ID NO: 69799 - DNA, 659 bp, Prunus persica
  Intron number 2 from transcript ppa014535m (locus ppa01453 5m.g) derived from phytozome v7.0 (chr-ID scaffold_1; pos 35626209 to 35626867 reverse strand)
tccgcagcaacgccaaggaaatcggcttcatcaaggtataaattccaatccttatggcctttattttgttatttttggtgctcttttgtactcatttccctgccccatttcaagtcgcaatttcttaaaatgcccccttaatacaccataaatttagcttgaatgttctgggttggtgttaattttacaactcagatggatttgcccaattctacaaccacttggcatcagcttgaatgttttggtcacttttgttctgtatccggttttggtatctcatataaatatcccttcctccaaataaattgaagtacaaaatttgaatgtacagagaaaatgtacgcagattggtttgttgatggaagatacctatctttaattttgaccaatcattattatctgtagttctatacagcttttttgcttgttattagtttgtgtatgtatgtatgtatgcctatgtcttgaatttgaatttcaatgtacagagaaaatgtagcagatcagttattagcatctataattccatgcagttctttggctttttattagtttgtgtatgtatttgcaatgtgttgaatttgaaatgatattaattctgtgttggttgtatcttcattgcagtaccgctgaaagttgaaagcatctgattttgcatc

SEQ ID NO: 69800 - DNA, 609 bp, Prunus persica
  Intron number 1 from transcript ppa004220m (locus ppa00422 0m.g) derived from phytozome v7.0 (chr-ID scaffold_6; pos 1022343 to 1022951)
gccaccgttgctcctcccgcggatcgtatccttataattttaaccatctgggtattctttgtttttggttttccttattgagatctgttcttctttgatttgttttggatcaaactggatcttctctgtctctgttgttattggtttatgcttaacatgtagatcgcagtaagcctcttttatgatgtttgcttagctcttggtttggtacgctttgttttggtgttaaggtgttttaggcttgatttgtggtccgcgtctggaaattcatggttctctgtgtagaaatagaagtccctgttattttaaaaatttgtatacctggactttgacaatttgtttttggtttgtttcatgagtatagtttggtttaggcctggttgaattgacggtttcatattagacgattttcatgaattggttataacttgtgttggagtgatttcattaatggagtttttaccctcatgtcaaattcaaactatgctcactggattcacgtgttgtttttgtttgttgattgtatatgtctattacaaaagtatgtatttccttcaccgtttgctttctttagaagcagcagatttgctacagaagttgtcattagat

SEQ ID NO: 69801 - DNA, 632 bp, Prunus persica
  Intron number 1 from transcript ppa004161m (locus ppa00416 1m.g) derived from phytozome v7.0 (chr-ID scaffold_5; pos 4897945 to 4898576 reverse strand)
gattatattggtgagaaatttctatcttccctttttgtttttatcattttttttctcttagacaaccttctttcctgaactagaaatactggtttcacccttttcccatttcttcattaattttccataagtatactggtcccccgtttttcccattaaagcaacttataatgcttctctatatagatggattcttgcttccgtttgaatgtggttttggattttagtcatatggaggttagaaaggtacctgaccatggaaaaagaatcaatttcttgctcaccatcaccatagctcgtttctcttttccactaaagaaataaattgaaatcccaatttcatatttatacttttgtgatccaaatgttgaaaagtggctttcagtttttttatatatttattttgaatttaaaggtaaacttatgtttttctctgcactaaaattagaagttgaatgcaggggaaaaaccaaagttatcctgtttagatctaactagcatatctttattttgttttatcagtataatttctaagtttgttttctatcagtttgtgcgcacatctgttttgcattcatgtatacactcttttggtaacatcatcatgtctattgcagttactacattttgca

SEQ ID NO: 69802 - DNA, 680 bp, Prunus persica
  Intron number 2 from transcript ppa005934m (locus ppa00593 4m.g) derived from phytozome v7.0 (chr-ID scaffold_8; pos 16773304 to 16773983)
aacggtgtaagtttctttctttgtatagatttttatttttatttaggcaataaacacatcccaaaaactatacactggctggacactcacaagactcatgtatgtacaccacttcacctacttgctgttgatttcagccattaagttaatcttatcttcggattatcttaatatggatcaaatttaatgctttttgcgaaaatggaattatgggatacttgtataaatcttagcacagataatcaaaagtgaaggactataggattgtttgaggttcttttatatttatttctattcagtgagagttattgattgcattatgtatcgaactagcattcttttggattttctgtaatgattgtctgaccttctctcagtttgttctctcatgaggcgaccatgttagacatctacaaccatagcagtgtcttttttggataataacatttatgatctcaatattcctcatcttcatcctattaaaaattattgctttgcatttagtgagtacgatctttctaggaaaaaccaagtaggcatagcattccactaagtatggtactcaaactatttatttaggaaatgattgttatgcttacccccataactgtctaactccatatggaaatttttctctcataacaggacgtgtgttacaagctgcattttggtacgggctt

SEQ ID NO: 69803 - DNA, 435 bp, Prunus persica
  Intron number 3 from transcript ppa008435m (locus ppa00843 5m.g) derived from phytozome v7.0 (chr-ID scaffold_1; pos 2804273 to 2804707 reverse strand)
ctgctctggagaagcacgcagctgctaactgcaaggtaagtgccaaattttcaatcaatttttttttagtttgttgcgtttgatctatgttactgggttatgagatgagttttgtacacgtcccaaatacacaactccatcttcatggagaatcatgactaatttgtcattgtatcggactgtgccatgtatctctttgttttctcaatgaaattcttaaggtggttccacagatgcgagattgtaaatttgtcatatctgtataaggggtgtgatcaatccccctttggaaaacaactagccttcctttctttaggttttctatacaacatgaagacacttgttgcagtttaaaatttaaaattgatttgacatttatatgctacctttcctttcttttgcaggttttggttgttgctaatcctgcaaacacca

SEQ ID NO: 69804 - DNA, 587 bp, Prunus persica
  Intron number 1 from transcript ppa020207m (locus ppa02020 7m.g) derived from phytozome v7.0 (chr-ID scaffold_12; pos 459413 to 459999)
cgagtaagctcaatttctctttgagaaagacatccaaattattgtctttgagatgtgagagacagtgtctctgagagaggaagaacttggaaccctaaatgtaaaccgaaaatgaatgaaagcgacaaatttatagaataaatttttaaaaccaacggcggtccttacaaaaaaaccgccgtttaaattgtaaaatcaacgtcggtatgaccgacgtatattacagaaatccacgtcggtacattaataaaaacgacgtgttaaatgatctaccatgacgcgagttattacttatgtactttaatttttgagtttactatgacggtacctacaacactacagtcgtacttatttaccacgtccgaagttaaatttaccgtcgtattttgtaatttatacgtcgtagttatatgcaaccgccgtattatttttttgaaatggttttatatgtaagcaacttttcgtctacctgacttacacatgcactgtttccaaacccgattaaaaatttcaatctcccggagaaaacttttagacttttttccttgtcagagcactgtcagagtatctcatcgtcttcctctcgt

SEQ ID NO: 69805 - DNA, 576 bp, Prunus persica
  Intron number 2 from transcript ppa010851m (locus ppa01085 1m.g) derived from phytozome v7.0 (chr-ID scaffold_2; pos 9922356 to 9922931 reverse strand)
gaagcagctctcatctggcttgcttttggtcactggtaagttctcttctttttttttctcataattaagtttttgtttttttcttgtatgttattggtgcaagaacaatgatgaaaaaaatgctctttcatctgtttcagttctttcttataaaatttattagtgcttaatttttgtgtcaattgttctgctggttgatttcatatggagatgattatttggtttgatcgagcacgtatgtaatacaaagaaaaacatgctttgatgaagtgttggtcattcagtacatggaacaaggtcattgtttacatttgtgataaaagtgattaaattttgttgatgtgtttgaatggaagttcaatagagccatttggctgtgcacgtctgttttgaaaagaaccattaggcagtgccaggtgatgtgatttgtagttttgttgagcatttcccttccctctttcttttttttttcatattccctgcgtgccttagatttcaaagttggagtgtttcttactgtcgttctttcttgtcatttcaggaccattcaagattaacggtgttcctcttagacgt

SEQ ID NO: 69806 - DNA, 659 bp, Prunus persica
  Intron number 1 from transcript ppa010851m (locus ppa01085 1m.g) derived from phytozome v7.0 (chr-ID scaffold_2; pos 9922969 to 9923627 reverse strand)
gtcaacaagcgcaagcccaaacccacaaagctcaggtccctatttctttgactgtcttatgttttgggtttggtttgctctttccgtaatgtggggaaatggtttgaatggatgtcttaatgtgtttggattctgagaaaatgcgtttacctatgagcttattttttctctctctattttgtagatttgtgagtgactatattaagttctgtttattgggattccgtctttgatttccaatacccatgtcaattatgaaaaaagaaattgggaacatagaaagtgaagatatgcattggacggtccccatggtttggggtttgagaaagtatttactttgttatctgagttttgtttttcccctttgggtgtttgaggatattatcatctttcttttgttcaatattggttaggatatagagattagaagttagatatcgctttttaccaaaaagaacataaattgtgagaatgttttattttctttttcagttgcttaccttaaagcggaaggagattgtttatgttcgagaagcagttttagatcttctgtaatctccctatgttctttttgtttatatcgttagtaattttttggtattttcttttcttcatatcttgtagaaatagcattactcctggtactgtgttgatccttc

SEQ ID NO: 69807 - DNA, 716 bp, Prunus persica
  Intron number 2 from transcript ppa010165m (locus ppa01016 5m.g) derived from phytozome v7.0 (chr-ID scaffold_4; pos 10219380 to 10220095)
attgcaggtgattttttgggagatattgttgtttgttgctctgttgggttgatgagggaatgcaggaaaagaaaagaaatttcagcttatttttcttttttgtttggtcatatgggttttgtttaaatgtggattttaagactattgagcctattggtttagttgaggcgaattgttcttctctttggctatgggaactaaactacgagaaaaataaagggtaggaagaaaagagattgattgtttcaaattgttctttctcatgacttaggtgttggggaaccctgatggcttcaaagttcaaattaatggagaccaagtttacaagaatttttagtagttaggcacttaaacttgagaattcagtaatgcaattgtatccgttagcgtaatgcttgaccatgatatgtgtgtgaatcatgattattagaatttgtcttcccactcgccccatttaattttctacaagaaaatcttcataaaacttccagaaagaccttgaaagttatgctttctagttttggtatcaatcaatatcatggtaacatgtaatgaactccatttttgtgaacatttgtttattggtaacaaaattgtttaaatgcacatcttctaagcaattttctatgtgtaagatgttgtgtaagtaactttcccccttaacagcttcaattggtcatatcacctaacttataaaacatttgacagtgtgacag

SEQ ID NO: 69808 - DNA, 864 bp, Prunus persica
  Intron number 1 from transcript ppa002116m (locus ppa00211 6m.g) derived from phytozome v7.0 (chr-ID scaffold_5; pos 14430534 to 14431397)
catccaccactggtatatttacatttcttatttcgtggtattgattctttaactaattgcttaacatacccatgatatttgaaaatttggaatttctagtgatcagtgtgattgatattcgcttatgtaagtggttttctgtttgattttttttttctttaatgtttgcaaagctgttgatatgtccttttcgtttctaaatttggtgagactcgtatttgtggtatcctttttattaatttgtcttgtgtgctgcttggagctaagaatgctggaaataaaaccaaaagagaaaaagtgaaatttatatgaaaatacagggaatcaatgctaaagagaaagatagagtaagacaaccgaatctaaaatggagaacaatctaatttctttttaaagttttagtagattaatacgaagtagcctaaatttgaatactctttacagaaaataaatcaataaagcaggaacttgtttcaagatcgttaatttcttgaatgctggatatctttatttaaattgcagaccataatcaattgggaaaagaaggaaaataattcaaaccacaagaatatctggatgtgatagaaaatgtctgattttgatgagctcctttgtttttctataatctctaagcacagccttaacttttatttactaaaataaaattttcctacacacttttcacacacagatataacttcatagaatttctaatgtaaacctgaggactgtagcatcttattgcaataattttcctcttcaaagaataaatcgtatgctgcctggttttttgaagttcttttttatactgacagtttctgtttcacttggttggtcaactaatgtggtgtaggcatcccgatc

SEQ ID NO: 69809 - DNA, 997 bp, Prunus persica
  Intron number 1 from transcript ppa019491m (locus ppa01949 1m.g) derived from phytozome v7.0 (chr-ID scaffold_8; pos 5800982 to 5801978)
cccggccattcctaagcaggctgcaaaggtaaactcaaaccttgaaccttttttcatttatggtgtgttggaattaattgttactctcttatatatctaaataatgtgtcaagaagtaaaatgaatgcacttttcttgtggttgtgtttgttttcttccgaatttagaaccatgggccgttgtactaggacaaccccagtgcctgaaatttagaaccatgaataagcctccttatccattatgcttgtgacccttgcccttggagagctctgtaatctttcatctgtggaaggaatttggtgatgcaaagtccaatcagaaatcaaggtcttaccatttatcattagaaaccagcacagtgctaggttttgagtatacagattcagagtgctttattaccttcctactgaaaacaaacttgaaatttcaagatgaagagggctcagtaatgaatgacaagaggcctattaagtttctctttactctatttaatttataaaagcagatcaaagggttagttcatccctgttttatggcttgtttatgtctcatccatgtttttgttcatagcttttgctttgaataaaatacgtttcctctaaaagaaaaaaccaactcaatttctcagaaaacatctggtatttgttgtttgtgaaaatgacgattaatatttgcctctaaactatagttaggaaatcaaagcaaatgtacgtggggatttgtgaacgtctgaaactgcatgttcaagcctcccccacctccttattgtataaaacattgccaaacggtttgaatttgactgaccaactacaatgtcatactgttatcactgtcttttcttagaaatgcaaaatgtccttactgcataataatatagaatgcaatctttggttctgatataaatgctccaaatgttacagataagttgttgagtagactaataagtggctcttgtgttataggtttcagaagtgagctcacttttgggcaaagctgg

SEQ ID NO: 69810 - DNA, 907 bp, Prunus persica
  Intron number 2 from transcript ppa009063m (locus ppa00906 3m.g) derived from phytozome v7.0 (chr-ID scaffold_3; pos 7379997 to 7380903 reverse strand)
ggggtactctgtattctcttcataccaatgtaagatgtctggaatttgaacttgttatgcatatcttcatttggaacaatcctcattttgtcttctgtttgaaaaacttttgggttcagtttgaatcagcatataagcatattaatttcactaatgttgcttgttcaataatgttattataatgcactgttgctttcaatttttttttttttttttctttccttcaccaaatatctttaatctcaaattattagaaatcttaatttctgtcactggactctggacaagatacttttctgaagttggtatttttttatacttgtattgagtactcacgataatgtaataatcgatggatgggggttatgttatgttcgatgtttagcctagaccatattatagtggtgtgtgttctagaacacttcctgctgttgatagtcctctagttggcttgtcagtcaattctcagattgttaaaaaagaagctacgttactacattagactataatcataacccaacattgtgaaaccaatttacataaatgaagtgaaaatacatagatatttcccagtggattaggattaggggtttctttttatcattcaaaatatttatctgcaccttttttgacataatagtcatgttacattattactttgattctatcataaacttcatggctttatccattcttgagtttctgataagactttccaacaccctattcctctaacctgcccttctctattgctgtttgtgtgtggatgcaattgttttctgtgataaactaaattattaagattgaaaagaaggtaaatcatgttaaactcctgagtcaattgttttggtgtggtatatatgaacttacaggaaggcaagggaaggcaagaccggaaactagctat

SEQ ID NO: 69811 - DNA, 948 bp, Prunus persica
  Intron number 1 from transcript ppb016965m (locus ppb01696 5m.g) derived from phytozome v7.0 (chr-ID scaffold_5; pos 10642231 to 10643178 reverse strand)
gcgatctgcaaacagcagatctacaagtgagtgtggcaatccgactgtgccggagatggagaaacatagaaaacagagagaaagagaaacagataaactgaaaaactaaaacagcactttgattcatctctgtatatggacgttcttaatcaaagttgcgatactaaaacgcaaaaccaaaaggtggaatagttctgcagtttgtggaattgggaaggcaatgggtggttcccgagaggataagtctgtgtcgaaacttctctgggttatctgttgttgttcgaaaatcttctttaaaagttaaatccatgaacacactcactcatattgttaatattactgaataaatggcctaggagagcgctaggcgggctaggcagtccaggcaattggtaggcgagcgctaggcggtctaggtggtctaggaaggtgctagcgcctagaaaaaaaaaaaaaagccattttggaatctccaaggtcaaggacgagatgacgatggtgctatgagcgagagtgagagagatgaggattgaagaagagaggtcgccggttatgtctgagcgagagagaggggctagaagacggctcgtgttagagttagggtttgagaaggaaaattgcatttctatgcgacattctattcatcagctaattgtaatgtaaacttttgagttttaaaaataaaattaaaaaaaaaaaaaaaaaagaagaagaagtgtattaattgtaataacgtggaagtacaacctcaacttctaaacctaatatagtcttctccttttctctttgtatttgtgcgttaaaactgaaacccaagctatagctgatgtagtgaaggaggtactagaagccacaacttgggcgacaacaacagtgacgtcgtcgatcttgcctccagcgtgctccacccccaccttcttagcctccatctgaaaagggctaacgcgg

SEQ ID NO: 69812 - DNA, 1014 bp, Prunus persica
  Intron number 2 from transcript ppa008306m (locus ppa00830 6m.g) derived from phytozome v7.0 (chr-ID scaffold_6; pos 3174451 to 3175464)
agccattgaagaatacatttgaggttagacagtgtctctttaagttttctcgatctgttttgtgtttgaatgctgagaaaaagattgaacaacgaagactttggagttcttaaattttgttactttaatgatctgcaacattagaacacaaaatcctttactcgactgacgacagtttaattatttagcttacttttggaaacctcaagttttttctagaaaaaaaccgtgctgcttagattatatatcagttttgtggatttgatctgagtctctgatgtcatgcatttttgttatttcttcttttttgagctgggtaaatccatttgtgaaattagattaataccatggaagttcatctgctatgaggagggaaggaaagacttggatctttttgattattacttaatcaacttgatcttgtttgcatttttgggggaggaaacttcatatcttgcttttagtgagaggaaagtattagtgttttctgtgatcttggtattggatagtaaagttaaaatctttgtgcgcatatagtatcaggttaatgctctgaattgacgaacctattttattttataagggtgattgaaatgttaatttaactgaaccgtactgcatctaattgggaaatgatgcacttgtttctattcttaacaatgcattacgaagtcctttctttgcgtattggggaaggaagggggtggggcttgtactttctaagttttttcaactaatcagctgaagaatgtcttttattgcatccgagagagaggcaaaggatcctaaccgaaaaaagaaaaaacgggtagagaaaaagaaagcaaaaggaaaatcagagagatggcgttggccaagctaaagtaatgagaaaatatagcatggttttgaggattatttttgtttttcttggaattctcgaattgaataggataatggtgtccctttttcttctgatgatttacataaatgaaatgcaactcaaaattcaaatagtgcctttttattttcaga

SEQ ID NO: 69813 - DNA, 1048 bp, Prunus persica
  Intron number 2 from transcript ppa002152m (locus ppa00215 2m.g) derived from phytozome v7.0 (chr-ID scaffold_1; pos 33656312 to 33657359 reverse strand)
gtgcttcagtttcacagccaaatccaggtgattcgtcatttctagctgaatttacctttgtgccacttaccgcctttctctatttagtcctttctcgtcaatttactcgtttttccattcggaattcaaaattttcaaccttatgcgacaaagaccacgtagttaggttgcctgcttggcgcttaagataggaccacgtggacgttgccgttggaacttgtcgtacttgctttgctgtgtacgctttttcttgcttttgtttttagcagtacacaactggacattttaatgatgtatgctatagttgtctgctctttatttattaattcaaaactagttgctttataatttatttatttatttttaattcatctccaataatgcacaaattagttcctttatattttatttatttatttttatgcattttgataaaagtaacaatctatggtgattttgttttataataatcaagatgaagaaagttgttgttttagtttcagactaaaaagattaatcatttggctgctactgagtctgttgtcattcatcattggcttgtcagaatttaatagattctggatttgtttttaggcacaaacaagttgtaagttaagacttaatcatttgagtggcacatgacacatgctatgttctatgtgcttagaacatgtcgtggagtgagaattaactttataaaaatttattaatttttccctggtttagtttttgttttcagtttttggccttttctttttctcgatttctaatcaacttgtttctcctaatgtataattcggaatagatcgatccgttgtattcactgcactggtgtaaatccactaaaagaatgtatctgctgaataattctttaggaggaggaaaaaacctttaataaattacagtgatatttgatcctgcttaatttttaactcagtcagtctatgagcttcacctcctaataagctcccgactagttctttaatgaaactagttatgatcatatattgcaggtaacagtgaggattaaggtagttttaagtacacc

SEQ ID NO: 69814 - DNA, 620 bp, Prunus persica
  Intron number 4 from transcript ppa011884m (locus ppa01188 4m.g) derived from phytozome v7.0 (chr-ID scaffold_7; pos 16916435 to 16917054)
atcctaggtaagcagtgaaagcattattcattttttaagctttagtagttacctggattgcatatttctccttgttattcctgggttgtagttttgtttacaacattgttgcatctttgcatgaaattataacttgcggtggctcaacaaggttcaattgcaagagcttacatgaataacatgtagaatattattgttaagaaattcaaaacttgatagctgttgcgttcttcttgatttaatctctaatacctcactcaataataattggagctcaactcttttttctattctgtcacatggaggaccttaatgctgggaaaaaaattgggttcagtaacatcctcctatttcagtttataaagcgacaagtattgatgattgatgaatcaaaaataagcgagttgaatgaattatttgcttttgcctttatatgtggttcaatgacatgatggtgaaatatgtttgcatgttgatatgtttgaggaatgagatatgctaaaagaaatatttcccagaatagatccatatatggcgatgatgtttaatttctcgaattgattttcaagttttgaaatgtttgtcaatatggttgcagggaaacttttgtcaatactttt

SEQ ID NO: 69815 - DNA, 507 bp, Prunus persica
  Intron number 1 from transcript ppa019448m (locus ppa01944 8m.g) derived from phytozome v7.0 (chr-ID scaffold_6; pos 26031979 to 26032485 reverse strand)
gcacccaaaccaccgtcgttttccagaatagggtactacttctttatgttattttaaaatctctacttctttatgttattttaaaatcttcttggtaatactttgtcttcgtttgattttttggtttgaattgttgtgggattagtttgtatggatgtgcttggttgctgagaaagtgaaggaaagggaacggatttaaaaatgagaattaccgttttataagaaattgattataagggatgttgaatcgatagtttgcttaagccaacggagaattttctgtttattcaagaagtaagttgtatagcttgattctttgttcaagaagtaagttgtatagtttgcttcttttttgttcaagtcctgggggcaaagaagaatgttcatgcatgagatctttagaaagttgactctttatgttcctcttcttgaaatttgatcttatattaaaagggttggtcattaattgatgttggtgttgtttaacagttggaaagtattccctca

SEQ ID NO: 69816 - DNA, 669 bp, Prunus persica
  Intron number 1 from transcript ppa002876m (locus ppa00287 6m.g) derived from phytozome v7.0 (chr-ID scaffold_1; pos 42984437 to 42985105 reverse strand)
tcctcctcattactcagtatgtttttttttttcattttgtttttatttgatcgtatgtttaactcataagtcatagcatcaataaagtttctattaaaaaaaaaaaagaaaaaaaagaaaaaaaagtcatagcatcaatactgcaatgtccttgcttcccctgcagctatagtattttatgtgtcagttgcttgtgaaatgataaaaccatcagacatgaccctttgggtcaaaatatttcttattttaattgaatgagctaaccatttcagtgtttattctggttgaggagaacttactttgcctttctttctctctgactaatttcttagagttttaagagatgaattttaataggaaaactgctttgtgcttagggccagttgtactatgcccttcttgacaatcatgtaaataatttttgtaatatgtaagaagtcatgaaccatgcacaatcacattgtattctacacatcagacttttttatatatttggcaacatggttatagatgtgtctgatttcaccttttgctgccaaattcatatgcagaagtgtcctaatattctgatgatttctcttagtttgtataaataaattttatgatacctcattattgtagactcttcatattaggtcatactttttgcctgcagctttcacttggatc

SEQ ID NO: 69817 - DNA, 459 bp, Prunus persica
  Intron number 2 from transcript ppa012979m (locus ppa01297 9m.g) derived from phytozome v7.0 (chr-ID scaffold_3; pos 3932772 to 3933230 reverse strand)
tcgtaagctctttccctctgtgttcttgtaatcacatcttctttatgtctggtttgtgtttattcaatcaaaaaagcattgtttggcaaaatcaaatcatggtatgcttgggtgagcttggatcattatgcaatatttccattcttcttttctttcctctaatggtcttcaattgtgtgctaagttcatagcttcctcctttattaaattgcaagaaagggtgtctatttctcacctatgagataattgactgcgatatgttccgctaataagctaagaatttatagtcttccaacatttggtcagtttattttttccacattaagcagtagtttcttcattccatagaaatgacaagttaattttggtttctttttaaatgtcagtctcaatattttcttgatcttgctatgatttgaaacagtgggataactcggaagatcggccaggtcttgttgg

SEQ ID NO: 69818 - DNA, 906 bp, Prunus persica
  Intron number 1 from transcript ppa001012m (locus ppa00101 2m.g) derived from phytozome v7.0 (chr-ID scaffold_1; pos 419529 to 420434)
ctgaggagtatatcaacagaaacactttgcagttggtatgcttcttcttctacttaattttctctctctctttctcaaaacatttgtgttattcgtttgggctatgtttggttgctgagaaaatgtaagagatgggaggaaaagtaaagaactgacagttctgatcaagtctagagtttgatcaacaaagcctgagggcatagctatacgcttgttctcactattgaagcccaaaataaaattgaagttaattgtctggtcttcatatgcattttgtttacttctcaaaggtgttcgaacaatttaattggagtggtggaggggagttccaattaacttgaaccagtggagaagaatcgcaattaaaatattgatttattgaacgtagtttcatcaaatagcttgtcttgcatgattgactgattaaaatctgtgccaagtttaaactcaaaattctgcaatttagttaattctacacatgcttcattgaaggacttctcatgcttaatttgaagtcttttttacatttttttggttgttgtgtacaatgtgggaacatatcatgcctggaatctcaagccgtatcataatgcaacatttgtgtctgctaccactgttagattttgggttattagttgtcaatttattgtttctaatgaatgaacttttaataaaaaataaataaaacaattctcttgttctttgtgaattttgttgagcatctttcttactgtgtagtgtgtattagcaagcaaactgattctgagctattatattttgtgttttttgtgcctttttgataggcggttagcctgccaggttaactttactctgtactcaatctgattaatttttcttttcattcttttctatagtttgattttgatagtgcggccccaccagaac

SEQ ID NO: 69819 - DNA, 818 bp, Prunus persica
  Intron number 4 from transcript ppa005880m (locus ppa00588 0m.g) derived from phytozome v7.0 (chr-ID scaffold_1; pos 44224729 to 44225546)
gctaatgttagtaatttcaactgaatttttaccttcaatgtagatattatatatctatatttttctagtttagatgtttgattgtgtcctaaattccaccaagattaaatagccttaaggtgcaattctgttctgtgcatggacacagacaaattagtaattttaaatttgtgcagaaataatttgatgtaaactcagtgagggcaatgataatgcagtagtttcagttcactgagggctctgttctgttcaggcagagggatatcgtacggtctggtaaaagtgcataaggtgttattgtgttgaaatcctagcaaaaggtgcactagaaaccaaatgttattaggtggtaaacatttcttttgagatatcagtttttacaactgttatacggttaaaagtatttgtatcccgtgtataaatcacaaaattttcatcgaagattgaatttctgccttggacagttttattgtcatcaagtacatctaattgattgaatgtctaatgccctgtttgtatgagaagatgctagttttcggatctgaaacctggttatggagatgatgcatatccggatttatgtgcttattgtttacagggctagttgtgaacacatcagtagtctcttgttatatgaatacatcctcagcataacacaatgtacacatctcattttggttgcaattggatatgtttatttaaatgagggattttggtttttctactatgttcaagctgatcatattaactgttaagagaaaagaattggatggactttttgaaggattggaatgtttaatactttggtgttttgcagt

SEQ ID NO: 69820 - DNA, 438 bp, Prunus persica
  Intron number 1 from transcript ppa018241m (locus ppa01824 1m.g) derived from phytozome v7.0 (chr-ID scaffold_1; pos 8228203 to 8228640)
tctgattcagctgcaaagggtaaaaaaacgttactcttatttctctggtattgcctttttgttttttctggttgattgtaataattttttgttgtggtgaacaaagaattatgagttgttcgataatttgatgttataattagactatattgctaatgagttatgatttggtaagtcaccagccttttggaggataagtatgcagaatctgattagctggtgatatcaaaggtttcatttattagcaatctactttgttgctttttttcttctttttccatttatggttgtttgcactcacctagtgaaggaatttgtagttttgcagatttcgtaagtagatggaaagttttagaagccctggaatattcagtgctgatttcttgtatttataatgcagcagaagaattgaagaccaagaaggtttttgtacagcat

SEQ ID NO: 69821 - DNA, 840 bp, Prunus persica
  Intron number 4 from transcript ppa018241m (locus ppa01824 1m.g) derived from phytozome v7.0 (chr-ID scaffold_1; pos 8229016 to 8229855)
atcagatattgtctaaagccagacagacacaggaggtacgtggcatagtataagttagctgtattaattaacccaccaagtaaagtattgttctctcttgttcctgtgcttccaatagtatgatttgttatttcatctcgtaaagaataatgatgcattaaactttttcatgctctgccttctttttgttttgcttatcgtccatttgttcttagttcaatcttttgcttgtgataataatcattgtcaggcagtgagttgctaagaatttgtgtcaaattgagattatgcaactccaaattttatactagttcccttgaagtttttttattgattcatcttctaacaaccatggagtagtctaaattttgtctatttcgaaaccattatttaggataaattcaaatctcccttacatgcatctagttagatatctttctattatgtcagattgcccaactttctgattgattgttaagaggttcagagtttagattgatattctgaggcagttgttctactactaccttatacattgagaataagaaataagaaccacatgctacgcattgataccatttaagtataggaaacaagttttgatagaacacttgatgccagattggtggacattagaggtaatctcaaaataagtttctcagagtgggcaaatgttttcttttttgggttgttttattatttaaagcagactgctatgtgtttgatgataagataaaaatggtcctcttttgttaaactgagtattttaatatgtattcggtgaaatttgttctgagtactatcttattttgagttctttctgttaggttgtcggaaaaa

SEQ ID NO: 69822 - DNA, 1004 bp, Prunus persica
  Intron number 1 from transcript ppa006706m (locus ppa00670 6m.g) derived from phytozome v7.0 (chr-ID scaffold_4; pos 9167360 to 9168363 reverse strand)
ctccctccaattccaagctcacgctgctcctgcaggtaactatcactcaccaacttctctaactctctctcatgttttgggttgtgtgtttgatctgttgggttactgggtatgctttgtatcctcacttgcttctcttatgaatgtatagctttattatatagataattagatacctagttcttagttttcttgattctactaaatttgttctctttattctgatattcccaaatagctttctctcactcatacacttggtaatgataatatgttgtcttcctgtgatctgcatatatacatcatgggttttttagtttcttaatattacttcacttatgatatggttttgaatgaactgtttgctcaggaccattaataaaacacttgtcttctcttctcaagtggaccagggaaatatcctccaaaacaccgcaatcaggtaatttgaagtgacttattagaatatttggttctttttcatgaactttatgcttaattggcataatttctgtacaggtcttatatggtttatcactttgttgtattgcagatgggaatgttcttcaatttgagaatgggtactttagttgagactgttttggaaggtaatgacattggagtaattccttaccaaaatccgcatctcagaggatggcgaactctttgccgtgactccgttaacagcaacattatgcggattagtgttatgcaacaatacttatgttgttttaccgtattgagattgttccttcttttccctaacttgatatttaaatttccatttttacttttttgacatttttctatttcaattttttttcttttggtcagatgaaagttttctgtatcaattattgatgctcatattttcttacttttgccttttatgttgttgtagagggtcgtttgactgtggaattcaatattgttgagttttagagtaatatgaacatttcattactgcagatagtaggggaagattggttgctgggtcatttcag

SEQ ID NO: 69823 - DNA, 450 bp, Prunus persica
  Intron number 1 from transcript ppa005352m (locus ppa00535 2m.g) derived from phytozome v7.0 (chr-ID scaffold_4; pos 13509440 to 13509889)
gcttcgcgcttcgttctcttcgcacgagcccaaaggtacactctaaccctctcaccctgttctcaatttcgcaatttttcttgtcgaattttttattattaatgtatttatttatttatttgataaggaattcatgtatttattgttgagtggaattaagttaatttagttggtgtttattaataaataaccgtagtatttcttgggtgtaaatataaaatgtgatacgaaatgatgattatttatgttaaaattttgattttgatatatgacccatttcctgcagcccatgacgatgatgtaacaaaaacgctagtaattcgtttcttagatacttggaattaaaatttgaattaagattttgggtattttcattctctgttctttaatttgtttcattgaatgggatctcatgtgttctttgcttattgtttgaatcccattagctcc

SEQ ID NO: 69824 - DNA, 685 bp, Prunus persica
  Intron number 1 from transcript ppa001187m (locus ppa00118 7m.g) derived from phytozome v7.0 (chr-ID scaffold_7; pos 18199288 to 18199972)
tttggttgctgccgagaaacaagtgcagaaaacggtgagatagagctttgaattatctgggttccttcacacactcaacagaaatcatatagattcaggaagtttgtttctttagctccctgcatttttcagagctaaacagttactgggtttcttgtgtctaatggttttgaattgatagatgaattctgtttatgttcttcgtgtgtttcacaaaatgtgcataaatttttttttattttttttctgattaactatgtttggaattagaattgatatttctctgttcttattttaatttctgggtttttaactttttgtttgcatgaaatgcaattgatgaattgaagccatttttaattattgctctcttattacaataactttgtgtgctgggctggcccttcatttcgcttcgctgtaaagtctgctttttgtactgtaaaagaaaaacccattaggggaggttactcatcaagtgaaatctgggcttatcttggtttttcaggttataaacagactgcttaaagtgccagcttattcttttgatggataaaaggcatttaattccggtacgaatggggtaagacacagagcactgcaaagggaatgatattcttctggtagatcttgtggctgcatgggaggaggcttattgcacctttttgatttcaatcaaggcagc

SEQ ID NO: 69825 - DNA, 440 bp, Prunus persica
  Intron number 1 from transcript ppa020283m (locus ppa02028 3m.g) derived from phytozome v7.0 (chr-ID scaffold_6; pos 96513 to 96952 reverse strand)
tctctcccgatctcaacccccccattcgagatcaggtattgggtttttcttttctgggttttgtttgtttcccgagaaagtataggaaactgtaagaatgtaaacatttaaactccgtcagctcgtagctagcttgagtggaagaatcttccttgcggacaaattccagtttgacacgtgtgcaacatgctgctagagacttgtcatagatagctcataatctagcaatgctcatcagcatatcaaatatcttgacatttaaattcttgggctagtttacttgaattcattagcaaatttgtggccctgttttattgatcattaattcattaaagaagtgttttctttaatgaacaagtgcattttataatttctttgattttgattgagacaatttgtaaatttctgcttttggtaatttgtttcaggttcatcaggat

SEQ ID NO: 69826 - DNA, 873 bp, Prunus persica
  Intron number 1 from transcript ppa004747m (locus ppa00474 7m.g) derived from phytozome v7.0 (chr-ID scaffold_5; pos 16369120 to 16369992 reverse strand)
agcacgagtccaatccccagcccaattacccttctgtatgatcccccgattttctttttcgttttcaattcagataccaattgcatatttgtaaatttttaggtttcgattttcaactttagctgtcttcatcttcaactttgaagcgatgctgtgcttttgttaatggtggtagatgctttggttagaagaatgtgtcttgaggatttgattacggttctttttagggttgggggtttatatatatgtgtttttattttttattttcctgaagaagaagaatgaaagataagaggtgggttgtgttgaagaacagaagcacttttgtttaacaatgattgacacaaatatctaatgcatttaagctgaaattgcacaagcacaagttattagtcttatcatattacttttctgtcaatggatagtgggaacataaataacgtgcgagaagctcaacatgcaatggtgttgaagggatcatgagcattttgattttcttaaagtcatcacgggtcatgactcatgaaataatatgcatcattttttaacattttcaattttagagatgaaaatgtgtggaacgtatttgtggaggaatcttgtgactgtaaggaactaaaggaagtctctggctcactaaagtagttgggaaaatgtaaggattgtgtttggctattagtaatatgagttgaatcttatatgatgtagtgattataagttattaggtcgacatgtatttaagtctgtaattgttttaatgtatcgtcattatgcttatgctgaaagtttgaaacaatcctttagcacttgtaacaactatagcagcatcaaggtgctttgtgaaaacatcttcgtgatggttttgttttcagg

SEQ ID NO: 69827 - DNA, 583 bp, Prunus persica
  Intron number 1 from transcript ppa013411m (locus ppa01341 1m.g) derived from phytozome v7.0 (chr-ID scaffold_7; pos 12564669 to 12565251)
acaagaaggagagtgggggagagaggacggaaggggtggggtttggaatatttgttttggtttaaaaatattaaaaattagcttctttaaaaaatataagaatttgatttattttctttttattattgttttaaatctttgaattgggtttttttgcagaatttatttatttttaagtcaaaattcctaattaaatttaaatattacaagaattattttttagtccgatacaacaccaaacataggtcttcactatttttacaattcagtttcttagtccgacgtatcaccaaaggtaggtcagtacttaatccagtttaggccaatccaagttaatccaaaacagtcccaaaatttaatccagtctatgacagtctgccgtaccaaacgaccccttagatgctaaaaaataagagatactaacggcaaatccagaagcaacccattgagtttatgggcctaatccgtaagtaaaccattgagtcaatgggctaagggtgtttccgtaattccacaatcaaataaatcctaattctttaatctcctagaacttcctctctctctctctctctcttctcgcttc

SEQ ID NO: 69828 - DNA, 887 bp, Prunus persica
  Intron number 2 from transcript ppa013411m (locus ppa01341 1m.g) derived from phytozome v7.0 (chr-ID scaffold_7; pos 12565286 to 12566172)
ccagtgttgcagtctcaacctttggacaatcagaggtgcctacagcttacctctaatctcccctctttgttattttcttttaatttttattttatggacaatagtaagcacgatatttaattttataaattgtcaaagtgaactgatgaaactggtgcttcgttaaagcccaaaagttcgacttaggttaatgattttttttttctttttttatcgtgggtaattggtacccacctgaatttcgagttgttcaattttctttctgtggttttcaggcttaagcttcttctctcttgctttttttttttttgggtgtgcaacaatcgtatacaaaattgaagctataaactctatattaccatatgtcatatttgtgaaaattttgttgagacctgtaaaaatggtagcttgggaatgttttgtgtgttatggctggtggtgcttttttttttttctaagagagaaaaggagacacatgggtaagttgtatttggcttataataagtagatttggcttttgattaactattgtgctgtgaaactaatttgtatgttactcaggtgctgcgatgcaactctaatggattctgatacttttgtgatgatttggttttttggaaaataccctgttcaattctttgcggctgcttttctgggttgaatttctaattaggtttgaaataacttttgttctatttctaattgtcattttttaatggaaatggtctgtcctcctcttacaattcaaatatctggaggagacttgatggatgcatttgtttttcttttggaagcaggggaattagttgtagggtttgaactgaataaaaaatttgtttatttattttgtctgattttccttttgttgtattactttgtggtgaaga

SEQ ID NO: 69829 - DNA, 668 bp, Prunus persica
  Intron number 1 from transcript ppa023921m (locus ppa02392 1m.g) derived from phytozome v7.0 (chr-ID scaffold_8; pos 11106616 to 11107283)
gaggacgtcggggtttcaggtttaatggcttttgactattattttatttcttctcgtctttgtaaaatgtgggttgataaggagaaagtaatctgtcaacatgtcgtcgttggagatgttctggaatcttactatcaaccgtttctgttgagtaagacctctacttgaatatacctcagaagaccttttgaagttgatatttcttaattttggctctggttaataacgtgctttgctttgttgtacatttgtttagatctttgtaagttttcgaatacaaatgtgaatcctattgtttgtttaacgacgtaattgagtatccatcatcttggttgtagaggtagctttgtttctgtcagtggtgcacaaaggctgtacaccttttacttttgtattgtcagatacatttggctcagtacatgtattaactccctcaactttttgcattttttgggtattaaaacttcagagtgctttagtttcacgctctgaatgttttggttttgcttgtttctttatgtgattatgggtctgattcttcttaatgataagttaaaattaaggactggtttgaaattgggaatgccattagtttttgctcagaaactaatctattgcaatttttttttccagccgagacaatctgtgcaagaactgcaaacgtccag

SEQ ID NO: 69830 - DNA, 881 bp, Prunus persica
  Intron number 1 from transcript ppa009217m (locus ppa00921 7m.g) derived from phytozome v7.0 (chr-ID scaffold_6; pos 27024388 to 27025268 reverse strand)
tctacgatcgtgtttcaagtacgtttttttctttttgggtttttgcttttgttgtttgtttttgttttgatgagcattttggcaatgtgaggcataattaagaagtgagtgtttaggatttgcaagataacccaattgggaatttggtagtttgtttgtgtttgtggtaaagtccgaaacttcactttgttttgttgggttattttgcattccatttttcattctgagtggagtggtttcgaatttgatgaaaccttcagtggaacgtttagataattagcagggtttgaggttgaattgtggtgatgctaagttgtgagttgagttgagatgagcagggtttgaggttgaaccttaaatatgttcaagcttggcttgacgtttaagtacctctggatctttagaaagaggctttccatttggaaattgcattctgtgatttaataatgcttttcttttgaaccaaaaagtattgtccaaatgtctaatgatgattgaagtagtgctttacatatagtgaagaggttattgaagaggtaatgatccatggttagaaagtggtggatggcatggaagtccaatttaataaagtaaccgctataagatgctttcactctctgcagttttgtgaaccagcccactagtctttgaattttctcaattttaaatttgtgaaactagattccaatgaaatgcagctttagatttgtaatgtaaacgtgaaatcatacttgctgatgagatgaatatatggaggttctgaaaagtttgcttatgtatgtatttgattgttggataaaggttttggatttccagctttctatatcgaaatgaatatattgcctaataacaaagataattgcaggttttcttgaatcatt

SEQ ID NO: 69831 - DNA, 398 bp, Prunus persica
  Intron number 2 from transcript ppa008583m (locus ppa00858 3m.g) derived from phytozome v7.0 (chr-ID scaffold_1; pos 35913060 to 35913457 reverse strand)
ccttctccggcgccgaagacttcgcccggcaacaggtttgtatatttacactttggtccctatagttatcaataccaaatcgaagaaccaaagtcttcttttgattctataaaaagtaaaaaaagagaaaaaatactcctgtctttttcagcaggtgtaggaatctagtgcgaagattccacgtattctttccagtgccacacgtctgtttaaataataattttactagatctcctaacccgacaatttaatagtattggatgtaaaaaacaatttaataataatattactatttttaatacatatttttctggacaaagatcttcctttttttttttccctctgtggaatctttatgggatttggtgtcacttgtcagggagttgagcttgtggaaa

SEQ ID NO: 69832 - DNA, 991 bp, Prunus persica
  Intron number 1 from transcript ppa010843m (locus ppa01084 3m.g) derived from phytozome v7.0 (chr-ID scaffold_2; pos 26008037 to 26009027)
ttcagtcgtcggaaagcgccctcgctccgattacggtatatcaaattcctcgaatttccatgattttgagttctatctcctttttgtgtttgtttggtgcttgattaaattagggttcttgggatttttttggttgcttttaaaggcaaaaactgcactaagaatatatgtattttttaacaataaagggagatttcagcagacttccaagcggtggaattaggttttcagtgggctgaaggattgaaatttgaggatcacttgtttccttaaatttcccattcagtgtctaagcaacctaatgaagttttgaagtggggatgaaatgtgtctcttttgatgtatgctgtatgtgggttaatcagtgttgatgtatatgtgaatcagcttattaagacattatctaggcttcatgatatgtatgattggtgcttccatggttatttctaagatgcacttagattatatgataaatttgcattattggtagctgctgtgcctatattgaagttcgggtaatcattaagcaatactttgtttcattcaaggatcgaccttttatgccttcctgcaagcattggtcagtgtacagattatattatttatttgaagatatgctattaagctggctcgctatagttgccatataaactactcagcttctatgagatatttggcatatattaggcatatgcagaaggaaattccaaatgtttgtgttagcatatgcaaatatttgggtataaacctagggatcttagcaacttgattacctgcttatgagcaattcagtagcttctagtgattatagaaatttggttttgataggctgtctgtagtttaacttaatattgtcttgtttgtagctttatgctgtagcaatttgattttcttcacaacggcacggtctgcctttagaatcatatgcattcaaatattgtttctttctttctcttttggtatctactgaagtacatccttaatattttag

SEQ ID NO: 69833 - DNA, 501 bp, Prunus persica
  Intron number 2 from transcript ppa008574m (locus ppa00857 4m.g) derived from phytozome v7.0 (chr-ID scaffold_5; pos 8145065 to 8145565)
gtgcccgaaaacaagcacgtcttctattccagaaggtaccttttgcttttgctgtttgatattttttgccaaatttctcagatttcatttgcaaaccgaaataaataaataaggaatttttctggttttgtttggatggattgattgattgattataagtgccaaagcttggaatgagtttcatttgattgtttttggaactgtgtaatattgttaggatgaaaaatctagtgattcaactaatgaattttattatatttattcaaagaagaagaagattaaaatatgcagagtcagcttttcaaagatgacttcgaaagaaatggagcatgtcgatttgacaggttgcttccaacaatccaacattagtttttccagagccggctattgtttgatgcaatatgttgaattgtacgaactctgtgattagatagaaccatgagacagctgaaaatctaaccgtctgcaacttggcagtgaatttattttcgatcccattaa

SEQ ID NO: 69834 - DNA, 838 bp, Prunus persica
  Intron number 1 from transcript ppa008282m (locus ppa00828 2m.g) derived from phytozome v7.0 (chr-ID scaffold_6; pos 26233053 to 26233890)
gatcgggctgctctcgtcgagttctacgctccctggtaatctccgactttatcattttcatctgtttgtttggttcctgagatttgattcagaaaactatgaagttagcttctgagctcttgtatgatctctttttgttgttatttttgaccgaaatgaatgtaaatcagcaggagcctagtttaacagagtgtagaaatcaaaatgatttgagttttcccttttggtttttcggatgccaaatagaaattagatacgttgaagtgatgtcagctatggtggatgttgaattcggttgattgtagatctgtgataggcgatcgatgattctagatctatacgtaaatgatggatcgaggcaagcttaagtgctcgattgatttttcttatatttaaaatttgacttcttgctgatggatcgaggcaagcttaagtgctcgtcaaaaaccttgtttaggattttctgacattttatttggttcgaataatggattagttccagtgctgtcagaactacggaggtttcacaatgcaattagaagattatacgttcaatttatcattgattgtttagtgcgttatattatcctttaaagctccttttgtttagtttctgattttagtatcatttttcctggaaaacgttgaagatagaagaatactgttatgtttagaaaataaacaactataagtgttgctgctatttatttttaaatatgttattttcagttgggtaatgcctccctctcccaaaaaaaaaatgtcatgtggtgggagttggtgtaacattctcacttcgattgcaggtgtggccattgtaaaaagcttgctccagagt

SEQ ID NO: 69835 - DNA, 267 bp, Prunus persica
  Intron number 1 from transcript ppa004575m (locus ppa00457 5m.g) derived from phytozome v7.0 (chr-ID scaffold_5; pos 15988777 to 15989043)
ctcttaccagggtaatatatcattttcttttatttctttaattaatttactgcatgtggtgctgaattttgttgagtcgtgtgcttaaattttgttttttggtgtggggtagtctttggtttctgaagtttagttaggaaaatgttaacgtttatcttctgtttggctgctaagaaaatggaagatgatgtgcgtgtgttaaattatgactcttgatttctttgcttcacagttatttccgtgaggtctcctagacaggtgattgat

SEQ ID NO: 69836 - DNA, 476 bp, Prunus persica
  Intron number 1 from transcript ppa000392m (locus ppa00039 2m.g) derived from phytozome v7.0 (chr-ID scaffold_6; pos 8113264 to 8113739 reverse strand)
ttctctgtaagttgttcttcttttgccctttttttctctctagtatttttagttgcatatattgcgattttgatatgtactactttaatgcaaatttgagccgaaatggtccttgtttgtacctttctgtaaaaaaaatttgaacatttttgttatggacccatgtgtacaaactagaaactctgtatagggtttagacttctggattgggttataactcataatgtttaaacgtagaaagtttgtgaaaaaattagtacaaatttcatagaggtagaatttccctgggcattgttttgtttctggtactagtacaagaacttacctgtactcagtgtatgaccattttgttttacctttttctctttctgattagttacaactttcagaatgaacttttgaagttttcatgcacaggggttatgaatgtctgtgaataatactgtcattaacccaatgagtaatgcaggtttgcc

SEQ ID NO: 69837 - DNA, 828 bp, Prunus persica
  Intron number 1 from transcript ppb016942m (locus ppb01694 2m.g) derived from phytozome v7.0 (chr-ID scaffold_3; pos 7315330 to 7316157 reverse strand)
cattgaggatttgagcctctgggtgagcttctaatgccattgatttacattatgtacatgcaatggctttggtttgaggttgttaatatttatctaagcttattccaaaatatttctagaaaagttaaagggataaatgaagagtttgacccaagtgtggaaattttaggggtctttgaaccctatgaccctactgaaccaaaatccaatccatgaagatgctagtttggaatagccgaggtagtgcctggcatggtttcttatttcaagctctttttttatattaagtctttcaatttaattttttttgtattttcgattccataacctctgggattagggcagatttcctagttaataggcttggttttaatagttccttttgtgtcctgtccaatggtcaatatggcgggcttattttgatgtagaatccttctatctataatattagtgttttgaattatcatgagtgttatattcattgtcaagtacatgatatttttgctaacaaaagttggtttgccacttttgtttatgcttacagtaaaaaagaaaaacttttatgggcttcaattatcaatcttaaacttggaatctctgatggttggatatgcttatgaaaaatttcaacaacatttgttccttacaagaaaaaattggagggacacagtctacctccaatgccatgatctagtttaatacctttattaattattgtgaagttttctctttagatgctcaagggatacctttcatcaagctttccaacagaggtttacctctactcatccccctccccaaagtttattgaaagattttgtaaagaga

SEQ ID NO: 69838 - DNA, 816 bp, Prunus persica
  Intron number 2 from transcript ppa004188m (locus ppa00418 8m.g) derived from phytozome v7.0 (chr-ID scaffold_7; pos 19096733 to 19097548 reverse strand)
caggcttggcttttgggaaacctgcatttaccaatgttataactcctctctcattttttgaattttacatttcccggtactttttctgtgccgttatgtttttcctactaatttttaaaaagttgcctatcattttccattttggttgcagttctacctgttgaagtggactatagaccaccgcgttcagtgagggcccatgtcgtgggacatgaaagcgtccaagaccaactgagaatgccaacacagaataaaggtcagggtatgcaaattctgtatcaatatggctcaagtattgtcagctttttgtcatttgtgaagattatgagctgaatttttggattcttattttggaacttttgttggctgaatttaaggtctatgttatgagctctgtagcgttaatggttcctgctgctgcttgcaataagatcatttttgtgaactactttctaggctgtagttgtactgtctattgaataaaaagcatcaaaccttgtctatttttaaaactgaatgctaaagaaaattgattttccaaatcacctttatagtttttttgatcgattagaggtgaaactggctgtgtttctccaaaaggaatagtcagctatcaattttcagtaattgacacttgaatgatttggttctctgttgcagttattcatgggttaagaagactgctttgtggagctattaaaccaataggtctggatttgaaacttaccctaccatatttaatactgctagaagttctccactcacatctcttacatttttaacttgcagcatcagctcgtttcaggcaactccaag

SEQ ID NO: 69839 - DNA, 575 bp, Prunus persica
  Intron number 1 from transcript ppa009593m (locus ppa00959 3m.g) derived from phytozome v7.0 (chr-ID scaffold_3; pos 19137463 to 19138037 reverse strand)
gtcccattccctctctgcagatttctgggcttcaggtttggttaattcgacataccttctactttactcccatttgtgaatgtaaaatttttcactttacgagtcttccttgttaaattttgcttcttttctcttacccttgttacttgccgtatactgtcctgttcagtcgttaattatggatttcttttatgtttgaaatgggtttcatatgtatataattatgtatgcatcatgtgtaacacatataatatataagaagctgacagttggtggatatgcattgaaattgatgtagttgaagaattgatagttacatcacatgtagaattttgattgagccgtaacccagaaaggattctattcaaaatgatgtctttcatgtacacctgcaagctacgaccgattaatgatcaccatagtcatatactgtactgtcatttatctatagctttatgttgcagcgacagttctatgtacatcgaaatgttgctgctattcttttttctttttttctgatcatatggttgacttgtgtagagccccatcaggaagcaatctgctgcctggaaggt

SEQ ID NO: 69840 - DNA, 827 bp, Prunus persica
  Intron number 1 from transcript ppa013459m (locus ppa01345 9m.g) derived from phytozome v7.0 (chr-ID scaffold_5; pos 15755198 to 15756024 reverse strand)
caagtcaaaccagcatcggatcgtcaagacccctggtacttttatcaacctcttatacatggttgttatatatttatctggggttagagctggtgttttttggtcttgtaatcaaaatgcaaactttgtgtgtttttcattggcttaggttggtttggtgtgagattcttatggtccctttttgctttattttgtaaagaaactctatttccagattgtattgtttcttctccaaaagtaaaatatttgtatggattttaatttcataatggagtttagtagtatacaaatttggacaaagtaaattgcatatgtctagaaattgtgttatttttatgaattcctgaatgggcaatttagggaaaattgaaaagagcgtgtgcattgtgtgtgcataagattagaaaattgatggaaataagaagctgcattgtttgttgttttacgagttgaatggttacaatagagtaggtttaaaatcttacatttttttgcaaaaaaatagaagatctcacattttgactgggtaaattccattgtttgtctccctcttttcaagttctatgcatttaatattaggtttctgagttggaattatggaaacatgttttgaaatgcagaaactgtgttagtatgtgtcctgcatttgtatcttatagatcatagttttcttttggattataatctgatcattccagcagttgcattgtaatatataccataaagttttctattctgttgattttgtgtggatggctttttgcttattccttggctacatttgatatttaggtggaaagcttgtgtatcagaccactaagaagaga

SEQ ID NO: 69841 - DNA, 985 bp, Prunus persica
  Intron number 1 from transcript ppa002244m (locus ppa00224 4m.g) derived from phytozome v7.0 (chr-ID scaffold_7; pos 20050010 to 20050994 reverse strand)
cacttccactaccagttggtgctgacatgacagggcatgttgatcttaatgtcaaaaatggaaaaatcgttttaattaggcataagactatctatcaaaggcgaagaaacagataatattttccaaaagaaaaccgcatctggcatttgcgtaaatgaatctttaatactctgtcatatctttgttttaacttttaggcttaactaattcatttgccccatgagcttattatatctagtttttgatttatcctctatacattttttattatagaaaattaaggatatgaacttatttttttcaccaaatagggttgtaggaggagagagctggagagagagagagttagggggttggcgataggtttggttcagtggatccaaggatttttcttttattttttttattttttttaaaataatttaactgaaaattaaataaaatgttgaggatatagacggcagggggggaatcggagaaaaaaagacgttgatgttcttaattttctataaataaataaaaatataaagtgtaaaacgaaaattaggtagaaatggcaaattaacagttaagcctaacttttaatctgtttttttcactctagaaagttacaagacgataagaaagttaaaaatagtatcaatcattgtgaacactggtttacattctgtcagtcaagataacattttcctactaataagataaaaaataaataaatggtttagctgcaggcttcgtcttctacagttcatggtttaagcttctgtcaaggcatcatttttctattaattcataattaaaaattaaatctttctttaataattatctaataatacatatgactgtcgatatgaactaggatcatctcatcatccatatttactcaaaataaacaaacttctctcacttttagtcaaagattgaatttttgtttttgtttttggactaaatgatcatcaaaacagtagcagccaccttactagcc

SEQ ID NO: 69842 - DNA, 809 bp, Prunus persica
  Intron number 1 from transcript ppa026100m (locus ppa02610 0m.g) derived from phytozome v7.0 (chr-ID scaffold_2; pos 26716360 to 26717168 reverse strand)
ttcaactgagttgggatttttcccaccaatctaaggttgtgacttgtgacatatacttgtggaccccacccctaacatttgatatagctaaaacgatcgaattgcctgcttatgtagatttgtggaccccatctctaacaaaacagccattataatctctaaaaactcaaaaatggaaacagaaaatcagattgggagggaaaattgagatctggggattttagagctagggtttgagaatacgatcgagagagggagagcgttgtatggttggtttcgaaaacttgaaggcaagaagaagcgacgcgactcgacgacgatgcctttttgacgagaagcaggagcagggcaacctgtgtacggtaagtgatttttttgaaaagggacctgttttctgaaaaggaatcttgtcatttgatgtggaaaagaatcttgaccttatagtgatgcgcgctgtgtacaaattaatagtctttaggtctttttgtgttatgtgttgtcagtagagtaggttctaatgcaatatacctttcttgatgtggtcccatttttgttttcttatagttggctttgaatatgttaatcgaatcatgttgttgtcttggttttaataattagcttagaatactattttgttgttcttaaagacaaaccttttttgtttgtgtgtagaggacaaagagttggtcacttttgaagtgcatcatagtggtagaattgtgaaaaacaaacagaataagtggtgttatactagtgagtgtgtaggatatttggattggtgtactgtagagtatataaatatgttagag

SEQ ID NO: 69843 - DNA, 652 bp, Prunus persica
  Intron number 2 from transcript ppb010449m (locus ppb01044 9m.g) derived from phytozome v7.0 (chr-ID scaffold_1; pos 13416550 to 13417201 reverse strand)
ggatctcttgggttcaattgcgtattttggatttctgtatgacagtagttgttgctcaagctattggggccactgtaggggaggttgaaaacacctgtaggatgactaaaaatgcctagtgaatatgccaatttaagattataatcaaataaataaaaataaactttgatagcaggattgatatggcttatctatccagaaatgtgctgaacataaaataaagaaatacgcagagaattattttacgtggtaaaaccccacccctggggaaaatccatgggacttctcagtctaacacaaatccactatagaacgatgattacaagaagtactcatacacttatcttagacagattctaaataatattttccgacttcttcgtaactcaacttctatcatgggatgatcttcgacactccttatgttgaacgcaatactggccacgattgcttcaagctcgccggaggaaaaccaccaccacggtcttagtgccctcaactatatgagtcaccgacatgcatatgaatgcaatatgaatgaagaaaggatttgataaatcaccaagtaaacaaggaacacttgatatgatttatctaagaaaaataagcatagcagctttctcaaaaacaaattcgatatattcaagaactc

SEQ ID NO: 69844 - DNA, 631 bp, Prunus persica
  Intron number 1 from transcript ppa000751m (locus ppa00075 1m.g) derived from phytozome v7.0 (chr-ID scaffold_5; pos 953497 to 954127 reverse strand)
agggttccaatttgcccaaacaagttcttgctcaggttcctctctctctctctctcttgctttttctcatatatataaagatcagcctctgtctgtgtgcgcatttttggattgataagattcaatgtctatgtcttcgcctttctatgtcaccaattaccaattaccataaatagtaagtagtctatgacttctgtaattcgaaaactaggaagagtacgagttgatggatttgctatagaccaacttcacattaactggccttgttctcatggaaacgaatctctaatttgttctagtcgataccggtgaacactgtacaaagttatttagtcacatgctgtcctgggctcttcatctcattattatgtcagcttatgattaaaatttaaaagagagttcagatttttttatgctgctcatgcttgtgcttattggagctgctgtaattgtctatgtttcatttatgtctcttttagtccaattttctcttgattatagaacccttttggacttctttaatctatttaccctttttatttttggatttatcttttcctctgaaatttaaattttgatttggcatggcacttctggctgataaattgttgtatgtttatgagttgcagat

SEQ ID NO: 69845 - DNA, 718 bp, Prunus persica
  Intron number 3 from transcript ppa013303m (locus ppa01330 3m.g) derived from phytozome v7.0 (chr-ID scaffold_5; pos 727551 to 728268 reverse strand)
gcggagaaagacaaattatcttattgttgattcaagtacgttttgagcttttttgatgcttgaactttggaacttcatccatactggtaatctgtttctatatgttcgtatgcagataggtcatcagttggactaaaatgccaattatggtatatgattagtaatctatttgtaagaatattttaccaactaatccagtgggtaaacgaaataggggggcctgggaaggggaagggaaactacaaacttctaggagatgtattctaggtaaaagactattatctttttgttgagaagttgctctttttttgtaagtattgttgcagtttatcgatggtataagttttcgttcttgtttatcaaagaaaagcaagcaaattaggctaccattcattagtgaagaaaggtataaaattacattttggtcagttaaatttggtctgctgtggcagtcctttggtattccttctgttcttcttaacgagtatcacagcactttaaattaaacaacaacttggtcccttaaaggaaaagtttagtttcttttctgtttttggtgtgaaaaacttagctatgaattcaaattaatacttaaagcaaggttcagtctctggtgcttaattattattattattattattattattattattatttgtgtctaatagtatttgttttctggttttctgctcagaaacaacagtgaaagcaattgaag

SEQ ID NO: 69846 - DNA, 681 bp, Prunus persica
  Intron number 1 from transcript ppa013303m (locus ppa01330 3m.g) derived from phytozome v7.0 (chr-ID scaffold_5; pos 728470 to 729150 reverse strand)
tcatccacctcacggcccgcctgaatttatctcaggtaatctcttagccaccagatttatttacgctatcgttttacatctggtgttgtttcagtttggattatatctgtctgagatcgtggctcccataatttcgcaattgagagaggttgttttgttttttctttttctttccagatttgttagctttccgtttgacaccaatgaacgaaaaatctattgattccatgtttttaggtttatgggttttgatatgatttttgggttgatttctaaaatcgccttcttagtgcaagatttggtcatttgttaatacatatatatgcattgtgctgacccagtttaggttttaccattattaacgtcctaaaattcgagtgattgaaactcacctcagccgaacttaagaagttgttgattggtaaaaggctttctgtatctatgaatccaatcacacttcaactttgaggtctaaatttttgtttcttttttatttcagcaaccaaaaggcatagaataatggttttcgtaccggttaaattgtagcaggcacaaatgacaagcatattgatgggctctagttctgtacattgtaaattatactgtttaatgtagtcagtgagaacacatatttgtcctgatagtttcttttctgcctgatgtagtggatatcaacttaga

SEQ ID NO: 69847 - DNA, 516 bp, Prunus persica
  Intron number 1 from transcript ppa005529m (locus ppa00552 9m.g) derived from phytozome v7.0 (chr-ID scaffold_5; pos 11909767 to 11910282)
cactcttcgtgttccttcacttggctctctccgaggtcagtgccctctttcatttcatttcaattttatttttacttcgactttttgtttggttgccgagaaagtgaaggaaacgcaaagaaaatttactttctgttacttacattcaattgtaatgtgaatttcgtttcataattatcatgggttttgaaatttgacccctttttttctggataaaacgttaattttattgctgggtttagtttttttgttctttccatttctcgtggtaatgttaattctgcttgattgtgatgttgggtgccaagagaagaaaataaaacagaaggttgctcaatcaagcttctcaatatctgtttgatgttcattttgattgtattagaaattcttagttattattcctcccaatcacaatgctattatgttagggtttaatagatctatgcttaaatctctatgcattttggaacaatgatgatgctgattggacataaaatgcagggactctgctaaaaa

SEQ ID NO: 69848 - DNA, 895 bp, Prunus persica
  Intron number 1 from transcript ppa005973m (locus ppa00597 3m.g) derived from phytozome v7.0 (chr-ID scaffold_4; pos 13177028 to 13177922 reverse strand)
gagccgaaaaccctcttctcatccccagcaggtaacttaatcatctttaccttctcatcttctcactctactgtttctttcactttctgggtatgtcaaaattttctcaggaaaaaaaaaaaaaaaaaatcagagtctgactccatatcttatgaaactataaatcttttgctccattttaagttgggttcggtttgttttgcaagaaaatactttcctttctgtctaatctttcttttatttatttatttatttatattttgtttagtatgttgtgtagcttgattttgatcttgtatggaataatgggccatgtgaacaagcttgttaaagagaagttccaaaagtttgttgttatttaaactctaagtataatgctagtgcaagcttaacagagcaggggtggaaattgacctaaatggagatggtagctcaaacaaacatgcatctgatgaacagttgcgggttgaatcataattggatgtgtgccttctgttaaaaagcaaatctatcctaggttttctgctgaagtgtatataagatttgttgcttgtgataagttttatagcgtacctccttgaatctcaacaaatccttaattattggaaatgatcaattattgttcatcggagtgaaagttaaatttctggatgttatgactgcacagtgaacatgattatcattaattgtgacttaatctgtgttgatttgtgcccggggcaagtatctttcaaggcatttggctttgtttgatattttctcattattctttccaaatttatgaagttcttcaggttttaaatcgtcttatttatggtagtcatttactataatatatactttgctgcacaaattcctattgcaggtgcacatctctttggcaggggacaagcac

SEQ ID NO: 69849 - DNA, 153 bp, Prunus persica
  Intron number 1 from transcript ppa000029m (locus ppa00002 9m.g) derived from phytozome v7.0 (chr-ID scaffold_2; pos 26033470 to 26033622)
cgaggccctatactcccagttaccctccccaacaggttcttaattatgttgttttcttgaacttcaacataatcaaattcatcttccataatcgctcaattaatcagtttcctgattgttttcttttccgattgatttacggagttcaggcca

SEQ ID NO: 69850 - DNA, 739 bp, Prunus persica
  Intron number 1 from transcript ppa014774m (locus ppa01477 4m.g) derived from phytozome v7.0 (chr-ID scaffold_10; pos 233634 to 234372)
gagctcatcgccagtgacattgtatgtaccaattaatttttgacaaattctaattatttaacgttacttgttttactcttttttgttgataaatttgattttcttgagtttattgaaacatgtgtttagtactttaggaaagtccatgtattcagtttgaatggtaaatttgcacttttagctgtcaatggtatggttgccaagtctttcctctctctaatattcaagtgaccggcatgaagttaagagttgggtcttttgaaactaggggtctctttgaggaggttatatgaaaagaaaaaggtttgacttgatgaataagtatatgatgttgataaattatttgaggtgtgagagaacctacaggaccttcttaagaaagaaaagccaaaattggaaccacagaattgcatagctttcttaaaaaaattgtttggtgaacttgattgcagaggcaagatggaagtagtaaaatttttagtgttcacatgttcgatttcagtggtgattttagatacaagatttagtctcacttgagaaagtcaaacagtaaaattgttctaggatgagtcatcttttataattgacagtcataacctgaggtgtaattaatagttttacttttacaccatgttagggtgagggaaaataagacactttctatttgatttctactaagagtttgctttgtcttccttgtgaattcatttgatcatatacttctgttctagccagataa

SEQ ID NO: 69851 - DNA, 607 bp, Prunus persica
  Intron number 1 from transcript ppa011873m (locus ppa01187 3m.g) derived from phytozome v7.0 (chr-ID scaffold_3; pos 17966451 to 17967057 reverse strand)
acaacttaaccaccgaaacgcctctggaaaaagaggtctgtttcatccctcgcactctctttctggttttcttttttcttctgataaattgattatgtcattgaaaatttggtatatatgttttcctgcgttctgtttggttgctgggaaaatgtagggatagtctagaaagttgaaaactgatacaaactgtagcaatgttgaggctggctgacgcttattcataattgggtttatcgaagtcatgtgctgagttgaacggatttttgttctttcttttttcttaactttttcgtttgctcagaataagactctgtgctgtaaaattttgaattcatcttactctgttattatacatgaaattatatttagtcacaacagaagttttgtcattgctgtgtatggaagaaatctattttgttattaatccttgtatttgcttctgatataagagtgaatatctaatccaacatattaatttcccctcatttttccagttaccaaacgaaggtattagtttggcaaagcaatgctcttgtagttaacttatatctttattttggatgttatagaagcttggagtagttgtgaagccaattgagaaacc

SEQ ID NO: 69852 - DNA, 498 bp, Prunus persica
  Intron number 1 from transcript ppa014609m (locus ppa01460 9m.g) derived from phytozome v7.0 (chr-ID scaffold_1; pos 12578272 to 12578769)
gatcatcttcctcttgctttcattgcacgcaaaaggtaagctttcattttcactattttggttactgttttgcatgctcatacgttttttgtttgaaaaatctttttaccttttttctggccaaaatcattttacttctttccaagtttgataaaatatacagacaaagagagaaagtttccaactttgaagacaactacatcaactaaataagacgacggtagaccacgacggttcgtcagttgttctagcgtcgtctgaaaattgacaaagttgtttttaaaataatagtctttttttatatgcttgtttaattgcaggtttgatttctctgaacaatggtttttgtttttcccttatttgataaaatataaagaaaaagaaactagggttggtatctaatatagacgacaaaatatcttattgttttacgtctgcttccaagaaatggaaggatttctagtctacactaacgaggcattatatccttccatacac

SEQ ID NO: 69853 - DNA, 516 bp, Prunus persica
  Intron number 1 from transcript ppa023515m (locus ppa02351 5m.g) derived from phytozome v7.0 (chr-ID scaffold_4; pos 15364562 to 15365077 reverse strand)
tggtataaattgaaataggcattcaaaaaatggatgctcattatttttctctcctttattgcgctcctgaactagatgtttgctatggtttttttaattcagttttgacttataataattttccactagaagatggattagttattatatgctacatgtggaaatatgatttcttgattttagacacatccctgagctttcttcacacaaccaaaaagacagggtaaatatgtacttttctagatttaggttcaaacttatttagaattactcaaccatgaaaatgtatattctatcacattccaagtaaacaccaagacgcccaagccttaaattcaattttggctttatgatatacacacaattattaaaaattgggtttgtaggtattacttacatgtccttgttgttccgcttgctgaataggaaatattgcagattaagtagcaacctctcatagtattacactttcaatacacaggaagttgttgggcattttctgcagtagcagctgtg

SEQ ID NO: 69854 - DNA, 515 bp, Prunus persica
  Intron number 1 from transcript ppa000028m (locus ppa00002 8m.g) derived from phytozome v7.0 (chr-ID scaffold_8; pos 20687036 to 20687550)
tggcgggtttgtgttgcctctgctgctgctaacaggtatttaaatgaaaatgcctttggtttgtttgatttaatagccatgttgttgtagtaagattatttcaagtagatgaactggatattactcttggtattatatgtgttgcacttgaccagctgttctagtaatctgcaactcaaaagttagcatgcatttggattgaggtgctgatttccttgttgttgggttttctttagcaatttgaatgagctcatttaacttctttttatgataatttagatgagctaagcttgtatattgtctctatcacatatatagtctcatactgtcttcatcatcatcaaccataatgcgtattctattttatatggttgtggagaaattctggacttagaaagcttacttatagctactgacaatccatgcgtgcttaataactgaggtttgattaatcttggcatgtttccatttttcttgcagctgcttttatcaactggagcttgctctcccttgtt

SEQ ID NO: 69855 - DNA, 1028 bp, Prunus persica
  Intron number 2 from transcript ppa000028m (locus ppa00002 8m.g) derived from phytozome v7.0 (chr-ID scaffold_8; pos 20687585 to 20688612)
caccaaaaataggtaagttgctctccgtaaaattttcagtttgtcttccacattacgaatgcttttatctaagtacacactacccagtgaaaatgcgcttgttggatgctcttcatgtgaatttcgttctcccttttcctctggtgtattgtagacattttcatctgaccaggaaatcaatatactaggaaaagtatgtgcttatggattaccactgtctggctaatgagttggcacaaaacttttcatatggaaggggttttcttgatatgacaattcttagctacaacagactagttaaattctttgttttagcctgagaacaatctgagttgtaaagtgatctcaatcacttaattaaatttgtcctgcatattgactgttacttgaggtgcattgactcaccagtccataaattgaatcttgtgcctcagttatgacataactgtgatagcatgattctgcattagtttttattttgttttcgttgtaaaaaatggtaagtgtctgtttatggatgaggatcaaagaaacagattatgcagttatagattccataaaaatatattgagtagaaattttaactgctgttaaaatatatagttgacatgaatcctttttcaatgtgctgtaggaatttgattaagtgcatctttgagtgctcaactttggttttcttaagtagctttaaccacgtgcataccaaatttaggcataaatgctgtgaacttattttatacaatcaaggaaaaataagttttagagatctacttgagttttatttagtatctcattcaatgtcaaaccttaggtttgattggattcaagcagaaaatgcactttgaccaattttggtttacaatgtaacttaggagacaaaagaaaatgattttggtgtttttgatactgcttcttattatattaaatgctggaaatatcttgtatttatataattgatttttactacttctaacagtgttttctttgttgtaggatttcattttggaaggaggcttttattattgtgg

SEQ ID NO: 69856 - DNA, 911 bp, Prunus persica
  Intron number 1 from transcript ppa022324m (locus ppa02232 4m.g) derived from phytozome v7.0 (chr-ID scaffold_2; pos 17570785 to 17571695)
attttctcggtaactctatatatacatctctctctctctctctctctgtgttttatatgaacaatattggatcaataagattattaatttaatctatgaacgccaatattgttcttatattaattgacacatgagaaatgatttctgggttgcattgcattgttgctttctgctcgatctcaaatctgaattcttaatttgctttgtgtatatatttcttaatccctagctacatgattttttttttttttctgggttttcatgaacatgttttctcatgcatacatgtatgtttgtgattgtaaaatgttggatctttgattgatcagtaccagcaaaacaatccctcttcattgatcggtagtaatttcaagtcatttataaagtatctatctatttttttcttccctggtcctgtttttcctcatcactatattgtttatgtcatctaattggtttaattttcttttttgatatatatatatatatatgtcggtatttggcttcaattatcttgtaattgatccagacaggggcggtgacgcttcttcccctttttcaaccctttgaacatgtataaaaacataaccaacccataatttgaagtttgtgtgaataataaaggacatgatcatctactgacatcatcagtttttttaacttctttatgattgttttaagtactcttcttctagttagctgatttccctttttttatttttctcaattttcaattacagctaggcctttttatgtcactgtcacattttgtgagcagtgtaaacaatcatatattatatatgtgtttggtggggttaggcattgcctgtaaatagtttgatataatatgatgtttgattatatatatctgcatcatgggttgaattgaatgcttttcatgggcagctgac

SEQ ID NO: 69857 - DNA, 783 bp, Prunus persica
  Intron number 2 from transcript ppa015423m (locus ppa01542 3m.g) derived from phytozome v7.0 (chr-ID scaffold_2; pos 20093198 to 20093980 reverse strand)
gtgacagagaacagggttgttctgaatagttagagagagaaaatggttggtataaatgagggggaagagaatatacagctaatgtaggaaaaatactttattgtaataaggatatccctgttttattatttccggccaataatacaataatacgttgataagttatctcatatgtcattatgttattgactgggaatagcaaaaaatgttttccccgttgttgcacgatagtttctctttgtaggaaaaaaaattctctcctaatgtagaggtagtctcgtactgtgtgcattgggttaatgacaccaataaaataataaataagcttctaatatcagatttgttttcaaccgtagggtgaagaaacatctaaaggctgaaaaggtgtgtcaagaagaagtgtagctttttgtgtgtcccaaatcttcaccctttttatctattttagtttgattaatgtactggcacatgcattacataaaaaaaaaaaattagtataatgaagaaactagaaaactctgggagaatgattgaatttgggtgtaaggagacatgctcactgttattatacccaaatttatagacaatctcattccttaaaatggcataattaaagttagtctgggatcttggctaagaaagtaactattaaattataaatcgtccacccaataatagaagaaagtccctatataattcaaattttatatatgttccccaagtcaaagaaacaacccacatagtttgtgctaattataatactaattgggtctcaactgaaag

SEQ ID NO: 69858 - DNA, 757 bp, Prunus persica
  Intron number 1 from transcript ppa023614m (locus ppa02361 4m.g) derived from phytozome v7.0 (chr-ID scaffold_3; pos 19184430 to 19185186 reverse strand)
gattccatatcatagtttcagcctataaacgaaatgtatcagccatccgatctggagatacaggcacacaacttaaccaatccgacggctagtatagtgttaatattcggtaagagaaagcagagcgtaattttagtcctcccattccctcaggtccgcggcggcgcgcgttttcgtcccttgaaaactctcacacactcttctcgctctcacactctctgcaacaccaaaatttgaaggtaatctcaaaaagctgtatttatcaaattttcatttctctgccgtttgtcccctgcaagtataagaaacccagtaatgactctggggttattggcacatgcatttgttttctgaggaagttaatagttagtgatgtgagttttagataactgtcaaattttgtgacaaagtttcgtttttggtccccaattcacaaattcttcatcttttgtatgcttagattgaaactttgagcgtgctaactgttaagttcctccatttgaattattcgaaagtaattggaatttctgtgcttgtctcttttgatttctatacagcctgtagtgagagaaacagcagaaatttgcaacagagttgaagggtacccatttgtttgagttgtaagcctttcagaaatgaagggtaccctaatttgtaatgcaagaggggattgagcaatatatcatggaggtagtgccttccagtgagtgtgaagctaaaggagtagactcctttgttgcactgggagatgagggct

SEQ ID NO: 69859 - DNA, 869 bp, Prunus persica
  Intron number 1 from transcript ppa002470m (locus ppa00247 0m.g) derived from phytozome v7.0 (chr-ID scaffold_4; pos 11546066 to 11546934)
cgtctccaagagtacggcgatcacgaatccagtcagtatgtccaggttgctttcctgtagaaccttctcgtctgttttccaagtctccatctttggtctgtttgaatattaaattcttgcactttgtttggtagctgacaaaactgatggaaaagaaaacaaatgggagtcacaccttaactgaatgataacaatatgctctcctattagcctttcgtttatgctgatttttgctttctgggaacaattaatataatctgccaattttaatttctcgtcaactaaacagagaggttcactgagctgaactgaattttttatccaatttttcaattggttgaacttatggttctgttatggctgaattaataatcttttcgcattcagaaatacactgattcacatttcctagaatataaatagagcccaaataagcatcctagcatggatcacagggctatttaaaacttttggtttcaaggaaaatgatgggtgaataacaccttatgcttgcggaaagagaaatagcccaataaaatttatcattctatgaatccaggtgatcctcatttggaattctgtatctgcaaccttttgatttttgttgatttccatgtcttgggtctccagtgatgggtgatccttacgcatgagagagtgttttaagagtataaatttgtttcatatgctaattgtttgaaattttggaatagtaatgaaccaaccaatgtatgcaaaatttgcatgctggagtagtatctttgttttgtttccatctttttgttctcttttcagtttactagcttaggtggactgtgttatggtatggtgaagagatttggtgatatgcagatttttggcctgcggaa

SEQ ID NO: 69860 - DNA, 608 bp, Prunus persica
  Intron number 1 from transcript ppa017500m (locus ppa01750 0m.g) derived from phytozome v7.0 (chr-ID scaffold_3; pos 9079448 to 9080055)
ctgttgagaggctcggcggacaagaaagtaagtttgaatttatttactaagtaaggcttagtctcttaagtcaacaccattgttgggttcagctgatcataatacaattcaaagggatgaactttctattttgagttttcttcaacaataaaagtagatatagaatttcttttctagggtcttactatttttcattttttgatacaacgatattctattttaatttaatctaaactacgaggagagagattcgaactcaggtgcagagtgaggagcatacctgatctagccaacttggctaagcccatgtctgcggttttacaattttgttagctcgcaagaaagtatagcaataaggataacttgagaggtttcatttacaaggactcaaactcagtatgcccattttgaaatatatatatatatatatatatatgataaattttattgatttatatatcactgttgaaagcttgagtcttaagttacctctcaagttttaagcatgtggatagtctaattcatatatattggtgttgtatcttttaaatttctgttttttaactgaactgaatacaggagcaactccaaaattagttcttcaattg

SEQ ID NO: 69861 - DNA, 622 bp, Prunus persica
  Intron number 1 from transcript ppb025337m (locus ppb02533 7m.g) derived from phytozome v7.0 (chr-ID scaffold_4; pos 10575632 to 10576253)
tcaagatcctgcttggtgacttctctaagcatctggtaacatctttgccttcttttttcacttttcaagatcaatttttttacagtcttgaacggatgcataattgcatgttttctttctgtgtttttctgggttcatacttcaagattgattgaaagtttgagtgaatggttaatagttaataccctgttcatggatcatatttgggtcgacttctttttaattatattgatcaatcctgaataaaatcacaattacatatgtttggttgccaagaaagtgagagaagtcggagagaaaatttatggcagctataatagcatacaactcactaagttgacttatttgactcaagctttgaccttgagatgactgagttgcttttctgtggattgtttgacaaattgtgggtgaggatgtaatgggaaattacaacaaagaaatgcttgaatgatttggaagtgtttgattattttcctgtattagtattgcgatgctattaagtttggattatgtttgttaaatgattcttgctttgttttaagcacatgtaccgtggtttttcaaaaggctattgaattttgcagcgtataccacctgcgtttatcaagaacttcaacgg

SEQ ID NO: 69862 - DNA, 566 bp, Prunus persica
  Intron number 1 from transcript ppa005987m (locus ppa00598 7m.g) derived from phytozome v7.0 (chr-ID scaffold_2; pos 23636809 to 23637374 reverse strand)
gaagataagcccctcattggcaagtctttcatcaggtaaatcaaagctgccatttccctgtttttagtttctgtttatgagccaatgagccatggatgttcttgatctgtttgttttaggggaatgaatgatgggttctcttcattctgttattggtaattgttttgattaggcaaaagtgaattattttgagtttttatctcttcaaagcttgggtttatggattgaatgtgcaatgcctctcattcagtgcttgattgatttctttcaatgagggctgataccatgacattgaaacctaggacaaaaaaagaatgaattaaaccctaatggctgtgttttggggtacccctttttgttttcctttttctgttgggcttttacaagaagacaatgagagaatgtcactgatggctgctctatgggaaattcattgattaaacatgttttatcaaatgaggtcttttgtaagtttctgtgcatgaaccaaagagtcgaatggttattcttccttgccatatgtaaattcaggtttgaatcgatcatcattcgaagaaccaaggaat

SEQ ID NO: 69863 - DNA, 1052 bp, Prunus persica
  Intron number 1 from transcript ppa003965m (locus ppa00396 5m.g) derived from phytozome v7.0 (chr-ID scaffold_7; pos 16378096 to 16379147)
aacagagtgtctctcgtgtactccgtattctgaaggtaatcagcataactgtgtaatgtatgagttatctcatatctctgcggattgcaattatgctgtttttgttgttgattatgctttaatgccaaaactgtgaatcaattaatttagtatttcttcaactgctgtttcagtattatgatatattttgcatttgttatacttttcatgcttttatgagtattagagtagttcagacattacacttttagagcctctagcctttgaatggaatggccaaatccctcctgttttggacatacatttgttacaaattctcgtgttggttaggttgttcattgtatagtatgtatgcgactgacttgtagttgatataagctacaatagtgtaggttattgtttaacgattgtaaaagactttctctcatgttattgtgcttccacattatttgattcatttatttatagtgatgcacttttttgtgttattatttattattattattattattttggttcaatttggcatgctagtagctattctctttatgtaaatatccttatgactcacaaatagactgaaaaaaagtaggaaagaatatggagatacacttattagattttaaggtttggaacatctttactactgtcccatttttcattaatctcattgataggggttgaactcctcaatgtttaggagtgtgcattatgctcaatttcaagtcattttagccaatgtcccgtatcaatatgcagtgtattttaagttctcttctcttatgctgatgtagattgatcctgaccatcagatttaattgaatggttatgatgacttgaaatgcggtttgaatgcagataagtagaatcccatagatatagtcattgaataggatttctatttcttgtcggcctacctgtattttctttttcatcttggcccctgttatacttctatagttcataaattgatcttagatatatcaaatcttaacctgaatctgggtggcaccttttttcagattgcagaacttcttgccttcaactcgtgc

SEQ ID NO: 69864 - DNA, 509 bp, Prunus persica
  Intron number 2 from transcript ppa011599m (locus ppa01159 9m.g) derived from phytozome v7.0 (chr-ID scaffold_6; pos 4782314 to 4782822 reverse strand)
ggaaacttaacatccttgtaagtacaggacaatgtgatgaaattctaagtacaaaacatcacttttttgcttattgttttattaaggattttttgtcacagagaaaattgaactggtattagcttttgtagcagacaagatgtcacagaatagattttctagttcgagtagaattaacttggaaaatttgaggatagttaaaatcgaaaaacggttatcttctcgtccattaaatttgatttcaagacccctttcaacaaagtgaagactgtgtagctagatcaaaatgttattagctaaaagtttaattagggctcgtttggtaagtgttttcgttttcacggttttagttaaaaatatgcatgggagaaagaaatgaggtagaatgcaaggaccaatgagaggagctaataaacaaggcctccctgtgttcaagtccttcaaagccccattttcttttaatttagggtcacttcactgcatatttgctgcatatttgtagataaaca

SEQ ID NO: 69865 - DNA, 874 bp, Prunus persica
  Intron number 1 from transcript ppa004572m (locus ppa00457 2m.g) derived from phytozome v7.0 (chr-ID scaffold_7; pos 20843594 to 20844467)
ttgtttttcaagcatatccagcagctcaaaaacaggtttctctctctctctctctctctctctgaatgtttagtttagctgaagtgcagagacttccaagttcttatctttaacataaattcagagtatgcattgtatagatcatggccaagctttcttttttaagagagtcttatgatttctgatctggttttggtcgtcagtctagtacgtgtgctgcagtgtagatctatgttataattctctttttgttctcatacttttgttccagatctgagtttccattgaccaatttggttgctgtaccaaaatctaataactttatgcatttattatttttattatcttataatttttgctaattagttgtttctttcttttctggtctggtatggtctggtctggttgatgtcttctttagtaagcctaaagtatttattagattttcattgatatacaaattcttcatgttttgaattatttgcttttgagtttgatctggatttaccatctgctggacaatgacattagtattagttacttggcaactctactgccaaagggcgtgaaagattcatttcagttgttacttgcgtaggctttctgtctggattttactgaagaaatatggtcatgtagatattactctgatttgaagaccacttgtttagtggtgctctgctcagtccgtctttcatttccagttactacttatgcagttgaagtcttttgttgccttttaacaatcctagtataaaccattgtgctatgctcaatgatattctgtttgagagttttatgtattgatgtatggattcgtttgctacaacttaatccatgtaacgtattggctggattttgcaggagttccacc

SEQ ID NO: 69866 - DNA, 690 bp, Prunus persica
  Intron number 1 from transcript ppa015596m (locus ppa01559 6m.g) derived from phytozome v7.0 (chr-ID scaffold_2; pos 17156681 to 17157370 reverse strand)
tgcactcgttggagtctctggccaatgtgagcgatctcaatttctataaatttcactactttatttcttgatgattatcaatttgtgtgagtttatcggcatatggttcgctttttcttgtttattggtttgtctatgccgtttggttaactgggtttttttcggtgaaatggttaactgggtttccaatgatcttagacatggagaaatctgatgaaggcaatctttaatagtattgtaaatttgaattcagcggtaagtgttaactgatatggctgttgacaattttttttccgtttttgataaagacatggctgttgacaattgacatgtatacttgtttaataaacaaaataataatttgctgaagcaattgattgacacatatactttggaatcagtgcatatgcgtatacttttggagtctcgggctaatgtacgtagttcattaagaagaatcactcgcaattattttgtactcctgtatagtcttttgtattgttaattttactgtctgtcctttttggttttcttcttcttcttctttatattatccatgtgtgggttttctttatctgcaatggtaactcataattggagaaaattcatggaatgactgcccttcaattgtgttatattttaaaattttgttatcttatctgaatgttgaaaatttgtacagggattcac

SEQ ID NO: 69867 - DNA, 946 bp, Prunus persica
  Intron number 1 from transcript ppa012623m (locus ppa01262 3m.g) derived from phytozome v7.0 (chr-ID scaffold_2; pos 25518438 to 25519383)
taaggttggttttctgttttctcagccgggtttctgctattttgtgtttttgagattggctgtgttcgtgcaaatgtgttttagttcgagtattggagcttgattggttggtggtgtagttagggttttagaggtaattttctagaaaacagttcatgaatttaatgagattcaaaagaaatttatacactttacactttgttttgttgtgatttctcgcctggttgttgggcatgggtcaaattgagttatacgtattctatgttggaggttaagtgcttacactattaatgatgcaagagacaattgaattggatattgaattttcactgaaggaatagtatacatggtgaatttttgcggtgagactagtctactctcaaatggtgtaaatgctacctaaagtagaaacttgttttggaacaaaaaatttggttcagcgcgactgggattgcaggcaatagtgtctattctcagaaatttggggaaggtgtcaacttgtggttacaaggctcccctgaaactatagaatggaaatggtatgactcttgtgctataaatggtaggagagtttaggattggatatgctgctaagtctccttatcgcatccaaaggttcttgaatagtcaattgacttgatgccatgggatagttatacaggataggaaatggtggagatggttgaaagtgggaagcttgaggttgtgggaagagatggaggtgaaaacggggtagacgaatcgctgaatacttggaagtgttcatattaccctgcaccggctctaggttttcccattcacgtggctctgtatcctcctttcttttcttcttgatgatgctctatttttttttctaaacatttttgttatatcaaatgttaccgctgttggatactgcactggtgattcaggtatctaaagaccggaccgggtaatcttgaaaagg

SEQ ID NO: 69868 - DNA, 404 bp, Prunus persica
  Intron number 1 from transcript ppa001189m (locus ppa00118 9m.g) derived from phytozome v7.0 (chr-ID scaffold_1; pos 34767809 to 34768212)
gttccgtgtccttcactcacggagactcttccaaggtacaactgatcgatgcatttgctttacacaattgtacaaaaatgcgtttttcaattagtaaatatcaagtgaattaatcaatctctgattgcttttgttgattttgaaatgctctgttcatgatctatgagtaagtgaatggacttcagttgatatgaagcttgtaacattgtcaactttagtatgtcttgtttggctgctcagatattgcaggacaaggaatgaacatttggaaaatcactatcttcttctttgtttatttgattttgctgttattttaatttcgaaagatagtttgatcttaactcaatgagtgaatgaatgtctgagcaggttttcaagccttcgaaagttgaggtattccaaga

SEQ ID NO: 69869 - DNA, 376 bp, Prunus persica
  Intron number 1 from transcript ppa004518m (locus ppa00451 8m.g) derived from phytozome v7.0 (chr-ID scaffold_5; pos 7911859 to 7912234)
tgggtttgattggtttgttttagttttcatgttaatggccccaacttgtttttgcttgacccattgttcggtttgtaaaatgatgctgggaaggtattggatttttcttttttggtaggattggcatgttggtttattgggtttgttttgatttccatgttaatggtaccaaatgtgtcttatcaaactcacttgatgtacacttatgatatttattcattggttccaaatttgtttcgatattttttatatttacaatacaactatctttctctcttgttgcaggtatgtttccatggctgacattgttgacgtatcatcattagtttcttcttctttagttcgagtcatagatttcagggtttttatatcctta

SEQ ID NO: 69870 - DNA, 237 bp, Prunus persica
  Intron number 2 from transcript ppa004461m (locus ppa00446 1m.g) derived from phytozome v7.0 (chr-ID scaffold_7; pos 18973483 to 18973719 reverse strand)
cagttatctctactgttaacccttctaacaatcaggtttgtaacttatttttaatctccattttcttcatcgatgattgattttttcttttctgttatataaagatataattttgataagaagaacttgaagatttgagttcaatcacacaaacccagaatttcaatgtttctaatatcttttttgtgcatttggatgttagcaaattgctaaagtcacggaagtgtctatagaaga

SEQ ID NO: 69871 - DNA, 165 bp, Prunus persica
  Intron number 1 from transcript ppa004461m (locus ppa00446 1m.g) derived from phytozome v7.0 (chr-ID scaffold_7; pos 18973820 to 18973984 reverse strand)
tcataagctacccagtcatcattgtttggtctccggtaattgattttcaacctcggatcatctcatgtattgatgtgctcttctcgatcttcttcttcttcgtttatttcttgttttgttttgatgtaatgaatcctaatacacagagataatgaatatgcagag

SEQ ID NO: 69872 - DNA, 748 bp, Prunus persica
  Intron number 2 from transcript ppa006507m (locus ppa00650 7m.g) derived from phytozome v7.0 (chr-ID scaffold_3; pos 21370608 to 21371355)
gtgtccttgtggtaagtttcctcttcttctctgctctgcatatcatcaccctgtttctgcttctgcttctgtttctgtttgatctttgatcattaaacattattgcacatattcattaaagttgcttttcagtgccacattttggtaccaaagttgcttttttcgaccattcaagtgaaaaaagtcaaagggagaggacactatcagtgaatatagcatgtgccctgtaattctttcaaatggcctatgatgtcacttaaactacacttaaaattagcatcttgcacgcatttaataacaaattgaaaagcaatatctttacaaaagtggatgctagaattacgctcctggaaatggctgcagatccaaaacagagggtccatgtttgcctataaagtcaataagaagaagaaagaaacagaggaaaacagagcagacttcacgctattcagattagacgtacaaatttgttcagattgttgaacaaaacttgtccacttaaataccaagtaatagtttttgtgtgcacacaaaacaaaaattggatttaagttttcaaaaagtggttcagagactctgcttctgcttctgcttctgatgaggcaaaaagaatcccatcagaaactgtcccaaaaaatgatgcaccgcctcaggcataattccatgggtgcaaaattcaagacacggataactgctcttggtaatgactataattgaggggtttctatattgtgtatgtgggtgcagg

SEQ ID NO: 69873 - DNA, 755 bp, Prunus persica
  Intron number 1 from transcript ppa005358m (locus ppa00535 8m.g) derived from phytozome v7.0 (chr-ID scaffold_5; pos 10187668 to 10188422 reverse strand)
accttcatcttgagctttggatacctcatcggctggtacgtttcttaaaaaactaatctttgattcgatgtttaaatttgaggaactgggttctttgtttgtgagttgggtaatcgaaatttaggagaagatttggtgggtagtgttattttgtgacgctggttttcttaaaaaatactcttttttttattaagtttaaagcttgtgattgtataaaacgttatttttgaggttatgaatgcaacaaaaaacagttcatgttggttgattggtatttttatggcatgatgtgtagtgtcattatttatttctttttattgatgattgaatttgatactatatgcatgtaactgtcatgcacttgaattaactccttttttttcttttaatttcttgacaatttagattaatttttagcagtcattaaagggtttaacgtactgagttttacagagcttatttgtctcattttaatgtcactgaactctttttgtgatgcattttgcattttctaatttcaatcaccttatgctctgggagaaagcacagttgcaccattaacaacatgcggagggcatagagatttttttgctgtcattgatgctaacattgttcctttaatgcttaatggtcttcaagtgataatacattatctataatgtgatagtctttataattatgtatccagagatgtattgaaaaatcttatttcagaattcttgatcgttcgtgaacatgtgtctgtatgtgtagcc

SEQ ID NO: 69874 - DNA, 579 bp, Prunus persica
  Intron number 1 from transcript ppa003265m (locus ppa00326 5m.g) derived from phytozome v7.0 (chr-ID scaffold_6; pos 1353300 to 1353878 reverse strand)
gccaagagggtccgagtccttgagctttctcgcaggcaaatttcctaatctcctaatttaattcaatattttatataattattttttgagtattataattcataattattagttggttctagttaagtagcacatgcatacctctagaatttttattttttgttgttgtacgtatcttttttctgatacaagcgatattagaaaatgagactcaaactctgtttttaatgacttgagctataagtccttacttgttcttgaacatttttataagaaatatcataagaatttgagcttttgatcatgaatgaattatggtaactgtggtttggtttgcaaagaaactagtgtttgtttaatgattctgacccttgtgacgttgtggtcccataaatgatgttacctttcatgaatggggtgttggggtccgttttgtgtggtagtggtaccatgataagaggccatttttggaaagcaaaacaaaaacagagctgaaaattgaaataacatagtttttttttttttgggggtggtttgttttcagattgaagcatcgtggccctgattggagtggtcttt

SEQ ID NO: 69875 - DNA, 975 bp, Prunus persica
  Intron number 1 from transcript ppa009709m (locus ppa00970 9m.g) derived from phytozome v7.0 (chr-ID scaffold_3; pos 596105 to 597079)
aggttttcgtgttcgattctgtgtcacctgagaaggtgatttgattgattatcctgaagttttatactgccagttgttattgttttgtctacatgggatatttgatttatgcttgtgtggcttgttactggaattagctctattggcgtgttttattaacacattatgcgcttgttgcagtgtttgtttaagctttgattgataatggttgtgctcgagatgaattgcttcaagtatttggtttattgtacattctatgaatgtcttttgattgtctaatagaattcttatgaacatgatgtttcacatgactggcgaaaatgtttgatttttacaagaaaactgatctgggaagtgtagtttttctagttacttaagtaatattgaaaatgcatctgcatactgaatttttggcatcgaagacttatacagaccttagagaatttggaatgtaatataaatatggataatggtaagatgggagaactattcttggccgcttgcatagtaaatggagtgttcctagagttctagataatattgtggaccatgtagatttgtaaatataactgtaaacacaaatgagtgaaaaatggtaaaatgggagcctattggcggacatggccatacataataaatggagtgttactagcgttctatataaaactggggagcatgtagatatgtaaacaattacgttggatcctaaacttagattgagttatatctgtacacattacagaaagtaaaagtagtaaaagactgccatgcttgttactttctggcacatgtttcaaaagtgtgcatatggaaaactgcagtctttcgaatgttcttttggtactttgaaatctataatttgtttacttgtggctattttgtcttcttagtagcttaataaagagaaagccttctgatttatttgaattaccttcctcaggttcaagctgtgttgttactattggggggccgtga

SEQ ID NO: 69876 - DNA, 685 bp, Prunus persica
  Intron number 4 from transcript ppb022735m (locus ppb02273 5m.g) derived from phytozome v7.0 (chr-ID scaffold_2; pos 20279083 to 20279767 reverse strand)
atcttatagggtgattcagtgggactagttttgacaatcaatgttccacctgtgcttgaatataagattgaagtttctattgttgcgtggaacactacactaatgaaagggcaaaaagaaaaaaaagaaaaaagaaaaaagaaaagaaggtccatgaatagtagcctcattgttagctttaatttagtaaaagacttcgtttgtaaactttggcctttctccatcgtttaacacattaataattgtttctagtagctgtgcggctatattatgtgaatatattcgattatttaaaaagtatagctgcctgactatattctttaaatatatttgaatattataatgataccagtgctactggagaatagtcatttccataattctattttttctattgtttttcttccagtttttgctggtgaattctatttaatttttcaagtcaaatgtgaagcaacgacattacaatcttctaacttacctagaatagatattataatgattccaataccttcttcttcttctgtgtttactaatatatatatagtctctttctattgagggattcttcaaataattttatttgagggacgcccttttagggtaccctactatttttttcccaatgatccaaaccatttattttttaggttttcattcatagatcatccttacaaaaaattag

SEQ ID NO: 69877 - DNA, 861 bp, Prunus persica
  Intron number 1 from transcript ppa023752m (locus ppa02375 2m.g) derived from phytozome v7.0 (chr-ID scaffold_6; pos 24413716 to 24414576)
ttcagtccctcaatccaaatttcccacttgcctgagttagttgacttagttgacttagttggagctgatgctgttatatttttcataatagtaattgtaataactcatgccattgttctagttaaattatagcttagttggtcaatgtttaaaaaattctggtttggctttgaatgggtagtaacacactgagaatttgtggtctagaatctggttttgctttaaaattttgattccttgtcatccaatttcttcccctcagctctcatacaacagtcaatgtggatcaaaatggaaatagcaaggcaagtggatttgccacttccaagtttttctaatttgtgatagactttaaaggcctcagatgtgatgattgtttgccaagtccctgtctgctacatgcggtgcagctcaactcccttttccttccgtttcatttgtcctcattactgaaaatggatgggatgggagaagacttcaaagtcaagcaagcaacaactctcatcaaggaagccttttccaaatcccaccatattaaagccaccacaacccttctcagtttcttcatcacttcccatgttcattaactctaaaactagatagttttatccaacatgaaaactttcctccaatgtttcttcctcttattcttaaatatcactactatgacaatctgtggtaaaaccatccctccagttcacagccgctgtattaaagaccaacaactatcattgctccatttgaagaaaagccttatatttaatgaagattcttattattcataccctaccaaggttatatcatggaattcgagtaccgactgttgctcttggcttggtgttacttgcagtactgacaggc

SEQ ID NO: 69878 - DNA, 669 bp, Prunus persica
  Intron number 1 from transcript ppa003995m (locus ppa00399 5m.g) derived from phytozome v7.0 (chr-ID scaffold_8; pos 16005275 to 16005943 reverse strand)
ttgctggtgctgctcttgcttacactcttgggaaggtgataattaattctctctctaaagaccatcataatgaacaacatggttttcaaatatttcccaagttcaaaagtttttatttttattttcatgaatttagaattttggtggtgaatggggttctgtttggtgacagagaaaatcaaagaaatttttttaaaaaattgcatttcattgctgtacatagaagacgtagtcattaatcattattagtattacttttcaactctattttcctcaacaacccagctaagcaaagctaagcagtcaaaccttcaagctgcgttgttctgactttttcttttttattgattgctttttgttttttgtttttttttttctcagaaaacaaggacttagcacatgatatgaattttattgaatatttttcttgtttgtacaaatccggattctgtcaatagatgatattggtgaagctgatttcttttttcccccctttgatttgattctattgggtgctaatttgaatagggcagtcagtccaaacccttttaatattttttattttatttttcacactggtaaatttgagtatctgattgtaaaccaaaattttgagaaggttggctaagcattcaaattgcttcttgttacaggaaggacgccgtgtac

SEQ ID NO: 69879 - DNA, 506 bp, Prunus persica
  Intron number 1 from transcript ppa016513m (locus ppa01651 3m.g) derived from phytozome v7.0 (chr-ID scaffold_1; pos 35839017 to 35839522)
tctacactgatcaaataatcaagggaattattgtacgtaattcatctttaaatcatgcaattcttttattatagttttggctgttttgttttttctcgaagtttcaagtaatttagtcatattatatcatgtgtatttttattaatattataacttaaaagtataattaagtcaaaagaaatgggtagctttatttgtatgatttggagtcctagtattaatgtcatagattcgatgttgttggatgctcgtactaaataattggatgagataacttaattagtagtttctgcatataaaaactgaatagtggcaagggagaaagagacataacatctaatcaaatggtggctgacgcaacttacaaaatgtcaacgcaacctaaaatgaggttattgtatatgcaagtctattgccctgaagggcagggcaagtcaacacaccttacaaaatgtcttcttgtttttgtctgtatgacaaaatgtcaactaagttaattgcaggtg

SEQ ID NO: 69880 - DNA, 489 bp, Prunus persica
  Intron number 2 from transcript ppa012723m (locus ppa01272 3m.g) derived from phytozome v7.0 (chr-ID scaffold_8; pos 13082636 to 13083124)
ctatttctgtctttgttgtaagtataagccacccatgtccacctcattcaaatattcccaataaagtagaatgatatgttgctaatctttagattttgatccaacggttggtaggtagttaaccatgaattttcatgacaatctagctaatgtaagggtatgtttagtattgcttctgcttgtagaaagtctaaaaacgcttttatgacaagtgcttttgatagtgtttgtttggtagaaaaacttcaaaatatttatgattcataaaagtgctttcttaacataaattatttttaagtgcttattaaggaatcattttttaagtgctttttaaaaaagaacttcaatatttagtaaaaatatttttatagtagaagcacttctaagagcagtcccaaatgagtcctacactaatgacaactttcaatcatatattcttcaatttgtgtggcagacttgtgaatcagccgttcaacttcggaaatcagg

SEQ ID NO: 69881 - DNA, 242 bp, Prunus persica
  Intron number 1 from transcript ppa011531m (locus ppa01153 1m.g) derived from phytozome v7.0 (chr-ID scaffold_3; pos 21343164 to 21343405 reverse strand)
aggagctcaaccctcgctcttctctctacaagcaggtcccttttttcttttcttgttcttcttgtttttactactttcttttaattgtgttttgtttttactcttatttttcttttcttgctaaacccttcattattattactattatgaattattgccttctgatataaaccaaattaaacaccttttgatgccgtttatgttttttttcttctttttgtttgtggtaatttagattgcca

SEQ ID NO: 69882 - DNA, 1000 bp, Prunus persica
  Intron number 2 from transcript ppa017235m (locus ppa01723 5m.g) derived from phytozome v7.0 (chr-ID scaffold_3; pos 5451274 to 5452273 reverse strand)
ctcttttaggcaacaggcaagtacatcacatgcaatattttgatttatacgcatatatgcattttagatagtactctcatgtttcatcccaactacttggaattctttcttatttttctttctgccatactttatcataatatactatctgctagagagtgtttagccattttgatcgatgtattgtcatgaggtggagtatggtttcctgagtctcggggttttggaatgtatttatgcatgcatggtatcaagcccggtctcctcatcatgtagcccgttctcctcgactatagggtcgaggagaacatgcttgacaccatgcatacataaatataccccgaaagcccaagactcaagaaaccatactccatctcatgaagatatatcgatcaaaatggctataaggagactccctgtaattgcttataaaacctagacaaacctagtgatttattaatgaaagttcaacacatgtcatcacaagccgaacagtggcggagccacctaaggaccacggtgggctcaggccccctctcctattttttttattttaaaatatttttacttatatatgtgtacatttgttgctttttggacctcaacccagtaaaatttgtgaccccaactgatgtcatggtgctttttatgaatttctagctctgccattgaactcgaggtgttactattacatactataccaatttacattacctaataccatacactaatctataatcaagaatataatatcgactaagtactaggtatatgagaaatttgaactgtatcaaacaatctctatatattatacataacacttctatatgcatatgtgtacacattatatgtatgtttgggatgtactgctcttttgttaggatatttttggatattttttttattttataaaaaaactcactttaattatgatactgatattgtgttccatgtatatgagctaggtggtcggctattactgcgcacttaccaaagagaa

SEQ ID NO: 69883 - DNA, 468 bp, Prunus persica
  Intron number 2 from transcript ppa024901m (locus ppa02490 1m.g) derived from phytozome v7.0 (chr-ID scaffold_4; pos 2205463 to 2205930)
gacgggcttaagaagaacgaggagaccatatcaaggtgagcggaatcatatcggtctcgtccagtttgattatcaccgaaattcgaatatcgttgaccatttctttgcgagattaattcgaatgtccttgtttggttgcttagtttcccatttcgtttacaaattgtattaaataagttgataaaactctgaaaattgaaggtacaattgcttgcttacttatttgtgttagttctgataggatttacaatatgaatctgtaacgataatttagtgaaacctaatgaacgatctttttttagttttatatgaaatgttcaaacagctactaatttaggcatttaatttaatttatttaaaattttcatgtttgaatatcttttgcttttattctgtagttatagtttcctgaattaccatttatgtgtttttgcgacagtgtggctgctgaggtcaggtctgtgattg

SEQ ID NO: 69884 - DNA, 498 bp, Prunus persica
  Intron number 4 from transcript ppa013629m (locus ppa01362 9m.g) derived from phytozome v7.0 (chr-ID scaffold_6; pos 23743708 to 23744205)
tatcccagcaacatttgaggtaccactatttttttccttttatggttttgagtgttttgtttgaaaatttagttggtgtttgaacaaatgaaatgatcagttttggtgcattgcaatttcaattattatggtccatattctattgcgttgttgcttccaacaaattttctgagttgatttttgtgtgtagaagagcttaatataacaatcacccactgctcaactagatatgtatgttgtttttctattaaacaaatacccgttgaacaaagattagaatgaaagcagcattgccttttcttcctttacttgttttcacaattatgcgatttatttggttattttatgcaaatgggtggattaatcaccaggatgtctccttaaggactgatagttttgtgagattgggtttcattattttgagagtaaactaattgcctttggtacttgcactttgccgtttcttgtagtcaccatattttcgtttgttttgcaggt

SEQ ID NO: 69885 - DNA, 943 bp, Prunus persica
  Intron number 1 from transcript ppb017730m (locus ppb01773 0m.g) derived from phytozome v7.0 (chr-ID scaffold_4; pos 18654460 to 18655402)
aaaacttctatctacattttcttgaaggattgcaggtatcatttcgattattctatgccttttcatttctttttcctgattagtttggtttgataattaaaaggttttgttgaatttagcatactagcaatggcatatattttcgataagcaacaaactctcatccatcggctaatctaaccttattattcaagctagaccagttcataatttatgtggtctttgcctgcaagagccattattcaaaatattttttattgcaatttggacaaccaatgcttggatttgaatagatgtgtaaaaccaatgcttggattctattttctgtgggcaggtttgtttttaatttggacaaacttggattagaaatagcgtcgattgcattgcctgcagcactggctttgacagccgatccaattgcttctctagttgacacagcattcattggtcaaataggtactttgcttctttttcttttcattttgaactgtgcatatgttcttccatctgaaacaagtactttttgtttttgctttaggtaacaaaaacaaatttgattgaaaaaattcaggtttctttctttaaatgacaaggatggggataaaatgaaatatactgtctacataagaggccaatgtgtaaacatatccacattcacagtccactaatagcctaatggttaacagagatgtatctcttaaccctatccttaaaaagttgaccaattaccacctgctaaatattagtcttcaatctgaaatgaaattttgtggctgaaccttgtatctttgttaaaatttacagttgtggaaagttgtgtttaaaggtccagtggagcttgctgctgtaggagtttctatcgctttgttcaatcaagcatcaagaattgcaatattacctcttcttagtgtcgcaacctcttttgttgctgaagaagatacta

SEQ ID NO: 69886 - DNA, 599 bp, Prunus persica
  Intron number 1 from transcript ppa008989m (locus ppa00898 9m.g) derived from phytozome v7.0 (chr-ID scaffold_3; pos 5164297 to 5164895 reverse strand)
aggtaattcgattctgcatattttctttcagattgtccattcttgtatggttaggacatggtcctggaaatggtcaatctgtttataacagatgaccaattccccaggaagaaaacagatgttttatgcagacatgtcaaatgatactgctgcagaggaaataccaagatcatggttttgcgggaattggatatccaatgtaatttaggttacatcacaacagagatgagcttactagttttcttaatcggattttagaaagttcacacacacacacacacacacacaccgttcttggccattctttctttttttctttggtgaaaacactccccattcttttgattaattatggtaatttaggtttatattaagactttgtgtcattttgctgaaaattttgattgaaatgaaaacactgaaatttcaaatagcatcctgttcttgcctgtgcctgctaaagatggctattttgcaagatggttataactgatactgattagaactgtacatttttattgctacatcatttatggtattcatttgaccactcattaaatgcagggttttgaggttgttctgccagataaagcaaccat

SEQ ID NO: 69887 - DNA, 522 bp, Prunus persica
  Intron number 1 from transcript ppa008843m (locus ppa00884 3m.g) derived from phytozome v7.0 (chr-ID scaffold_5; pos 12409649 to 12410170)
gatactgctcagtggccacaggtatatagatatagattttcatttttcatcatcaacccttttttcttctctctctttccatgaataatttagacaagaagcttatttattgtatgggatctttttgttctttaaatgaatggcccttttgggttctcctttgtaaagatgatggcgtgatcagtgcaagtccccactcagttggatttagtttttatcagttcttcaacatggtgtttcactttaccttttgtttaggtgataaaggaaaaaagaccccaattttcttttgtttttgtttctctcctttttcttctgttgcctgttataattttgaaaaagtgtaaagcagctgctctcttgttttgttttgcttgtccttctgctccatcttcgttaaatttacagtattctccagtggtactaggtgattattcattttcttttgtttgatctgaaatcctttccctttcttggctttttaaagggaattgtggtgaaaccaatagaagagatagtgac

SEQ ID NO: 69888 - DNA, 1008 bp, Prunus persica
  Intron number 1 from transcript ppa023600m (locus ppa02360 0m.g) derived from phytozome v7.0 (chr-ID scaffold_2; pos 9135831 to 9136838 reverse strand)
acgagcttggtataaaacccattcccagtaaacgggttagtatgttttttccttatcaattgtataattttcggaacttgtatggatagcgaaagcattttttcaatcacacaactaagtctgaggacatttttactaatcaagtaacttaagaaagttcagctgataatagcctagagaatttaaaaggccggtacagagttgaaggttcttctttattcttttgttttgttttgaaatgttcaaatacgcttgttatttccttctctgctacagaaatatactgaagatttgcatgaattttatctggtgattggtacgtaacataatcgtctattggcatttagccagctctctcttttggaaaaattgatgttgattgttttcttttgtttaaaaactataaccagaaagaaatgccctttgtattgtgttgatgtattggactacattagtggtaagacttatctgtgcttaacactcttgctcagcggtctaagtagatatttttgtgaactctaatgtaggctctataatgatggagcatgagaatggaggatgaggttaaatgtagtaagcattagataaatttagtatatgtttgtctcactgagagtgtcctttctccttgtggaggctctattcttctagtttctcttccgttttgcatcacttattgacatggattttttctccaatcccaagtagttgaaatcccttaatccgagtatttcgttctacttaatgatataaaacacagattattaccgatgattgttcacaccttttttggagcctatgttaacaagacactacaatggacgttcaaatcatatgtaacgttcaattgtggtgatactacaacacagatgcagaacttgcatgtcttttgaactagtgtacattagtgtagtaatggagctggctttgattttctggtaaaactgctatgctctgtctacttattgtcttggaactttgcttctttcagtgtctctcgttactttt

SEQ ID NO: 69889 - DNA, 421 bp, Prunus persica
  Intron number 2 from transcript ppa007386m (locus ppa00738 6m.g) derived from phytozome v7.0 (chr-ID scaffold_1; pos 31522303 to 31522723)
atataggtcagtgttaagatcataactttgaagcttgtttttgtgtgcttcaattaaatggattacatatgggtggataatggatatggagttttttgggggaagattcatactgcaaaacatgcgcccattcctaaatctttacttttgacttctctttggctacatgtaaccacatgccttcttgcttatgtgagctgtactaatcaactcaactcataataatggtatgcatatatctacacaaacaaccatttctgcaaaattctgttctccatggttttcattttatgcttctcctttcatgttttcagccttgcttttattttcctgttctcatcctatataacctactgaccatattagtccttggttgctcattgcaggtgattataagtatttgaggtttgtatttttctca

SEQ ID NO: 69890 - DNA, 542 bp, Prunus persica
  Intron number 2 from transcript ppa018824m (locus ppa01882 4m.g) derived from phytozome v7.0 (chr-ID scaffold_4; pos 7647996 to 7648537 reverse strand)
atcaaaaccttcaagcccgtttaaagacacaagtggtataattcctttgttcttgctgctgaattttttgttgttttacagttttttgatacaggtttctcacattcttatttagtacattagttgaagattaggggctgtttaagatttttttttggtcgaaaggggctgtttaagattgatgcataagtttggtggtcagttattttattatagaaggatttgcatttggaaccaaaaaccggggaaagagattctttgttcctacctgtccaaaaacctctagggttttgttcgttgttgtttgaaacacttttttgagttataagcatcatcatcatcatcatcatcatcatgtttgcaattatgaacaccactgttgcaataaatttacaattatgaacatcatcatcagcagcagcagtgcagcaggtggtgaaatcataaatttgcaattgtcaatttcctggctgtgagtaaagaattattttttctgcttgaggaaagtcccttgctccaatacctgaatccgacgcagagct

SEQ ID NO: 69891 - DNA, 549 bp, Prunus persica
  Intron number 1 from transcript ppa004827m (locus ppa00481 9m.g) derived from phytozome v7.0 (chr-ID scaffold_8; pos 16637475 to 16638023)
ggctcgaactacacgtgattagagttcgtgttcgttcaagcttttttttttaaatccaaagttggttaattttagcgaattgttgaaatcagcaattggatgtgatttatattgttgttgtttcctcaaattttgtttcttttgaacaaattttggggcacttagtttgttgctgagaaaaggaggggaaagaagaaggtcgcattgtcaaggattggagtttttgttatttgggttcggggacactataatctacacaacccaaactattttcagtatttagacagttaaattactgtaattcaataatctattttatgttactctctgtttctgatattcatacaaacttagtgttaattaggcaaaattttattgctatgatctaattcttcactcatttgattggactgatttgcaatgttgctttaggaagtgatcctagttgacatcttataaaattggtttcacaattcgcagttgctttggatggcttctagtggtttttattcataattgctgaatttttttttttcgtgaagcttgcaa

SEQ ID NO: 69892 - DNA, 591 bp, Prunus persica
  Intron number 1 from transcript ppa007012m (locus ppa00701 2m.g) derived from phytozome v7.0 (chr-ID scaffold_5; pos 10309619 to 10310209)
aggagggtaccaggtaacaaatgactttttgctatgtaatgcaattgaaatgttcatgcttctatttgatgtttgttgatgggttgttgttagttgccgcaatttatgaacttcttgtgacaattctcgagtgtttgcttaaaatgctggcatttgatttggagcaaaataaaaaaacttttagcagaataagattttatgtgtacgttaacccattatgttgtttaacatgaattgcggatataggatatatctgcagaatctatcatgcagagtagagcagaggattagttttatgattcttcttggctttttaaggcttgttgatgactgatgactttggttttcattcgattaatactttctaaaatccctagttatgtgtaatattgactatatgtatgcatattaaactctgttgttgattactgaactggttttccactggaaagggaaggatgcttgtttatttgcagctggtactgtgtgagaaattggatgatttattttggactatttcgtttacgtgctcaatgtttttgctttaatctctcagcagcgttgcaaagcatttggaatctgcaaatacaa

SEQ ID NO: 69893 - DNA, 712 bp, Prunus persica
  Intron number 1 from transcript ppa002248m (locus ppa00224 8m.g) derived from phytozome v7.0 (chr-ID scaffold_7; pos 15558617 to 15559328)
gatttggctggtaatattttaccgacttgataaaaccctctttcctctttagatgaacatgtcttaaaaacacaataattgatcctaattcctaacaagttaaagtgatcccattgtcgttacgcaagccttcacaaaattatggtcctaacatttccggaaggccatagaagcatgctccctattttggtaagtcgagtcatggcttgcatatataaatttttctttttatatttttgacgaattatttttacatgtatcaaattatgattcgaagaatatttatttataagaaatgagagggacagtatccatattacattgtttacaatgtatttgattttttaaattcagccatcactttcagtttacaatcaggacaagcacacagaaaaattgggggttgaaaatctaaagccacagatttcccaagtagtaagttaataaccaccttccgaccgaaaaacagaagaagaaagaaagcaataaccaccaccaccaccccataaaagatatttttccctcttgcgaaagtggagttgtttcgccaagagagtgccacatggctcgagaatctccatgattggtggacatttcaatccttcgaaggtgtggctcccaatcatctatatctgactccccccatattttcccacttcctcaatcctcaaactcagtctttttctttcaacagaggaaagccaaaagcttt

SEQ ID NO: 69894 - DNA, 413 bp, Prunus persica
  Intron number 4 from transcript ppa025907m (locus ppa02590 7m.g) derived from phytozome v7.0 (chr-ID scaffold_5; pos 10485429 to 10485841)
aagacgatatcatacctatattccgcaaaggagaggttggaagcaacatccttcccaatttggttttattgattgaataaaattatttcgagttcagatactagattctttgtctagtacacaggagttcacgtactttatatctcatttctaattatggcaatgaagatgcatgcattcaaaagaattttaaggcttttaaaactgtacatgactttgcttattggcatttaagttctaatttttctgaaccactttggttgcaacctaactttctaaactcttttggttctagacatttccacgtgctttttgtttgtgatttcttggatctaaaagttctttctcaaaagggaagctaattgctcttgcaagcaggaattcaacttcggtgtggagtttgtgcttcttct

SEQ ID NO: 69895 - DNA, 822 bp, Prunus persica
  Intron number 1 from transcript ppa009931m (locus ppa00993 1m.g) derived from phytozome v7.0 (chr-ID scaffold_10; pos 300523 to 301344 reverse strand)
ttggtcaaggaatttccacagcaacaccttcgaaagctccaattactctagagagtcaaaatctgtattgtgtattagaaggttactttgacacaattggcaagtcctgacagattatttgtattcgtagtccaatccggtatagtatatggtgtcctatcttggggagaaacttgtattgtatacccttatcttgcaggcaagttttttcccctatcttgttgaaaatactagtatgtgttcaatttttgtgatccaaccttctaaatgaggcctaaaggcgatggtccccaatcactcaaagaaaggcaaggggaaaaacagcctcgacgtttttcaagaatttataacaattaggcattagtttggcgagggttgaagattatattattatgcacatataattatgccttgagctctgcagcctatcaatatattattattatatatagtgtatgagaccaatggggcactataaacagcagatccaagagacttatttggaagtttgagcagacccataaagaggacaagaaacctcaccatgtctaagccaaggtaagaaattcaaaatctttctttttgtatctcaaccttattggatcttccagctgagttccagtgttagttttcttgtaacatcatttcaagtgcttgatcagttaacttggattttggatatcatattccttttcactctcacaatcacaaacaccttcaaattccatgccttaatcaaaatgcatgctcttaatataaacaaatatatacaattatgattttataggttggagggcaaggtggcccttatcacaggtgcag

SEQ ID NO: 69896 - DNA, 743 bp, Prunus persica
  Intron number 2 from transcript ppa013417m (locus ppa01341 7m.g) derived from phytozome v7.0 (chr-ID scaffold_5; pos 18375334 to 18376076 reverse strand)
ccactgaggaacccattctcagagaagcgcttaaggtactacttgttactgctactagcgcttaagtcaattcatatataaataaatcccgattaatttactcaattctgagttcccaaattccgtgtaaggtagggattttatcttgatattggtttgcttgtagtgtatgattttgtaagaggtttattctggatggtttagggttttggggggattagactgttaccaacttattcttgcatcttgataacacagcatctcatgcggatgcaaaatatggattcaaaatgtcactcttggtcttggagcataacacaacatgatcatttgctttggtatattcattagttacttcctcttgttttttcttttaaaatcttagtccaaaaaaggtctgcctgatgtagacaccactgagttatatctgtcttgtccatgtttggatagtatcatcagtagttctcttccaaatccaagtagcgtgtactacctcaatgcttgctttgttaaaagtaactctctttgatcattttcttatgacatgagctgttaaatgaagatgcattccatactatatattattcatttgttctcccagctctcccatctactgtgttttagatgatatttgccactgccactagataaaaagaattttcgatgggaatgcaacataaatggtatactattatttccatcatttctctgtatatcttgtcatttaggagccagttgcgttc

SEQ ID NO: 69897 - DNA, 875 bp, Prunus persica
  Intron number 1 from transcript ppa005888m (locus ppa00571 2m.g) derived from phytozome v7.0 (chr-ID scaffold_1; pos 39506763 to 39507637 reverse strand)
ataaggagcttgatcagttcgtatgccttttttttttttttgattgcttgtgtgaatttgtgatgacttaatttgctgacttgtgtctctcggctttgaattgttaatgagtcatcaaatttggccaatcgactataaagaatattttaaaaattggaacaattattaagcatcataatttcaatcagaacacaaattagtaagattatagtaggacagacgaattttagtatttacaaattctgcactttggaaatgagaaatttttcttcaattttgggtagagttaacgagaatcgagaaattttgttctgtgttgcacgaaagaaattttgattgtcaaaaaacgcttttaagaattttagaatcagtttcaaacagatcctaagtattgcggttaagtttaaattgttgaatttaaaacaaaaaagttatgggatttaattttcaagatgggttggagatggtggcacaagggaaggacttggcatggttgaaatgtttctggccatgagaagaaataatgagattcctgaagattttgaaaaaataggggtatagggatctgaaaaagctttaaggctacaagatatggacagtggtggtgctgacagatataatttaaacataataaaagcgagtctcgagtgacacaaccccagctttttataacaaaagaaaaaaataaacatgcgggaagacaaaagctgatattcataccacaacaagacaactcttgctctctgcaaagtcatttgctgatgttcttcacttgatccttaagcttaaacccaattaccataattaacaatatgttaacttaattttgatagtttctgattgtttctgcttgttgatgattttatagaggcatt

SEQ ID NO: 69898 - DNA, 519 bp, Prunus persica
  Intron number 2 from transcript ppa026512m (locus ppa02651 2m.g) derived from phytozome v7.0 (chr-ID scaffold_7; pos 4575412 to 4575930)
gttacattgctgagcggtatataactgaagaagttgtagagttttgcacatagcatttatttgatgttagtacagttggagtgccatcaagccagaagatgggagtttcaaagccattatcaggttgcacagtgagcttagttgatcgggacctgttgaaccatacacatctatatgtcttggagaatacggagggagtcctaccttatacctaatatgagttttgttctttaagtagccatttaaaattattccttatgtttatcttatatacaagggaccgtaatgctttatttttttcgtatcaatgtagagaaaatatgatccacatcaagaccacttatccaaaatttagaaagagaacaaagtggctgcacgataagcacaatagcactttcatttaatagctacgctttaagttatatgttattgaatagcatattgaacttttaattttcttctttctatgttagattgaattaagatatatgattaatgtggaggttcaaagtgaactta

SEQ ID NO: 69899 - DNA, 624 bp, Prunus persica
  Intron number 1 from transcript ppa012783m (locus ppa01278 3m.g) derived from phytozome v7.0 (chr-ID scaffold_1; pos 3222980 to 3223603 reverse strand)
tttttccccacctgcccttcagcccattgttgcccgtaatttctctaaccttcaatttcccatattttctctgtttttatttttctttaggaattttggtagtcatttttcatgttcttaattagataacttaaggttgtccactttgatgttttttgagtgctgagagacttcaaaatcaatttgtagaattggaaacttgatgtttatggttaaaggtagaggcttcatagaaaattgtagaaaattgttttacatgttgacaatgtgatatggcagtaaaaatgaagctcaatcttctccaaaaaaaagaaaaaaagaaaaaagaagctgaaacaattgtttcctttctttgttttggggagtgggaatatgggttcaattgcatttcctctatatagtagtaggggatagtaattttagtctggtagtggaatcaagttgaatggattgtcccataaatggggtttcttgattgctaatttagttgagaagtttcttgattgttctcatggtcatttgggtcattacaactaattgttagaatggtggaaattgatttatcttgtgaattggttaatttcttcaggtagaatttgtcctttcactgggaagaaatcaaac

SEQ ID NO: 69900 - DNA, 397 bp, Prunus persica
  Intron number 2 from transcript ppa023775m (locus ppa02377 5m.g) derived from phytozome v7.0 (chr-ID scaffold_8; pos 21094539 to 21094935 reverse strand)
tgactgcggaaccatcttttccaggttgttcaattaactcaaaaccatgattttaattaattcattcattcatgtttggacctatatataaaataaatattgcatgtgcatgaacatatatgagattatattgggatcacctacaatttcatttctggagcacacttcaaagatatatatatataaagttaggaaagaaatgtccgaccaattgaaatatatatacattcatccatatccctttctgggaccttttagtttttaagtctcaaatgatctctctcttcccaccaatgtctaattaattatatgaacaaagaaaacaaaggcaacacttgaatatcatgcatgtgtttgtgcaggagagatagctttatcacccacagagccttctgcg

SEQ ID NO: 69901 - DNA, 449 bp, Prunus persica
  Intron number 1 from transcript ppa023775m (locus ppa02377 5m.g) derived from phytozome v7.0 (chr-ID scaffold_8; pos 21095274 to 21095722 reverse strand)
cggaggcccttctggtgcccagagcaacagcagttctgtcactcaacagcagcatcagcagcagcagcagcctccacttaagaagaagagaaaccttccaggaactccaggcaaataattttcaatcaattacttgagtagtaataatatcaagtatatttctttaatttttattggcagttattattgttatggagtctaattttgcatgtgaagatggatatttgattgacttcaaaataactaaaaaaacaaatgttttctaaattgagttatcctgtaaaagaatcaaaactttttaattactgctttaagattacatgaactgtttgcttgatttcaacttttgttgtacaccaggttgttacatacatattatatatatatgctaatttaattattgtgtatgatcagatccaagtgcggaagttattgctctatccccaaca

SEQ ID NO: 69902 - DNA, 903 bp, Prunus persica
  Intron number 1 from transcript ppa002731m (locus ppa00273 1m.g) derived from phytozome v7.0 (chr-ID scaffold_1; pos 7799307 to 7800209)
actcgctcagcaacgcatcaactctgcttctgcttgttcttcctcttctttttcttcttcacataatcaccaccagctgcatcagtcttttccttccactatcaacaacagtaacaggaattgcttccaaggctcccctgcgaaacccattcccaattatcttcctaacaaggtggaacttttcttttttcctgtttccttcttgaagtttctagggtttcagagacctgattaattgacagtgttctctctttttcactttgttctttctccatttctgaattttgaattattacatgcttttggacttttaaaaaatatatatatataaaataaaagttaacaccttcattacttccattggtgtgccgtttgtcattttcttttttaggatgtgttgttatatacatttttatttggcaacaatgcaggtagcacctttgtctcctgggaccagagtattaccttcattagtcccatgtaaagtaaatcttggtcagtttcctcctttgccatttcaattgctttgaacttttctctattacttcagtgtcaaaattcatctctttccaagaaaaaaatgtgtatgacacctactttgactgcttcatttttagtgcaattgtattaataacgaatggaggttcctactcttaaaaggacaaaaatgttttttttcttcatatttaatcgttttctcttaaattttgaaaacggatcaggaagaaacatcccaccttgacaatcaccaatggttgaatcttccaatttgataccattctgaactttttgcattcaactgattatattacttgctggttgcactgttctgcctgctgacattaagtaatttctgtataactcttggctcctttcttccacttgttgccattttgcaagaag

SEQ ID NO: 69903 - DNA, 683 bp, Prunus persica
  Intron number 1 from transcript ppa008580m (locus ppa00858 0m.g) derived from phytozome v7.0 (chr-ID scaffold_8; pos 11272774 to 11273456 reverse strand)
ccgtaagtttcttaatctgttttcttttattttattttaaaagctagagtaactctatttatttgttacgcactgttctctctgggttgaattggttggtaagatcattattttattagtgtacgtgtgcatgagcatgtctatttttgaattttggtcctgaaggtctgtatgattagtttgtgcgaggtaaaatcttgaatttggctatttggtagcctacatatgatacattcatgttaagaaaacatcaaaatggatgggatttgttgattgcatgtctagttctagatagaactacatattgtaaagttacaatgccaagaaattatctgtttatcgcaatgcagctattagctaaggagattggttaattatgctcttatttggtatattgaatttacaagaacgaagagttttagtacttttcttgagatttgtttatgtcttgcttttataacttgcttatgatttaacagagctggtttagggttatttttcctgccatttactaactttttctttttctttggtctatgtgcgcgtttgggtgtctgtgttctttttcaggcccaacatggtataatgacatttactcccaattatgtttaatcattttgataccgttgcctattaattgatggttatgctttatttttggccagataacactaacgggattc

SEQ ID NO: 69904 - DNA, 938 bp, Prunus persica
  Intron number 4 from transcript ppa001309m (locus ppa00130 9m.g) derived from phytozome v7.0 (chr-ID scaffold_7; pos 7666227 to 7667164 reverse strand)
tgccagggagaagtttggcgaggtaatcatggtttgtgttagtcggttgttatatataagcatgtgaatagatttaatctacctggagcttcatcacttattcaagactttttagggtgttagtaggtttaaacatttacgctgataattgcactgaacaatcaagttgcagtctttttttttttttgaatgctaatctgctgcaatcttttaagattctagcttattatggccatccaccttaataagaaacgcaggaaaagaaaatggttaacaatacttttttttattccatacaagcaggcttcatttttaacagaaaattttgcgttctctctctctctctctctctctctctctctctatatatatatatatatatatatatatgtatatgtgtgtgtgtgtgtgtgtgtgtgtgtgtttggatttttgcagttaaccgaattagacacacacatagggtgtgtgtaagtgtttgtccattatatacatgtgtcactcacatgtgtgcatgatcaggacccccactgttcaacatgcctccatatatatatttgactattcatcatacctctgtatatgtatgtatgaattttgactatgaataccgtttcaggatgcatttttaatgtctcaacaggaaaatgatttgttttaggttttttatttaaggtgtaagtctcttgcatgttctcctcccgtcacagaagctaagtttctatatggccttgaaataaacctttctattagcatatccagtcaaagtgttgtatttgttttaagtttccatctatgtatgtacaagcctacccacttgctgctctctgttttctcttttagaaagatcgagagaaccgtcatttctttcacttccattgttttatcttttatgaagatggtactacggtctcttattgtttgatgtccttagctct

SEQ ID NO: 69905 - DNA, 321 bp, Prunus persica
  Intron number 1 from transcript ppa012616m (locus ppa01261 6m.g) derived from phytozome v7.0 (chr-ID scaffold_3; pos 1685918 to 1686238 reverse strand)
aacgctttcccgcgcgaatctgagatctctttcatgtaagaatctttgccgtctcattcctggaagattctcattcttagctttcattttcttttactggaatgaattatacccattttccttcccttcctcaactaatttcccgagaaacaaacagctcaaaatgtccttaaatgcttataaacttaagtgttcaagctctgatctttaatgggtcagcgcaagtttcaaactttacccatttttaattgctgagttgctaatgggttgctcttgtggtttacagagtgtgtgtcttgtggtttctgggtctttggaaaa

SEQ ID NO: 69906 - DNA, 462 bp, Prunus persica
  Intron number 1 from transcript ppa022636m (locus ppa02263 6m.g) derived from phytozome v7.0 (chr-ID scaffold_5; pos 15529005 to 15529466)
catgtaagtctcacaatgtatcaattccctgaagcgtctagtgctcaagaatttagtagtgtgacatctccccctacaaacacaagtggtacaattgccgattgccatctacaactatgaacggacacctctggctggcttttcagagctcagttaataatgatttttattaaaaccgacaatcaaaagtcagaattacactcttgttttttttcttggacgaacagaattgcgttcttgtaaaatttaaatacgacacatgtcacgtcgtgtaggtaatagtcatgtcaaaataattgcttcctgtcgaatagaaaaggccaaaattgcttacatttaactgaagagcaattctttgaggggccaatacccaaataatgtacttcttctcattacatgattttatgttttccttttcttgtttcagaaacgaaatatcaagacaaatatttggctcatttc

SEQ ID NO: 69907 - DNA, 829 bp, Prunus persica
  Intron number 2 from transcript ppa022636m (locus ppa02263 6m.g) derived from phytozome v7.0 (chr-ID scaffold_5; pos 15529592 to 15530420)
gaggtatccgttgtgcgtttcctaaccctccagaatggcctccattgtttcaaatacctgctcccgaatatcgctctgtgagaagtgaggttgttcctctcacagatttgccaaatggtgtgaaatttttaaggcatcaaagagaagctgatcatttagccattgatatactgagtgggctccatgcctcaattaatgatttgagtgggatttatttgtgatggttaagacagtcaaatgcaacaaatcaggcattggctgaggacttgctaaatttaagttttaacgaacaatgttaattaaaagagtggcatacaaaactcttgtcttcttttcttatttttttcccagagaagtgcatttggggacacgaagtgtctaatttctgttgaaggttttcaactttgacgccctatttagttacaagtctacgctaccacttccatattgattttgggtttcttggttatcaagtcaaagcgcttcggacatcaatggcggatgttgctggtcgccctgccaatttttggcttcagtccaatgctttgctcaggaaaaacttaacctttcaggttctccagcaaccaattaattaatttaattattcaatttagctcctgagttatgacaaagtatcaacttaattaatttaattgtcgatgatgattttgcagaaacgaaggatgtgtgccaatatagccctgattttaataccagccttcttctgctcgctctttgctttcttccaaatcgttgtggatgtgtacacgaacaaacctaatacgaaatgcggatcggatctagcagacatcgggcattttgacgattc

SEQ ID NO: 69908 - DNA, 629 bp, Prunus persica
  Intron number 2 from transcript ppa018029m (locus ppa01802 9m.g) derived from phytozome v7.0 (chr-ID scaffold_2; pos 17672358 to 17672986)
tcatcaaaacccagtttgggaaactcgatatcttggtaagtatatgatcatagctgcaggtttcttgaaaaagtttatgtctcttgaattgaactcttaatccgaacgcgatttaattgaaggagatgaaatatggaatcatatagcaaatgaaattggagaataaaaatagcaaaccaagtgttaactagcttaataaatgtcatcaagaagttaatctttgaaataattagaagtcttagggtttttgaagaacaaaataagtttcacataaactaccagttgtggaagattttaccttcaaatctaactctatgtctgccactctgtttttgtttcttggaatcttttcatatatgatatgatccctttctgtacaatttacaagtaccttagaaagatccgtggctggaattaaggggtttggcaaagtagcataattattgtgcttctttaaaggcattggcctttatggttggtatggttgtaaaaacaaagagattgtcagagtactcagaggatctatcaacttacttttcatttcattttctataaaataaaaaaatctgttcttttctttactaaaagaaaacagaaagtgaaacagttggactctgcacaggtgaaca

SEQ ID NO: 69909 - DNA, 558 bp, Prunus persica
  Intron number 4 from transcript ppa001585m (locus ppa00158 5m.g) derived from phytozome v7.0 (chr-ID scaffold_1; pos 38284976 to 38285533)
gcatttggaaggtgtgcttagaaatgcttatgttgctgttttgctaaatcaaaaacattcacatcatatgttgatgcttccctctctacatggtttgtttttaaacaaaggctttggatgtgtatcagacaccattttgagcatcaatacacactgtatttttaatgtagattaaagaacatgaactgtgtagcagaaatgagggttttgaggaaattggtagacggatagcatccatattgggggttattttgtttgagaaatatcattgttaactattattacttcaaaattgacgcataaactatctgtctaactgaataatgatggatgttgtgaagagaaggatgccatttttggtgttcttattgcatgtagataccttttctatagtaggaaaggtcaggaaaatagattaacttggctaactttcagcaactcaataagtgctgtgtgtaataaagtcacttgattaacgatttatttatggttcagcccaaaggaaaaaaaaaagatattcagggatgatggaaatttaccaattcttggtttgtgcag

SEQ ID NO: 69910 - DNA, 436 bp, Prunus persica
  Intron number 2 from transcript ppa001764m (locus ppa00176 4m.g) derived from phytozome v7.0 (chr-ID scaffold_4; pos 7671759 to 7672194 reverse strand)
actggaacaggctccggtggtgattcaatctacaagtaaggagtctgcctgagctattcagtgctatggctatttcgcagagaatattttagttgtgccaaaatattgaaatatgtttttcttcctacacttcttgcttcttttttctttcttgccttcctcacatcaacaactattactgcatgaatggctattttcacattcccactttatccatttgcacccttccctcattgcattggtaattaagtcaacgaaaggtgaatcaaagcatacaaacaaggagatgagtgaaaacaaacaaaatgggagtgtgaaaatcactaagttgcatgtgtttatagttatcaattgctgtacttaatgataagtgactacagtttttaaattactccatatactcaccttggaccacgttctattttcagatttttat

SEQ ID NO: 69911 - DNA, 621 bp, Prunus persica
  Intron number 1 from transcript ppa001764m (locus ppa00176 4m.g) derived from phytozome v7.0 (chr-ID scaffold_4; pos 7672251 to 7672871 reverse strand)
cctctgacttgtaaaaacttcttaaagctctgcaagtaagtttatcttcactaccctctaactaagactattcagtttacttttgttttacgttgtgttaatatatgtagattgaggagaggtttttttttcagttaagaaacttaacaaacaaataaatatctaagccttgagcttctttttcattttgttaaattcatgtattttctcagcagccaaattttttttttgttacttcagctatggattaaatatgtgaactttgagaacataaaactgggttcatgtggatttccattattcaatgagtcttgcgattgtatttaaactttgattaagtactagtttctattttcaattgcttacaggcttgttagggattatagagtttcttactcgccccagaaattttggcatgttattgtcatggctgattggaatataatattaagaatcagactaatgttttatggttggaatttatctctctccttgaatgcttacttttttgagtttgttgagtttaattatgaattgtattatctttctcaattttggtatatcatcttttttttttctctgttctttaatctttataatgattcaggataaagtattata

SEQ ID NO: 69912 - DNA, 688 bp, Prunus persica
  Intron number 2 from transcript ppa013066m (locus ppa01306 6m.g) derived from phytozome v7.0 (chr-ID scaffold_5; pos 15017331 to 15018018 reverse strand)
aagaaaagccagttgtctacggtacataccataatttccgttgtttctggcggtccattacccatatgaatttgtgtatttgattacgttgtcaactatcatatttatgttgaaagaagctggctttaatatgaaatctttctagaactgcaaatacgacaatttgggtatggaattccagttacatgctgattacaatgtgccaaaatatttttatttataactggagagagtttagaaaaaatttgagttacggaaaaatgttgttctcccattatgattttaatgttattacactcaacattgcaagagattttagaatcaatcatggaggtcaatgggaaaatgtcccagctgcttcatttaattgtttcattgcctactagttctggactgaaaccccagcacaaatatattccttattactcggtatacgttgcactccatgttaagtttttaaagtggtttttttattagcctcttcttaaccactatccttccgtattgtttaaaccattctgggaaaaagttacataatctcaatcttattttgacattctgatgtcatgtccttcaatgcattactgtctgtctgatgcaatctgtattgattcagtgatggatcctatttttaatacttcttttgctgtcaggtcgaagttggaaagcatctgaactgcgcctgaag

SEQ ID NO: 69913 - DNA, 463 bp, Prunus persica
  Intron number 3 from transcript ppa012880m (locus ppa01288 0m.g) derived from phytozome v7.0 (chr-ID scaffold_2; pos 24403226 to 24403688 reverse strand)
tggaagcaagatcttgcgtattcttaaagctcgtatgcctttcttttaataatatttttctatatgagtttattgcactttttagttgctacaaaaattatgaaggtttggatgttcagtgggacttgtgggattgaaacccatttctccatttatctcgattactgaggtgaagataatatatttaagcactaattgattgtatgattaggctagctcgataagattactattgtgtcttcattttgtacatttcatctctctgaaaacgtaaagaagattaagagtttggttttgatctcaaacaagtctctggcgttttcgtttttcgtttccttctaaccaaatgacagcctactttttgtttttgttttccttaaaaaagtgttatggaaaaaatttataatttccatttgttgtttggctaggtcttgctcccgaaattcctgaggatctgtaccat

SEQ ID NO: 69914 - DNA, 690 bp, Prunus persica
  Intron number 1 from transcript ppa006633m (locus ppa00663 3m.g) derived from phytozome v7.0 (chr-ID scaffold_3; pos 1493082 to 1493771)
aaattgagctcaagaaggcctctgactctcttaaagtgagtaactgtgctctgtttgtttcagtggaaagtagtatccagattttgtttttttaaaaaaatttgtgaattgtttgttgaaattagctcatgtatggtcatattgattttgtaattaatattgaaaatattagaattacagttattatagtttatccttttgggaaaagcctctgcttttctgaaaagatttcaatcaaattttatggaggcttaatcataatgcaatcttctgaatagaattgttaatcttttgggggggcacttgaaattggcgcagggaaactgtataagatggatatatttctatttggttctttgaaataagccatacaagtatgatagattttattaaagaagctaactgtgtaaatgtgaacttcactatttatgttaattttgtttttcaattcttcattggcgatttgttaaacttgcttctctgttgtcttaattgtgtttccattatttgattgatatcgccacttatcactgtttatagttaatttggggaataaatctagctggcatgaagtgttcttttgttgaatcaagttacagaatgataaagaggtcaagttatgatctccatttggttttatagtagcattttagattaattaacgtgaattacccttcatgtgcttcagtc

SEQ ID NO: 69915 - DNA, 629 bp, Prunus persica
  Intron number 2 from transcript ppa006653m (locus ppa00665 3m.g) derived from phytozome v7.0 (chr-ID scaffold_4; pos 20432029 to 20432657)
tactaataacttagctcaagtgagaagaatacttggtaagcatatcttttgctagagcgtagatatggctgagttagctttatttttctattcgttatgtgcttttgtacatgtttcgtcataagttctaaaatagttgtctatcaacagccacttatatggaagctcctgaatcaaatgcatatgtatgtggctgtctattatttatccgttacgtctttgtttatacatactttcatttgtagttaatttcttggctacaagcgctttgaagatataccatactacatctacgcagtaaataataagtcacacacatgatgctgcactgtggattttctcttgaatatgcgtcatggcggtatccatggcagagctgtagagtacttcagttcccaataacatacatccaagcttttctttggttgttgcataaccagatcaatttcctagtaccctggctatttgctagtgtttaaatttgacttgccaaaagtagacatcaataagttttgtcatcttttttcctttcactctgagtttttcattttctcttcttctcaagtttgttactttccatttaagttacctttataagtcgttctcatggtattttattaatctctcag

SEQ ID NO: 69916 - DNA, 486 bp, Prunus persica
  Intron number 1 from transcript ppa019917m (locus ppa01991 7m.g) derived from phytozome v7.0 (chr-ID scaffold_4; pos 10614490 to 10614975)
aaaaccaatatttaagtaaggtagccttgcttcttgtccttttttgtttcatgggttctatttcatatggaacacaatcaaaagatttcatagtttctagatataatttatggttctgaattggattttaagattgtaaattaaaagtagcaacaaagaaatatagtactaagggataaaccaatgtcccacatttacgcattgaacacaattttcttgctgcagattccagattcttcggaatcaacttcgttcacttcaggtttgtatcactcatatccatagttttttttcccgcccaatttattgaattgtttggctactgagaaaatggataatataagcaatgcagtctttgaataacgttctctggttccatttatttattggcaatcaaacagcagatatggcatttaatgttaacaatttttttattaaaaaaaaaacaaagtaattgatctgtttgtgtttcctcatctgttagag

SEQ ID NO: 69917 - DNA, 692 bp, Prunus persica
  Intron number 1 from transcript ppa014823m (locus ppa01482 3m.g) derived from phytozome v7.0 (chr-ID scaffold_3; pos 11399164 to 11399855)
aaaacccaggtgagtttatcaaagattgttcccttttttataattaaaatagaacctgaacttttgaccacatttagttgcttccgcagaagtttaaaccattgaaagttctagtaaccacgtttgatagctttggaagaaacccaaaagactgatatttgacttctctcactagctatcatattaaattaatgcattttgttaataagatttttgggcaaaaatcattaggttaagttgaggttagtcaatttgcaaaaggctggctgttactgttggtattagacatctttatagagttgaatttgatattatatacaatggtatgaccacaactgtcatcaattgttgcgatgaatataagagcttggtgtctttgttttttttcttctaattttaggcttcctttacacatagaaaggggaaaagtttaaaatgatatctatacacaaatatatgttcatttttcacatttctggttgttttgaagccaataagggatcgaaattcttatttagtctagcctgtatgcttgcctgtttcaagggaagattgaaacaaaagtattgagctaccaattttttatttttactaggtattagcattccagtacccaaaacttttatctgttgtattgttataaattctgatgagttgaaagtatacgacagattttgttatctatcttggag

SEQ ID NO: 69918 - DNA, 963 bp, Prunus persica
  Intron number 3 from transcript ppa013836m (locus ppa01383 6m.g) derived from phytozome v7.0 (chr-ID scaffold_3; pos 17558642 to 17559604)
agttcttcactggaggcaagggcaaaaaggaagaggtacttcagatttctttaacccataagtattaggatatgttatggttggttgtgggcttaggcatcagatatgcaaagcaacattgctgtgttttttttttttttttttatattttttatatttaataaatatattttttatatttaatattttttaattagcactgttttcgatgcagaaggatgtgtgtcgtaattttgtgttatcaatcagatatgcctttatatggctgctccctgtcgcaatctagtgagatgttgtagttttacattgtttccagcatctaggttttgttaaatctgtgcatgcttaaaaataagtaggatgccaaaaacataactagagaactcacgttgcgtctctcactttatactcttacaataaatgattgttctccttttgtcctgtcgtcacattccctgctttatattgtatgtttttggtgttatgatatagatgggcttggtaatctatagttagtggttcacctctaagaaaatttgcaagatgacactcttgtttgcaatattcaagttgttcacatatggcaattggatcacattattacggggtgttgctttgctaattgctactaatgccctacatagagctagctatggatcaggttagggaatttaggctgggtcagggtcttgtagagtacttctgtgtgaagcacgcaatgcagtgtgccttttcttctgtgtttattggttggacaatcctagtaactctaggatcagggagaaaaaaaaaactaattttgattgaaccaggtaaacatagctgagagtgtagtttagcattccagtatggagtcaccgatgtaaactattgtgttgttttgtgatgtacttttagcttttgctgactaattcttgttttggttcagaaactggcggaagcatcgcactgaggcttggagtt

SEQ ID NO: 69919 - DNA, 753 bp, Prunus persica
  Intron number 2 from transcript ppa016103m (locus ppa01610 3m.g) derived from phytozome v7.0 (chr-ID scaffold_7; pos 12440495 to 12441247 reverse strand)
aaggacatctacttgcccagggattattatactgggtaagaatgctttttatctatgcaaattctgggattttgttttaaaaaaatatgtgaaatttttgggagtactttgtggttgaattgaactaaaacttgtgaattgtgacaattgttttggtttgatctgattgtttgatgacgggaatagtaatttttttttggtatttttaaatatttattggaatttggttgtttttattgaaagtgttgaagacaccaatgaagtaataagagtactgtgttgaagacaacaatgaagtatatagagtcttgttatgaagagaccaatcaagtaagtaagagtgttcaaggtggtcttagtgtacatgaagatgtgaagaaagttggtttgaatacattgagaagaagttgaagtctggtcttagtgtacatgaagatgtgaagaaagttggtttgaacacattgagaagaagttgaagtcttgaagaatttcaacccaattttatccttgactccaacaaggttagcagccagtgatgtttccacttgaattgtataaagtctggggagctatttgtgcttatgatgctcattgtaaaacatgctggagtttcgaccatatatatggattttctgtaatacaagaaggttcagtaacattgatagaagaatgtgtgtttctattttttggttatactgactgttattgtatggttcagggagccacgtggctttggatttgttcagtttgtag

SEQ ID NO: 69920 - DNA, 691 bp, Prunus persica
  Intron number 1 from transcript ppa011367m (locus ppa01136 7m.g) derived from phytozome v7.0 (chr-ID scaffold_2; pos 24998061 to 24998751 reverse strand)
ggctgatcactccaaagttcttgctattgttgagagtatatttctctaaatcccccttcactttattatattttctttattgttaaagtttataactttatctgcttggttggtgagaaaagcaaatctcgctctgatcacttcttttattttcaccccatcatgaatctgattttcttattctttgatgacttgggattgcttgtcttgtctggcatatatgttctgtttctaattcttgagattttttgttttacttttaaataaataaataaataaaaatggtcttttaatgttattttccccatggtttttttaccaataattatttccttctgtcctcttttggttcccgcttgctttctcttattgttttgaatttcgtttccttttccctgtatttttgtagtaaatattgttttctgtatcaaattatatttcatattcttcttctttttgttagaaattatttttcagtgtcaggatttgatcgagttacctaataatgagtttaaaagttctgttagacacttcagaatttaaactccgaaagttcttccactagatggaccaaattaccattgcttttgcttgctatataatatccttggcatctcaaatttgaaagaagcttttttttttttctcctcccatagagccttctgaacctgctgccgaagagaaaagtaag

SEQ ID NO: 69921 - DNA, 365 bp, Prunus persica
  Intron number 1 from transcript ppa010758m (locus ppa01075 8m.g) derived from phytozome v7.0 (chr-ID scaffold_1; pos 46370942 to 46371306 reverse strand)
caccaaaacttcagacctgaaacctcccaacgaaggtaaacattaaacaaagggaggaaaacccagaatttaattaattaaataattgattaattgatggttttccctctttctcctcgtcatcttcttcatcttcttcttcctcatcttcttcttctttgtgctttggtactctaggcatgttgttgtgaactcgtgacctattttggttggtgggtttttctgggttttgttcactcagatctgggggccattgaatgtttaaaattgagaagaaactcagaaaatattgtgtagttttttaatgtatggaacataataatatatatgaaaagtggttggtttgaattttttttgaagggggg

SEQ ID NO: 69922 - DNA, 709 bp, Prunus persica
  Intron number 2 from transcript ppa012730m (locus ppa01273 0m.g) derived from phytozome v7.0 (chr-ID scaffold_1; pos 37029080 to 37029788 reverse strand)
caggttagctacaatttattagattgcttttttttttttttttttggggtggttttttggttttttgtgagtgcttatccaatttcagtttagctttagagcatgtatgcatatgatggtcccaagttaacaaattattactagtttaaaataaaatacatttaaagtttaatatgtgcaagtgtggtgaaactctcccttatggctgacttgggatagagggaggactattgaaacatgaggcaaatgggtaacaaggtgagaaatggagggagaatggatgtgggtgtgaggaaaagaaaacagggtttgtgttgtgaactgtagctgctatagatcttaaatttggggaggaagtagacagtgaagcctcctggaacggtgtatggtggggtttaatgacttgtattgtgttgcattacatagtgaggaattgtaacgtataccccactctgaagatgaaatcatgaaatacaaccatcacttttagaaaagactgatgccatttatggcagtgaacattctttgaatggtaaactttaatgactagcaggtatttccattatacagtatccaccctgtttctgatctcgaattgatatgatgcacacatatatatatatatatatattaatcttatggtgaaaccattttgaagaagtagatttgtgcaggcatcaagggcaaggcttttcaaggaatacaaaga

SEQ ID NO: 69923 - DNA, 965 bp, Prunus persica
  Intron number 2 from transcript ppa023449m (locus ppa02344 9m.g) derived from phytozome v7.0 (chr-ID scaffold_5; pos 9582932 to 9583896 reverse strand)
ggtttgaatcttggaaagggctgtcttggggtgtgagttattttcttttggtgcaatgtaatttttatttgattatttggatggtccatggctaaatgcataaaaaaaagaacaatgttgcctctgtttaaattatttgttctgaatgatggagcacttctaacttcattgaagtactttttagaggttgtgtacaatacttgaagttttagtaaaatggttggtaggcgattgttcccatttgtttcccattagttgtattgttggctaaatgagggtagaaatccaatagaaactatatctgccctgttgtcgaagatccttctattcgtctccaaccccacaatccaaatagaggccagcactacagaatacccaagagtaaaagcctacttgtttgccccaacataagtatatatatgcttagttgactcgctctcagcttttctcaacacaaactagtgaggagataaacaagcatagggcctccttttctttcagagcatatcacaagtattggtttatcataagccaccatacagttaccagtagtaggataaaaatcacaagtatttcttgataatggtctctttatgagctgattagaaactttactactaatggtagatttcatttacaacagtacttgtttgttaagctgtactactaatggcagtttatatccatttaactgactttacaattcaaaacgattagggtctaatcttaaagaagatggcttttaagatgggttgatatcatttttgtcagtttgtggattctgatgtagttttaagtcgaaaatttaggtttccaagtcagttgctgggatatggaggttgaggagtttatgtagagcttgctttgtagttttacaattattcaaatggcttgcctccttgattaaatttttactgatgtaattgattgatgtaggttcccctgctcggtggagcattgtgtgc

SEQ ID NO: 69924 - DNA, 645 bp, Prunus persica
  Intron number 2 from transcript ppa009010m (locus ppa00901 0m.g) derived from phytozome v7.0 (chr-ID scaffold_2; pos 22152823 to 22153467)
tgtgactgatctgcaggaggcgatccataagcgaagtaagtgctggttatgcttttcttttctgttgaacttatttaagcctggtctgttaagactgtttttctggtcaatcaacattttttaacccaaagataagattgattgagcctctatgcttaagaactgtgactttaaggcttgctgcatcatcatgtttgtttaatgcatattttaccaactttttttttttttttggacacaatcctgtacttattgtattggattgcctaaagtattttgatctatccctttttttctagatgattatcattggaatttgaaagaaaatgaagaataaatcatgggaagccatgtgtgtacagtgtggtttctttgtcttagaaatacaaatacttaaacattgttagcaaacttggaatttgggttcctggcctgaattatttgttattgacatctgttattgtctacgttaatatacgtcattattgatgcttttttcatccttatatgccttattccattagaaacttgcccctcccaaagaaatttgtataggaggttctgtgttttataaattatcgtaacatgatttcatgccttatgtcaacagccaaaaagttctatcctgcaaggcagcggcttact

SEQ ID NO: 69925 - DNA, 730 bp, Prunus persica
  Intron number 2 from transcript ppa010092m (locus ppa01009 2m.g) derived from phytozome v7.0 (chr-ID scaffold_2; pos 23952792 to 23953521 reverse strand)
caatttaaagaactctctgtaattctctctctctctctgcctctttctcacagatcaatcctctatgcattttcattttggtttcaagttctaaacatcttaattagttaatataaatgacttatactagatggacctgcaggatcagggtcatcaagattctccaatttcaccaacaagaacagctacagaaacttcatcagaggtaagcccatcaattgtgtcatcaaagctcatttcaagatgaggctagaacctaattgtaatggctgcttgtggtgcagggtagcagctctaaagttctgccacagaagattaatacagctaatagctcaccacctaaggtaaatccaccagcttatatatcgttaaccttaaaaacattaacttataaacatgatttacattaatgacttttgataatcttacaggcaagcgttccgtctcagattctaaaccgatttccacatctatgtttggatagccccccagctgctccggtgtctccaccttgtaatgttccaaattaccctgccgtctcatacatggtaattcattaacattctttttcccattttgaagggaactgttctgaataatagctttcgaattgtaaagaaaagttatgtgattttagttgctgtttcttatggctatgtgttgtttgcttccatttgaagttttagtaccagaatcatttatgatgatgattttgctaatgtttggacag

SEQ ID NO: 69926 - DNA, 498 bp, Prunus persica
  Intron number 1 from transcript ppa010092m (locus ppa01009 2m.g) derived from phytozome v7.0 (chr-ID scaffold_2; pos 23953684 to 23954181 reverse strand)
agagaaaaaaaggtgcatacgataaatatttaataaccaatttgttatatcaattttcaagtgattaatttatgcgtctaggctttcttcttgttgctgtttgatgaattgtgtcatgtgttggagaatgcatgtttctttcgatgtttgtttctttgtataagctttgttataaacttttgttcaaaataatagtacttcgtaacatcttgcagttgttaattaaattaatactgcagcagatgacataacgatgctcttcaaattggttttcagagcttatgataactaagtgaaattttaaaccaatccataatgaagtagaatcattaatgagccttgctaatgggtgctaatgaacttcttaattaacattgatggctacaaaatatataagagctttgcatatagattcttcttcaggtttggttttggctgaatttgaataaatatatgtactcagggaggccgtggaccgaggaagagcaccgggtgttt

SEQ ID NO: 69927 - DNA, 781 bp, Prunus persica
  Intron number 1 from transcript ppa009507m (locus ppa00950 7m.g) derived from phytozome v7.0 (chr-ID scaffold_2; pos 23389573 to 23390353 reverse strand)
taaatctgccaattcttacaagctcggcaaatcctgtgagttttcccctttctacttccttgattttctcgcgatcggctattttctctgtcattttccttattggtctgtttgcttgccgagaaaatgtaattggaatgataatcacagctagatgaataattggggatctcctagtgggggttattgatgtctatagccttggggcgattgcatttacccaagcgtgggttttgatcacaaatgtgtgtcttgatttaatgagagtggattttcctgcaatttttttttctccgttggatgattagtgtttcatattttagatctgataaacaaattctgttctttttgaccttttagggtttgtttggatctcctttttatggaaaggcttgaatttggtttgaattggagttcttgaattgaataatatggaaaatggatagtctttaattgagtggcttggcgctctgatgaatttgcttattggtgtaaaacgtgatggatttgattttggaaatgatgcttgaaagttggattgggttgtttaaatagattgaagtttgaaagctgcaaactttttttgttaatagcttgaatataaagctttatgtggtatgttgctgccagagaagaaacctcatatcattttggtcctgtggtggttatttcaattacagtatcactgagttgtttgaaactgaatttttttctctggccactttaattgctttttaatatttgcaatatggtatttcaggggacaaagctggagcaacat

SEQ ID NO: 69928 - DNA, 764 bp, Prunus persica
  Intron number 1 from transcript ppa012529m (locus ppa01252 9m.g) derived from phytozome v7.0 (chr-ID scaffold_1; pos 34307863 to 34308626)
tatctctcggcatcgcggcatagctgaaccgcaaagtaagtaaatttatcttcctctttcccttgttatctatatcgttgcctctgcctctaaaattaaaacctatgaagtgttatttttctcatttttgcatcactcataaatacaggagcttatatcattctgatacagattcaatataaaaaaaaattcttcaactcttttatggggttttcttctgaacttactgtttgtcacgtcttctgtagcttatttctgttaatgggttcttaagatttgattcaatatagttgctaggcttatcactctaattgggatattgagttttgaggagcagtgtgattatagctgagggattcaggaacaaaggagaaacggaaagaaaatttattttggtattggtaatgaggaaaattgcgtacttttgcatcattttggagcttaagagggttttgtagctcctcatatcagattttgtaattgggatatggcactaacttttacttaaattggtcggtaggacaattgttattgaaatcataccatatgttttggaagaagtgagtaggtgcagatgtctgtgctggaatcaaagtgcttctattctaacattggatgttgtttaaacttacagtggacttagttcaaatgaatttggtttagcaaacttgcagtttagcgtatgatttatcccttccaattttgatttgcaccatcatattcttgcaggtgcccccattacttttagagtccttaagtaagaa

SEQ ID NO: 69929 - DNA, 787 bp, Prunus persica
  Intron number 1 from transcript ppa001690m (locus ppa00169 0m.g) derived from phytozome v7.0 (chr-ID scaffold_5; pos 9085711 to 9086497 reverse strand)
gctgctggtatttttctcctcctgttctatctctttctattctttaactgctactatcttgttgaatttttgttctttaaagtgttttccgggtacccaattgcccaagttgttgaatttgggttattctgtgagattgtattcattttattttggttcttagtttaagtgaatcagagtgaatatttataaccaaaagcatgatctttttagttataataaatgaccctcatgttttgtttaggactttgctattctaatatgtctttttgagaagatatggaccgtatggtttatgtattccattgttatctatttctctgacttcattgtcaatttgcaacccgattagcgtagtgtcttcctgctatattgtagtttaatttaagtttattgaaggagattatttgaatgttctatgcatatgagtttgacatccatttaattgtctctggaacttataatgatatgaattcaatcttttggaatgtgcacaaatgatgcccttcccaacaattctgggagttagcatctccatgtttatttagctactttgatgctagatgggaacacaatattaatgtttttactgtcttttcaagggcatgttataactgaacggtgctccataataatacatttcttggtgtttctttaactgactttataactatgcctgaaaactctttgtacttttttcagtttgcttttgatttttgtaaaaatgttagtttatcagctgacatagcagagctgaatatgttttatttgtttatctgtatgacag

SEQ ID NO: 69930 - DNA, 865 bp, Prunus persica
  Intron number 2 from transcript ppa006444m (locus ppa00644 4m.g) derived from phytozome v7.0 (chr-ID scaffold_1; pos 11347163 to 11348027 reverse strand)
gtttttccttccagacatcgtcattacaatctgttagtttgtttctcaattgattgaattcagtttgagtgtgattcatttctttaaccgggtgcaattgagaatgatgtgatcctgccttgttgatgtgtgtgcttcagatgttcaaaggaaaagtaactactggagttgtcttggctgtttttggcattatgtgaaacaataatttgcacgctgtagccctaatagccctaaaatttccctggaaaatgtattctttgcactaggatagtaacatgcttctttgaatttttttggaaataagaatgtttttttttttcagcccttatttaataattaatgctttgaatgctaacggttctcactccagctaaaatttccatcatgcatttccttggcatatgataaataatatgtgtgtttgaaaatatatagaaatttggatgctttttgtgattcctggcttttgtgctgtttactaggaaatgaattattcattatttgagacagagttgattaatttcaattaaagtaagggaaaactgctttcatggcctcatttttactacaagaaataaagtctacccatctgactactgagaaaataagtagatagttgaatataacaacaaattcttttattggttggattttagaacttcagggcttggcttgtggtataagatgaatatgctgatcttagatacgatgcaaggggccaacacttccacgttattgggccagtcatgaatctgattctaatggatggttatctccccaccatttctcatctttaattgtaaaatttatattgttccctgtgcttgcaggtgtcctttcaaaatttggggctggcttattttta

SEQ ID NO: 69931 - DNA, 386 bp, Prunus persica
  Intron number 1 from transcript ppb019524m (locus ppb01952 4m.g) derived from phytozome v7.0 (chr-ID scaffold_2; pos 23356705 to 23357090 reverse strand)
ggacagtccactgtcgtttctcaaatttttgtaaggtttcaatcgacaaaacttatacgcagttttttttttgcataatttctatatatgtgagaattcactatgtcggattgtttagctttctgcattaaagggtatataaacaaagtaaatactcgttaaaatgaagaatcaaacaacctagttgaacaaaaaaagataagaagaaaagtttgatatgattatcctatacatgtatgaatttgaaaatcaatgtgtagcttttagtatggaaaaggatcattacctagctagctatatccttctcattgtgcatgtatctaacaaatgaaaattatgtgtggttgtcagggtggtataattttcggcccgtcagttctggggca

SEQ ID NO: 69932 - DNA, 798 bp, Prunus persica
  Intron number 1 from transcript ppa026063m (locus ppa02606 3m.g) derived from phytozome v7.0 (chr-ID scaffold_2; pos 21130711 to 21131508 reverse strand)
cacagctgggtcttccaaagcaagggaggaaacaggtgtgttgttagatatatttaatggtttgaattccgcaagggtagtttccaattgttgtctgtctctgtagattggtgatttattagcttcttctttctttatcttcttatttgctcatgaatttagtcacctgtatgaatgtactttgaaaggaatagctgtctatgatgggctttaaccattgaggcatgggtgcgcattccagtagcatgcaatcttgttctctttcatttaggagagattttctggctagttgtacaatgctcagttttgaaatatgtgtcggccagtgttgctttgcatctataggatactgcactgcctttgtgctatgtcatcttccaatacccaattccaactgacttggaatagtttcttttgagttattgaaaaacgtgtcgtgcaaatcatttatttttgttgctcatatatttctacattcttgcatcgacgtatgttttagattttgtttagtcagcttgtgcttgtagatctcaatcagaaatcttgtagccacttatttaggtgattgatggaaaaatttaaggtagtatactttaatttttttatgttttcagttatgcttaacagcatgttgagcatcgttgatccaaaacctcctggctcgcatatatccattgagtgatgtaatgtttctgtttcatctatttttgttagtatagttacatggggtaaaccgtctattgtacttctctttcctgtgcaggatctggtcgagagaatcttagcattagtttcagg

SEQ ID NO: 69933 - DNA, 359 bp, Prunus persica
  Intron number 2 from transcript ppa008233m (locus ppa00814 6m.g) derived from phytozome v7.0 (chr-ID scaffold_4; pos 6568305 to 6568663)
aaatttctgcaaaggttgatacggtgaggcttcgttcaaccaattagaacccaatatcttctttatgtgattaagagttttagtttcttcatctgatctggctaggtgttatacgatttggcacttcaatggtttgattttttcatcattcattatcaataaatcagacaactgctgcttggctttgtccacttccaccttttggcccagctactatggtttttacatctatggttttgtggaagtttttccttattggcatgtcacatctgtccaaaattttaaactcatgaatacattggctaatttgtctttttcttgcagcttgagaaaagagtgaacgaggttgaacgatttta

SEQ ID NO: 69934 - DNA, 263 bp, Prunus persica
  Intron number 2 from transcript ppa027082m (locus ppa02708 2m.g) derived from phytozome v7.0 (chr-ID scaffold_4; pos 3493032 to 3493294 reverse strand)
atcaagcaacttcaagtcagtctacctctcttcaggtctgtatttctttctctccatcttcccttccccatatatacctaccttcagatcatggacatattaaacttgtaattcgtatatttattcactctcatatgagtttatatgtaacttccgcatgtttgttggaaatcaaaaagaaaataattttccggtcttgtacatattacgcaatagtatttcgtgattatttttatggctatgcatgcaaattttaggaaagt

SEQ ID NO: 69935 - DNA, 634 bp, Prunus persica
  Intron number 2 from transcript ppa024741m (locus ppa02474 1m.g) derived from phytozome v7.0 (chr-ID scaffold_2; pos 11476176 to 11476809 reverse strand)
attcaacagatccaaccattaaggttcttccttcaaactcatttatttaatttaatgattttttttttttccttctgcatattctttaaccaaagttgatagaccgatatgtcatattgctctagtaaagtgtaaatctgtactaggcatttaaacaaacatgatcaatcattgatactagtaattctatcacctaatatgttaagactgtttgacaagagaatattttatattaatttatatgttgtttaaggattttttagtgtctgtgggtcaaatcttataaaagtgtttcaatgattagtctatcaaaggggaaatattagtttatgacaaagaataaaaaaagtcatcttggtcaccctcatagataaattttaaccaatcaaaatccataaactaatgtttaccaatccaaacgtgctctaaatccataaagcaacccaaccaaactcagccacgcgactttgacatcctacttttaagcattcccttttgggaaaagagtacaaagcagcaatttccccatcaaaacacataaagaccaaaactttcccaattcactcaacaaacctttaatttctgatgtgggtttttggcctgaaataaaactacaggatttggtggagctaga

SEQ ID NO: 69936 - DNA, 819 bp, Prunus persica
  Intron number 1 from transcript ppa026786m (locus ppa02678 6m.g) derived from phytozome v7.0 (chr-ID scaffold_7; pos 11617872 to 11618690)
gtcccggtattttaccctatcggccaattttggtcattgttatcaacttgatcattttagtccttgagtttgtatccattagccaatataatccattccgtccaaattatgttaaatttataaataaataaaaacattttaaaaaaaaaatctgtaattgattttaaaaaagaattaaaacccacacaaacacaacctccactccaatgttatagagtactgtaacagataaaaaatgacacaacctccactcccatgttattaaatactgtaacatacacaaatagattacattggctaccggatacaaacacaaggaccaaattggccaaattgataatacgggaacaacattggccgatgaaataaaacacaaggagcattttgctatttaagcggaagatgtgttattgatcataatgacaaatggtgttttcacttttctgcaattaattgttttaagtacctctggtttttttatacaagcaatattctactataatctaatttaaactacagtttgggggatttgaactcgagtacatagtggggaacacattcgctctaccaacttggctaagcccgtgtttgcaattatcctacgtctttaagagaatattacttattatttgagttgcttgatatagatttgagtttatggtttctgtttatgtttagttagcttttaaaggcttattcaacacctcatcatttaattgtttttttttcatttactcatctcttatttgtgccttataactctctgatcttatttccatggtttgaattctctttcatttcgactgcaattttttaggt

SEQ ID NO: 69937 - DNA, 700 bp, Prunus persica
  Intron number 1 from transcript ppa003950m (locus ppa00395 0m.g) derived from phytozome v7.0 (chr-ID scaffold_1; pos 34892914 to 34893613)
gccctattttcaggtcagtttattaatttgtgtatgtagcaagttgagcaaaccttctttttttgggaccaaatatttaggctttctagggggatgagaaaaagacaaacaattttactcaaatgaactttcatcctttttctttttttttccttgttctcaaatgagttttatctagaattttcctcagttaatcatctgagacagacttagactaccctcataaagcacaaagattatgcttatctcagaaatatgcgtaggctaggttagatacaacttacaaggaacaagctgagacttccctcccactgctgcattgtgggttagaaattggccgtaacattaccacatgaagggcaggctgaatttgccctgccaaattgactaacccactttcctttaccacgtggcttcagcccaagaaggtttcttttcaaattcatggtcttaaggtcaaacgctatgttaactgaataatcagcaaaggtagcatctgttctgttttgtgacatttctttttcatggtcttggctacaaagctgatagattgtggaaaaatatactctttccttccttctttttttcttttttatttttaaattttaggagggttggagggtgttaatcacataacaaactctatgtctcatgtcatcacgtttattttctttgattacatattttgggcaggtttcat

SEQ ID NO: 69938 - DNA, 493 bp, Prunus persica
  Intron number 1 from transcript ppa017810m (locus ppa01781 0m.g) derived from phytozome v7.0 (chr-ID scaffold_1; pos 4882531 to 4883023 reverse strand)
aggtatgcaagaatcttgcccatttgtaatgccttttcttcttaagtggttaagaaaatatgacatatatcaaaccatttatataaatatgtgtgcaaagcacttctttaagtttcaattttcggaagatttgacaataatatctgatttcagtattgagtatatagcacagttttgaatggttagcaaaatatagcttatttcgtattagtaatcacttttctatacacaaagattctgtttatatacttgatacttctttgtttgcatcagtgactggctattgttttgaaatgattgagtttcatgtacatgcctttgcattgtgcattgtgcactgtgcatttcagtatcttaagagctgtcgtatgatgaatgatggaatgtagaatgctgtggtacaacaacattcttcttttcaaaattttgtatgatttttcatgctgacttcgaaagaaataaaaaaatccctttgctgttatttaaaccagaa

SEQ ID NO: 69939 - DNA, 954 bp, Prunus persica
  Intron number 1 from transcript ppa000318m (locus ppa00031 8m.g) derived from phytozome v7.0 (chr-ID scaffold_1; pos 37007123 to 37008076 reverse strand)
cggcaaagtgtgagcacttctccatacggtaagccttttccttttgagaaatcatcattacatctgaatgtgtatatgtgctgttactcacttgttcataataaattactagggatttctagctaatgatattaactaatttatattttttcatattcaatatctcaagctctattcgaatattaactaatttggcttacttttcccccttttgaaaaatactgtattaagctattttgctgcagtattacagatagagaagtctattctctttactttttagttcactgaaaaacaacactgagttaggattgaactctttggtccaataatggttttcatgaggacccaattacgatatactagctagtatatatcttgctaattttacaaggttgtatctgaagggacacaagtacttaaacaatggggaagacatgtacgctaatttgagggacacccttatagggcccattccgtattgtatttcactaatccaaaccgtctattttgtagatactcattcaaagatcatctctgccaaaattcacttgaatccgatatcatttgaccactcaattgaattattgaaattttaatactttcttgaagcatcatgttcattgattttgtaggacacaattggatattgaaacagtttccgatttgtctaattttttgcaaggatgatctatgaatgtagacttaaaaaatagatggttttgatcgttgaaaaaatatttgtatgggaccctaaaaggtgtccctcaaataaaattatttgagggatccctcaatagaaggggactatatattttatatatatatatatatatatgttgagtattaaattttcaagatatgcagtaaatatattgattacttcaacagcacccatgcatggagcttttgtttgattgaaacttctcttttatgtttctaattgcagtggtt

SEQ ID NO: 69940 - DNA, 874 bp, Prunus persica
  Intron number 2 from transcript ppa007310m (locus ppa00731 0m.g) derived from phytozome v7.0 (chr-ID scaffold_1; pos 8061544 to 8062417 reverse strand)
gactcgtagcatttttacttgttcgtgttttcaaggtatgactgacatctttacttttggatatgcttttatttctgtttattgtttttgacatcggtgttgaaatctctgtcaagctagtttaacatgtagataggtaaccactgtcttgaatttttttatagccaatagtcaaaatgattgaatgtcatttccctgaaaaattgtttcccgctgttctcttctacccaattaccacacaaaaacacacgcagacacaccaaccattttggttttgaattttttatgactactttagttaccttaagctcttgtctgagccaatgttgttatttctgtgaggattcttacctccactgtttgttatttccttattttgctcttacaagtagttaatacacgaattatctcaaaactgatgcatcttcattcagttcaatgcttgaatttgcattttccacatgtgaatgagaaggggagtcccaaaaagatagtgggttagattaatctgtagtgggacacggcatgcaactgatgccctatatggccagagtgggacaagatttattttggaggtctcttttatatttatactttctgactggagagctttataacgcaattttgaacttgcaaatttagtttgtcagaaagtgtggggaggtacacatgctgtgcaattttcgtttcttggttcatttttccacattatgtgccaaatttgtagtttgtatttgtagtttctgttatgcatgtgtggcaaattgcatcaatagctccttatttttattgttttgttcatcttttatgcataagtgattttttatctttatttatttctctgtatcttgtgcaggttgtagctcctgtcaaa

SEQ ID NO: 69941 - DNA, 779 bp, Prunus persica
  Intron number 2 from transcript ppa009397m (locus ppa00939 7m.g) derived from phytozome v7.0 (chr-ID scaffold_7; pos 10758417 to 10759195)
aagaggaagaggaagaggaagaaattacagaagaggtatgtttcttgaattgttgtcctttttattttagtgcataattggtttagtgagcatcattttaatgtaatatgactgaaattttggattaaatgtgtggttgacatgcataatgtagaacattagatggattatgatgatttccatccaaattggaactgttattgggttaattttcagttagtgccggctctcttaaattggaaatttaactgagaacaagtcccgtcatctatgagtttcactagaatcctagataacatgataaagcaatgtggcctttatataatgttgcatattgtggaatttaaaccaaagttttgttgatcgtgtcattgatcttcctgtcggtaatcaaatttttcgtatatagttggtggtcaacaactggagacttatactgggcttaggataaacttttaggtggtctttgtaataactaggtttgaaagtttcagctttgaataatttaacaaccaagagctaatttaggatatgtgagttgatagtatccagattattgtagttctgctatgctagatactctttcttgggtgtatcaggagttgggtctatttccaggccttgtagacgatttccatccctttctgtttcttccttgtcctaatgcctttggattattactgctcgatgttacttgggaaagttgaaatatttgttatgcctggaaataacctgtgatgatggttactttctgcctgcaggatttgctagagatattg

SEQ ID NO: 69942 - DNA, 826 bp, Prunus persica
  Intron number 1 from transcript ppa009884m (locus ppa00988 4m.g) derived from phytozome v7.0 (chr-ID scaffold_1; pos 11500779 to 11501604)
tagccactgcttgttttactctccctgttgaaaaggttcggttttctcatctgggtctgttttgtttccattttttgatagctcaatttgtgagtttcttccttgggtgtcgttttccctttagttttcaatatgggttttgcgaattggatgatttgcttgtgccttttgttcgattttgtgatttatagcgttattcttttggctgtttgatttgggtatgcatctttttttgttaattgaattattgggtaggtcttacatttcgagttggggtattttgggggaggggggagggggtgtgtgtctgcagaccattgttgggattttgggtttggctgtagtcgtgtggaatatagtttcttccattagagctatgctttggtagtttacatgtttctgacattgacagttaagttagaatggaatttgggggacgagcccaatttgatgtgttggaaactgggattatgatttcaagcatgactaaaatgctgagctgaatttgattctttgttcatttctaactagattttatgtcatttgaatattaatatggatgttgctttgttgctttatagcctccccacaatctcagttttccccctagtttaaaatgtgacaatgcagtaggacttctctttcttaattgcataaattctgtcagctgctatgggaggtttatgttgcggatcacttccttgagacttttgttagcccaaaattttggctatgaagctgataccaaattcttttatttgaatatggtcctatttgtttactgataaaataactactacctgcagattttgaaggacttcttatt

SEQ ID NO: 69943 - DNA, 586 bp, Prunus persica
  Intron number 1 from transcript ppa011077m (locus ppa01107 7m.g) derived from phytozome v7.0 (chr-ID scaffold_3; pos 6397481 to 6398066 reverse strand)
gcttggccttggagtttaccactctggtgtacagggttagtgcttcttctttgctcatcatcctgttctttccttgctcttctttcttttcataatctgaagttttgttggtgtgactttgatctgtgcttgagtttgctcaagttatcctgtagttaaatccatgttttttttttgttctctttctttgtactggtttggtgggtttggttggtagattcaagttttctttggctgatgaggaaatacagaaaacaattgagttaactttttgggttttgaatgatttgcaaatatatgatataaaaatttgtctattcaatttctcgaatccgaaaacataattgtttgtgtggttcataaccccgtatcagattctggtaagaaaccaaaggttcatgaattctcttttgtttatttttcctaaatacaatgagctttacatggtattttgtttttgtccttttacatttgggatttgccctatctaatggtatgggcaaaagaaaaaaaaaaaaattttgttgtcttctttctttcaatgttaatggaggttttgatgcttttgcagttcacggtgttgaat

SEQ ID NO: 69944 - DNA, 408 bp, Prunus persica
  Intron number 1 from transcript ppa004643m (locus ppa00464 3m.g) derived from phytozome v7.0 (chr-ID scaffold_7; pos 18579214 to 18579621)
tcatcctacatatccagaaacggcgtcgatatcaggtaaaaagacttgaagttttcatgttcttatttctaaaattttgaactcttgtcgtaagtgtggggttaaacgctctttctttcattccctgtatgttgacgcatatacatgcaagttggcactcatcaaccgtaataaaagtttcaaattggcaggaaatagaaacaaaagcttttggaaacgcaaaagaatctccctgtttttatgttcttctttcttttagaaccactagttgaccaaaaaaaaaaaaaaaaaacctcccttacaccatatgccgaataactacaaaagaaataatattttccaaagtaatgattgattaacaattaatgttaaactgaattactttttgacatttaaatccatgtaggt

SEQ ID NO: 69945 - DNA, 408 bp, Prunus persica
  Intron number 1 from transcript ppa015834m (locus ppa01583 4m.g) derived from phytozome v7.0 (chr-ID scaffold_2; pos 23258452 to 23258859 reverse strand)
gttggaccaatacggctcacaggcacggtgttaaggtacatgaagttttgggctattgggattttcagtaaatatgttttggcttttgggttttcagtgatggagtgaataattgtttgtgcttggaattctgaagagcctggtacaaatggcatgactttttgttagtttaagacataggggtgagcctttgagttggtatgtacagaaattgtcgtcttttcttgtttcctgggactcagaaatgttgattacaagtcatttcgatttgtttatgtttttgcttgtgggttatggtatgttttgcttttgagccgtgtataatcccaaatagatgggttgaaaggaattgctatttgtaactttcttcattatggaatctaaggtattgggaactttcatcacgga

SEQ ID NO: 69946 - DNA, 640 bp, Prunus persica
  Intron number 2 from transcript ppa012727m (locus ppa01164 0m.g) derived from phytozome v7.0 (chr-ID scaffold_1; pos 2982006 to 2982645)
tacccaactctgcaaattgtaccagcagcttgcttgtaagctccgatctttttctcgctctctttgaattatacatgcgatgatcaagttatgttgtaaatttggatacagtgtatgttcatctggaacttgttttaaaatcattggtattagttgaaatgtttttattaagctgtttattgataaagattgaagcttgcttgtaaagtttacttatttttttggtatgtgaatttgaaatgatgatgtgggtacgcagtgaattgggaagatggaggggactgtgttcgctcctgccttggaaggattcaagactgtcaagtctgatggaggagagattctgaccaagcctttcttggaagtgtgcaagcagattctgcctgttataggttcatcattgctctcctccctgttttgttttgatcccagaaatggctttaacctctttgattccaaaactttgaaccagttttcagttttcacaatgcatgcttgtcgcttgtacatgatttttaagcataatgtttcctacccatttgttatttttacaatacgagctttgtgctttggttctgggcatgaccctttgacttaacaagtgcaattacaaattctgatgccagataagtttggagctgct

SEQ ID NO: 69947 - DNA, 1017 bp, Prunus persica
  Intron number 2 from transcript ppa012828m (locus ppa01282 8m.g) derived from phytozome v7.0 (chr-ID scaffold_5; pos 1478103 to 1479119 reverse strand)
ggctctctttcctactcccacatcggagctttcaggtttgttattatatcttcatgctctccatttcatcacaagggttgtggttacaaaaatctcaaaatttgtaaagctttaacaaagatacagatgatcagccgaataattagtagaatgacattagtgattctaaactgaagattatactgggtttagattttaatatgactaagccaaaacatatacatatacatacatcatggaataacaaatatatatatatgcatttttttttataccaaaaacacatatatatactccccatactaatttatgattactgctagaaatttcacacacttgatattcatgtgacatgttttttttttttttaaagaaaataaaaagttaccaagatcgtagtgggagaagagaataaagtaggagaattttagagtgcgtttggtatcctattcaaatagggaactcaaaaactttgatttttcttacaaacaatgagttcttaaatctatttttaagattcaaaaacttgtttggtatgcaacttgaaaactgttttcaaatcttaaaaatttgagaacttgtgggttagaaaaaaaaatatatatatattaataatttgggtgttttttagttgttcttaagtttgagtttttaaaaacaggtctaccaaacatgttttctttgttttggactcaaattctatttttgagtttaaaaaattgtaggcccttattattttttttttttaacaattaccaagttccgccgcacttcaaaaaaattatcatacacttgttccttatctattcataatatatatattttaaataaataaataaaccccaaaaagaagaatgcatgataattattttttagtgtcagtaacaactccctcatatttaatgaaaattatagcataattagaattttaggaaaaatttgttggagtgtgtaatttaataattaattttatagatagtatatatggatgatgcatgcaatgcaggtacttggtga

SEQ ID NO: 69948 - DNA, 442 bp, Prunus persica
  Intron number 1 from transcript ppa011470m (locus ppa01147 0m.g) derived from phytozome v7.0 (chr-ID scaffold_4; pos 344351 to 344792 reverse strand)
ctctgcaattctggtgttggtaatattagccggcggtatcttcatcctttcccaagtggttacagccatggttggtgtctctgattttacttatgattacggatattgaaatgatatatttgaatgtggattcattccctatatctattatgtaagtaaagtgactttttgatgcatgtcgactaggaagttcatttcctattacagtttctctagacgcaacgcaacgcaaatttggagtagtccaaagttaatttttgctttgaaatcttattgttatccaagattggcaactggtaattatttattttcattttgaagagagctatatatctctagactcagttataaagtcaagcaaacttattaacaaaagattgcataagaacaaaagatttatatattagctagcttggagcttggttggtgttggtttagcagc

SEQ ID NO: 69949 - DNA, 908 bp, Prunus persica
  Intron number 2 from transcript ppa005551m (locus ppa00555 1m.g) derived from phytozome v7.0 (chr-ID scaffold_4; pos 15074014 to 15074921)
atttccggcggcagatcttctctcctttccaacgggtaagcctccttcttctccttcttctatgtccttaaatctctttttcttaactcgattttctgttatctctttaactaattcttgtagttctctatgataggagagggccgaattgtagtaatttttttctttcgtcattcgaaaaacataattttgtgttcgtttgaatccagagttaatgcttttgccttcatccttatgtaaagtgtttttgaatagtctattgcctagaaattattttattgtcttttcctcatattgcatatatctttaaagatgtaaatgtaaaaccatgtcttttcctcatattgcttatattgcctttaaatatgtaaaaccttgtttactcaatccatgtttactacgagtcggaacccaaaagtctgcaaaacattcaggtaaaattggcgttagtttctgtgcttctctatgcttttggttttccattctagtttttaggtcattctcatgatctaatttcacaacaccgccaaccacacccgctgattttttgatcttcaattcgtcatcctctattttgtttttttcgatttattttctggtcatgaattcagctttggcatctttatttgttgtttggtgggtgcgtaaagaatagaaggaaaatagtggaaaagaagaacactttttcttcattgcaatttgttgaacaaggttttttttagtggaaaaagcagccaatcactgttgttgagtttgggttttgggaagggattgaaacactgaacagggtgatgcagtttctcagcaacccatcactgtcttagttgaaatcaatgaatcattgcattctggggtttttttttatttattttttttttttttggtagggatttgaggagagagtagca

SEQ ID NO: 69950 - DNA, 436 bp, Prunus persica
  Intron number 1 from transcript ppa006143m (locus ppa00614 3m.g) derived from phytozome v7.0 (chr-ID scaffold_7; pos 12701267 to 12701702 reverse strand)
cacttcaaatccaagtttcgctctcaagtttccaggtcatttctgaaattcctgttaattgtttatcgcatcgttgttgattcattatgtttagcttcaatttctgtgtaactgtttggttgctgggaaaatagcctagcaactgaaatcaagctcggaaatttgagttttttttttctgggatacatgagacctcaaaatgcgtaaagactcagattgaactttcccaattaaatttttttgactttcttcatatatgttggctaaagaatttaatgcaaaatccgtacttttttcgttttaattaaaaattttggatttgattcaggatcatcttaatagaaaattgttatcacaggtgtttttacagatgtttgcattttttatttgaatatttataaattcagtgcaggtttgcgttggaattaggataatc

SEQ ID NO: 69951 - DNA, 428 bp, Prunus persica
  Intron number 1 from transcript ppa003438m (locus ppa00343 8m.g) derived from phytozome v7.0 (chr-ID scaffold_6; pos 24359544 to 24359971)
gaagcaacaaccatagacccttacaaggtattgttctcattgctcttccttcattcctttcctctaatttttcctcttattccagtttaatgtgaatgaattgaatgtaaatagagcggttttgattttgaatgtggagttctatgatcgaatcacgttctaaagattttttttttcgtttcatatgcttggttttgagattgaaaagaaaagaaaatttgacaaaattgataatgaaaaaggttcaaattttagcgtattatgctgctgtggccgttatcagaatgcaatcaacacttgagataaacaaaaggaactgaatttaacgactttttttaaaagaaagaaccgataaatccttagttctatacttactcatttattagaaatggtttcaaattcttatcaggtccttggagtcgagcgga

SEQ ID NO: 69952 - DNA, 705 bp, Prunus persica
  Intron number 3 from transcript ppa004032m (locus ppa00403 2m.g) derived from phytozome v7.0 (chr-ID scaffold_1; pos 20254885 to 20255589)
ctactaaaatccaagcagcttatagaggttatgtaagctcatacttcccattgttagcattgaagggtgggggatgtctagagatgtgcaacgacaagactagaaaatgtgagagtagaattcaatactggaaaatagaattcaatgcaaatatatgccctatcatctgaaaagcaaaaggttgagttttggagaatttgttaggtaaaagctgtagattttccagttttcacaaaacgcagctgttggtataatataaggtcctgtctagaatcttgtgtttcgtttgctgactgtatatcatacagttgcaaattttatgtgcatagttattctttagaagcacaataacagttcaaagtaattggtgtgcaaaagggtatgcaggggtaggcatttgtctggtctgtttctttttgtctatcttacacaatgataatttattccgaatgtacatcatcttacagcagagttgcaaattttagttgcattttgtctatctgaattactgaactagatctcattcaaaaggagttcttcaaaaggctttgataccctaggtgtcggtaactacaagttaggaactgtgtggggccctgtttaatgaacatactctatattcatgaaaaaacttcaacccagacgagataatgtggtacttgttgtgcaggcgaggagaagctttagagctctaaagggtctagt

SEQ ID NO: 69953 - DNA, 937 bp, Prunus persica
  Intron number 2 from transcript ppa018458m (locus ppa01845 8m.g) derived from phytozome v7.0 (chr-ID scaffold_8; pos 19247498 to 19248434 reverse strand)
tcaaaatcttctgcttctacaccttcttctccagggtaatcttgcatctgattttaacccccctctccccacaatgagtcatacttcactttccccgtttcattatccgctctctctgtctctatgccggagacaatgaaacggacaataaaacgggaatagagaagttagtttttctcctccactattacataatgcaagtcttgtcagacttgtcagctggcccttgtcctttctttttgccttttttctttataatttatgttatctgttcctttcttaactcatggctcgttgctttgataatggtaaggcaaagcaaaaggacaaatattctttaactcctactgacctccgtgacactttccaagtaaaagaagaagaaaaaactctttaaactagaaagaaaaatcaaagagacagattagtgctgtatttaataatttatgacaagagggtctgagaatgtcggtcagttttaaaaaaataaattataaattcaaagtgcggattttagtatatatttctgtttgtttctcttgtgacaaaaatgtgtgacggtttgtagtgaacaggagaccgtctataatatcttgtagcattcatctgcaacgtctatgatgtcttcaataatatctttatttaaggccctaactttatatgcattatatattagaaatataattattatttttatgctaatccttaaataagattatgttttctgagtagatgcacgtaaactcattctgcatctcaactatttatatataattgctcaaaacatgatgtaaaattgctggaaaatgtggatctaaataacaaaatcctacaagaaatgtctgatagaaagatatatagcagaatatatatgtgttcatctttcaattataggaattgaagtttaatatcactttgtctggttggttgcagcttg

SEQ ID NO: 69954 - DNA, 578 bp, Prunus persica
  Intron number 1 from transcript ppa008956m (locus ppa00895 6m.g) derived from phytozome v7.0 (chr-ID scaffold_3; pos 4320568 to 4321145)
tcattatatattcttcctgctattcaccaaaagtgagtttatcagtcttatatttattagtacgtgttttttgctcaattgtctaccttaatgttgtcttccatcatgttattagttttcctcttaaggtttattttttattttttgatggagagggaatacttgagcccgtatgtcctcgtaatgaaaaatatattaggaaaatcacatttacgtaccaccctatgtttaagtatgatttccctaaggttacgacatcacaaaatatgtggctatttgcaaaatggggttcacttcaccattgcccaatttgtagctatgttggtcgaaactatttattagtctaatatataggaaaagaacagaaggaaaattcactgttcaggcttattccagtctggctctcgttcgaaaagaaaaaaatcattttgaattgagtaagactatgcatgccttttatactgaaaattatcggactaacacatttttgtttcaattttgcaactgacaaatttttacttgttgcttgtttctgtatgatttgatgggaagcagcctctttcactaactattgaggt

SEQ ID NO: 69955 - DNA, 472 bp, Prunus persica
  Intron number 3 from transcript ppa000676m (locus ppa00067 6m.g) derived from phytozome v7.0 (chr-ID scaffold_1; pos 37069474 to 37069945 reverse strand)
ggtaattctgttgaaaactattcattcttgctttttagatgtcatctccagttgtccatcttgatttgaatatttacttcattcaaaaactgaaaagtaatcaacttcgtgtttggtgccgtcaatggattggatcatcttcaattaaatgaaagaaggataacatactctaaggatgtgttcagcactttctgcaaacttttaactaaagtgcatatgttcattctttattaccaccatttcttagaagttgtccgttgttaactttttacttgggtgtcttgtatgtgacaatgtgtgtattattaaattctcaatcttctatgttttaggattctctctctgtatgccatttgttttagtagtttaaaattatcctcaattgagaatctgttatatgaatcaatgtttgtctaatatttgcaagtccattgtaggaggacaagtgggcctacaaggcgttctacaaaag

SEQ ID NO: 69956 - DNA, 727 bp, Prunus persica
  Intron number 1 from transcript ppa000676m (locus ppa00067 6m.g) derived from phytozome v7.0 (chr-ID scaffold_1; pos 37070121 to 37070847 reverse strand)
ctctgtaattcgctcttccaagctcagttcggtcagtggcttagggttttcattttgactacatttgggttttttctttattgatcccaacattttgttttgattgaattaatttgatgaagctttcctgataccccaagtttaagttatgtgagttctggatttttatgaatttgaattgtgtaaacaatttctttcctatctgatggcttaatctgctggatattgacaaatggttcattgattttcagttgaatttgagtctgatatgatctatttaaaaatttactcaatcccattttgagtttgaatatcaaggagttacttttgttgttgttgaggttgtagcggtagaattggtgaattttgcgttttggatgctttaggatataatttgctatgtttgagtttcttgggtgctttggtttctttgtaattcatgttctttctcgttatagggcatatgatgtccagtgagcatagctatacttctttgctgtgccagctttgatttgatttgtcaatgttttgcctaaacttactcattttcctgcatcaacaattcagcttgaattcttcaattctttatttttagtttgttcattcttcatggggcttcatttcttgttgtgttttatcctcaattttgagcgaaatatctcttaattttatcattgctcatgtttttccagcctgtgggttttctgtgcaacaaggtgggtcctac

SEQ ID NO: 69957 - DNA, 677 bp, Prunus persica
  Intron number 2 from transcript ppa004342m (locus ppa00434 2m.g) derived from phytozome v7.0 (chr-ID scaffold_4; pos 17667153 to 17667829 reverse strand)
tggcaatcttgaggtatgcttagccacttgtatatgttctttatttaatatttgttttgatctctaagttgtggtgtaaaaattctgacgtcatgtttacgttaagtacacaaaatttccattcaagattctcttttaatcatcccttcattgtaattccaattcaaaatacagtttttctcttctttcttcggtactttccctcattaggagatgtaatctagcatgttgagattttacattaactcctcagcatctgtatttatttatttgtttatttataaaaaaagtgtgaactcttaccccaaaaagcatgtcaaccttcactcttttatgatggtgtcttgaacactattcgttgcactgtcatcctccagattgataggatttacctgtttgccccagtcacttttatctaagctcgtgtttatagtttagggttatcgtttagaagatggtcctatgtttaggtgtaaaaggcttttcgttatgacttatgagagagatggaacagcctttgtattgtgattttcttcatcattatctgtaagcatttggttagatcggaccacataaactattgtgtcctcttgagtgattgttctgtgtttccttgatttcctttgggctttgaactgtattctggtggcgtgaccctctctctctaacttgtagga

SEQ ID NO: 69958 - DNA, 704 bp, Prunus persica
  Intron number 1 from transcript ppa004342m (locus ppa00434 2m.g) derived from phytozome v7.0 (chr-ID scaffold_4; pos 17668615 to 17669318 reverse strand)
ggattacaatagcggtaaggatttaccagtcaaagtaggaatgcatttgtgaggtgattgggcttgaagtgcatgaggtagaactgtggaatgcatagctctccttgcttaaactctcaaacattaatcccacattaatttttagagtgatattatgcaagaaatggtgcagggaaaattaagtactccagaaataattgctctgacatttcttatcagaaaaatgattactctggcattagtatgagctaagataaagtatatcctctgcttgggtacttcaaagacattacattgaataaatgaagcatttgtctcaagttcaaagattctatagaagataacgaaaatattgtctttatgttggtacattgcactattgttgctttgaatgaaaacacatgagcatgagtcacaattatgtactagtaacactatgccttgtagtattacatgtctcgtatgccttatagttgatatattgatgcataaacttctgggtacttagttcaaggactatgcatcagggcattttgttgaagatttcctcgatgtgtacttcttggtcaaacgctaatgaccatttgtattctgtgaatgatggaattgacatgctactccaatttttactgtcaaccgtaattcttttcctctgattgcgtttcctttccctttgcatccagattaagtcctttgtctttgtc

SEQ ID NO: 69959 - DNA, 328 bp, Prunus persica
  Intron number 1 from transcript ppa012410m (locus ppa01241 0m.g) derived from phytozome v7.0 (chr-ID scaffold_5; pos 5375668 to 5375995)
tacaggttagccacataaaacccaataaagtttaataatttcatttctcatctgaatctggttgagggttttcagaaagaaaaaagtgtagaattatagggattttaattattttctcagataccaaacaagaattagcagttggggatctgaggaaacccattggtttaatttttaatttgagtttttgtaaatataggtatttagatttgaaaagaaaaaaatctggatttgttttctctaataaaggcatggattctgatgggtattttgtgattggtttaaatttgcagaggtgacactccattctgtagtgaagagtgcagag

SEQ ID NO: 69960 - DNA, 297 bp, Prunus persica
  Intron number 1 from transcript ppa010222m (locus ppa01022 2m.g) derived from phytozome v7.0 (chr-ID scaffold_1; pos 22524515 to 22524811 reverse strand)
tgaagtttgcaaggctgacccttgggatttgccaggtttgtttcacatttctcaaacttcaattttgttgaattggtttcttcttattattattgtgttgtaccaaaccacaatgtcatatgcctatcaatcaaaaacccaaatcgtattaacatggaaatggtcttgaaggaagaaaattagacagagaattgaaagacagtgaaaacccaaatcgtattaagtgttgtttctgatgcatgtacggcttgtgtgggtttaggtgattgtgagcaagagaggtacttcttcagcact

SEQ ID NO: 69961 - DNA, 561 bp, Prunus persica
  Intron number 1 from transcript ppa013867m (locus ppa01386 7m.g) derived from phytozome v7.0 (chr-ID scaffold_1; pos 18597442 to 18598002)
aaggaagaagaaagaagaagaaagaaggtacccactgtcttctatctactgcatctgctgcttaccaacaacaaggttttagatgtattttttttaatgctttagcttaactcactgaaaatttacatccttcaaaatttgctgctcttgcttctggtgctggcagcaatctataaacagcatgctgctgtttcttctggtgtgaattttattaaatgaacttaaagattaaggtcatgtttgttcattgatcaaacaaggaaacccaaatgaggcttttatctatttgatatcgaactgttcccaatttgaatcatttttaaccctaacgatttataatagaacaatgagaaaacaagaaaattgttttccgtttattgtaatacttagaaatcttggtaatctgtttaatgggttgcgtttgcatatatttgttgatatagtaattttgtgtctcttctggaataaaatacatgagactgatattttagtttgattgagctctcattcctttcccactcttttcttctttaggtttcgaaactctgcagattttccgat

SEQ ID NO: 69962 - DNA, 503 bp, Prunus persica
  Intron number 2 from transcript ppa013867m (locus ppa01386 7m.g) derived from phytozome v7.0 (chr-ID scaffold_1; pos 18598006 to 18598508)
aagctgaccgtcgaattcgggtacttaatttcttttccctctactatttcacaaaattttcgaatggttctttgttcttgcaaagtacaaaaagaaaaaaaaaaaaaaatgacaatatgcaacattagagatatggctcttctatgggctattcttaaaattgactgagattgccattgtattatgcttggttgatgtggtttcttttgttattctctattttttactatgggcaaactcttgttaaaattacatgagttcctgtagacctaagttggttcagagtcatatattattattttttagtactcttgatgcttttataaggtattcatagtttgagttttggacatttcattgtttgcttttttatatggtaatccatttttactttgcgccttctgaacttgagtcaaatcatgtttgctttttttgtttttggcctgaaatcgtattttctttatgtagcggaggattagagcttctttgcaactctgtaaaga

SEQ ID NO: 69963 - DNA, 894 bp, Prunus persica
  Intron number 1 from transcript ppa009589m (locus ppa00958 9m.g) derived from phytozome v7.0 (chr-ID scaffold_3; pos 16450396 to 16451289)
cattcaagaaaatccaaatccacagaggtgatactgtgagtcttgcttctgccccatttagtcttttgcttttcttttctttctttttttcgaaattctggtattgggtttcttttttctttcaattgaggctgtatgattttttctttcgacaattttgactgatggtaaaagggaatttgatgtttttgaatgtattggggaggaaatgagatgggatttgtgtcgttttgttagatttctatgttcgagtgaattggaactatttccatttatgaaattaatgtgattgtggtggaattgtttattttattttaaagaatcatgctttatttttttctaatatgatcgggcctggattgattataaaataaatttaaaaaaattgcccatgttgtggcctcccggaaagttgtgcatcaactcttttgaggcttgtgcgttcatatctatggtttgttagtgatgttggcaaatgggtaacatccacgctaccttctcttcatgctctccaactttgttcttagatttcacttgtctctcagttttgttctattgacacatttaagcacactaagtcatactgctgaactgcaactatgaagttgattgtcttgacagattgtatttggaaaccatttcattctttcgttgcaaatgaactgaactttttaattgttgagagtatttatcccgaattgaaaagttaagggacctagcctgggtttataagaagttgggctactccccccattgccaattggttttggggtggaacctcaacttccttcattaatcgaattgttcctgataatacgtttttgtggttactagctgctactaaaacttgtttctgattgttcttcttcttttatctaattgaccaggcatttg

SEQ ID NO: 69964 - DNA, 840 bp, Prunus persica
  Intron number 1 from transcript ppa002002m (locus ppa00200 2m.g) derived from phytozome v7.0 (chr-ID scaffold_5; pos 18320226 to 18321065 reverse strand)
ctgcgtcgttgcttcctccggcatcgcctttagcggtatctatctatctatctatcatctctagactctatctcttctgatttttgtttttgttttttttaaatctatcagtctatctactaccttcattatattcattcattcattatgctttgctaattaataagctgattacattaattaacatttaacatatcgatcttctgccatccgccatctgccatccttgaagatgaagatgaagatgggatccagctagcttcattcattttgattttgttgacgtcgttaattattagtttctttctgtcatgctggcttagcttggtaaaatgacaaaatctgcttttattttaattttttttttaggaaacaaggaaattattaaaaccaaccaaccatgtttttttttcaattttttatatatttaaattggctaatgacgttagcgtgagatcagtttgcctaagttggtgaagcccagcgcttgcggccatagaaacaagattggaggcctagggtgtctcttgtccgggttggcccctccagctggcaatgctcctactaggtcgagaaaaaaaagaaaaaaaagaaaaaaaaaaaaaaaagaagagattgagtttaggcaagtggtgtggtggtggtcccaatattatatgaagataaatagtgagtggaaagatgattgaattgaaattgatggtgtattgtatcatctatcatgattcatgtatgtatgatataatgatatgccaagcttatatatttatttactcaagtacgtaatgtgtaaagtaaatgtacaaactgacaggagggtttgggagctatctgtttggc

SEQ ID NO: 69965 - DNA, 437 bp, Prunus persica
  Intron number 1 from transcript ppa008661m (locus ppa00866 1m.g) derived from phytozome v7.0 (chr-ID scaffold_3; pos 20441273 to 20441709)
ttgggtattttaaggccactgactctcctctacctgtgagagcctctttctctttcattttcttttaatgcatttgcttgtattttgattggggttttgaaaataatgtttatttttaggaatttataggtttttattttttcccttttaattgtttggcagtccagtctgaaaatatggcctgctgttgttggatccgttttgctgtataatttgcctttcttcttttttgatacaagtaacaaattttgtgcaaatctaaatactgtagggaaaaaaaaaaggtggatgctttgaagaatcaaaataaatttcatctagttgatcatgaaggaagttttgtcaccttgttatgtttctattgcatgtttccattagcatgtttatattcctagtaatcagctggaatcaatttgttttgcagacggttcccgggt

SEQ ID NO: 69966 - DNA, 311 bp, Prunus persica
  Intron number 1 from transcript ppa007692m (locus ppa00769 2m.g) derived from phytozome v7.0 (chr-ID scaffold_8; pos 16789456 to 16789766 reverse strand)
aaggttattatatatatgtatatagttaaaagaaatcaagaaaactaaaccatttaaggaagagcagccttaaaatagctagcagcaacacgtttatatttttcattcatcctgtgagctattagtttcatcatttgatttgtctgttaatgtctgcttattacatcatttgtctgcgctaatgggataagaaaaaatgtggttcctctgccatcactccctgattatcttgctataatttttcttgctcaacaaggcgtttttgcaatggatactctgattctgttttcgtgaattgcagtgggttcttc

SEQ ID NO: 69967 - DNA, 490 bp, Prunus persica
  Intron number 1 from transcript ppa010913m (locus ppa01091 3m.g) derived from phytozome v7.0 (chr-ID scaffold_1; pos 27842296 to 27842785 reverse strand)
gaagcgttgctcgtctgccaaactcagggagtcaggtaacacaaatttctccaaaattttgtttggttaacgataaaattaatggaagtttggatattttcgacgttagcattaaatacccaaattttattcctcgaatttcttagtaaccatttgtttttcttaaagtgaattttttttttgcgatcttagtaaccatcagggatcggatcgcgaagttacaatcgtcgatacttttcttacttagttagctaatctttacttaatttccgaatagcaaggtaattaaaaccgtcaataattcacaaatttgggcgcttcaatcccttgtgtgaaggttattttgaattacgtttgtttgaatgctgtattcattagtttatgtcttcttgcccagaaactgtttgtgaaaatgtttcattggcaatatctcaatttgttttgtgcttgtgaaggctaagtgttgtgctacattctgtcggtaggggtg

SEQ ID NO: 69968 - DNA, 732 bp, Prunus persica
  Intron number 1 from transcript ppa005469m (locus ppa00546 9m.g) derived from phytozome v7.0 (chr-ID scaffold_3; pos 16151361 to 16152092 reverse strand)
gcaacgttgaaggtaacaccgcgttttgatgtacccagttgggagtataacgatctgatgatggttttgtattgaaatatatctcttatgttatggttatgatattttgtgatcatgacggtgcaatgtgttatgtgtcggtttactctgggaatgtattgaattgttttgattctctgttttgttgatgtgttgatattctcatggtttcggagaactccagtggtaggtgcaatgcatattgtggattatcaaggaatttgtgtttgttcttagtgtattagttgaaaattcagaattttgttcagttgtttaaaaactttacctttttgtgaccagtgggtatttagttggtaagaagtatgatgttgatgcaagtcagattcttattggggttttgaagaatgttgttttgtatcattgtttagttgtaaattttcgattcgtttggagatttcacattatgccttcaaagtttcttttttttttggggttcactttcagaaccaattgaaaatttggttgatcctagtttactgctttattagtatcacgtttcggaagttgtaatcttttgctacttcgtgttaattcttttgaggagttctgatagattatacaatgcagattgaggctttggaatgaagatttgatttccatatgtaatttacacatctatttcttgtatccattgtagaggcattttggcggttgactatcaacgataatcaa

SEQ ID NO: 69969 - DNA, 715 bp, Prunus persica
  Intron number 1 from transcript ppa003182m (locus ppa00318 2m.g) derived from phytozome v7.0 (chr-ID scaffold_2; pos 11539942 to 11540656)
atcggtgagctttatgacatgtttatatattttgtttatgaagttttgtgcatatgatcgtacacttgttcttgtttaacttcatttgaacaaagaaattggaaaacagagttgtctaaatctgggttgatgcttatagtgtttgtgaattttcttggttatacaactgaagctgttatctaaatcagtaaatctggctttaatttttttcgttgtataaattgcttaattatccaggtagaaagaaagaaaaagttcagaaattttatagaaatacaatgaaaataaactttttgtgttctgaaaaatggatcttggaattttgctgatttatgtaatgggattttgattttgggttttaggtttatgtcacatattgttatgaactgtttgcccaaagatttattttcttgtgattttggggggtttgcttttcttttttagtgaattctgaggttagttgttgtgagaaaaagtctacggggtcgccatttcatgcattagctaagcagacttttctcttaccaatactaggttcttctccccttcctctacttttcatgtagttgacaagcaacctaggagagcattatggtaattgaatttttgataggaagctgtctgggtgtttcttcaagttaatgccctgaattttagctgtttgacccaatcgtttgatcataggtttataaatttttttgcaggatcaagaaat

SEQ ID NO: 69970 - DNA, 578 bp, Prunus persica
  Intron number 1 from transcript ppa004094m (locus ppa00409 4m.g) derived from phytozome v7.0 (chr-ID scaffold_1; pos 41847036 to 41847613 reverse strand)
tccctaacttctctgaccccttcaagctccccacggtgatccccaaacccaacccctctctgttttctcttcctttttctttcttctcttattttcggaaaaagcaaaagcaaaaaattcaatttcatgatcttttaaattctttttccttttgttgttgttgagaatttctctgtaccctcttccacaatcagtgggatttagattttgatcatcactatttgtttgtactgctgaaaatgctgttgggtttgctaattttttttaataaaaaggctgtagatttcaatcatcttttttattattaccatgtatgtgtttctggatctttgactcaatatccgagtggtttttgtttttagtttcattttgttatgtttattggggattaggtgtggatactcattgactacgattgacttcccatatggggagtttctttcataagtgtttttgtttcttaaaaagaaaaaggaaaataaaggcttttttttttgccttttacattttgtttctggaaaatattttgtgggttgatctgaattcgtgttgtatgtttttactgattttgtagcaac

SEQ ID NO: 69971 - DNA, 649 bp, Prunus persica
  Intron number 1 from transcript ppa000066m (locus ppa00006 6m.g) derived from phytozome v7.0 (chr-ID scaffold_1; pos 35572693 to 35573341 reverse strand)
gcaagcttatctctctctcatcactgcttccagaggtcagtgtgacttttactcttttgctcctctttgttcagatttatttgtttattttcgtgcaactgttgaactgtagtgcttacggcggggttagctgagttaatttttggttgttgataagcctgaagaaaagaaataggttataatgctgttttatttcatgttgagcctttggtttcttcaattactgaaactttgaagaaccagtagtagatgatgattgttagcgttatataaatcttagtgaagcatcaaaggaacttacataattagggtgtttcttgtgggttctacataaatttgcactgcatgagatcaaataggtagcatgggaatgttctgcgaacaaagtaggtgctgtttagcccattagtcttatctttcatcattaatttgcctatgttcaactactttgcttcaagctgctagttagattttcagaccaaaaaaagctgctagttagatgcgttgggccctgcacaagtgctttaatgaatgaaagagagaataagtagccttcatactgtagattataaatttttctctccaatgtggtaatcctcaggctaacttcacaggttgtacgagcgtacaacgtattgtggctgatctc

SEQ ID NO: 69972 - DNA, 741 bp, Prunus persica
  Intron number 1 from transcript ppa007588m (locus ppa00758 8m.g) derived from phytozome v7.0 (chr-ID scaffold_5; pos 16611836 to 16612576)
agaagtacatcttcaccatcgacgacgattgctttgtaagtatctatttcaacagctcgatctcttgtttgggagtttttcggatttgggtttcgagtttttggttcaaaagcatggatcttgatgggttttggctgtggatttgcgggttttgctggcttagtacagttttatttttcagttcgatgttgatttgactctatatgattgctcggtacttaaattatgttgcttttgttgtttagatctgtttctgctgtctctgtttgacttctgtgcttcgtctattttgtcaatttaacttctttttctgttgtcaatggacattgcatgatttgatctatgtttcttatgatgtatatgttattattttacatacttttgggttgatctgtttcttggcagaagccagaatctctgtaccatgagttctttcagttagtgtagagatggggtttaccaaatttacagatctctcctttgcactgtaatgggataactttcagattcacacttgaagagtttcagtctataaattttgattaagatatacgtgctgaatttcaatttcatttatctatgctttgaatcgttgtgaaaatagcatgttacggtggcccctttgtgtttcagatttcattgatatccctctaattcttgtgagaccaagttgatataactaatcatggttcttttttatgaaaatgcaggttgctaaagatccttctggcaaagatatca

SEQ ID NO: 69973 - DNA, 807 bp, Prunus persica
  Intron number 2 from transcript ppa011920m (locus ppa01192 0m.g) derived from phytozome v7.0 (chr-ID scaffold_3; pos 16408222 to 16409028 reverse strand)
ttgttctgcaggactcagcaacatttcatttgcaggttagtctcttcaccgcaaattaacttgttctgcatgtatgttctagattgattgctttgtgatataactgactacttagtaccttctctttgccataaagcgagtaattgtcccctgtttatgttagataattcattttccctgaggtgttaccttttaaggactgatattatagcaagtatcattcaatccagtatcatcgtcgcaaagttttcactttcagatcccactctccaatagacaattttttctggaagaaatgtgaagtcttgcagtattgcaaactttcctgctcacttttattctctcaaattctgtctctcaacatcatctagatgattctgtagaatgtgtgtggtttctccacactacacattttgcagttaagactgcatcaagagctcacagcctagtagatttcgttcattggaccataactgaattctggccttttctttttcctgtgccctctcactttttgtctatcttaactcgctctttaaaattgctgatttaacgtgaaggatggatttgcgtctttgatgcttgtccgtttcattcttattttggttgaacgatcatctaaataattcaaattacaaggttgtggttttcataagtttggttttagaatttaggtagtatttttggttttccaaattgggtgatgcaattatagggctgcatgaaggtttcaaatttcattcaatccttagaagcttccactgtgtatttatgtctttggcacatattatgcagattgtgcaaagc

SEQ ID NO: 69974 - DNA, 280 bp, Prunus persica
  Intron number 4 from transcript ppa005095m (locus ppa00509 5m.g) derived from phytozome v7.0 (chr-ID scaffold_3; pos 21376406 to 21376685)
agatccatcgacgaagttctgatactttccggcaggtactcaaatcatttatgtgtttttattcctttttttttttggttaggagtatctagcttgtttggcatgtagaattagtgtactggtaacattgtactatttattattattattcttatattactttattaactatccttattattagtattgttaccatttttactcttctcaaggttcgttttgacttctaattgtcgttttcttcccttttaatcattttatttactgatttttcaggtga

SEQ ID NO: 69975 - DNA, 796 bp, Prunus persica
  Intron number 1 from transcript ppa011921m (locus ppa01192 1m.g) derived from phytozome v7.0 (chr-ID scaffold_8; pos 1953423 to 1954218)
tctcactcttcctcctctccttcgggctattccaggtctgcaaaaatttagaaaatgcttttgttttatgtatatttttctgggctgagatgttatatttgtgatttctggtggcttttatttcctttccaattttgccccctgtttgattgtggattaatctttagaagggataggaggttttagggttttgaattctgactaattttgagtaaccctgattggggtttattcggtgtttaacatggatgtgtaatttattgcaatttagtgcgttgtgtagtttttgtagctaacattgaaaagtttcgaaacgacacaaccggggaaaattagcttattttcagctcaaagttgagttctcacgtgtttttcataatatatatatatatatttatttatttatataaacatgtatgtctcagtttattcaaatagattataaattaaattgtagcatgggtttcgatctggaagcttaagttttcaaagaatatgtagtggattgtattgaggaagtatggaccttgtgaggtgcgttaaacagtgtaactgatgaggactgtatgctaattgagcaaatatttgggttgctgaagtgatttgtatgttttgttatgggtttttctgctcttagaaatttaatgtgaaatcattctgttactgggcaatgtggtttagatgcaagttagaagatgttcataggctaatgcttgatggctgtttttttaacatcctttgtttattgtttaatgtcgcagtgatagttcttcagacagtgagcgtgaaacatcta

SEQ ID NO: 69976 - DNA, 561 bp, Prunus persica
  Intron number 1 from transcript ppa006979m (locus ppa00697 9m.g) derived from phytozome v7.0 (chr-ID scaffold_6; pos 26869041 to 26869601 reverse strand)
tctctcttcgctttcccactccttctggtacgctctatctctctcttgctattttgggtttcttcttcttcttcttcgtcttttttcttccatctatcgatttatttatttggtttgttctggttttggtgcctttgggattggttttgatttgggttatggttgcgatgtcattcggatacaattttgagttctgttaaccgtgtttctccttgtatcattattgtattttctctatttgggttcatgggtttttcttaagctttgtgattttacctatgcaaaagtttgtgtctttttgtgagcttaacatttgcctattgggttgcttgaaatcatatgattaaaagaaacccttttgatatgatgtataaatctatttcgtggattactctgctagcctagttgcagggtttaagtgatattagaaatctgattgattgctttcagggatgtgttttcaagaacgataaatttttgatctggaaactaatgggattcatatgctcaagtgatattgaatgaatttctcactgctgtttcctgcttttttcatagaca

SEQ ID NO: 69977 - DNA, 778 bp, Prunus persica
  Intron number 1 from transcript ppa009027m (locus ppa00902 7m.g) derived from phytozome v7.0 (chr-ID scaffold_2; pos 6008382 to 6009159)
catcaacattggttaccgccattttgattgcgctggtatttcattttctcctcaatcgtcaatcttgatgatttctctgatatgtttctttgcttatttcatgtacaagtttactctttgctgttcatatgggcggaggaaggggagtgggggtttaatttattttgtcatctgagtttgtcgaaaatggcttaattggagcatttgaagagggttttataaattatagcataaatttatttagttgcaagcacacagcacaacaatgtgacaatttgaacccaaaatatcgtctcttctccagggtgattgccagttaccaatttgtgtctgaaatgtatcacacctcttctactggcattttgacaccactgaatgccatgagtacgaaatagcttattatctggtttttggtttggtttggtttggtttttttttcctgtttacaacaacatttgaatctaggttctactcatttgcccgacctcagggcccttgagcttgaggttggttaaaaaggaaattgttttgcattctaaccttgttttgcattcaaccgatctatagtatcctcaagtccactagattccaaagttgactttgcacttaaaaatgtgatgcatgtagttactagcttaatcgccctcatccctctatatttttctttttcctgtctggccctctatggtggtaacttagttgtaggtagtagcacaaattacccattgggctgtaacatacgtgaacaagttattgttgctttcagctgattacaaaa

SEQ ID NO: 69978 - DNA, 588 bp, Prunus persica
  Intron number 1 from transcript ppa019717m (locus ppa01971 7m.g) derived from phytozome v7.0 (chr-ID scaffold_4; pos 17747714 to 17748301)
tgctaagcaagagtgcagtgaccttgaagttcacggtaggtggtttttcatgagttcttcatttaggaattaggcaccattcagttcttcgttttgataagtttgtgctaagaactgagtaggcagtcttaagatattggttttacaagaaaaagattatttacttgatcaaatccaattactaggatctcttctgcttataccctaaaaaaagatactgactcacaatttttattttccgattacaggaaaggacggtcacaaggtgagatacatgagctttgatattatatatgtgggatgtatataagttcttagtagggtaaacgaacttgccagacctctaacacgttacgtggcgagattgtgaaagagtactccacattcaaacatattgccactttattaattgtccaaattcaatctcacaacataacatgtcagattgcctaacataacatatgtgccggttagtaattgcaactaactgagcgttttgcttgtacgcttcgacagggccacgagagtggtcatggtcaccaccctgcaacagttggttcagttggggacagcattttgttgatcgta

SEQ ID NO: 69979 - DNA, 693 bp, Prunus persica
  Intron number 1 from transcript ppa013204m (locus ppa01320 4m.g) derived from phytozome v7.0 (chr-ID scaffold_8; pos 17870113 to 17870805 reverse strand)
agttccacagccccagaaaccttctcttagctctggtttgttcatctttcaaaacccataaacatgtcttcttgtcttctctcatgtcattttgtgtttggcctttactgtttgataggtgtttttctttattaataatttgtgtgatccatgaaatagggaagatccaaataatttttttagtttctgtgctattcccatattttctttcactttcatcatgggcttgtgaagatttgaccgaaataaacatagctgactcactctagctggattgttaaacaaatgggtttgcatgcgctgcaaatgggcttctttttttgtatgttttcaattatttttaaccttcttcttattaaaaccaagtttaagattttaaagttttgaacttttggcttgagtattagtgaatcatgtttaaccagagtcaaacttgacttgctttgcaaacagatgttcctttttgtttttgtcatggttttgaggcaaatgtcttagcagcccacatttttgtgttttcttgcccccttgtgcttttttttttgtgctttttaaattgttgtcattcacagaaagttaaaacaatcagaaggctaaattttttttgttcatgttgagttgatgtaataaaggttgggcctttctgatgaaatctcaggtgggtgaagttggagagctatctgagatattcca

SEQ ID NO: 69980 - DNA, 455 bp, Prunus persica
  Intron number 2 from transcript ppa018129m (locus ppa01812 9m.g) derived from phytozome v7.0 (chr-ID scaffold_1; pos 6046584 to 6047038)
gctaccagcaaccacttgcagcccctccacccaaggttgataacataactcttacatccacactactaacaaaaagttcaataggcatagataattttgttcataaatagagtttgtattggcatttttcgtgaaggagcaccaacagtgtgcgaatataaatttggacacaaatacctggccattcgtgtgattttctctctatgtgcatgttgtcgtttctttagttgatgttgtatgtttctttccactatatagattagattgttatcctttcataagaaggtttttttttcttctcattaaagtttggtacgtaacatatattaattctgattttggtattttgattagctagacacagttttttgtattaatacataggtaggtacaaagttgtacataggtgtatttacatttgtaggtacactaatatacctatttcaattcaggtc

SEQ ID NO: 69981 - DNA, 623 bp, Prunus persica
  Intron number 2 from transcript ppa004237m (locus ppa00423 7m.g) derived from phytozome v7.0 (chr-ID scaffold_2; pos 15152501 to 15153123)
caaagcccaattccagcgaatccgcaccgttggtacccatcattctcttgtagcattcaaattgtttatttttacagtgatttaattaatattttcgcagaaagaattacattttgaaagcttagctcatgtttatttgtgcaatggaaggagaatgataattatattacgaaagttttgatcttcctgagattttgataaactattttagtgtagttttacgagaatatggtattatttcaaagcaccaatactagcttctagcaagcattgttattggactctggggtaccagttgctgattgtgtctaatctctatccttatgtatgaagaaatgacaaaattagacgatgcaaccagtgggttttgtggcctgaatctgattgtgtatttcacttcgaatttttttattaaaaaaaaattaagaaatctcttcatggaattggcaaatatttagccccttcattttatttatttatacagttttctccaattatcaagctttggtgatgtcttctgtttattgcacttcttctttatgttgtattgttacgtaaaagaaaattttccaaatgttaattccttgctcatttttaacagctcctgttttttcaggctcaga

SEQ ID NO: 69982 - DNA, 818 bp, Prunus persica
  Intron number 3 from transcript ppa004237m (locus ppa00423 7m.g) derived from phytozome v7.0 (chr-ID scaffold_2; pos 15153215 to 15154032)
ttcattattcacacgctgtttctctgactattctggtaatcatactgttccatatggagattgcttcagttttttattctcttgtttatccttctttatattttcctagcctgttgtggaagtgactaatgtggaggtggggagttggttatcagatgtattaacctggaaaagtatgcacgttattacccataatagcttcgctctgtagacttccattagtttggatttttatgattattattattttggtatttccctaagtacagttttcttagttttactagttttctaccatgccgacattaatatcttacaagatcaaccaaactacttgaatataattttctctggagaatgaaactgtattttgcagaagtacatgccttataagacattagactagcagagttcgtatattatctgcagaccttagcatgaatatttttgctaggtatcttccttttccatttttttcactagttgaaacttgaaatggagcataattctaatttaaagtttgatcagataatgtaatcgatcctttttcatctgagtcctttcaaccttactcgcatctctgagtagaatttgatgatgtggcacatttgaaataagcttctcgcatgccccttatgtagttttcttttcatttgtccttactaattattaacttatgattattatgaattttatattttacttgcatgcatctatttttctgagttgtcatgagcattggatcttagattgatctagttaaatgtctctgctattttgcagcagatctgtcttctagcgattcaggggtttcaaat

SEQ ID NO: 69983 - DNA, 591 bp, Prunus persica
  Intron number 4 from transcript ppa009480m (locus ppa00948 0m.g) derived from phytozome v7.0 (chr-ID scaffold_1; pos 40047030 to 40047620 reverse strand)
attcaaacctccttttaagatttatctatctcttggtatgtatgtagattttactttgaacaattgagcttgattttaaaattaactttaccttgagtctggtttatttcaatgaaatggcactacacagcattaagtcaatacgtggaaacagagataagatatgcattatttgtgcgagcatgtgtccttatgccttgtactgacaatagatgatgtacactcggggtgtctttgtgtattactccttaactaatattagtctgagtgtctttgtgtattacatggatatctgtgtgtattctctgagggaaacataaaatgtgaacttcttatcaatttctgaacacaagctttatcaaatcaaatatcaagtgttgagcccaaacaagatgctgatatggagttcctatttggcacttgatatttatatttttctcaaataaggctaaaaacttatagttattgaaggtataagcttttatgatggctgctctcctggtaccatatttctttgtttttcatgctcagtgcatttctattctccaattgacagaagaactgaagaaacttcgaaagctggttattaat

SEQ ID NO: 69984 - DNA, 953 bp, Prunus persica
  Intron number 1 from transcript ppa009480m (locus ppa00948 0m.g) derived from phytozome v7.0 (chr-ID scaffold_1; pos 40048520 to 40049472 reverse strand)
ccgtcactttgtctcactcgaaaccagctgaggaggtaaagctactctctttctcattctccattgctgattgagctgtttctcttcttctcaatttttattttgtttgattttatgatgaaagatgcgggtagctttggttttatctgacttgggtcttctattaaggatgtgggtgagcttgatttagggttacccataaatttttcatgatttcgaatttggtttgattttggcatctcgttgtttttccagttttgggttggatcagttttagattcgcatattaaacgattgcttcaacattgttttagcaaattttagttctaaattcagagggcatgtctatgtatcgtttgcggttgttgttacctaactccccctaagtgtccatttgaaccttttgttaggggttaatttcaatttaggcttttaaacatagcatttatagggttttaattgatttttgaattggactcgttgttttatttcagatttcagccatttggttttcctcttgttgttagcttaaataatacaagtgattaacaggttgtgtaaactgtgggtaatgtcgtaaaatgaaggggactctggcaaaattctgaccgaggaaaattggctttaaaagttcagccatcccattttcatatcctgggtccatcatcaaacgctgaacagactggaaacactgacccactggtatatatagtgtttgtatctttgcttattcgcttcaattatcatgaatatatttgtttttgattgtttgctgagaaaaaagtatggacattggacaaaaagagtgatctttgttaaatcttcacgttttctccgttatcaagagaaaacctgaatgattttgggttttaggtactgaaaattgtgtgcttttattacccattttaatgcaattttcttctgcttcgtagtgacagagaaattaagtccca

SEQ ID NO: 69985 - DNA, 580 bp, Prunus persica
  Intron number 1 from transcript ppa011883m (locus ppa01188 3m.g) derived from phytozome v7.0 (chr-ID scaffold_3; pos 11641137 to 11641716 reverse strand)
cggcggtgggtgtggccgcgacggcgcttcttcaggtgttggtggtagggtttgtttagactcatgggttgatttagggttttggttatgttgtgtttatgggctttgtttgggcttatggctaattgtggtgtggtgagctagtagttttggtgcggcttttgtccgcgttagttttgcttttagcaagctagtttgttgccctcttgggattcgtattttagatgttttgtttatatccttgattgtactattgaagtttatctaatgaagtttttatttgataaaaaaaaaaaaaaaagaattattatttcaacgtacgaaccttttttctggcggcctagaattgcagcaaacaacggggacttgccttgaatttctgtgtccttctcaactgctttttcttttattagcttcactatctcaacaagcccttgttcagcggccagatacaaaggggacttttgttccttattagtgtaaagtgaaacggcaggatcagcctctatcaaacacttggctactaattggtgaccttgaatcagggcttcgtgcagggcagtgttttcctcattatttt

SEQ ID NO: 69986 - DNA, 664 bp, Prunus persica
  Intron number 1 from transcript ppa015310m (locus ppa01531 0m.g) derived from phytozome v7.0 (chr-ID scaffold_6; pos 26284968 to 26285631)
cacccttgtggagaggtggcccagctgggcccaaggtctgaccagaccacccaccatttgttaacatgcttgtttgttttctagacaattttcatgcagccttttgttttgatttttgggaatttctccatcatcttttcctgcatttgtgcttttcaactgaatgagcaacacccaggtgatttttgttgtatttagcattcgcaaagctgagcaatctgcattataatgcattgatttttgaattctgtttgtgattttgtttactgggtccccctctttcattactgtttaattttcctataaaatgaggcttactttgtgttggatttgatcttttgggccccatgtctcggttctttctctgtatgatttctgatgctctggttttcctgtgtgctgcgcttatttgatgattgcaccctttatttctcaaaccttcagtcgattttgggaattctttatttttgtctccctttcctaaaaggcgaaacacatttgttcatagtcttctttatctgcggctttgatttgtttaataaatggcgtttctctcctttcggtattgttctttgttcatatatttttgttctctatctgcctttgccgaagttgtttcatcgatcaatttcttttgctgttttggtttttcagtcactgtgca

SEQ ID NO: 69987 - DNA, 971 bp, Prunus persica
  Intron number 1 from transcript ppa008138m (locus ppa00813 8m.g) derived from phytozome v7.0 (chr-ID scaffold_4; pos 14552798 to 14553768)
gtatcggtttctggctctaacacgcccaaggacaggtctattttttttctctttcttctttgggtaatttctgtttggttgcctagaaaattgggggaagggaaagtggtataatatgatgggctttgcatgttatcttgtgtttggttatttttgcaaagtttcaacttaccgtggaattggtgttcgccttgccaatttgtgttttcgaggcaattagggtttagggaaattggaaaattgtccagtcacatttcgtttattgtattaagaaaggtcctcctaagttcatttccttcattttcctgccatagagtttcgagaaaatttgagcaacaaaaagaaaatcgataatttcatttttaaccgttgtagaagtctaaagctttatgtttcggggcatgggaagtcgagaaaccaaattccagtgctctttctctctccattaacattggtaggtaggttttagggaaatttcgaaacgtagccagatttggacatgtcaaaagatatttaagccactttttaatattagatttttagaattttaaccactcttaaggggttggagcactgctcgagggatctcgagagggatcgtgcagtgttcaagtgggccttgagtgataaattccctaggtttcagtttcaactgcactgattttggcagggtacggctgtagattttttagcataagcaatttgttggtctcctatttttacgcatttggtcttttatatgttgtatgtaaagtgtatttgtttttggaggatatttggcctgtcatatatcaagttttattcagttaagtcttgggttgcaagcaaataacatggaaagatgcttacacaacgcagatgttgtagtactttggtgcattgtagtagtttgatgcttgggctaatgtttctgtgcattttatcatacttttgcagcgctaaacctaaagctaagagaaaaggtggcccag

SEQ ID NO: 69988 - DNA, 677 bp, Prunus persica
  Intron number 1 from transcript ppa023336m (locus ppa02333 6m.g) derived from phytozome v7.0 (chr-ID scaffold_4; pos 4829149 to 4829825 reverse strand)
cttgttttaagtgtgtgattaaagaagaaccaggtcctcttaactgatgtggcatgcagatcatctgcaacatcacatttgaatttgtctgtagatatgacctattcaacacatgttgaacctagaatgctacaaggaaacagatagagccacaagcaatggccatatgttttcttcaaattgcaccaagtggaacttcatacccattaattataagaatgaatttaattaaccctctatctatctattaaacaaaaggttaggagactgggggtcatgacacattgtgggttacatctgaaacaaggaaacagcaagacttttaacttcagtttgccaattgccgattgaagtgaaaaaggacaaattggttttaatatggtagatgcttgatccactccattggaattatcactttatttttttatttttgtttctatatatgcagatgagcagaagtaaaaacaagccgaattcagaatatctacaagttaaaagcaaaaatctcaccccaccaataaaaaagactatatatatgtagccatacaggttaaaagactttataaaagcaaatctataagcttcagctcctcatagagatggagttagttgcacttttagcttctttgtttttggtctcagtttcactgccaacttctagttcaaccagtggtcaa

SEQ ID NO: 69989 - DNA, 473 bp, Prunus persica
  Intron number 1 from transcript ppa000050m (locus ppa00005 0m.g) derived from phytozome v7.0 (chr-ID scaffold_4; pos 1641045 to 1641517)
cgcaagctcatccttcagagccagaagcctcgccagtacttcctttcaacaattcactctctctttttttttcttccttctcacagttttttatttactgtaatgttctgtttggctgccaagaaaacctaggagaagtgaggcaaagtaagcaggaaacgtattagtgtaagataggacttggaataccgaattttcccctgcaatgagattaatgcaatttggcttagctggtttttaatggaaaagttcaaagcacgttatcgaaatttcatgttctataaattttctgcgccccttaggctccttagtgaccaaatggaggagtaatgcactgctgggcacgtgaaatttgtgctaatttttactagtcaagctgtgtataattcctaattacttggtctttgatcaattaatcccaaaataacttttgaacctttgaactttacgctgtaggtcttcgagctcagttg

SEQ ID NO: 69990 - DNA, 886 bp, Prunus persica
  Intron number 3 from transcript ppa000050m (locus ppa00005 0m.g) derived from phytozome v7.0 (chr-ID scaffold_4; pos 1641785 to 1642670)
ttgaaacaaatattgccggaaaaaagtaagaattatgttcccaataattaacattcctttttatcagacagaaattaaattagtattataagtggttgatgtgtcatgttcaaattatgatatttactaactatagtatggttaatgtgcctggatatctggaagaaataagtaatgcatctatccaaaagctagcagatccagatagtacattttgctttttttgtttttgtttgtttttttcttgataagtaaagttaattttagttgtacaattaaatttagaaacttcggagtcactgcatttaggaatctcttgtgctctgacctccgggaacacagtgaacacgttattcaaatcccactactaataattaagtctcaagataccaaactgaactgttctagaccagattaaaggcatgcttgagactggttttggaaggtctaaaagcacttttaacatccaaaagtgctttagacaacgtctggcagaaacattaaagtgtttatgggtcacaaaagcaccccaagtgcttttcctggaagcacttggatttttaatagtttttgatgtgtttataatagtgcttctagaaaaagcgcttatgaaccccaaacgagccttgactcacgaaggataaaaccaattcagtgcatagttatacaagatgtttaaatttgtcataaagataaaattaaaaaacgctgggattgtgtttaatgagtatttatttcatttatttattatccggggtttgagattgtgaataattttaacaataattatggataaaaatgaagaaaagtttcaagaattttgattgcgtttactcatgtttgaaatgcaggctggaagtgcaaaaactacttggtcacgccgttt

SEQ ID NO: 69991 - DNA, 850 bp, Prunus persica
  Intron number 1 from transcript ppa013292m (locus ppa01287 4m.g) derived from phytozome v7.0 (chr-ID scaffold_2; pos 17566371 to 17567220)
tgaagccagaggcctcaagaaaactgattttctctgtaactttctctctcttcccctgtaattatatgttatgaatcttgaattcttcacattaatttctgttggtaattttatgtatgtcatgaaatatgaattttgggttgcttggttgttttctgatttaccatctgtagatctgaattctttgcttcttatatcagctgagctcaatgttgtcaatttcaaggtttgatgatgaccatgttttttcgtttctgcattttgtgggtgtaaaaatcaagttgaatctttgatgagtaccctcaaaagtaaagaaatcgatgaattttgcttaaaccctttccattgatccacttttaagtgatgtagaaaagatcttacttttcactggtgtttttcctcgacccatctgatctttatgtctaattcatttttgtttttgttttttgatatgtgggtgttttgggtttagttaatatccggccactgttggtatcaattttatttttgaaaaaaagacatgatctttatggcatatagcagtccatctgatcatcatttcctcattattaattctgagataaatataaaaaacatatgtaggtgtttggcagagtcaagaagagtcttactttttcttttttttttcttcttcttgttgggatgaatataatacattttcaaaaaagccagtttaactgtgatcaagattctgtaagctgcgcttcgtctattgatacagttcattataaacacgatattcacttttaaaatttatctgcattagatttctgaatatgctcatgtatgtcatgggttgactgctttgtggcagctaaaattgatccct

SEQ ID NO: 69992 - DNA, 419 bp, Prunus persica
  Intron number 3 from transcript ppa006479m (locus ppa00647 9m.g) derived from phytozome v7.0 (chr-ID scaffold_1; pos 8615662 to 8616080 reverse strand)
aggtaaaaactttgctgtgaatctttgccttaaatcatttcatactgtatcatgtttggaatgccctgtggatgagacatgatgccattttttaccatcgtaagtcactgttataatcattcggaagagttttgtatacatagcatgtagcttttgtttgtggcaatttcattcaatttgttttcaacatgcattgcattattgggcttaataatggttctatccttttgatttgtttgcacatgtacagtagtgttggcttcgtattgtttctatccatttgattgcgctcttaatgtgttcttttagctcatgctttgtgccttctttttattttccctcatttattcaaaatgaaattatcacaaaattctccaatttcaggttgtctcagtcattgagaagcgagcagatcaact

SEQ ID NO: 69993 - DNA, 889 bp, Prunus persica
  Intron number 1 from transcript ppa013479m (locus ppa01347 9m.g) derived from phytozome v7.0 (chr-ID scaffold_1; pos 8564154 to 8565042)
agagtggaagagcaggcctccgatcgctcctcagtgtacgtacatccatctctggcaatcttaatttcctcaattctgttttccgttttggttgtttatgtttttgacgaatttgatgttatgttgtcttcagttcccaaataacagatcttaccgtttgttatctattctatattaactgagtctggaacatgcggaaccatattctgtgttttaatttttctttatagggacgtgggttttattttttattttttaatttccaataattcattgtaaacattggatttttttgtgattctatctctgtttctgtataattttcttggttttagatttagttcctagaagaagaaaaaaaaagataacccagttcaactggtgctgatgtgctgagtgagagatatcaaaggtctaatatggacttaaggcgccaggatcgccaatattcatgactggttttagctggttaagtgaggtttatatgttgaaatcttgataatttaattcatcataaacccactaaagagtcttctatgtgtttgcaaaacttaaagcaaacccgtttgacccttgttctctctagtttttctcctccggcggtggagtttcagatttaccatccctgtgaatttaggaagtacctaggagttccacccattgtgttctgaaatttttgtgtatatttgcttcctcagtagtttcacctgttccatttccttttttttttaggttcactcttatgctatgatttacgtttttgcggactagttgctctatgaacctgtattagttattcactgatggtttgtaccaaactaagggatggtttatattttgtcttttttcttcagaaattatttgtcagctcacagaaagcagaaggtat

SEQ ID NO: 69994 - DNA, 515 bp, Prunus persica
  Intron number 1 from transcript ppa005474m (locus ppa00547 4m.g) derived from phytozome v7.0 (chr-ID scaffold_6; pos 27727676 to 27728190)
ggaggctacaaccatatcactctgccttcatacgtgttagttcctcttaatctcccttccttcaattgtttcttgattttgtgctaattttgtgatctgggtctccttttgtttttcattttatgattttgcttcttcataatttgtgcttttgttatctggggtttgagtctatcatgcaaattctgatttttctctcagattgtttcgtatttgatatgcatttcgtgccatcttttgcaaattggaaactgatatgtctaatttaaattctgtgttttgacacagtctttcttctttttgttgattaacacctgaggacgttacgaaattttattttctttctttttaatttttaattttaatttttttttgatgtgggtcagataagctgccatgcatccccatagaaatgaagaaaaggttttgattgtaagattttttttttttttactctatcagtaattcactgccaatatttataaaattttgaattccaaaccagtttgcaggaa

SEQ ID NO: 69995 - DNA, 582 bp, Prunus persica
  Intron number 2 from transcript ppb017740m (locus ppb01774 0m.g) derived from phytozome v7.0 (chr-ID scaffold_1; pos 3990629 to 3991210)
gggttcataattctgccttgtcacatagacaatagacacaggttttcaaaggctagctcaattatacggtgattaccggtgagttagaagaaattgaaaggttagttaggaagtgagaagcaattttaattgtgaagtttctcatgatcttattcttgctccagcactagtactcaaacatcaaattgattttgaggaaatattggtgctttgtggggttagtttcttgatttcttctaccttcatccaagtgtaaattctactgagtacatattgatgcaggagcataggagtggatcaagatagatattagcatttaattagttatttcatgatatattattattttcttatttaggtagttttagaatatcttttattatttatgtgtgattttataattaattagtttacttttggaccaagtagccttgatgcccaagtcttgtaaagcctataaataaggctaatgtaatagttgtaggagagatatgttgatgattaataaaatagtttatttgtggcatggatttgctacgatatatgtgagtttgcactagccctagatttcggtgctcgtgt

SEQ ID NO: 69996 - DNA, 810 bp, Prunus persica
  Intron number 1 from transcript ppa019153m (locus ppa01915 3m.g) derived from phytozome v7.0 (chr-ID scaffold_28; pos 6131 to 6940)
ctgtgagtgtaacccacttcctttttttttttttcctttctaatctgcctttttctgtttatattgtgttttgaaactgggtttgagaaacgtgaaataaagttataggcttctaactttgtactctgatattcagcatgccgtattctacatttactattttgaggctgaatcctactctgcaaaatccagaagggtcaaaataatgcatgggtttctgtttctttattaattttggttttggttttgatggattgttcctgcaaaaaataattggggaaggaagagagaaaaagaatatggttgttttgcatttcagtacttgtttggttctgaaactaatatctatttgcgtatggacataatctgcatacaacgccttttgttctggctgtcattgttatgctaaatgaattccaaaatttgttgtcatgttgaccccaattcacaagctttgatctttatgtggataatgagcatgctaggaagtttgcaagtcttctgtacataatcttggatatatactactggattccccctgttattttatcattacattctctgctggctatagttgaactaatgtattgggggtttgctgatatttgcaatgttaaaaatggcctgaggttcagtccatagttttaagagcacgccgtccggttccttgcttaccttgttttatgaatttgttgccgacccttcgaatgttttgctgagttaatagaccttttttttggttgatgatgttaagtgacttttgatgttacttgaataaataaatgtttgcagggcagcttccatccccag

SEQ ID NO: 69997 - DNA, 780 bp, Prunus persica
  Intron number 3 from transcript ppa009822m (locus ppa00982 2m.g) derived from phytozome v7.0 (chr-ID scaffold_8; pos 19339025 to 19339804 reverse strand)
gctccgacccgttatctgatctttctcagattgaggtaggaaatgtaactcagtgttgctttggcattacattgcttggtttagctgaattgttgttcatcttgttggaatttggaactcagagaaatgatatagtaagagtaaattgttcaaaatcaacatggaatgaatgtgtttgagttttggtaatcattaggtaatttgtcatcaaaattagctgactaagatacttggacgcagcaattttcaaatatctgttgtctatacatgtcgtgtgtcgtgttactgattttacccgttcatggcttatgcttgtcatcaaaatcccaacatttgatggtgtctctgccagcactttaattcctgatttactgggaaagttggttcctaatcccgttctgtttttttttttggacgagtgtaatcccattcttagaaaggcaagctgagaatgagtagctacaacccacattagtttctgtccaagttcaaaccatgtaggaactgatttcaatctgaaagcttagttcttgcagaatcagtattgtttttctgtttgtttgagcgacttttatgccgcagggaatttctgtgcatttggttgatagatacacttcttccacacacataaaggaaaaaaagattacctcctccagttcaaatatgagtgtgatttatggatattttgcttactgccttgtttgtttatgattgcgatttatggtattctcatgatcatttccagaggaatcttccttcagcgactggatcaggttcaac

SEQ ID NO: 69998 - DNA, 614 bp, Prunus persica
  Intron number 1 from transcript ppa005486m (locus ppa00548 6m.g) derived from phytozome v7.0 (chr-ID scaffold_1; pos 33061739 to 33062352)
cttggaccccttctgccacactgtaagtctcactcctctctctttctctctgagcattcaataattaatgaacatttggctgttcataaatgcagagctttagaaaatttggaatttttattgtttctttaattttttttctattttgatttgatgttcatatcagtcgggaactgcatgctgagatgacaaccagaaatttgcttctctgttagcttcttgttaattatgaaaatgtttcaaataggttcaagctgtttccagttggaatattgctttggaatttaaatcattaaagttcacgatgaaatgtacaaatatatacttgcaccagtgtgtgtatatatatatatatattatatggaaaacttcatgcgcgccatatataattaatgaagaataaaaacttaaatatttatcaacaattttgttgttgaattgaatgaaacaaaaaaaattaatgagaaaaggggggcactagtagctgacccacctttaaatttggaattaatatttatgtatttttatttttatttttattttctcatgagtagtgttcattacatttaaattgtgcaggagcagtagtggtaactcatcaaattcaggcttgg

SEQ ID NO: 69999 - DNA, 646 bp, Prunus persica
  Intron number 2 from transcript ppa008040m (locus ppa00804 0m.g) derived from phytozome v7.0 (chr-ID scaffold_6; pos 28534459 to 28535104 reverse strand)
ccgagaagcatatattgagaggtgtgagcttcaaggtgaatctgatttcaacacatattaagttcttttgattatgtctttttagttgtttcaagaatttatgtgcatttcttttgtgaggatgtagcataggtctttactttgccattatcttctgactaggatatagtttcctagttaagcgtgccaaaagttaattctttagcttggaattttggctcataaaaaaatttgaaaactaattatttgcttcagaacaggaaatcaatgcttagttcccttcttcatcagtacgtatttgtaaaaaggagtcgtcaatgcactatttggattgaatggcatttggcttatgggttaggtggtagattgttatgcttattgaaggtcattcgggttttgccccaattaacatagttttgaaggtttgcgtaattatggtatttggttttttttttttttaaaggattttcattacttctctttcttagcgatgggcaacaatctgtgttgttgttttctttaatattgctgtttaccatgggatgtactgctggtcttcctttcattagtttgtgctttcttatattataattttgtttctcataaaaagttattggtcaatggtggattcatttatagattagac

SEQ ID NO: 70000 - DNA, 822 bp, Prunus persica
  Intron number 1 from transcript ppa006435m (locus ppa00643 5m.g) derived from phytozome v7.0 (chr-ID scaffold_2; pos 9581818 to 9582639)
tccaaaaggtgagttttgttttgaagatgaccattgatcgtaaaacgaatattgttgaatcttctaatttttggatatgtgattttacatatgtaatttgctgaatttggtatttttttatgtttgtaaaagattcttggaattgctaatttttattttgttttaaaatttcttaaaattaattggttgctgagaaaatggaggaaatgaagaggatgaaaagaagaaaaagaaattaaatttgaaatgttgaacagtactggtatgggagttgttgtcctttgattaatttgttgggtaatgttggttagaggtcctttgggaatcaatattggggaaattcccatgtgaaaataaattttctgtctttatatttgctgcttttgtgaatttataacacctttccattctgtttaacatcaatgaaatggttgtataatcccatttgtgcaaaatattggataaatgagtaattttgagtcgtgatatgattttgaaatctgaattatttaaaaatatgtaaagaaaagtgattgtaaaactcctttagttcattttgttttttattttttatttttatgtagtttaagtggctcttcatttggttttttacaacttatctggagagttggtgtggtattggaaaggaatgcatttgtgaaattatgaataattgatcaaatcctttaatagtgttttagcaaacttctttattgtcacatttcaagacatggctcatttggttggtctttggtgatggtaattgaactagttcttttgtcatttcaaatttcttcagggttctctgcaaattttttgccc

SEQ ID NO: 70001 - DNA, 498 bp, Prunus persica
  Intron number 1 from transcript ppa1027227m (locus ppa1027 227m.g) derived from phytozome v7.0 (chr-ID scaffold_8; po s 20101697 to 20102194 reverse strand)
tccacaggtaacccccaaaatgaaaagagcagaatatatggaactggtgtactttattttcttttccttgaagaataaacaagtgtaaagggtactagagacaactggccaaaaggaaaaggtaaagactaaactaattttccttcattttccttctgctatagtctgtgttgtatcacagaagagtatgtaaaatttcctcaataatttccttgggtacaaggaagacgagatttcggctcttgttgttaaagaaattaaagccttctacaagagcatacaaaacttacttgagatcaaagtcttattgaccccacttagagattctgagaaacaagctttcagtcttcttttgatgacagctaacactgtactatatatacagtagctcgagccaagagtgaatacaaatatgaacagaaacacaaacgtcagtgtttagttgctagttgattatagcaggaagagatcaaaaaggcttccacgacaacagacacc

SEQ ID NO: 70002 - DNA, 633 bp, Prunus persica
  Intron number 2 from transcript ppa013945m (locus ppa01394 5m.g) derived from phytozome v7.0 (chr-ID scaffold_1; pos 22956167 to 22956799)
agtgcatataaggtttgcttctttgacagtttcaaggacattgtgggtttctatttcatgattgggattgtgttgaagctctttgaaatgttgttgtggcctctgagagaattgagcccaattttgtctttggaggtttcttcatccaaatgcaatgctaaaggctccaaagcttgtgcttaggggagtgcattttggcattgcacttgtcattgaagcattcgctatatgattgttttgttgttgttagttctaaatttcccatttcaaaattcttatttgttattgatttgacccttctcctaggtaaggatctggttcttttggacggaaaggttaggaaccaccattttccctaacagtttttgcgtaattagagaaactgtcggtttcatttgcattataatcatttttatgcactatatacattatgtaaaagagggtaaaagattacatttccttgcatttgtgatctaatcactgtatatgatttcttcaggctttcgtaaccttgaaaatattagtgtttgagatctcaagttgtgtttgatatgttatgggatgaatgatgctcattggttttctttccttgttgcagttgcataatcacttggaggtttctgttgcagttgg

SEQ ID NO: 70003 - DNA, 846 bp, Prunus persica
  Intron number 2 from transcript ppa012493m (locus ppa01249 3m.g) derived from phytozome v7.0 (chr-ID scaffold_5; pos 16644152 to 16644997)
gaactggttagaacttaaaagctatttgctttgcatatgaatatgatgttgttgttttgaatttgaatttgaactcaactgttgctttctttgtgatatattattgttagatgttatgaaaacaaagatacccaaataaaagatagggactttgtagaaaaatggcaacaagtttcattcatcttagttaattgtttgaatagatttgttgttaataccaattctcccttatttgctggccattggagggtggaactcttcattcaagctcctgtcttcatcagctttttcctcgtcctaacatctctctcttaacatcttccaactgatcaagtatgtctgattttagatgtgttctttggatcatgtctcaaatagctttgtctttgtcttcgtctttgtttggcagataacgaacatggcagaggaagtgccatgttttacaagtagtttatatctgacattctattcttactggtttcctctttcaatacaagggatacttccatgactgaaatagtgtgtcaaatgcatattgaacactctgaaatctttcctcttatttatagcagagtgagattttggcaggtttagatccacataggcttttgctttcattaagtttggtcatgtctaaagatatgggaaaacatagcaattttgaaagcacaggaccagttgcatccgatattcaatcctggacctcatagtctgtcaagttgtaggtggtttggtacatttaatatctattatctagtttgttcgaaaatgtttaatttcttatttgcttattttctgtgtcattttccagctccttttttggagatcggaagacagatacggagg

SEQ ID NO: 70004 - DNA, 598 bp, Prunus persica
  Intron number 5 from transcript ppa008890m (locus ppa00889 0m.g) derived from phytozome v7.0 (chr-ID scaffold_2; pos 21713395 to 21713992)
tgtaaggtctgtttcttttaatttgttttttttcttctttttctactttctatttggagtttctcaagccgagttttctgtttgcttttatatatttatttaatcctctgttaatttggatttggaccccaacgtaaagactacttctgttattttatccttatattttttttttctttaaaaatgaatttgttgaccaaatctgtttgttgataataatataaatttatctaaatcctaacaataattgaatcattctagattagcctctcttttttctcgggcgctattatagtatgaataatgttactctcatcacgtttccattcaacaattttctttttaattatataattttaaccaactgaaagctgacccttcatccaactttcaattaaaactacttttcttttttgggttttatttaaaatgactcaaaatgaaagtggtctgtccctttcgaaggcacccttttttcttgttctaataatacaatttagttagtggactttacagatattgcaacctaatgatgaaaactcgaactaactcgttttgtggggtttttttaaaaccattttttatttacagattgcag

SEQ ID NO: 70005 - DNA, 820 bp, Prunus persica
  Intron number 1 from transcript ppa012423m (locus ppa01242 3m.g) derived from phytozome v7.0 (chr-ID scaffold_5; pos 851751 to 852570)
tccagctctcttctggtaatttccctcgtgatctaatcaaactgcgtttgttggattctcagctcaatttttatataagcaatgctcttgcttgcaagtgttcttgcatttcaatttgatggttacttaacttttttgctttaaatgaaagatgaaagatgcaaatgggctgtcaatgatttcattttggattagtgtgtgtgatatggaacctaggggatttgcagatgactttgttcttttacagttcgtgtttgagcccgaaataagaacagaaagcaatcttatatttcccaagttagtagtgccttgcaagccaggagaaaaggccttgtttctatgcagctttcctgagctccaattaaattactgtgtaattttatgtaaatttatggctattttttctgcattttttgttgttattaaaactagggcattgaatctgaaacaaattggcaatagctgtagagacccaggaacttatatttgtgaggctaggcttaggttaggtttcccaagtgagatttacaccctgggagtaagctgaaatagctaaccatctgcaaatggtagtggagtttattccaaagatctatagctgatgtaaggttatatatatgtatacattattttcccattaactaagtggttagtatcagaattcactgaacgttcttctggcattttccatatcagcaatgagtttattgctgcacttagtttctgtttatgcgctggatttcgaataatgttgctttttctgttcctgtgaaattcttcaccagggtctcctctgaaaccatcacaacaatatcttggg

SEQ ID NO: 70006 - DNA, 503 bp, Prunus persica
  Intron number 1 from transcript ppa013551m (locus ppa01355 1m.g) derived from phytozome v7.0 (chr-ID scaffold_3; pos 19199777 to 19200279)
acacacagaaggacccagatcagtttcacagccaagtaagacaaaaccatcaaagtttttccatttttcttttgtctttgctttgtgcttgttttagagccgacccagttgagaattcttgtagctttttagattctagtagcacccattttaagctttgctggtttaacggatgctaacagctaaatcatagctgtttttgattttcctctatgtactgatttcaatactgaatcacagctcattttctttgcttgaaagtagaaagctttaatcaccatatacaaatatacgcgtccagagtttaaagtgtttccttatttgtcttagtctttattctaagattgttgcaaatttacgtagtttatattgtttccttgtttatattctcgttgaccaattcgagaattcgttgtatcgattgcctgtagaaaaacccgagacactgggattttaattcttttgaacaagtagaaatccttatacttctgaactctttgaag

SEQ ID NO: 70007 - DNA, 972 bp, Prunus persica
  Intron number 2 from transcript ppa013551m (locus ppa01355 1m.g) derived from phytozome v7.0 (chr-ID scaffold_3; pos 19200405 to 19201376)
gcctaaaggttggttttttcaattttctttaaaaaccaaaaacttctttgctttcttttttgttgggtgtttgattgcaaaacaaatcagtctcagcaagcttatatgtaaaggttgcaggagggacttggaattggttaacgtcagatcatagttcatatctctgttctatgttagaatttgctctgaagtgataacttaaccagaacaggatctcttaaataagtgactatgggatagtcttctcaacacgtgatattgtgaacttgtgttgtctttgcaattcaattttttattggctctaggtgtacttcttggtaacttaggtgcaatgtttagtttcatttgcattacatgtttattacccttgagacatttctaactgacatctccgctttctcacttttccctttcgttttctcataaaccttttctgaattgtgtgcactagtgttcttatgctctctttagggaatttgaggttgacaagttaattattgtgaaatcaaggttgtgccagttccatttgtggttctgcggacacagctttcatatgagcaaccaagccaatggttaaagacttaaaagcaccgtagagctgcttatgttacatgggctagtgattgaggacatataccattccttttacaggcagccttttttaaggtgttaaatctcatcgaactgaaatgattttctactaaagacaagttaactgtcttagtacttctctcctacttgcacttggtatctgagacaattgagcatggcttcagagcattagatagaagcgatgacactatgaaatctttgaatctcagatttctccgttctctttaatctttcttaattacctttagaatactgcttctttgtcaaaatttgtcggcatgcttgatgaacttttgtgacttgtttaatgtatttgagctgattaagcataatattattgttttgaatcagagaaggaga

SEQ ID NO: 70008 - DNA, 650 bp, Prunus persica
  Intron number 1 from transcript ppa000453m (locus ppa00045 3m.g) derived from phytozome v7.0 (chr-ID scaffold_1; pos 30961720 to 30962369)
tttgctcatccttggcattgccctcggttccataggtctctctctctctccctcactctcttcatttacattttttttcttggcactttaatattttagcattagcatgcagaatatcatttcaattttccgactaagttgttaaattttcagctttgctggtttcagtgctttgattattgacaaataaataaataaatttaagagcattttgcttttattttttgagttttttcttacttgtaggaatagtagtggccttctggaaaaaaaaaaaagtaatagtcgtggcctggctcaggaatttgtcaagaccgtctaaagtcagtgggttttgggtgatttgctggggccaagaattaaaaaaaaaaactaccggtagcaggacaatggtgagatgcgcaaagaataaaatgatggaatataacgaataatcgaatgaattctttatgggacagaaaattactttattctttgtctgcccatatcagatggtggatagatactctcgcttgtgtctttagttatattgtaaaaaaaaaaaaattcattgggagttgctttggtgaaaattctaggcattgcaactggtttcatctgttgttgaattgtttgttccaatttaattaacgatccaagacatgcagaat

SEQ ID NO: 70009 - DNA, 623 bp, Prunus persica
  Intron number 4 from transcript ppa021477m (locus ppa02147 7m.g) derived from phytozome v7.0 (chr-ID scaffold_1; pos 40372852 to 40373474 reverse strand)
aggctgctgtaaggcttgcaatattttttccttcttattatttcactttgctcttatattttaaggaaccaagtggaataatttcctaggagctaacgttgtctgtttagataatataactcccaagtctgattttttgtgataaatgttaaaatcgtactttttttctttataatgttttggtacaataaattccaagtgaattatgtttgaatttttcttatcccctataaagaatcgtattttcttcccctatttttgaaactcttacaagctataatcttcatttaaatggcttccataattcttcgaataagtgttcctctgcttttattggtaaataaaccactttccttttctctcgtcatatttaataaacattgctacccaaacaaagcttatagagcacagtattcaagcgttggatttgattccccacacttcgattaatcaaacatctacgaagatggaaattccaaattttgcttagcaaactgtcagccaaagaaaatatcgtcccctgtatgtgtgtgtttattgacatatccctggttatgtataacactaatttctgtttgcttatttcaggttcccagaagaactcgaagacaaaagaaacttaa

SEQ ID NO: 70010 - DNA, 574 bp, Prunus persica
  Intron number 1 from transcript ppa014113m (locus ppa01411 3m.g) derived from phytozome v7.0 (chr-ID scaffold_7; pos 18995825 to 18996398)
ggaccttgaggaccttggccttcttgagggcgaaggtgacgtcggcttccatgcgagatcggaggtccttgacagccttggcgttgtcgagcgtcttgctgtgctcgtgagaggactggaggttctggcggaggcgctccagctccttgagctcatccttcacggactccatgtcgccgaagaacttgtcgccagagaacaagtcgttcatggctgctgcttctcaaatccaaaaatcaaaatcactggtttaagttttcttgcatatttattatagatagctattggttttaagttttaattttaatggctatgacgggcttgtgatatatgaaagcagcagagatgcccatggaaatgataacttaagtctaatggcgggccacgcgataaacacaggtcaaatgaaaacacattgacaagttgggatggatgatgaccaacgactgatgatgatggcggtcatagtgcaagtctataatgatattattttatgaaggtgtgatattattttaattatataattatattgattaaaggtttacaggaggaaaagtgggatacagcaagttga

SEQ ID NO: 70011 - DNA, 833 bp, Prunus persica
  Intron number 2 from transcript ppa012477m (locus ppa01247 7m.g) derived from phytozome v7.0 (chr-ID scaffold_2; pos 21190250 to 21191082 reverse strand)
acagtatgttttctgactacttaatgaatgcatttcagaagtataatacttccatgaatcaatcttgtattacattagttgcagttacacttacattctgattactgaggtctggtgttgtggaatttttgatttgcatccttctttgagctgaaaacgtggcacatggtatttcataacaacgtggttgccttgcactctttcatgagataccatgtgccaaatagatgaagcctttaggggctattgtttcaatttaaatttcttgtcctgtagtgctttatttgcttagacttatcaacaatgtgcatgtttatgctttggttgacaaatataaggtacacaacccttccttgatgagttgggttttaacaaacttctgttgttaactgacttgataagaatgatatgtcctgtatctgctcaccccctaaaagaggcttacattaaactatattatgactagtagaagcatgaaattatattttaataacctgtacagaaccagctctcctctagatttataggaagtctcatgggaaagtattttcagctgctgatgtaccattgtagaatagtatatataattgtattttgggctcttggctatggttttctcctagtaattttagaaacacatgttcatcggagacatccttcttctaaatattccaaatgttgttcttggtaaatgttgagagaattactttgggcgtatacaagagagagaacagtgcctgggtattggccttctcctctatattgtcatgtctcatgtatctttctctgaaatcaaaacaacaaaattgttgcaggcgttcaagtccccaagt

SEQ ID NO: 70012 - DNA, 405 bp, Prunus persica
  Intron number 1 from transcript ppa006233m (locus ppa00623 3m.g) derived from phytozome v7.0 (chr-ID scaffold_1; pos 44907625 to 44908029 reverse strand)
gctttggttagtcttttccgttctgcattttggttttttcattttatgctattatcaaacccatttttgttctaccatgtaatctggatgtgaaacattgaccatataactggagctactctcttcccgttgattttgatttaccctctgaaaatggtgggaggctcttgctccatggttaagtgattccaatatgtacagaaacaagaacaatactctaaaatggactccattttctttgtttttgaatttttgttttttactgtcaatgctaattaatttcattaccaatatcagaactgacacagaatttgttgggtgatgttgtaattgtatctgataaacaaaatgtttatatatgtttgatctacttctaggtgttgcacgcggggaacactaataaaa

SEQ ID NO: 70013 - DNA, 840 bp, Prunus persica
  Intron number 1 from transcript ppb013341m (locus ppb01334 1m.g) derived from phytozome v7.0 (chr-ID scaffold_4; pos 18765562 to 18766401)
gaacaggtgctgtgcatctcgtttctgaagcagaggtgcaattccagctcttgtaatggacttctctggcgaccggaggtgcaggtgcacctccttgcgcctgcacaggtccgccactgtgtgtaatatttcacggcttcccttaaagtttcttctgtttcttttttgtgttcttttgggcaaccctccacctaaagttaagtttaaaacttttgaccctataaaatatctcatccatcaccctacttttttgaagcccttttttttctctccccctctcccttctctctgtgtctctgctgcacccatttactaaatttattttttgattctatagattgagcttgatatagttaggactagtttgatattgttgtactgtgaaaataatcattgtcagatttgctatgagagaaatcagctgggggagaaagcagtttgacgtttggtaaactttttgttaaaagtgttgttagtacgaattcccgcataatcagaaaataattcccccataatcattaaacctagtgcctcttcgaaattgatttcgtataatcagaaaatgaaaacacctcattagccgctttctcttataactttctcttacaacaatttttaacaataaatgattttctcatagtttactgaacaggctgggctttccaaatttttttaaaaattacttatcatcccaaataagcaatgctaaatgggcacttattcactgtttaaacttttgcttaagtaatgttgctactatctcattctagcttttgattgattttttttttcgcgtgcgtgatagtggaggacaagtgttgctgttggtgcttgctttga

SEQ ID NO: 70014 - DNA, 1015 bp, Prunus persica
  Intron number 1 from transcript ppa014233m (locus ppa01423 3m.g) derived from phytozome v7.0 (chr-ID scaffold_7; pos 9816315 to 9817329 reverse strand)
tgaaatttctgctgctccatctgcttcaccaccaggttttttaaaattttatttatttatttttataaatcttcacttcgttcgttgatgtattagttcattcgttataaccaaatccaaatcctgtccggattatattaattaattaattttttgttataaaaatgaattcttttgtatgaaaatgatattggggagcagatcttcgtgaatcacttgggaaatgaatggttttattggatgtgttaggttctctgcgttgttttccatggaagcagttcttaactgaggaaccggcagacccattgttaattgtttgcttttgttttgtggacctgaattggagccttaatttgggacattcgtttggtggctgagactggacaggattgggattgtgtccagtcatatcccatagagtctcccacccttgcgaaggagaggaacttccctgcctcggtttcactatcgtcttcttcctatctctctattcatgcacctgaggacagagataggaagaggggatagtgaaactagggtagggaagtatttttcctcgcaattctctgatatatggaacagttgtccaatttaatgagtccaatgccaccattgttaagttcatcattagaatcaaacccttgctgtggagagaaacttccatgccccgttttcactatccactattcccgtctctctataggtgacatgaggagagagagaggaagaggaaaatagggaaaccgggtcagggaagcatttttccttgctaatggggacttgttgtcgctaatatgtggacgagttgtccaatttaacgagtctagtccgaccattgttaagtttatcaaacagaagacagaacatgtagtccatttaaattggtcttgccctgtctagtcctagcaccaagtagttgatatggttttagtttgtttgaatgccttccttttttttattgtcattgccttttctctgataccactcggttatgtttctgagtagcagtttgaaa

SEQ ID NO: 70015 - DNA, 821 bp, Prunus persica
  Intron number 1 from transcript ppa023275m (locus ppa02327 5m.g) derived from phytozome v7.0 (chr-ID scaffold_8; pos 1910981 to 1911801 reverse strand)
tacaccctcaatcggttgaggctcacgatattgatgtgcaacaaaacattttgcatatggccattatgcatcgctggttggagatctttaagctttaaaagagagcagatcaataacatcaaggacggctatgaagattgaccgcaatggcaacaccatattgcatcaagctgcaactatgagatattactctgcagacactcagcgcttaggtggtccagcgttacaattgcaagacgaatattgctttggatggtggtgagtgtcatgagttatgtaattaattgaagttcatatattagctaggaatgatgcatgcattttcattatttaatgatgtcttctatgagttttgaactcaatacctcctccaactaggcatagaaactcagtgccactacaccaaactgacattgatgaatttaaaatacaaactatcccccaatagggtaggtagtttaatcatttttatttatttttagtataagtgatagtctaaactataagccaggagggttactttctgtttcctttcgttggctagtaaaacacttttgttaagttaacgataatcaaaatatgtatgaagttattagttattagttattaattattttgataaaacaagataaacatcttccaaccttacaaagagaaataccactaactaactggttattttaagtatatatgaacctgcttataaatttatttgtcacttgagcaatgttcatggtgattgaaatgattaatcctcacctcatcaatttttccatgtgtggctagcgtgtgaaaaagattatttcacctcattacatcat

SEQ ID NO: 70016 - DNA, 404 bp, Prunus persica
  Intron number 2 from transcript ppa003856m (locus ppa00385 6m.g) derived from phytozome v7.0 (chr-ID scaffold_6; pos 10694957 to 10695360 reverse strand)
ccttcacccacaaccatccaggtctgttgaattcaaacaatcaattagttaacaattcttttttttttttttttttttgagttgaaactaagaccttacccaacaaagaggagacaactccactagaccagagaagatcgttagaaagttgtaaaaatttgaataagtctatgccatttaataagggtaatcatggaaaataaaattgaagcttttactatattaaagacattgtttaaaatacgagaggaataatacatcgcatgaaaagaagtgagaagttccaaaaacaaggttagagtgaaggctagcattctcctatttaaatatctagatagttaaattaatttgtgtgtttatttctaaataacattacatttggttaattgcagaaaaaatcaccg

SEQ ID NO: 70017 - DNA, 360 bp, Prunus persica
  Intron number 2 from transcript ppa012038m (locus ppa01203 8m.g) derived from phytozome v7.0 (chr-ID scaffold_4; pos 12735555 to 12735914 reverse strand)
gaggttgaagaggttaacaagcagctcgaccaaatgtaaattttatatatatatatttttaattattatctaaattcaaatttgatattagattttttattttcctaaaaattatgcagttttttgaagttcagttctactttgtactgtatatatgtgtgtgtgagtttgggcatcgaaaatttcctgctattcttggatgtaaagttctgttcttggctgttaatttgtgcaattccttgattcaaagcgatgtttgacggccaatgaactgttcatatacatttatttttggttttgctgatcatgtgacaatttaattgcatttcaggggctataatattggaattcgattaatcg

SEQ ID NO: 70018 - DNA, 528 bp, Prunus persica
  Intron number 2 from transcript ppa009040m (locus ppa00904 0m.g) derived from phytozome v7.0 (chr-ID scaffold_2; pos 15175533 to 15176060 reverse strand)
accaccagaaaagcagtatttgattactagaagtatgatgacatcacactactctatttctttgcaatccttttgttttttcccacttcctgcgacaaattttcatcttgttattaatagctactggggattataatattcaggcataataatattgctagtgctcaatgttttgtatcatttccttttcattttaatcattgatttatgccacctttatggtttctgtaaatgaaagaaaaccaagcaaagagatttttttgtcttatactctgtttttggcctccaaaaagttaaaaagtttgctcaagcaatccaattggttggagttaatcctcattgaatcaagaaccatttgagctaactgcccagtattgtgtgtgtgcgtgggtttctctctctcaagtataaacttaaagaaaactgctgctcttgcttatcgctgccctgtgacctttaattacattgggtgatctgtttacttcttattcagtcccttgcttacggagggctgcatctattgaagag

SEQ ID NO: 70019 - DNA, 712 bp, Prunus persica
  Intron number 1 from transcript ppa009040m (locus ppa00904 0m.g) derived from phytozome v7.0 (chr-ID scaffold_2; pos 15176065 to 15176776 reverse strand)
gataacctcgtctccaagtgccccacctggtcttggtattttccttccctttgtttctatttattgtaaaattcgatattttaattttacttgattgtaatttgttatctttatgttcggattgtttattgttttcatttttgactaatggctattatgaatttgttgaaaaaataaagttcgggaagtgaagcgaggttttaagagtttgccactgattttgtcaatcaacttggctgaattgcagggttaaataaaattaaaaaacccatctatcaattgggtttatgggtttttgttttaaaacaaattcagtaaaagtacaggaagatgaaatttataaaggaaaagggatgtaaatttatttgaaaatagctgaaagaaagtagagacaagaacaactttgtttgattaagtattctgatcatttgaatttagagaaagcagttgttttagagttttcaaatatgctggttgaatagttattacatatttagattgtagagtcctattagtgatggctacaattcttattagtgatggctacaattcttaatctctttggattttatttcttttgtatcttctcatcactttatttttgttttacgaacaaggttttgaggtgatatcttactttttggttggtattttcctttcgattcatatcatgttagggaatcaggtgagccaagcaagaggaagccatact

SEQ ID NO: 70020 - DNA, 816 bp, Prunus persica
  Intron number 1 from transcript ppa013799m (locus ppa01319 3m.g) derived from phytozome v7.0 (chr-ID scaffold_7; pos 12895444 to 12896259)
cgacgacaacgacagcggtggtctatcttaaagtggtaagccccagtcgcttactctcacacccaaacatgtatatgtaggaattttaatgctcaccaagattcatttcagattttgtttttcaccccgcctcctgtctctctctctctctcactggctctggttttccatcggtatgaaaacttctgaaaagttctatagttttgatgttatttctttgtttttgaccgttttaatgcgttgatgtttccgatttagggattttggactgtttgaatttgattcatgtcattcacctttctgttttttcatctgggtttttttttgggtatgtttgatagtcctgttttattgaaaattcaatggatgaaggaaattattatggaaatgaaaaaaccctttgactcacacgcagtaatttggactgtgttgtgttgtgagactgctgctgccatctttcctgcaacttagccttatgataaaaacatatccatttctctcgtattgtgagcttggtattgacatgttgatgtatggttatatgaaatatggtttgtttccagttgtttctcattgcattgatgattgtagtattgtttcctttattcccaagtgtaggctacacatatcgaatagtgtggatgtaaaatgtttatgagttatttttatttttatttttttcataacctatatatagttgctttcgagcataggttatgataaataagcctgaatttgtgtgagatccacaaaattgttaattcttctgtttccagaatgcttactgggtgggtgttttcaggggcatttactcag

SEQ ID NO: 70021 - DNA, 592 bp, Prunus persica
  Intron number 1 from transcript ppa008837m (locus ppa00883 7m.g) derived from phytozome v7.0 (chr-ID scaffold_6; pos 4860345 to 4860936 reverse strand)
agaaatctttacacattaagttgaggtgagtgagttttcttgaccttacactgaatttaatttaatttttagctttaattgcggttttattttattggattgttgttctggctctgtgcttggaaactagaatttgatttgtatgatttgcttagtttatttgattggttgttgcttaccatattatattatgtttccttagtagaatttgctggcatgtgtatgtacccaaagtaacagggcatcttggaaactagttttattccctggagttgattaaatggtgacagtgtgtacctgtgtggatctcctctgtgaagttctaattctattggacaccactggtcttaccatgtagactgcactgtagttaagtttactgtggtcttgccatggagaaataatggaactctagctctaaagcttgctcttctttatcaaggctttatagcaccttctgggtttgttgtagttgctgttaatttgtgtatatgatgcagttctctattgataactgctcaagaatttcagattattcatcgtatgtttttgtgtagattcagaagtttcagcaagttggttgaagctaact

SEQ ID NO: 70022 - DNA, 885 bp, Prunus persica
  Intron number 4 from transcript ppa009386m (locus ppa00938 6m.g) derived from phytozome v7.0 (chr-ID scaffold_1; pos 40428743 to 40429627)
tttttcgatctggaccgcttcatcctcaaccccgggtgagtatcatagtagtttgtgtataaactatacagaagtttctttggctggtcaatggtgcatcattagataattctcaaatgtattatcggactatgaagtgtaattgttttatttttcttggatgacttgcattataatctggttagtactaaacattgatcatgtattgtaactgctttgctgtatttcttacatttgtccttgttaagacattttatgaccaatcaatttgattcgtatttctctgtagcttgttcaatgtagttttagtgaacttatgtcctagctgatgcatgataattcatcttttttcctacccaaaatagttctgcaatataaaagagttctattgaatgccttcgaaaacacaggtaggtgcagatgatcaacatatttgcaagtgaaactgttaataaccaaagcacgggctaaatgcaattctctaagcacattaggtgcaaatcatcaacataattgcaagacgtggattaaatgaaattcttattagatggtggctattgaaagcatgtacctattctctagatattagaaccgtattgtgagacaatcttcactgttcccatcaaagatatcaaatcctctatatttttggttatttctatcaatacattagagtatcctttgtgagatgttggtgattctgacaagatgaaacagtttcttagtgtccaatgtttgacatcataggaactcatcacactatcattttggcttgcaaaatggatgtatgcggcagtgtatatattatttttattataccttaaattcctttcacaaatggattagcttttaagtagtgttactaatatatgggatgcagatttt

SEQ ID NO: 70023 - DNA, 491 bp, Prunus persica
  Intron number 1 from transcript ppa003662m (locus ppa00366 2m.g) derived from phytozome v7.0 (chr-ID scaffold_3; pos 16305887 to 16306377)
gccctaaaagctctgctgctggaaacccaggtccctctttaatgttttatcaactgtttatgcacatcatttatcagttattacacaagctatgtcttattgtctatgttatttggccactgtgcatgtatgtacgtttggcttatgtatatgatcggcgactgtctggttggtttacatgttatttacgtctgtcaagtttcatcctgaagacccaattactacaattgctcaaaaaatacttgttaattaatgcagccagtcttccaaaaccaaactgatacgaagttctgaactttttctaaaaatgggatatatgggagattttttaaaattccctctaagtcatatatcatagttcatggactgttcttctgaaatttgacttggtctataatgtgataattggatttctatattgttttttaaatatgattttgttcaatgtaattgcagaagagatagccaagttgtttcctaacctatttgga

SEQ ID NO: 70024 - DNA, 975 bp, Prunus persica
  Intron number 1 from transcript ppa005120m (locus ppa00512 0m.g) derived from phytozome v7.0 (chr-ID scaffold_4; pos 25957323 to 25958297 reverse strand)
acaatcaggtattgttaaaaccccaaagctcaactcaatttcagcttcctatataactttggagcctgcaaatgtgtcttgaattttattttctttaaattattgtaagtgctcaataattggttggttaatcatagaatagaaccttagttttgcataatccacacacattactctttcggtttgagtaggcttctactgtctgtggttatgaacactgaagcgttctccttgtgctaaaatgcggcactgatttactggtattagtttttttttcgatttttattgaataatttgaccccttttccaatttctgcaaatttggtttctacagtttttcagtatgagtgcataagatgcagctttcgcatcgcacctctggtttttcttaccgaagccaagttttctgtaaaacataagcaatttcattgaataagttccagcaaattcagcaaattcaaaattaaggactttttgaaccaaattatattttcctctcatctattttgttaccttggcatttgattgccatcactttgtgaacattgtaacctcaactttaatgcgtgctgcagagaactataagcaagcacctaagtttaatacgaactaggtaaaactaaatatgcaccttgcaattttttctcgtttctctgacaaaagggtatcacagcatatggaaagaatactccaaaaggtcacttgatctgttgtatacaaccatgaaatagtttgctattgtacctacctggtgatgacttttggtcttgttacttctcagagatttactactgcactttaggacctgttgaagtgctataggtatcttgaatgaattagaagatgagacattcttccatagtttcttgaattgcttcagagaggacccttgagctttcacagcacacatatattcgctaaagatctctttttatgacaggctttagagcttccagaaggaaaggtgaaattcac

SEQ ID NO: 70025 - DNA, 525 bp, Prunus persica
  Intron number 2 from transcript ppa005332m (locus ppa00533 2m.g) derived from phytozome v7.0 (chr-ID scaffold_5; pos 13946927 to 13947451 reverse strand)
tgctcagacctcggcggtttcttcctcaaggtgttcgaagaatttactgtttagttttttcgtattgattccttcactccttgctcttgtgccactgaatttgatttcaggcgagggaattgtgaaatgacatgggttttagcccaacccattagtttgtacgtgttgttttgtgttgaatgcttgacataaaagaaaatgttaaaaagactggatttttgttcatgatcttaatcagttaaactatggaatggggaggggttggttaatcaaatagctcttctttaatttccactttattccttacagagtcatgctttatcgatgcttgttgttcggtttaatttgctttctaattggtttttcagttttaggggaggtacaaggggacctatggattttaaataccttggaattcatcactggtggtttttggttttgtaatatttgtactgattactgaactattcgtggatggtgtttcaattaggttgcccaaatcatcgggaagcccgacttggcccc

SEQ ID NO: 70026 - DNA, 601 bp, Prunus persica
  Intron number 1 from transcript ppa005702m (locus ppa00570 2m.g) derived from phytozome v7.0 (chr-ID scaffold_1; pos 795293 to 795893 reverse strand)
ctgcttgaacctagcgtttgagcttcagatctgtggtattttcctcttcactctcgtatattgctctcttttactttgtagatcttagatttgtattcgttttcatctgtgctcttgatttcatttttgctcacctgtgttttgttctcggctcgttttgttgcatgcttttctagtttgttcttgataataatctgagaaacttgatggtcttaacttagtctgttatataatagatcgatttcttaaaaccaatctgaagtgttataggttttcacagtgtagtagagttaatatttttactgaacaaaaggacttgattttgggattacctcgttattgtcttcgattaagttattctgttcatcggattaaatgctatgattaatcttgctgagattttttttccaagatttttagaaattatatgtttgtttaataatttaaaagttattataatatatatatatatatgtttcttgtaattgtggtcttcagaattttgaaatgtgttgttgttatttgggattttattttcaacagtttctttgttttctgagatctaatagttgatttcacaggtaaattttaatcgcttata

SEQ ID NO: 70027 - DNA, 691 bp, Prunus persica
  Intron number 1 from transcript ppa000505m (locus ppa00050 5m.g) derived from phytozome v7.0 (chr-ID scaffold_3; pos 4122235 to 4122925)
tcttgtaagctcttcttgttctcttcttctcctttttatttttttattttttttctgggtttttgttttgttttaagacttattacaattgggtataaattgggttttaattttgtttacgatcaatttcggattgaatttgcattgttgaattatagtctgtgtgatgatcactgtgttaatgtgcattgcacagcaaacagatatgaaccttttttaattgaactaagcagggaggggtaattagctcttttggtatccacttcttaaatatctaatttattatttcgcctgttaattttgttggcaaggctttgaataaaacatacttcaattcaaataagcaagcgatcaccttttccttgtgcgtgcaattacttgagctaattagttagttttattcatctcccagtaccacccacttgatgatgtatcttaattttataggttaaaggttacatatttggccttgaaaatctagtattctggttctatctagttgtagatggcatgcttcagttgtttcgtgtccactatttattacttgtgttagaagccagcattgtgatggaaggtaacagaccttcttgccgtctgtgatgttcatgttttttctttccttgaggtgtggcttattgttcttgttttaatttcagtgacaagctcctctgtctggatcaacttgcctgct

SEQ ID NO: 70028 - DNA, 791 bp, Prunus persica
  Intron number 1 from transcript ppa010296m (locus ppa01029 6m.g) derived from phytozome v7.0 (chr-ID scaffold_5; pos 12253559 to 12254349 reverse strand)
ggtgtcccatcatttgaaattaccttcttttttttcgtcgaaccatcattgaaatgactggaaataaggaatataataccatcatgttcatggcatcatgtaaatttgatctcaaaagcttactgctatggattttttttatttctttgataagatgatggttcctattatatattaacaaaggtatattgtgtcctttccccaatctaaaagcaatcattgtgtaccttgcccttgtgtgagttctcagttctctttcaacccaaaaagaaagaatacacactttaaaagttttaaaaaaactcatgttccttctatccagcactgtaagtagatcatagttacctctaaaaccttgagttactaagttatggaaacacagatcttttctttttggttacattaaaaagaatcgaaccttgagttacacgtttcaatttttatcagtagtttaaaacattgactaatcggtaacataacatgttaaattgtctgatgaaatagaattactatacacatatttaatactttaaatataaaagcgaaataaaatctctcagcacttttttggtatgaaaatgatctccactctcatagtacctgaaccaaccccaccccaagctctctccataaatacactcaacaagccttttctactttcccacacatatcttcacctaacaggaaaactaatctcctactttcagaagctagctcagcttgggtgagagatgagtagtcttcctcaaactccagccagttctaccaattctcacctttatcctcaagct

SEQ ID NO: 70029 - DNA, 977 bp, Prunus persica
  Intron number 1 from transcript ppa025029m (locus ppa02502 9m.g) derived from phytozome v7.0 (chr-ID scaffold_3; pos 15094625 to 15095601 reverse strand)
tgtaaattcgagagtgtatagccacatttacatctttctacacctccgaaatatatacacccttatacatcccaccattgcagggtgtaaattatatacaccccctttacatccaccattgtagtttctcttatcttgtatcctagaaaattatgtaaattcttctcaatgaatgaggttgtcagcaaagaaagaaaataaaaacattaagtgcatcataataactgctgtgcaccaaccaacactaaatgagcaaaacaaacagagagctgaaaagcaagccatgcctgaaaaccagagaacagtttggcattaaattcttgggaggagaaatgaagaaggtgaagacaattaattacaggaaactaactaagtagaggcttccacgtttctcctctcatgcagtagaaatcaaaggcctctctgctatgctcatctctggcaagccctgctggcattggcccctgatgtgctgcttctcatgtaaatcatgatcatctgtgtagacctccaattctgtgctgcaaggccctaaacctgggttttttcacctggttgttgtgtggaaggaaataacagagaaagagctagctgttcaaagttcaaaccagtccagcctcatcagtttgtgtttttggggctttatctggttgttgggattttgtgtttgtaagttttcttatctgtttttcttctatctgggttggtaggtagatgtttcatagaggaggaggaggaggaggaagtggtgttccaaatcacacgtataatagtcagcttctgcgggctgctgctcttcagcctcgggaagaagaagaagaaaaagaaaggatggttggttgtggttttgattattttggtgataatgagcaagattttcaaggacccccaactcccactgtcacacagagtgatgacagtgttgttgttgagggtgaagaggaggaggaggaggaggaagaagaagaagaagagga

SEQ ID NO: 70030 - DNA, 993 bp, Prunus persica
  Intron number 3 from transcript ppa015314m (locus ppa01531 4m.g) derived from phytozome v7.0 (chr-ID scaffold_214; po s 752 to 1744)
ctagtgcgccttcttgagggtattgttctctgcgcatttgtgtttgaatatcttctagctttgcacctagaagtagattgttgactccatccaattctcatatgtgcagtcttatttgaatactctattattgtgtaatgttctgttgcctgatagtttgccatgttatgttgccaaattgtcaatcaaaatcatacatttagatcagacatagttttgcatttgattgacagtttgtttgataacataacatctctgtagtaagagaacatttcccatttattatttgtggcaacatgagactaggtgaccaagttcttattgaggctgtagttggtagatgaaccagaaagcaggtggacattagatatcttctgaaaagacatttcttctaaagaaaggtttgcgtttggtttttaaaatcttgaagtatttcttcagttataatacttgagtttgtttgaagttttttgcctagttagtccccaagtttggagaaggtggattgtgtgagaatgagtgtgtgtggcaatagaggaatccttttgcacccctttgctagcaagcaaatacttggctccttctttcctgcaaatcaccctttcacatgtgtgcagaatttaattttttctttctttcttttgagcgtttaatgagttatctttgcacacgtatgaagctgtgacttgcaagtacagaggactggctccttccagataaggagccaagcagagttcctgctagcatatgtttctctttaagtttgatagtttatgtcaataaagggtcggtttttggtttccttaaattgtctatccatgtcaccttatctcttatcctggttagtggaggagtggacagaagggtaatggccctagaaacatcatgactgaagtaacaaggaaaatcgatcaaccttaaaaagaaaaagaattgacaatatccttgtcaatctttgctgcaggctgcactgaaacatacgagaacttcttt

SEQ ID NO: 70031 - DNA, 515 bp, Prunus persica
  Intron number 3 from transcript ppa000923m (locus ppa00092 3m.g) derived from phytozome v7.0 (chr-ID scaffold_1; pos 31369092 to 31369606)
taccatctgctcgggtactaccttttgggtgtaaggtatgattttcttaagttttagttctttaacagttttatgttggcaagaactttcatttttctggaaattgcatccttttgaatttgttttgttcaactctacattacattgacgtgtatgtgctgaattgtacgtggaagaccctatgatgatccaaaggatgtaacaagctcttgtagaaatagtgcttgtatgtcttgtcctgttggtagttgcagggttgtttcttaacgctgtgattggtatttatacacagaccttattgttctcgggattgatatgcatttcattctggttctgatttgtgtatgctaatgttgccaaggaggctgtaaattgaacttatatgataatttttttcccgtttgtcaatttcataatgattatttatctggtttaaatgaccttatctaattgattttattggtgttttgttgttttttttcttatctccccacatgtaggataatttctgggag

SEQ ID NO: 70032 - DNA, 947 bp, Prunus persica
  Intron number 5 from transcript ppa005232m (locus ppa00523 2m.g) derived from phytozome v7.0 (chr-ID scaffold_3; pos 209025 to 209971)
ggttgcactggccccaagtatgccttcgaatctcattttgattacgtttctttttcttgtttacgtatggctcgttaaggtggcaattgttatttcattaccagttccatgcaaaaaatcttactggctgatttagatttgggattcggattcctgatgtaggagaatgttacctttttttaatttaaaaatgttatgccttttcatatctgcattacacaattaacttgtggctcaattatttattttttaactttgcaaaagaaactagggactagggagtagtttgattatccccgcttggcctccatttgttgtacctgactattaaggtgttttgctttattgttttgttgcttcaatcttgcaatatttcttcacgttgaaaatgcattgaataattcaaattcgtagatgaactgctctactggtggatgtgctgtaatgcatcatgtcaaagatttaaatccaacctgattatatttggattaacattttagtgtcctgatgtcaagttttaattggatcaaaccaaacattggctagttctaatccaacccagaccagaaccttgtagtaaggtttgataatataaatctatatattcatttggtaacgaaagctatatattcttattgctttaaatgaaaagttactttttaaatatcagatatagatgaaaaagtgtacatgttatttgagttctgatcttggatattgaattttcttttgcattcaatgcctttgcaattttgtagatccgccagacttgaattctgtaatggatactgctatactaatctaattctggttcaaaatctggttcatctacacaaaagagacccaatcatggggtgctattctgtatatcgtctatctcatttccataacatcaatgattctaggttcattttctttgtcatgtaggtctgtcattgaagttcgaa

SEQ ID NO: 70033 - DNA, 823 bp, Prunus persica
  Intron number 1 from transcript ppb021505m (locus ppb02150 5m.g) derived from phytozome v7.0 (chr-ID scaffold_2; pos 14753145 to 14753967)
ggttgctctcaaggtttgagaatcacaaatttcaggtatagatcttctgtgagcggcatgcttatatatgtactttttcgaaaatcaaatggaaaatcaaataaaatgccatttccaatggtgacctttaaccatgattgcaggtaagtcacacctaatcttttatttcgcgtattaaagagttctttgattcaagcatttggattaaacatgtgtttcactaggttgacgaggcatatgtatcaatttatttcttttgctagtgttatgctagcttcttgaaactaaattgaagattgttgtatgctaccggcacatcccttgctagtaggtaaccaaggaaaatttgattggcttaatttgtttctggcactggaaagaaattgactgcttcacttgttaattatgttctttggtctttaagataccttgtgtgttccacatggttactgtctaattttttctgtagcttgtgctttcaattgccatattattgcaaccctgtcctaactcgttcatgcgttgtcaaaatccaatttctacattttgtgttgtcaaaacctaattatttgtttcttttgtgtacacgttggtttaaaagtagtaatatttctgtatctttattttcagtttcattttcttgttaaaagatggaaggattaaatttatttggtattttgagaaaaatgatacattagggagaatgaatgcaaaattgaaaagcccaagtgttatcaacaaatggttgattgcctttgtacaatggatagatcatacgtgtatagtgttaatgtactcaaaaatagcatatttgttccaagaa

SEQ ID NO: 70034 - DNA, 743 bp, Prunus persica
  Intron number 2 from transcript ppa020883m (locus ppa02088 3m.g) derived from phytozome v7.0 (chr-ID scaffold_4; pos 20943102 to 20943844 reverse strand)
atctttcaagcaacagtttttttggagaacttcctgttataaaaaataatagttttcctctttccgtaaagccaaatacaaaacatttatgttataaataacatataaacaaattggaaagctttgaaggtataatgaaattgaagaaaacaaaataataggtaagtaaaaggaaaattaataataagtaagaaggtgagtttggtacggtgaagcacgtcaaagacgctgtcctaaagcctttgtagcctccctacgtgcaggtactgacggtctacaagactccaagatacgaccccttgtacacaaactcaagattcgctatgagcacgttcacagacagatataggtatccaagtcacataaccattgcccaaaataataataataatagtagagaatatatgtaaaagtagaaaaggagagaattagaatgtgtatgtgatattctgataatgtattgtgtgttattgtgtataattgtgtgtattcaaatgtgaaggaggagtggccttttataggcatccaaaaacatgtaaccttcaccaaccatcaaagttcaccaaccaaaaaattaaggctttcaccaaccagaaataaaacttgaatattaaatatttataacccccacaataaataaaataaaacaagcaaaataattaaataaataaaacggttaaattttaaaaccttttaaaattccaacacttccaaattgttggagccatttggagactctagtc

SEQ ID NO: 70035 - DNA, 920 bp, Prunus persica
  Intron number 1 from transcript ppa015613m (locus ppa01561 3m.g) derived from phytozome v7.0 (chr-ID scaffold_5; pos 15188607 to 15189526 reverse strand)
tctacaaaggcctcgtttggcacaacgctcaatcggtaacactcatctctccctctctctccagctagggtttcctgttactgttttaattatggtgaattgttataccctgtgatttttgtatgtagcatgaaagatggttcatttctgtttcactcgattgtgcatgacaaagattatcaattgttttgtagcgtattcttgggcttggtatcaaataagtttcttggaattatctttcccctgtggtgtttgaacaaaatctagaatatattgaaactatttcccctaaatctaacctaatttcttggcatttattgcttattgataaaagatgtgggcatatatttataatttctatgatcttgtataaaattattgatagccttgctgttaattgtaacttcagaagatgaacaacctcagcagaaatgtatctgtttgataaagtttatgcatcccctactttcataagataaaagagatcatagtgctaaaaaaatccatgcacacaccagataatgagaaaagctgcacaaaattgaggaaaataagtcaaaatcatacgccatggcatgaattttgtgtaacatttgagtgcaaaataagccaagaaaccagtctagcaatcactttgatgattgaaatatgcaggaaggcctcaattgcagagaataggattctggtacttgtgtttgaattgctcaagtattccttttcatcagattgtgaaaacagctttgatgacaacaatatatagcttgattgatgttttggtgtttctagcagataaatggtgtcggctcataatgttttcgtggtcttcatgttttaactgttttgtgttagatccctaacttagattttcttctttcttctgtgcagaaaatcgaaaaagagcagtctgctgaacaagcccc

SEQ ID NO: 70036 - DNA, 904 bp, Prunus persica
  Intron number 1 from transcript ppa009773m (locus ppa00977 3m.g) derived from phytozome v7.0 (chr-ID scaffold_1; pos 40149173 to 40150076)
ttctctactccactccaccctaacctcctcttcaggtttgttttcttttctagctgttcttttttcttgggaattttttttggggttttttgagtatgtttcatggtccttttctatgcatagaatttagtgataggtttaacaaaaatggaatctttgtactgaaattaacactttaactttgttggggactgttttctctaagtaccaagttcattgttgaaatgataatcactacatttgctatatagattaccaggtgggaaagctcatgctcccatttgttggttccagccttcccattgtgtgtgtgtgtttttttttttttccttcctggttctctcattctgaaacatggtctttatgcaatgcaacatagactgtccgggctaaaatgggtactggtactttgtagaagtggaggatatgaagatatcttatgctaaattgcagagccaggtgtgttggtgagtttagggtggtgggattaaggttgcctatgcgcctagatttctctcatcttggcattcagggtggttcggttttatttccttgatgggattggctatgatgaaagggtgatataaagtctaacctacaagagtagaatcttgggaaatggacaaaacgaagcatatgtatagaattagcaaaacttaaaaagatcataactttcgataggtaacttgtgaaacctttaaatgtaagatcaaagatcaaggtgcttacccttggacatacatatccaactatattttaacttcctggttttttcttaattgtttttataactttcttgagcacatctttcattgttgattccaatgtaaagttaagggatgcaacttcaatcttgtttgtctctgcagtgatatttattttggctaatcagtggttaaaaaat

SEQ ID NO: 70037 - DNA, 467 bp, Prunus persica
  Intron number 1 from transcript ppa012604m (locus ppa01260 4m.g) derived from phytozome v7.0 (chr-ID scaffold_2; pos 15674835 to 15675301)
ctgaagccgagcatctccttttagcccgacaccaggtaattgtgtttttattcttcgagaagaacctgagaagttggaaagtttaagctcagagattcttttttctttttgcaaacaagtttaaactcaaagatgatagtacataatgtttcaataacaaattgattggtttaaaagattggaaccacatgattatgttttagatactgtagattgtatataactggcaagacaaattaatctattccatcatggttatttggcttagttattcgaaattcccttttggttccttaataactaatatgtttaattgggttttgttagttgatccatcccagtacagttaagtggctttatttttgaacaaattcaagtttattataaactaatgtattttattgggtcttgttagtaagacattgaagggattatgtttgttatggcgaaattgcagctggttgaaa

SEQ ID NO: 70038 - DNA, 882 bp, Prunus persica
  Intron number 1 from transcript ppa000699m (locus ppa00069 9m.g) derived from phytozome v7.0 (chr-ID scaffold_1; pos 550845 to 551726)
ttttggcccgagatctccaccagcgtacccatcatgtactttctctcgctcgctcgctcgctcgttttttctttttctttttaattttctgttgcattttcgggattagggtttgcatttcgttgttcttcatcttttcgataggcgagaaacttcgggaaacaatttttgaaactcaagtcgaaatttgaggaagatttaagaccaactaagctaattgcttgtgctagttttcttaaagaattgtttttgtgtattttggagaattcaactatcaaatgtgtgagattgtacatttttgttgttgaaatttatgtactttggatacttcttgtttctttgttctcattgaaagatggtttattattttggtcagttaagagaattaggcgtttttctgagaagagattctgttggagatttgtgaatgttttctgggcggtgatggaagtgattggtgtgttggcgaaggtggctagtatataatgcaataagaaagaaaatattggagttccgtatatttttacagggtttgcaaatattgtatttcattagtagagatgagacatacgatgcagatggggtcttggtatttgtaaaccctgataatacaaacttaggagaaatgcaagttttgctgtttttttccttccaaacattgactgtcaaagtacctgggctatgcttatgccctgtcaacgtttggttctgcttcttgtcaataaattggttatgctagagcgcttctataaccttagtcatgctgactttcaaattaagtgattttgcatatattttgaagaaaccaaaatatttttagcttaaattttgtgtttattaatttttttttctaaattgttttgttgctcagtgaaagtttat

SEQ ID NO: 70039 - DNA, 931 bp, Prunus persica
  Intron number 2 from transcript ppa025936m (locus ppa02593 6m.g) derived from phytozome v7.0 (chr-ID scaffold_2; pos 3138197 to 3139127 reverse strand)
attctgcagctggttttgcttcatctcctggaaatgtaagctcttaaggatgcttgccaaaacatgattttaagtttctcatgttcaatatatataagtattttgatttaaaacttgcacattaatttattgttgttgatgctgttgctgaatcttccatcttaatcgacacaagatgaaacactgataaatgaatcaagctctgcttccaataattgtgaatgaaattgcctaatacaaggcgaaatgacaattagtggtctctgtatcggagtttcatccatatgcaatcaatgtaggtaagcaatatcagaaacaaaataaacattaggacactaatattttgcgtggttagatgttttaacctacatccacatttgagtgacacaagaattaacgttgaagggtgttaaatgtagacatttttactttacagtatctatccagattcacttcagtttaagcgtacttaaatataaaaagagagagagcataatatagaataaaaaaagcctaactttatttaattttgattatctattctcaattgaatgttcaaaactatgattgtatgacaatctaaaatgaaacccacaatgacaaggaaataataaaagctataaaggctactaaaaacaatagaaaataaataaacttgcctaattattatttttgtgtccatgcctaaaatcagtacgtaggcctccatgattcctatcataacacactaatacatacacatatatctattttcttgtataggtgcttcatttccatcttcatctttcttcaaatggatcttcacaatgtagcccaactcaacctttggatacttctctagaacatcttgaattcaataaagttgtgcctgcacaactaaatgacacctcagtgggttccaaagtgaagaactgttcggaaatccacctga

SEQ ID NO: 70040 - DNA, 1008 bp, Prunus persica
  Intron number 3 from transcript ppa025343m (locus ppa02534 3m.g) derived from phytozome v7.0 (chr-ID scaffold_7; pos 14786867 to 14787874)
tagagaaacgtcttccaactggtgtcatacatcaggtgcatgtttatacttttacttaattaattgctcgacactgttgaaaatgtaggaacttttataccatttaataactttggttagatttttctgctcaattcaatcatttgatttaattctctaatcggggacataatttataggcaacgaggggatcaaggtctaatttttagttagttgtacaaaatataaaaaaactaattttaatacaatatagatggaatgattaaaggtactggaccaacttgaaatttgacgtcattaaatctaacagtaggaccccaaaaataaaaaaagaagaagaagaaatcctacaaaaaatttgtcaagcggcgtaaagctcgtgagagtgtcaattaatcctaaaaaccttctctatgtggttgcttttgcttatgatttttactatattgtgtgtggttgaaaaagggtttaaagcttgcataaagtgataattgaaaacaaggaaaactgacttgatttaccttgtcagttttgttggaattgacaaaaaagttccaggcattgcacccttatgaaagaacaataaatttgtaaagagagtgctagtattgctttagctcccctttggggaaaaagagaaggataaagttgattacttctacgctttagcatgtgtaaatcaagattaagggaaaacaaactgttacctaaataatcttttgttataattacaacattctatgttttggtcagttactatttgttcttcagacatttacgtttaatatgttgtatagatatgtatattatttgtttatataatagattggaattggaatacatccgttgttggttatatctattggtgtccttagagtaacatgggattgtaatgtgttgctcttgttctgtatagcttaattgaaagtaaagatatcatatttctggttgtgttatactcaaactttccaattggactagtttgcgcctgttgatacaccttctgct

SEQ ID NO: 70041 - DNA, 1043 bp, Prunus persica
  Intron number 1 from transcript ppa016169m (locus ppa01616 9m.g) derived from phytozome v7.0 (chr-ID scaffold_2; pos 13604389 to 13605431)
ctctatcagctggtgagccattctacacactacttgtgtttttgactatattttcttctatcatttcaaaatcttggctgaatttgcttgctgtatcttggactgagtgtatttacgcatttggcactaattctatttttcctttttataaagcttctaggagattatttccttccccaccatattataaagaagtcatcatcaaatttaatacattagttgacattagtttccagaataatatggaaataatggcccaggaaagcgctttgcatttcaatgtgcttgttcaactactaaactgctcttaatttcattatgcttgtcctcatattgtttttttcttttttcttttgatgattttggggggagtgggggattccgacttgggacctcttccaactaaactaagaagaactagttggttgcttcttctcattttcttaactgtgcctttgaccaaaactagttaagctaaagccttatcgtcagcggctgcctaagcagacttcgagaagaagttgttgcttcgagaactatagctgcagctgcagctgttcatattacagccaagcttctgaagcctagtaaacaaggtcacaatttcaaaacatctgaacttgtccatttccctgttgacgtctgaattaaatattgtggaattacaaagtagtctctaaattaaagaaacagaacagaaaggctatacgtggcagtccgttctgaatgacaaattcagtgtatacccaattaataatgaaagaagaaacaacatgatggatccagtggtaaacagagaatagtttcttctagggatttctgaaacctgtggttcccatgtaggcaatactctgatttcaacaaagctacttcattattatttggggtttgacatgtgaccttaactcttagggatgcataggcatgcatggtatcacttgctatatgataaatacacttatggtcattctataagttgtgttacactctaattgttaaccaatgcagctcttaatcttttggacgacgtccaagtgcaagca

SEQ ID NO: 70042 - DNA, 319 bp, Prunus persica
  Intron number 1 from transcript ppa007038m (locus ppa00703 8m.g) derived from phytozome v7.0 (chr-ID scaffold_1; pos 36850313 to 36850631)
ctgaaggcccattctccagtgacctctgcgtcccggtatatacaataaattgcattttgctgcttctcaattgtcatttttcttttcatgagaaaagttatttgtgaatttgtttttcaatcccaaagcaaaacgacaaaattcatgattgaatgaaattttcggcgttacgtaattggcacttggctacagttctcggaaatttgaaatttgaaataaaaaaatttgaattcaattgggtatttttgattggttttgatcaattaattaattaatttgtggaatttttttggcagtacgaggatttagctgagctcga

SEQ ID NO: 70043 - DNA, 687 bp, Prunus persica
  Intron number 1 from transcript ppa026263m (locus ppa02626 3m.g) derived from phytozome v7.0 (chr-ID scaffold_7; pos 10756173 to 10756859 reverse strand)
ttcagaggctggggcatttactgaaccgcgtggtatgatccttcttttttttctttttgattttcttgtcgttctatatggagtctttttcactgttaaagttgatagatgtcgttggtgaagatcgttgtttagagatacagtgttcgttatcctctgtttggtcactgagaaagtataggaaaagtagaaaagaaatagagtagaaaaagggggcaaaaaagttttaatttttatgtgttggaagcaaaagaatcagaatttagaaggctcgaattttgtgccgattaattttccagggttttacgagcaaccaaacagtaaggccgcagctttgggcgggaaaattacgaaacggtcttttgctcaaaacgacctgtcgtctttgaacagtattagaaagagtaatttttgtggtggtttgaagaaataatagttcataattaatcaattggactttcttacttctcccagtttaccaacaaaaattaaaattaaaaatcaattggactaccatgttgtgcattctgctgagaagggcagaatgtttttttttcttttttttttttcttttttctggaatagaatatgcatttagaataatcttagctgtactggttccaagtttattatttcactctgtgcattgcagtcactgctcttcaagatctttacagagcccttaac

SEQ ID NO: 70044 - DNA, 901 bp, Prunus persica
  Intron number 1 from transcript ppa008410m (locus ppa00841 0m.g) derived from phytozome v7.0 (chr-ID scaffold_2; pos 25763348 to 25764248)
tacccaccaatccatcaggtcctttttctctctcatgctttgtgttgcctagagctggcttttgtttgcatttccatttattgaatttgatggccgtttggtgggtttgagtggatatcaaaaatggggttttgaataaattgattaatttggcatatttgtgtttttattctattgaaaattggttgtttaattggatttttggaactggtctttgaatagttttggtttaacaccaaaagaaaaaagaataagagttttggttttaggatttttggtaggtggtataccgttctggtgaacggtgattggattttgcttgtatgattgagccttgtttgctagttcaggtatctttctgagtctaggaatgatttgagtagatgatccaagcaatgttgatttagtatttaaagtcatggaatgtgctaactagataatctacaaaatttagttaactttgtcaaattcaagtccatgactctgcaggaatggtgtttccagggcatatatgtgttgaaagatcccagtcctactaaaaaaggaccaagttatgtgtcgacaatcttataatccaatgttgtgaaaaaaaaaaatggacacagatcttcactaagtagctgaaacttttatcttttcaagtcctccttggcatgcacacacacgcatgcataattggatatgctcatttactttggtctgaaccatagttttccttgcattgacacgaggcgtgggggtcttgcagaatattctttcttttatattaaaaaggttgatattgtaattgtaggtgttttgatatcaaatttgaatttcacaagaccaatgatggttatcatagttcttatgaaccgagccttgtttcttaaaactgaatttgctcttttgcagtgccaca

SEQ ID NO: 70045 - DNA, 793 bp, Prunus persica
  Intron number 2 from transcript ppa006536m (locus ppa00653 6m.g) derived from phytozome v7.0 (chr-ID scaffold_7; pos 22440141 to 22440933)
gatccaatcaagcactctcggaggagcactgtcaggttctgcttcttcttcttctcctcttaatatgaatatcaattacctaatgccaagtctgtaaataaggttttagttgagacaaagagcattcttttgtgttgtatttgtagcaaagatgagtgtcttggtattcttatgtggtattggttattttgtaccatttctggttacaagtatgataaaagacaaattctttgccgcatctgcatctttttctcaacaatttggacagttgcggagcaaaaaacattcctctcgctgttctcattcataatgataaaaactgattagaatagttgctccttgtaaacaagagttcttgagtaaaccctttttctttttcacccatgctgtttgttttccttgggggcattggtttgaaagcaagatttttctagttcctatcaaaaagctattttcaccaggttgtacattacatttaggcaataagtttcctgggatcgtttggcagaatgtgtggttatcagttcttatgtgcttgggtctataaaagcaggtgcaaacatccttatggttatattgtgctacatatccccacccacatccaccccaccaaatgcatttccttcatctaagttcagagtatttttctttatgttagttgtcattaagttctggttttaatctcagaccatatagatcagactcaagatcaaataattactgttttttcctctcttttttcttccttttccgtgcagtatttcttatatcagatcctccgcggattgaaata

SEQ ID NO: 70046 - DNA, 698 bp, Prunus persica
  Intron number 2 from transcript ppa021923m (locus ppa02192 3m.g) derived from phytozome v7.0 (chr-ID scaffold_2; pos 18902084 to 18902781)
ccctacctcctgctagttgtagtagctcactggaggtgagttattatgtccctcttctcctgaataagaaaaagaatccctcttgttaaaagaaaaaaagagaggttgtttctatagccgacttcttcttaaataacttatatatagaatagaaagaagatatcatgagtccagtagtcttacaaattcaacaatatttacaatgaggattaagagttgactttccaattctttgaaagtgcttcttttcactgacattaaattttagaaggctgattcattgtaaattctgggagtgattactcaaaatgtaacttaatggtgcatcttcctggatgcccttaagagaatcaactgataagtagacaacaatgtaaagtaatacagagctttctctattaaaatatgaactgtttgctcaaagaattcatagaagtcgagattctatgctgagtagaaatgttttggaacgacaatatagtgatattgtattatgtaactacagatattcaagacagaactttggagtataaaatattaatgatatcatctaatacaattggaatgatgttttgagttattttctttcaccaaatcaagtaagaactaaaagctatgttatctgctggtttgatggattcaagtatcctttgattttcataggtggcaccttataagggaaggataggtgagtcaag

SEQ ID NO: 70047 - DNA, 889 bp, Prunus persica
  Intron number 1 from transcript ppa011074m (locus ppa01107 4m.g) derived from phytozome v7.0 (chr-ID scaffold_7; pos 17706132 to 17707020)
tgcttatctcctacaccagcaacaccttccccaccgtaagtggagaccccccaattcgttgtttgattttattttttcttctcagtgctttaattcaatttccttatctggcatttgattttagggttctattgttgtgatacgtggaatgtatttggtaattcatttattgcttttaattgggttttgtttggtcctggggaagtttaggtcaaatgcaaagaattattggtgacttttttctttcgatgcaagaatttttttcaaattagcttcctttgaaaattgaatgtgttttttttttatttttctttttgtttctgctcctagctaggaccaaatggaggcttggggactttatgttatttccttagctcaatcttgttgacgtgactggattggtttaggaaacattgggaaaagatatttggaattgtattaatttttgtccaaattgccaaatttttttttagggagaaaggctcgagagttctatctccattttgaatcttcagaaaggttgggaaatagtggtttatttcattagttaatggattttaatgtcattttggatcttttctgcagttaatttaatttcacacatgcccgtaatgtatttggaatgaaggtgtttgataggagttctttcagatttttggcattttgcaacagcaatttcacctctaagatgttatttgatcttatattttcaatttctttctccctagagtgtcttaacttccgtacttttttgcaatgtttgtttgtaatttcatattgttaaggttgaatgagagaattattcataatgttgtatggttaatgactttcctttgcactgtggtgggaaacaggattacgtgccaactgttttcgacaatttcagtgc

SEQ ID NO: 70048 - DNA, 621 bp, Prunus persica
  Intron number 1 from transcript ppa003292m (locus ppa00329 2m.g) derived from phytozome v7.0 (chr-ID scaffold_1; pos 31020674 to 31021294)
aaagagcacttttggaagctaatattttgcaggttctacctcttcctatgttcttacttgcatattctgtatgttagcgtggcctgatttcatccttactcatttcctttgaaatttttatctcactctgctggtgtatcataaaattttataaattataaacaaaaaagttaactttttgttttttgctatcttggttgattgggttgggtatgctgcatgcatcatgttataatgtaagaaatatttatcccttgtaaagtctagcagcagaggcagagcgtggcatctctgtaaagtctatcttttctttgattccattcccactcatctttgagttgatacttataaaaaccaatctatactcatagccataaacgttaaaagttgggactgaataaatttttcaactccctccggcattgacatcatcaatttgtatccctgaatgtcactaatttgtgatggaatactatagccattgcaatttcagtcaggttgttgataccccacttctattgagttccacattggcaacatttttctttcctgcttttgtttgtcctttggattctgaccatttttttttatctatgtgatgttttatattatgtcttcaga

SEQ ID NO: 70049 - DNA, 532 bp, Prunus persica
  Intron number 1 from transcript ppa022252m (locus ppa02225 2m.g) derived from phytozome v7.0 (chr-ID scaffold_2; pos 2762998 to 2763529 reverse strand)
ccttgcaccaaccacgcattgtccctgagattcttgtgagtactgcatacccttattactctattacaaattatttataattcggcgtaaatattatttggtgtcggatatcaatctacaatatttggacgactatcgatgaccatgtgtttaactggtagaaaataatatatactagtcctcctgcgccatattgcccatatgctgaaaggattgtacccctagatatatgttttacatgaattgacataacatgctaatggtcttagcctttctacacgcgtgccattttggccattttatgtggttgttataaatcagaagaagaaaaaagaaatcctttttcaagaaaaatataagccaaattgaaattacagggtcctggtgaggtgcgtcgaaacaaatggatactttgagtcttaattaagttctatattgttactgtgtgcttgaaaaatttatgtttatcacgaaaaaataattgtcattagagcatatattttcagtactaatttaaaattttcagggaggc

SEQ ID NO: 70050 - DNA, 539 bp, Prunus persica
  Intron number 4 from transcript ppa009289m (locus ppa00928 9m.g) derived from phytozome v7.0 (chr-ID scaffold_4; pos 14703896 to 14704434)
ttgcaggtataaagtctttataattatttctttgctgtttaagttacctttccagctaatctgtttcttgtaaattaattacctgaaaacttcctcagtggactaagacataataataccttcttcttttttccttttgtaattaaaaaaatgaaccacctggaaaccaaagtctccctcatctaactgttctatgtgactttttttaaataaacatgttcaatgtgacttagtacataattaatcagtcaaattgttatgcattttttatttttttcaatggaagggaatcaaacctttaatctagcacgtaacgttttaatttcaatgaaaaataatacaaaattcaaatagcgttcactgcatgacgggcaaggtcagccttccagaccttggtttttttttttctttttggttactattttctttgatgtgaactgtatatgggtagggtttgattaatgaaggctatttgtatgataaatagacttacgttagtttaatgaaattggttttgggtgatcagggagctgtcacac

SEQ ID NO: 70051 - DNA, 728 bp, Prunus persica
  Intron number 2 from transcript ppa015462m (locus ppa01546 2m.g) derived from phytozome v7.0 (chr-ID scaffold_4; pos 2611900 to 2612627 reverse strand)
acttgaggtcagacaccaaaaaagacttgaagtcaacgtcaaacaatcaaaaggatgggtgagagaatctctttgtcagctctggctatatttttgaagtgtataattgatttcttgagcaacgagtttgcagaattgagtcaaattgatgaatgcaattatacatgtctggttatttattttctcttcaacaaaagctgggttgcaaccctgcagaaaacccagacatgagtttgtgtagtcttttttgctaaatctttcttaataatcaacctcaaattgcatgaagtcatcatgatgttgaaagttttgtcttcattaagtctccaacctcatgttgacttaatggcagtacagctcaaattataaaactataggtgctgatcagagctggatttaaacaacctaagaaattttgtttagtgatgttgggttgctctctactaataatcaaatattttctcgctactattttttatatttttgaccgaagacctaaatagaactggtggacgcacatggttgtaaggaagaactcctcctcaattttaaggagacaagccatttatttgtactgttttatgatttgggctcatagggctgggcctgcaaaaatgttcgtatttcttgcatatatatatatatatatatatatatatgtggttttgaaatatagtagttggactagacttttggatttagggacagtttaaagcccgtctacagtt

SEQ ID NO: 70052 - DNA, 755 bp, Prunus persica
  Intron number 1 from transcript ppa006651m (locus ppa00665 1m.g) derived from phytozome v7.0 (chr-ID scaffold_1; pos 43594254 to 43595008)
gttatatcaaggtcagctgtttctctattgttcttctttccaatttaatgttcccttttcagttatacctatttgtatgttactcactttaataaaaggaagatttcaatttgtatatgtgttgatgtgtatgtttatgtattgcatgcacgtagttttgagtgaacatgtttaagactctaaattgatacttacagttcaaattttgggttatgattggtgttctcaagctgtgtgctttattgcccaagactgaatttggtatctaattggaattagggtgtctgagttttattgagaatttggtaggaagatatagatatttacatgacacatatacagttgccaatgttcattgatgcgagaaggatacatttgttacttgttcaatgaggggtcgaagaagcatatttgatttactacaaataaaggacccttgtttgtgcttgctaaatttaaaggtaactttgattcttttgtaatattcttggattgaggtaagttttattgggtttggagtggttgctttggttgcatatgcactaattgtggtaatgaatcgtaaaagtttgcttcttttatggttgtttttattttgcaaatattccgtttgtcttttgcttgcctttaagttgcctgttattcccttatgaaggtgtacagtcattatctttggttctaggtctgtattcagaagtagaatgtgtgtgatttgtgcaggaaaccacaccattagccggttcctctgcaggtgc

SEQ ID NO: 70053 - DNA, 179 bp, Prunus persica
  Intron number 2 from transcript ppa015306m (locus ppa01530 6m.g) derived from phytozome v7.0 (chr-ID scaffold_5; pos 274161 to 274339 reverse strand)
gtggagtggaggggttttaaagttgtgtataaaaggtacaagattactgtttttccctagctactcacacatttaattagtccttaattaatttgaaaatcaaagctgcacattgtaatattgttcttgaagattcataattgttttgttttttttcctacggattatcatgctcagat

SEQ ID NO: 70054 - DNA, 784 bp, Prunus persica
  Intron number 1 from transcript ppa011804m (locus ppa01180 4m.g) derived from phytozome v7.0 (chr-ID scaffold_4; pos 2190689 to 2191472 reverse strand)
atttctccagcttcatccgccagcttaatacttatgtaagtcatcgtcttttccttgttattcaacaattgtcttctatgagattcgcgctaggcccctctttcttttactaatctttgatcaagtctttctgattactcagaatgctttttggttatttttgatcagtttctcaagaacccagtatttcatatgtgaatcataaatattttgagtgatgggttttctttcttttcttgtgtgtacctcaccatgtacacagcagtcaaactaagctaacagaaaatataataatctggagaaagtcaaaacatttgaaagttgtaattggtcaaaataatcacgctccgcagactgatttatagtatcatacagcatcacagctccttcatctataaacagtaacataaaaaaagcgtgcacctctctctgccatatcctgtttttactgttttcctttgtctgcttattttacctaaccaataatgtacttgatatcttaatgattttcaatcatttatgttcctgtcaatgtgcatccgtgtgtgtattttaaatacaggacagtctaattaggaagcattagcaacaatggtcaaatttggttttggaataaacaattctatgcaccttcgaaacaacgtttgtctgatgctaaatgtccaaaaacaaagttgttgtctcaattcatgcataattaattggagagtttggctggttttttgatttatgaatctgacccttgaagccaaaagcaggggttcaagaaaacatcaccaagaca

SEQ ID NO: 70055 - DNA, 494 bp, Prunus persica
  Intron number 1 from transcript ppa002356m (locus ppa00235 6m.g) derived from phytozome v7.0 (chr-ID scaffold_5; pos 9343780 to 9344273)
actagtcttcaaggttggtaattttcttcggatcaaatgtccagtttctggagaaaagtacattttcttgtctttctggttggagtgccttttttggtttattggtataattggatgattactgtctaagatagctgattgtactagtgaaagctccgatttttcgtggaaaagtagtttaatttcgtgatttgaattagcataactggctcctttttgtatcatatttgctactgccgtccaaacaaatgaagatcactgtctcctgtttttcttcctgttgtaaagatgcattttagtttgctatatagttatatggccatgatttagctcagtccatgctcttggatttatgtcattttgtgtttcatttccgattgttcatttaacattattggcgttcttggctttaatccccgtatataattttctttctcgttgtctgtttggtttttgtagttttacagctgtgttgtaaccagctgacgggaaat

SEQ ID NO: 70056 - DNA, 886 bp, Prunus persica
  Intron number 1 from transcript ppa1027125m (locus ppa1027 125m.g) derived from phytozome v7.0 (chr-ID scaffold_6; po s 23924573 to 23925458 reverse strand)
gtatgtgctgctgggtgtcattgatccgcagataatgtattcgtcagcagtgtatgaaatctgttatcagataatgaaataccctccttaggcaatgcaagcaatatttttaataattttgactattgtgaggtacaactccaatcttcaaaatctcaatcatgaagcattcttttaattatttatttatactcttttttatttttaaataagcacctgaaccaatcatagaggcaggtctgttttaaatacgagcttggtagtctcatactcaactcaattaactaaaatatttgtcttcaactttttataaagtcagaaaccaagggactgaaaatacgaaaatatttgtcttctaaaattggcggcagagcagaatgtcaacttctggagtttagacatcaatatcctcacgcggcagggaagaacatgactcattcttcaaactcatcactaagtttggatgtttattaattaaacttctgctaaattagattattaagaggaatataacataacaattttgattatttgtttgctacactggacaggtcttttcttctttagttaaaaaggaaaaatccttctaacaccttctaactgtgcaagttctgtgaactaaattcttccattgtccaaactctgttaggttgctgttctttctttcttcctccccaactgttcctcctcagtcctcctcacaaagtgagatatttgaaatgttaactttggtgaagatcactggtaactagacatagctaccctttgagccattacttgttatatgtttgcattaacctaaactttttttcatctaatcttccatcatgcataacattttctttaattcttttgcttctgctcctaaactgtatgtagtgctgac

SEQ ID NO: 70057 - DNA, 698 bp, Prunus persica
  Intron number 1 from transcript ppa026607m (locus ppa02660 7m.g) derived from phytozome v7.0 (chr-ID scaffold_16; pos 354978 to 355675)
tgtaggggtcattgggtgtttgtttaggatatttatgtctttaaatgaattaaaacgacagtaattcataaaaactaaataaagcatcaatgagaattcttaaaaatgccatgtaacaggaagaaacacaacggtttatatataaaactgaagtctacatgcaccttcatattttaacgaaaatttttgtaccgatatagtacgtccatttgtacaaacatctcaacgtcttaaagacatacaatggtggttagcttacaaaacctgacgttgtagagataaacaatggcggcatctactttagaaaagacgttgtaaatataacccacgtcagttattaagaaaaagctgacgttgtaatttacaaaccacgtcggtgattgctttttgacgtctagtatgatctaggacgacgttaagtgtggtctaacgtcattgtaaagggatgcaacatcggttatgtacatttgtcatttcattttaatatgacttatattttattttatatctattacacaacgattattttgtaaaaaccgtcgtttgattcttgtttaattttttattttcaatttattctttgctatgtgaatatagtagtgtttcattattggtcttttcactttattatatatatgattttatagtgtgtgagatggataagtcatggatgcatgcagatagaagatcgaaggcat

SEQ ID NO: 70058 - DNA, 805 bp, Prunus persica
  Intron number 1 from transcript ppa002626m (locus ppa00262 6m.g) derived from phytozome v7.0 (chr-ID scaffold_4; pos 731489 to 732293 reverse strand)
attcgtctgtggcttcggtatcggttaccgttcgggtatgtgctgttgggaaagttaaagtttttcttggttcaactctaaactattgaatttgaggtatatttttcattgaggtatgatgggttgctttgcaatttggttagtcaatgtgattcaggtattcgagaattaatagaattgtagattatatcaaagaaacatatgacttttcattattacctcaataaaggatggtgattttgctaagaatagccttcaggttatcaaactgtcaagcgtgacttgctgtaattgcaataagattgttcatggaaaaagagttgccgtcagatttgattggtcatgttctgtcaaaaggttcaaactaatatccctaatattatgtacatgagttgatgtcggaatgaaattgttaatggccagtttaagttacgtttaagtttttggttttcagtcctttttttatatttaaattttataaaaagtttaagagatagaggaaaatacatgagagaaatgaaggagggaggtgagatatgagagatgcgaggaagaaatgagggagaatacacaaaattaaaactaagaaatacatgtaaaactatttttggtttttattttatgaactataccatgtacattttctcatccttccctcacatcacatctgtcctctttcttcccactattttctcatttttcctttcctatgtttaaataaaaataaaaataaaaactgaaaatgaaacattacggatcctaagattttcctttttggctcttactcggtatgtttgcaggaaaa

SEQ ID NO: 70059 - DNA, 569 bp, Prunus persica
  Intron number 1 from transcript ppa003952m (locus ppa00395 2m.g) derived from phytozome v7.0 (chr-ID scaffold_8; pos 10368837 to 10369405 reverse strand)
ggctctcgagctcctcaagacgtcctcggctgacagtgagttctcttctcaattcaatttttgttacttttcgactgatagccgtgattgtgttttgaattggtagttagtgtttaattttctcatttgttttggaattttgattggtcaaatgatttcatttgcgtaatattcgtccagtaaaccagtttagtttcataaatcgttgatgggttgtggtttagggctcttgaaatgattgcaaaaagttaaagaacagtgactgtttagtgacctattaagtgttcatctgagaattagcaaagcatttactttttgtttttagtttaatctctgaaattttcctctagttttcaatttagtataatgggtatgtgtatgtgattatgtgactgttaagcaaaatctttactctataaaggttgaagagtatgtttttttggtggaataaattatatgagtttgaagattgtgtgatgcaactagttgaattggtgattcaattttctgaacaatttttttattttttttcaggatatacgaaggaaaggagcagcctagcggttata

SEQ ID NO: 70060 - DNA, 598 bp, Prunus persica
  Intron number 3 from transcript ppa012000m (locus ppa01200 0m.g) derived from phytozome v7.0 (chr-ID scaffold_4; pos 13319759 to 13320356 reverse strand)
ttgaagatcagacagagcaggtattgttaatggcttgtacatgtcttactatgttctgatgtattaggtatagttgtgtggattttttttgggatttaatgtaatcataaatctgttttttttttttaatggatttggttggggatatgttccttgattcttaaactgctcaagggtcaagctgtaacctttaaaccaattaacttcctcatgatttagaagtgaaagttggagaatttggtggttgtgggatcttacattactgatcaatccacttggtacctctgcagaatttataacagttactgtctcaattgttcagaagttaaaaacaaaatatttgatatttgtttttctgtgcaacattgcaaccaaagcttatactaatgtttttcacaaaccttcatgaaggagaagttacatttcttatcctaatttctatttaagttaacctgttgagttatgaactcataagcgaggtaggtgtttatgttcttttgtttcatcatctttgtaatggagtatagatgatggcattggttgtctgactgtttctgacagatttgggcgtatgaaactattgcaggttctaaaaaat

SEQ ID NO: 70061 - DNA, 865 bp, Prunus persica
  Intron number 1 from transcript ppa011506m (locus ppa01150 6m.g) derived from phytozome v7.0 (chr-ID scaffold_5; pos 2133785 to 2134649 reverse strand)
gcaggtgctctgtttatagccggtaacgttccctacttccattctctctctctttgattccgcagtttactatactgatctatgcagttgtatcattgtccgttgcgtttatgagcaaatgttattaaaattgatttctaatgggtatagaagatttatatccatttgatgtcggtatgatgtaatctggtttaccacgtcaattagttgtgtggagccattgtcaaattcccctctgcttgttagtgcaattgaagtttaagtttgtcattggtgtacttgatgccagatgaaaaacttatgcttttgtattatattgatcactgtttgaggataatagcttttcgaacttggattctcaagcacttctagtgttgcaatttgggttctgtaacttctgttgtatgccggtgctaaaaacaagaacaaacttttaaatgtggcaactttttttgttgttgtttttggcaagttagaaaatgtgcaagctgagtttctttgttgtgaaatctcaagcatttttattgataaaatgccaagctaataaacaaaaattgcagaacccatttcccttttaactcaattgaaaaacagtatggctatttataatttatttccctttgtctctgaccatgtccactagcttttgaatgggtatgtgttaattgcaattgctttcttagtttcttgttcatacaacggcttgtattttatgttgtttttgcctgctttaaaactgtttctcttaatctttgtgctgtttcgtacccttctttgttacatgtttgggatgatatgtaaaagaactgaatgtgcattgctttattttgaagtcccttgttcaaatccctattgcaggtaagtc

SEQ ID NO: 70062 - DNA, 870 bp, Prunus persica
  Intron number 1 from transcript ppa011278m (locus ppa01127 8m.g) derived from phytozome v7.0 (chr-ID scaffold_4; pos 10198083 to 10198952)
aaggcccagatttgggacaccgccggccaagaaaggtataaacttgcagcctttttcccatttcaatgatttcagtcaatttttctgtttattggttttcgtataggatttgggtaaattggttttgcccgtttgggtgctgagaaaatgtggggaaagggaaggaaatgtttatagttcctggtcgtttaatgaatcgagatctattgatagaattgggttttttaattgttgggatgctgaggaaaatctgatattgatgtaagaacactgctttactttttggcttgagtaatataacttgccatattaagaaaatgtgcattatggggttatggcaatacattggttattggaagccaaccatctgtttgactttatttgcttagtagttggatgcaatttctctttctggaggtatatataatctcaaagcattaggcttgaacatagtactctttagttctgcttggttcatagcagacggatcaactgttgaaccctgtaagtaggttattgggtgcgcctaatttgtctcgtatgcgcaccaagtgtgatccaacaagagattctgttgtccctctatgttctgaacagtttttttttttttttttgaaatagtatcggtactgagtatgtatcggtttccttctatgaaggagatacaatcttactatgtgtttcagaacctatttggtagcagactagcagtacctgagagataattagttgccgaggaataaaaatattttgtttatttcatgttggtcttggttgtgatgatgattgtttgaatttgaagtttgaataattactcattttcttcctgttaaaggtaccgtgcaattacaagtgcatactaccgaggag

SEQ ID NO: 70063 - DNA, 931 bp, Prunus persica
  Intron number 1 from transcript ppa019629m (locus ppa01962 9m.g) derived from phytozome v7.0 (chr-ID scaffold_5; pos 399673 to 400603)
gaaaagtacttgggagtgcttcctgaagaagtacatgacaggtgctttagaagcacttctaaacttttctgtcaaacgctgtaagaatcgtttttggttgtcagaaaacgcttttagcactttcagaatcactcccaaacgtagtttagttggatcttccctctttgtattttttcacgtgcttctatttttttttttaaaaaaactaatttaatttttgttgttataatgaaaaaagaataaaaaatacaaatataatgacaagactatgactcgaacctgggccttgtaccgagaaatatgcactagaaacttttgtgtcaaagtgctgcacactagagtatatataccacttttataatattaatatatatactataaagtaaaaatatttcagaagccctcaaaaatcgatggaccctgtgtagtagcctcacttgcatcataccagggccgacctcttctctatttctgtatatgatttgttttggttgtaaatcatactatttgtgtttgtacccaattttggtaaacggaccaaaaatggtctgaaatgttaaaataatattttaaagataaagccagacccattagcgtttgtcttttcttaaaatgtcatcttttccctaatgggctttttaggataaatcaataagagggcccaaattgtaaaaatcagaccctcatcttttccctttaagccaagagacaccatctgatcggggcattggtgttgattcaacgaatttctccgttccttagagcagagctgacccccgtgtgcggcggaaaggaacaacggacagaaaaaatgaccaacaatttgtctcaagggcatttttctttttctttttggtattgaaaaaaaaaataaacgaaattttcaaatacacaagttaagagacagaaaacaacacacactttttaaggc

SEQ ID NO: 70064 - DNA, 570 bp, Prunus persica
  Intron number 1 from transcript ppa023977m (locus ppa02397 7m.g) derived from phytozome v7.0 (chr-ID scaffold_1; pos 16640406 to 16640975 reverse strand)
cctggggtagaaattgatcgatctaccttatggaagagagctagacaggacaaacatggtaacatccctgatccaaaggtggcagagaaagcaaaattaattgtaagcctactatcactctgttttaaatttttattaaactgtgaattattcttattacgtcgtatgttatatttttcgtcgtgtgaatgatattaccacgtcgagaagtttttaaaaacgtcgttaaaggtctaaataggaatcactactatgttttttgtaattatagcataagacgtcggtggttcattttggcgtcgtttgaatgatattaccacgtcgaaacttttttaaaaacgtcgttaacggtctaaataggaatcactactctgttttctttaattatagcataaggcgtcggttgtttattcatttcgtcgttttaaataaataaccacgtcggtataactaccgtcgtgataagttataataacgtcggtttatacgttattgcgtcgtgtgaaattatataatacgtcgtttgtacataaataaccgtcgtgtgtttttttgtttatcttttttagg

SEQ ID NO: 70065 - DNA, 823 bp, Prunus persica
  Intron number 1 from transcript ppa016896m (locus ppa01689 6m.g) derived from phytozome v7.0 (chr-ID scaffold_1; pos 16408293 to 16409115 reverse strand)
catttcttgctgaattttcagagctaaggctggtatgttctcatcctgattattcttcgtgctcttcttcctataggaaaattagttattcgcatggtaaacatgaaatttggttaagaaggtggtcaactctgcttgtcttggtgcttctctcgacaccagattcctgtatctctttgtgcctttattttttaccacagtggttaagccctttgcatggtaatctttttcccccgtccatacctttgaaaaattctctttttgctgcgcatgatgtttctagttttgccatagacacagttgggggaaactaaagtcattgagaatgtggatggtagagaatgcattttattgaggtctctggatttttagtcaggacaatttttatttatcagtcgtgtttcttctttgaaagagtgtacttaaggtaaatggtttagggtttagggtattaatatgaacataggacctaaacccattataaagctggaataatggtatccatttttggcaatcttttgttttttcaatattcttttccaacattaagtgccgtttttcctattatatagaatactttaataaactagggatcttaaggcggcaaggtaatacatttgataaaaggagagttgacttcattttctgactttactcttatcttaatctcaggctctgtctcgttttgagggttataatgcaagcacgtctcaagatccccaatcaaaaaatcttcttcatgactcccatcagctacctgggagtattgtttttgaaaaatttgttaatgttaaatccaaggaaattgacatccactggcctc

SEQ ID NO: 70066 - DNA, 605 bp, Prunus persica
  Intron number 3 from transcript ppb017154m (locus ppb01715 4m.g) derived from phytozome v7.0 (chr-ID scaffold_2; pos 11615789 to 11616393 reverse strand)
gacaaagaaaaaggtgatgacttgctccctactctcacatgtctttacttttttagttttcaagactgtttcatgagttttggtttcattggattattatattgtggtttgagttacttttgatttcaacatgtatttttttaattggctttgctctaggttacttttgagttactgtttcatgagttttgattcattggattattatattggctttgctccaggttatttgaacattggggttccctcacccctccacccaaacatcaacttatgcacatgtattggctttgctccagcatcgtcttttaatttcttttatttttttttttatggtacaagtgtttctttacattttaaattactattacaacatatttgcacagtagaataaaaatatcacagatcagtggtttgtgctgcgttgtttggataaatattttctttctttttattgcttcctatagttattatcattgatatgttatattaccttctaatctactcaatttattgattttttaaatttatttttgtgttatatgctacgaaaattatttcttcctatagttattcattatcatctcacaaaaattatttctttc

SEQ ID NO: 70067 - DNA, 647 bp, Prunus persica
  Intron number 1 from transcript ppa007793m (locus ppa00779 3m.g) derived from phytozome v7.0 (chr-ID scaffold_2; pos 18750319 to 18750965)
ttgattctcaaactgcacataagtttggttctcaggtataattgctgattctaacttctgggtttggcttaatttgtagttgtattttgaagtttgagattattatggtgttgataaagttggttccttgaattacttgataagtagactttgtattttccacttgtaaattggttggttgattttaagcacaacaataatcgtacttgtggaagacctcatacaagtaacactaatgcacttatgcaccattgccatttcctgcatataaggtgtgaaacgccaatgaattcttcctgtcacagcattggcacagtgaggatggaatttgatgtgcaaatttcaatgatcttctttttgcttcccacacttacctaacaacttctgcttaagttcttgcaactaaaatgaaaaataatttaattctcaggttttgcctccagcatattgttcccccccttccattttttatttttaattttaattccagtgcttctcttggcgtttatctttgtctcctgtggacctgtatatgattattggaactgtttgaccttatgaattgttgattttttcctttcaaaagtgatcttgattggtttcctagtgtagggattcttcaactttacttcccgaaggccacgcca

SEQ ID NO: 70068 - DNA, 1003 bp, Prunus persica
  Intron number 1 from transcript ppa014373m (locus ppa01437 3m.g) derived from phytozome v7.0 (chr-ID scaffold_6; pos 2285823 to 2286825 reverse strand)
accctccttctcggcccactcgtcggcgtctactcgtaagctctccttctcctccttcttcttcgaatcttcctttttttcgttgatttttatattcatatgagttaattgatcgaatttgctggatttatagtaaaaactaaatttgaaagctttttctttttgccacaaagaattgtcaatacccatttcaccaagcgcattctctctctaagttttcccaagatatgatattagggttcgcagccataccgaaataattatttgtttagattgtagctgaggaatttggacgaaaaactgggaaaaaaaaggtggcagcttttgatttttaattaatatttattttcaccgatgcatgcagactgcagtctgtatttttcttacaagtcgtcgagtacatattttttgttcttggtttttcataatcagttgattgtttagaaccagtgatatttagttcatctgcttagaggaatatgtgtgtgtgtgtgtgtgtgtgtgtgtgtgtgtgtgtgtgtgtttgttcggggaagtcagaccagccagaagaacatcattggaaccccttgatatcttgcttgaggaagtcactagttttcaaaatgaggacttgataaaacaatgaacaagataattagaaaactaagcagaattgagacacagcctaaaatcttttcacactatttcatcaaattctagcaaacattagcgtaggatgtaaataaattaacttagctaagttgtgtataaggctcagataaaagagattctttgttttgaataggcattttgttcgtcagtaatacatttgtttcaacattgcaaagtcagaccaatctgtaattgccctcttctttgtttctgtcatcgtcgattttacttattatttggtgtctaactcccctttcctattcttcttccctatgcccacaaaaatattttgattaaatagaccttctatttttttgttcttgtgctcaattctgaaatgtatgcaggt

SEQ ID NO: 70069 - DNA, 1042 bp, Prunus persica
  Intron number 3 from transcript ppa016817m (locus ppa01681 7m.g) derived from phytozome v7.0 (chr-ID scaffold_4; pos 29794613 to 29795654)
ggaagctttgggtttacaaaattgacattgaagctgtaagtctttgctatccttttctcttatgaaatcgtatcagtttgggatttgattttttcactttaatttggattgtatttttgttgaagttggattcattttgatgtgttgaaagcttgatagaacctcaaatttggggtatgttagtatataaatacattttgggcagatttgttaaaatttaaaaaaaaaaaaaaatcggaaccgcaggaaccgaaccggaaccggacaggttcggtttggttcgaatttctgtatggatgttgagcagaaccggtccaaaccgaaccggtctgcactatcggatcaggttccattttttccccgaaaccggtccaaaccgaaccgtgcccagccctagacgtaataaatgtttaaaaccaaggtaattaaacaacgacgaaataatataaaataagacgtaataataacttataaacgacgtgataattaactataaacgacgaaatatttatataacgtcgtggtattgatgttcacacgacgtcaatagtaatataccgtcgtctatataaggatccaaaacccttctttctttctctgtgaatgtttgattgcagatttgatttttctgaaccatggtttttgttttctaatttgataaaatacaaggccaagaaagaaagttttggaatcttatatagacgacggtattttaatatgacgtcgtggtattaacattcacacgacgtaaaacaataagatactgtcgtctatattagataccaaccttactttctttttctttatattttatcaaattagggaaaaacaaaaaccattgttcagagaaatcaaacctgcaattaaacaagcaaataaaaaaaaagactataattttaaaaacaactttgtcaattttcagacgacgctagaacgactgacgaaccgtcgtggtctacatatttaaccacgtaaataagaagctaccgtcgtcttatttagttgaggtagttgtcttcaaagttggaaactttccctcttt

SEQ ID NO: 70070 - DNA, 559 bp, Prunus persica
  Intron number 1 from transcript ppa005700m (locus ppa00570 0m.g) derived from phytozome v7.0 (chr-ID scaffold_2; pos 19765288 to 19765846)
gtcgaacacgtatgtatctatgtctctctctctctctctctcccccccccccccccccccctaagcatctatgtttatgaatggggtggcaatgggacccactcgaatggtaagagatgggaattcagtttagttgaagctggtgatcattgtgttgcggaatattgtggttggtgcatgtgaatttttccggtttggtatttggtaactagacatgttaatatggtggttttgatgggaggttacaagttttttttagtagaaatctgtgtttgcaattgccaaacatgagttagtgaaagattgattttgtttttatttatttttttatatacttatttataaatttttattgacttggtaggtgaggtgataaaagaaaagaataatgaaatttgttcaataatgtatttttaaatatatatattatttaccatgtgctcagcatgagaatgaagacaagacattgatcacaaattgttttttttttttttggtcgaagatcactaattgttgtatttgctttgtataatgacagataaaaagagagatatcaaca

SEQ ID NO: 70071 - DNA, 656 bp, Prunus persica
  Intron number 4 from transcript ppa002045m (locus ppa00204 5m.g) derived from phytozome v7.0 (chr-ID scaffold_2; pos 22275432 to 22276087 reverse strand)
ttggctttgatcggttgggcgcaaacggatcacaggtatgataaaaaatggacagtttgtttcttcgttttactagacttccattgttaaggattttttagctgttagcttttcagcagtttttgttttgtttttttgttctaccatgattttagtctatgttgaggcaattgttgaggcaagtgcttgtttcccatgacattttgcaccatgcttttaatggctaacactataggttcttcatctgccttaatgttttgtgttctggttctctagcgatgttggtaacttggtagaatctatggtgtgcctgtatcgttgttggtctttatgggattccttggttaaatggatcagttattaggttcacgttccgacatctgtgtaatttcaagaccatatgagaatggcatgatataagcagactagttcatgttggccagtattagtttgcatgaatgatatgcaatagtgtgttcatattttttgcttttaaaaaatatattgtgatatacatatgaatagttatttattttaaatactttgtgtttttttatgtaaggtttcagatcagtctatatattcataagaactttttcttaactttgtgttcatttgagggcaggacagattgatcattcgatcctgattactga

SEQ ID NO: 70072 - DNA, 596 bp, Prunus persica
  Intron number 1 from transcript ppa022128m (locus ppa02212 8m.g) derived from phytozome v7.0 (chr-ID scaffold_4; pos 4972761 to 4973356)
ggagaggccggtctactgttggagattatctggaggcttcgatttttatgggagtagcgtgcgttggtcttctttttcatatcgaactccagcttgctctctgtttcagtctctttctctcactgatctgtaagtaaattttgcttcatctttcctttcgatttttgttgctcttctttttcatttttgttgttactaatatcttggatcttatttgattaaactataagacctgttttaatttgctgctctaaaagtccaaatctctaacagatgttatagattttctgtttgcatgtagttataaattttctgtctggccgattttttattttttatttttttgtctgtcttgcgttccctttttggactctctcttcgaccttgaagatgcataaggttcttgattactgtcaattactgagaatcctgttatgtcattttcacatacagctcagacagactagcttcctatagcatatacagcccttgattataaaagggtggaaccacattctcttgatatagtattgcaattgtatagcaagctgtaaaatttgttgtattacctgcattgtcctgctgttcataggtaa

SEQ ID NO: 70073 - DNA, 922 bp, Prunus persica
  Intron number 3 from transcript ppa016458m (locus ppa01645 8m.g) derived from phytozome v7.0 (chr-ID scaffold_5; pos 11243923 to 11244844 reverse strand)
catttctggtgcctgttccttattatccagggtatgctctaatattctttcgggaaagattaaattaataatgtaggccatttgcctgataatgagacgtttagcaattgataagtggaccttgacttttatttcaaatcacaactctatgactttcgaccaacttgagcttaggtgggggcctgaaaacgatcaattacaactgggtcagcagattgtcttaaaaaccattcaatacgtattacattttgacaaaaaggaaaaagatgcttggggaaaatgaggtccacttcccctttagaggacagtttacaactgtgcagactttggatacttttctttataaaaaaatcgtccatttcttagttctagccaactagcctcttcatacgcacttccgcagctgcaagatgttttttttaaaaaaaaattaaatttattttagaattaaaaaagatgatgggtagttgtgttccataaaaataggatccattatctgattttcttttcattttaatttttttaaatatgaaaaagtatgaatttatcatattatcctcatttaattaataattttaattcttaatgtttatattaactaaggatattttctgatattttgaattgtttcacaattcttgccttttgctttatatatatagattagttgaaatcttagtagctgaatgcactgaactcgtgtacaattcttaccctttcatggtggcccggtaatttccacctcatgtcaaaagcagtcaaagcagggacaaattttccctggtgaaaaactttataatgaaactgtttaaaggcagcaaagtttaaattaagggaaataatctttgaacaacttatatccattctgcagcaattgataattttttttggaatttatttgcagtttcgatcgagatcttgg

SEQ ID NO: 70074 - DNA, 558 bp, Prunus persica
  Intron number 1 from transcript ppa024826m (locus ppa02482 6m.g) derived from phytozome v7.0 (chr-ID scaffold_3; pos 5379883 to 5380440 reverse strand)
ggctcctgggtttctgagattcgtcatccattactgtattctctgcttctcttcttctcttttcctaccaacccccctccattaattccattgctgttttctcaacaaactattcaccgtatacttccattctttaagagcacaattacatatatatatatatatatatatatatactttacatatatttttctagttcttgattctatgtgttcttcaattgtaaaaaaagagtcccattatagcatggtggtggtgccttaattacttgtttagtgtatggtcttaattttgggttttggttataggaaaagacataagtaccaatttagtttatagatttagtatgcgtgacaaagtttgttagttaattattatggggcaaactatatctccacacaaacacacacgagtaggtgttctaattaagggcctaattaggaaatgtgaaagaagtgtcaattcattgatttgatccttagttagtatcattaattaaattttcttttattttctttttaaaattttaaatttatgctaatgcaggaaaagaagggt

SEQ ID NO: 70075 - DNA, 571 bp, Prunus persica
  Intron number 1 from transcript ppa018198m (locus ppa01819 8m.g) derived from phytozome v7.0 (chr-ID scaffold_8; pos 9860377 to 9860947 reverse strand)
cctggggtagaaattgatcgatctaccttatggaagagagctagacaggacaaacatggtaacatccctgatccaaaggtggcagagaaagcaaaattaattgtaagcctactatcactctgttttaaatttttattaaactgtgaattattcttattacgtcgtatgttatagttttcgtcgtgtgaatgatattaccacgtcgaaaagtttttaaaaacgtcgttaaaggtctaaataggaatcactactaattttctgtaattatagcataagacgtcggtggttcattttcgcgtcgtttgaatgatattaccacgccgaaacttttttaaaaacgtcgttaacggtctaaataggaatcactactctgttttctttaattatagcataagacgtcggttgtttattcatttcgtcgttttaaataaataaccacgtcggtataactaccgtcgtgataagttataataacgtcggtttatacgttattgcgtcgtgtgaaattatataatacgtcgtttgtacataaataaccgtcgtgtgtttttttgtttatctttgttttagg

SEQ ID NO: 70076 - DNA, 801 bp, Prunus persica
  Intron number 2 from transcript ppa022722m (locus ppa02272 2m.g) derived from phytozome v7.0 (chr-ID scaffold_1; pos 35836049 to 35836849)
gaaaagaggtcaagaagttgatgattgataacttattggcgttgtaagaaatagagctccaattctacactgacgaaataatcaagggaatcattctggtaagtaatccaaatttttaaaccttgcacttttttatatatttatttatcagaacttgcacttctttaattggttaaactaatttggttttagttattgaggcattaagcttttataagatgaggcttttcttttgtctttcttcaatcttcaaccgatttattcatattataacacgtgtatatttattaatattgtactctaaagtataaaatgtcatacacccatattatgacacttaaactaatatcgctaccttctagcagcatacaatagttattcaggtacgtaattttgagaaattatgaggttgatatttgtttttcacattaattagtcaaaagaaacggctagtttttttaatatatatttattataccagcaacaatttctttaatgaaaggaatacatgataacatagccccccccacaaagggctcttgtatataatagaaagatacaaacaagaaacacaactatagcaagacaatgaggaaaatcaatttcaactttatagatatgatttggagttggtagatgcccaacactcttacttatttcataagtccgtatgcaaaagtttctgcacataaaagttaaaatagtaggaagagagaaagagacaaaatacattatcaaatggtagctgcaggattaagcaacttacaaaatgtcaactaattaccaagttaattgtaggtg

SEQ ID NO: 70077 - DNA, 641 bp, Prunus persica
  Intron number 1 from transcript ppa003566m (locus ppa00356 6m.g) derived from phytozome v7.0 (chr-ID scaffold_6; pos 10804821 to 10805461 reverse strand)
ccccttacgtgaactcaacatctccttcgtcaaaggtagtgcttcttttcatcttatgtattcttatattttatgcatttatgtgggtaatcttcgattttgaataaatctgatgttttttttagttgggctctccaatatgtgtgtattcttagtcttttgagtgaagtgagattggtgaggccatttgtgcacaatcacttaagtttgagaatgcttcttagaagttcttaaatttcgatgcttttactttctaaatgctaattagtaacaagccccgcatacaaacaataaatgccacttctaactgctacaatactggggctgtttgaatttgtgactttgagcaactattttgaactaaaataatgcttattgagtaactcaataagatatcacggtttgaattttaaatttataatcattgagtaactcaataagatatgacggtttgaattttaaatttatgatcattgagtaactcaataagaatgttgatcccattgattcttaaactataagtgccttagctaagttggttgagtaccgaccaactttccttttcagattgctgattgctgattgagattgttaatcatattgcagaatatattactcaaaaccagcctctgggaggtttg

SEQ ID NO: 70078 - DNA, 556 bp, Prunus persica
  Intron number 3 from transcript ppa022553m (locus ppa02255 3m.g) derived from phytozome v7.0 (chr-ID scaffold_8; pos 21125626 to 21126181 reverse strand)
tgctcctaggcaggacgtctcagcatcaagttgtggttagttctcttaatcctatataagtaatgtggcttagctaaacacttaagtagaggaagaagtggcagacaacaacactagaaatctttagtcattatggggaaatttctgagctaagcctgaacagattgctagcctatgcaaacaaaacaacatacatcttattcattaagtgttgacaggatcagttgcttcctggtacgtggttcttccgtaaaacaactgttttcatcttttcttgtattcttataatgtgcactcatttgccgtgaacgaagtttcgttcagtccgttctgtattttttattgaagtaaacaaactcggaattcccatgccaattatgtttctgcaggctatgcctaacaataatattaaggaactaaattttgaatttgagcaatgttatactttttgtgaaagtcatagttcctaccagattttcagataagctattacattgttggcaggtcaaagaattaactcaagattagaagaaacagccacaagcttgcgaaaatc

SEQ ID NO: 70079 - DNA, 815 bp, Prunus persica
  Intron number 1 from transcript ppa023228m (locus ppa02322 8m.g) derived from phytozome v7.0 (chr-ID scaffold_2; pos 11797102 to 11797916)
ctgtgctttttgagcagtcacagaaaagggagaaatgagagtacaaccataggttgtctcgaaaagggtatgttggtttggaggatcaattggaagaaaccatgcccagtgaagaaattgattgatctctgctatggaagaaggcaagagaagataaacagggaaacatcattgatccaaaggttgcagagaaggcaaaattaatcgtaagtttcactgactctgttctaaacttgtaaaacagaggttttatttttcattcagacgtcgatctttttattaaccgtcgttagacatgaaaccccacgacggtttttaatcaccgccttttaaaaaatatataacgtcaggatttttataaaaccgacgtctggattgaattacaacgacggttttgtgtttttgtgttaagttttttaaattaaattttgaactttcttcatattcacacgcacacacacactctctctctccctctctatttctctgcaattggtttgtacactatttctggatcaatgaatattttggttaagtgtttttacatctgatatcatataaacgatggttattttattgaccgccgttgtaatttaaacaaaacaacagtagttttgggacgacgtattaaatgattttctgcgtctgttttttaaagaaactgttgtcataacaactttcccatgtcggttaatatttttattaattaattaatttaatcagttttactatctgttcactcactaacattctctctctcacttttaggatgatttgaaaaaacaagtctctgagggctttgggaacccctgagc

SEQ ID NO: 70080 - DNA, 892 bp, Prunus persica
  Intron number 1 from transcript ppa012607m (locus ppa01260 7m.g) derived from phytozome v7.0 (chr-ID scaffold_4; pos 2411344 to 2412235)
tagcaggtcagtcaattaacaaaccctaaactttacactcattaatttcttaccacatatcttttcttgtggagctaacttcttgcttcatgctcatagaacaaaagatatctagtgcttaagtgaaattgcattttaattgaacatttagaaaccccatcaaatcatttttgcaagtttcatcttgtttttgttattgcattaattggtgcatgactcatcaagcaaaatagattaatctcttttttgatgggtaaaatgtttggtaattttttcactcatcttgataattcatttttcgtacgtccttctataacttaccctaaagtcttttcaaaacaaaaggtgtgatagttgggtttttccaaaaggatatatagttgatgtgagctataataaatcacgcaattagtatgaaaacttgttgaatggcgttgggaagggggcacaccatgaaccccatccttacaatttcatgtcatgtctcactagctctaagccttttttcttttctctctccctttctgccttactttcttttgttttttgtgttttgatttcttgccttagtttctatcaatgtaggttatcttttttgtaccattcttatacttcatcattatatagatcatatcatataaagggcccatctaactgcataattacttatatacagaatcatgtagtttagtatatatgcagtgcagagaaaatagctaaagaaaaagagaaaaacaagatgaaggggagaaaaccatttaccccaaaaaagaaaaagagagaaagaagaagaagaagaagaaaaagaagtggcttaattaccatatattgtgactcataaatccactgcattaatggtgcgtttacaggttccatagcctatcagagtttg

SEQ ID NO: 70081 - DNA, 768 bp, Prunus persica
  Intron number 2 from transcript ppa007043m (locus ppa00651 9m.g) derived from phytozome v7.0 (chr-ID scaffold_8; pos 14890860 to 14891627 reverse strand)
gactcttcgtgaagtttgaattttcatcactatactttaacaaatgcaaaataagacgttgaatttacacttgcaattactttgtgtagtatgctttgtgagcctgtgacctgtttgatttgaactttgaaacaatttcttgcagctttaaagtttagcactgctcttggatgaataaagcaaatgattttatgctatgattgctaattgttaaagaggctttagaaaatgtagaaaaaacagatgattttggcccgcatctgttcgactgtttaattgaattaatcaaagtcttttttcattattgtgttgtctttggggtttgagggttcaagagctgatgagattgctttggtgggggattttattttccctatagattaagaactcaaataaatgcacacctctaatgaccatgagtagtactgatgtatggaatctgcatactaattggtgaaaagcctgagtagtataactccttccaatctttttagcaggctctagaaatgttgtaatgccatgttaaatgtatgatattggaatttgactgtttaattcacactttttgttctccatggtctgaagtttagttttcaattttttatattttatattttatatttctttcatgaaaagaacgtatgtggtaaagcattgaacacgagcgagatgaattttgattaggctatagtacttgaaattcaattgaacttagttaatttcgcatgatcttatgctacccagttttgaatttcaaacaggcaggcg

SEQ ID NO: 70082 - DNA, 516 bp, Prunus persica
  Intron number 1 from transcript ppa000446m (locus ppa00044 6m.g) derived from phytozome v7.0 (chr-ID scaffold_1; pos 29702076 to 29702591)
ggtccgatcgcgaagttgagttgccatcgcgtccggtgaggttttatatgtatatgtgcatgcgtaaggtttttaatcggggaattcgtggtgtgtttactcagtttgaaatgctgattaggtttcagttagggctcagcttctgaattttgaagtgcaagtcgggcgtttcactttaggctcttaacttgtttgttaattgagtcgggctcagtttactaagtcttatgtgaaatgctatgtcgatttttgatatgcgttgcttgcaattgttcgaagtgggttttataatcgttgaggaattaacccccttacctgggacctttttttaggtgtttgacttacgtggtgtataacttctctttgctagcttagtagagaatcttcatttactttcttctgtgttgctgtgaattcattcctatccattttcagagtctcgcatatgtaaatgttaatggtatttgtttttcttaataatgcagactcagggtgcttccccgtctgataacattg

SEQ ID NO: 70083 - DNA, 910 bp, Prunus persica
  Intron number 1 from transcript ppa007902m (locus ppa00790 2m.g) derived from phytozome v7.0 (chr-ID scaffold_6; pos 21379549 to 21380458)
acgaagccaaggcaagtccaacgaaccctcctttcgtttctctttccctgacctccatttctttaatctctgtgccctagttttccgaattctctatttcttgttttgttttacttcttgaattttgttaagcttcgacggaatggttttgaatttttgtctagggttttggggttgtaatccttagtctttgtgtgcaattggctccttttaggtatttgttttctacccaaaaaaggaaagaaaaagaaaagaaaagaaatcaaggtctagatagctattgatttccaaggcagttgttgattttgattagtttgttcaatattgatttggaattccaacatgcaattaagaaatagttcacaaagaaatggtttaaatcttgttctaaagaaattgatgcaggagttttcctttatttgcatcaattgcaggttctcttcatgttgaattattcattgggaccaatttactactcttgcacttgcacatattgcacgcttcagtctacttcctcaaaaattataaaattaaaaaaccatatataactccaatccagctcaggtagtaattatgattttaccttttcaccagaagggcataattcacatatccttttagataattttaaccttttattagtccagctctctctagcactacggcataaccagcgtagttggtgatttcgttctgaaagatgcaatgggccatctgtgtagtatgtatatatatatatatatacagggaactagctttaacctttcgcaaaagtgaattaccaatactaaatctgctccaaattcagctatattccttgaattctttactctttttgtgtttctgtagttataatctaaacaactttaacttttcacatttcaggttcaaaaggcagagctgaggaaaa

SEQ ID NO: 70084 - DNA, 864 bp, Prunus persica
  Intron number 1 from transcript ppa011582m (locus ppa01158 2m.g) derived from phytozome v7.0 (chr-ID scaffold_6; pos 28727395 to 28728258 reverse strand)
attggcataaagtctgtgccattcctccaaaggaggtatgcttaatgaaaccaaatgttttttttctagatcatgaagatttgtgttgtatatggcttcatgctgcgtctgagcctgaatattggtcatcatgagtttttctttcttctttgttcttgtttcttgacgaattaaagttgactgcattatcttttcttcatgaatcttagatgatttgaaatttctcttatttctatgacaccggaataaataataaaatccctgaacccttctgaataatagtgagttgcatgcatccttcttgtggcaaggactgttattctttcattcatttttggatttcctcttttcgctctgctctgtacctatctatttccgagttccagaccagaatattattatacagaatgatgcccaaattttgaacgtggtgctgtatattaggaacttgtaccaaaatcctgccttcgctaagaattaggggcttaaaggaatgagtaagggctgcctctcatcctgtggccatagacctaatggaccttgaacggatcgaagtatagattctgcttagtccacttacagagaatgagttgagtcagtttggaacttttgtggacagtcgacagttgatagaactttctttttggtttagtttacagtagattgattatatatccacgtcaaatccaagttctccgaactgtacttaagaattatacatgtcctggtccaagtacgactagataaaatacttgctgatgcttcttcttttataagaatataccaatacccccctcttaacttgcttatttctgttatgcggacacagttttcattcaacaaggcatcagtggagaatagcct

SEQ ID NO: 70085 - DNA, 668 bp, Prunus persica
  Intron number 2 from transcript ppa020764m (locus ppa02076 4m.g) derived from phytozome v7.0 (chr-ID scaffold_4; pos 20173050 to 20173717)
gtactacccaaggcagccttcgtcctcaaggtgggttatacatttatttaactcttatcttctaattttggaaaaagaggagctattacaatttacaaggccaaaatagtctatacaaaatatattcaaccataagtaattaagaaggtataccgtgggcttaaattggccatgggaataaaatgtttaaaatgttacctgtttttttctctgtcttttactatttatctgacaacccagctaccatggtggcccacaaaattaaaagaagaagagcaatcttaggaaaaaaatggcgattcagggcaggtttgggagaatagggacgggggatggttttgtcatactcagtcttaaatcggtccattgccgtcactattgatggtttttttttctttccttaaaatactttattatttttatcactatattaatatatacctataaaatatgttcataacttaactagaaatgtataatgtcaaaacagtaaaataaacattcaatctaagcatgcttttgagttcagatcttattaagaaatgacaatctgattttccaaatgatgtttttgtttccgttgagctttgaaggctttaatgcgactaattaaccttaaacttatgtgtttagagtgcggaccgcggtgcactactcggtgctcggcc

SEQ ID NO: 70086 - DNA, 700 bp, Prunus persica
  Intron number 1 from transcript ppa023427m (locus ppa02342 7m.g) derived from phytozome v7.0 (chr-ID scaffold_7; pos 22152701 to 22153400 reverse strand)
aaataagtaagatatgatccatatcctggtatgtgaagcattaattatgttgtttcacagattgttaattttattcctgtgtttctgcagagtctccatggcctataggccctacaccgaatcaaaacaaaggtagcataaaagaggttaccttcaatgttgttctttttgtttctatagttgcatgtcatcctatttagttctaacacaactaataacaaatgtataaaagctcatatcctgggttccaagaagcttcttgccatagtaatcctggcggcagcactggtgattataactccaattctttataagataaccaggaagcaactgcaatatgcaagcaaaaaagatatcgaaatcctatctggtgagcattcttttaattagcctcttccgaagatcgaaaattaagaagaaagactcatatatgtttgttgttgcggttttagtctccaagaagacggtagaggaagaatccaggagtttctttaactgctctggtctttacctattctcacaagatgaagtgttgaaagctaccaaccattttgatgattcaaacttgattggagaggcaacacttggtatgaattatgaaccatatgatgctgactgatcaatatatatatatgatttaattcagaacactcaaaattgggttacagctgaaacacacagattctttcagggaaattct

SEQ ID NO: 70087 - DNA, 1023 bp, Prunus persica
  Intron number 1 from transcript ppa006476m (locus ppa00647 6m.g) derived from phytozome v7.0 (chr-ID scaffold_1; pos 45558206 to 45559228)
tcgctcgacttgtttgatcgcttgagagacattaggtagatatcttctaaattgagctcatttcactcattttaatcacttttgcttctgttggtgtttgtgtttgcttcacttgcttgttttggaatggtggttttcctggtttctctgttaaattggtctgttattgcaattttagcaattggagctactcgggtctttttttttattttttatttctatttcatggctttcttgcatctctggttcgaatatttttgtactgaagaatggtagctggtgctactctttcccttcactaaacttcattttgttagaatttgctttagttgatagatttcatatagcttcccacatttcttcatatctacaaacgaacatgtacaatttaccagtactatgatcgtttaggtagtggatttttatgattgtgtcttcttgctttggtcaattttatgatttttattcaaggcccttccctttttttcttcttatctttcttgtaccatattttgatctctttcactaaattaaattgtttagcttgagtaggttgttgtttgtttggggttcctcccactggttcataaaaaaaaaattgtttagcttgagagatgtgaatgtagttttgtatatcacatgattttaataggcgagtaaagaaagcccacaaattttctctaagcccgccttggttgaaagatgggaaaagtaaagagagttgcctctttggaccattctgttcaaaggagagtgaatacaacaacaattactgagttacttctgtctctttgagaaaccgtcacatattggttttcatgagcaccatttcgttcattctacaagttggcttctctatgtgctgttagtgtctgaacgtgtttgcagaatgttacaaatgccaacttcaatcttgatgaatttatgctgccctgcctgcctttgaaaaaagaaagaaaaaactctacagctaattcatgctttgatctgttttgaagccgtttcggaacttggccagttgct

SEQ ID NO: 70088 - DNA, 689 bp, Prunus persica
  Intron number 1 from transcript ppa007687m (locus ppa00768 7m.g) derived from phytozome v7.0 (chr-ID scaffold_2; pos 3228949 to 3229637 reverse strand)
ctcgggtactttcatgtttacttatcttactgttgttctttatcaaactcataataatgtggcatgttttacaaaaagaaaaaagttgttttctaattttctctctatattgtaagtggatgtcacaatcaaatgttacattagtattggtataaaattttgaggaacttcagggagttcaataataatattgacagaaacattttcatgcttgtgattaaaatttatgatgcttctctggattactgttgcaactttaagaccacacaaatttgttccgccatttctgcttcggttgagaagtatattatatgcctaggttctttttgttatcaagcttattatatatttctggtacatgagattaaatttgtggtgccaaattgtcaactcttagtgtcaagttttcaatttgtatgactaccttctatagctctttggtatataataattattttcttagggaattcttaatcccatttgaggtgctatatttcttgttattggagttcatataagcaagataaatgcatatctatttcatttcttgagttaaatggataaattgaatagaggagtcaactacagacttatataactcttcataaaatataaaagcactttgttcctttacttaaagtaacactatatctctctctttcacttgtgaactttcagacactatcagc

SEQ ID NO: 70089 - DNA, 678 bp, Prunus persica
  Intron number 1 from transcript ppa020618m (locus ppa02061 8m.g) derived from phytozome v7.0 (chr-ID scaffold_1; pos 46282711 to 46283388 reverse strand)
gctggaacagaaccttcaaggtatgtgtgtgtgtatgttgtcataatataagtgagatcagtgttcctgttgatctgtgattgatccaatctgtttttccttttagatttgatatcttttacccactttttccattgatatgataaaaagaaagaggacagtaaaaaaaattcttgctttgttttttttttctttctttaatttcccttttattggaattagtaggttatgtagatttgcttccacatcaataaaaccctatatcccatttgttggaaagatatgtactgctgcagctagaaaatgtttgatgaattttcccaaagaaaattttaaaattgctaacaaaaacctctaggaagaggtacatgaatgaaaaggagagcatgaagataaaagagcaaccatgtagctagggaacctgtaatgatttataacaagagcaccagttttaaatttcccccatgaattcaaagaacattgttatttttcttttacagtgactataatcgccttccaaatctgtgtagttaaaacttcttataagtgcattgtctcataagctaaactgctgctgtacattgtgaattgaattccccagttggctaattctgcgtctgctttgtaagaatgtggttggtattatactaacatacagacatgtcttgaattacagat

SEQ ID NO: 70090 - DNA, 981 bp, Prunus persica
  Intron number 1 from transcript ppa003309m (locus ppa00330 1m.g) derived from phytozome v7.0 (chr-ID scaffold_3; pos 15648308 to 15649288)
ctctactgagctgaatttctctcgggcttcgtctggtaagcactctctctctctctctctctctctctctctctctctctctccccttctctctttgttccttctgtttggtcgctgagaaaatcgtagaaaatgaaagaaattttgtttagttggcatcgaatttgttgctgttgatctaagaatttaacgaaaagtccacactgaacaaaggcaagtatttatattaggatcggttccgtgacctctgaatttgctgcttagccttccatttattattgttgctttaattctctctgtgaaacgaagcaggttaatcaccaagcgaagcagattcaacggcatagtagacttattgttttgaaaagaaaaaattggggttttctattgtgtgcaaattggtaaaggtctgcctttttgttatatgtttctgacatgttgctgttgctagaacgttgtttcatttcgtaatttggagattagaggcttttctgaaaatagcatgcttaatattgatagtcttacggcaagaaaaagcttagattggtagtattattttattcaatttcagtacttctgttgtgatgattaattctccggaatcagtacgactggcagcttttaatagatgtagtagaacctagatgatatgcttctcgtagcagtttgggtaatcacaggtatccaagccagtttgatgtaactgaaaatttgtcaaatcgtctcaccatgtgctgtgttgcttttgggatttcatcttaactgatagttgtatatgtttgtctgtgcatgcacatgtcttcttttgggtgctgaatgcgtgttgttaattctcaacgatgagaaatcttctatattttttaacattcactttcagatctaatatgcaaaatgtcacgatagctttcagaagagtaaaaatgttagggtacttggctgatacttctatttctgtagttgcagaagtagcggatctggtgg

SEQ ID NO: 70091 - DNA, 760 bp, Prunus persica
  Intron number 1 from transcript ppa013051m (locus ppa01305 1m.g) derived from phytozome v7.0 (chr-ID scaffold_6; pos 6376381 to 6377140 reverse strand)
gggtaagcttcccgttcctccatccattcaattcagctttcactttctgtttgttttctctgaaactagtttctcgatagaattcattgaatagaatctactcaaaatctcagcaatattagttgaatcaaatagtttataatgaagcttaggactgaaataatatattattttctgcaaattattgcacgcgtttttggatctaagaaccgagtgaatatgttagtttttcagtgaccggtttggtttttttaagaaagaaatcaatgcatttgactcgtttcattatggtttcgattgctcaagtttctccagtttgaaaggaaaaggtttcgttttgtgaccatttttccgggaaatgttttcttgacataagaagaaaatatttctacccttatgttgagttggttctgtaaccaaaatacaattgaaataagctgaacttaagttgtagaaggcgtttttgttaaataccatctgactaaacttgactgaccaaaaataagcacaaaactggaatagttttgggaaattttatattgattagctgggtttttacctagtttatcttcttgtattagttatttgatgcaattgaaaaaatcagactccatacttagtcatgtgaagtgactattttattggctgtgttgttgatacaagttttattaaaaccaatcaatgtcagtacagattttaaatccttctagaaataattgactcaacacttgtagcaacttttcgcaggaagacacgtggt

SEQ ID NO: 70092 - DNA, 646 bp, Prunus persica
  Intron number 3 from transcript ppa012251m (locus ppa01225 1m.g) derived from phytozome v7.0 (chr-ID scaffold_4; pos 3842475 to 3843120 reverse strand)
aggtttgttctctttgctgtttatgctttatttaatgtaattaataaattttgtgctcattttgattatttgtcagtctcttctatagcaaatgttgttttgcggtggtgaaatgtgggctcgctatatatgttatatacttgctcgctgtgttgttataatgtctgtgtttatcttctttcttttgtttttgtaaaatccaatttcatgtattatatgcctgggcattattattcaaggagcttgagagtttatttcgctattttttgtcgttgtaaatgctgtttgctcatttaggtatcgtccagcctgcgtctacattatgtttagtgcagcagttgtacatgtattcaggattacagacgttttgattgttatttggtgtattaccttttcaattcatttgttattttgtatggtctagcatttgaatgtgggaagggccacccctggctctttgcaaggcaattttgcctgcccattggtttatttgttcaattcaattatccagtgtgttccatttttgacatgatgtttcatatgctagaatttggatgattgttgttttttgggtttttggtgataaacaatttgtttgaaattgcttgcagatatttgagaagaacccaactactatcaagaacta

SEQ ID NO: 70093 - DNA, 572 bp, Prunus persica
  Intron number 1 from transcript ppa008027m (locus ppa00802 7m.g) derived from phytozome v7.0 (chr-ID scaffold_8; pos 1777693 to 1778264 reverse strand)
gaggttagttttgaattctctgttgttcctgttcaattgattatacagcttgatacttgggaactcttagccttttctggttttcttgagagcacgttgtgattttagttgtggaattgattgatgtatttagtttatcactataacagatatttttcatgtagttcctactagcgaattcttcaaattatatataaaaaaaaggctgtgcatcatagcttttaataatccttgtcttcagttggtctcttgttcacatgtgctgcatttttgttaggattctttgcaactctaaactgtcaattccatttgttgtagcttttggtagtcggtcagaaagcattaccactataaaacaaaaaagaacaaaagaaaataacagtggctttggatatagcaccaactctgaattgatgcttgttgaaagcatgctcgttattcatatcatgcccttatcaagaatgaaactttatcgtgcccttaccaagaataaacactgaatagtttataacattcgatgattaactttgtgttcaggtccaggctgctcctctattggtggaggtgccttt

SEQ ID NO: 70094 - DNA, 647 bp, Prunus persica
  Intron number 1 from transcript ppa025913m (locus ppa02591 3m.g) derived from phytozome v7.0 (chr-ID scaffold_7; pos 1411153 to 1411799)
gcttttgtcctcctcctttgaccccaatcgtgcgtactactttccccaccttcaattctatcagttcaagacaatcatacaattttttcttactaagttttaccaaacaatgcttgagagtgatcttccattttcataatttctctacaactcttgccattttcacttcgaattgcgtggttttggaaggcatcgttttaataacattgttaattgtgtctctttagactgaaatagtttctgtgttgttttgattttagtagcaattaagtttttagatgatgaaaaaaatcatccctaggtttttaatattgcattatgtattagtataattcgaaccgtcaacgatttattaattctctgtttggtttccaagaaagtttgtaattcgggatattatttgtaatttgaacgacacatcaactggtcatgacaagtatctcagaatggcttcagtgaatggggtttcagttgcacggcctgagctaacacacacacacacacacacacatctgtatactgtatacatttgtatgctgtatgtatgcaatgtcgttgcccttttgttatgcccatggattaattaagcattttttgatttcttcattacagtattgaacaaaccagagctgattttaggatttcca

SEQ ID NO: 70095 - DNA, 637 bp, Prunus persica
  Intron number 1 from transcript ppa018318m (locus ppa01831 8m.g) derived from phytozome v7.0 (chr-ID scaffold_1; pos 27025602 to 27026238)
gaggtaagttagttttcaatttatcctttttctattttggatttttcactctgattaagattaatcaaccaatctctattcaatttaaaagtttggatgttaattaatatggtttggttgattgacgaaggcgattaattttcaacttttgaacttaaaggcgattaattttcgctagtatctagtctgacactagaggaagggatttcctaattgtttctttttacaaaaaaaccgataagattttaattaattcctttaattcttattaggatttccttgttgatgttggaaaatggtttccttattctcaacggagatttgttttcaatgccttttccttgttgatgttggaaaatggtttccttattcttaaaggagatttgttttcactgtctccttgttataaataattctcctcatcatcaactactatctagcaaagcattctgcatcacaagcatacaattataccctgctgcagtttctttcttttttcttctctgttctggttttgccttttccttgtgttttgaattcaaaattaaagtttcatagcaaagaattcattttatgtccacttttaagtttgataaggacccctgtcgtcataggaccacggctgtcagcttcagca

SEQ ID NO: 70096 - DNA, 575 bp, Prunus persica
  Intron number 1 from transcript ppb024895m (locus ppb02489 5m.g) derived from phytozome v7.0 (chr-ID scaffold_2; pos 15604834 to 15605408 reverse strand)
tctgacagtgctctgacaaggaaaaaagacaaaaagttttctctgggagattgaaatttttaatcgggtttggaaacagtgcatgtgtaagtcaggtagacgaaaagttgcttacatataaaaccatttcaaaaaaataatacggcggttacatataactatgacgtataaattacaaaatacgacggtacatttaacttcggacgtggtaaataaatacgacagtagagttgtaggtaccgtcgtagtaaactcaaaaattaaaatacataagtaataactcgcgtcatggtagattatttaacacgtcatttttattaatgtaccgacgtgaatttctgtaatatacgtcggtcataccgacgttgaatttacaatttaaacggcggttttttttgtaaggaccgccgttggttttaaaaatttattctataaatttgtcgctttcattcattttcagtttacatttagggttccaagttcttcctctctcagagacactgtctctcacatctcaaagacaataatttggatgtctttttcaaagagaaattgagcttactcgcatcaaatct

SEQ ID NO: 70097 - DNA, 900 bp, Prunus persica
  Intron number 1 from transcript ppa009406m (locus ppa00940 6m.g) derived from phytozome v7.0 (chr-ID scaffold_8; pos 20328154 to 20329053)
catttggtatcacatttcctttttgttggctttggaaatttcattgttttttgttgttgattttaagaaattttaattggcaagcacacattgttagttcagtgtagaaagtagtaaaaaatttgctagctcgttattgtgcatgtgtatgtataatgtatgtatatataggatttcagcttgtgctaaccatatgcataatagaagacgagatagcagtagcgttggattgattaagttatgcaatggttgggtgtgtttttataaatgaatcgaacattttgaatgctgcaatgtggttgaagtgttgttcctggtggtgatagatgattaatgctgtatttgaaaatcagaacatgctaaggatattgaagctctgtgaaagttaaacattactaaatatcggataacttttacttgtaaaagattaggcggcaatactttggggaagaaagttatggagatgattgtgatgtgacaataagagtggggtattttaaatccagtgcatatttcatgttgatgataagtttattaaaaacaagggaattaagaatttggtaattttttttttctgacatcttatttccttgcgttatgacatggtgcagtggtactagtggctctgagaaataatatcctcactaattcagtacatttgatcaaaatggtgtcattgaaagtgtcggtgtcagtagttagggtaaaaacctatctgtgatttctttcacatggtttgattcctcaaatacagatacataataatgctggctttctcattctggctatttttcaaggtccttttggcacagtcgcagtcctttaagcctgcattgtccatatgcatagcctttgcgatacatttcattgaaatatagttgtgtgtatctgcaggtattt

SEQ ID NO: 70098 - DNA, 632 bp, Prunus persica
  Intron number 1 from transcript ppa003878m (locus ppa00387 8m.g) derived from phytozome v7.0 (chr-ID scaffold_5; pos 17061675 to 17062306)
tcggcaaaaatttggttcagggtttcttgattcaggtaaagttccagcaacccatttacatagatctttttctgaattttaatttctgattgttgtgtagaatttcactatgctttttcttggcgctctgtttggttactgggaaatggaagaaaataatagatggttggtgttgttatgtgataatttcacctgaagtaagcaataagataacttagattcaactgggcccaggaatcccaattgatgaagaaatgaaaatgcaacttctttttgtttttgattgtatgctcaactattctgaaggaaaactgtaatcaccgaactcaaatttccttatctggttagattcttatctggaaattaatgaactcttctgggatataacttttaggctctggtttactctttgcaaggtttgagcgaagaaaatcacaaaacttcaactgtgaaggtttggcattagcttttctacgaatgaaaatatcagtgattttgtagtggaaatggttgccaaagatgatggggagtggccttttaatcaataaaatcccgctttgattttactggaaatgagtcgttctccttcattttcagtgaagtcagaacttagtccaaagcttgatccagaa

SEQ ID NO: 70099 - DNA, 598 bp, Prunus persica
  Intron number 1 from transcript ppa007950m (locus ppa00795 0m.g) derived from phytozome v7.0 (chr-ID scaffold_1; pos 900052 to 900649 reverse strand)
gagctttgctcttaataggtacatatttgtttgtcaccattgtttcctatatctttagataactgaaattgtttcacatttttgttatttttgtcccaaaaaataaaaataaagcctggcccccattgttgtaattaactctttgctccaacttcttactacctctgtttttctttttttcttatggtttcccttttttattataaacttatgagaaagttcatggaaaaaatcattcggagtttttcaccacagcccctattattgggtgagacattataaagtcctagctgtcttccttgagttattatcagaattctagattttgatttgccttttctgacttatggccttattttataatctcagtgtcaaacttccttactttagaaaatgatagaattcgtaaagtgaaacactgtcatgaaaaggtcagacaagacataataaaaatgttagaatagagtgcaatattctaatcacaaagtttagtttcatcattgagatattttaataattaaccccttttttttctttttttcttttttttttcttttttgcagtatcttgcatacaggagctactccataccaagaca

SEQ ID NO: 70100 - DNA, 728 bp, Prunus persica
  Intron number 1 from transcript ppa026103m (locus ppa02610 3m.g) derived from phytozome v7.0 (chr-ID scaffold_5; pos 14115375 to 14116102)
gtttgtatagccttctttggccagaagaatcataggtaatttccatgtctgtttatacattccctctgcaatgggaaattggaagtttcaattgtcccaagactgaggtgatgatccatttattaaagcttcaataatactctcttcttttttctatctggaacttaaagctttactccatttatttccttatccataatgggttagcagtttttgacatgcacccaaaaatgatctagacgtgcacccatgggttagcaattatgttctttgcttcaatgccatcgtgtatggtcttctagccagaaagtcttttgaaagacttgctatatatggtttatcttcaaaattatgcaagttgtttgtggctccaggattctcttttgaactttcttttattttacttttgaggtctcaaatttcatgtatatatatttttttaagtggtacttcaattttgggaaattttatggaaagtaagctggtttttaaatttttcatgaaattaatagtatagctgcgcggctatacacaatgctttttttaaatttctattccaattcggctatacttttgaaatataatatattaaaagagatgtttccttttttaatctttcctgaaattaatagtataggcgtgccgctatactttttaaatatattatattcaacccgtacagccgcgcagctatactttgttcatttaacactacaacagccttcttg

SEQ ID NO: 70101 - DNA, 682 bp, Prunus persica
  Intron number 4 from transcript ppa010924m (locus ppa01092 4m.g) derived from phytozome v7.0 (chr-ID scaffold_1; pos 33947132 to 33947813)
caatcttgttcactcatcctcctgtggtaagcttattttctgttttggtcaatgggttagcgaaatatatgtttggaagcaattcagatggtttgactgacattttgtttaagattttaatactaccctgttgctgtctcttgtgtgaggaagacaagttgtggtcattaagaatgttgtcatgtatctttatgctcgaaatttcaaatatttccttggttggcctgtgttggcttggcttagatttgttaacatggctggttgtgtgaatgacataattgaactctcaagtcttgttcaggttttgatctaaatgatcaaaactgaccagattttgatctcacatggttgatttgcctgcagtgcagaatatgaacctatactgaaacttatatgagagtgttttctttttttgcatgtttaatttgtacatctgatatttgaaactaggtgtcatttgatttcttcactagtaactaggcactgttagttgctggtaattctgccaaatattcatatctaagatttggaagagcatagagaagttggaatttggtttcattagaaaattggtttcattagaaaattggtttcattagagaatttgtttcgttgtccatttcctcattactaattcatatgtacagggagccttcagcactgggttggtggtgtcttccaa

SEQ ID NO: 70102 - DNA, 491 bp, Prunus persica
  Intron number 2 from transcript ppa010614m (locus ppa01061 4m.g) derived from phytozome v7.0 (chr-ID scaffold_1; pos 36666257 to 36666747)
aacatcattaatattcttcaatcaattgggtagtggtttggtttagtgggtgtgagttggctatgtgggcttcacctattcttctttacttattcttctttacaataagatacaaagatttcaacccaactcgctcaactcttaagtgtttagaaaataattttgtttttttgttttgtttcgttttgtgtggattctatgcaaatgttgcgggctttctctaaagaacttatttgatctggaggcccaaattcattacatcaaagtttatattagtttagcccactgacccaagtggagcaatagatgatagatctaaagacgcgtagctcttcttccttaagaaaaggcatggacccattgacagatttggtaaggaaagaaagcaataaatatataaaaacggacaactcaccgcacgccacgtgtatcctactgcgacaattcttataaaagtaagaggcagggaccgagatattatttcaagcaat

SEQ ID NO: 70103 - DNA, 346 bp, Prunus persica
  Intron number 3 from transcript ppa012895m (locus ppa01289 5m.g) derived from phytozome v7.0 (chr-ID scaffold_7; pos 13630698 to 13631043)
cctgtctggaagggagacacttgttcgcatcactggtaaaatattcaacttctcttttgttaattgaaataatgttttggtattttttgctttggaattgcatggttggaattctccccagtaatttagtcaacccttaattcattgtagagctatgtcgtcaaaactagtgatgtgtatgaataatgggagctcaaatattaatgtatttgtgtttttttcttcattgttaatgttcttcataaaccgggcaatttagtcctggcatttcgaagataattttcttttgattgtgcctgtgctgttgctataataccctatcacctttttcccaaatgcaggtggt

SEQ ID NO: 70104 - DNA, 756 bp, Prunus persica
  Intron number 2 from transcript ppa012256m (locus ppa01225 6m.g) derived from phytozome v7.0 (chr-ID scaffold_6; pos 28330034 to 28330789 reverse strand)
ttaatcatctcaacaagcctaaaccctctcgaaaggttctgcctttaatctccattcaactttcttttttattgtctgctttttttttattttgtcttgttttcgttcccattgcatttgcatgtttagtgtgctgctcctgctgaggatatttccgtacaaaatgagtgtgaaatgatatatctttcattcattccaaaattagagaacaatattgcccaggactttattttggtccattgtcatttcatttgggggctaattaatttcacctatgacccaaactgagctagcttctctatctctagcgaggtaggcctcttttattctttgaattaatgtgaagatagactggtttaagtggcaactgattcctctaacgaaaattacccagtttcaagagcatccgcaaatgtgagttaggccagtcaaggaactaatgtctcgtcttattgcacataaattattcaaacacattcccgtacagtacagtaggttagaatttcaccaaaaagtaagtgctggtggtggtggttatgagactaagattttagttgacacattttgtttgaaaatatgtgattttcttggtgaccaaacaaagaaacaagtatgcaccacattaatgtgattgagagaaagtagttgatgatatataaattagaataatgaaatggacaagtgtgaatttatgagaatgctgttttgggaaatattgcagcagcaggcagcaacaacaagagtagggacgaggga

SEQ ID NO: 70105 - DNA, 1004 bp, Prunus persica
  Intron number 1 from transcript ppa010689m (locus ppa00840 4m.g) derived from phytozome v7.0 (chr-ID scaffold_1; pos 1308351 to 1309354 reverse strand)
ccttatcagttctcctcaccttgtcagaagggtacttcttcttgagttgccctactctcaacttttttatttttttatttggttaaatcttttctctgcacttttgcttgcttgtttttttattatttctagaatcccataaagggaaaaacttaaaaagaaatgcgaataaatgctcaataatatcttctactttatgtatattatattgcatttatgacatgtttatttactcggaaggaaaaatagtatgtttatttactcgaaaggagagtgggatttatacatcttttgatttatgtgttaataaacgaagggaaattaatacttatttatgataagtaaacatgcgaatataatgacgtatatattttcaatcatgccctttctatttttctctttttccattttgtggataaggtaaattaatctgctgctatttcaaaataataaaataaatcatattctaaaactagaagtatatatttttttttctgtcttgagatgtattttaatgcatgaatatatctttagtgggtgtttgtattataatctcgattaaagatgagagctgagtcatcctaggttgtatcatagtaagtgaagcacgtcagcttctgacagcgacgtggaaaagcacaaatatccaactcagatcgtctcattttctcatgacacctgtatttttcatgcaacaattaataaaaaaatttggtgcacaaaaaatattatctagatacattcatgacggtcaaaaatattgggccatcttaaagtccaatcccatttcatatccttctgggcacagcgaagcttaggcccatcaaatatttattctttttttaagatatgaaaataggggaatgtgaatatatatatatatatatatttaaaattcttttaactatttgagctacaaatccttgcaattattcatttttgtgccgtgttttagaatattttttcgtttttcttctattaaaaggtacacttggactaccttg

SEQ ID NO: 70106 - DNA, 701 bp, Prunus persica
  Intron number 2 from transcript ppa024244m (locus ppa02424 4m.g) derived from phytozome v7.0 (chr-ID scaffold_3; pos 20409328 to 20410028)
tcatctcctttggccttttcctctccccagtgtaacctctctctctctctgtggatctgatggttttcttgttcaagtttttgattgtagagaagattatagcatatttgatgttcttcatacgtacattgcaccgcttagcttacctccttctactgtgattcagtattgttacattgattaattgtgaatctacaagatatttgacgtgttctgttttccaaaacttgaaagaaaaaaaagaaagagatcgaaacatgagatttttcttagttgtggaaggaaccattcatttattaccttataatgcaaaacataccttgaactaattaagagcaaaatagggaatattcatgatttggcatgggaaaaaaataatggaatcatggttttggactgtatgcgttttctatttgcaagtaatctgtaattgtgtggatcaattatccaattatagaatttagagttgtacaagattcttcatggttccaattaacttaagggggttgattttttcttttttgcgttttcatgtatgccttgtggtgcagtacattagtttttttctttctaatttctaaattaaagacctgttccatggattgttctttttctcagtgactctatcaagcataaattgagatattgaaattttttggaatgcagtccaacattttacagaatcattaagaaaaagacgg

SEQ ID NO: 70107 - DNA, 910 bp, Prunus persica
  Intron number 2 from transcript ppa013027m (locus ppa01252 8m.g) derived from phytozome v7.0 (chr-ID scaffold_1; pos 20111265 to 20112174)
aacgacataagactgatttgtccatctccacaaaggtttcttttccttctttccctccttttaatttttcagtttgtatcctcatttatttgatatgtgtgtgtgtgtgtgtgtgtgtgtgtgggttttgacttcgcttgcatccagctgacataagactgatttatccatctccacaaaggtttcttttcctgcttctcaaattttttgttattagggtgggtatggaccttaattgtatcttagattcaatgggggctctaggatgtttcttctaaacattgacaagagctgtcttttgatatctgtctctcaagaaatttatgatttgtagaataaggtttgcactggtgtgactcgatcttgttcctctttctatgtgcgtgtgttaattggtattttgggggcaatctggcttcaatcaaacacttttttaaattttggaacttgaagctcttaccttagaggtattagaattgttttctgatctctataaaatatgctttcaagtgctccattacctttattaatatccatggaaaagaaaaatgcaactatctcataacaatagtttatttattcaaagctgatatagttagaaattgcttgactttttttttctatttaaaaaataaaaaaataaaaaaataaaaaaataaaaaaataaatatatatatgtataatcataagatgcttgaaaatggcatgttctgtatgtttcagtagccgctttaaaattcacactcgtgtagttactattgtctggtagcaattcaattcctaaagaaactagggtttttaccttgagggcgtagtttgctggggatatctattgtgagctacttatgttttaaattcttttgttctgcttgtaggagaggaaagagaagcttggtgaacggattgtagc

SEQ ID NO: 70108 - DNA, 120 bp, Prunus persica
  Intron number 1 from transcript ppa005770m (locus ppa00577 0m.g) derived from phytozome v7.0 (chr-ID scaffold_7; pos 4627920 to 4628039 reverse strand)
ggatttgccaagtgagtagtaattaattttgaaatatttttcctcctgtgtttatatatttgaattactcttcttaatctctctagtcaacggtttgattgatgagcagagaaagccaag

SEQ ID NO: 70109 - DNA, 908 bp, Prunus persica
  Intron number 2 from transcript ppa011680m (locus ppa01168 0m.g) derived from phytozome v7.0 (chr-ID scaffold_6; pos 718911 to 719818 reverse strand)
tactgacgacaagtcgttggatttgtcattcgaaggtaagaagaggaaacctactttttggattgacggtgtcttagaattagtcacaattttctgttattttcatcacaagatggcagaaacctctctaagaaagagaaaaaatgctaactttttgtgttggtttgttgataagggccaatgaggtgtaattataatatttaattcaagggttatggtagcttaatgattttaagagtgatggttggaatttggtgattttgcttatgaattggagttgggtattttgttggattgtcttgtggggtttgatgttatagcaattggtttggtctttggaatggatatgaattgctcaagtgaaaagatatgaatagcaattggtttggtttggtccttggaatgtcagactaaggtttgccaagaagcatgttatgtcagttcgaagctttctttagttgtcttcttggtggcatttgacagccatttggtatgtttgatgttgccaatataacctgtcttgtggtataggatcatagtcctgagggccttttgtagttatggtactttgacatgtgcgtaaaaatagaatagaattaagttcattctctgcaatcatggcctacccatatgccatagatacctcatgttgcatgaagaaagacaacatcttcacttggttttactcacttttgataactattcaatcttttgcctacttaatgtgcttgtagcttctttttcaatccgtcgcatgattaattatggtttctagtatgtttgttggacatggcacaactagctgactaatgaggaagtaacaacaacgaattgcatcctttttgaaaacttcgcttcccctgttttaacaaatggttcggttgtaaacttggaatatcttgcagagg

SEQ ID NO: 70110 - DNA, 991 bp, Prunus persica
  Intron number 1 from transcript ppa018119m (locus ppa01811 9m.g) derived from phytozome v7.0 (chr-ID scaffold_4; pos 10599997 to 10600987 reverse strand)
gagaagaagaaggaacacaaagaaacaggcggtcatggaagaaagtgtacttggacgtgttcgaggcaaaaaaacaggtattgtatattttcgatcgtttcccagtaattttttttttctttttctggttgatgaaactggaaaatccaaaattatttgtttcagcatattagtgtgcacacaatcacatgcatggaataatgcagtgcataattgcacaaacatgtcatgaatggttttgagttgttttttatttcttttgggtaaattagggtaggatctaatctattcataaacctaaaaacatatcatgtattttaattttaattttgagttaggaactttaccaaacagtatggataaagtagtggactaaattcatatgcagagaggggattcaaacttgaaagtttatgattgaagtacatacctaaatatttgaccaatagaagaaatacatacccaaaaagtgtccatgattgagttcttgatcagaaaacaaaagtctcttctcttgttggttgtactctacttaatttaattatgatagtgcaatggctcacactatatatgtttatcatccgccatatgaattcctcggacctctttgtcattgagtttttattgaaaaacaaattggtactatttttatcttcttagtttattgttgatttgtctttatttataagttcatttcttacaatctctattattcgtcttctaggttccggagaaaatgatcgctgaaggtgagagattcgacctttttttggtgttactttgtttttattgttaatttttcttttcattttctcgcaaatcaattctattaggcctatcttttttattggatattaagaacaaaacttgcacaaaaaacgaatttttaagacattactaatgcacccagattgtagctaggcagatgggcttggagaagaaggatcaaaaagaaggtggtggaacaaactgttagacgttgaggaggcca

SEQ ID NO: 70111 - DNA, 761 bp, Prunus persica
  Intron number 1 from transcript ppa024595m (locus ppa02459 5m.g) derived from phytozome v7.0 (chr-ID scaffold_4; pos 16743989 to 16744749)
gctctctggaaatctcgtggcggagcctggttagtggtcgatcgcacaatccaaatgagtagtgtacggtacggggcctcctcttgtgatggatgtatattttcattacatgcttgaagagtgaggaaaaaataatgaccctctcatatgataaaaaccgtacaagtttctatatcccctcataattcagtcattttggttctgagtgtttgagcgtggtcgaaaataatcctttcattcggcagaaaaaagggaaacagtgagttttaattccatggataccaaagccaacatcgcatccaaacctgtcaataatattaagggagattcactattatatccaatataggagctcaaattatttataaaatatatatatatatatatatgaaatagactttagaaacacatccaaagcccatttacaacataacaaatatgcttttaacttcttttgaattacaaaactgccattgatttcttaaaacaaacccaattttaaaacttcataaaaaatcccaaaacactcaatagggcatcaaaataatttaataatcaaaattaaattcaataggactggttgtcattttttgggtttgtttatagaaattaaattgtgtaggatttacttatagttttagtgctaagaatgagtatgttactaaatatctctaatcgtaatgccatttctgactccccctcatgcaatggcactcaaaacccaagtactctttgtcatcaccttgctcgcagacttgttc

SEQ ID NO: 70112 - DNA, 723 bp, Prunus persica
  Intron number 1 from transcript ppa020662m (locus ppa02066 2m.g) derived from phytozome v7.0 (chr-ID scaffold_1; pos 30559949 to 30560671)
ttgccgccaagcgtggctacttaggtattgctttctaactgttactgtgcttaagctttgcttgtgtgtgtgcgcgcgcgatgataattgattggttatttttatgcacgctgaaggaagggtatgtacaatgattattaataatttccttcctagagtgaatatttgtgattagtaagaggatcaaattctctgtactgcaagcagaataattcccaagtctgacatgttgaaattcctttgttttttttcctttaaaaagaaatttcttttggtttgtttccataaaggagtgtatttcgaactgaagaaccaaaaagaactatgattttgattttgacatattttgaagggaagctcagaagaaaaaaagtcatctcctcaagtatatggtatatgtttgtaggccaagggaaataataaataatcactgataaattgcgtatcgctaacctggtaaagatgataattttgaaggtcttgtttgtcttaatctgctttgcatatactgaagctactatgatatatcctagaggttaatgtataagaaattttgcaatctggtggccattttgagttgatttctgtgttttccatgctatatgtatactgtaatcactgcagtggtgaaaggatttctttttttataaatttatctggaatagggtattgactgttatttattcaggtattgtgaaggcactgttggcaatttggcctgag

SEQ ID NO: 70113 - DNA, 1017 bp, Prunus persica
  Intron number 2 from transcript ppa005468m (locus ppa00546 8m.g) derived from phytozome v7.0 (chr-ID scaffold_8; pos 20062543 to 20063559 reverse strand)
cgactgtggaacccttttctccaggtgattaattttttctcattattatttctttaaaactttaaataaaagttgcaccaaaatgaacaccataaatacaagtgactgtcatctgaacttgcctgccgtgctcatgtgtgtgtttgaaactttgaaattaaagaaaaaaagaaaaaaagtagcactcaattataaccttttggttttatatatgttgtgtcctcaagtccttgtagttgatgcttcatcgagttcttttgcttaaaagtttttttataaaaacaattcgaattggttttctttgttttctgcttctggtattttgcaatggagtgtgtctgctgctgctgcatatggtctagaacaatgatggggaagctaagaaaaagttaaagaagtttgaagaacttttggggatgtatatttcatggttggggaaaacccgtgaccagttttatatatatatatatatatatatatatatatttttgtcttggacatgaagcatgtggcattaattagttgcagaaggcagagagactctgatgagatgagcttggtcattatgaaaaaaactgataaatctgcaagaatatctgctgctgctgctattctgaacctcagttgctttcttttttccctcttatcaatgtaaatctctcatttcttgagcttgttttcatgcacgactcttttttcaaccaaatcgtaattcttttccatttcaatttatccattcatccatccccatctttttgcatgcattatataatattaagcttcaatcatggcattggcatgcatccatattcatgtaatttaatgaatgtatatatcatttttctttgacgtttatgtccctcacttctctaataatttctgctcgattgttacattatttttcagtttgttcaagttctgaattatgacttatatattgtgttggcttgtgaataatgtgcatacatatatatacatataggaaggacagcttcataactcacagggcattttgtg

SEQ ID NO: 70114 - DNA, 692 bp, Prunus persica
  Intron number 1 from transcript ppa006039m (locus ppa00603 9m.g) derived from phytozome v7.0 (chr-ID scaffold_4; pos 12459957 to 12460648 reverse strand)
ctggtaagaaatccctgctgaataaaactctcattttgggcaaatattatttgaaaattgaaatgttcttcagttcgttcagaacctttcttcttcttgttttcaagtatttgttattttcagttttccttatcctcttaggactaaatgtctaaattcttatgaccacaaaaatatgagcactttcttctgaccaagaaaagagcaaatgtgaacagagttctccttattacacattgtagatatgcatctgttttacttttccttatcctctttggatcaaattactaatattcttctggccacaaatatacgagcactcttgtgtttttttttttttttttgtttttttttttctgacaaagaaatgaggaagagcgcagagagttcttcttatttacatattgcaagtttgaagatgagaccactgcttgagacactggtgaatctagcagaaactttatctggtttccttttggttccccaacaacttaacattcactaaaacctcagttttttgcttgaatgatgacttccagcatatttagtgttcacccaaatgtttggtcaatcacactctaaaatggctctgattctataaactatctttggattcatccaatggttacttcaaattttagagtagatttcccactcacactatcttcatatctgtggcagttactgaactt

SEQ ID NO: 70115 - DNA, 672 bp, Prunus persica
  Intron number 2 from transcript ppb010436m (locus ppb01043 6m.g) derived from phytozome v7.0 (chr-ID scaffold_4; pos 26613236 to 26613907)
tcagtcgcaggcgtgcaacttcttcgtgtatgtacacaatatatatcatgtacttcaaattgcttcgtcagggaccattggtaactcttagtatttggtttttagtttctaggtttttttttttttttttgggtagttaatgataagggaaatatatgggaggagggagggagggaggaggaggggaggataaggagaaatgaaagagaatgtgtgaaataaaaacatgaaaatgaaaactagttcgaattgcttttatttttgtggtttttggttttcattttaggtaccatccctcctcccccttcgtcctcctttctttctccctcttttctcctatggatttcctctcttttaattaaaaataaaaacttaaaaccaaaaatggaagtgttaccaaacaggccatatttgattgttttttggaagagctgtcaaatgggcttcacaggtagccacaatgtttcatgcctactctgtgtaaatgatccattgtggcctgccttgaccgatactttagtagaagcttgtctctaacaggcagctctagattgaggttttcatctggatggagatgacctaaatgaaacatacagtacctaaaatgctggtctgtatttttttatggtgacctatctcattactggtctatccttgttgctccttgtgcag

SEQ ID NO: 70116 - DNA, 531 bp, Prunus persica
  Intron number 2 from transcript ppa000255m (locus ppa00025 5m.g) derived from phytozome v7.0 (chr-ID scaffold_1; pos 27273654 to 27274184)
gttcagctgctttgagcagtgcacctcaggtttgtctgtttcttctagaactcatgttgatgtatttctggtaacctgtgctttatccagctaaatagtgctttgtccagctaaatggtgctttattttcgttgtgatacaagtagcaaatatttagtttctctctgctacctaggacttcataacactacttattgacctgccttataatgtttgtgctccttatagaaatctccatgataattcccttttccgttccttctttcgtatattcttattcatatttaggaaagcattaaacatcgagtttgtgataaaccttttctatatatgcatgtgctggtccctcaatatctttaatctctccaattttgctcttaaatgtattttggtggtatttgcactgctggtttcacggaagttactgtttgagtagtgtggaagttcgcatccaagcttcggtttgatctgttgtgaagttcttgttgaaccatctgatgtctaatttgaaattgtgtacaggttcctcca

SEQ ID NO: 70117 - DNA, 571 bp, Prunus persica
  Intron number 1 from transcript ppa016606m (locus ppa01660 6m.g) derived from phytozome v7.0 (chr-ID scaffold_6; pos 16682264 to 16682834 reverse strand)
cctggggtagaaattgatcgatctaccttatggaagagagctagacaggacaaacatggtaacatccctgatccaaaggtggcagagaaagcaaaattaattgtaagcctactatcactctgttttaaatttttattaaactgtgaattattcttattacgtcgtatgttatatttttcgtcgtgtgaatgatattaccacgtcgaaaagtttttaaaaacgtcgttaaaggtctaaataggaatcactactaattttctgtaattatagcataagacgtcggtggttcattttcgcgtcgtttgaatgatattaccacgtcgaaacttttttaaaaacgtcgttaacggtctaaataggaatcactactctgttttctttaattatagcataagacgtcggttgtttattcatttcgtcgttttaaataaataaccacgtcggtataactaccgtcgtgataagttataataacgtcggtttatacgttattgcgtcgtgtgaaattatataatacgtcgtttgtacataaataaccgtcgtgtgtttttttgtttatctttgttttagg

SEQ ID NO: 70118 - DNA, 718 bp, Prunus persica
  Intron number 1 from transcript ppa007976m (locus ppa00797 6m.g) derived from phytozome v7.0 (chr-ID scaffold_5; pos 8734597 to 8735314)
tgcaggtgggtttcttttttttacttcttcatgacattgcaaatgcttgtttatatatttgaagtagttttgatatgaaatttctcagatgtttttttggtttataactatcaattttggataaaacatggttctgttttttcgtttattttttcatttagtataatattactagagaatctagaatcactctcaaacgagcctttaattagattagacaacttagtaaacaaaagaaaagacataaagttaaacaacaatcgcataacaaataggaaaagagcgaaatagtatccaatcaataacacaagataacaagttatattttctcgcctatttactacggcaaagaatcaaattatcactatatttattctttttttttacttcatataatttcccttgatattgatagtttagcgttattctgtattctcacaccctcatattttggtaacactgataatggagacaaacaatttgttttttgtgtgtagatattagtccaaattttcatgtaatttcttgggtagttgatattttaattgaaatttctgtattttaagaccatccatattgatgttttagtagataaaaccccagattttaatgtaatttctgagctatgatcatatcttgtttgatatttctatattaaagtgatttctgtatttttcttatggaattatgggattgtaggcttacattgttggggagc

SEQ ID NO: 70119 - DNA, 966 bp, Prunus persica
  Intron number 1 from transcript ppb015051m (locus ppb01505 1m.g) derived from phytozome v7.0 (chr-ID scaffold_1; pos 28029900 to 28030865)
cctcggggcaggtggtaagttttgaaaaatcaagtgtttatttcagtcctaatactcctcagtagttcagggagactgtagggcacataatgcatgtcaatataactgaaaacccagggaagtatttgggacttctaatgatgcgggagcgtgaggtgatgaattttgtgaaagaaagaatgatgagcaaagtggagggctggaagcaaaaactgctcactgaggcaggccgtgaaatccttattaaagctgtggcccaagcgattcccacctaccccatgtttgtgttccttttcccaggaggtctttgtagagagttggatgagatcctagctaaattctggtggggagggaatgaagaaaaatataaaatccactagattagctgggtggagctaggaatgcccaaactagagggtggcatgggtttccggaaccttcatgatttcaaccttgcattacttgctaaacaaagctggagattgcttacagagcaaaattctttttgggctttgattatgaagagcagatacttcccttcttgtaatttccttaaagctagcaaaggggcttgtgcttcttgggcgtgggcaagcatgctagagggcagagaagtgatcattaggggttctcaatggaaaattttaaatggaaccagagttaagctatggattgataaatggtttcctgtgtcgctagacgatatgctccatcctattaatgatgagttagtagacgagaatgcttttgtgtctgaaattattaaccccatcacaaagagttgggacttatcaaatcttaatggtagaatctcggatcaggatgcttgaaggataaaaagccatgcttgtatgaggaggttgcgaatctgatcggttggtttggcccttcaatgtgtctggttgctactctgttaaaactgggtataacttgattcatcctagctaccatccaaatcataggcac

SEQ ID NO: 70120 - DNA, 439 bp, Prunus persica
  Intron number 3 from transcript ppa003886m (locus ppa00388 6m.g) derived from phytozome v7.0 (chr-ID scaffold_1; pos 46696780 to 46697218 reverse strand)
tggctggtttgagcgtggccacttccatagcagaggtaatgcttttctgttctcttctctctgtctattgagattaattgaatatgagctcattgtctttgcagtttgttatgctattgtttccttgcttttgcactttttgattggtcctgttcttgatgatgatcatgcacattcacgaattcaaattgtaatctttaatttgctaatagaagatgtgttattccttgtcattatgactgaatggtgtgatatttccagcattctgttgagatgcaatgagattatttcatctaagtattctgcaatacgctactacttactgcaatgttcatttagtgggattgaggaacttcattcatgtgatatgacgttttatttttgttgcttgatttatttgacaggtctataaaccgagcgagtataatcgtgtccttgc

SEQ ID NO: 70121 - DNA, 511 bp, Prunus persica
  Intron number 1 from transcript ppa006203m (locus ppa00620 3m.g) derived from phytozome v7.0 (chr-ID scaffold_7; pos 12603023 to 12603533 reverse strand)
ctcctccttgttagtttcttcggctccttctctttttcttcagtttttcattcttgttttaatttgttctttgtggtttaacgtcctattcgacacagttatgttgttagactatgtggcaggttatgttgctagactgttcgactcgacattgtcaaactaccttacatgttattaacttcttcatttgggcatttagattattttgacatgttaagttgggacttttgttatgttgctagagtatatgcacatgctatgctatgtgtagagcggtttaggtgttttatttattttgagatgtatatgaacaaacatcacttagatcaatcattcagattacaatatgacccgcttagatcaatattcgtgaacacagcaatctccttttttccccccttcttaattcacatttctggtgtggtatagttggacttttttttcccttggggatggggaaaagtttaaaattgatctttatgttttgattccgtgataatgaataggtgga

SEQ ID NO: 70122 - DNA, 1004 bp, Prunus persica
  Intron number 3 from transcript ppa000103m (locus ppa00009 9m.g) derived from phytozome v7.0 (chr-ID scaffold_4; pos 25393864 to 25394867)
agcaccacgaaattatactcagactcgctaccaaggtatttaaatgcgtcatctgcttttgactgtcgtgtagttatctaagccccttgtagctcaattatgctgtttgagctctgtctgttagttcttagttagttgatgagtgtgttggaaagatatgcacataatccttactacttgcagaacatactgggtgtaatttaagagggataatatgttatgtttttgaagaaacaggaagttcacataaatttatggggtttatatcttaggcaaccaactttaatagaagtaagtgagttctgattttctgttggctaggattatacgttgggattcagaatcttttcatgtcaggctcttactttcttggtgtgttaaatcttgatcattgggctggaagtaatatatccaacgtgttaggccaaattaagctttcaaatgataataaaatatgaaaagcattaaagaaagaggagtgaagtaggtgaaatggatgggaaaatggcctcccttaagttaatagtgggcacataataagtgagactgtttaaatctgatggttctaggatgggaaaagcaaatctcaatccaaggaatattttacagataggagtagacatgacgtgtttcttagaattctaaaaataagttcataatcttgttccagtggatcgttagtgaacaatttagcattttcttggtgttctggttctgtcaaatggaaagttattctagttgaatgataaaaagtggttttatcaaccaggatgtagttgggatttaggcttgttagagttgggtatggcaaaaaaaaagtgtacatttcgtatagtgaattggagaagctttgagacttatcgagctattagtatccaatttatttgacgctcaatttgtatgttgatataatttaaaacaactagtgaattcatgttgcataattttgggttcttttgggacatgagtatgcataactattgattctcatttgattacaggtc

SEQ ID NO: 70123 - DNA, 927 bp, Prunus persica
  Intron number 1 from transcript ppa004458m (locus ppa00445 8m.g) derived from phytozome v7.0 (chr-ID scaffold_6; pos 2402201 to 2403127)
cttgtctgggaggtttgtcttcacctactcatactgaaagtttctaactttgattgcttatcaaaaccccatttcagcaatccttactgtttctgtacttatgaattgtcttattacatttgtggggacaaaatgcatgtttttgcagcttactaggaaaaacccatttggcaaatgtatttggttttggacaggatgatttgtatagtagagggttttaatggaaatggggatagataaatatggatcatgttgttgcttcaattgcactgttgctaggtttcctttcattggtgctattttatccaggttgacttgaattgtgagctacatgagtctatttttagattattacgatttttttagttatctatctacccatgttcacacttcagatcatagatggctaattcagtaccttagtatgattttggaatgatccttgtgaggaatcacggtacaaatgtcctgcatgttggcacactgaactttgttgcagatttacatttttttagttagcctggtattactttttgtgctgcaaggccccttcttcatcctgccatccctgtgtgatttggttagggtatggctaactaacatttcaagggttgggagactttaaaaaaaagaaaaaaaagagagcacttgcagaacatattcaggccaagtactatacctgaatcgatatagtactactaattttaattttattcaagctttggaatttgttatgtttacagaatgatgatgcttgtctccataatgttgaattccctaagtcaatgaattagtatagtcaaattgcaagaattttaaaaggttgttcctttatatgacatattttctatttctcttgtcattggtttgaataagttcgtactgatttggttactatgtttgtgctacagaatttctgtacaagaa

SEQ ID NO: 70124 - DNA, 561 bp, Prunus persica
  Intron number 2 from transcript ppa015976m (locus ppa01597 6m.g) derived from phytozome v7.0 (chr-ID scaffold_3; pos 20025573 to 20026133)
aggctataggcagcaggtggagttttcttttacttattttctcctttcaatagtacttggctttaagataatgcaaaccaaatgcacctaagaccagagcaactagtttaagtagataaaagaccaagagatcaaccaagattaacatcaaaacatcaatcaaatttaaagatctagaagttttgatttaacaagagatcctgcagatatatgtaagaagatgacagataattcctggtgatttggtttgttttaaggaagcttttggatcttattgtttttaatgagttttctgaatttgttgatgcgaaaagagcttatgtgactgaagttctagaagctcacaacaaaaattacagccaactggaatatatatatatatatatatatatatatctatgcacaactgttttaacagcctgtattctgttagaactgcatgcataatctctctctttctctctctctctctctctctaagctctaaagtgtgctcttaagttaaccccatgcttatgtagtgcaggtggtccctcattgcaaagctactacccggaagaa

SEQ ID NO: 70125 - DNA, 804 bp, Prunus persica
  Intron number 1 from transcript ppa001040m (locus ppa00104 0m.g) derived from phytozome v7.0 (chr-ID scaffold_4; pos 14077924 to 14078727 reverse strand)
ccatcgctgagaagttttcgctgacaaagaagaaggtaaagagtcatttttgtgattggatatggtttagtttgtttcctggcagggtgttgttctgttagcttttaattggtatgccttgttgtgtgattgatgggaaagtgttggacaaatgaagaaagaaagaaacttttgactttgaatttcaaatgtaggtaatgggatgatagtaatataattcatatactttggtgttttaatgtggtatgcaaataagggatatttgtctggtttaggagaaattatggagaaggtatttttggttatcgtttcttaattgcgcattactttttgtttacttatcaatactgggtatataggaattagtctaattcttgacttcttctgtgaatttgacattaaaacccgtaattcaatacctgaaaaccatgaattagattgactaaggaagtagctattcctaagttctccgattcatgacttcccccgttcctaggattgggactaacaaagcaactgttcagcttagttgttttgaggatgttgggcttgttggttactttaacgagcgacatatatgcagtaaactgcatagttatactcttcggtaattgtaaaatctttcacttttattcaaatcaccatgaggatgtacgtgactcattgggaagttgaagtcttgcgaccaagaagttgtctttgaaattgtatggctaatgctattttacttcaattctgaactatcaaattagaatttttgggactgtaaactgatgttttctgaactcgaaattcgttttctag

SEQ ID NO: 70126 - DNA, 314 bp, Prunus persica
  Intron number 3 from transcript ppa012049m (locus ppa01205 0m.g) derived from phytozome v7.0 (chr-ID scaffold_2; pos 24946334 to 24946647 reverse strand)
agggtatgctggtttctatcatattttcctttctatggaggcctgtcaattgtatatgcatgaacgttaatgtgtttgtcttcttttccttaaaaacaaagtgtcactggtgttatgtataaagtggtcttgagtttcaatgattgtttcttttcatatgctaatgtttgatttgttggttttcaatcctttgtgctggttttaatactcgttttctgaaaatatatatatgtatcttaaatgtggaaacttatcattttgtgtggcaactttaatcttggcaggatctctgtctcctatacggggtagcttca

SEQ ID NO: 70127 - DNA, 629 bp, Prunus persica
  Intron number 1 from transcript ppa012049m (locus ppa01205 0m.g) derived from phytozome v7.0 (chr-ID scaffold_2; pos 24947030 to 24947658 reverse strand)
gattcgcacgcttattttctccctgaggaagcgaggtaccaaatccaattttctgtttcttgttttctcctacttataaatttcattttttacgctcaaaattgtccatgaaatcccggaaacggcaggaaaatgaaagaaattgaaagttccgatccgtaaacaaactcgctgtttaattgaccatttctatggttccagaggttcattttcttctgttttctcgaatattctcagcaaccaaacgaagcgtaagcaaggtgatccatatattttcttgggcgccttctgcgtttttgaggattaggttcgttagggttttaatgcgctattgatctgtggctctattggatagttttattattctgcgtctttgattagtatattatggcccatctttgagctttggatttatttcggagaaatggaattgaaatttccattcttttttctttttttctttcttagattctcaggttattgtgtaaatataattcattgttgttaataaggggttgaggacctagaatgcaatttttttgggtttattctgcttaatgtagagaatttaataagtttttcaatttgtttcagagaattcaattcaattgagcagttgcttgtgctgc

SEQ ID NO: 70128 - DNA, 681 bp, Prunus persica
  Intron number 2 from transcript ppa002113m (locus ppa00211 3m.g) derived from phytozome v7.0 (chr-ID scaffold_1; pos 11825951 to 11826631 reverse strand)
gaagtgcctttgcactaggccttctcgcagttaaggtcactttactcttactgtttttcaatatttcaatccacttaaaactttctatttctgcatgaatatatttcgtgttttattttttggtgatcgtataattgagtgtgtaaattacttgcagaggttcaaggattgaaatttgtattagctggatggtaactgaagttgcaaaaatttaaaatttgtataaaattgaatgaaaaaattagcatgaggctgagatttcataatagcttgcaagttgtggcaaaaagttgttttatttttggttgtagtatatgtaaggtttagtacaattagcttctctggccttttggttgttttgtacttgctgaaatgttatagtaagttggtgtggcatgattgtgcccgagtgcataaactctgccatcttgtgtcggttttgaagtattctaatataccaaacgtgtaacatcttgatgcccttttatgtctgcttgcttttgattcttggtgtagccagtattattcttcacctttatgatgttgcatgaatatttatgccgtagacactctgggatagtattaattcagcatcacaataactccacatgtaattgctaaaccagtttcttttatgtgtcaacagcctgagcatcaacaactcatcgttgacactggtgc

SEQ ID NO: 70129 - DNA, 873 bp, Prunus persica
  Intron number 2 from transcript ppa004307m (locus ppa00430 7m.g) derived from phytozome v7.0 (chr-ID scaffold_1; pos 12116848 to 12117720 reverse strand)
gcggtggtccatccggctttcgccctgaggttagtttgaagctgggtttagaatcatcctgttcaattttagttagtatagattggcacattagttcagtgttcgttttctatttgtttgcccgaattagtgataacgatgaaaaggtgaacgatgatttacttcaactatgctaattactaggtaaatgctactgattcttggatacattggatttcggaattttatctcaataaatcagtatcttctgcgagattactgggtatgtatatcaggttgaagcagtgatttagtgctagtaggacgtagtcaaatgacccctggaaattaaatacctttacttttctgttgctacctattgactgaacattatctttgatatgaatgagattgctgaaaattcaaaatttgtaatgccaaggtaatggtattgataataactgaaaattgatattttgtctatgatcagtgaagaagatatgatgactggttattgcggcgcagcaaaattggtgtaaaacatcaagcaatcaagcataaagtactcatgccatctccaattttactttttttagaaagaaaaacaaaacacattcgaaattacccttctgagatgcttttgacgataataaatcaacatttcaacgtcactaggagtttccagtgatgtattttgtaatggcccagtaaaaaaaaggttgtaagaaggaagctaaggttgagtttaatgttttcgtgcaataaaattgtctcttgctcaaaaaaatgtaacagcggaactgcttgttatgtatttgttgaaactttgactctgaattttcttaccatgtatatgcagttgaacttggataaactttggagaagtgctgattc

SEQ ID NO: 70130 - DNA, 552 bp, Prunus persica
  Intron number 1 from transcript ppa021389m (locus ppa02138 9m.g) derived from phytozome v7.0 (chr-ID scaffold_2; pos 14360063 to 14360614)
ccactgcctttgctttgtgtcagaagggtatccaggtaaatttatgcatcacctataaacagggacggagctagaattgcaaaattaaggagccgaaataaaaaatacaattatacctaacacctaaatatattcaagagttacatgtgagagcttaatatttctaacttagccatgaataaaccctctcttaaaactctctgatttttgtccttccttctcggttctctgatttctatcctttcttttgtccattcaatctatattttcttctccttaatctcttatattcttctttgttctattgtttgagtgcttaattaaatacctgcggattgtcctacatcaattgatattagagccaaattttggtttagatggggccattaactttaattataagttgtctaaagtgacataaaaaatctggggccagagccactctgacatgttgggtctaatcatctacgagacgatgttttttccaatatcctaacataaattgtgataatttcaggtagctactttgaaccagaccgagtatttgaagct

SEQ ID NO: 70131 - DNA, 988 bp, Prunus persica
  Intron number 3 from transcript ppa004153m (locus ppa00415 3m.g) derived from phytozome v7.0 (chr-ID scaffold_7; pos 19092930 to 19093917 reverse strand)
caggcttggatcttgggagagctgcatttacccatgttacgcctcctctctcatttttacaattttacatgttccccctctcttctatgccttgttgtttttcctactggtttctgaaatcttgtgtatcactttccattttggtttcagttctccctgttgaagttgactgtgggcccccacactcagtgagagcctctgtggctcgccatgaaagcgtccaaagtgatccttcagaacagtatagaggtcagggtttggaattgttgctaagtattttcaggtttttatcatatttggaaaagaattagtttctattggaggcccatctctatagccgtgaatatcatgcaagtttgtcttctgttagttgggttttgttttagtcaaccttttagtttggtttaagaagagcaaaacagggttgcagtgaaagttataatcaggtgattttgaagtaaaaggtcagatttaattttatatatagtgcttccaaaaataattcatattttatattatttttggaatcacgtctagattatgaaactctgcaatgcaaaggcttgtgcttgctataagatagttttgtgagctactttctacatgtgtttcaacagttacatcacaaagtaggttttctcatagctaaagatttgaataggaaaaagaagccaaaggagtgtaccatgcagctaaatgttgttgtaccaagatgatgttctacttgtactgtctatttaattaaaaatatcaaaccacctgtacagttagttttgatcaattagaggcgaaactggctatattgcaacaattgacattttcttgaatgatttcgttctctgttgcagttcattggttaagacgaatgctttttggagctattaaacgaataggtctggattcgaatcttacccttccgtatttgctattgctggatgctttccactcatgtctcttacatttttaacgtgcagcacgagctggtttc

SEQ ID NO: 70132 - DNA, 358 bp, Prunus persica
  Intron number 3 from transcript ppa012378m (locus ppa01237 8m.g) derived from phytozome v7.0 (chr-ID scaffold_8; pos 20535066 to 20535423 reverse strand)
gttgaccgagctttacaacaaatacaaggacaaaggtttcttcttttccctctaaaccttcactgctgctttatatgtatgaacatattatctatatttacaatcaagtttcgcgaagaagtactaattttgagcgaaggattattaaatcccatgaaaaactcttctgggttctttttctataatccaaattttatagttttgtttatgttgctaatttccaagttcttatcagtttagttgatgcatttgctcattaagactgagagtaaatatttctgttagttttgtgtttgatccggtctagacatgagtatttttaggtcttgagatcctggcatttccgtgcaatcagttt

SEQ ID NO: 70133 - DNA, 670 bp, Prunus persica
  Intron number 1 from transcript ppa012276m (locus ppa01227 6m.g) derived from phytozome v7.0 (chr-ID scaffold_4; pos 18148641 to 18149310)
ttgaaggcacttgcaggttccccctcctcctcctcttcttcttcttcttattattaaatacaacataacccttgcgattttcttttgcttttttttttggttgccttgtagccctgcgacatttaaatccgaggaaagcttaaacctttctattctctttcttcttttcattttatttgctacatgcttatttaggaacggaaacccttatctgttcgattatgctctaaacttgggtaaacaaaaacaaaccaaaaactgaatcttgtcagtccttatgtagacgcagtaacgttaaatacattgaagtttgacccgatattaatttatagataaatcccagatcacattgagtttgttgagtggggacactcagcactggttcttgttcagttttgtctttgtgaaagctcggaccttggccaatataagctccagtacggcatgtattttgcattagtatggctccttctgtataattaatactagtccaattccatttttagtcactttataattgaatttcaccaagttctcctgctcaagtttaactttcaagtgctatagctttgaaaaaccaagtatatggtgaatgttcttcgctgtttttgctacatggtgggatggataaagcagttggtatattttcatcttttgtgcagtggtcaac

SEQ ID NO: 70134 - DNA, 871 bp, Prunus persica
  Intron number 1 from transcript ppa000364m (locus ppa00036 4m.g) derived from phytozome v7.0 (chr-ID scaffold_6; pos 22390526 to 22391396)
caacatccttcttcttcttctccgaatcttcagcggtaagctcattcaagcaaaacccacttcgctgaaatgtgtttctctggaaaatctagcgtccttcagtggaaaaacttgggttaactttttgatatgcaagttacgaagaaatgtgtgatttctatacgtttgcaagttacaatttgtgcttttttatgggtttagattttagtttcttgcacgagctgaagccgagctaattggaaaatgcatttttcttggaaactcttgaattaattgatattttccttttggaagaattgggtagtgacagtgagaggttgcatagactttgatgaatttggtacctttggtaatttttgataaatttggatttagagttagtgacctcttcttcattcttgcaaagttcctatgtgttcaccaaaatctttgcatctcagactttacaggggcttaatggtaacttaatccatgtttgccttaaggaggtttcctactgcctatagggtaccatctgtttgaacaaatgcctcggtgagaaatctatcactgtttttcttttggaggtttcaatctgcatttgcaatagtgcaagaggctagtatttgttagttttgagacttctatataccaaactgaaacaggacgagtttagattttgccggtcctacatgtttacttttcacaattgtctttggtctcctccccgtcatgtgcttgcttgtacagttcttggtgtaacttttctagtcgattacttaaattgttgacatttcttgcattacaacttttgcatttgaagaattatactcatcttatggtcagataatgatttcttaattataaaaatcattgcagcctttttgcatat

SEQ ID NO: 70135 - DNA, 587 bp, Prunus persica
  Intron number 1 from transcript ppa007293m (locus ppa00729 3m.g) derived from phytozome v7.0 (chr-ID scaffold_1; pos 44362622 to 44363208 reverse strand)
gcaaaggccattagtcgaaccagcacatatcatcggtaatttcttcttcttcttcttcttcctaacatagctttcccgtcttcttctccttcttctgcaacatttctgcaagcaatttttgatgtaacagtggtgggtgcattatgcatatctagtaaatgactgagtgagatagagtttatgtcttcattgttctttatctcccttttttactgtttgaaaatcgagtacaatatcattctgtgtcttgttgattgcaactgagctatccttgcatgattgcaactttgtattcctggggtttttttcaaaaaactttttattttgatcttttgtatgttggtctggccctcttccacgttttttaccaccttcagaaaataaagacctaaaaggaaaggtggtgttttgattgttttggttaaattttggttctcatttgatgctggactttctgtgttgcgctttgtttgctttgttctctttctatcaaatcattaatccaaaatttagatttcattatatctctctgattatattttacttcagttcaacagattctcatattggcatttttatttagtcta

SEQ ID NO: 70136 - DNA, 564 bp, Prunus persica
  Intron number 1 from transcript ppa020163m (locus ppa02016 3m.g) derived from phytozome v7.0 (chr-ID scaffold_16; pos 119427 to 119990 reverse strand)
taggttccttttctctctcttaagagtattttcctcagtccaaaaatatatgtaagattatgagcgtatgtttgcctctgtagttgaattttactttttctagtatgtttgcatgtgaaatatttgacaagaaattattcttcatatattctttaagcatggacaattcaaatatacattatataaatatttttaagtctatttgtttgggaaaaaaaaacacacaaaaacgaattttgacaagaaaattaaatatatatctttgaatttacatattccctattggagtaaaaatcatatttataccctccggaggatgttaaagaggatgttaaatcaaaaatacacccctaactgtggatgctcttactactagattgggattttgagtgcatgattttgtctatattttaatttgtaattgcattattatttgtttaaccaaattctaaaaacaaaaagaaaacaagaaaaaaaccagtattttattttatgaaatgcctctctgagatgttgcaatatattgcagcttcctttttgggcataagatctccagtgccttac

SEQ ID NO: 70137 - DNA, 382 bp, Prunus persica
  Intron number 1 from transcript ppa001520m (locus ppa00152 0m.g) derived from phytozome v7.0 (chr-ID scaffold_6; pos 22256875 to 22257256)
gaggctcttgcaggtaattttttgttcaatttattgcgatataaacctgcattgtactaatttgtagtccagtcctgatttatgttcaaagattttaaatggttggagaaatggtgaagtaacccaactaagaagatttttacttcccttaggcattttcagttgggttttagataaagggctgtcgaaaatgttaaaaatttgatccttagtttgttgttatgtgaatgggagaggaagaatctaatgtttcatgagaatttcagtcttggaagaataataatgtgatgagccatggtagagaatttgagactccttggatttgtaacagataatacttggttcaggttatcgtttcccaatcaaagaactgctggagcca

SEQ ID NO: 70138 - DNA, 621 bp, Prunus persica
  Intron number 1 from transcript ppb014513m (locus ppb01451 3m.g) derived from phytozome v7.0 (chr-ID scaffold_2; pos 14299235 to 14299855 reverse strand)
tcggactcaagttagtattcaacgtgttacaacttacaagattaacatgtggtatcagagcctagttatatcatgttctacctaacaaatctcgtgcaggaaaattaaaagaaataaactgacagttttaagttataaagcatgacatgataacagtataaagttgaactttatcatgttctttatggtttctatagatcaatgcttacaatccttgtgtagtgattgagtgagccaaagcgattcaattactgcatgatcactgtattcaaagtttatgatctaaaaatttgcatcatgatgcaaaacatgtcgaaaggctttctgtccaaagatgtaagcagtttgatatgtttttatcatggtggatatacatgggatatggatagatatggattaatgaaagattttcttctatccaaagatgtggaagatcttttgcttaggaaattcacatatatttgttttccagtgtcaataagcatgcttaatttactgtccaaagatgtgagttaagtatgtttgattaaagttttggggaaagttgtttatataaagtgcttatcttgttttaaaacacgtacagtcaatcataactcgattcgaactctcactggctca

SEQ ID NO: 70139 - DNA, 592 bp, Prunus persica
  Intron number 1 from transcript ppa003805m (locus ppa00376 0m.g) derived from phytozome v7.0 (chr-ID scaffold_1; pos 26289330 to 26289921)
tgatcgctccaccttcaacaaccccactttccaaggttcattttctttaatctctctctagaatgggatgcaaattttgaaattttgatttagtttatctttcggaattcagttctgggattctcttctttggttgaattgtttgttggttggttttatttattggaatttgagctttccagagacagaatgctagttttaattttccttgtaagaccaattgatcaatttaagctatgttcctgttttctggaaaaggttcagtcttcaagaggatccttcagttctttctggtgactaacaagctgaccaccctcccaattggaggcttttgaaatcatcctcggagctagttgatagacaacaagaagaaattgcttatgttgtctttgtcttttattacaaatggcatgttggaatacaatctctctgacaaactagtcaggctttggcggcattttcttatcaaacgtttttatcctcaaattgcatgctactgtaattttttcttacggccatagcccctgatttttattaaaatgtgatagcttccacagaaagtatcgaagaggcgtggtttgatccagttgca

SEQ ID NO: 70140 - DNA, 915 bp, Prunus persica
  Intron number 1 from transcript ppa001377m (locus ppa00137 7m.g) derived from phytozome v7.0 (chr-ID scaffold_6; pos 24335013 to 24335927 reverse strand)
tgccgggttgccgaggctgcacacgcttccggaaggtatggctcggctggatttgtcaccagaataatcaattttcgctttaatttcataattttgatttgatacatatagtcgtgccgcgtagtttttggattggcttcgtcatttggacatatggttttctttaggattatcaatgcctcaatagctccttctaaactacagtgtattggtattttataatataagtctgcactaattgaaatactcatagatattgccttatatggcatctctgtatgatgagaagtagtaagcatgacactcatttactttcatttattttttagcctaaccaaagagtaaaccaaaatggaattagaacttacttgttgaaagtaaggtatgctgtattcatagagttttggtggctactttgattcctaaaattactcaaatgggcatgaaaagagaaacaaacaaatggaacaaataagatactccgcgggagctcatctgtaaatgtcgaacaaggaaaagatactaaaatatacaggacacaaattggatgcgacaagttttctatgttgtcatgttatccacatgcaaactggcaaatggattttccatttcctcttgacaccttaagtgggctggaacatggtcgcaaagagtgaaattaatgcaagtaatgatgaaagattttctttcacaatgtatattttctttgtgcttgatgttgttattaggctcggatataatatgaattgtgcaaatgcgcagtgtttcacgaagtttcctttttaccctctctgtcattaccaaatttttgatatcaaagcaccagtgtgatagatgccagtttcctttgctgttaaagtacagacttcttctttttcagggaaatctactgagcttgcgagttcagctaagaga

SEQ ID NO: 70141 - DNA, 768 bp, Prunus persica
  Intron number 2 from transcript ppa020224m (locus ppa02022 4m.g) derived from phytozome v7.0 (chr-ID scaffold_3; pos 7566589 to 7567356)
ttggaggaccgaatagtgcccataataaagcttgaagaagttgtgaggtcttattaaaccaaaagcagcatattaaaacaattatctcaaaacactcaaaccaagattgaattgattatcgaactcatttaagtgcatccattggtgttagtaggatacttttacaacaagggcttccattttgtgggcatgatgaatctaaaaattcaaccaatcaagggaattttcttgtatttttacaatggctatgtcgttttaatgattatataaaagctgtcacgctaaaaaatgctcctgaaaatatgaagttgacatcacctgatatctaaagggacatttcaagtgctatttcaactgaagttatcaatgaaatcatcagggatattggtgattcattatttgccatttttgttgatgaatcatgtgacatgtcttcaaaggagcaaatgaccattgtgctacgtttatgtggataaaggtcatgtaattgagagttttgtaggtattgtgcatgttacagatactaaatattcctcactcaagttagccgttgatgatttctttttgagacatggattaaacatctctagattgcgagggtaaggttatgatggggcaagtaatatgagaggtgagtttagtggtcttaaaacactcattctaaatgaaaatgactctattttttatgttcattgctttgctcataaacttcagctagctctggtagctatggcaaagaaatatttataaattgcagatttatttact

SEQ ID NO: 70142 - DNA, 442 bp, Prunus persica
  Intron number 1 from transcript ppa007451m (locus ppa00745 1m.g) derived from phytozome v7.0 (chr-ID scaffold_1; pos 32854972 to 32855413)
ggaagctaagagatcaggttgctaaacagcagcaggtactctctctctcttccatttctctccggaaaacgaaaaagaagaacagttccggtttgatcgaatttaaactctctgtttccggaatttaatctccgcatgggtattaatattaacaataatctgcgtggatatgagattagtggagctatcaatgaatttagttcaaggtaataataataataatctataattgtctgaattgaatcgaatagcattttactaactatgagctgtttggggctgtggtggcggtggctgcaatgttgttgaatttctgaattctgagccaagtgttgtttattacttcatttcatttctgaatttaatatttttggaaagtaatttgcttttgatttttgttaatactgtcaggttgtcttcaaacaattttctggtggcattt

SEQ ID NO: 70143 - DNA, 306 bp, Prunus persica
  Intron number 2 from transcript ppa000074m (locus ppa00007 4m.g) derived from phytozome v7.0 (chr-ID scaffold_2; pos 10258902 to 10259207 reverse strand)
agtttaaaactgcacttcttcagcgtctagaaagggtaagccttcatttcccctggtaattgcaacaaattcttttttcatatatgtgatgtgatctttcagtgacattgttaccaaagcaagaaagaaagaaagaaatagataaacaataaataaacagatagataactagataataaataataaacaataagaagttattcatttgttggaaatcatatgtactatatctcctaattttttttatctaggactatttggaattcagcagagatattacttatcattttgattcttttcaggaaa

SEQ ID NO: 70144 - DNA, 717 bp, Prunus persica
  Intron number 1 from transcript ppa000074m (locus ppa00007 4m.g) derived from phytozome v7.0 (chr-ID scaffold_2; pos 10259265 to 10259981 reverse strand)
agttgaggccaggaatccaagagttgcctatctatgtgagttgcacttgttttctcatcttgtaagcttgtattctattatctctttgtatgtaagagtcacacgtgtttcgtaatgggagtcatgtttgattaatcaaagctcatgaaactggttggattggatacactgcagtatggactttattcccatagcttctggctgttatgtgaaaggaaaatgtgatggatgtaaattgtctgtcttgatactcattatacatgattcaaatattagggcatgtcatatgtgaaaggaatacatgatggattttgtttataaatgtaccaacttgtttctgaaacatgtggtgaagagtaccacaactgccgaggagctggccccaagggttgaacttgaagaattatgctttccgaggcatgttggcttgtcaatgaagccatcagttggggtttttaaatgcatcttttttctagtaacttttgttttgttttgtttttttttgtttacaatgcttgaggctactttattattcatagtcagtggaatagttggttagttgataatctacctattgtaataagacgggttatgtttcaacattttatcatggcaaaaaaagacctttagacaaactcaaagtcattttaatgaactatattgtatgtttgggagtccaattcatactaatgtgtatgttggaattaggtcggttct

SEQ ID NO: 70145 - DNA, 808 bp, Prunus persica
  Intron number 1 from transcript ppb017269m (locus ppb01726 9m.g) derived from phytozome v7.0 (chr-ID scaffold_5; pos 16866387 to 16867194 reverse strand)
ctctggaggtgcttgcaaagctagtgccttcccatattaaatttacagtcctttaggagggtctaggcaagagaacataacattgttatgctcatggtcatgaatgaaatcagtcaaatgtatgttttttttaactctttggtgaatgcgaatgctattagtcaattggtcttcttttatttctttcccgtctcctcctcccacctctaatttttactcatcttcttctgaagaatatttttcaatggttttttttttttttacctctttctacaaacatgtaaagggctttaatgaaaacccctttagtcagctttacaagcccaacacgggagacccaagactgttgaattaaaatccatccacatccagtaacattttaaagatgaaaacaaggaaggactctgaaaacaaacattctattccctataactaaattggagccaaagttccacaatatccattcttgtaagttcaaaattcttttaaaaagaaaagaagattggaaaaaaaaatatcatatgaatttgaaggtattgttattaaccatctttttgggcaaataaatttaacccaaacagttttatttttcattttttatgagcaattaaatatgggaaatagctcaaaataccacccattttataattttttgtcaaaataccatccctctccaaaaaatttaaaactgtcacatataaatacatatttattgtccactgattgcacccatatcacattttcagaaattttgttctctccaccgaccacagcttcttttgctttgcagagtcgtaatcgataatat

SEQ ID NO: 70146 - DNA, 505 bp, Prunus persica
  Intron number 1 from transcript ppa014629m (locus ppa01462 9m.g) derived from phytozome v7.0 (chr-ID scaffold_1; pos 36703331 to 36703835 reverse strand)
gcaagcccaaaagaactggtatgtgctctcttttacaacatgagctcgaagatcatatgatttttctccagtttcacaacatggtttttcagttcaactcaagttctttctctttctaatgtagcaaaaagtccaaacttggttacattctttttcctattttcaagtttgacttgttctttttcttttcttcacatgttcctttgttatcttaaaaaaaagcttggaatgtagccattaatgttatcttcaaaagcttggaatcctttggctttgggatacagctactattaatgcataaagaattcgccttgagatggctcgaaaattaagcaaagttaggatggaattatatgcatcttgaaaaagaaaataaaagaaaaacaaaatgtcttgtagacatacataagctttagggtttaacatattgcagatgaaataattaatattttcccttttttttttattctctaatatgtatatatgtagggacagtgtggactgc

SEQ ID NO: 70147 - DNA, 489 bp, Prunus persica
  Intron number 1 from transcript ppa006563m (locus ppa00656 3m.g) derived from phytozome v7.0 (chr-ID scaffold_1; pos 31650503 to 31650991)
attaaggtgcattttgattttttttttttttttttaagaatcgattacgaaatttcctagtgtaagtctcggatttttcaattttttattaccgcttctatgctctgagtttccggtggggttcgtggcagctggggaaatgaaatttagctttacgggatattctattgttgttactgctcatcacgttgttttcttcttgtatgagaatgcatctcaagtgggaatgcgaataagaaaccttgtaaaaggatttgggccataacatcattatgcgttgtttaaggttctgtgtctttgtattttcaaaatttcaagggaacagttgctgccgtgtcattggaaacacattgttatggcttttttttcttggacaaacattgttatggttattcttctgtaatttgaccgtcatataatttattgacttatgtggcaaaatttcgtcatacaggatcgtgtacgcactgaaacttataggacggcaat

SEQ ID NO: 70148 - DNA, 732 bp, Prunus persica
  Intron number 1 from transcript ppa008426m (locus ppa00842 6m.g) derived from phytozome v7.0 (chr-ID scaffold_8; pos 3967189 to 3967920 reverse strand)
cccaacctcatcttggccgtacgtagctctctcactcacttgcgcacaaacccaacacatcagtttcactaaaccctaaaccataaaccctaaaccttaggggaatattcaatatataatctgattgtgtaaaagttttagcatttgttgattggaaattgtaaaattttgataaaattttgaaatgtttgaaagaagattggtaaaagtttgttgcttgtgttctcacattccatgggtattcataggtttgaaattggggaaaagtttgttgcctgctcaataagtgtgaaccaagtaggcttattggaatttcgaagcgagcttattagaatttggataaatttaatgaactttttatattaatgcgtagtggaagtgaagtatatgctagaggcaacttcggtgattttaagagcctaggtccacagaaacttgtggctcttatatttaacatgggaattgcttacaagaggggttgaagtgttaaaacttgtgtcttatcttatgggttatcttgtttgggatttcgaaaaatgaaaagatttcttcatactgaaagctgttagactcggtcgaggggggtgttttgtgtttggtgtagactcttattaagcaaaaagactaagttggaaggtttcagttgcatcaagtcactggacctatgcttctactgatcactgtttcttgttttcagggtcctcctggaactggtaagaccactagtatact

SEQ ID NO: 70149 - DNA, 190 bp, Prunus persica
  Intron number 1 from transcript ppa013883m (locus ppa01388 3m.g) derived from phytozome v7.0 (chr-ID scaffold_1; pos 40640078 to 40640267)
actctaacctccgatccaaagctccccttcaaagtgttcgtataaccctcgatttatattttcaattccccttcgttaacttcttttctgcttctcgatttacaataatttgatgaaatttctcaactttttgtttttgtttttcttctttttagatttagcgttcctgaggcagcccctttcaccgccg

SEQ ID NO: 70150 - DNA, 869 bp, Prunus persica
  Intron number 2 from transcript ppa013883m (locus ppa01388 3m.g) derived from phytozome v7.0 (chr-ID scaffold_1; pos 40640296 to 40641164)
agttcctccccaaaccagcgctattatcaccaacggtatttcattcctgggcttttgcatgttgctattgatttcatttttgtctcgttaagtctgtgattttctaattgatcatcagtgtgcaaattggtattgatttctttttcgtctcgtaaagtatgtattttttttaatcgatgatttgggtgtgattggaaatttcattgcttgatcgaattagggtttatggtttccggaattgggaatccctttttatgattcagtgtgagattatatctctatgaaaacagaagttgtactctttaattgagagcttggacttctaattcttgtagagcatcataagtgatgcaaatttcgaaatcaaaattgaaaactttgaaccaagggaagaatggaaaaggatggagctgagagaatttaagcaaaaagggggaatttgaattgcagatgacattctaggaatttttgatattaggaactggtccgtcatcattttctatgtgactaagctcatgtaaagttcacttgaaggcagtctacggtatcctctagaactcgtaaagaatatccaaaaccattttgccaaaacataccgatatctccagtcttcttcccttccaggacaacagtgttattagttaaagaactgtgtgtttttcccctatccttagatccaatcagaaattgacattggtactatccaatctttagacaattgaaatttaatttgataaacagtgaaacttttttaatgaaaaaccccttatctcctaatttgatataagtaagggaaaagtgcaggtatgccaatgcttgttgattgtcaccattctattagttctcacttgttgattgttattgtgcag

SEQ ID NO: 70151 - DNA, 505 bp, Prunus persica
  Intron number 2 from transcript ppa009562m (locus ppa00956 2m.g) derived from phytozome v7.0 (chr-ID scaffold_1; pos 32266067 to 32266571)
cgcgtttcggtggtggttcacctgttaccgttaccgtaagtagacagatttcttcatctctctctctttgcttttcggctccccttttgtttttcagaaaacgcctgggaaaagatgataagaaacagaacgaaacgatcaatcaaacaagcatagcttttgagaaaccgactgcatggcttaatttattatataaaacgccagatttatgttttaactggtagttatgattctctttaattgccaatggccaatcatttctgggcttgaattgaattcagatattataaagaaaacttaaaagtgaataagaaacttttagactgaccaattgaattcaccagggttaatttccaaaattattaattgagaccttggtaaatttttcatgatcctgatttatctgcccatttgtctgtcaactgttgaaatgtatagtttttttcaccttgctaaacttgctcagtacttacaaaatactctcgtttctgaaactgcagttacc

SEQ ID NO: 70152 - DNA, 647 bp, Prunus persica
  Intron number 1 from transcript ppa003553m (locus ppa00355 3m.g) derived from phytozome v7.0 (chr-ID scaffold_2; pos 11488171 to 11488817 reverse strand)
tcaggtacttgccgtttgcctttcttctttctgttcttggagtaacacggtttcttaaatttgattattttgtatgattaaaaacaacacatggagcaaaaaagagaaattcgtatctcttttatgtgaatgtcagtttgtgatattttgttaagattgcattgaagtatatggaaaatgaaattatgggttctttattttatgtgattcttttgggttttgtgcttatttctttgcggtgtgtcaatatggagtctaagtttgatatatatatatatatatatatatatttttttttttcttctattggtggataagttgtgtgtccgcgcttgagttttgtcttgaaagattgtacatttactatgggattagcttgagtttgtttacccttctgttatcaagcattttctgaattaaccttctttctgcaaaaaaagttgtcgatgtataactgtgttgatctttgtcatttcaactgggtggcttcctaagtagttcttgtgttgctacctccacatgatatgtgaggccaagttttacagtcgttttcctatatttgaggaattttcagggaagcattttagatttgaatatctggtcctgagtaattaagaccagttttatttatcatgacattgcagggt

SEQ ID NO: 70153 - DNA, 663 bp, Prunus persica
  Intron number 2 from transcript ppa024367m (locus ppa02436 7m.g) derived from phytozome v7.0 (chr-ID scaffold_5; pos 124090 to 124752 reverse strand)
ccaaacgccttgggactcttgttcaaatcctccaggttcatcataaatcactgtaattacattttatttttattttatttgtcaaccttgtttttattttttgtaatgatatttaggtaatacgaagcgacggttggggaggactatacagcggccttaagccttctctgcttgggactgccgcttcacaggttattcttctttcctttcattatatctttttttttccttgaaatgatttggataaagtaagggctatttggttttggatttcaaatgtaagaatttgaaatttagatatatgaagtctgcatatttgaaatttccttatttgggtaacattttttaatgcaggaatgtcttttcctttttttttggtaaagtttttaatgcaggaatttcaattaaggatttcaatgaaaactacattaactgggaaaaaaaaagaaaaaagaaaaaaaccgttacaacagtcaaaaagtttcaacactcattccatcaatattgccattatcaaaatttgtttactcaaattcttgattccaaacgggttctaatagaatcagaaatatgccacactatagaggataatgaatgttagtgatagttctgtacatcattctggcagggcatctattactatttttatcaggttttcaaaaa

SEQ ID NO: 70154 - DNA, 629 bp, Prunus persica
  Intron number 1 from transcript ppa013186m (locus ppa01318 6m.g) derived from phytozome v7.0 (chr-ID scaffold_1; pos 25472476 to 25473104)
ctgtcaatcgtaattgtctttgcgcttcctcaaaggtgatttctcactctaatttacaagatccttgtttctcttttgatagatttggatgcaaatttgttctttttttataataaattttatcagtgtcgactttttatatattgtggagtaattagggttccgatccgttgtttaacatcgattttctctctgatctgctttgtaaatcggaaagttacgttgaaaatttatgatcaatttagcggtttacaatgtacgattagtttatgttggaaatttttacttacattctgttacatcttggcgaaaaagctcgtctttttatcaccataattaacataaatttgaaatctttgttctaattttttggcaaaagaaaagctctgctcaacccagctaaggaaattcccaatcgattgaagtaggttttgttaatgtcatgtttgagttctctgaaattatgaagaagaaaaaaccaaagctttaagactctatgttacaattcttatggaccacattgagaaaagaatataattgcacgtgcacaactatgtttgttgaactcagtatgtgtagttttaatgattgaccgttcgtgggtgtgaatttcgcaaggtttagctgaa

SEQ ID NO: 70155 - DNA, 598 bp, Prunus persica
  Intron number 2 from transcript ppa001863m (locus ppa00186 3m.g) derived from phytozome v7.0 (chr-ID scaffold_6; pos 4221991 to 4222588)
caaaggtgagtttgcatagagctaaatatcaatgggaaaaccaagttatctttcattcttcttcacatttttgaatttcatgtgcgtggcttctgcagtcctatgtggtttttgtgtgtgagattttttcttttttgttggaggggagtgagggtggcaacattgttatggcttgtgtgataccggcttggacagtcctcaatttttttgtctaccatccaggataggtgggtctgattcagattggataggttctttttcttctcctcttgaggaagagtccttccaattgttggacaggagtgttgggatagagttcaaccatcacccattcttttccctaagaaacacaaaattattattaatcaagacagtttacaagaagaatgggcgagaattagattccttgtctctcttaattgggtggtagttttccatttgctgttcttggatggactgttgctgatccatctccttgtaattttgttgttctttccaatgaaatttttgtttgtaattttcttattggtgcatatgtttgtaaaaattatgtctgttctttgcgcatctaattttgctatttattttgttgttagaa

SEQ ID NO: 70156 - DNA, 696 bp, Prunus persica
  Intron number 2 from transcript ppa023685m (locus ppa02368 5m.g) derived from phytozome v7.0 (chr-ID scaffold_1; pos 41422223 to 41422918 reverse strand)
gttggtttttgtttttccatttcagtaaaacattaaaatttcaatttttaagtacatatttttcttttttctaaccttttttttggggggaaggaatcgattttgtagatggggttttggatttttgatggttttgattgatagtattcggtaaatgatattagtttgatttgagaattgggtttttccgtgtttgttgggtttggttaatgggtttttagttttgaagatattgatcaatggatttttgtttcattattactctaatttaaacagtagcactctaatttaaacttccttgggtggggaaataggacaatggggtgtaaatagtagcactctaatttaaacttccttgatcaaaaatgattataataatttaaacattttgtctttgtctgacaatcaactttttggttctattcccgaagagacaggcaacttgaaaagccttgtggatttagaattgagcattaataaactaaacggttcaattcctgctacatttggtgacttaagaaactatttgaattcttacacttacgggataaccaactttccggcctcatcccccaacagatagagaatctcaaaaagttgactaactagcaattggatacaaaccaatttttttgttatttgccccaaaatatttgtcaaggtggaaaactcacaaacttctcagccagcaaaaac

SEQ ID NO: 70157 - DNA, 498 bp, Prunus persica
  Intron number 1 from transcript ppa007200m (locus ppa00720 0m.g) derived from phytozome v7.0 (chr-ID scaffold_3; pos 13521076 to 13521573 reverse strand)
cttggagccgtgatcgctccagtaatgttcttatccttttttcttcttctgtttggtcgctgagaaaatatgggataaccaataggaaaacaatcaccaaattttttgtttatttacagtgatatcttttagttcttttatgtgtgtctttgtttggaaaaattggaaagctcgtagcttggagccaaacatatttgttgaattaatatgaagaatctgggttgaatattttgattccatttttatctgcacttgcttggaaaccaaacagggggtttggggttaattattgtgctgttaagcttctatctttctgcttgtgctatatattttgcttcttgttgaaaaatgtgaagtaaaaaaagactctggtaatcaaattgaaaaaatagagaattttgatctcggttcaggcaatgtgtaggcattttgtatatgcaatgctgtaatttgatcattcctattttctggtagtgctggcattttgtccgaacaaca

SEQ ID NO: 70158 - DNA, 399 bp, Prunus persica
  Intron number 2 from transcript ppa002722m (locus ppa00272 2m.g) derived from phytozome v7.0 (chr-ID scaffold_3; pos 17760020 to 17760418)
gccacgaagacaaagccttcaacagggtaaaaccccgtgatggaattcattcattacccttttgtcaaatcaagatccctctgttttcttcttttttcaattactcgtgaattctgttctggggttagttcaaattttgctgatatggaatctgggtttcccccaagcacgttttggtgataaagtttagaggttaaaagttttacccggaaataaatggatgatgccaagtactcatctgtaatttttagaattgttttgatctgttttttctcactaatttctctagtttttgtttttgtgcttttcatactaaacccataatttattttcggtctcagttttgtgcttaatcttgacttcatttttgttttgttcaggttggacagataatcaaag

SEQ ID NO: 70159 - DNA, 505 bp, Prunus persica
  Intron number 3 from transcript ppa012741m (locus ppa01197 1m.g) derived from phytozome v7.0 (chr-ID scaffold_5; pos 16908575 to 16909079)
ctcaagatcttttgattgagtgttgtgtaggtgagtatatgtaaatagtttagctttggtttatctgttacatttgtatgcattaaagcacacaggtagattgttattctgtgttaatccaaacgagttttgttattgttaatgcatctatttttgcatcttggtttctgtatagttcaaacccttatctgcatatcttttggtcaatagcatgttctgcaagttaaacatggttgtttcagggaatacacaacaaaatgcattgtggattcagtacataagtttcaatcaaaattaaaatacagttacttttcggattttgagggatttttattatcagttatggctgttggaactcctaacttctttctttgccccataactttttgttttgtactgttgtctactacgtatgctagttctaggatgttttatttattttcattgctgaaggaaaccttcatcgcttttgcagagtttataaatctcatctcatcagagtcta

SEQ ID NO: 70160 - DNA, 815 bp, Prunus persica
  Intron number 1 from transcript ppa009600m (locus ppa00960 2m.g) derived from phytozome v7.0 (chr-ID scaffold_3; pos 5610605 to 5611419)
aagcaaagcaagccctcctgtttcaaacactcttggtatgtttttccttcttaattggtctctggaactgcttctaactgttgggttttttttattcatttatttgcagactttggattctagaaagaaatttagcactataatcttgtttgtgggttagtgtcaaaagcttataatatgccaccaaaaagaaaaagtgactttggaaacttcacaaccaaaattgatactgaaatttgtggacaagcttcaattgccgactttctactcataatagttttatctttacctttgagtgctggcaattagagggaaggcttctttgaagtgggtccttgtgtggtgtttacgtgtcctttaaatgataataattcatctgtatctgagttgaatttgaagaagtcatcaggattagatgccactataaatttatcttagtgtcagcccccagttgctttcctatgataaaatggaagagcaatggggcatgcagaaattcaatctgctaaagcccatctcatcactgagtttaactcaatttgaacaggtttgatcgtttgtttttctcttttctttttgggtgtttctgatagcatctagaaagctgtttgcaatatcaaacatgtttgatttgtcgcaagatcaaaaaaattgtctgttcatattttgatttctatgatgcacaagaaataaatgttttctgttcatattgtcagatcaaaagatttatgttttaagattaagacttcaaattcttaacatttctacaatctaatgcagctagcagttttaagggattttcattgccaaggtgt

SEQ ID NO: 70161 - DNA, 679 bp, Prunus persica
  Intron number 3 from transcript ppa006737m (locus ppa00673 7m.g) derived from phytozome v7.0 (chr-ID scaffold_2; pos 18971884 to 18972562)
tgttgctcaaagtaatacgtcaggttggttgatgcaaaaacttaaatatatagtagattcttctcccgaaaaggagttacttacgtttcattatgtgatagatgacctcttgcttgtgtaaaatttcaagtatctatccttaaacagcaacttttgcaatccagcagatgtcatattgtttggcaaagctttgaaccttactgtctgttgtcatagaggcatgggttttatatactcactttctctttgatttatagtggaaaaacctgaaagtgccgtgtgaagtcttagatagagtaactaggtttttttttttttttttttctttctacggtgggacgaaggaacaagagaagtacctaaaatatgctggatggtagataatatttcaaagtgattattaagcgagtattgcatcatatcatttgactgtatgccagtgccacaaggaaatttgcgatgccttacattacatgcatggcattttcttttcatgttttaagacacttttcaatgccttgtccaccacatgcttactgtatccccattaagggactatttgcttatttaggtcatcacctatgagtttgtaggcaaatattttaataatattagaggggtttcacaggaataaattggtgcaggaaggattttggagactctggaggggcactacagc

SEQ ID NO: 70162 - DNA, 577 bp, Prunus persica
  Intron number 1 from transcript ppb018012m (locus ppb01801 2m.g) derived from phytozome v7.0 (chr-ID scaffold_6; pos 18396565 to 18397141 reverse strand)
aagcaacacctcaggcctatagaacccttgaaagggtgtttggataagtcaacaattgcattcagtccaaacactcctgtgcatttaaggagcgtggttagcagaattctaaagatcccagttgttgagtttcatgagaaatatttggaattaccaacagtgattggtaggaaaaagaaagcttgttttaacagaataaaagaaagattgagaaagaagcttaatggctggaaagagaaatttctttcaaaaacaggaaaggctttccttatcaaagcggtggctcagagtattccaaattatgctatgggagttttaaacttcctgcaacattttgtgctaagttgaattcaaagatctctaaattttggtggaagaattcagagtattgcaaaggtgttagctgggcaaagtgggagcatctgtgttttgcaagggatgaaggtggactagattttagagatctagagttttttaacaaatcgcttatggctaagcaatgttggagactttttaccaatgaatagtccatgattcacaaggtgttaaaagctcgatatttttcaaattgtaattt

SEQ ID NO: 70163 - DNA, 893 bp, Prunus persica
  Intron number 3 from transcript ppa018114m (locus ppa01811 4m.g) derived from phytozome v7.0 (chr-ID scaffold_7; pos 3492966 to 3493858)
gaattaccctgacaatcgtaagagcacctcttgtggttattcatatgccttcctcttgggcttctcctcagcgatattggcaaccccttcaagctcatgtggttattgctcctatgatcctccatcgccgaccttattttcatgttgcatattctccacatgtcctcatttccgctttgtcagcctacgacttttctttagaaatgtctgcagtgtgccttgtctcgtgattaaagtttgtcatgatacgagtaaattgttattatatatttgtcattgtctcttgtaaactattaaaatataaatgtcatgatgactgctataaataagggacattatatattattatcaaaatgcacacgacctcattttcttatagtttcttcccctaatgtttcttcctccgtttctaatattttgtctatcatacttgatcgtactaattatcccttatagttggctcaccttataactatccttgaaagtcgtggtcttatgaagtttgtcgatggcactagtgagtgtcatcctgtgtttttgaaagttactgatgactaaggaaaaacatctgaagttgttaattctgcccatgaagaattgattcaacatgatcaaatggtacttagctggattcgctaaaaaagttcccttgtgaattctgcatatcacaaagttcccttgtcatcgggaagggctaacaatggtgtggtcgtcaaccgcctcttgaattcctgaaaactcagttcacactcatcagtttcacccgaatgtcattccatttctcatcaactgagtaaggtgtgcaatcgtcgtactgatgtgtttccacaaaacaagatagtcacctgcacaaccaagaggactccttacttcagctacactggtaggttgca

SEQ ID NO: 70164 - DNA, 874 bp, Prunus persica
  Intron number 2 from transcript ppa019522m (locus ppa01952 2m.g) derived from phytozome v7.0 (chr-ID scaffold_5; pos 17617803 to 17618676)
cactcctcgggaaccggtatgtatacatgaaactactataatctcaatccataaccccttccccaaaattaactccccaataacacgattgcctaagcaacctagctatatagagagttttatggtgtaatttaatcgaatttcgaaacaatcatacttaatttgcttttcaatatacctagccagctacagtaacacaacattacaaatacatgtgtataaatatatgcctactatcatatatatatatatatatatacaattcttcccctttcaggacgttattattgtgcatacgtcattgtaaacatggaggaaagcatgaaaggtagtagaaaatacatggtgtccgcacggtaataacatttggacttctgcataagagaaaatctacacatgtatatgtaattacactaatcgtatatgggaaaatgttactttgatggttgaggaatattagctacgtgtattccactccattagtgtatgtggaacccacctatattagagatgtggtcatcaatattattttcagtaaatatcgtctaaatagcaacacccgtatttaatgtgttcaaaaacactttattctctttattacaagcaaaatatcgatactttgcattaaatacatagattttatgtgtgaggcacaaacttaatgaaaaagaaaaaaaagtagcattctttacatataactatttattgttataaatagtaagttaatttaggtaataccatgaaaaaacgattggctttaagtgattatggaaactgaatctaataaaaggaactttactaacatggatatatatgattatgatattggatgaatttaggtggtcattgatagcaggaagactgccaggaagga

SEQ ID NO: 70165 - DNA, 735 bp, Prunus persica
  Intron number 5 from transcript ppa025985m (locus ppa02598 5m.g) derived from phytozome v7.0 (chr-ID scaffold_1; pos 42605073 to 42605807)
tgattaagagactgaggattgcacgtaacaaaaaggtcaggcttctggaccatagcttcatctatgttttgcatgatgacataacttttactttgtgatagcaattgtgtcgtatttgcttatctgaagttttttttaaaggtttaactaggatttatagtctgccttgagaaatttgactggtactccacctgccatatctgactagaaagctgctactaacaactacaattgtagtcttagtgaaatttccacttggttgataagccattactcagttagagggtttttttacatgagttaatgagtaatttaaattggaatggtagagtgagaatgctaattatgaggccagttgagactttagtgaggtcacagttggtcccattgtggcaattttgagtttgatcttagggagattggctgacaaataatcagggaaaaaggaagcagattcttaaggagatagcccattcctcaagttcccaattgaaatgtctttagttaaatccttgtaactgaaaattacttgaatgtctattgccccggatcttaatactagcacgccttttttcctcccagaattttgaacattttcagacttcaggatttttcttttctatttagcgggtagtattgaagtttaataaattgatatttttctgacaaattttaacgattttgtctttcatcttaatagacaggaaaatcaaagcactttggcttcattgagtt

SEQ ID NO: 70166 - DNA, 344 bp, Prunus persica
  Intron number 2 from transcript ppa007947m (locus ppa00794 7m.g) derived from phytozome v7.0 (chr-ID scaffold_8; pos 21685746 to 21686089)
acatctttgccgagtatgtttcctttccttcctcattcccctcttcttctgctttaatcagatatttgaattacaatacatccatataattcctcatatcagcaatatcagttcaaaacttcaaatctagaattttcagatttaatgtctcttttctttattaatatggactatggactaagaactatgagcgagtttaattacagacttaaaagtaaggcagctctaattgcatatttgtatagtagctcagctcactttgtaattttgaggacatctcagttctttttgttttactttttaacaacttcaaggtttcttttagtttttttggtggtcgctcc

SEQ ID NO: 70167 - DNA, 698 bp, Prunus persica
  Intron number 1 from transcript ppa004346m (locus ppa00434 6m.g) derived from phytozome v7.0 (chr-ID scaffold_3; pos 2569044 to 2569741)
tgagttttgttttggactagttgaggattacagaggtatatctcttatcatccacatctctctctctctctctctctctctctctctctctctctctctctctctctctctctctctctctctctctaagttttatatagccagtatttatcttttcttcatatttgtgtggccatagtttggattttcttggtattgtcaagcatatggctactgaaccatattgaaggagaaaagtagctagataggtagaggatctggtttagctgcactcctctctctctctctctctctctctctctctctctctctctctctgtgttgtttcttttgagccttcaaaaaacaaaaaattgtctcttgggttggagccaaacaaatttaagtaagaaacaatcaaggtgtgtgtgtgcatagtgggtgttatggggttgaaagactaaaactcgagtgacatccatttttgcctcttattaggtttccttccttctctctcttcagcttttttctttgttttgttttgtctttaattatcagatcctgaagtcctcatcactcagagaatcaagatccacatatacatgggccataatgatgcaagcttaatagcaattcaagaattttcatatccaacaaaaagatgatgaagggtttgatgttccaacaacaacagcaacagcaacactcacaactggtgg

SEQ ID NO: 70168 - DNA, 648 bp, Prunus persica
  Intron number 3 from transcript ppa004346m (locus ppa00434 6m.g) derived from phytozome v7.0 (chr-ID scaffold_3; pos 2570396 to 2571043)
tgactgtggaacccttttctcgaggtaactaattaacctcaaattcatcatcttttcaagcattcacattcatgaaattgcaagaccactctcttagtaatttattcaaacactaacaagacatacatcttcacttcacctatgaactaaggatagtggggggcaattttagcaaaagctaattaatttctgaaaacccaaatttcaaatcgtagaatttgttcaattaagttacttattttggcattgggttgtatttaagtcacattctttatttggtgctcctactttgacacctatctagagaaaagtggggatgaagggcatgcttacaacttactatggatggaaatttttaatgcaccaccctaatttggactgtctgtccttagctctctgaaattttttttattaaaaataaaataaaacagaaagagatgagcaaaagagagagagggaagtcaatacatatctgcaaatgtgtttatgtaatagagcactttatgacatggttgcttttgttttcttgtggtttgtctgtttttgggatttttttggggaaaaattccacaacaatgttattcctgtttcacacaaattttttctgcttcaggagggatagtttcatcacccacagagccttctgtg

SEQ ID NO: 70169 - DNA, 487 bp, Prunus persica
  Intron number 2 from transcript ppa002267m (locus ppa00226 7m.g) derived from phytozome v7.0 (chr-ID scaffold_5; pos 14036266 to 14036752)
agcttgtcaaagctgatatacacggaaaggatcaggtaatgtgaagttctgtttatgcaccttttcttccatgcagtttaaagtttcctctagtctagaattattttgcttttgcatgagactgtaccttttagtcatcctagatgactctaatgacatattgaaccgccaagccaaaaactttgatagaggctcaagtgttataaatggctaggtgcatagtccaaccaatttgggactagagctcaacataattcattgcattaattgcttgcaatttattacttacccgattacctgctatggaggaggttcgagatgtggttttctctatgtcagctgatagttctcctggatcggatggcttttcagcctgctgctaattcatcttttaattgcacttattaatctggtgccgtgcttatgtgttcttgtctaatatcgattcataggaaatatactccattaaacttcctggtgatccgaa

SEQ ID NO: 70170 - DNA, 509 bp, Prunus persica
  Intron number 1 from transcript ppa020998m (locus ppa02099 8m.g) derived from phytozome v7.0 (chr-ID scaffold_7; pos 13591265 to 13591773)
gctatttgcgaaaagtattctccatcaatagtgtaaatagagttggagttgggaacttgatcccatcaatatatatagagggaggctaattttggtttggtggttgtggtcaatttattgttgcctttgaatttgatcacaatcgttctgttttctatgaaaaataaaatctagtagttctctgaaaaattaaaaattaaaactgatttcatttagaactaaagtactttgggtttgttaaggttgtttatattgttacaattaatattcatgaatataattttttttttttagacaagacaattataatcttcctaatctgtctttcttattgtagattcggatatttcaatacataattgttcatgtgaacgatagctgtggtttccattgatataaaaagcttttcattgttttctagtattgatcggtaggtattatttcttctttcttcttggataacaaatagaaaagtatagacaagagttggatagatatacaagaccgaa

SEQ ID NO: 70171 - DNA, 877 bp, Prunus persica
  Intron number 4 from transcript ppa012610m (locus ppa01261 0m.g) derived from phytozome v7.0 (chr-ID scaffold_7; pos 17192232 to 17193108 reverse strand)
tcctcatatttatagcaacggtcatatctgtttaggtaatttatgggttccagttaatcttttgatgtcataagttactgatctttgctctgttttgtgataactgatatgtgatttgtacatagtttaatcatcgatcctttttcttctcaggtacgaggattatttctttctttctttttcttgatttggtattcatcatttgttaaaagtgacagtcttgtcctcataatggacttgaatcatcctttgttgctttttttttttttacacataaatttattatcattacttgaaaaatatgagtcagtgtttcatttcaacctcagtttcttatcaaaacatttcttgctgaaaatatttagttagctgaaacaaattttttgtgagataataataaaactttactcctttattggctgttgtgaaagccttgtggggaaggaagaagcgcgggggaaggggggcgtatttggttgtgaaattgttttcgtgacttatattgcatagtaaagctagccttggaaatcctgctgaatagtgatttttgctgtaggtttggttggtcattgccagcctggatatgtttagtctgttagttcagattaatttttatgtaatggagattttaatcatacataaattaaaggtggtataatatcacagcagctttaagttgtcatttttcattgctgacttcgtggtgtatcaaacattctttatctcccaggaaaattgatccattatgaatccaatgagttaaagttaaagttacattgtatttaaaagaatatgattttttttagttttaccctcgctgcctcacctgatgtgctctattgttgatatggaattttgtagatattttgtacgattc

SEQ ID NO: 70172 - DNA, 769 bp, Prunus persica
  Intron number 2 from transcript ppa004351m (locus ppa00435 5m.g) derived from phytozome v7.0 (chr-ID scaffold_6; pos 22092617 to 22093385 reverse strand)
ggttatctttttcgtttctattcttgcacttacaggtatattgcttctgcttcatattggtttgtgtttgatgacttttgaatgttcaaagctagttggttatgcagttgtgcaagtggtgtgtgataattttataaaggtttatgcttttgttgttcaataaattgttactgataaagtaatgatttctttagaagttcgcgaaattgtgtgataaagctctttgatctgtgaaattgttactgataaataggatttttagcagattttctgcaatcttaatacggagaggactgatatatcacacactaagagtagcaatgtatcaaagtatccagtgaaggtaaaaccttcatttactgtcccaacaaaaattggggtttctttctatgccaaaaggaaaacttctatatgtgtaagaagtttctttataagttcgtgaaatagtgtgataaaggattgttcgtatagggaaagttgtagatcttcacttcaattcctctatggagtggttttgatattcttgttcccagcctttttgtatgtgttagaattatgatttcattaatagctaggatagattgatgttagattgatgtgctgtgttttaaattgcaaagtcattctagataggtcaatgtttttcaatgaactgcgagcattttgtgagtggaatctccaaaacttgaatttgactgcactattcatttctcttccttcgtggtacaagcatgatatgatgtgtctacattactaaacatgtgcagct

SEQ ID NO: 70173 - DNA, 499 bp, Prunus persica
  Intron number 1 from transcript ppa006797m (locus ppa00679 7m.g) derived from phytozome v7.0 (chr-ID scaffold_6; pos 27072648 to 27073146)
gcaaagagtataaagctttttcctttttggcactttggcaagtttgcagcatcattcagtattaggaacccttggcaattcttgtatctttcctgtcctgttccaagtggtggatgatatattgattttgagtctgaaattgtggaaataacttttaaaggaatgtcttagcctttttaatccttcactagagccgtgatggctggcttatatctgccctttccgagatgcagattctgattttcacttccttcattatttgtgattatagattctttgccaacattttgatttacttctatccaggggggctggaaaggatcctgaaaacttaacggtgaaggcaccagacgaggtttctaaggtgaaacagaaaagaagaggtgttctacttccttgtgcttctgcccaaggcaacttcctttcctctttgtgtttatctgtttccatgttctaattcttctgtcataatgcttggtttcttctctgtagatttgag

SEQ ID NO: 70174 - DNA, 718 bp, Prunus persica
  Intron number 1 from transcript ppa011198m (locus ppa01119 8m.g) derived from phytozome v7.0 (chr-ID scaffold_4; pos 2336041 to 2336758)
gtaagagactcgatcatacccttcactagtatgtatttgtatgtaacaaaaagaagttaaatactcattaaaaatgctggatataataaaatttacaaatttaaagtcatgtccacagtgatgatacatgaatgataatatttgtttctagaaagatatcttgaataatgataacatcagtggaaaaaagcaaccccattacaatattaaatatcattatggcctcagtttattagggtttttgataattgaccccaatttattacattaattagcacagttagtgagtgaattaaaaattaattaggagtatatatatatatatatatatatatcactaagtcctcatagcgcgtgagagaacttcccacaccagtagaacccaaagtccccaccaaaacatttcttaccaaaccaaacgaaaagcaacaaattctcatctcaagacatcgaagtctctcttcttcctcccccctcccttacctccccctcttcttattttctctccttccttcaactttttcggcaaccaaacagtgcaagaaatcagaacctatcatcatcaatggaaacctcgccaagacgccaacaagagaacccaaacccttctctgcttccttctccaaacagcaacagctccaacagcagcacaagtagcacccacagcacacatgggacttcagctccaccaacaactcaactccccaacccccaaaac

SEQ ID NO: 70175 - DNA, 542 bp, Prunus persica
  Intron number 2 from transcript ppa011486m (locus ppa01148 6m.g) derived from phytozome v7.0 (chr-ID scaffold_8; pos 17926390 to 17926931)
ttgtgtatattggatataaatcccctgagtcgtgggtaaggtatcattaatccaagaaacaattgttcttttctttactgctatcccttgtttttctttgcctttgagtttttatggtaatttcattacttgtcaggataaacttccacatatgttcacaaagcagcttctttcactgcatcgaaactgtgtttattatagtttgtcagctttatgaatcatacttgattcaactgtgttgcctgaaaagggcatgttgtcttagttatgggatacgatttattgcatcacatgactaccagaccatactttatgatttgtaaatttgtgaagtctgcatgatgtgcttcagattgactttagttctgtattgtagacttgcaagtgttgtggcaattttgtctgcatttctttaacgctggataatagaaagactcggtacacctccatcatctttacatgacagttttttgtttcccatactcaatttcatacttttgttcgcaggcattctcttattatcccaaaatctcatttttgtt

SEQ ID NO: 70176 - DNA, 640 bp, Prunus persica
  Intron number 1 from transcript ppa003716m (locus ppa00371 6m.g) derived from phytozome v7.0 (chr-ID scaffold_8; pos 3062155 to 3062794)
tggtttgcaacaaactacttatttcatgttattgtagaagttttgctctgtttgttcccattattgactactttgcaatttgcatcttcattttttatggtttcagtggtttggtttgtttatttgcttttttgtatttcctttgggggaagtttggatttgtgacatgtcccaatatccaatcaacatagtgagggagaggaggttggttgtgattatttgagtcctgtggttctccttgcttttagattttgatgatgttttttgcgtcgttactaccatgttctggccactttgaacacatttgtagctgaagtaattgaattttaaagtttctcctttaagagtgattcaccaaatccatgtttattttggccatccttctgtatctccatgagattcagtctagccgatgatgcgcatgtgctgctcacagtgcaacacttttttctccctgaatttcttttctaattaccctcttcttcacataaggcttggggtatataaatcattaaaactattgatttctttcctttcttagattttactcctctttgccttattcttcaagcaccagtgcagattaattcgtgatgtccttttcccacaggtagctgcattggctccaaatatcccagca

SEQ ID NO: 70177 - DNA, 736 bp, Prunus persica
  Intron number 2 from transcript ppa007724m (locus ppa00772 4m.g) derived from phytozome v7.0 (chr-ID scaffold_1; pos 42255570 to 42256305)
tgccatcgctgatagtacaacattaacacaggcaagtgcattgctcagtcttgttccacgcatgatgttcttgatgtcatggctatgatcgctacagcttttgtttcaaatgtcattgtgtggaaaacattctcgtaatgcttttgggaatcttgtattgtcggcaattgactgtgtaagatcagattacttcatttgaatcttaatttgttgcacatgaaccatgcaagaggataatttttcaccctttatggttttttatgtatgcaatgatgtgtgaaaatgttcttgtgcatattggaaatatcattttcattgtcattcagagaaaagttggtagaagtatcctcttgtgggattgatcattgatattatatgatttgaggtttcctttctaattttattttttttttcaattgtaacatctagaaagacattcaagttaacaaggagggaaaagaaaataaggaaagaagacagagatggtgttagtattaacacagtagaaaaaaaattgaattgtagggagtctttacataacaatggtttcatgcaagaaacatcaaaatctctgctgttctgtttgtcatgaatttgaagtcctgaattttccatatactgatgtagatgtgataatgtcgatcaatttggttaatgagagatggtttctgttgcttggaaggattcactgatagttccactactctttctctctctctgactatgcaggcaggtt

SEQ ID NO: 70178 - DNA, 793 bp, Prunus persica
  Intron number 1 from transcript ppa001924m (locus ppa00192 4m.g) derived from phytozome v7.0 (chr-ID scaffold_6; pos 2468516 to 2469308)
tgctagactctcctgttttcctttcaaattcattggtgagattgcaactttgaaaatatctgcagtgcttaaatataatttcttttccttatatttttgcttctttgttaatttttacttttattgtgttgttagtatatagtaaaaaattgatttcatggaaggtgctagctagtttaggtaaagtcctgggatcagatcttgcctttactggggctgagggtttgtatgttggtatagggtcatttacctctaatggaataaaacggaaaattgatctcatcaagttcaaggcgtgcatatggggctggtgaaatattttttgttcttgcaatggtaggaacatggacaaaatgctgtaaaaccaagataatcggtttttgcatattttggcagagttttgaactttaaaatagtttatgattaacctgaatgcaaaattgcagatatctgtatcttgtgtacagggatgagctgttaactggttctatacatgcgtttcaccttggtatgatttgagtaccttcaggaaattgaaattcatattcttgtaatacatcatatcaagttatttgacttgggattgctttcctttgaaatagggcaagtagatgtaaattattatagagaaagtttgtttagtgtccgtgctttaagttaaaatttgcttccacttgtgatgaaatttaaaagtaagtttagtctcgctgacatttgtcctgccatatgttaaaacttttcttctggatgtcttgcaggcacagccatctccaacaactggaaaatttccatt

SEQ ID NO: 70179 - DNA, 665 bp, Prunus persica
  Intron number 1 from transcript ppa024073m (locus ppa02407 3m.g) derived from phytozome v7.0 (chr-ID scaffold_3; pos 6904488 to 6905152)
ttggaatatcctcatatccccttttggtgttacaggtatttaataatgatcatccaaggtcttttatattttgtaaaatttgtatatgtatatacttatattctcgttgcacgcgcgttactcattgcatcattttgatctagttttggaaccgaataagatgtttcattgaattttgtcattttaaattatcaagtcctaggtcactctcgttcgcctctgcggtctcgtcatgctccaagtaccatcgaaacaccacttttaactcttctactctccatcagaaaacttttgttctattttgaagcatatatgttgtctgcaaaatccaaacccactcacatgtcatcagaaacccaaattctgcaattttgagcaattgcaacttcaaatccaatccagtctttccgaatcatcccaacccatctctatattaacgtatttctcttaattttaagtcaagttcagtaataacaaacattttctatttgcatctctgtaccaaaagctgtggttcttttctggtcacacaacctgtggtgcttgagagagagagagagagagagagagagagagagagagagagattaccagtaaccatatatttatatatggttgtgttttaatttctacgtatatatgcaaacgcaggttacgtacttcaa

SEQ ID NO: 70180 - DNA, 681 bp, Prunus persica
  Intron number 1 from transcript ppa000688m (locus ppa00068 8m.g) derived from phytozome v7.0 (chr-ID scaffold_6; pos 22618501 to 22619181)
caggtgagttttatttgatcttcctcatttgttaaattaaatcaaataaagttttgctggtctgtggatttttgtggccttctcagtttatgcttcaatttctgacttgaaatctcaatcatttggtgagtttcattgtgatgttagttagtcctcacccaaatatggctatccctacttaatgttgccaacattatgggtgaactgtatgggctgggatttggatgagaatcatagtgaagtttactttgttcggcattgaatttgagatattgaacaagcattagattatacttatgccagctgcttatctataggttgcctaaaatattttcaacttgctgctttcccaacttctttgtacttgcacttatgactgtagaaaattattctactcctcgtttaattgttgacaaaattttcaacagctggaccgtagaaatgtttgtttacacagtcttcatgtcattgaagttgtgtagcttcttcgaattgtgttttattttttgacatggatttgtagtgtaacattattatgccagatggatttgtcgtttgcttaattttaattcaaaaaatttatctaaagttctaaacttctgtgtgtaagatcattcttgtgtacatctgatgagttatcccattggtttattgttgatattgatttcaggcctctaagtg

SEQ ID NO: 70181 - DNA, 448 bp, Prunus persica
  Intron number 1 from transcript ppa005135m (locus ppa00513 5m.g) derived from phytozome v7.0 (chr-ID scaffold_6; pos 27357640 to 27358087 reverse strand)
cacggaaagcagacacgtttgagaaaattgataaggtgcgttttctttttcctttttctttttctggaaaaagtgggtgttgttattgttgcttgctttgtaaaaatgatgtggtggagatagtttatgagaattttacataattatggtcgtttgctatgacttgaagggaaaatgtgatcagccaagtcattttagatgcattcttcaaaatcttcctatttggagtgactatcacaaatgatgtggccgtaaacaaaattgcaattaattgcacaatgcctatcacataattttaggtcgtatcattttttatggatatttcatcttgtataggggccagttcatcatgtagctatgctttagtttatgtactcttcttgtgtatggttttgattcctttcattttgttttctctaatgttagatcgggtcaggaacatatagta

SEQ ID NO: 70182 - DNA, 389 bp, Prunus persica
  Intron number 3 from transcript ppa001730m (locus ppa00173 0m.g) derived from phytozome v7.0 (chr-ID scaffold_7; pos 9874034 to 9874422 reverse strand)
aagtcgaggtttgcctcgagagtggtgagtaggttatggcaataaaacaagtatctggtgtaggctatttacaccttccctgcctgtcattccattatataaggccatgtcttcctgttaatcagtcccatcccgccagccaataatgaaggagatgaacaatctgaaaatgtggggtggagctgtcattaatgcgaatacagtcaggctggagaaaccacccacaatgaatatcattcaaatgaatcaaataattggagtttaaaggatttgggaaaagaaaaaaaatacaaaattcgagttcgaaggaaccgaaaacaacgtgtttcttgtggtgtgtgattggttttgcaggagattctgctgttcagaccaatcagggccagtgc

SEQ ID NO: 70183 - DNA, 710 bp, Prunus persica
  Intron number 1 from transcript ppa001730m (locus ppa00173 0m.g) derived from phytozome v7.0 (chr-ID scaffold_7; pos 9875017 to 9875726 reverse strand)
tccttgggcagccagagacttttttaccttttccggtgagtgcttggggttttctggaattgtttgagctttgattgtgaagtcggtggtgtgagctgttttttagctctttgtttacttcttcatgaagctccagctgccttgaatggcttctaatgataaattagccgtgaattgagcttaggctctgtgaatttcatacttgaactttgattaaaatcctgacgctcctgttttattctgttagtcagtttcatatgattgttctgaatttttgggggttttcagaccaaaaagtttcaagctttcagcgaaagttagaggctgggaaaggacacaggcccacaccttgtggaccaaacttgatgctgattcaaaaccctcaagttatttccctttttgccttttgggtttttgttttctttctgtagcagttttcctcaagcagcctcaatttttcgaaattaccaaataaaccctgtgcgccaacatgcatttcacctgggttcttaaatttttccattgatggtatatttttcctgccaaaaattatggctttttatttatttatttataaaacccatggataaatatgaaattgatgtagttgataattgtaaacatgctccagaattctctatctgatccaaggtgaattttgatgaatttgtgttttatgttgtgagacagtagtttcgcagtcatcaacc

SEQ ID NO: 70184 - DNA, 609 bp, Prunus persica
  Intron number 1 from transcript ppa006660m (locus ppa00665 0m.g) derived from phytozome v7.0 (chr-ID scaffold_7; pos 20504084 to 20504692 reverse strand)
gagctccttcacagctaaagctgcttctttggaaggtgaactttctccaccttctttgagcaaacccagcagctcataactgcttcttgaccaaccccattttcccatattgcacaattcactttattgcggtggataagtttgagttgttttgttttgtcaagggtgccctgtttcagattaagagctgtttagagttatatgtagtgaaagccagaaaatttgagaaaaaaacattacaaaaagaatttatctttataatgaattgtttccaaagtttagacattggcattcaatattaaaagtgctaagaatttgatataaaatcaggtaagaggaagtggactaaatgatccaaatattgtgactttgatttaatagatgttcttgtatcgttcgaaaataaatgtggaaaaatgcaatgaaggttgtgattctatgggtatggacatatgtatatttctatgttatgagtaacaattctgtgacaaaaatgtgaataaatttatttgaaatctgatgatattgatttcttgttattttacattttcctatttgtttcgttcagatgtagctggtgctcctgcaatatcgaagggggcagctgag

SEQ ID NO: 70185 - DNA, 481 bp, Prunus persica
  Intron number 1 from transcript ppa004116m (locus ppa00411 6m.g) derived from phytozome v7.0 (chr-ID scaffold_1; pos 10745427 to 10745907)
caaacaggtaagaggtttcttctctgtttttggtgttaattttaagtttggtttctcagaatttaaaggaaatgaaaaagtagttgtaggtagtattaggactgttcgaaattttatgatacagctgaccataaattcatgaaattttaaaagggttttcagtaaacatgataattttgatgtttcgttgtttcgtagttcttggtttgaaaggccagagttactgttagaacttagaacctgtttttaaagggccaataccgattgggtatgccttcaaacacctaattaatataaaaccaatcctctgttgcatgttttgcaaaagatgtacagctgaagtgcttgaatcactcaaggaaaattttagtatttagttgtgtaaagcttgatctttgtgttatgcattgagttttttcttgtcatgattgattagttcaacttagttgacttatttttcttgctattatacgtttgcaga

SEQ ID NO: 70186 - DNA, 1018 bp, Prunus persica
  Intron number 3 from transcript ppa010075m (locus ppa01007 5m.g) derived from phytozome v7.0 (chr-ID scaffold_7; pos 17744058 to 17745075 reverse strand)
gatttgctggtattgtttatattattaaccctgtcttcacagttttcgttttgctatatgctgatttagcatcacttgtgtatgtaagaaatgttatgtatgccgatgtaaatctattactgggatttctctttgtaaatctgatattttctgaaaatttggctgtcagagaggatggttgttttgtgatttatttgtgtttacttggatttaccaatttcttgttgtgccactgttcaatttgtatatctgattgaggcaaaacaatcaataagtggagacgatataggatagtaggttggagctttttcttttagtacgtggtttctcaatagttctttatagtatggtgtgattgttttttagatgagctgagatttagagtgtttgtggtattttttgccttttatgttggtattgattctttttgcacacataattggtttgctttggatactggttagttatgccaggttgccttgaaatgtctgaagacccaattcaaggtatttgacgagcgttgtaagaagtctaatagagatgttaggtcctttgatctatgactatgctgtaaagaacaaattgcctttgtcttttgttgctttttaagtaatagattttatttttttttccttcgtttgatgtatgttttggaaccaaatttttgcagttttttccgtgtcaacataaaactggatgttggggttgatttttgattccctcccacaaacgtggatttgaatctttccaatttcactgggaacttaacattttaacactcttattagaatctgccatatcatatatcaaaccaattactgatgagatatagccaactaatcatgtgtgtaagaattaaagatattactgttttgggggtataaaagtgctgttatcactattaatttagatgtacatgtgtatgtattttacttcatgttgttatcacatgcctctctgctggtattgattcctctatttttgtaattgaaggttaaagtattgtgtcacttgcacc

SEQ ID NO: 70187 - DNA, 868 bp, Prunus persica
  Intron number 1 from transcript ppa008645m (locus ppa00856 3m.g) derived from phytozome v7.0 (chr-ID scaffold_1; pos 9683268 to 9684135 reverse strand)
catcgctcagaagcccaaaatacctctctctaaaggtatctacaggcattttccttcctggtcttatctaaaaaggctctgcttgcttttttttttttttaaaaaaaaatcttgaaattagtctgctggttgctgagttgttggttttcgttttctatgcttctgcatgatgtttttattttattttatctgggagctctttggatttagattttcacaagattttctctagtgaggttttttttttttttctcttttaaaaataaaacttgggctctttgtttttgttttatttattttttttctcttcttccgttgaacttgaagctggcagttgcactagtaataattaggaaaggtaagttattgattttgaccgaagtcagattttgcaattaattacttacatacaagtaaggtgtttgataaagaattaaagagcatcaattactaaattgtaggaagaattacaacaacaaaattctagctagttagttgtctttattaaacataaaataaaacctgtgctggtttcttcttccgtatgcggttgagagagtaggctagttaggtagtctaacgtcaaaacgcccgtttgatgtagtgatactcgcctaatctttacgacttagcctgatttttgatacttgtatctttcataattatcaataaaatcccatcgcctttgtgtaaatatatatatatatatatgtgccaagaataagatcataaaagttatattatattccatatatgatatgatatatcatgttctatacaagaataattttgtgatcatggaaaccgtgattgctgtgatgcaataggagcagggacaagcgagaagcccaagaagacgagcccaggt

SEQ ID NO: 70188 - DNA, 962 bp, Prunus persica
  Intron number 1 from transcript ppa023856m (locus ppa02385 6m.g) derived from phytozome v7.0 (chr-ID scaffold_6; pos 28469883 to 28470844)
acagcacgtacataggtgaaaagagagatgaaattgatttgttggcctatgaatgtcattcacaacaacgtacatgaaaagaaaagatgaaaagattgcttgggatcaaatggttcctggcattaaagcctatgcttgtttcttgcacaacgagcttttttaggaatgtaaatttataaatgatgcgtctactctaatatgaaaggaccaaactgttgacataaaggattgaatctttcttgatttgatttattgatctgatttgattattatgatgatattctattagtaatattcaaggttgaatcaagtaattaatctccaatatcattttcttgtcctgattatctctagatttgactgtccaaatcttttgattcataatttactgggattgtcctcgtcagccagctgtaaattttatttctaatgaaaatattcatgtacattatgcctcgaccacgacggatggatacactcattgtacatttgatttcaaaaagctagctagcttacctaggctagggttgccccatcgctttgtaatgttttggaatttcttgatgaaccaaaccacaattatttcggatctgttaaatcaatttccagagtataattaataatcgagtgggataagggtccacacgtaggtttaattagtattgaacacacaaaacttaaaactattggagcaagaaataatgtcgaagatataccataattagtattatgagaattgtgcacaatccgacatgaaaggaaaattcctgaatccgacactatacgtacataccttttgaaataaagtcatatatatatatatcagtctatatattaagggctacattgactaattactttcgaagatgaagaagatgaaaaaacagaaaatgacgatggtgatggtgatgatggtttgcttgacagcggcaaacgtagcacgtgggcaaccgaagcccggg

SEQ ID NO: 70189 - DNA, 1012 bp, Prunus persica
  Intron number 1 from transcript ppa000783m (locus ppa00078 3m.g) derived from phytozome v7.0 (chr-ID scaffold_6; pos 12036122 to 12037133 reverse strand)
cgggactccatcttcagctggaagtgcaggcataagtatgttattttctttgattactttggtatctccgtggtttgagcttctaggtttagctgcgtggaaaccctagtagtaatggtttggtggtggtataagtaatttatcaacctagctttgttaatttctgattgaggaccttgttatgttcagtttctttaatctggggctgcatttatgtgcctgctggcatattgttaatggtacaagcaagctaatttgctgtctttcaattcaggaaagaaaaaagtacttttcattaaagtgaaatatgggtccttggcaggttttgaagctatggtgattcaggctgttttttattatcttgcaaaataataatgaaacgtttggtggtttaaagcctctatttaatcttggctcagttttattctttcctgataaattcattttgtgtgatgcaaatttgctattgtcatttccttgaagtgatttgagtagttgggtagttttgttgtagcccaactaatatgcatgtagttttcttctttttgttattgtttcagaaacctcactcttacaattctttttaacttaaagtgatcaagtagcatgtatgtaatgtcgttggagcttcaaatcagtcagtgcattttgttttcaactatggtgttgaaattcttgattcatttttcattgaattctactatgtttgtagttaatattcgaatcgaattatttgattcctcgacccaattgtttattttgcgaggatcccaagttttggttctttctgttatactctgcttgaagtgaccaggattttaggcccaatccatatcttcactaatgcctgtgcttgtaatgaagctgaaaagactaatgaacattgattcatttattttaattatcttaaaggaagaaactttcttgtggagtcttgtggtgatagtatttcatgtcttgctcatgaccattgtggtttacttaatttcaggactagctggtgccacggccg

SEQ ID NO: 70190 - DNA, 850 bp, Prunus persica
  Intron number 1 from transcript ppa022667m (locus ppa02266 7m.g) derived from phytozome v7.0 (chr-ID scaffold_12; pos 545951 to 546800 reverse strand)
cgtgcattagagtcagtaactacagcacgtcccaagtcattcgactaattgacatgatatgcgagatacgggtctcggcagactcaatgggcgcacactattaaccagtagagtcaatgtagatatgtgctatgagagagtaacattttaatgtaatttttgtctaggtaaaaaggtaaaaagaaaaagtaatttcaaaatttggtttcgctgctaattcaatttaacgatgattccaaccataatacattgtcaagcataaaaatttgactgtgaaagttcaaaataaaagtcaataaaagtcagtgttctgcacttaatttctacttacacatttatacatgtttgtatttttgtttttatctacgcttattgcttcgtgtattaatatagtgatcaatattataagtcatttactgaatttcttctaacaacagggatatgcctgtttttccattttagttagattagccctgtccagtcctagcaccaggactaagttgagccctgacatgactcttggtggaagggtggagaccactgttgtctacctctttgcaacactttgaacaacttgtattttctgttgtcatgtagtagtaccaccaattaatgctgtgaccaaatctacatctatccattaaaaggaaaaaaaaaaaaaaaaacgatgaaaaaaaaccatagactatattgctgagagagaaaatttacatattggctttgttttgatcccttcaatctctttcactgcacttaaaaactgttactacatttttctctacaatggctgagctatctctggattgctatgatggtgcatcgccggtgatggttcctcagcatacagctc

SEQ ID NO: 70191 - DNA, 723 bp, Prunus persica
  Intron number 1 from transcript ppa015522m (locus ppa01552 2m.g) derived from phytozome v7.0 (chr-ID scaffold_1; pos 26047694 to 26048416 reverse strand)
gtggagctgttgcttattgctctgtttctcatcaggtgcttctaatttgcatgacttttttttataacgattggctgtgctttgaaagcaaatcagaaattcataagcatgctgcaaaacatggacagcttagttttaaaaatacaagtgtggaagccttattcttgattttttcatggcttctgatatttagctatgtttttagctttcatttaagagagcaacaattgggttagtcttaacttgtgcagaaatggcgtgtgaggaagggagaaattgattttaaaaggtctgtcggcttgggtctaggttcttggtttgcagcttagaatagtatcttcagtggtagctcatgcccacaacaaaataatattgcagttgagctaataagaccaaagtaactcaaaaaagaaataaattactgataatgggttagctgattatttgggtgttagcattatagtccatgtgaataggttcaccacatctaggcatgtgcctgtatgtttacattggttgctaagtcttctcactgtgctcattccctcactgctcaatttcattatggctgaatgttgtttactcggtgggtgacaatttttttctaacttccattgacaataaaattttatggttgtcatgattttccttgaatttaagttattttccaacttgataaatatcgtagattgtgcattggcctgctcataaagaagagtgcgg

SEQ ID NO: 70192 - DNA, 793 bp, Prunus persica
  Intron number 2 from transcript ppa021051m (locus ppa02105 1m.g) derived from phytozome v7.0 (chr-ID scaffold_6; pos 5369478 to 5370270)
cctctacagattcctcttcagatctagacacagaggtcagtataaattacagatattttaggtataagttttctcatatatactagtcttgtctttgatagttcatttgggattttgtagtgaaacaggtcatacacataggcacaggattaattagtttgtgtgcatctgtatattatatgtatatttggtctgaaaatgattggtatatactatttgcagtaccttctgttttgtttctttcagcttgttttcttcatggacaaaatatgcttgaatgaaagctgttttttttaatcatttcttttggcagattttgaaaaagaaaagaattgataattgattttgaaattgaaatagaactgaaaatgccatttaatttgtctgtttgttgtaatagtaacctctcctaatgacttgaaatttaggctgttcctacactttcagtaaggactgtaagttaaaattgacccctgaacagtaactattagcatcagtcagaattggctctgaatgaatggtcttattgatgacatagtggcaagactattgcaatttgtatggtagttttatgaaataaaaatagtacatatgtacagttgttcactatatactataaaaaatgccctcaaatggtctgctcagctgcaaacttaacaattctaagtgtttgatgtcagtttaatcttgagaattcgtgttaatttctagaacaaattggtgaaagagagtgtgctgatatgtttacatgttaatttctttgctgggttgcagtccacagggtcttttttcc

SEQ ID NO: 70193 - DNA, 772 bp, Prunus persica
  Intron number 1 from transcript ppa010183m (locus ppa01018 3m.g) derived from phytozome v7.0 (chr-ID scaffold_4; pos 5190862 to 5191633 reverse strand)
gttatcagccacaaccctgataacgatacctccaggtatctctctattcaatcattttgttttcttttgataaatttctttggtattgcggaagtgtaattatatctactttgatgaaatatagcttgtttttcaataatgaagcatgaaagatgacattttttttggaaatcccacttgggtatattcagactcagtccgagattaagggacagtagctgctgttttgtttcttggattttattgatttgggtggcattttgaattttgcttgtggtggctagtcatagtggtgtggatatgaatcaatgtagtagtaagatcggattttgaattttagatggattgggtctcaacgtttcattttagatgaatcaatgaatcaatgtgctttttctgatagagattatgattgatttatcttattgttcagaagattgttgaaataaggaaaattagagggggagaaagtgcttgtcaataagaaataagaagattgtccaatgtgatcattcgtgttttgacatctgttactgaatgtactttttagcttgtcattaacttctctgttttctttcacaacgtcttttacttgaaatggtataacattgatgattgtaaggttttatgttgattgtgtttgtccaaagatggtatttgtaatttgcttgctacgttgttttatatttatttggtgagggactaactgattatggctgtttacatgttcttaacaggatcaagcttccttctggtgcgaagaagattgtgc

SEQ ID NO: 70194 - DNA, 708 bp, Prunus persica
  Intron number 1 from transcript ppa006120m (locus ppa00612 0m.g) derived from phytozome v7.0 (chr-ID scaffold_1; pos 10654374 to 10655081)
gtgagtacaaagagaactctatactatatgatgactctagtttaaatataaaagaaaattcagataaagaaataatatcaagagcagcattgtgttgataacgtgttataaaactaaggagaattgtagagatcaataaaaggaagagaaatacagagaatttcttctatgaacttgttgtcttcatctttaataatacctatttatagggttacaaccgtagaaaattaacacactaaattataggcttacaatcatccacattccatggatttataacaaaaatatacttttgaaaagtaattccactaatttgcaccaacttcaagtagtcgcccaataattttggaagcccttgaaaaatacaactaagaaaatgtatttgcctttaaacccttttaaattttatttcttttttatcaccatatatagagagtaaactttgaaatttcgtaatttcaagttatagttgggtgtgatgatcaaaattcatgggtgtatatagcaagtagcaaaaacttagaagtgaagttccacaacagtaacggtcttgaaaaaaaaaaaaaaaaaaaggtccacagtaacaactatggaccgccgttacacaaatacatgctcctctctcttccggtcttccctctaaaccctgatcgtttcagtacctgggctttagctctttctctctctccaaaactcgccgagttcact

SEQ ID NO: 70195 - DNA, 533 bp, Prunus persica
  Intron number 2 from transcript ppa006274m (locus ppa00627 4m.g) derived from phytozome v7.0 (chr-ID scaffold_3; pos 13230581 to 13231113)
aaggtgtctacttggtcgatataattccgtcaaaggtgagttctttttcactcctacgtaatttgtaaactccgcaactcaatctccatacaaaaagaaaaaaagaagaagacgttattttcctcttgtttagttgcggaggcaagtaagcacaataagtagataacccagaatttcattgaagtgttaagtcagtgaaccagctcgttgttcggtttagccaaagctttagttttttttcgtaagtaattggaaaaatgaagctcaattttttattttctctgaaatcaaaagggccatatcatgttgttcatttgttcaagcttgtgaaactgtacttttgcttgtgtgatttgtgtgtacttatgtatggacttacgtgtttgtgtgtataactgcaaattatgctcctttagttttgtcttgttgtctccagttttagaaaaatggcatgtacttgtgtgaacatatgattatggtctttatttgggcgtgcaggcttgcagttgtacagccgtgggtctctacagtat

SEQ ID NO: 70196 - DNA, 572 bp, Prunus persica
  Intron number 2 from transcript ppa017639m (locus ppa01763 9m.g) derived from phytozome v7.0 (chr-ID scaffold_6; pos 16062561 to 16063132)
aaaacaaagttgtttgcattcctgttgtggtcgctgtaagttcaacaactcatctctttttctgctttagatgcccaattttctttactcaaatttgttagttttttactttactgtatacaaaataaaataaaaaacttattaatgtgaaagttttacttcgtactacttcaactgtaatgaaattggtttactaattcttcaaacatatattgaattgaacttcttagaatgcaatgtttgctcatttgggtatatgtctttctttgttttacattgttgtttcttatagttctacttcccatgttcgtagcaaatgattttatttggtaatggaaacagtaattcatctgcaatcatcttgtaatttttgtttcttagactgagtttgcatcctgcatttttcttttttcctttgtaacatgtttcttgtattttttagtaaatgatttatattttggtaattgcaaacctgactgcgcattattatgcatattattcatctcttgtcttgctaagcttcttttgcttttataggttgtatcacctttccccccttcggataagattgg

SEQ ID NO: 70197 - DNA, 425 bp, Prunus persica
  Intron number 1 from transcript ppa008120m (locus ppa00812 0m.g) derived from phytozome v7.0 (chr-ID scaffold_2; pos 23205049 to 23205473 reverse strand)
tggccgagactttgggcatcgatttggaggtattttggtgtaatttcagttgttttggttttgtgctgttttgaattctctgaattttgtatgaattctaactttggagaagaacatcaggctttttatgccggtctgatgtgtagcattagcaccacaaaacttagaaatttatgcatacctttttaatactacccatatttgaatgcaattttcgatattatgttaatgttaattgcgttttgtgtaatggtagatgcttcggtttgtttaaatagcgttaattgggtctgcatgttttctatttagaggcatgctcaaacaaattattgattgactggtggttaacctgttttgtttgttatgtattgttttcataggatattaccctatcactaattgactttacttgttacaggagctgt

SEQ ID NO: 70198 - DNA, 657 bp, Prunus persica
  Intron number 3 from transcript ppa000310m (locus ppa00031 0m.g) derived from phytozome v7.0 (chr-ID scaffold_7; pos 19360435 to 19361091 reverse strand)
tgagggtctgtgtcttggaaaattttctactacatttgcctttttcactcatattttctatattgtgctcctttcttgagtactggctatgaatatcttgtttaaaattaacttacaggaactactttagttgtaattgtggttaaactacgttttgtctaaagctgctttagaaaatcactctatgctgttatggttattctattttagtacctgttttatgggcgtatacaaatacctcactttgatctaattggatccttcttccacttagatatcccttttcaaatgtcttgaatgcgaacattttgttcacctgagtgagtgtgggatatggtactcatgtagtttaatgtttatgcgtattattaggtttacaatgcaccctttttttgttttgtttttgtttttagttatgatgcatacgtgactgcatataattatgaaagtatgtatacttgcttcatactgttctattgttctcgagctgtggattggttaaatttgtcttttgtgctttaagccatgtgcattccgcctgctaatccatgaagggtagattgataatgtctctagttatcttcaggttggcaccattgatattttctgcattattactcctttaagggaagactgacttaactatgataattgtag

SEQ ID NO: 70199 - DNA, 1034 bp, Prunus persica
  Intron number 1 from transcript ppa004665m (locus ppa00466 5m.g) derived from phytozome v7.0 (chr-ID scaffold_8; pos 7108929 to 7109962)
caccgatttcggcttgtccgtcttctacaagccaggtctgggttttcttatttttcgatatgttgtttgatttaatttaacgagatccatttttattgtttctttttttgtttttgtttgaaatggaaatgttggtctggttgatattaatttcaagagtaattcttttgacctttttaaatatatttctgattatttattgaactaatattgcttgatttcttttctgtttgaagaatttcttgagccttttgtttcaatcaaagaacttcctgaaccatccttcttatagatttgtgcttgccacactgcctagggaaaaaaaatgtcactttgatggcagatacaaggacagttttcctttcaatgaattataaagttgtgtctcttcttagtcttggatacgggaagattttaaatgcatatgaaactccatctacgaggaccggggatctattttctttatgtttttctctgtcccctgtttgcaagtgcgaagaattttttttgtagtgtctttattggacattttttttcctttcgaacgcggtgctatattgtgttgtgttaatacactcaacatgtccttctgtacgttagtcttttttggttggcacacagaacactagaattctgagcttccataaacaggtcatgaggtgtttttttttttaatatttaaactaaaagccttaggatcttcctttaagtttgggattaatggctcatctatcatggtattggtatcctaaaaggaatctatatcttattcagtatgccaatgcattcaattattcctttgagctatcatcaatctatcgataaaattatctgagtctcaggatctaaaacattctggtttgtagaaacaaaaattccgactatattgcctttggcagaatacagcttattttattttaactgtttctaactggtttgctatcaatgccacgctcgaatggtgtttcatcctacataacaatggttgtttatgtgcgctgctctatctttttctgctccaggacaagtttttt

SEQ ID NO: 70200 - DNA, 665 bp, Prunus persica
  Intron number 1 from transcript ppa007104m (locus ppa00710 4m.g) derived from phytozome v7.0 (chr-ID scaffold_5; pos 16806345 to 16807009 reverse strand)
gcctgtaagtaacccttctcttcgatttatctcacgtcacgtgccttactgggtttcaacatttttcatgtttatggggaagaattctgttgtgcaggctgacgggtctttgagaatcttgtgttttcaaataccttttctttttgttattgctaaggttcatgtggagccctgccaattcgattgatatgtcctcttgttattgccaagttgatgcatttgtaaaattatgagttacaagttatttggaccagtcaggtttttagtacagattttgcctgctttgacatcatactagataactgatgcctgaaagctattagagcatattgagatatgtttctgcattttctatgtaattctcaattctgcatcattctgcaatttaaagtatcatacgtgcatctagtgatctatgctgtatatcaggcgtcttaatgctagtttctcttatattggtgtcactctcattatttatgtagtagatcgattagttttatttcaatcttttctagtcatctcttatcatcaatcttaacattctcatttccttgatgcattgatcttacttttgttttaatcccaacattcaatcttagttgagtttattatgacaataaatcttcattttgagttataggaacgcccagataactggagagaca

SEQ ID NO: 70201 - DNA, 723 bp, Prunus persica
  Intron number 3 from transcript ppa006603m (locus ppa00660 3m.g) derived from phytozome v7.0 (chr-ID scaffold_3; pos 5874375 to 5875097 reverse strand)
agtggccttccaagtattccaagttatttgttgaagtacgtaagaattaatattctaagacaccaacggtgatgtttttttgttttttgttttatatatgcttatttggtaatgattttatcaaaatgaaattgctgaggctgtgagggtttctctgagtctgtgagtctagttgtttgtggttttagcaggaaatgtattcgaatgagagacaacttaattttagcgattgtaattatagctactaaacaaggtccttggtttctgagacatttcagagtactcttaagttccgctctttgaaggtgtatattcttttaggattttctgaatttttaaattatctcacctttctttatttgagattttatgtgcttgagagcagctggtaaaggaaatagttgatgtgaatcttcttatgtgattctgcttcatgatcaagtttcacttcaattgcaattagttcctttctacaatagtttgagccattaaagctcatggatgtatatttctttttcaatgtcttttctcaagtttgtatgttatcccactagcaatgaaaggggagtagtaattgtctgactcatttatttgtactgattgtaaacaattttatgaagtactttcatggatttgatttatctgtttttttgaataaaatatgggtcatgatgtgagttaacttatcccattatgactgtcacatactcgttgggcagctgg

SEQ ID NO: 70202 - DNA, 484 bp, Prunus persica
  Intron number 1 from transcript ppa020670m (locus ppa02067 0m.g) derived from phytozome v7.0 (chr-ID scaffold_8; pos 13313441 to 13313924 reverse strand)
gctgcaaatttgtctgggtcgcattacttggaggggtatgttttatttatttatttattattatttatatttttttccttttctgatgcggtatatttctgtctttaatatacatttaggatccgttattatttttttcttttctgaggctctgctttaatttcaatttatttctcccagggttgcagaatctgttattttaactgttaaaatgtgatggacatttggtagaaatctctagagtaatagacattttcaatatatttctgttaaaatgtttacattaaccaatgacattttatggtattttgaatgtttcattattctctattttttgctttatatatatagattcatgacataattgacattagtatcgagcacttctttataacatatatagaaaaatcccatttgatttaattgttgtttgtgcttgaaattggcagccgtgaaactgaatttattcagaacattgtcaacg

SEQ ID NO: 70203 - DNA, 637 bp, Prunus persica
  Intron number 1 from transcript ppa009450m (locus ppa00945 0m.g) derived from phytozome v7.0 (chr-ID scaffold_2; pos 24081746 to 24082382 reverse strand)
gtttccagcttccttgatcagctatctcaaaagaggtaacccttttttcatgaaatcgttattagtttaaaattagggtttcgtttgtctttgaatattggaaactaacttttcgtcaagtattacggtattagtactgttcgtttctttttgtctagttccatgtttgatcaggctgcgattgatattgatttgggctatttgtatttgaatccaaaaggaagtagggtttgagaattggactgttgttgaaagaggattaaatctatttaccaaaagaaagaggacctaaatctttatccggtgacaatgaaatataattgattgaagctgattgacttagttgagcttaaaatttttactttttagtaacaagaagagaaagaccttgattgtttttttttttttgggaggcggtttgatcttctttcatttccttagcatccaaagctggttcctttccttagtttttttgtaaccaaagtgagaaaacatgctgagcttattgtaatttttttccccctaaattagcagaacctccacaaaatagtagttttcagccttctttgacatttttttgtactgcttttcctttaaaacaggctaatttaattctggttagttcaactgcttcaat

SEQ ID NO: 70204 - DNA, 824 bp, Prunus persica
  Intron number 1 from transcript ppa013187m (locus ppa01318 7m.g) derived from phytozome v7.0 (chr-ID scaffold_7; pos 19335243 to 19336066 reverse strand)
ttaggattttgcttctcaggtcctgcaatttatacgtaagttcctcttccagtttttcctgtctgtaattctctatttcatgattgatttgattgaatatctgtttttatcttctgggttttgttgggatgttgataaagcttggtgcttttgcaaaactttttgttaatcctttcaatttatatgatatgattgtgttctgtagtatccgtagtttagatttcttattttgacgatttatgagctgaaatgggatgtgccgcaatttggtacatacatgctgcaaataagctgtggtttgatttgaaatttgtgggaggttttgcaacacatatatggatttgtacatacagacctttaagaatgaaatttttttgaagacgcaagaactaaggtgttgttgacccaagtacttgttcattatagtaccatggaaattttgtgttgtattgccacctcagctggatgattagcaaatggtactgggtccagcccctgtgttcggttccattttgaagctaatgattgcttagtatgctttaattagttgtgattaatggatttggatgctctgagaaaggtggtttctgaaagattttgaaccataataagggagggcttgtttagccacaggcaattgcaaactgtagtgcaagcttgtaacttttgcgtttgttgttttctgtttgatctgcaagcaagtaaagatgaatggtttctcacagatcatgaaccaaaaatttgtgggataaattggatctgaagtgagattgtaattttgtgaaacaggtttattgaggtgtggcaagtcaggacttttgaca

SEQ ID NO: 70205 - DNA, 821 bp, Prunus persica
  Intron number 2 from transcript ppa015252m (locus ppa01525 2m.g) derived from phytozome v7.0 (chr-ID scaffold_6; pos 5678587 to 5679407)
aaaagcgacgttacaattctgctaccgtggacaaggtacctgttttgttttaaaatattggcggtttttctcttaagttatacgttgtagaaagggtatctagcttgtacctgctgaaaatacttgcagtccgcaacacagggtgaaattgcacagatgcacgtttctgggtgtgcatgcatatgcactttgcatacacatctacagatgatgtcaatatgtattacctcaacatcctttaaatttataatttagtttacttaaattaactatagaaaatggttattattgaatattaattgaaagcgtcaaaagaagagagattggagggaacacgaggaaagaagttggcaaaaggatttgagagaaggagaaggaaaattacggcatgagtgctggttttgtttatgtagagcctacagtgagatgtgctttattcaagatttgtttcttctttctacagaatgagcttgaccgtattgaggtggcataacaattggcatttgataaagttgccctggtagccatttaaatgcttgcgtatgccttccttcaaagaacattcaaatgcaacattgtgctgagcagttcttatcaggcgatccacttgttctgaaagagaacattatgatgttggttctagaatacgtttctattttttatcgccagacatgagttaacgtgtgttttaatagaacctcaaaatcagttgcattgctttatcattgggtatcacactgcaccctagaaacatgagaacgtttatttttatttttatttgtgcagacttatattgagccagggactggacagcggttccg

SEQ ID NO: 70206 - DNA, 365 bp, Prunus persica
  Intron number 1 from transcript ppa016242m (locus ppa01624 2m.g) derived from phytozome v7.0 (chr-ID scaffold_7; pos 12837622 to 12837986 reverse strand)
gatcagtcggtggattactttcagatatttggactgtaagtaattgaatctttgagaactataaattcttatcagtatttcgtgaattcagttatgtttatttttattctctctgctttgaatttatggttcgtatttgtttggttaccgagaaagcggagagggaggcggaaagaaagtgaaaattttgtaacttgtttaacgaattattggtttcaaatctttagtttatgtcattctgatttgagcatttcctttcacaaattaaaaagaatgaaaatttggaagttttagctagtgttcactcttcaatgtgatttcccttttttttcttataaaaattagttttgacagggagagaaagt

SEQ ID NO: 70207 - DNA, 785 bp, Prunus persica
  Intron number 1 from transcript ppb011482m (locus ppb01148 2m.g) derived from phytozome v7.0 (chr-ID scaffold_8; pos 21016420 to 21017204 reverse strand)
agcaggtcattgcccttttccaggctcttcaggtacctcctcataataagttttagggttttcaaatgatgccgagaaaattgttgataaatagaaagtgattctagaacctactgggtttgatttagtgagcttttctataattaacccgaatttgtttcctttctttttagttcaaattggaaatgctctaaagcttttgaatttaattctgtctgtttgggttcggtttctgtaaatcacaggcttattaggatatatgatctaattctattctgagaagacccagatgggcattggccatagttatttgataaaattcattttctgttatacaatggatagttcttgtatgcctcattcattgcatctaagttgctcgataagagtagagttgctagctgggttttttatgtgaatgggaaaagaaagaacttgtgcattttggggtgtattgctttggcatcatgtttcgtagatcgaaactgagttcatcttgctgccccctgtggtgaagttacccttcatcatgtgtagttgtatgggttgaatttatgtatctgatgtctgtgtttcaaatgattgctagaaactagttttgatggccctaaaaattatgcatcacagacaatagagtgatgtttctgctttgttttcagttgcatacttgatgttcctgtatactcttgcaagttattttctttttacattatcttgtttgttattttttgcattcaattgggattatttcctatttcttgttgcataggcagctggagcaagag

SEQ ID NO: 70208 - DNA, 521 bp, Prunus persica
  Intron number 2 from transcript ppa027144m (locus ppa02714 4m.g) derived from phytozome v7.0 (chr-ID scaffold_6; pos 20087475 to 20087995 reverse strand)
gcgtgcaaaatacaaacaagtgtaagtgcaattgctttctgtctttggattcttggttagataatttaggccctctcaggcccatatcacctttattatcaactaagttgtatgatttttgaaatttatactgagttctattttaaagctgttctttataaaatttacttgaaataattggaatgagttttaatcttttctttatcttcatttgatcttcattttccttgagttttttggccatctgttacatgtcaccgtttgtacttttgctcccttttccaactgtagtgtcattctgtaatgatttcctttggggcacttgtttcctatagctgtctgatatttgtattgttcgtaatattgggtatatctgatgattgccttgttgttgttgctcttgggactgaatttgcacgtattatcctctcttttttcctttcctttgttttctgatattttactgttctgaacgtgatgtatttttttttatacatggggaattttgcgtatagaagtgc

SEQ ID NO: 70209 - DNA, 678 bp, Prunus persica
  Intron number 1 from transcript ppa013496m (locus ppa01349 6m.g) derived from phytozome v7.0 (chr-ID scaffold_4; pos 16785954 to 16786631 reverse strand)
actctccagtcactcccacatcagccgtcttccaggtctttctctactaaatctcgagtttttgtttttgatcgtatgatcctatgccttcgatttcttcagttttgtgtttttttttaatttatggttttgataagacaaggaaatttgaaatctgggattttcctttgatttatttggttgcttattgttgattttgatgggtttatcatatttggtttgatcgtgcatatgggattgttttggagctttttcttttgatttgtgatttctgaaaattgcaatcgattattgcaagaaattacatggaaaataagctctaaatgatcaaacactcctgtattgggtttatgcttcaaatttaataaaaattatgttgcccaaattgttcacagaagcactctcgcttgtttttgttttaattctgttgatattgtctgttgtagtgaaaagccaaagtttaaaagcacttccccatgcaatatgtttcgaatggcagttttgtgttgggaaaaaccttggaaaccattggtttaaagaggaccaattgtggttgatatatgatattaatgcttgctaatcccttttcaatggttatagtgttgtattgccgaatccataacttgaaacttctttggtacaggtgatcgttggtggtggcggtggtggtggtgcctt

SEQ ID NO: 70210 - DNA, 753 bp, Prunus persica
  Intron number 1 from transcript ppa013973m (locus ppa01397 3m.g) derived from phytozome v7.0 (chr-ID scaffold_5; pos 6436030 to 6436782 reverse strand)
ctgcgccatcatcctctggctcttttccaatccaggtacaatacaacagtacccacttgtccatttgtctcacagattgttattttccattgaatcttacagtgaaaatctcatgtaagtatttgccttttatgggttgtgattggaattttgttttgttttctaattcagtacaatttgatggattttatttgttaagtctgctgacaatttgattgagtgaagtcatctaagagaaaatttaaccgattataaacgaaatggattagtagtatctagttttcttgcttttggttaaagattacaactttagaatgatcacatgttttcgtatttattttctgctgtggtgccgtagcttgtactgaggcagttatcaactgcaattttggctttatcagtcagcttcatgattgaagctattttgtttgcttgcttgggccacacttgtgtttcttcatgtggttttatatgcacaatgttttagtatcctgaaaagctgaagaacgggttttcttgtgaacgctttctagtgttaggcatatctttgaaaaatgttatttccagccttgtctttggataacattttgcttccattgcctcctatcttataaaccgtggcgggtattcctttctcggtatatccaaagtgcaggtaacaatgtgggatgcttgtagtttaggataattcgtgtttggaggttttttttgttaattggttgcttctatttcagtgattcacctttttctaga

SEQ ID NO: 70211 - DNA, 516 bp, Prunus persica
  Intron number 1 from transcript ppa010667m (locus ppa01066 7m.g) derived from phytozome v7.0 (chr-ID scaffold_3; pos 16478529 to 16479044 reverse strand)
aacatactccaaatttctctaattggtaatttttcttttcgaattttactgggtctcttgtgaaattctggattttgttattgttctttttgggttttactttgtttacgtcagtcagttttaaagtttcgattttggttatgctaaattggaatattcaatcaaatcttatcagtttttcattggggacatttggcaaacaccttctgatcatatgcaatctctgtgtttactcagcatgagtttggtattgtgctacgttactaatcatctactactagttttatgaaactctctgcctcctttttgctagacaaaacctttggccttcttagctttatagataagtttgtggttgtacggtattggtccatatcacaatgcattttgcgtacagcatatatgtgaattttgttctctgatttttcttaaataaccatttgtgaattttgtttccctcaaaaattgattttcaaccttgttcaaaatgcagggattgtactgtttcttgtactg

SEQ ID NO: 70212 - DNA, 641 bp, Prunus persica
  Intron number 2 from transcript ppa007441m (locus ppa00744 1m.g) derived from phytozome v7.0 (chr-ID scaffold_1; pos 32894087 to 32894727 reverse strand)
aggttctactcttttacatttttaccattaattaccttgattaccttgctaagagaatgaataatctgttgatctttgctatacttaaaagtattaaacttttcctaattgagttgaacaaaacctgaaagctggttgcttcattcagtgtataaatttgactgtattgcagtgtctctaacgatttctggtgtgttagaataagttctcttgtttttgttcttccatttacttttccaatttgacatgcatttgaatattttatttttattgaagataccgtaaactacaagaactatgtgttgtttgagacagtatgctgtttggtaaacactcatggtgcagaaaaaaactgtgactttgacatgtactagtgctagaggcagtgtcaatgtgtgttaatttgggcagctgactttctaccttaatccttatttcaacatagggattagggatagggaagccacagatttagataaagctctgcaagtgtcagtgtgtgttaatttgtgaagttgggttgcttccttattccttatctcaacacagggattagggaagacgggatttcactgtcaccatggcattctcttatattaaagcctgtaccttttgcagtgtgatccagaagaatttggttc

SEQ ID NO: 70213 - DNA, 948 bp, Prunus persica
  Intron number 3 from transcript ppa021048m (locus ppa02104 8m.g) derived from phytozome v7.0 (chr-ID scaffold_4; pos 15568450 to 15569397)
aaaattactgcgaggcaaaggtacgataaactttatggacatctggtgtaatgggccggtaaattaggtaaaccaaatttgtgcgctaaatttataaaattataacaatcttgatctacaacctaatacataataataataaatgggagagcgaattaaagctcacaaaggatcaacccattttgaaagctgcatccctcacataattatattttgcttatggccggccttcaacctcttttttcttagcaacgtggggcatgaaggctaagtgcaaaatttttacatcggattggtagagagattcatggtcaaataatttttgttagctaaattttgtttgtccttcttgttaaatatttgactctaccgcttgtagtaacttcatctcattattaaaatcccgtttgataaccatttcagtttcagtttatttatttatttatttatttttgttttagaatatagaggaaaaagaaggacaatgcaagtgagaatgagaggaaagaagagagcggaggatgggagggataagtaacaaaagcgaaaacaaaaacaaaaaactgaaatctatttgaaattatttgcacttttgttactctttcctctcatcctcactcccattctcactctcatttttctatatactctaacacaaaaaataaaaattaaaaactaaaataaaaataattatccgaaataattcttatcattacatatcatgtgataacaaatacagatacataattgtctaaaactatctatgtaagaaatattcttcgatcagacaaaaaaaaaaaaaaattcttcgaggtacagctagcactccactattgtatttaccctttgaatattttactagttaaatttacaattataaccttatatccttacctaattaaatttagaatgttttttgtttttttgtttttgtgtgatatttagggg

SEQ ID NO: 70214 - DNA, 603 bp, Prunus persica
  Intron number 2 from transcript ppa011668m (locus ppa01166 8m.g) derived from phytozome v7.0 (chr-ID scaffold_5; pos 15034071 to 15034673)
gatctgaggcttctgagctggagaaggacaaccaggtaattaaattttcatttaactacattatctcatctgataaattaatttgattcacatctctatatcagcctgtcacatttagagtagattctttcttcaaattgcatacatggttttgaagttactgggttccctgaagtccccaagccaaaccaacctttgcttctgttcttctgctaaaagtggtcaatcaaattttcttgataattaattaaaattttttaatttatttaaagtgaaagcattatgattaatatttcagacaagaacatattaaaagaagattcttttcatttgttaatcagcagaaaatcagggaaagagcattgagtttccttctgtaacggcctaaatcattaagtagatgaataaataaataaacaaaatgcttggaactcgtttcagtaatgggctaaatgaataaacaaataattgaatgaacccaatgaattaaaaaaaaaaagagtgaattaattgttctgttcaatgctttttctttctcattaatggaaagttgaaaaaaccactcaaaatgatcatctcaaatatttgaccaggtggctaaac

SEQ ID NO: 70215 - DNA, 166 bp, Prunus persica
  Intron number 2 from transcript ppa001864m (locus ppa00186 4m.g) derived from phytozome v7.0 (chr-ID scaffold_7; pos 18943876 to 18944041 reverse strand)
tcaaacctcatatatttacattaacaacacctcaggtaattacttatgaagaatagacatactttttgtttgtacactttgagatttttattattaatcagaatcctttatctttcatttatttattttttctctaatatgcattgttcttgttttttcaaggtca

SEQ ID NO: 70216 - DNA, 877 bp, Prunus persica
  Intron number 3 from transcript ppa019202m (locus ppa01920 2m.g) derived from phytozome v7.0 (chr-ID scaffold_6; pos 4660112 to 4660988 reverse strand)
gtgacggtggcaaaaatttcacctgcaacaagtacgttccctccatttttttttttcacttatttaatcatattacaggatcatgcaaatcatctttagttggagatctgatattctaaagtgttgtgaaaacgcccacaaaaataaccatgatgaaactaaccagaaatagagggaattaatactatcattgtgcttcaggcaacttatataaatatcacctagactaccatattttttcttgagagaatgattaaaagatggctccatgtgctctgattcattatttggattcaatcctatccaggagaactaccaaagtgtttaagcactcttcatccgagagtgtactgaactactctatttcgaaactgttatcttgatatatatttttggccctcatcctgcattttggatcacgacgttgtccaatatagaaaaccaaatccatgtaactaattccgaaatatagaaaccaacttagtactttttgttaaagaatataagtcccacatcggaaacttgactaaataaaatacaatatataatgaatggttcaactactaatatcaccgaggctttttgtgataaaacctcacacctattgggttttgtaggtggttaagttggggacaatatcggtgttgttagtaatgggctgctggcccatctctttgaatttaacactttttagttattgttgttctttctagtactaaatcataaatagacaaatgcatcttgcatgacagcaatatatatgcagcattgttgtaataactgttgagctctaaacttagaaagattatatcaacattctgaaatgtttattttgcagcaagataattggagctcgacgttacacagcagagtctgc

SEQ ID NO: 70217 - DNA, 932 bp, Prunus persica
  Intron number 1 from transcript ppa005252m (locus ppa00525 2m.g) derived from phytozome v7.0 (chr-ID scaffold_5; pos 2328262 to 2329193)
ccgcttggctttcaggttcgtttccttttcttcggatctgattcctcacgccttttcattattttttcaagtttcgtgtttttttgcaattcgattttattcgatttgtttgggctgaatttattttattctctttgttttgtatatcgatttcattcaatttggtcagttgggatttttttagaattagggttagttcttcttcatgtattcgtcttgatgtgtttcttcgatttcggttgaaattttgtttggttgccgaaaaactgtgggaaaggcgtcaggatttgacaatttggggctctgtcttattaaattttcttcgtctgggttactaaggtttggtaaaaaaatttctgatctggaattgtttctctaggataatgtaatttctgggtttaatttggtcattgatttgcattacttttattactctttaactcgattttggttattggaggctttttgtttatttaattatttttatatcagcgattgattgtaatctctttaagtctttattatataaattgttaatgttgtataatttttgcctattgatatttaagtgaggttatagcgtagttaatacttggtttcgtttgcatatgagtgtagtgcaactaagtgttggttttgtatggatgtacgtctgaactgtaatcttctaaggctcaaagtattgtgcaacaatatttgttttgtacactcgaaaaattctgcagtcatatttataatatgcctgcttctggtttttaatgctggaatttgcatcattatgtgcccatattatgtgagattcagtttgagtggccattatattcagtaatggattccttttatcatgtctgcatgattcatctgatgtgcggttacttgttgtaatctaaatttcaggttgtgccgggcttggatctaaagagctttgacat

SEQ ID NO: 70218 - DNA, 1024 bp, Prunus persica
  Intron number 7 from transcript ppa005252m (locus ppa00525 2m.g) derived from phytozome v7.0 (chr-ID scaffold_5; pos 2330852 to 2331875)
tcagcgtggatatttccatcgcgaccttaagccaggtatttgatgcaattttgatgcacgactttagttgagtaattaaaaggttcaaagagaatttgaagggcttaaggcatctatgctaatgaaaattcttgtatatctttttttttttgggggatggaaacatgtgtacctcttccatattttgttgaagaatcaatcttagttgcttattgtgggtttgtgtttgtttcttttttagtcgcagttttctttcatttcaaagcagattgatgtttgctaaggctgcaatgatcatgtggaatccttgatttattagtgtacaattttccctttgttatacttataatagttgtaatgcctgctgccgttgtttttggacaccaattcttaattagctacttttcttcttttattatttgatatttatttataattccagtataaaacgagatttgatgtggccatgttttcctacggttttggaggtatacattttatttgaaaataattttcaaattcaaaactacgaatgttatgttagctttagaatctacttgctagattaaaaagaaaaaaaagggtttttgaccaccaaactgacgttttgaattggtgaaacattggaaggggcgctgatcaatgtacatgctttatattttcttgcctcttttaagtttctctgttttgacatctttcttcaacaatttttcattcacgtattgtagaaatttctgtccaccagtggaatgctttgttttgtttctttctttttgggggccttctatggttgcttcgtgcatggtgttgctatacttgttcaagttgtgtttgtatttcccttttggattctcaatgataattggcaaaatcatgtattacttttgtttattatgttctgttctgtgtctttaagtcgttcatgttgtcatctgttgggtccgtgtcttcttttgctaccgaactctaacatactgctatctataccttcactcctttgtagagaacttgttggttaccaagg

SEQ ID NO: 70219 - DNA, 223 bp, Prunus persica
  Intron number 2 from transcript ppa007327m (locus ppa00732 7m.g) derived from phytozome v7.0 (chr-ID scaffold_4; pos 17730698 to 17730920 reverse strand)
ttcaccacttcaaggtcaccccctcttttccttcttggttctttattatattcatgatagagcaaaggccgggcacactgttttaatcaactaacctaactcatgtcttcacggggaatttgatatttgatgtttattgattgttaaacaatataaactttaaattaattggtaaatggcctgttttgattgttgttgtttaatttgttattattttcagaac

SEQ ID NO: 70220 - DNA, 789 bp, Prunus persica
  Intron number 1 from transcript ppa012740m (locus ppa01274 0m.g) derived from phytozome v7.0 (chr-ID scaffold_2; pos 26474110 to 26474898)
gctacgcgtatgttctctctctctctctatctttcctttttaattgatttttcttttgttagtgcaatgcttttgggatgtcaaagatctaatttttgcttcttggctgtatgtgtttggatgccaagaacatacgttttttcttctgtttttcttatcgtaactagtatgcctgaatccgatttatcctctttgatacctgagaaatggaatacaaatcaaagtgggatggcagtgatgaggctttgaattcgacatttttttctttttctttctacatttctcttagcgaccaaacgcagaccaaatgtacaaattgtttcctagaaggttaattttatttttgtttggtttccgagaattcttaggaaaataatcaaaatagtgggaaaattatgaatttagcttactattggcgaaagaattatctgcaaaacaatatttttggaaagcacggtcgaaaagctaagcgggttctgattatttggtctgttatctgatgtaaatctgttggctcggtaggattaggaaaatgtaggaaagaaaacaacttaaaggctaaaacttttttcataaaacttactgtttggcactcagggatgataccttttgtttcaattattgctggcatggttggattctggagcattttctgatatatggcttccctaagatgtctttttgtagttgtttgaatggctcttaaattgatatttttctttgggactatatctctatactgtgttgactgtttatactgttccaaatcttgcagaaactgcattttcg

SEQ ID NO: 70221 - DNA, 862 bp, Prunus persica
  Intron number 1 from transcript ppa007816m (locus ppa00781 6m.g) derived from phytozome v7.0 (chr-ID scaffold_1; pos 41122908 to 41123769)
tccggtcgtctcagccatttttccggcaagcgaaggttttaccatcctaaatctctcacttgtcatatgtaactattcttgtatgctttttgtgtgttctttttttgttctttttagaacgatatatgtttcttttctttccatattgaccttaaacatattagtttgttttatgtataattagcatgatttgtgttcttctcaaatagttaaacttgatgatcatgtgtgggaacttcttcagaatatcacattttattattattaaaaaaaaattccactttgtttagcttttacagattatgatagcaattcttttactctgtgattgtttttggagatagaagtggataatttagaaaaccattcatgaattcaattttttttttcttctggtatttgccttgagagtaggatctctgactagagtacgttgaacatcatttgcacacgtattaagtgaatattaacgacagttgtccacacgtatttgaattattattactagttgtttatgcatgttgacgatgataagtaatgcaaaaacaatcattttgcattaatttcttttttattccataaatatgactagccgtacaacttctagttaactttaaattttcatgcatgtacgggtgtttctttccttaatgtaactaaaattaagggtcaaataccaaatctataacacatggtctaaattacagggatcattttggtatttaactctagagttaatatatatatatatatatatatttatggtttatttcttaattttcttttggttcgtgtttcttggttaaatttcaattcaagttctgctctgataaaaaatttattgtggaaatcaggattgagg

SEQ ID NO: 70222 - DNA, 1027 bp, Prunus persica
  Intron number 1 from transcript ppa009738m (locus ppa00973 8m.g) derived from phytozome v7.0 (chr-ID scaffold_9; pos 846158 to 847184)
acccttaaggtactcaatttataggtaatttgtttattttctgctctcctgatttgagcctatgtattattacctcttgtaatgcatgctttttctagtcttgtagtgtttacgatatgcagatttgtgtggttttctgttattcggattgatttttagttctgtttttagtaagcagctgtgagtttctttgggcatgtccttttctatcaaataaagaatactagagttgcaggaatgatatgtgtattgagtaggatgatccttagagaaaactttgaaggggtgacgtaatgcttgaaaacaggagcgtctaaatgtggtgttctggcatggaactgatcattgtgaaatggattgatagcttaccctaagcagtgactggcatagttttctgagtagagtttgattgaaggattttctgagttagttaacttgatctttagtaagttagatacttaaggcttgactacaagaacaaaaacaaacgaaagcaaataagaaaaacagaacaaaataatctcgttttatctcaatttcagttaatgtttatacgaatcgtatttcagataatgaatggactacctttaaaaaatcagagattttcttgccgctcgatatagtttctaaatgtgcaatcatcatgttgaacattttattgtagaaactctaatggaattttgtttattctttcttgtgcttaactaataagtgaaaattaagaatgcattagattactaagtttctcagtgtctgccaaatccagtcaatggtttaccaagtgacatgtaaaaatgaaattttttgcactgatacgagcttgggggaaagaaaaaagaaaaaaatatgcagcaagtaatttctattacaaagatctaggggtattatctgtctttcaacggattaatcataaagagtctttatttgagcaatataaagttctctaatgctgtcaagtttcttactgttctttttctcattttctttgcaaggtcatcactggtgcagttttgtacacgaccacact

SEQ ID NO: 70223 - DNA, 580 bp, Prunus persica
  Intron number 2 from transcript ppb013742m (locus ppb01374 2m.g) derived from phytozome v7.0 (chr-ID scaffold_4; pos 20733648 to 20734227 reverse strand)
gtctcgtgctcactgattatataggttccttttctctctcttaagagtattttcctcagtccaaaaatatatgttagatcatgagtgtatgtttgcctctatagttgaattttactttttctagtatgtttgcatgtgaaatatttgacaagaaattattcttcatatattatttaaacatggacaattcaaatatatattatataaatatttttaggtctatttgtttggaaagaaaacacacacaaaaaaaacaaatttagacaagaaaatcaaatatatatctttggatttacatattccctatcagagcaaaaaccacatttataccctccggaggtgtaaagatcactactacaaaaagtgaaaaagacgaccagaaaacaacgacggtctcagtgaaaaccgtcgtggtttttaaaacgacgacggttctaaaaacaccgtcgtgtaataccaccttagacaactaaaaagggagattcaaatggctgttcaaaaacaacgacgtacttaattaaacaaccgacgtctatttgaaacagatttccgcagtgtaaaatcaaagcgaacaaagaac

SEQ ID NO: 70224 - DNA, 522 bp, Prunus persica
  Intron number 2 from transcript ppa012944m (locus ppa01294 4m.g) derived from phytozome v7.0 (chr-ID scaffold_6; pos 2231541 to 2232062 reverse strand)
cagtgctggtatttgctcctttcccttttccacaatcccttgcatggtttctgtctcagacttgtaaatgtttattttaaatttgtattaagattgtagaaagtattaattgcagctaattaactggttaattttaaggctttcaacctttttcagcccacgatgtttagcataagcatggcccttttgatccattaaagaggaaaaaactgaaaataatgttcaaatattgtgagttgttgaatggcatatttgtggatggcccaatcgagagcaacacctctaatctaaggaggaggttgtctcgggctcaaattcaaacccccatcccctaatgttttaactgatcgaagatggtagcatatttgcactttaatgagtttccagttgtctcgtgtgcttgctaatgcatcttagctttctcagatatgtatattttgatcactatttattttgaggttgatatagaagcttttctttgggtgtaccttttaatgggttataggtcccgtggccgaggac

SEQ ID NO: 70225 - DNA, 641 bp, Prunus persica
  Intron number 3 from transcript ppa004659m (locus ppa00465 9m.g) derived from phytozome v7.0 (chr-ID scaffold_1; pos 45684451 to 45685091 reverse strand)
gtgcatttaagaattccaacattacgctttgccaggtactcttttggccctgaattggattaatcttgtttggtatatccatgttttttagcagagtttgattttgattgctgtatagcatgctattttgggactgtggctttatgagcttgcttgtgtcgagaaggatggatagctttaagcgggcagtgctccgcttagtgacagagaaaatatatagaaaggaaaaaaaataagagataaattggtaaatgcaggatatccatttttagcttttgactgctggattttgatacattctataaggcctatcaaatcatgaaattaggtctaatacgaccattggctttagttgatgcgcccttttcactttaaaaaacctaatataatatagccctcatggccatgttaatttgcattaaccaaggagaacctggtcaggttctctgtaatgaaactttataattatcataaatctaacagaaaaagtattcttggctagtttacttgcaaagaatgggtcagctatgaaaatatgggactgattatgttcattttaaactttaaagttatcctatgcgtatactgggaaaaaatgacttttaatacatattaatggaaaaggcctcttgcagactgta

SEQ ID NO: 70226 - DNA, 489 bp, Prunus persica
  Intron number 5 from transcript ppa026524m (locus ppa02652 4m.g) derived from phytozome v7.0 (chr-ID scaffold_4; pos 6411590 to 6412078)
agaggttctatttgagtggccgattacaaaaaccagtatgtcttcttcattgattctcatttttgtgcgtgtccttatgcttgtggaagattgatcttcagcttcatatttgtccttcgttccttttgattttagttaactttacattattttataactagcagcacccttgacattgcaataggatgataaaagttaaaagaactttcaatcatattcaatgatagtcttgtagtgacgtaattctagggggaaaaaaaaaaaaaaaaaaaaaaaaaaacctttcactaattcaatataacaaatttttaccttattgaaatattttgtggcacacgccaattgcctgaaacgaatgaaaactaaatacatcttcttatgctatgctgttgaagactcaagacttggattgtctcatctagttcatgtggtcatatattgtctttatttctgaacatgagagttttcaatgtttttttctacaggttc

SEQ ID NO: 70227 - DNA, 571 bp, Prunus persica
  Intron number 1 from transcript ppa010695m (locus ppa01069 5m.g) derived from phytozome v7.0 (chr-ID scaffold_5; pos 16372197 to 16372767)
gctggccagtcaagtaagaccttgcttagctgaaacatactcgcacatctatataatattttccatattttccttataaggcatggttgtttcagcctttctttctttctttctttcttgctttccatctttatttctaaatggaacctctaaaatcatgtaatcttttcaaagatgacatctttacttacttgtaatgtgtctatcttttgtagatttgaagccagtgcaccctttcattgtatgttataatggttttgctgtttagaccttttcatttcatgtagtggaagctatcaacaaagaaattgctcaaggaccttaattaatccttgcttgtttgttttaaattcttatttttatttatgttcccatttttattattattttttataaaaaagatctgatctttgatcttcctatcttatatatacactctccctttcttcctctctcttcagatgtgcaagtttctccctttttttaatttgtactcttttactttttatttgcttattttctttggaattgtataggtgccaattggtgtgtttgcaaagagggattaggt

SEQ ID NO: 70228 - DNA, 686 bp, Prunus persica
  Intron number 2 from transcript ppa010892m (locus ppa01089 2m.g) derived from phytozome v7.0 (chr-ID scaffold_4; pos 2738387 to 2739072)
ttgtcactgttctcgaaccattcttgtctaaggtatcaagtttttcttttttgattgttcgattgttaatttcattattgttatgtggttattatttgttatgaattttcgcttcattgaactgaaatttgtacaattaagactgtgtttgggaaattacaaattaatgcctgagtttctctatagtggaagttgaaagttgggaacttcagttgagactataaagaaaggcccgacatatcttatactttgtgtttgcaactgaaatgagtttgaatgtaaggcttagggtcttaaattccagaaaaatgagcagttacattggtagattggaggagctctaacaatttgtctgcctgagacagctatttaatttcggcattcgaaaatttacatacaaaaatgaaggtatttgaaaattttggaggttagtctaggggaagagcagggtagttagtgtgatttgttggttaaatgctttggattgacttagaaagatagggtacctagaggaagagcaggatgaccataatggcattatgacctgtcctcatatgaggcactgcaaatttcggtgtagggtttgcaacttggaaaagctttctggatatatgaggaacttgatttagctaccattggctttctgcgcagcacctactgagagttgtccccgttattggcatact

SEQ ID NO: 70229 - DNA, 807 bp, Prunus persica
  Intron number 1 from transcript ppa009765m (locus ppa00976 5m.g) derived from phytozome v7.0 (chr-ID scaffold_1; pos 30905139 to 30905945 reverse strand)
ggcaaaaccctaaagagccgtttacacccacctaagtaagttttctctctcctctctcttctctcactatctctctctctctttctaaaatttgaatatatgggtccttgtactattaacctgccatttacattcttgtgcatatttatatatttgaaagcttcaaaattattatgaatttgttatttttttctccttattgtgcacagatctcagatcccaatttatcagattcggaaaccctaatctgttatgtttgctttaagatggaaatatagatctgggtgttggtctttttacttgggttctgtttggttgctgagaaagtgtaggaaatgcacagaagttttgatcctggaatccgcatatttatttatttggatagggaaggatcttcatttttcagaaataagccattagatgaaaatatttgcatgctcatcacaattggtctttgttcattttaaatttttgttcttttggatctgaatgaaacatttaggaaggatcgatagtatttgtgttatccttcattttatcagctgccaaccaaatgcttgatatttaatttaataggaagatccattttttttcagctgattttgtgtttacatctgcctcctaggtcctaattttgtgatttggttgagctatgctctgtttctatctccctatctcttttgtttttcgtttctgtggcctcagagggctattcgatggcaacttttattgttattcaaaaactttcattaatgggccaattcaaaagataacgatgcttgtttgtctgctcaatctctagctctc

SEQ ID NO: 70230 - DNA, 557 bp, Prunus persica
  Intron number 2 from transcript ppa005410m (locus ppa00541 0m.g) derived from phytozome v7.0 (chr-ID scaffold_5; pos 17769129 to 17769685)
ttttgtcggttggagacataattcaattccaacgcgtttcggtataccaaactgatcatccattaaatttccttgcatttttgggtgtcttaaaattacagataattgctgattgctcaagccaatagtttaatctgtatagattttccttttttatgtatcaatcgaaagaagaaaatatgataaactaaagtttcgtttgtctttaagttcctattttttcacattttgctgatgctggcatgatgagatagttaatgaagaatgattcagaatgttcctcaaactagtgcgacatatttgtacaaatacgttccaaatattttttggttgaatagaccaattgcagctgctttcctttccacctcctttttcccaattaaatcatgttttctccattatcacaatggtgttgtattatctcttatgaaacaaaagtgatgttatgtattatcctttgtactccattttgtttttgttaaaagcgtgcaaagttctgtgaccttgacaaacattacatgatgaagcataatcggatttgatttggcattgtgcag

SEQ ID NO: 70231 - DNA, 663 bp, Prunus persica
  Intron number 2 from transcript ppa017979m (locus ppa01797 9m.g) derived from phytozome v7.0 (chr-ID scaffold_1; pos 4252084 to 4252746 reverse strand)
aatctgaattggcttcccttgcggaatctctcacagtatccaattcaatgctattgagttttttcttaataatttattccattaaacttatgatttctaatctgttcagtgtttagcaaattatgaaaatttgaaatgcacttatttttgttttatacatcccttgcctttcagctttcaggaacactgcatagtcacgtgtttccccaatttcagtgagaaattaaggattatttcaataatgtcgtttcaacgttctattataatatttgttcaatctctcgttcataaaagttgtgcgcagtaataaaatggaagataaccccattttttggcttcttgtcaagtgttgatgtgaaaaggtttgccactggatcaattactttttgttttctcagtgctcttatgatgacctttgtgtttcttttgatgcaatgttgtaggccataaagtttcttagaaatatgtgttttcaaatttacatgcataggaaagctttcatggccaaccagcccaccattatattcttttgcaaatggtcataattcggtatgcaatcctctcatgaactgtttgctaagcaatcatctgttaatggttttgttcttaacaacaaactagacattttgggaggactatacttgcttggatataagccagtgc

SEQ ID NO: 70232 - DNA, 862 bp, Prunus persica
  Intron number 1 from transcript ppa007332m (locus ppa00733 2m.g) derived from phytozome v7.0 (chr-ID scaffold_1; pos 33035923 to 33036784 reverse strand)
tttctaacgatcactgtcagtatttcctcttccaggtactcaactcatcatgaccatgccctgttgtgtttctataattgtggaaaatgcattttctgagtagacataaattaaatacttgtcagattattttaacttcgttttgctagtgaaactattcaattctggtaatttagtccagcatatgctcttttgtactatattgttgattcagttcactttcttggctacttttcgttacttggaaaatgaaacatcataaattttagaatgacttacaaattttattacctttgcgagtgggggcatatgaagtttcataaaaactggtaatgcataattttgtttataactttatgagactagacctctgtgctaacatttttatatgcgaacaccagaccaatgcgtggaccttccccttggaagtttcaaataatggtcctgctgtagaataacataaccagactacagtagtgaaataggtgcaatcgtctagtatccttgaaccatactaatgaacaaacgtgtgctctttcatccgtatgaatttcgacttttgattggtttggactaaggttattaagagcagagtgggatggatggcctgcgtcactgcctctgcatttactgtgctaccctatgcctttccttcttttttctttttcgggaaagattcttttgtgtttgctcttattaattttttttccttctatagaattaaaattgtcctccactgttttgattttaaaagccctaaaagatacataactgttgtctttgctttaatcttttatcacttgtactaaagagaatgtttgttgcagctgcttcgaggcctaaagtatctccattctgcaaa

SEQ ID NO: 70233 - DNA, 913 bp, Prunus persica
  Intron number 1 from transcript ppb017081m (locus ppb01708 1m.g) derived from phytozome v7.0 (chr-ID scaffold_6; pos 3901959 to 3902871)
taccgccccataagctcaaagaagttgaatttgaggttcaaatagtgatggagaaggcgatcgattggtgtcaatggtagcggattggggattggaatacttcttctaattgtgggcgtaattagaatttcgaaaagttttgggctgaaaagagtggggattggagtgtgaatttgaagaaattggatttgagcagagagattggacattgaacattggagagaggtcgggagggaagtcgcggacttcaaactagtttttgtggcgccctaatgttttcagttaatgattcactttgagttccgtgtttcctattggctgatggtttaggaaatttcatgttttttttttaatgaaaaggaaatgttttatgtatgctatatcctttcttcttcttttcccttttttttttccttcagaatattatgtttttaaaaaaaaattacatttaatatatattagcaatagtctaaattaaaagggattgggactttgtcatgcatagggatggcaacgggtcggataggagcagtgtatgacaacaataccatccccatccccgcccccgtccccgaacccatctccgtttattaggtttcggagaattcccgtcccagttcccgttagggaactatcccccatacccgctccgaatccccgatttttttgcataaaaaaatatttatcatacattttaacattaagtttatattaaattatcattcaacacatccaaattaactataaagttcaactcaactattcaaaatcacatcaatatgaaattccatagaaaattaggaagaattaggagaggaagttaacttagggttaaacataaatattataattatatatttatttatttatttatttaaatataaacatatatattttcaggtcgggttcaagg

SEQ ID NO: 70234 - DNA, 753 bp, Prunus persica
  Intron number 1 from transcript ppa000389m (locus ppa00038 9m.g) derived from phytozome v7.0 (chr-ID scaffold_6; pos 12870232 to 12870984)
aattgaattggcagctctgactggtaagtccagtcgctctttcttctccaatgtttgccttaaattcagaagcaatatagtttgaaaccctagaactaactctgagctttgattatctttttgtttttcgttattgaagctaatttaatttcatagggtgcatatacagttaggggatagctagggttcgagttcagagagaactcatttgtctcttctccctccctatttccactcgaagacaaaatttgatatgcatagaggttcgacccaagatgtttgtgctttagccctattgaaatgctcttgttgttttgagcatacgagctagctcatttctgtcttctcgtggatctgaactttttgagcaaaattatttgggacagtggcaaactacttccactgagcattgtttggcctttttgggtttgaagattgcggtacaagtacttccacaatgctaattttgaagcctctaacttaggctttgtaatttggatagcagttttaagtgtatgcgtgtttgtgcgtgtgtgcgtggattcgtctgtcttttggatgcaataacatccctattgattctagtttccagtaatgattgctttaggttcattaatattctggtctgtggccagaggggaatcctggagttgtccaatcctggcaaccaaatgcccttattagtatatggcagtctctaatagcttttcttttacattttctcacagaggttggtgagctggtcatttcaac

SEQ ID NO: 70235 - DNA, 403 bp, Prunus persica
  Intron number 1 from transcript ppa022602m (locus ppa02260 2m.g) derived from phytozome v7.0 (chr-ID scaffold_3; pos 16649469 to 16649871)
gcgcctctttcttcaccaccgtaaacttgcgtgtgtgtgtttttttttatagcgaaaagtcacatttgattcttatagtttaatttgggcaatttgatccgtgtagtttaattttgaaattttcatccgaatttcacagaatttataacatgtccttgaattgggaggaatttaaaaccctagggataaaattgacagaattgaaattacaagaactaaaatggtaaaacagaaaactacactgatcaaagatgactttttcgcctttcttctttttttatgatatgtcaaattagttgagattttaatcaaattgattttgattaatgttacatattttctggcttatggcttggtacaaattgcagggcgctatattagcagagctcatagggtcgggcaa

SEQ ID NO: 70236 - DNA, 473 bp, Prunus persica
  Intron number 1 from transcript ppb012448m (locus ppb01244 8m.g) derived from phytozome v7.0 (chr-ID scaffold_6; pos 19495977 to 19496449 reverse strand)
cgtccttattttggtgctcttgtcaaccaccggtttgtttcaatgatcttcaatcatatatattttattcttttcctattagttaggctttacaattaagtatttacaatctcctatatatggtcaaacagatgtccatgcatgcaagctattaggattttttattatttctttttcctttttggttgatcatatcagtgtatgagtcgatagaaaactcatattggatcaattttaattactattaatctaagaatttagggtttattcaagtgcataaacccatatttacacttgttttttccgtaaatattttgtaatataattttatatattgcacaagtccatgttactattttgttttttttatttttggttcatgtcacgctaagattataatctttttgaagaaataattaatagtgtttttatttttagtttggaagatagcaactgttgaaggttccaagtgt

SEQ ID NO: 70237 - DNA, 416 bp, Prunus persica
  Intron number 1 from transcript ppa000159m (locus ppa00015 9m.g) derived from phytozome v7.0 (chr-ID scaffold_6; pos 27444204 to 27444619 reverse strand)
caattataaaggtctgcgtcttcaaactcttaatattaatgtttgcgtgcatgtaattggtgatagtgtggctgcaaattcaaatgttttgtggagtaggaggaaatgaatgaaatgaagagttgaaattgtactgaaatagtcaccaatgtgatattattgtattttatgcatgttgaagctgaacaagttaccgtggaaaatatagtaaaacaattacttaattctgttttgtgaaattgaaggccgaaacagtatttagtatagctgattagggaagagaattagggttgaagtagtttacatattaatattcttaaatcgtaactaggcaggctgccaagttcgcttatatgtttgttgttgatgtaaaacttgcagctccgtgctttgtctagtcccggtgagattgcgca

SEQ ID NO: 70238 - DNA, 776 bp, Prunus persica
  Intron number 2 from transcript ppa002514m (locus ppa00251 4m.g) derived from phytozome v7.0 (chr-ID scaffold_5; pos 9381383 to 9382158)
cctgcaaaacgggggactcaaaagcaacctggaaggtaaatgcagcttatattacgatgtcattcgtggtagatatatgcactgcttgtgattattttggaggattcatgcccccttttctctctctacatggattcgtatacatgcatatctattatgtatatcatgcatctgtcttttgatttataaattgatgtgcaaataattgaaaagtgttttcatgtattgcatggacatggtttcaagtaatatctttgataattttttaaaatttctgtaagtttagtatcgtatttgtaacttttaaaaattaaaaaaaaattgtatcaaaataagtatcgggaatttttttgaacgtcaacaggaaatacatgtcgttgatgtgcttattatgtgtatactgcttgtttttcttttgggtccatgattgataaaattcaccaagtgtactgttaaggttgtttcttagttttatgcactctggaatatatttggtcaatgaatgatttgatcaaggactcaaggactcttaacagttgggaaatgtgacaccatctttagggtaatgaattatcatatttctttttattttgttaacccatttgctctgcaataagctgccacacattgaattttctcacactggctaatatcctcctcctcctcctctctctctctcataaactggttgatgattttcaatgtgataattttcttctttggttacctgcatgtttcatgtcgtccttgaatctatatatctgcaggtacttatt

SEQ ID NO: 70239 - DNA, 409 bp, Prunus persica
  Intron number 4 from transcript ppa012540m (locus ppa01254 0m.g) derived from phytozome v7.0 (chr-ID scaffold_8; pos 11227816 to 11228224 reverse strand)
gcatagattgggaaaacaaacttgaggtattgacttgtcatagagttagtttatgcttgaaaaggactctgtttttatgtgttttgactttctgttttcttgaagttacttgaccctttgctcatgagtttgagttcttaatttattaggcaaaagagttgcaggcaaattttgagtacttgagcctgttatgcaagtgagtgtcccttcttctgcaccattgttccttatgtattattatggctgatcgttcaagaattttctctctttaaaattttgcattatcttgtgtaagatctctatacttaggatgagaccttgatgaaactaaaatagcggtattgcatgtgtggtgatgccagatatgaaaagtgatggcttgacatgtcaaattttttattaggctgta

SEQ ID NO: 70240 - DNA, 861 bp, Prunus persica
  Intron number 2 from transcript ppa007993m (locus ppa00799 3m.g) derived from phytozome v7.0 (chr-ID scaffold_8; pos 19860822 to 19861682 reverse strand)
ccttcatacgtgtgagtcttccctcttgccaatgactctgcgtctctgattctttgtttgtctctttctgctggtttagtttccgattctgcaaaattttgagtgtaaagctgtgatttttttgacatttgatgtttttggtgatctgggttgttggtattttgcatttttcttatctgggtttggcttggtttggctccgactggttttgggatgtgggtttttgaaattccatgctttccttttatgtttctctgctggaagatctgagagcagctttgccagttggattggccaaccactcgtgaacaagccgcatcttgttaaattatatacttggcgataattcgaaagttcgactgacagtgatataattttgccttctgtcgaaaggcctctgcttgcagtggtctaagtagcattgcgttcatgcttcatcccatgactgtataattatgttcaaaatctatagcactgctcagttatcataaatggttccttttattttcgctgcctgattaagaatttagttagcttaggtgtgcatgtatttcatgagcctcctgaaggcattaattgtattattagggatgataagtggttctttttagttttgttcatgggcttagcccccagtttacccccaaaaaaaaaaatttagttttcttcattttctggattttctaatacttagtgcaaaacaattctgctgaaagtttttttctcccagagcgctcccccaacccccttttctttcctcaatattctatctccgtgtacagtgtaaagaataattctgatagattttttgtttggacttctccagtttgcaggaagtgcatatatagtaagatttcggac

SEQ ID NO: 70241 - DNA, 915 bp, Prunus persica
  Intron number 1 from transcript ppa026836m (locus ppa02683 6m.g) derived from phytozome v7.0 (chr-ID scaffold_8; pos 1083922 to 1084836)
cttgtggccgtggtcgtggtcattataaatttcgaaattaaggtggtcataatcatgcctcaaataaataaaaaagtgcaccataccaccagaaatagaataacaatgaagaaaaacaaggaattgctcaggaaaagtgcaccatttcctgagcaattccaagatgcatgatgaagatgtatgtttcgtgaatagtgcaataatacatacaattcttctagataagaaataattttttcatgtttttagacctgtttggataccctaatattttttagataacctgcttggaactttggataattggatacgacatagatataattgatttctttgattgtctatataattattgtttcttcgattactctaaagattaatatgcgtgctcgcaagagtggaggctaagaggtgggggtgggtcaggatggggagaggagataggagataggagagaggagagaggaaagagaggagagaagtgcagtttttattattatactgttttcaattttaaaaaatttatgttttatttaatacacgtggcgtcgtatcattggatatgtgaggcctacatgtgtgccacatcatcaatctaacagatttttcaacggaacctgacggtaaagactacttggttgaaggatttcaaactcaaataatattatatccaaaaaaacattatatttttgaactgacattatgtattactgcgaatcttacggaatgatggttaaatatatttttcagaaaaattacttcatgttgttcttctattaaatatattttcattgtttattatttttttcttatccaaaatgaatgaagaattgcattgataattaaagcttatcactcgtattacttgttcaaagagaacggtacactaatcatctaaagttctattttagggga

SEQ ID NO: 70242 - DNA, 841 bp, Prunus persica
  Intron number 1 from transcript ppa003211m (locus ppa00321 1m.g) derived from phytozome v7.0 (chr-ID scaffold_7; pos 20784068 to 20784908 reverse strand)
ccaccgcagccgcccataccttcagtgaggcctgtgtaagtttgtagcttttcatatgaatatgcaatgaagtttaatttgttgggaaaatttttgccgcttaataattgtatggtccgttggttgcttattagttcaatttgattgagaagttcggattttggattgtgaggtaatgtgggaaaactgctcaaaattggaggcggcttgagagcattgttttggagaatttagtctgtgaggtggtatattttggtgtctattaaacaatcttttgattttgtttgaaggattgattttggagggcgaagttgttatgttttgggtatcttttttattatgttttggggaagccatgtgtttgccacgagctactcctacagggctttttttactcaaattttagttttgattaaagatgctttagtctgcgatcaaaatctctctttgcctctctctcaatttcaatttacaatatctcatacccttttaaatgtgagtattgacttcttttattttacacaacattcgttgaactgagtccgggattttgggaccctgatttccacctccaaggaaaggatgccttaccaagaggcattgacttgctttccttctggatttgagatgtaatgttggttatgattgatgatcaatctttgttcctttaatgcatttactgaattttttttgtacaacctctgtttaattgcacgtagagatgcatctgaagataccagtgtggcttaaagtcatgtgaaacctctgtttatttatatttaaacactgttatttttctttcttaggaaaccagaatccccaaaatcaagaccaagaccca

SEQ ID NO: 70243 - DNA, 745 bp, Prunus persica
  Intron number 1 from transcript ppa002290m (locus ppa00229 0m.g) derived from phytozome v7.0 (chr-ID scaffold_6; pos 19922109 to 19922853 reverse strand)
aaggtaagcatgtaaataaaacttatgatcataattaataaagaaacaaaattataaggcattaattttttttttttccttcagattttgttcatgattttagatcagttttaactatattaagtttcatccagattagagcctctttggggttcagtttctaaccttatgatatggtcaagaaattaggtgggaaatgagtcatgatctcttgtaactttacaacaaaaaattatcatatatggtctgctaatctactaaaattcaaaaccattgaaagtggttgatctcaacatggagatcagtcacctaaccgttatgtcaagggagatcctttcggagatgcgagactagggttctcaaaatttggttacacttatatcttgattgttcttaacaagatctaatttaatttctgctgtattatgcaggcagctttgtgagcattgcatgctgcgccgaatcggattataaggatagtagaaccattagctggatatcagactttaatcagttccctaataacagaggctgccacactttagttaaggcagtggtaaacaattctggttacaacagaaccagagtattttaccaaggctcaggtcagagaagatgttataagctatcaacaacaaaaggtgaagactatctgataaggggcacatttctatttggacctctttggggctcacactttaacttctcagtttcagttggagttaccccaattggtgtagtagat

SEQ ID NO: 70244 - DNA, 695 bp, Prunus persica
  Intron number 2 from transcript ppa025434m (locus ppa02543 4m.g) derived from phytozome v7.0 (chr-ID scaffold_6; pos 10463628 to 10464322 reverse strand)
tttgtctggaagagaaaccctcgttcgcattactggtatgtttaatatcatttctgattgctgtagttaaataagattccatagtttctaatcgtactattctttcttgagtatatctgcttggcctgttcgtaatacattttagttcttttgtatttgttgtcttctttaagtctagatactcatctgaatatcaaatgtggtgtgtttgtagaaccagtaacatccaattcaaaatgcatatggttgtgactggaccttgtctaatggggcatactcagcaccagttatactggtgaaactgtttcttggatacttaaatgtcaatgtcactctaaagacactttggtttccatagtcttgtctgccaaaattagtcttgagaaattctgaagcataagattggcttgcagtgtactctgtctaaaggtggttctagttggtattttatcctagtccaaatggtcttggacaatagagtatactaggaatgcaattcactctgctggttccagtttgatgtgtatatttgacatggctgtttttgtcattttcttttaagttttaatttatataaatcttcttactttgtctggggatctacatttttcctttgattaattggcgttggatgtggacctcagtagctgtatctgaagtccagattctaacaaaaaagctaaaatgtaggtggt

SEQ ID NO: 70245 - DNA, 560 bp, Prunus persica
  Intron number 1 from transcript ppa006845m (locus ppa00684 5m.g) derived from phytozome v7.0 (chr-ID scaffold_1; pos 25471200 to 25471759 reverse strand)
agggcaagttccagaacactgactctcctcttccggtaatttttctttcttcttttggattttcgttcatttgggtttgtcttggctgctgagaaaatgtagagaaagaagcttaatttgagtttggattttaagtttggaaaacaagtgaacatgttgaaaaagaattacagtagagattgtgatgtagagttgtgaattttcgttgttatgtgttcggatatctggaatttgtgttgggattagaatctgtgttgtaattattgtaattttcttggatgaaattgtcaaattgaatgctgagaaagagtgactagaattgtggttgttcttttggattgggtataataataattatgttttaatttctaaaggaattgagagtaaattcattgctagcaaaattctagttttaatgtgaagttgaagtggataaagaggaaaatatagtaaacttttccctttcctatatgatattggtcgtgccagcttcatttgaatggcactattattaactcaagggttctttcactttgtctccatgtagactgttccgggat

SEQ ID NO: 70246 - DNA, 749 bp, Prunus persica
  Intron number 2 from transcript ppa004737m (locus ppa00473 7m.g) derived from phytozome v7.0 (chr-ID scaffold_2; pos 24778074 to 24778822)
tgcttcacgaaggctcactgctcagcaggttttaggtaggtcaaatgcgaccatgtgcacgcacacaaagtttactgaaatgctataactgtcaaatccggacgtcccatttttgtattctggttggcatatttggaatgtggaaggtaataattggatgattgttaatatattatcaaattctctaagatgatctttattagaagaaccaaaggaattatccatttatattgactgtaacattaacaaagatggttggtagagggtttggaactttggagaaggcctactcttaggttaatgcttatataaagatacatgtcatctttttgtggtcattcatgaatacatgcaaaaatatagtggttataaattgatacaagattggagtaaaatagacctttgatccttgctatttatctacacactgtagttcttctgagaaagcaacatagtattattatggacagattttgcatcaatgacttttcttaactctgtactctgtggtttactggcgaagtaatgcagtttatctgtgcacttgactaatctagtaggcttcaagtccaagagatgcaacccttatgtttcttgtttcttctttcaactcattatataattactctgttttttttaaataaaaaactcattatctaattactccgtggtctttgtgaactttccttttgtagatcatccttggatgagtagtcaactgagtcagtgtgaaagtgtaggctgtgaca

SEQ ID NO: 70247 - DNA, 326 bp, Prunus persica
  Intron number 2 from transcript ppa000651m (locus ppa00065 1m.g) derived from phytozome v7.0 (chr-ID scaffold_6; pos 6018089 to 6018414)
acaagcagattgatagaacctttgcgtttgacaaggtttgttgattagaatgctaaaagtcaaactcttgtgtttcatcttgttctactttaaaagtggcactaaggtcttattagatgaaaggaattcatgggttttaatctgttttggctcctgaagttccaaaatttgaataatgatttttcctcaattttagtgaagtaaaattgaaatatgttgctgttgttgtgctacctcttgttactttctttgcactgggaaatgatcagaaagctggataatgttgtttaggtctttggtcccgcatcccaacagaaggaattgta

SEQ ID NO: 70248 - DNA, 693 bp, Prunus persica
  Intron number 1 from transcript ppa021820m (locus ppa02182 0m.g) derived from phytozome v7.0 (chr-ID scaffold_3; pos 3648931 to 3649623)
ttgtctccgctaaaacctcacctcttttaccattcgtaagttatctctttatctctgtctctgcacccagatgcacagtacatatttggaccctatcagttaaaatggtatttttcatgctttatcttagtgggtttttattgtttttaaaattatgttatctgggtccaattggaaatttggttatgagggttgttgatgactcataatttcgactagttgtatgtcagcttctgttagttgaattgttatctagatctgtatgaaaatggggttatgatttttcttttcttacttacttcaagttgcttttgaattgaaaaaaaaaaaaattggctcaatgaaaaagagtggttgttcagtattggtccactgaaacttaagataatctatatgagtaaacaaccgtattccctggctctatcaagcctttttgtttttgttcttcacatttgtctttctgaagaaaagatttttgccatttgacttgactcagttatatcttgaggaattgattttctgattgctacttttaaggagcaaaatcgtctgagtgactccaatagtaatttttttgttgcaataaatatctgaaagaaaggattctgatttggttttcctgtttggctatttatcaaaaaccatattctataaagtttagataagtttcgttttaatttcagttcttttcat

SEQ ID NO: 70249 - DNA, 452 bp, Prunus persica
  Intron number 1 from transcript ppa017270m (locus ppa01727 0m.g) derived from phytozome v7.0 (chr-ID scaffold_5; pos 6811085 to 6811536)
agtctccacacaacaaaactagttgtagggctcaggtaactttgttttattaatgttttagtttttgttagatgagctagctagtgatgtgcattggactaacccgtttgtaactgcttctgtaaaagacactttagctcataagcggtttttttgagaagcgcttctatttctattagaagtacttcaagtttagtttattaaaaattcaagtgtttccttgaaaaaaaaaactttgaagtgattcttgaagaagttcctagagtatttttgtgacctaaaagcagccccaatttcctgtaatctaaatttttgttgctcctatatgtaaacaagacaacaacatttcttcggagaaaaaattgaaatattctgatctgcaaaagaaataaagttgatgtattcttgtattttcaggctttagctgcaattaaagaagtagtgaaccgata

SEQ ID NO: 70250 - DNA, 528 bp, Prunus persica
  Intron number 1 from transcript ppa012250m (locus ppa01223 5m.g) derived from phytozome v7.0 (chr-ID scaffold_6; pos 26928650 to 26929177)
ttcagtcgcacaagcccattagccttttcttcaaggtctgtagccttttcaataatctgtcaaatttttgttttttattaacttaatcaggttcttgtgattaattgagtcagtaattggtcagtttgatgggaactgttatttttgcgtcggaattcactgccgagtaagtttgtaaacgttgggtttgtgagttttatcaatcttgtgtatgattaagacgtgcatttatatttcttatgttgatggcgttgttgaatggcttaaagttggtatttttcattaaaatttattagatttggtttaacaaattgctattttgttcttgttgtgcgtattctttgtcattagagcttttcaaatgtatttgattatcatatagtcgccaattttgttttttgttttgtttttggagaagaaccctattttcataattcctacttccttaattgttttcattgtgataggtgtttcttgttgcttgtggttgctatagggttaagtagtttgtgctttggggaaatttac

SEQ ID NO: 70251 - DNA, 451 bp, Prunus persica
  Intron number 1 from transcript ppa005263m (locus ppa00526 3m.g) derived from phytozome v7.0 (chr-ID scaffold_1; pos 25962973 to 25963423 reverse strand)
cgttcccgccgcctcattctttgccgtcactttcggtactgaatttgctttcaattcctcttttttttttgttcttttttttcttttgtgtgtgtgtgtgtgtgtgttttgcttcttgaaaaactctaacttggttgaaatgtgggttagaaatcaggaagtagaagcctttataattgattattagcaaatttcaactggcaaaaagcattgttctttttctgtttctgtcttaatctggtccatatataaatgccgaatgtagacgaggatgacacttcccctacctgtcgataaataccctttattgcgcttgagataatcaaagtcatttttttgttccgccattataatttcatctttatgtttaccatgcctcccaaattggtgcactaatttatgtcttcagctgacagttttgtggaaattggtggagaaaatccttgttcca

SEQ ID NO: 70252 - DNA, 928 bp, Prunus persica
  Intron number 1 from transcript ppa018622m (locus ppa01862 2m.g) derived from phytozome v7.0 (chr-ID scaffold_1; pos 43781297 to 43782224)
ccgctcgtatctatatcaactttccaatagaaattcaatgcattattttttcgttcataaaactagtggtagataaggtgattacaataaatttgtaatctttatatacactatatatatatgtctctattttgagttatttacactaacattttttgatgtttttgactttttctcaaaacacattgaggttttagaaatgacaagaacaccctttgaggttttaaattgttttgacaaaactctgtttcattgatttttcatctaaagattgatgattttataataaaaaattctccaaatgacaaaattggcttttgagattatactgcatatattttattgagattcattttgtcatttacataaaaattttttttatatatataaatgaaatcattaaacgaaaaagaatttgtgaaaaacaaaaagacttgtgtttttcttcttcttttctctttttcttttgtgagtggacattgtgctcgtctcttctcttccctctcctttgatgcctctttcccctatgcttccttgcattttcctgaccttcaatcttagccgtccagtagatcgtgtagccaataagatattatattttcactgttctccccacacgggaacttttgcttttgttgactgaaacgtttgaggaccttgactatgcgtatttcgaattattcatctgcgctgcaacacacaaaccactgcccagaaaaaataattgataacttcttctgctcaagtcggatcggaaggccaacttgtgcctaatttgttgctggtctgatctgaaccgatagctcctccagtatcaattaatggatgccaggaaagcccataaagcatcctcttcatcctcaccatccacctcctcatcaaaacgtttgaagtacgacgtgttcttgagcttcagaggtgaagacac

SEQ ID NO: 70253 - DNA, 623 bp, Prunus persica
  Intron number 1 from transcript ppa004030m (locus ppa00403 0m.g) derived from phytozome v7.0 (chr-ID scaffold_5; pos 4405897 to 4406519)
gggtgtggtgagaagtgcttccactttgtcttcaggttagcataaaaaaaattcaatttaatttgagaattgaagtctatgaaaaccatgaatttataaaagaattatgtgttcgagataatatttgatgtgatgattatactttggttttgaaagactactaattatgtacttaggtggtatgattttttttctgtattttttttttggttcttctgtgaggaatgataacttttttttcttttcctaaatctttatccgctatcacatggagaagaagaatgttgaaattttattcatgagggtataaaacctttgaatcaatacgatgttcaagttttgatgaacctcaaataaataaataaaaggtcttatattagtcttttcttgttctgtcttcaaagtctccatcctacgagaactattgaatgtttttatgagctatgttttctgttcttcattttgttttcttgttcaactatcatattatggttgcgtagatatttgtatagattgtaagggcaaaaagatgtgtatcttaaaaaaaggagatgggttttttggctagctgaaaatttcttcaatgttttgatattgtcataggtgcagtggactctgagaaa

SEQ ID NO: 70254 - DNA, 446 bp, Prunus persica
  Intron number 1 from transcript ppb016104m (locus ppb01610 4m.g) derived from phytozome v7.0 (chr-ID scaffold_2; pos 15611317 to 15611762)
tggtttgttattgtgataagaatattttattatttttatatcaaaatattcaaaataaatttaaaataaatcagaaaaatgcaaagtcaactcctatgaagtcattgatatattttcttccccctaaaccttgaaaaaattcattttgaataacaaaaatttaaaatgaccatccaaaataaaattgttttgatgagtcataaaatcacttctagttttatggtttagggtttagagattagagttgttatttattggggtttatttttaaagtataatttttgggtagtctagggtatatattaggctataaaaccataaacccttttataaacttaattttttaaattatataatttagttttaagggtttagggtattaatttttaacgacggtagttgagtcgtggaatatatatgttacgtcgtgcagtaaaatatccgac

SEQ ID NO: 70255 - DNA, 853 bp, Prunus persica
  Intron number 1 from transcript ppa022406m (locus ppa02240 6m.g) derived from phytozome v7.0 (chr-ID scaffold_1; pos 37173246 to 37174098)
aagagagctctcttattccaccgttttatttaggggtgggcactcaaaccgacgaatcggaaattcgaattgaaccaaaccaaaaaacaaaactaagttgatcaaaaagtgaaaaaccaaaccggaccggtttggaccgatttcagatctggttccatgtcttcaaaaaccaaactgggctgaactgaaccggtcaaattaaaaatatatataatttcaatatatatttatatttaatgctatatttttaatttcactaaaaataaaactaatatttattcaaattcaatttcaaaatatctttcttttttaactttaatatttatttttatataaaattgaataatttgttaatttttaaataaaataataatattttaattgagaattgtattaaaaaataatttttataatccgattcaaaactaaactggaatcgaaactggttcaaattgaaccgaacagtttttgaattttttttcttaaaatcaaactgaaccaaaccgaataaatggtgccaaatcagttctaatttgagacataaacagattcaaaccgaacttttcccacccctagttttactgataagctagcttcttcaacttacatgtatatttatgtcactaaataatttgcagactttgtcggaccagccactaactgtcagttaccaaaaagatgatgttgctgccactgacaacgttttctttggttacaaccaagacgctgccactgccgctgctgacaaacttttctttggtcacaatcaaaacgttgtcactgctgctgacaacattttctttggtgacaaccatgaggctgctgttggcaatcaactcctcaaagacccaac

SEQ ID NO: 70256 - DNA, 341 bp, Prunus persica
  Intron number 1 from transcript ppa001887m (locus ppa00188 7m.g) derived from phytozome v7.0 (chr-ID scaffold_1; pos 32125273 to 32125613)
gcgtcaagattgccgatccttataggtatggtacaaccttctcttgtctatatatttcccaccatttttttttcgtttatttgtttgtatggaaattgaaattcattatcgaagaagattttctttcaaggttttcaatagtatgtagcatttgtacttagagtttcaatcctaggccctagcatttgtcctgcttgtaatctcaacgaggatcaatcgccgacttcttgatgctgctatttttatttatttataagaatttgatcgaattttgattttctgactcttttggattaaatcttttaggcttgaagatcctgactcagaagagaccaaagatt

SEQ ID NO: 70257 - DNA, 404 bp, Prunus persica
  Intron number 1 from transcript ppa022531m (locus ppa02253 1m.g) derived from phytozome v7.0 (chr-ID scaffold_2; pos 18396446 to 18396849 reverse strand)
tctctgtcattgcaaatttctccttcggcttcctggttagctcctcctgtttcaatgttacaaacttctcctcatgctcatgtttctaaatacaatcttcgtttaattttgcaataaggttttatcattttaaatttcataaacttgtttcaagaagtctgtctcacttaattgtgttagctaaactattcccctctgggatagggagttagaattttagggtttctcttggggccattagcatggtttgaagaaaactctttgtgacaaacaattgaatgcttatttgtgtgtagaagtatatctatttggtcatttttgtgagccattctatttgatttcagtggctaaaacttaaaacaaactaagcaatcaattaatgttggatgaatttgcagcttggt

SEQ ID NO: 70258 - DNA, 1030 bp, Prunus persica
  Intron number 1 from transcript ppa001804m (locus ppa00180 4m.g) derived from phytozome v7.0 (chr-ID scaffold_4; pos 20057108 to 20058137 reverse strand)
ggcagtactttcctttagctgctgttgttggccaggtaaaatcccatctctctttcattcgaaaaatggtgctttggctttttgattctgtattttgctggtgaaatatggcgtgggtttttatgttttctggttttactcaagtgggtttagcttttggagttttttttttttgatggaattctgtcttcgaagtttaatttttcgtttatttgtgagtgtggtatgggttggtgtgtcatttgggtacattgatgttgggatggttttctcatagatttgacccactttttttggttggaggcgatatatttggcatacattttatcaggactaattttggagctgaattttctatgaattggatattaattcttaaactgcaatgtgattttttgttattcaaatatcacttttttaagcaggtaaaatgttgacaaatgctagctattgacatttttgatatcatgctatatttgacttctttaatatctgtataccaatgatgtattgttttggtcctatcaaatttgtaagctaataagaaagatacgttcttgagtatgagggtttcactggattgctaaaaggtttaacgaaagctctgacaacaagcgaatacaaacggtgcttccatagcttaggacattaaccaaaaactaaatgggatagtttaggtgttgtgcattcatgtcaaattgcaactctctacatctttagattggttgatgttagatattttcattatccatttgttattattcttttagtattagatgaacttagttgtgtgtccagattttcagtatgaggctagttaggcgtgcatggagaaataatgtcataggtctggagtcctttgaatttaattttgtttttgttctatttcaagccagctggctggatacaaaatttttttttccacgttttagtacatattaaatctaggataactgccaacttctaccgttggttaattagtgaaatttccatatatgtgcattattttgaatacttgttattttatagg

SEQ ID NO: 70259 - DNA, 785 bp, Prunus persica
  Intron number 1 from transcript ppa012539m (locus ppa01253 9m.g) derived from phytozome v7.0 (chr-ID scaffold_6; pos 977366 to 978150 reverse strand)
gagatcaaagtcaccaccaccattgctacacttttgtaagccatttgcattattcttagcttttttgtttttactttaccatagaaatttctgaatgggaggtaagattgagtctcactccaagctgtggtacgtttggtttggagagatttctattgctcaagtgtttactctaaacatgagcacaaatagatagcttcaccttctttcctcctttgcaacctgcccacccacccaccacatgtaaatgtcattaattaattagttcacatatataaaccgcgtttctagtctcttacataaacaacagacccaatgcaaaatggcaaagactgatttataagttatcatgcattgattgaggttgtagtgattgatgtaatgtgctagcttatgacatacaattaaaaccatttaattattttgacttttattagagaaatatcaagacactactttccgcattaatcacagattaatgcatatgaaaaactcattcatcacacaccaaccaaaaaacaaaataaaataaaataaaaaatctacatacatgtcaaattgtaattaacaaaaaaataaaaactcttactttgaggaaggaggcaagtgttttccgtaaggaaaatatcatgacagattaaagtaaaatggctcagatgcagtgattgactctccaacagtacagtagaagttagaagaagtggtcaaatttaagacgcattcaaattccaatcaaatcaaaattaccagagaaaatcaaactcaccccaatcgacaacgagaga

SEQ ID NO: 70260 - DNA, 637 bp, Prunus persica
  Intron number 1 from transcript ppa007569m (locus ppa00756 9m.g) derived from phytozome v7.0 (chr-ID scaffold_9; pos 1545968 to 1546604 reverse strand)
cgtatgttctggtttaatctaaagcttggagactcatttcattaaaagccaaatgatttgatttgttttgttacaaaaaagattagggaggagaagagacccgtgttcaacttggttgtctatggtagtcttcaagtcttgcaaacgtgactattattattattattttttaaataaaagctacaagagaggagtttcttacacatatattatcacaatgttataagagttcgaacgtaggaccattaacctgcaaattattgacatgttattgatatgttattgctaagtcatgaatgttatatatatatatgcggacatctggacggtattatcgtgtagatgccatgtattttctactacctctccctgtttataatatatatatagcatccgcacgataataaagttgcggacatccgaatgaaagaataactatatatatgtgtgtctttattatattttgaagagaaaaaactatagctagtatgaaaccaaccatttatctaatttgaagtatatgtaaatgatgatctctttaatttatagttaattaaatataatgaaattgatcatgcacttatatttgtgatttcctaaagggctattgcagagtatctctcccgtgacctctcgc

SEQ ID NO: 70261 - DNA, 431 bp, Prunus persica
  Intron number 2 from transcript ppa009741m (locus ppa00974 1m.g) derived from phytozome v7.0 (chr-ID scaffold_2; pos 6172350 to 6172780 reverse strand)
cagataccaccgaggaaaagtgcagcttcatacaggttatgctcaactcataaaaatagaaaatgtgatatgcatttagcagtttatttgtgattaatctgatttatttgtaactttgatgcttctgttccacacattgatcagttacctggaaatgaagcttacagttaggctagattgtgcgagcttttaaaagctattttgtggataagttttctgagatggagttggattggcaacaaatcaaaagatccaaaaatagacaaacaaatggagatgagttttagtaatcctgagattggatgctttttaatcatacaatgaacaaacaaaaagaagagtactcttctattggaattaataactgctggaactcttcattgcatgtgttggagttgagtttgaagtgtctgaagtttatttcagggctg

SEQ ID NO: 70262 - DNA, 561 bp, Prunus persica
  Intron number 1 from transcript ppa009741m (locus ppa00974 1m.g) derived from phytozome v7.0 (chr-ID scaffold_2; pos 6172743 to 6173303 reverse strand)
tctacttggtatagttcattttgatatacaatacctgatgtgccatccctgtgttttcatgaatttttgtagtgattctgttgaagggtatcttgggaatgcaatggaaaaggcataattttactagatttcttcatgattgttgatgcatgtaatagttgaatgaattttgttagcgtgtaagttagattaatggctgaatagattggcatttttttctttgttcttttggtcaatttgattattgatgttatagttaaatgaacttgttggagtgtaaactttggttaatggtgaaaatatttaaattttttgctaaaacaagttgatggtgagatcgtttaccatttagtaatttattggtgcttgttgggatctatcaagttgtacaaagtcatgggttttaaattacaattgagcaagtaattataagaaatcgacaatgagagaaacgtatggttactgttatgtagggttcttgaagttatttgtgatgtcaagctaagctattactttgtttgtgcagataccaccgaggaaaagtgcagcttcatacaggtt

SEQ ID NO: 70263 - DNA, 380 bp, Prunus persica
  Intron number 1 from transcript ppa023392m (locus ppa02339 2m.g) derived from phytozome v7.0 (chr-ID scaffold_1; pos 39309931 to 39310310 reverse strand)
cagtttcgattccattggttgagctccgaagcaaggtcattgccgcctccgatcatcacctcatcaactccaatgccaatcgctcgagtcatcttcatcgtcaccttcacatcaacgagctcgtgaatcaaactgtacttgtaagctcgatcgtcactttcacatcaattttccatccaagaattcgaaccgccattccatttgaagtttctattcattttagctagctctgtcttcttttagttttttgtttataaaaaatttcagtatatttctattctactgtaattttatttacttttaacctttttcgttgttgctgaaattaatgatcgattgatgcagaggaaaatccccaagccgaaagcgagcagagagca

SEQ ID NO: 70264 - DNA, 823 bp, Prunus persica
  Intron number 2 from transcript ppa008148m (locus ppa00814 8m.g) derived from phytozome v7.0 (chr-ID scaffold_6; pos 19433352 to 19434174 reverse strand)
gcgtccaggtgagtctttcactgacctaacattaggtcctgtcaaattttcaagtattgtaatcttgcacctttgattttaaagatggcatcatgcgcctcttggctgtgtggatactgattagtcttctgccatgtgaagctttcctagtgttgaagcaactgtcagaaaacaatggcattttgcgaaagttttccctgtgcccaaaaatgaaatttcgaaaaaaattcagcatcgtttttctctgaaaacttgtacttgtcatctaaaagttaaatattgggctgtaattgtttggtctttgggtggaagttccctgattggtttggcatattctgtggtttctttatgttcttgttctacaaattaaagcccagcgcctcatttgtattcggctttatccaagcatttggtaatggccattctgctgatacagcttttttcttgtcacaatttctgcaactcaatcacttgatatatttttctatcataaataaaatatgcgcttgtatttttgcagcaaactatatctcttcgatctaattgttgcacggaagaatgaatttcattttaagtttctctcatctctgtactttatatattaattgctgagactgtggtaaattttgttttcccgtgctgcttgattttttctttaaaagaaaaagtaaatgtgatgtcttagttctgagatgctgtttaatctactggttgtaatttcaggcatttgatttcattaactttatgggcaattgtatcagtgatcaataaaaaatcattcactgcaggatccgggtaaccttggtacgctgctcagatcagc

SEQ ID NO: 70265 - DNA, 417 bp, Prunus persica
  Intron number 1 from transcript ppa008148m (locus ppa00814 8m.g) derived from phytozome v7.0 (chr-ID scaffold_6; pos 19434430 to 19434846 reverse strand)
ggttcagctctcgttgtgggtgctacgcctatcaggtttcatctttatccttctcttttccacttgaatctatgtgggttctttgcaataatcagtttacttgcacaaaactcagatgggtatatgctatttttcttgtcctgtttgattgctgagaaattggagaaagatgaaaaagataaaattccaatgttgaaatctttattcattgcatatggaactggagggaaggtttaattttaatgttctaaacttctgtcctttttttgtgttactgctactgtattgccgtctaactgtgttccttgcatttgattttgattttgtttttcctaaacataataaaacctggtaatatgtatgatgaagttttcattttcagggaaatatacaggttccaaaggtcatcgcaagaga

SEQ ID NO: 70266 - DNA, 1019 bp, Prunus persica
  Intron number 2 from transcript ppb021627m (locus ppb02162 7m.g) derived from phytozome v7.0 (chr-ID scaffold_8; pos 5149953 to 5150971 reverse strand)
aagcactaagtgtcctatcaggcttgatcaaggaagtgagaaggatagttgacaagcttcttcttgtcaactagcctaaatgtaagctcaatttctctttgagaaagacctccaaattattgtctttgagatgtgagagacagtgtctctgagagaggaagaacttggaaccctaaatgtaaaccgcgaaaatgaatgaaagcgacaaatttatagaataaatttttaaaaccaacggcggtccttaccaaaaaaccgccgtttaaattgtaacatcaacgtcggtattactgacgtatattacagaactccacgtcggtaaattaataatcacgacgtcttaaataatctaccatgacgcgagttattacttatgtactttaatttttgagtttactatgacggtacctacaacactactgttgtatttatttaccacgtccgaagttaaatttaccgtcgtattttgtactttatacgtcgtagttatatgtaaccgccgtattatttttttgaaatggttttatatgtaagcaacttttcgtctacttgacttacacattcgttgtttttatattcttattttatttaaatctgtcatccaaaaaagaaactttacatattgcagaatattaatttccttcgttttaaatttcctccgaaaaaaaaactctatttataacgcactgtaattgaaaaataaactgaaaggtcacgggaaaaaaaattctattcataatttaaaaattaaaatccacgtcggttatattaaacctaacgacgttaaatgaaatgagtccacgtcgaacgaaaaatattgcgtcgtgttagttaaaaacgacgtagttaaatgtaaccgccgtattatttttttgaaatggttttatatgtaagcaacttttcgacttacacatgcactgtttccaaacccgattaaaaatttcaatctcccaaagaaaccttttcgtcttttttccttgtcagagcattgtcagagtttctcatcgtcttcctctcgt

SEQ ID NO: 70267 - DNA, 727 bp, Prunus persica
  Intron number 1 from transcript ppa005017m (locus ppa00501 7m.g) derived from phytozome v7.0 (chr-ID scaffold_1; pos 24686631 to 24687357)
ccccttttcttagagagaccaacccaagttcacaggtaagaggcttctgattatttttccttatttttctctgttattttggactttattgatatctctgtgttaatcttctaaatggggttgatgggtttttttttttggtcgttaacttgaagtttgatttgttggtgaagatctgtgatcgttgtctcattggctcttctgtaatttttaactcttggccattctcatcgcttcttttcttggttttgtccacttgggatgtcgttgtttgggtaattctgaaaaaaagaaaaaaaaagaaaagaaatcttgtgttatataatctttagacttgcgatttgatgtctgtgattgcgcttgctcttattgctttatttcttaaatattaaatagctttcacaaattcaggtgtgattttgctttgcgttgcatttagtattataatcagaatgattcttccctccagtgaactagtttataattaatatgcagtgttattgttttggctaaatgagttctcgcttagaaaaacatactgaatttagaaataaataatgagttctgggatttaggttggctgatgagtgggtcgatattcaagttcccatctccacaccatatattttattttttgaattttgaatattggctttccttcccattctcattaatttttctaaaatcctcaggttgtgtacataaatttgctgccttgccttctcct

SEQ ID NO: 70268 - DNA, 593 bp, Prunus persica
  Intron number 2 from transcript ppa005501m (locus ppa00550 1m.g) derived from phytozome v7.0 (chr-ID scaffold_8; pos 19278065 to 19278657)
tgcaaactggagaggaggtggctgttaagctggtatgtgattaacgtttaaatagtagagtctgttctgatgtttagtttgtgggtaaatattttctaagcgttcttaagttttctaacatattattcaatgtgatacctgacgggatattgaagttaatttcatgtttcatcaagtcatttttccgttcaagaggttcagaacacactggtgtcactagagtagatcaaagaataaatcaaatactctctcttttgaatctttgtgaataagagtaagaatggtacattagattttctagttgacaaactctattcgagttacaactgaagcttcatgttatatatcttccgtttcatttattatcaatgaaaagagacacaaagccatatctttttttaaatctctctttattatggttatggatgcatttcgagctcatgaacttccattctattacaaccttgttatattccctcattggaatttgtctgcattcaactcattagtctacaatcattttgcatttgatgggatagtttattttccaaatttcaggaacctgggaagaccaagcatccccagcttcacta

SEQ ID NO: 70269 - DNA, 776 bp, Prunus persica
  Intron number 1 from transcript ppa012752m (locus ppa01275 2m.g) derived from phytozome v7.0 (chr-ID scaffold_7; pos 17761321 to 17762096)
aagttgaccaggcaaccctatttgatctcattctggtacgttaaaaccctatcttaaccctaataatgatttgcttatttgtcgcgattgttttgttcgagtatagggtttcggaaattggggcgtggattaggttagggtttccgaattagggattgggttcaatcttgtttgaattttggatatgtttctatctttagagattaggtttttactcaattagatgttttccatgatgattgggttggtgatgctgcgattaaattgatttggctttctgttcgggatttgatttgggagtgtttgttaatttgaattctttactgatgcgatatcttgatgaagaaaatttgtgcatgtacagcaacttcttcatgtatgtactgtgcatatgttgaagttgagataaagatgcgatagcttcataaattttgttgccttctctacttatatttattttgtgtttctatagaagttgagataaagttcactaatatgagaatctgtctcttgaggtgctagtatgtagattgtggtaacaattaactagttttctttgtaatggtattgttctagttcagctaatttgattatgaatgttatgtatatgtatgttctgaaactacagtaatttggtaatttttttatattgttaataggggtggctagaaagtctgacatagctgattgctgaagcttaccttgaatatttttctaatatgttgtgatatctgttcacaggctgcaaactacttgaacatcaagctcctgctgga

SEQ ID NO: 70270 - DNA, 626 bp, Prunus persica
  Intron number 1 from transcript ppa007591m (locus ppa00759 1m.g) derived from phytozome v7.0 (chr-ID scaffold_1; pos 43758573 to 43759198)
tacgtcgttggagtttgaacacttgcatatatctggtgcgatgctctttcaatttctctgttatcgaatgttttttccttgttcgtttcttgagcttgagaatctgtttggttgccgagaaatggaagggaaaccacggaaattacagtcagttgcctagtttcatctctctatctctttttatttaaaaaaaaataaaattggaaattggaaatttgaaagttgggtttattctttgcttggaaattgagaaatcaaaagtcctctgttggggcagctgagcctggcacgactttaatttttagtctttttttatagcaaaatttcacgatttgggtttgcgtaatttcctttgctctctcggccttcatatatgtatataagattttcacattttcacattttatctcttgggatttttaattattcaaaatttttatttgaatattaatattgtggatctctctcatatggataaaggtcaggtgccatgtgcttgggttccatgattttccttattatttgattaatttattaactgtcttcttgcgtgcttcattgattaaacacgttagtctgtataaatctctgacctggtttttttttctcttttaattgtatttcag

SEQ ID NO: 70271 - DNA, 418 bp, Prunus persica
  Intron number 2 from transcript ppa001233m (locus ppa00123 3m.g) derived from phytozome v7.0 (chr-ID scaffold_3; pos 2333490 to 2333907)
cgcacttgaaaggcttctataagtaagaaaatttgtatcattttgtaggtaaatcataagttgcagttgtgaaaaattatttttccaaaggcaatgaagtactttcaggcgggctttttgtggaagatgaaatctgtaggctgtcaagttacacaaattcttcatccttacctgtctgtttggttgctaagatagagacagaatacaagaaaaaactgaatttagaattaccacttagctaagcttaaaacaaatacaagcgcctgtagtttggaaggaaatagagggaaaaaatttcatttatcaaagaaagtgggcctttaattgtgttttatttgcttttgtcccttgtagtttctttgctaccaaataaggtttttaatgaaagcatttgacaatttgcacagcacttacttgg

SEQ ID NO: 70272 - DNA, 706 bp, Prunus persica
  Intron number 2 from transcript ppa021872m (locus ppa02187 2m.g) derived from phytozome v7.0 (chr-ID scaffold_193; po s 3820 to 4525 reverse strand)
aggctcagctccattttaagcacctatctttctaagtaagttacactatggtttaaatatgtgagttcaaaattccaaaaatgaacagggagtggttgtaactatctatgttcatgattttcataaaaattaaattatgaagggagggggatttggtggaacatctaagtagaagaagcaaaactatgtttcctttcttttttcctttagcaagcattgtactttgcaccaattttgttttgtttaatcttgttctttaagaaaaaaacttatgaaggattgttcatcatttgtttcattgtaaaaaaaggagatttggaaaaccaaataccagttaagcatagggtatgtcaattttatgtttctaaaatgaatcatatgcaattagagcccatacatctactattaccatagagtcatagtggttttacattgtctgttggattgaccacttattcaaataggttaaattcactctttcgcatgctacgtgctatgtgcattgttttttttgcctaaccactaaaacgagcaagtacgtagtgtttccttgtgaacagattcttaaatgtgtatgtgtctgcttatttgtgtgtgtgctttctatgcattattgaagtttttattgttagtgtgtttatgggcttgtattgtttccagttatgactttatttgtatgtcttgatcctgcttgtgcatcatagat

SEQ ID NO: 70273 - DNA, 567 bp, Prunus persica
  Intron number 2 from transcript ppa006490m (locus ppa00649 0m.g) derived from phytozome v7.0 (chr-ID scaffold_5; pos 5677928 to 5678494 reverse strand)
tgacaaaaatcgctgttttgaggagactatttctggtgtgccttttttgtacttcaaatttatctttgaaatcattgtatttgtgaaaatgtggtggggtttacttagggttggaatgtctatggtacaataaatcaaataggtgtgttcggcaaccacaaaaactcatgcccttatcctacatcaaattgtaatgccatttgaaagttgaaatccgagacttatatgtacacaagaagataaaattttgtatgcatcctttggaggaagaaaagaagtcacagtagaatactgaaagatttcaggttcaagtagtcttggtgtgtgtgtgtatttctaggagtaccatggttagaaatacaacctgccttgagaaatatatcgcataatactactaaatagacagatgggtgttagaccttagagttggaagatggcttatgctttctgcttcctttttggggaacctgttctcagtttggtgttggttagctgtcattctaaagcagtgcatagtttgatgttttaatgtcatcggtttgccaggtacctttcctgtgactgtat

SEQ ID NO: 70274 - DNA, 906 bp, Prunus persica
  Intron number 1 from transcript ppa010911m (locus ppa01091 1m.g) derived from phytozome v7.0 (chr-ID scaffold_7; pos 17236566 to 17237471 reverse strand)
cattttcttgacgacaattccattgccattcaaaggtactctggttctcttcctctgtctctaagatttgtgttgtgatactctttttgcttttagctacggtttcttcaacccctgaagttttcctgacagtttctcttattgggtatctaatttagggtaaaagcaaaacatgtaggcagttgggtgatgcctcaaagtatttttatggtttaagttagctagaaatgcaattaaagatgttgaattggagttaataaatgctaatcgtgtgtgtgtgtgttccaaaactagatgaatatagcagaccaggataaggaaggaacagttgactagcttctgaatttatgtttgctccccgaataaataattttttgaacatttttgtgatatggtgaagaaatttcttttggatcttacccttatgatagtaggcgatttccaaaccaacgaagatattatggcattaccgtgtcccataaccttgttggaataatggaaaatctcttttttgaacaagaggagttaattgtaagagttatctttgaccgcatgccattttacataggagaaaatagattactacaatttgataatggggcaatctctactgttaatgattttttgataatagcttttcctgaatttaattagagttcataatgtgtcataatatttggttgcaatttgtttgatgatcttctgaaatatgctgcttgttggaaaatattgtgttctgtttgggaaagaaagcatttctttttatcttttggacaatgcatttgtaaattctctgtgtaagtgaacttggtgccttttattttggaagcacctttgcattccgagccagatttgtgaaaagtatctaatgtttttgaggcaactcagcagcttccaattttggca

SEQ ID NO: 70275 - DNA, 857 bp, Prunus persica
  Intron number 1 from transcript ppa017346m (locus ppa01734 6m.g) derived from phytozome v7.0 (chr-ID scaffold_7; pos 14717075 to 14717931 reverse strand)
taatattttgttacagcaccaaggaagataaaaaagtttactactttagggggggtttttttagactttacaaatagaggcttcaaattatggatcttgtacatcatttccgaaccgaagaggttatagtttttagttttcatttttttaactagagtatagaggtaaaagagtgagaatggaaatgagaaagaaagggaagatgagagaggaggatgagaggatgagtcccaaaagtgaaaacaaaaacaaaaactgaaatctatttgaaatattgattttcactttcaagtttttgttttcacttttgttactcttccctctcatcttctccttcatctcccctttcaatctcatcctcactcccgttctcattctcattttcctctatactctagcacaaataatgaaaactaaaaaataaaattgcttatcaaacgggcccataggtttttttttttcctgcacatgctgcaatagaattgtataaacataatttgaatgaaagattacttgattgtcttcttcaaatagtagtcaattcataagttattctcaccagattgcaattataattagaattattctcaatttacagggacaacacaacaaaactaacacggatggtattgtttcaagcttttctctgcgggctatttgggtaactataatttttcttcttcttgtttttatgcaaattatttaaacttttgatcatgatttttctgtttaatcaatcattattagtgtgatacaaatttctacatggcatgtggaattcatatctccaataattaagtaaaaattatttcttaattttaggggtttacttctcaaaatttatatatagagaacct

SEQ ID NO: 70276 - DNA, 903 bp, Prunus persica
  Intron number 1 from transcript ppa000452m (locus ppa00045 2m.g) derived from phytozome v7.0 (chr-ID scaffold_1; pos 43117471 to 43118373 reverse strand)
aaaccaagctccggctcgccgatcttcgccgacaggtctttctttctatctctcttgtattttcattttttctttttcatctcttaattttcatttttttgtcttttaaccctcatgaaaagttgtctccttgattttgttctctctctcctttttcttgaatttgtgattttctgtttgctcactgagaaaatttgatcatagtttggttgatcgaacgactgaactgacccaaatagttcagtcaagaactgttttttctttgaactcttgtacgtgttgctgtgagttatgtagttcaatattaaggatccatgacttgtcatcaaatttttcatacttttttttttccttcgctctgaattttgagataatattcaagttgttttgtccctattgttatcttttacaatctattttatcggaattgaactgagaaagcaccgaattctaaaattttatgggtgaatttgtccgacttttttctcctctagacttaagtagatcaaaaacaccttgggctgcagtttttgttttaattttacttttcataaattgttcgattgtttatacctttattttaaagtgtgtttgcttttgcttgtgttaggtgaggttgtttgaaaacccgggttttcttccttttcacatgggtgtctctattttcaagtgttggacgaataacaattgttttttgggttcgataaatgctctgtattttttttttcctcttggcgaaggattaataatgatgctttcatctctggtttactgataattttcactttcttctcaaacaacgagttttgtgacctaactctttgttgtgtcacttgtatgtagcttttagcctaaattctgacattgccaactttcatgaattcgtttgagtacaggaatact

SEQ ID NO: 70277 - DNA, 396 bp, Prunus persica
  Intron number 3 from transcript ppa012554m (locus ppa01249 0m.g) derived from phytozome v7.0 (chr-ID scaffold_1; pos 8863701 to 8864096)
gttattggaaacagaggccttggcaagctcaagaggtaccaatcacaaactcaaatcaattatttgttgatgcatgaatttgagtttgtgttacaaccacatgtttgttgttttggaatttttgagtttggttgagggaggctgccattgctttccagttcgtgcttggctgctttctttggttatcaagttcctattgacttcttggggcccatgatggcaataataatctaatggctaccatagacttttcttcacagttatactgtttgtactgttatgaaacgtgggtttgtgaatcaaaccactttggataattaaaataaaaaaatcctcatctaatttcttttgtgttttgattggatctggatgtgtttgttgttttgcagagtcatc

SEQ ID NO: 70278 - DNA, 274 bp, Prunus persica
  Intron number 1 from transcript ppa010425m (locus ppa01042 5m.g) derived from phytozome v7.0 (chr-ID scaffold_6; pos 23659429 to 23659702 reverse strand)
gatctagttactgcttaaatgtgagttatgataagctttagagtatatgtatattttaaagttgtgatctttgtatgaaaaaagcttactttctttctgaatttccatttcacagtgttggaaatctcaaattcggattgggtttttgaaagttatgaaagaaacgaatggaagatgcttgaatttgttaattatttcctgtattgttgtttactttcttacatttcaagttgaggtgatatggacttattttgatctttatttttctagggaa

SEQ ID NO: 70279 - DNA, 925 bp, Prunus persica
  Intron number 1 from transcript ppa010065m (locus ppa01006 5m.g) derived from phytozome v7.0 (chr-ID scaffold_2; pos 25420518 to 25421442)
gaagcccgttcacaaggttttgggcggtggcaaacgtactgtatttccctcctctctttctccataatacattattaacatttatgtttgcatgaattcattgtgttttgtttgattgatcagaaaaggtggaatttaaaggaaaactaaattaggaaagttaattttggggatctgattgaataacgactttgctgaattaatataatataaatgttcattcctgaaaagtgtacaaggattttcgtataagcgagctgatctcagttttttaattcgcttttgtttcttcttcatattatcgtatatgcgattaaatgaagaggtatgcagtgcaccgatgattttgttttgtttttttaaattaaattaattaatgtgctgggttgtaaaacaaagttagataaatgaattattgtagggtttttgtgtgtgtagtattagtggatagattccaattggtaggcattattcaaattgttgattttgcatactagttattttttatttttcctctgctttgtgttttatatatataatatacgtttcaaaatgatgtaatgaaaatatactgacaatattttaatagtattttcctggtttctgatacataataaatatttcatatgtttatagtatgtggtttagtagctcactttcttttgatttgctgtgttgggttgtgcccgcgtgttttcataatattttttaaaggctgtctatcactattggcatcttcattttgaatttggaaactggtgatttgtttttgaaattatgccttagaaaagctgagatactaaatcctgcaagaatttctcgaccagttttccgtttcttcatttatgactatgcctgagagaagaaccttgtaccaaaaagaccttaattataatctaatgtcagtatttcaatgcagctgctg

SEQ ID NO: 70280 - DNA, 668 bp, Prunus persica
  Intron number 2 from transcript ppa013881m (locus ppa01388 1m.g) derived from phytozome v7.0 (chr-ID scaffold_6; pos 4663299 to 4663966 reverse strand)
caaggtttagattctctccctctgcttttcccccctattctgcttataattatttttgcagcatccatgctattgcttagaagattgatgggtttctgaattgaaatttatattgaacaatgaataagttaggggagattgtgctatccaaactgcctttctagaccgcccattcaaacaaaaattcgcctaatcaatggttaacattaagaattatgctgggatcagtggccccttgaaataatctgcatagtaggttgctagagtttgcatgttaggctcctagagactctaggatctttcagtctgacatgttatattgagtgaagttttttgagtgctttataacagtatttcctttcctttctttttttggtaagttaggtctacatgcttgatttaatgattttgattgtttactgctggacttggagacggtataattagaatgttctgcgtatcgtctcttgcgccaatttcaattgctggtttcttaccaagataatggtggaaagttgaattgaccaaggttttttgttggaactaatccaaatttgagagcgtggtcagaaggtggttttcatctactctccttttccctattattgacttgtcatgttgctcttttgacagtgggaagcagaccgagtttcatattgaacctgaat

SEQ ID NO: 70281 - DNA, 785 bp, Prunus persica
  Intron number 3 from transcript ppa003930m (locus ppa00393 0m.g) derived from phytozome v7.0 (chr-ID scaffold_1; pos 45332355 to 45333139)
tgcctagtaagttttatttgtctccattttatgaacttaacagttcaatgaaggaagaaatatgctttatccaaatgcattagatagtggaaccctgaagctcaaaaatttattttaactgattgactcattttctagtcataataaggcttaaggccaagacttaaatgcttagccatttgtttgtttttttattttattttattgtatgcatgaattggtttatgcttttatctgtcagataagaagttactaatcctgttgcgtgctgagctttgtctttctgcaaatgtgcagatgtttctcctcattttctgttcaaggtttcaagtccttatgaaatcaaacggctgagtttttaattttttataattgagatcctctcctccacaaaagtgtatgcatcagtttttaggttggaaattggatcccggtcctatgtgtttagggtccaaacaactaagtacattatttcctgttattccagttccaccctagctccatcccatcttcaggactcatgagtggttctcttagaataagctagaaacaagatagtgtgcgttcatttctatatatacttactaccatgtcatgtgtattcttgttcaagtctagtccaatcttcatgaatggttcactcttaatattaatagaatctattacacaatcggactggacacttgcccatgcgtgtgtgtagactaatatatatactcatccaaaacaatgatgatgcttttattgcagatttaaaggagcttgacttgactggaaatctaatt

SEQ ID NO: 70282 - DNA, 748 bp, Prunus persica
  Intron number 1 from transcript ppa006887m (locus ppa00688 7m.g) derived from phytozome v7.0 (chr-ID scaffold_1; pos 27832021 to 27832768)
tcagctttcagcccctagagcttgttgataagcaggtttgaacatgtttgcatatgcacttagcctcatccaaagttatttcattctcattcatataaggattttgggaaactaatgactggtaaattattttctctgtttatagcaatctacactcatatcaagaatcatatgatccaaatttaaggctgggaattggaatactagcaattaaagtctcctctctctctctctctctctctctctctctctctctctctgaatgaacctttaggaacagtgtactgagttggtcaacgccgtggaccaattcttggagcaatattttttttttgggtctgattcttggagcatttgcagtacggcttagttaggcagaaccgtacgttaactgggttatactatttaaactacattatgtcaccttccatgacatgttttgttttgtgctagttttgcatttgctgtaaactacattttggcatcatgtttggtcttgttggacggttgaatatttcagcttctgaggattggttaaataagtttgatcagttccaagcttgcgtccaaaattccacattggatgctgcaaatatctttacctaagatatgacatctcatagtttaactacagagcaacaacatttgactctgcatattttcatattttcaaacaaaataagtcttctttttttggctcaattgccttgacagttttgaacttatataagtttatttcatttatagg

SEQ ID NO: 70283 - DNA, 260 bp, Prunus persica
  Intron number 1 from transcript ppa010590m (locus ppa01059 0m.g) derived from phytozome v7.0 (chr-ID scaffold_1; pos 27541982 to 27542241 reverse strand)
tcctccacgtcgccgtctcttcgagtaactctgaggtccgtcttctttcacattcctccgtatcccatttggttgcccagaaactataggaaaataataggaaatttgctgtcttatgttttctgtttgctctcagtttgaattgaaaataaaatttgtgaagtatcctcaatttgcttcaattttaatgctctcgctttaaggttgatgattttgtggctatctgtggaggcaggtggtgaaggtactactagctgctg

SEQ ID NO: 70284 - DNA, 582 bp, Prunus persica
  Intron number 2 from transcript ppa007894m (locus ppa00789 4m.g) derived from phytozome v7.0 (chr-ID scaffold_8; pos 7462811 to 7463392 reverse strand)
agttgaaagcagtttcatctctggagaagaaagaggtacactgtgtgagatccctgatgcaactcatacaattttcattacacgttctatacaccccagtggtttgtagttgatgtcttttcatagatgaaattttaaaactgtgatcgttgcaataacccctgaattctgggtttctctgtttacttcttctgactaggttttgttgaagaatattaagtcccatatcggaaacttgactaaataaaatacaaaatataatgaatggttctagtactaataataccgaggccttttgtgataaaaccccacatctactgggctttgtaggtggttaagttggggacaatatcggtgttgttagtagtgggccactagcccgtctctctgaatttaacaggtttctctgtctacttcttctgactcagaatttcattttgattttgaactatgcttgatttaaagagagaatagaattttgtatgctatgaagactggatgcggtaaaacaattttcttttggacctcatcttcattgcatttgcaggttagtcaggcagagcctaatctcactggaactga

SEQ ID NO: 70285 - DNA, 525 bp, Prunus persica
  Intron number 1 from transcript ppa011207m (locus ppa01120 7m.g) derived from phytozome v7.0 (chr-ID scaffold_6; pos 28583354 to 28583878)
cctttcctccaatcccttaatctccgatccatcatgtaagtcttcatttttacacaagcacacacacaatgcatgtatgtatctatgtgcgttgtgaggtttttggtagttgacaaagtcagggaaaatactatagaatgacgtgagaaaggaaggaaaagataagacaagaaatcttttaatctttttcaatctttatgtctaagttttagtgtgaactaagtattgttgcattgaagaatctgattagcgttcgtaattcttttcaagaatttgtttgattgcttaggttaagaaattgagggaaagaagagcaagaaactaattcagagtagcttcgtcttcacttatcaaatcgaaagaaaagtaatttattttctaaaaggactgtcgtgaatttcctggcaactaaacagaacataataaattggtttatttgctttaatcagaatgtggcgtttattgtgattttttttgggatttggagcagatatttgtgtcctgagccttacccagaggagaatt

SEQ ID NO: 70286 - DNA, 1030 bp, Prunus persica
  Intron number 2 from transcript ppa014887m (locus ppa01488 7m.g) derived from phytozome v7.0 (chr-ID scaffold_4; pos 14114616 to 14115645)
ggatttgaaaaataggtatttctagtactcttgttcttcaattgaaattacaaggtagtcttatatttaactgttttaataacatatgccctgcttgattagatgattatacttgttcattttgtttctttttctcattgatgtttatggttctctttattatatagctattctttttttgcttgatgcagcaaattgaatcaaagcttgcttataaatttgatgcttaaaaagaaatgtcaacttgtggccttgtctaataaactaaaatgggagaaaactttcctgtaccagttgcatacactgattctctctttctcacacatcatgcacctaagttgtgtgagaaagagggagccggtgcacctaagttttgtggcttgattacatacaatatttatagcaagatatgcagaaagcacgtaggtgatctgattggaaatatcatgtacgtggctgatctctgataaaagatattgttcttcggagatactaatgtttttaacataggaacatctggtgaggagagattaagtgagagaaagaggagaagaaagagagggatagtgaaagcgagaggtcagaggtggtggaatatatggtggtcggaggttggatattttatgataaaaaaacattatgggtgttattagcgtggttttgaaaggtggtgcatgcggtggggatatgtaggaagcaaattctagatttggatatttatgaagcagcagcagaagggttttgagcggttcaaattctggggctgaagagaaaggaggaagaccgggagagaaaggaaaaggaaatagacagagagatgggttagtattaaggtgcaacataattgaactccattagattaatcaataagctgaccacgaaagcaaagctctgacatagccatttccgacacaacaattaatatttctaattttcttttttgcatgtcacttgtggtcagctaaccacaaaatagttattgtattcttttgcaggaaagaatcagaagttattgaggaaatagctaaca

SEQ ID NO: 70287 - DNA, 599 bp, Prunus persica
  Intron number 1 from transcript ppa009059m (locus ppa00726 2m.g) derived from phytozome v7.0 (chr-ID scaffold_8; pos 17121067 to 17121665)
ctacccttaccgaggctgctggagccattatcgatgtaagtgctcgttctgattcatttctttactcattgtattgaagattcaatcattttaagctctgattctatggggataaagtaaatgattgtgtgttttagctagaagctagctagctgagtaattaatgggctctagattgcattgatttggccaatttttgtaaagatgaaaattttatcgaattttagttcatgattatgttaattcctatgatgatcgtgaatggaaatgaacaggactcattcacacggtgctttaagtcgaatcctccagagccatggaactggaatgtgtatttgttccctttgtggtgttttggagtggtggttcgctacttcattctatttcctgcgaggttaaaattttcaatcttctgtcgacaaattcaaatgtttcatgcattcttgccattgcacaatagctttacatgagtttaccggaattactctgactgattctggatgggtgtgcttccatggttatgggatcttatattattgtttgtttagtcgcttaatgcagctccatcaattgtgcagggttctagtattgactatcgg

SEQ ID NO: 70288 - DNA, 551 bp, Prunus persica
  Intron number 3 from transcript ppa016322m (locus ppa01632 2m.g) derived from phytozome v7.0 (chr-ID scaffold_2; pos 19299602 to 19300152)
atttgaagcacactggttacatcgagcgtgaggaggtaagtacattggattcttactttttgctcttggttgttcattgagttaaaagatcttggggtacaagtttttcattttcctgtggactagctttctattgaagacagatagatattcttgattgtgctaattggttagtcaaattaattaaatcagcttagttaagacctcatacttataacctaaaaatcatcatcatgttctgtttatttttagtaacaagtttaaatttgtctctaaattaaggtactcatatagcagctaactatttaatgaactacagaaagctagacaattgtagaaccagcaccttacattctggtctttgatctaactttgttttcacgattgaaagagtgatccggtcatcattcatcagccctgcggacgatcactattttctgaatacaaatagtatgaagagagatcaaatttcttaattgttatctttcatgttcatgatttttacttttaagtgacataaagcccctctgtgttaaaaacagttgaaggag

SEQ ID NO: 70289 - DNA, 806 bp, Prunus persica
  Intron number 1 from transcript ppa013613m (locus ppa01361 3m.g) derived from phytozome v7.0 (chr-ID scaffold_6; pos 26463088 to 26463893 reverse strand)
acacttcaagctttctctgcgagatatcccattcggtacgccgttttctacttcaaatctctatcgtttttgcgaaatttaaatctcgttttcgttgttactttgataaattaagcaccaaatttttagttttttggttgaacttcaagtcacattttttcttcttatattcttgtgttttcctgggaatcaaacagagatacatgaatgtaaaagttaaagttttttctgttctatgtgcttattagtaagaacccatatcatgatcatagatagaatatggtgtaggtttggagcttaagaagttgcacaccaattgtttgatagaggttgcgaatgaaaaaccaacagaaacaaatactgggaaattaattataactcctattaatttggtctgatacatgccacagagtttgtttgatcagttatagtgatcggggttaaaattcttaaaagtgattaatactttgtgtaggtaccatagaggcatagagagtatatatttcctaacttttatgtttgtcccgagctctggtttaattgatagaatcatataccattgtaaactgaggaattccattgtattgctgcctcatgtagtagctttggttttcatatattcctgcgtcatggcagttctatatgttggtaaaaatgcattattgcttcatttttcttattgtaccacttgtctaagtctagataattccagtgcgtttccttgtgttccatttttctagcgtcctggatattaaactttcctgttgatttttatggttgaacttgtgacttatttgcagacagaa

SEQ ID NO: 70290 - DNA, 742 bp, Prunus persica
  Intron number 1 from transcript ppa024009m (locus ppa02400 9m.g) derived from phytozome v7.0 (chr-ID scaffold_6; pos 4963441 to 4964182)
gaggtgttatcacaatgtgctatttgcattagctctttatcttttctgttctttctgttcatgtcttgttttgatttgtctctgttacgtgctatgtttattcattttagcacctctagtagtcattttcaccattaaagtacaaaagtttttgcttaaatatcggtggctcaagcctggttttgttagtttccgttgatttgtaaatctttcagataatgtcccctgtgtctatttgcttgatattacaatttgcagttctatttttctacttgaagcctagtgctagttctatttgactgagacctttcacttacatttcatgaacattagtgcccactttatatgagtaggctagttattgtttttatttagtaaactaggctacaagtactacttacctgacatagtatcttttattttaaacatctttatttgctgattgtaaccacttttccaatcgaaaccttctcttctggtatataaatgttgtgggatacatttctgaatgtaatttgggaaagcgtgccaaatggttgtgctattcatgatattttgatgcttgttcacagaattctgacttatgtggttgttctaaaacaattggttaacgttgttgcatctgtcttgtagcaccgttgtggttgcttactgcaacatgtatcaggacggggaggcctcagactgctaagagagcaattgaataggtggagcagcggctctcaaaagacgggtggccaga

SEQ ID NO: 70291 - DNA, 593 bp, Prunus persica
  Intron number 2 from transcript ppa010581m (locus ppa01058 1m.g) derived from phytozome v7.0 (chr-ID scaffold_5; pos 8366064 to 8366656 reverse strand)
cagaatctcaacctcaacaaaccctcccttcagaggtttctctccctctccctctccctctccctctccctctccctctccctctccttctccctccctctctctctctctctctctctctctctctcaaaagcttcaagctttactttgtaaattcttatgcgggtgtttgtttcttcaaaattctcagtttgtatttgtgttcaaagcgttattttcttcgttccgaaggcagtttgtaattcttcaaaattgtttgtctagaattgtgtatgaaagtaaccaaggacaatttttcattcaacatttggttttcaatatagaaaggaaaggaatcacatcatgggtgtttgtattttgcttttgcccaagttgctcaacagcattttcaactgaatgaaattattgttataagtataacccatgaagaaaatggtgaaataaagcgttaggcgtgtataatgaattatgtatttgtagtaaatatcagtatgcttaatggaactatgtgaaacttctgcgccaagttgagtatttacattctttttcttgtcatagaagtaaagaatctacagagaacaagcaagaaccac

SEQ ID NO: 70292 - DNA, 818 bp, Prunus persica
  Intron number 1 from transcript ppa014487m (locus ppa01448 7m.g) derived from phytozome v7.0 (chr-ID scaffold_1; pos 32030647 to 32031464 reverse strand)
tggtaatccctcagctctctgtctccatactctttcttcatctttatcacaactcttcttcactgattgaatccgttttatatcttacacttatatttcactgattttgaatttgtacaattcaaatattgatcaaatttcattcaattcaatgcaccttgtcatatccgctctgcgtgccttgttctttatcttaaagcatcgttttttttttgggcaacttagacatggagaaatgctaacgggaagaaatgagaattcacttaaacatttgggattgaagttgaggtatctggctgttgaatttgggtggcttgggagctgaaattgactcataggatttcttgttgtgagtaacatttggttgatgagtaggttgtatggaaatggaaccataatatcaaacattactttctgtattttccttgtgggtaagcttatattctaggccgacttctagtggcttcggtgcttgatttttagcatagaagacactagtaattggaatcgtgcaatatgggataaagttgaagtaggggattgaggttttctttaggtgattcgtgcatacaaatattccagtaatgaatcattaatcggttcatctaagtctaccactaagttatagtttttctttcttccttttgaattttggtctctgtgttgcaactataaggataaattttgcatgtcagtttatgtttccgcctcgcactctctctgttttctatcttctccgcaataatattgcaattctttgtagcttactggttttgtttaatttctcaggttttgggtgctgtacagggccaagcaag

SEQ ID NO: 70293 - DNA, 992 bp, Prunus persica
  Intron number 1 from transcript ppa002822m (locus ppa00282 2m.g) derived from phytozome v7.0 (chr-ID scaffold_8; pos 15314070 to 15315061 reverse strand)
agctctcccgaagttcgttttggtcgatcgtggaggtacccattcttttctttcgagtagtttgatcattgttatgagttttgaggttcaatttgattgtttttgttaatttgggaggtaccctttttgtagttttgaacaatatgatgagtactatgagttttgaggttcaatttgtttgttttgttaatttaggagttaccctttttgcagagtaatttgaatgtcaatatgaggtttgaagttcaattgatgtgttttagttcattttgagtctgcttttttgtagtcgtgagtagtttgatgttgtaaattttgagcttcaataggccccttttttggtcgattgtggagatgccatttttggtaagtctagtcaatttgccttgtttagctcttatttgattgattgtacagacagtgattttataaatctgcctaatttgcgtcttgttagcagtttagagtcgtggttggtgttggcagtcactgaggagatgccctaatgttattttgaatctagattcctgctttaaaatttttcaggcttatatggatgtaatgtcttcttaattattattattaacagtgtgtttagcaattttagctaggagtgaagagaaggaaacatatatgagagaaaagaagagatgacaaaagagaaagattttgaatttaactaagtcttgtttggataggcaagaaagaaggggagataaaatattaattggggatatttttgaaatattaaaaagtcaacaatacagaaatctcattctctcaaatctctgcattagttgtagaaaaaattaaagtggcgtcggagagaacttttggggttgttgggaggggaagaaaactagtacccctcttaacaggtccctacaagatactttctagtattgcttatttgtctgagttttttcagcattgcttgttttgaaactgttgtttgtgctttccagattgcttctttgccttgaaggtttgga

SEQ ID NO: 70294 - DNA, 946 bp, Prunus persica
  Intron number 1 from transcript ppa013386m (locus ppa01338 6m.g) derived from phytozome v7.0 (chr-ID scaffold_6; pos 19091918 to 19092863)
acttctcttctggtaagagatgttgctcttctaattctgtttctgtccttcttacattgtttagttattaggatattgctgacttttgttactcgtatatcttgtgcatctacagcttgattaattattgactgaaaacaacaaccttttggaactgttgagtaatttaagttaattgacttctgtgttcttaataggccagacaaaatcatctgttaggtgatcacttggttcttggcaagaataaagttggattattcatgtcatatcaaaataatttggtcattccattttgggaattcttagtcaattattgtcataatgaagaaatcaatctgtcacctgtcttgctgattttaatatttatgtggaacaattgtttggttagtatctactactgaaaatcagttagtgattaaggtaacctgtttttgtccattcctgtaaatacacaacttacttttgcggctgcaaatctcacaaccatcacagcacagcatatatggggaagtggaatgcactgtgatatgcatgatattgttgggacctcctgtcccaattttttaacgctagtccaaacggtttcgggagtcatttgcctggagcatcaagtggattgatcagtcacttagataatccttatcttgacaacgtgctctggttggcagatttcttgcatgaccctcacaaaactccaagaaacacttaatgttttgacccttcctttatgaatggtgtgaaattacatgagaacacgtccaaaggacctgctaattgaacatgagaacaaaatcactgaacttaaaatctgattcatttacattaggatcgaaaatgcttgttggtttcttatatgtcatctgttttaagttatgctttctaggctcttaaaatgtcatctgtgctaatctgcattttggttgtatatgcagattgcaagaactat

SEQ ID NO: 70295 - DNA, 656 bp, Prunus persica
  Intron number 1 from transcript ppa001093m (locus ppa00109 3m.g) derived from phytozome v7.0 (chr-ID scaffold_3; pos 16625457 to 16626112)
tgcaaattgtagtgtattcttgggatcagctgaaggtacgttagtgatttgtattattctttctgtatatgaatatcattgtttgtttctgggtgaaatttgaaatgatagcagttgtagtgatgatcaacaatttatataaactgattttaggtgatttacagtacagttctctttccatctcctattttaagttcatctcatgttgctaaggactctactttatatgaaacttctcatatttgtggtagatttgaagttccttgaaaatgtggaaccactgattttctcacctctgctttgaatgttgcctttgatattaagctttgttcatctccaattttaagatagcactgcatctggctgattttagattctttcaccactatttgcccttcatgagctgtttttcttgtcaacatgtcccattttctatatggcatcacatcacatctcctcgtaaagttattccttttagtactttcatattctgccaccagtatcaatcagcatatcaggtttttcttttcttatcacatgataatttccatgcttcttttcctttcctgagaagtttgatattgtacttctctactctaatagcacacctattgggagcagtttttcaggtacttgacaaaagtatagtagccata

SEQ ID NO: 70296 - DNA, 814 bp, Prunus persica
  Intron number 1 from transcript ppa023725m (locus ppa02372 5m.g) derived from phytozome v7.0 (chr-ID scaffold_1; pos 40923203 to 40924016 reverse strand)
tccgagaacccactcctcggcccttcggcttccacgtgagcttctcttgctcttgttttgaaaattttttatttttttttattttaagtgaggatgagttttcttggtgaaatcttggtaggttctgtctgtttgtaaggttactgagaaaatgtgggagagaagtaaaagaaatgttcgttctttgggttgaattaatctctttttttctcattaggtttctgagatctttcatcttaattagttagttcctgccgtggttcttggaaactttgttgattgagatctggctgctgtgatcaattttgagcaattggttgatgttgcgttagtctaattaggttttctctgtttggttgctgggaaaacaaaggaactcgtaaattgatagaaaggttttatttttctcttttccacataatttcctttattatttttaagtctcatcaaagggatacatatcattgttgtcactggtttttagaaactgtacccgtgtttgagatcagttttgcttgaagagtcaaaattttctcatagaacacttttggttcttcagttctatgatcgtcctatagcttttattgatggagatcggttaaaggttttgttgccaaaaactcggttgcctgtcctgtggaggctttggtagaattcaaagtgatttttgtagtcttaggatttggcctcatctatcgagttgtatgaattaagagctgtgtttgactcttgagaatgcatgaacatgtttgtggtttctggtacagattttcttttgcccttcagacctaatgttagtggcattgcaggcttg

SEQ ID NO: 70297 - DNA, 610 bp, Prunus persica
  Intron number 2 from transcript ppa006468m (locus ppa00646 8m.g) derived from phytozome v7.0 (chr-ID scaffold_1; pos 32815817 to 32816426)
agtcggttcagggtcattgccattgatcaacttgggtgagctatttttatcttgatgcttggaatttattatatgttcccttgttttgttgtaacccttctttcagagctgttattaacgttgttctttcagagctgttattaacgttgtcatgctttaagttcattccgtaatttgcagccgaccttttttgttttcggttgtacttttaaaacttaaaacatctatgccaccatgatgagggaacataacttttacaattcgaagttgtcggtatctactatggactttattgggatacaaattgttctagctctgttgatgttagtatgtaaaagacctccctccctgatgttctgtttgcaggcttttattttagagttacatcaaaattagctactcttttgcctgctttggtttcttttccttccgacatcaaaaactgcatgaatacacacagcttccctttaagtttactgttaaacattattaaccttttgtaccatgttgggtagtggtttctggggtctattttgtgagacatttggttctcaaatccttggtttaatcttctttacagttggggcggttcaagcaggcctgattttac

SEQ ID NO: 70298 - DNA, 377 bp, Prunus persica
  Intron number 1 from transcript ppa023334m (locus ppa02333 4m.g) derived from phytozome v7.0 (chr-ID scaffold_5; pos 4320268 to 4320644 reverse strand)
ctcaatcacgataggcttcccaactttctggtttagggtttttacattgttttcttagctgcttacattcggtttatctatgggttggacttcaaaaccataactaagttattgttgcctttatgaaatgaatcttatccaaatattgccttacttacagatactaactagggtttctgggaggattttgagttgccctgattctgatgattggattggaccccttttttttttttttttttttttttttttttttttttttctattgttgttgtttttcctttcatgcctatgcaatttaatttttgttcacaactcagtactcattctagcaattttgatcattaatagggagagccggggtccctttggaggtc

SEQ ID NO: 70299 - DNA, 539 bp, Prunus persica
  Intron number 2 from transcript ppa008467m (locus ppa00846 7m.g) derived from phytozome v7.0 (chr-ID scaffold_1; pos 46845422 to 46845960)
cattcggtaatttcttcaactgttttagtttttgttatgttatttgcttttgatgaattgaaagaaaatgaatttgggccttttctggttaatattcattgttttttagacgtgtactatgatgggtttgtgagacgtgcaagtgcatttgcgtatttgtggggaatgggatttatggtgtgaatacccttttaccttagttttcctttctggttaatatttttccagctttatgcatccaaaaagttcaattatggctgatgccatcatttagttttgtatccaaggagacaaggggtgaaaatgttacttttgcagctgttaaatgaatcttaatcacacatacatgtgcacacattccacctacagaaagtgtgaatagaacttgtgatttttggttgaatagaacttgtgatttttggttttatcttggtcagtccttttgaagcatgtggaagaacaataagtaaagtacatttatgtaattatgttttgaatgctgataaacattttgatgttgaaggttgattcatcttctg

SEQ ID NO: 70300 - DNA, 370 bp, Prunus persica
  Intron number 3 from transcript ppa010202m (locus ppa00792 5m.g) derived from phytozome v7.0 (chr-ID scaffold_1; pos 44218055 to 44218424 reverse strand)
gcaacattctggtcgccacctcttgggacaaccaggttcatgttctttttcttgtcttcgttttattttttatcagttataaaaccttaggttctgtttgtttgctaagaaatttatttgtagagattttgattgaatttctgcgaccatcttattgaacttggggtttatggacaacccagaatataaggaaatatgctatgaggttaacatagatttttttgggtacaatctgcttatgtaattcatgttaactgaaatagataaacatggggcatttataatttcttttgttttccgttttctttcattcccaaccaaatttgttaggatttagtaatgactggcggtgtgcccttgtttaggtgcg

SEQ ID NO: 70301 - DNA, 466 bp, Prunus persica
  Intron number 3 from transcript ppa010103m (locus ppa01010 3m.g) derived from phytozome v7.0 (chr-ID scaffold_6; pos 16485816 to 16486281 reverse strand)
tgggtatgcatttcttttcttgttgatttactacgaactaatttgtttctccctaactttcgatttttttttgcttgtttctttgcgattttgttattgagtgaccctcttgaaattggtatgcttttgtggatgttttttttttcccacataatattaattttttattcttattttgggttatagttaaactgtaatcacttctgtgttatatcacattcatgtttagaaggggcttcgattgttttcttctgcccttcttttccagttctagtttgagatttgagttatataaatcttttgaaaaagatattggttaatttatttctagataaagtccaaacctttggcttactctgcattattctgcgtgtgaaatggattttgaaatatcatcctcaacttcaatctagtctttgaacgtgaaatcatttggtgctattttgttgattcaggattttggcca

SEQ ID NO: 70302 - DNA, 565 bp, Prunus persica
  Intron number 1 from transcript ppa018697m (locus ppa01869 7m.g) derived from phytozome v7.0 (chr-ID scaffold_1; pos 41732696 to 41733260)
tcgtcttattgaaaagggtctcactcctcttaaaggtattaatctcgatcaaaatgaaagacccaagtactgttgcgcttgcttgtgtatatctttatgcttttcatttttaataataaactgcatactaatttggaaaaaaacacaaaacaaaaaatctagtgtagtagaaaaacttgtatgaaacgaaaatagcattgttttgatatcgctgaccaatcacagtcggataccgttattggccggaatagtgctatttcggttttatgcaagagtttctcctgttattgggtacaaatctacagttgcagtacattaattattgttgatatttggttgatatcgataatgtactggatactgtaacatggcggcctattaagggtgtttggtatgaagttttgaattcaaccttctgagctggtcatttggaaattgacggactttacagttggacacgtcttctatttattgatattgactgatgttgttcatatgattaacttatattttaattaaaatgttaactaactttcctaatttgataatttgatttaatttgcag

SEQ ID NO: 70303 - DNA, 777 bp, Prunus persica
  Intron number 2 from transcript ppa022977m (locus ppa02297 7m.g) derived from phytozome v7.0 (chr-ID scaffold_4; pos 17617588 to 17618364 reverse strand)
tgctttgccttcaggctgattctcctattgacagagttagcatcaatcatcttggtaattaactctctctctctctctctctctctctctctctctctctctctctctctctctctctctctctgtgttacatgcatagtggtgttggattgtcttatctttttcacgatagtaatgatagaattactcagtttgttcaaagaatgatgttacattatgattgttatgtgatcatatctaaagaaataaataagtttaaccaaaattgaaccatatctgaaattttttattgtcaaactcgtgctagccagccaagaaacacaaagaaaaagatgtgttgtgtgacaagagactagtaatattaaaaagaaaatatttgtaaaaaactaatataagtcaaacattttggactaacttggtattttttaggtttatttattgctatgcctcttatgttgttccaaaaatttcaatttgccccgacagtttcaactgagtcaatgtgcccattgtgcttttatttcatgtccgacattccctcattccatcaatttctttggtaacaccattaacttgttgacttgacatgggtattttagtaattttagctatttaaaaattcaacttatattagattgtggtgttctaatatttctttgaaaagcagacatgggcttagccaagttggctagaacggatgcgctcccaattctttgggttttatatataattttccattaatttttaatcgatttttacccttaaaattcttgtagg

SEQ ID NO: 70304 - DNA, 328 bp, Prunus persica
  Intron number 1 from transcript ppa000949m (locus ppa00094 9m.g) derived from phytozome v7.0 (chr-ID scaffold_1; pos 15069905 to 15070232)
aagaaagtctttgatcaaactgttagggacatgtaagtattgaattgtgttcatcagattaaattgcttactgttttttttctttctcaatttaatgcttagataatgatcttcctacctagcatttgagtgttgcttgttactttaaaattattgtgaaaaaactgattttgaattgtacttttgacaaatttcgagttttttccccctctgttgatgaaataacttcttctttttccctatattttgcaaccaaaactgcgtaactgtagttctttattgtgttcttgcagcaagagagaggtgaataaaaaagtgcttaaagttc

SEQ ID NO: 70305 - DNA, 378 bp, Prunus persica
  Intron number 2 from transcript ppa003018m (locus ppa00301 8m.g) derived from phytozome v7.0 (chr-ID scaffold_5; pos 15727960 to 15728337 reverse strand)
tggggtaacttaaatatctttttcttttcctttttccctttttctgctcctttaatctgcatggctgtttatactgctattttcaaatacaactgtattcttgtccctctttggaacttacatcccaattctcaagtacctagcaaagttgcagattgtctgtgttttgaagtgccacctagtaccatatttatgttcacccgtttctatgatgggtgcactcttactttgcttttgtcgtagtatttttatctagcttatgaaacttattttttgtggtctatatttatattttttttttcttctatttgatttattatccatgttggttcatacttcataggttgccagctggggtgcctacctgtttaaaaagaa

SEQ ID NO: 70306 - DNA, 750 bp, Prunus persica
  Intron number 1 from transcript ppa003018m (locus ppa00301 8m.g) derived from phytozome v7.0 (chr-ID scaffold_5; pos 15728967 to 15729716 reverse strand)
ccacaaagattgtcattttcgctccctgagatccggtaagagttttcaattcttttggtttggatagaattttcatttattggatgctttactatctacatatgcatgatgtctaccctgcattttttgactcttttatatatgggattttgttgaaaagttttacttctttatttgaatcaagttttgtggtagggttttgttgttgattttgttcaattgtctgtgattgttggttgatttcgaataaatagaaaaagaaaaagaaaacgggaacaaagaaagcaaaagaattgcagttgtgttagtcttagctgagaggtgggtttggaggttccaagtaataaaatatttgaaactctcatattctgatttactttttctgcatttgctcttaagattttgtttctgccttctaaactagtggctatgtttcattcttgacccgcttgcttatatatgtgtccttgtcgttgtctcggtatctttgattaattgaaacgtggaaagttatatactaagaatcacatttttttttataaatgatagaaagtgtatgaaaaaggaacgctaagggggcaaaatctgacaagtctgagggttcttcaatgtccacttatagagtctcctattattctcgaaatccttttagaatgctcagccacttcaaatctaccctatatttcctttcatttatttagcaaaagtcataattgttattgggaatccgaaaatacattcaggtacatc

SEQ ID NO: 70307 - DNA, 883 bp, Prunus persica
  Intron number 1 from transcript ppa014542m (locus ppa01454 2m.g) derived from phytozome v7.0 (chr-ID scaffold_5; pos 14170159 to 14171041)
tccacgtctggatcgctctccatcaggacgaaaaggtaaaaaactcttctttctcatcatcgcaatttctctttcgaattgggctgagaatgttggtaattttgaatttgtatttaggatttcaattcaatttcagctccagaagctcaaacattgagatgggtcataattaaattgctcaattcttcgtgaaaaatgttattttgatgagtgaaatgacatgaaatttgggggggttaggtttgcttaaaatgtagttactgtttcctacctttgagcttgatttattcattaattgttttcttgtcaatcaagagggtaatgcttggttaatggggattgaggaacatagttgaacttggaatttctccttaatcattgttattatgctatatttatgcaatatagtgacactcctgtgtagattaaacctttatgagttagagccaattcttattcatggatttcttatatggagctcgtcttccatggtggattgtgtgtttcctcgtgtgttgcttattatctttactagttgggttacttgtgtttcgtttgtttcttttaaaccacgtacatattgcatgccatactttgggtagaaagcacaaaattgtgtaacagagaaaaaagcatttgcattttggagtaataaaaccatttgtaattagattaatattcaaatgatagcaggaagctattatattgtgcttaccttttcaatgaacctttttagttgatcttctcttatcttcacatatggatcattgtgttttggtgttttggtattgatttcctttcaaaatcttccattcttcgatactgatttgggtctgctactgtgtcagcaagaaagactggaaagggaattggaaattaagag

SEQ ID NO: 70308 - DNA, 226 bp, Prunus persica
  Intron number 1 from transcript ppa024493m (locus ppa02449 3m.g) derived from phytozome v7.0 (chr-ID scaffold_7; pos 17293604 to 17293829)
gaggtacttctctgcaaattttcgctcaatttcagcatttcacatttcagtcctttcacttttcaattattgtcgttactgccactttagtatcatcatcttctgtttcgaatttggccttttcacattagagtgattagttaattaaatttgatttttgaatctgtttggtgctttttgacaatttgcaggcaggtgcttctctggaagcacttgccaaaggagc

SEQ ID NO: 70309 - DNA, 471 bp, Prunus persica
  Intron number 2 from transcript ppa010712m (locus ppa01071 2m.g) derived from phytozome v7.0 (chr-ID scaffold_6; pos 16248606 to 16249076 reverse strand)
tgcgaaacaagaagctcaattcacagacccaggtataatttcactccgcgcatcttatatttgtgtttctactgacagcatttgtatttaatttattacatttttgggttttttttcttttcttttctttttataagttgattgttaacgttcaatgggtagttgtaatacagtttccattttaatgagaaactctgcttctgattctccattggaaaagaatgatgtctttatttttcttttgatgttgggctgtccatccttctattagtcttaagaagttttgatgttctaatcccctctttattgtcatctgtccaaaatccagattcaatgagcaattttcaggcatttaagttgctaaattatattttagagttcaaatttcaattaatttgtgaccaaatgcgtgtactgtttgtttgtgttttcacagttgagcggcaaatttctgccattagggctattcgt

SEQ ID NO: 70310 - DNA, 526 bp, Prunus persica
  Intron number 1 from transcript ppa010712m (locus ppa01071 2m.g) derived from phytozome v7.0 (chr-ID scaffold_6; pos 16249172 to 16249697 reverse strand)
tgcctcttctctcttcctttggactttcatcaaaggtatgaaattctttgacttggactgtttgggtgtttcagatttggtgtttttaggctgtgggtatttgatatttggactgttattgtgttttgctattaatgtgtttctgggttttgttgttgctgtgtttttgggttttgttgttgctgtgtttttgggttttgttgttgctttgtgcttgacttgttttctatcaaatcggcccttagttttatgttttcaatcttctgcaacattgaaatgacattcttttttaccgtttgaaaagaaaagaaagaactgaaaatgtttcccccttctttttggagtatgcaaatgcgaattgggttgcttggcatttcagatttaacatactctggttgctgtttcacacatgaagctaacattgaacacaaattgaaaaaattgacaattttgtgtgtcgtgtataaatttaatagttgatttatggaattgtttttggatatgatagcagaatagaccagttcaa

SEQ ID NO: 70311 - DNA, 252 bp, Prunus persica
  Intron number 2 from transcript ppa011230m (locus ppa01123 0m.g) derived from phytozome v7.0 (chr-ID scaffold_1; pos 3149985 to 3150236)
tcatacagcttcaatcccaccctctcagaactaaggtttgtttcagtttttgaatcatacccagtttttcttttcgttttgtttttcttactatgtctttgtaaagatttcaattcaaagatgaaaacttgggcctgtttttgaatattttgttgctttttggtgtataagtcattaaattttttggtttatttgctttgaattgatgggttactaggcaattacatctggagttttagctgggtgtagtga

SEQ ID NO: 70312 - DNA, 793 bp, Prunus persica
  Intron number 4 from transcript ppa001708m (locus ppa00170 8m.g) derived from phytozome v7.0 (chr-ID scaffold_2; pos 16791475 to 16792267 reverse strand)
gtacatttgcaaaaagaaaagcaggtattcatgacaatgttagtatggtagttgttaatccactttatatagttttcttcgtgtgtgctcatgctgctctcatattggagtcaacattagatggtgagtacatgtggtgttcctacaattgttaaaaatcagaaatggggctaaaccacatctttcttgtggttgtggcaaccatgaaagcattcaagtctttcggtggaaactgctgattgggaagtgccactgtacataactattttactcaggtcataatagattcgtagagatttgatcaaaacaaatgttccgttgtcgattagaaatttgtagtacttaagctatgtcaaatgctactaatgaggataaaaatttgatggctaagccctagaggtgatcaacttctggagaacctgaaactagaaattttttttggagttggcagtgaaataacactgttgtcggcctagcatttaaaggtgtcttgtggggtttaaggtttcatttcttgaaatttccaaaacgagaaaaaaaattagaaagagaattggagaaataagacgaatgaagaaaaaaaatgaaaactagagaatgtagggatactgtgcctcattctatttcttgtgtttctaggtagatcaaatggtctgcatgactgtggatgtagctctggcggagtagttaatattacttgttcttgtatgtgacatagttttcattattttttgacgtcttttctctttttaatacagaggattttgtttctgatacgaagagactaaaaggt

SEQ ID NO: 70313 - DNA, 520 bp, Prunus persica
  Intron number 1 from transcript ppa019994m (locus ppa01999 4m.g) derived from phytozome v7.0 (chr-ID scaffold_6; pos 23271646 to 23272165 reverse strand)
gcggtgatttggaagctcaagcaccagagcgatttgtaagtttctttttcttttctattattttaaatttatgaacttttaatcttgcagaacttttttttgtgtttggccaccatcagagttcagaaatcaagttactaataaaaatgctttgggttttgagattgttttctatgattattttgatgcattctgtttgaaccacaaattagggacttcaattttgttggtgcagccaagcatggtttaagatacataacatacgtgcatatgcatatagaagtttgagcatttatatcttatcaaatcataaaatagaatttgaatctataatcaatatgactggaggcattatgatcattcttctcacatgaaaaaaagttctagtatgcttaggctttgacatccaaatgacctttttcacggcgaatatattgtgtatgtcatgaatatcaaagctagtgatgatctccggtatgatagttgtcttcttgttaattaaggatattggcctgggagg

SEQ ID NO: 70314 - DNA, 667 bp, Prunus persica
  Intron number 1 from transcript ppa013074m (locus ppa01307 4m.g) derived from phytozome v7.0 (chr-ID scaffold_3; pos 9028816 to 9029482 reverse strand)
ccgctctggcgctgagatcgaaaccctaaagaaaggttttttcttgttgcatttgtgtcggcctttcttcttcctcacccccttgttctttggtcttgattttttgtttttgtgattcgtgaagcaaaagataggataaaaccctggaaataatttcaaaatctgatagtggatttagacaattatttatgtttttggaattagaataagttatccttggtttttgggttggatatctgacttgataaagttgtaattatgttgttttggatggatcttatccattatatgtagcttgctcgttttgttccctttggattgttgcttgaatcattgttccggcttcttctttgatttttattaccttgcacctatttttttatgaatgaaacggtgttcaaattaactaagccgtgcattaaaaatcgaaaggttttctggatttgtgtgtgtgtgtgtgttttttttaaatatatttgatggcccttcaagatgtttatagttgtaattttcttttcccatttgaggtgacttaggattaagtatgaaagttacttatcttttgggttgcgcactgcatatgataattttagaacttacagttctaatagttattttattatcctttgcagctactgctgggaccaataaagctgcctccagcagc

SEQ ID NO: 70315 - DNA, 741 bp, Prunus persica
  Intron number 1 from transcript ppa010809m (locus ppa01080 9m.g) derived from phytozome v7.0 (chr-ID scaffold_2; pos 24206545 to 24207285 reverse strand)
ctggggagctcaatcagcccatcgaagttcctcaggtttctcgcgctttctcttgtctgatttttcatattttttgctaattatatatataggtttgctctgaaatctctgttactgttatgaatttattttcctatctatgaattgcattttcgttaaaacttaggatatggatttttgttggcagagtgtagtggaaaattggtttggtttttgatttgtacttctgattagaaggtctttgggtgatagaagaaagccttatcaattttaagaaaaaattagctgatttgtgttgtttcttttagtaaataatttttgggattttcgtatttttttcagtgacctcatatgtttctaatgccctttctacgttttgtggggaactttgcaaatcagattttttgaaatcatagttaaaacccttgtatcattgtaaatctttggtacgttaaataattggctggatctgaaattctgttaacttataagtttatcatattgcattctttaacctgcttgcctatatagatcgaggatgcgtgtggtttccaaataaaaaggcgactatatggttctggctacaacttgaatatggttacaaattacatttatattgcggatttatggggtagatgctaatgagtttctaaattttacgtgtgactttctctacattggaggttagtcttggataaggatgtaaacaccaactaatccggtgtattatgggctagttga

SEQ ID NO: 70316 - DNA, 416 bp, Prunus persica
  Intron number 2 from transcript ppa021176m (locus ppa02117 6m.g) derived from phytozome v7.0 (chr-ID scaffold_2; pos 1023145 to 1023560 reverse strand)
ctgtgaaaatacaaactgcctttagaggctaccttgtgagtttattcaggctcttctctctctcttgccaaaatttcaatcaatttttgctttcactggggtggtttgaattggtacaaaaattccatgaaacaatatgtacatattgacaaccctgtcatcatggctatgtttatgcttatctgagaattttggtagcattttgtgttttttttcctcttaattactcatttattttcagcaaggtaccatttctggcatgaaagtaaaattactagatgaagtctacaaactatattattgtaagttatttctcatatcctgcaaagatcagtttattagacttatcattgttacaagttttgtgggagaaaattgcaggcaaagaaggctttgagagcactaaagggaatagt

SEQ ID NO: 70317 - DNA, 918 bp, Prunus persica
  Intron number 1 from transcript ppa011567m (locus ppa01156 7m.g) derived from phytozome v7.0 (chr-ID scaffold_1; pos 17778893 to 17779810 reverse strand)
atcaatatccggttagttattgttcttctcttttgggcattaatgctaggcaaaattgcatatatgtctgttacaaattatgggtagcatatgacaatctgttccttacatttgatcttttcatatgtattgatgatacatacatcttatcccatataaccccatatttgtagaatctaatcgtaattattacttcattacccagtgccttataacatacagtacagctggctgcatatctgtattttggtaaacacaatgcagttctaattattaagtattgtgacaagatcgttgaaacaagatttttgtctattagggtattgtagttgaagtggaaagatttcctggttgaatgtgcttctgtgtatcttcgtatggacgatcttggtttgtgaatgatttaattaattctgcgtagtatttataagtttatgcagtaagttgagtttacaaaccaatacattacatgtaagagttacgttctttttccaccatacttcagtcactaatccatacattaaaatggattgattgtccacctatggaacggacctccagttctttattgtgtccatatcattgttaccaacaaaacataccaacatgttattgatacattttaacaatatcgttgtgcgtccactttaacaaaaatggacgtcctgcacagagaattttttatggattcatgctcaaaatcatggacagaaaatgtaggtgttatttttgtgaaaattctgaaacgggtttgaattcatgaatgctagatattctgtttgaaagaatatacaatgacattgtgatttgtgctcaaaacagcgatcgatttgaagttttaagtatcaaaatattatatcttttttctaataatagcttgttatgtattttaatttaccttttgccttcttattcaga

SEQ ID NO: 70318 - DNA, 914 bp, Prunus persica
  Intron number 1 from transcript ppa010817m (locus ppa01081 7m.g) derived from phytozome v7.0 (chr-ID scaffold_1; pos 37269955 to 37270868 reverse strand)
aaggtacgcaatacttgccatctattattactttggtaatacgttaaaactatttgtaccatcttaactgactcactatatttctaacaaaagaaatcgtctcatactcacctatgtgaaactcacaaggtggtacaaacataaaaagccacaaagtgtgcatgcatttgcgtatcgtctcagtttatcagatctcttgtttattacatttcttatccccacatcatattatactgttagactgttaatttaaagtatttttcttgtgtctattcttccatcttcacaatataaccatgacagattcttccatcttctcaaaacttccctttgggtcttttaatcatccgatccaactatactttgccttaatgcaatctgattaatctagcattacaatgattcaacgtggcacgtaagaaaccaagcatatttctcatgactcgtgcatataccattttccctcacaaggtggtcagtgggagcttctaatcgttgtttcatcatcatcttttagctacaattaacaaaaacatttcgaagtggtttcttgttcatcacatggatgatgggccacttttatttatttatttattttctaagggtactaggcatattggatatataagtgaagatttattgcatgccaccatgcttatattcttacatccacttcactaacccactcatctcctattgcatcacacgtcagctcctgcctcaataatgatgtatctacaaggcatttcttggtaccaaatagttttaaaaccaagctattttgtcggcaaaatgtttatctcgtcaaacagtctaatctttttatgattgttaaaattgtttttgttttttttttaatatacgctgttgaattgacaatctaacaacataatatatgaatatctatcaggata

SEQ ID NO: 70319 - DNA, 647 bp, Prunus persica
  Intron number 1 from transcript ppa012668m (locus ppa01266 8m.g) derived from phytozome v7.0 (chr-ID scaffold_2; pos 23421699 to 23422345)
ctgtaattcccctgctgcattcatttctcaggcctttcctttattccattggcttaaagttgctttctgtatatatgcttgataccaacccaaaattgtttcctattattttgttcttttgtataatttattgtttcttttccttataacacaaaatacatgcaattggtttcctttttttttttggtgtgtgagtgtgtgtgtgaccttacctcctcaaaatatctcattttctgcactcttgatttcaaatatacagatgaagaatttttttagtatttataatatgaaaccaacttatttctgtaatttgttaatttaatccgtaatttctgaattatctcattatttgattttcaactgatgaggaaattaatctatatatatttgtgtaatttcctaaatttatatatatcacaagagagactatttggaatctatatatatatattgaccataaaagttcttacatggcagtacttctttaattatctaaatttatgagagcgtgtatatatatatatataccgtccacataggagaatttatgtatgtattatacatatacaacttcccgtttgtcacaatttttggtttgtgcatgtgtgacagctaaacaaaacctcaatcatagtagacgcatcaaa

SEQ ID NO: 70320 - DNA, 745 bp, Prunus persica
  Intron number 3 from transcript ppa003610m (locus ppa00361 0m.g) derived from phytozome v7.0 (chr-ID scaffold_1; pos 30340974 to 30341718)
tttcaagaagattaaacaagacccataattggacggtatgctgcttatccattcaattgcaatgcgatacttttcaattttgtattggacgtttattggacttaaatgatttcttttcttcttttgaatttcaattgggttttgcttaatactattgtttaacatgccatactatatgaggttctctgtgtgtgtgtgcgtttctgttgatatcatttggatttgctcggactcgtacttggttgctttcttaaaccacgtagatgtgcctaagttactcaatgcatgctattgtagtgttagacaatgacattacagttaaagactgaccttaggctctgacatatttaccagttgttgatcctctccttagtttccatttctttcactagacgaattgaggagacaaagttcatatgcactgcgttttgtgtgtgcatggttgtgatttatgaaagatctgaagttttgtttaagcatttgtgaactctatcatggtcttctactcatctggttcaattctgtctcaaaaactgaattcttctcagcattagcaccgtgaagccaactgcatgagatgaaataactcttatttgacgttttccttttagctcatcattttcttatggataaatatgcttatgtgtgtgtatctatttattctttcctgctaaacttgcatgtatcatttctgtgtttggcattggcaggtggctttaaaaacattgatagttatccataggac

SEQ ID NO: 70321 - DNA, 871 bp, Prunus persica
  Intron number 1 from transcript ppa009298m (locus ppa00929 8m.g) derived from phytozome v7.0 (chr-ID scaffold_4; pos 8513381 to 8514251 reverse strand)
ataatctggccaataatcgaagggtactgatcactctcttttgatccctttttgtcttttttgttttatttaaataatgggttgtttcatatattttgtttttcttctgattatgttcggattttagctgaatgggctttgtgggatttttctaattattgtaattttgatgtaatgtgatttgaattgggtttttcgttgaattggtagctgttcgggttgtcggtgagtgaggttcttgagtttcattttttgccttgctgatcattcattataaaagtctagtgattgctgattatgatagaaatgaaaagggtgtatagttccagtattgtaagttgtaaccgtatgcatagtttctggtcagaagttagttgtttactgatgtagtctgaattcatgatctgaagttcgagtttccacttgttcgtcttgagagtaaatgagctctatgtattttgtttagccttttgattttcagttaacattcagtttgatttctatgggttgtgtgtttgtgttggaaagtcgtttgctcctttggtcagcaattttttttttttctggatacgcttagcaatcacttttattattcagcatggagttttgtttggtgcatattttcaatcatgactgtgtttctcatcatcattattattagttagaacttgtaatgatttgattgttggacgtcttatcaattgagagcctctgaagctgttcttttgtaagaaacgactttgtttgaaaagatacggattacgttctacacatgtagttattattttccttcattgtatttggtcatagtaatttatactttttgtgtttttcagagaagaaatagctttaatcaggggaagagaagact

SEQ ID NO: 70322 - DNA, 492 bp, Prunus persica
  Intron number 1 from transcript ppa004720m (locus ppa00472 0m.g) derived from phytozome v7.0 (chr-ID scaffold_4; pos 10867199 to 10867690 reverse strand)
cccttgatgtgagtgaatttgagcaaaaaggtctccttttggttgctgataatgatttttattctgtttttctcttgtactaaaacttctgctaattcatttggttgctagtaaaaatctagtcttgtttgtttttctagtgttttttttttttttttttttttaatgtttgttgggttgggttccattagatgccgaaaaactcgcctcaaacagtctattggtttcaattgaatgattctttgcctgcaatcccccacttgcttgctgagaaaattgatatatatataaaaagatttttataacaggttaatttggtcatagggaaaatgggaaacccacaagaaaatgagctttggttttcttcgttgttcagatgaactgatagaattcattgtcaggttctgatatttaacatattccgcagttttctgtttccagttgacatgttactcaagcttctgcctttttcattgttgtgcaggtttctga

SEQ ID NO: 70323 - DNA, 542 bp, Prunus persica
  Intron number 2 from transcript ppa017198m (locus ppa01719 8m.g) derived from phytozome v7.0 (chr-ID scaffold_4; pos 20753553 to 20754094)
gtttttatataaacagtcgtctattgggtgtcgtagtttaacataattgtagtagtgagtacaatccattgcatccacatatagacagatacacttttttattaaacaaatataaagaaagtctatatcaatttacacttttttcaacttatacaaattgtaacataaatgaacataaattgtttgggccaaaatgagtcatttcatgtattgacagtagtttttggtttcatatgtagttactttaatagaaactacaaaaccagaatcaaaagaaatttgaatcttccaactttgggaaaaaaacagacaaattgaaataaaggtaggattaagatgtcttatttagttactttatggtcagcatgcaagttttctactgttcttgttacctctatactctaacggttcgggtttatatggtctctcaaatttctcagagtcaagcgttggtgggaaaaatagagtaataaccttacatgaatcttttgttcaacaaaaatgtaggaggtggaaactattgtattaccctggattataga

SEQ ID NO: 70324 - DNA, 685 bp, Prunus persica
  Intron number 1 from transcript ppa004494m (locus ppa00449 4m.g) derived from phytozome v7.0 (chr-ID scaffold_2; pos 15552825 to 15553509 reverse strand)
gaggacgagaccgttcttcaaactcaggtactttgaaattttttattctgtttgggctatgttggggtaatgggtttgcattttttttgtttccttgctgatagaatgttgggaaaaaaaggagaggaaatgagtattgagagttggaaattggctacttggtaatgagtattgagagatgggaattagccacttggtagaaaatattttaatgctcaggtgcttctatgtttctggagcatttggttcatgaatttataagttcacttaaagttgcagataatagattggactcctctgttgagagagtgttctttgatctcatgtttgttcagttcttctctaagtattatctttgaagcttttcctggacatctgggaaacgttgcacaacttattgccatcaatcagaacattagtgaactgtttccgttaaaaaaaattatggaaatttgatttctttgcaaagttatggggcattcagagaaagctaccccaccccctgcccaacgggcgaaaataaaacaaacagaaaaagaagaggacaggaagaagaaaatctgttacaagtatgcattcatgtttgcggtttgtatacataaattttacgctgcacttttggtgtcttagagttaacctaactcaatgctggtttttcctgtcaggaacctgtgataagaccaga

SEQ ID NO: 70325 - DNA, 1021 bp, Prunus persica
  Intron number 3 from transcript ppa020667m (locus ppa02066 7m.g) derived from phytozome v7.0 (chr-ID scaffold_3; pos 20657368 to 20658388)
aggtaatttccaaaactcccttacctttatcattctgattcctctggtttttcccttgaaaaatgctaatttccaaaaagcccttaagcagaataccatcattgagatagaaatggaccgttactagaaatccaacaacattgtgccgaagttcatttttgccttggaaatgttaccccaaaaaataaaaaaaatttgtttcctgatgtggacaaaatatgttttctgtctgtggtatcaactctagatattaaattactgttataaatctgagaaataggaaaagcttggaatcatagatagtaaggttttagatttgtttggttttaagtctttctaagactttagaaatagtgttgttcttaaggcttaagtgatatttaggagacaaaatttcatcagctccaggagatgtggaaggggagacaaattttagatgtttcgtgttgccattgaggtgatgaggagtttaggtagaacaaaagctgggattgtttttaaagattgaaaagacaaacctacaactaccattcaaaataaggttgattttgagacaaacctgggtgggagtcaaatgtgactgatggagactcaagtctaggcccttggaatggaaagtcatttcactaggcattagttccttttcatctcatctatattctgggtgtgggaatacacggaataaattgattggggaatcacccttttggtcattcattcattctcgtctttctaggctatcttccattcataatgtatcaatttctagtatgcttgtctcttcttctttttcaataggttggaatttgaatttcagttgaattttaagcatttgtcttgtttacctctgttgcgctcagataaaattatgctatatattattgcttataaaaaatctataacaaaagattctttggtgttgtctctctctgagcatgcttatttatcgtacctttgagtctgtctaacttgtttgtgtggactaggtacaaaacggagctacttttgttagcatagacaa

SEQ ID NO: 70326 - DNA, 328 bp, Prunus persica
  Intron number 1 from transcript ppa000214m (locus ppa00021 4m.g) derived from phytozome v7.0 (chr-ID scaffold_5; pos 14095739 to 14096066 reverse strand)
tctacctcacggcgctctcacacccacacccagagtcttgcatcttcccctgccctcaatttttactattttcctcttctttctttcctctgtagcataataaagaaaacagaggaaataagaagaaaatcccaaaaacaaaaaagcctagaaaatgaaacatagaagaatctgaagtgctgcttccctttctctgtttgctatacgaaatggggttttgactgagaaatcatcaaaacccaaatctcagaaatccacgaattgctagtttctgctattaatgtctgcttcaggcttagccgcagagccgaaccaggaggtgttttca

SEQ ID NO: 70327 - DNA, 373 bp, Prunus persica
  Intron number 3 from transcript ppa022762m (locus ppa02276 2m.g) derived from phytozome v7.0 (chr-ID scaffold_2; pos 22924034 to 22924406)
tttcaatcaaaggtaatgacctgtataggtttatttcaaaataatttatggccattttttagggctgagttgcagggagattcattctggcaagtggtaattggttttcaattattttcgtctttgaaatctgatatccagacatttcttctatgcgttatattatgttttaattgtcatatcattgaatttattagttggtattgatcaaacatagttgttgccagcccccaggcatgtattagattttggggaagacatgaagagtgacttatgtgattcaagttcaaagttcaaaattagtgattggtattacatatttaacccttgtagatttcttcttttgtcagaacaaaactggaacttggggctg

SEQ ID NO: 70328 - DNA, 542 bp, Prunus persica
  Intron number 1 from transcript ppa009361m (locus ppa00936 1m.g) derived from phytozome v7.0 (chr-ID scaffold_4; pos 5234260 to 5234801 reverse strand)
gccaaagccgataaattgtcagtatctcttttcacatccaatcatttatttataaacatatatggtattattatgaaagtctatgcatttgattcagtttagaagatccaaagtttgtcagttaattcttaacacatagaaacattttccaatgatttcgattagttatggtagtaattgattggtagaatgaaaaagagcattcattttcttcaatttttgttttctgggtcagtgtgaaattggatgaagttgtataaattttgaatctttcagtaatctgcatatgaagttggtatactaactctagaagagcatactaagaattgagtgatgaataaattatggaattctgtaaccgacattttgattttgcttaagctttgtttgtttgttcattgggaagagaagaagaagtcaagctttgtcttttctttttgaaagtaataaaatttgattactttcctcttctgaattactgaatgcctttaatttctgttatcttagaacgaggctcagtcttacaaggtggagtgcagatt

SEQ ID NO: 70329 - DNA, 820 bp, Prunus persica
  Intron number 1 from transcript ppa009211m (locus ppa00921 1m.g) derived from phytozome v7.0 (chr-ID scaffold_5; pos 9614661 to 9615480)
gataaggtaatttgtgctttttcttttagttttttggtttttgggttttgggtttcgttcaattctttcatagggcaattttttcaaaactgtggttgattgatttgtttatattcttgatttcatattgtctagtgcatgtttataaagggctgtgtaaagtttatattggaatgcatgaattttttgttctatatgcaatcaacctacgtctggtggttctgctactggaatggtttttgattaattgtttgcattccttttataaaattttacctggaaagcgtttcctttttgtgcgaatagctctcttttgcatacaaggcacgtctaatttgagctttgatgaaatgggtactggctactcatgtagtactttttggattataatttggagcttgtggtgaactttggaatatatttatggctgcagtcatttatgtggcatacaaattacgtcacttataacaaagttctgcttcccctagtctgttttggaaggtttaagctgagttttaattatattactgtaggtagtagataatttcgtatccctgttaattcattgcatggtgtctgcccaaaacaattgttgcgttgatgaagaaacataggatattaagaatgtagtactgctattaagtcttatcttaaatggtattacaaatgattgctggttacttttcctgttccaactagctttgtttccaactttgagagattgtgacatacttcctcatatataaagtcttttactagctaactaatgatgaagtcgtttacaggagattattccaattattacctgggagacaaagac

SEQ ID NO: 70330 - DNA, 948 bp, Prunus persica
  Intron number 1 from transcript ppa013875m (locus ppa01387 5m.g) derived from phytozome v7.0 (chr-ID scaffold_6; pos 9322187 to 9323134)
agctccatcgcatccaatccctcttcagttttaaggttcaaatctctctctcggttatagatttcgttaacttaattagcaaattatgctgtgttgtttttatttgattcagctcactagcctgcaatgtctgtgtctcgttttgaaaatttaaacatttttctggttgtttcttcgatttaagggaattcataaactgggtttgttttttcagagagtcagtctgattaggtagaggttttagttgctgggttgttatctcagttagcagcatataagcagaaattagtattagctctacaatcttgttacttggatttgtttttagattttggaattatgagtcagcttcaagcttcaattttttctcatattattacatgcaaatttttttgtttttttttgttttttttgttttttgtattttttgtgggtaatatgaatatcattgagctatatatctgttccataacttgactcgaatttggagttacgctgagaaatatgatacagaactataaccatttaaaattatgtgtgtgctagtctgattgcatagtttaaggctaagtctgattgtatagtttagggctaagtctaatttgacccgattctaagtctgattatagagtaatgctacacttaccacatttttatcccacatttctatactacatgatgtggcatgtccatattatatgccacatcaattaaatcaatgaggtgtattttaattaaggcaattagaaaaacaaatactggaataaatcataaaagaaaagaaaatattaaataattttaattgatgtggctatccacctcagttgccacataagatggtataaagatatggtatacaaatgtggtaagagtagcattattcctgattatctgttggatgtgagactctcaggaaggtccccaaggccagggttaagtggtaagctg

SEQ ID NO: 70331 - DNA, 798 bp, Prunus persica
  Intron number 1 from transcript ppa008374m (locus ppa00837 4m.g) derived from phytozome v7.0 (chr-ID scaffold_5; pos 18424744 to 18425541 reverse strand)
acctttggtgccgtcacgagggagaaatttatgtgagaaatattctttaattatcaggcctctgtggtgcatgcactacctcctccaactgcaatagttcacagaatctcattgctaaccttgtaatgttatatacatccatctgtacatgttcataatatttatcatacttgcatataacagcactgtagagctcgtttgtttgatctgcagccactcgctagagagtcaaaacaagccaatatttccctagtttaggatttaggattgattttaacccagtgcagacttgaaatcagctcctttgacttttgatgatgactttgcgaggatgcctttaagcaagcagaagagacctttaaccagatctgcccagatttctagttgcaagttgggaaatttcattagtgacccatcccgtaaagagaatgtgaaatcaaataacactgagactgcattttgtctcttctcagattaaactgagagttatgaccctttttgcactcagtttcagggagtgcatagtcacccatgaaaccaaaagaacatcttcacaagccaatggggatatgcagataagctggttggtctgttcgtgccatcttaacattcaagttttaatgatattaatgatggcatagctgtatctggttcagaatgtgattcatgtcaatgcttttcgttcaattttcttcatgtgatatagcaaggttgcctcctatgtgtgaaagcattagctcaacagtgtggttgtttttttcagcttgattcccatcagaaattaaagaaattgcttga

SEQ ID NO: 70332 - DNA, 717 bp, Prunus persica
  Intron number 2 from transcript ppa008193m (locus ppa00819 3m.g) derived from phytozome v7.0 (chr-ID scaffold_3; pos 1672645 to 1673361 reverse strand)
gaaagatacgtctttaagcgccgcagtatatatatctcgctttcgtcagatttagtcattttcttagtctttgtttatgcttttgtttttgtatggatgctgagaaactgcatttgatataaatctgaaagatcagatgttttattattattatagctgtttgtttgtttggtgtttgaaatgatgggtactattaaatttgagctgcattgggcgagattgggtaacttttgcttttgccagatctgtatgggtcgtttagctttggtatcagttgatagttatggtatattttatttctctaatgttcctttggattaaagtttcttttttgccaatttaaacagcttcgttgggttgaacttaattgattttagaagatgaaatgtttgtctgccgtttggggactgtttcttagatgaacttgttatacaataccaatactgtgaggagttattgtatttttgattgcacagagttgttgtcgagcgagatgaacatgaaactctacaatttcggttgcatggtgatgagtggttgtgatgcgtattgattaggcatgaaattgtgctatctgcgtagttctccctgttgtctttcttacctgttgatttaatcggaaaagatcttttgttattgaattcgaagttggtgcttaattactaaattttgtctttctcaggaatttacattataaatcttggcaaaacctgggac

SEQ ID NO: 70333 - DNA, 1054 bp, Prunus persica
  Intron number 3 from transcript ppa005209m (locus ppa00520 9m.g) derived from phytozome v7.0 (chr-ID scaffold_8; pos 15998949 to 16000002 reverse strand)
cgcaaaaaagcttcatctctccccaagtattcttcccttcaaacactcccaaattattctgctttgatattgtagcctagaaattgaagaaaacactactttataagatatgcacaataatcactagcctggcattgtgtaccatattgctgaacacatacctcatatagaaggattcgaattacatagatgaggcccatgtgagtcccgactgtttagtgtcattataaatatggtacatgttgcattactcatatatcttcaaactggtagccaacttgaaaagttggactttctctctacacgggtctttaatttttcaattaatgtgatgatttgatttctgaatgtttctagtttctactatacaaagatagttcaatattacaagataagatttgcatacttgaaattcatgtcttccttcaatgttttgacatcagtgtacggttggaacaaggaacagtgacatctctaaacttggacgctctctgcacgggtccttaatttttcaattaatgttatgatttgatttctgaatgtttctagtttctactatacaaagatagttcaatattacaagataagatttgcatacttgaaattcatgtcttccttcaatgttttgacatcagtgtaaggttggaacaaggaacagtgacatctctaaacttggactctctctacacgggtccttaatttttcaattaatgttatgatttgatttctgaatgtttctagtttctactatacaaagatagttcaatattacaagataagatttgcatacttgaaattcatgtcttccttcaatgttttgacatcagtataaggttggaacaaggaagagtgacatctctaaacttggactctctctacacgtgtccttaatttttcaaataatgttatgatttgatttctgaatgtttctagtttctactatacaaagatagttcaatattacaagataagatttgcacacttgaaattcatgtcttccttcaatgttttgtcattagtgtaaggttggaacaaggaacagtgacatctctgc

SEQ ID NO: 70334 - DNA, 491 bp, Prunus persica
  Intron number 2 from transcript ppa006146m (locus ppa00614 6m.g) derived from phytozome v7.0 (chr-ID scaffold_2; pos 19091259 to 19091749 reverse strand)
tataagtaccctgtattggcctacatcactccgtatgtcttacagtctgtttggccatgctttttgggattgcattctattctctgtaaaatttaggtgttcgaattccattctctagcacatcctgtggaaccaaatacaacaagaattttagttaacatttcaaacaggaaaagaaaagaacttggaatttaagtatttaaaagttgaggaagtcatttggtccctaacacactctgaatcgaggtttattagcctttctccatacgaagtgccggtcttttggtttaagatagcttggtgcatttgatatgattccgcacagtttttggttataaaagtttgatgttgtctgacaacgtaggtatctagttagtagtttgtatagctgagtttctcatataatcatatcagacatatttgcattagtgagcttgaaatgtttgtgaactccttttcacacatcaaattgtgcaggaattccaagggct

SEQ ID NO: 70335 - DNA, 298 bp, Prunus persica
  Intron number 1 from transcript ppa1027185m (locus ppa1027 185m.g) derived from phytozome v7.0 (chr-ID scaffold_1; po s 34874189 to 34874486 reverse strand)
gccctattttcaggttagtaacttttagtaagtatatgtataatgctagatgtgaaagagaaacttagcaactgttttgatggctacagagcttgatgtggactgtagattgtgcaaaagttactcttttgccttttcattattattattattttgaatctccttctttaattatggttggaacggggtgctacatttcagtcatagaactttaattttgaagaatatattaaggttagtcgtccgcacgtaactcatcacttaagtttttggttttgcatatcctggcaggtttcat

SEQ ID NO: 70336 - DNA, 587 bp, Prunus persica
  Intron number 3 from transcript ppa003360m (locus ppa00336 0m.g) derived from phytozome v7.0 (chr-ID scaffold_5; pos 15420162 to 15420748)
gcatctatttgataagtgctgccatagaattcgtgagtttcaaacaaacattcggattctaattctttgcctcgtcagtttacttcatgaaatcggtttttgacagttcccaactaagccttcctcagaatttgcacttgaaatataaagtttcccatgagtaagtttcattttcaacttgcggagtgctgtcacagactggcagcaagagtacttctccaagaaaaagcctagttggctatgggactcattgaaatatctctgtagggacataataaatccagtcaaaaaaagttacatctattaatgttggaaaacaaagttagttttctaacattaattaacctgataaagttcatttaatatgacaagagctaatgaccatttgattaattggttaatcaaagagaagactcataaattaaccaaaaagtccaaggctgccaagataaatttgttgtgaacatccctaaacaattcattttacaatttaagctctgacaaatacaatgaccactattgccacattactaatttagaccgatggagcaggggttactgattctcacaatccaagctcagatacc

SEQ ID NO: 70337 - DNA, 776 bp, Prunus persica
  Intron number 1 from transcript ppa007710m (locus ppa00771 0m.g) derived from phytozome v7.0 (chr-ID scaffold_7; pos 18124734 to 18125509 reverse strand)
acccagaaagtgtgcaaggttttcaagagtggcaggttccgttttcaactctgattgcattattgagcatttttaatttgaaccatttgtattttttatcctatttctttatcaagacggcaactttttaaatgaactgtcatgatttggcaaggcctttgcctttaattagtattattactgtttttttcaatttcattggaattcagcagatgaagatgtgggtcccacttcaaaaaaaaatattatatgtccttttccaattgattaaaaagttagctgttgcgaaagagatagtgagcaagtcatgagggaaaagaattctacaatcatgaagtcatgcattgaattagtcatgttactcttgtaatagcatttaactggaaacttgttttcttaataatccctgtcctttgctttgataatgtatttaaattttctgctattgctgaccacattagtatgacggcatgctgggacttcaactcattttcatctggtaaacacttttttgtcttgagatcattcagcttaaaaatctagttcagtttaactcatatatcctttaaattccaatcctagtttgtggtgtgattttaattccatatttgtgactgccatcctagttataaaatttggcacatgctgcataacccattttcttcttcctgcatattttcagaattacattgtgttgaaactaattatgtttttttgttgttgccatgtttgataatgcagtcagaggtgaactttctaggaaggctttctcatcc

SEQ ID NO: 70338 - DNA, 778 bp, Prunus persica
  Intron number 1 from transcript ppa003609m (locus ppa00360 9m.g) derived from phytozome v7.0 (chr-ID scaffold_1; pos 43096053 to 43096830 reverse strand)
tctccacctctctctccttccattccttgtacaaggtaagctctcaccgccgcacttttctattttactgtttgattgccgagagaagaaaaccagtgatattcaaaaaatcagaagaaatcaatgtcaaaatccttctccccatcaaaaacccaaatgcttctttttctaagctttccccttcagctcgtttactatgttcaatacttttatattcaaaattcttggccagaaaacgttggaaagtgaccgaaaagtcaaatcttgactcaaaagttttatatatatatatatatatatttgttgtttaatttgatgtgtttttttaattaattatttttatttaaagtatccctcggattatttttttattggaagaattttatccaattaggattctgagttgagtaaaatcggtcatggatgcttgagaaaatgaaggaatatcctgtaacccaatttgaaattttaattatttaagacctaaaataagtcaggtcaaatcacttgcaagaaatgtggggcgagggttttagtttgaacattgctctgtgtgtggtacgaaagcatttcattcactctcagttttctttcattttctcagaaaccaaacaaaggctaataatcttttcacattctgagtcttttatcacacatatactactatcgatgctgctatggtttccattcctgagttgcactctaacttcttcataatctctttatcgttaaatcattaccagtctgtgccgcaaggattcaggcaatcgaagggttt

SEQ ID NO: 70339 - DNA, 891 bp, Prunus persica
  Intron number 1 from transcript ppa023099m (locus ppa02309 9m.g) derived from phytozome v7.0 (chr-ID scaffold_1; pos 29616834 to 29617724 reverse strand)
catagcatcaacgcttgaacaatactcattcaagggtaataatatacatgaagaaatttgttcatgccataattttgaacatttcttgtgtctctgcataatttgttttaaaatttgttcattccataatctgaatttcatgcacagatatatggtggtctgtttatctttcaaataagattggcatgcttacataaatattcctgtattttatgtatacatataggtcacatttggtgtctaagattagatttgattagataactcagtagatttgttgatggaagaaatcaaggccaatcttaaaattttgttcaaggtgaaggtagaagatggattagttatgtcccttccaatccccacaaaatgatatgatatcaatatgtatcccttctaatccctacaaaatgaaaaatcattcaactctatcttcatttcttgcatcaacataccttgaatcttgtgagttattcaatccaatttaatcctagacatcaaacgtggctttatgtctataacacaatattaagagttaatatatcacaatgtgcttccttgacaattttcatcttatttgcgtggctgtgtgcataaacgcatacaaatacttttttgtatcctatatgtaaataactgatattggatcaaaagtttaaacattttgttttgtgaacataaatcttgaggcaatccatgaaagaaaactgatatagaaatggttggaaaggacaatcaaaacatattggatagagaggatatatactttttgatataaattcacagtttcaaagtgatttgatcttgatgcttgttctttgcaacttggttaatcttcatgttgaatggaattcaactttgtcttgtgtttttcttccagtgaccacaaccgag

SEQ ID NO: 70340 - DNA, 859 bp, Prunus persica
  Intron number 1 from transcript ppa025253m (locus ppa02525 3m.g) derived from phytozome v7.0 (chr-ID scaffold_6; pos 22040113 to 22040971)
gtaattaagttgatgaaattcagacatgtggttccaagccacagggaactagttaataaaactaattaaggtgtttttaaacattggattatggataccattttaaacaattggaacaaatttgatttttctttattatattggttttctgtttggtgtgacagaaaaatgttcaaggaaaataataataataataatattaatccgatgatgatcatgagtcacaaggttgatgaggataagggacagatgtcatagactcgcatatgacataacatccaaagtaaaacgtggtgttatgagtcgtaagaattttgcaagacagaagaatatttcacttcataacatcaagaattttaggaggattaggacccttgttaatgatggattaattgaaagtccaagctcaattggtcactcatttgagagacaagatgttaatgatgtttttttgattatggacctatgtcattgttatgggtttgctgataaaaattctaccacacattcctgacatttgaagaaaccattaattagcgcttactgagttggtctgctgagttgagcttatatggttctttttttttttatgtgtttcagtttctgattaaatttgggtgcacggagagtgaacctgttatttttatcagagctaaaaacagacagaaaatctttgtcctcctttgaccatgatgaaaagattcaaagccccactgccgttgacattccattatagtcagccaagtctaccttcgattcttttaccaaagttcaagaaccaacagtgtagcaatgactacataagctccctgtgcaggcaaaagctttacaaagaagctcttcaagcatttgaattttt

SEQ ID NO: 70341 - DNA, 700 bp, Prunus persica
  Intron number 1 from transcript ppa025116m (locus ppa02511 6m.g) derived from phytozome v7.0 (chr-ID scaffold_5; pos 10283742 to 10284441)
gtgtgcacagctttctctggagagatcaattactggtacgtaattgcaaaactgcgtcgtttgattcgttttgttggtttctgaagttgtatgtattttgactgtgtcattgtgatagggtggtggtactgtatatatgatattgatgaaacagttgatgaatttatgaacttcagcattgcgcgaatgtgttttgttgactcttaaaaattttcgaggatttttggtaaagaatagctagattcctccaaaatttgtgcgtgtttagcgtttacctcaacaaatgttgacatgctttcaatattacgtcacatatgatccgtttgagctcaagaatttgagtttatgacatatgaatgtaggaagaagtgttttatattgttagttttctgtaaatttttgttgtcatactggttatgcattatttatatcaatgaacatttatattgactgaattgtggttatgtttggtatcctagaactcatgcatgttggattgacctctgaaatcctactaaagacgccgtcgttgatagcttgcatgtgttagctcatgtgaagttaaattgcttcaaaaaattgtgccttgtttattgtttatcccagaaaagattgacatgtttcggcactatatcatatattatcagtttgagctcaataatttgagtttaatacaggaatcgttctgctgagaatctct

SEQ ID NO: 70342 - DNA, 410 bp, Prunus persica
  Intron number 2 from transcript ppa012641m (locus ppa01264 1m.g) derived from phytozome v7.0 (chr-ID scaffold_2; pos 16796187 to 16796596 reverse strand)
agattttttgcgacgaggtccccaaaaccgccgaggtcagtaaactcagttacctgaagattctctctctctctctctgtttgtttcccgataaaattctttctgcgccttctttgattgtaattattaggtcacgcttgggacagctaccatagaaattacttacgcctgaaattctttgttaaatttgttgggaactctattttatttgattcaaacattatcctttgtcaaaaatcctcactattttttcagttttcaaccattccatgcaagacctgtccgattctctgttctcagtgcagtaaattgtagagtcaactgagattattagtactgatgttttgttcatggcgatagttttgtcactcattctcatgtttaatttcactacagaattttttggcact

SEQ ID NO: 70343 - DNA, 956 bp, Prunus persica
  Intron number 1 from transcript ppa013454m (locus ppa01345 4m.g) derived from phytozome v7.0 (chr-ID scaffold_3; pos 2830667 to 2831622)
ttagcaaaacaactgttctatactcgtcttgccaggttttgtctttgctcccatcttttaacttaaggcagtacagtgctttcatagaaggtgcatacgagtgtaaaattcttgttccaatctttgataggattcaggaatgctgaattgaatcttgtgataatttttgtgagattgtcacattttgattttgagtcgttgtgtttcaattcactctggatgttgcattccattatctagacacttctctttaagtctatccaaaatgagttgcgttgcatagttcaatttcaacactgtacaacaaataacaacatttaatgcctttcagatatgcactttacctattttccttgtaacagtccatatgcagcagcagtagtgataacgttacttaacatagactttccagatatgaaatatatgcttgtgatattatgtgcatgcattttttatgccaatagctcggtcaattttaaacatatgatatctactcatctactttgtttaggtacatgtacttttacgacaagaaggttggacttttgtgcctttgtttttggtatgaaatgtggctagctaagaaacacttggccaaaacagacatcctgggatttatgggttaatgactctgtgtgtgtgtgtgtgtgtgcgcgtgttagaaaatgttgcagtcatatcctccatgaaaatccaacatcactatttgttgataataatcggtggagtttatcttcggttcactagaccagaaataatttattacatttttaatcatactgattactggattacatttgatttagctatttatcaattttaaggtgtgttgacttaaaaatccctctcttctttgaatcattgatgcatagatgcaaacacgcgtaaatgcttgctttgttttcactactgcataacttccttctcaaaatttctctgcagcattccgggtcgtt

SEQ ID NO: 70344 - DNA, 571 bp, Prunus persica
  Intron number 2 from transcript ppa025378m (locus ppa02537 8m.g) derived from phytozome v7.0 (chr-ID scaffold_1; pos 34245934 to 34246504 reverse strand)
cctggggtagaaattgatcgatctaccttatggaagagagctagacaggacaaacatggtaacatccctgatccaaaggtggcagagaaagcaaaattaattgtaagcctactatcactctgttttaaatttttattaaactgtgaattattcttattacgtcgtatgttatatttttcgtcgtgtgaatgatattaccacgtcgaaaagtttttaaaaacgtcgttaaaggtctaaataggaatcactactaattttctgtaattatagcataagacgtcggtggttcattttcgcgtcgtttgaatgatattaccacgtcgaaacttttttaaaaacgtcgttaacggtctaaataggaatcactactctgttttctttaattatagcataagacgtcggttgtttattcatttcgtcgttttaaataaataaccacgtcggtataactaccgtcgtgataagttataataacgtcggtttatacgttattgcgtcgtgtgaaattatataatacgtcgtttgtaaataaataaccgtcgtgtgtttttttgtttatctttgttttagg

SEQ ID NO: 70345 - DNA, 564 bp, Prunus persica
  Intron number 3 from transcript ppa016887m (locus ppa01688 7m.g) derived from phytozome v7.0 (chr-ID scaffold_8; pos 1976717 to 1977280)
aaaaattatctcgcaatcagggttcctgtcattaggtaacttcatttcaactaaatcattggggaaccgcatggatagccattcaatctccgttctcttagttattgattgattgattgattaatgtttgacattcttacttctcaatataaatggcatccgaatgatctttggttggtcaattttgggacattcaatttgctagcatgcactatataccttactatgttaataaacacagattcatgcctaaaaaattctctctgtatcttcttcaaaaaatctgactcatgcttatgctctccctaaaatagatgagatattgatgcaaatacaaaatttgaattgagcacaaatttgcactatagccatgagaaacatactcaaacgaatttgcaatatatagccgggagaaacgtactcaatttcattttcgttgtttagttggagcattatgcagagaaccattcttcttttattgttttcccatatgagtgagcattacttctgttctcatgtgttagtctttcattgaaaattgcagtaagttcttcaaaaccagtg

SEQ ID NO: 70346 - DNA, 1018 bp, Prunus persica
  Intron number 1 from transcript ppa013693m (locus ppa01369 3m.g) derived from phytozome v7.0 (chr-ID scaffold_2; pos 20575288 to 20576305)
tctgtgaacgattcccgtgaaacgtaggcaacaaggtacttgtcaagcattaaattcatctctgtttttcctttttcttatgagtttctggcttcggtatgaagtgtgctcatagatctcaaatggggttgttttgtttttggcttttatggaagaaatgcattggaaatgtttgaaaatcttttgggttttccatttctgtgaacttccccttttctctggatctgtcttttctgatatggttatcttctacgtagtgtttctttttcctctttgaaaattgccttaaagatatggtcttttagttattttcattgtacagcaacaaaaaggaaataaatgtgaagtagattagttagtttggaggtgaagaaaatggattaaaggttaatacctgaagattaagttcctttggttctgggttcattattgaattatctatgttccgggttcattattgaattatctatgttctgggtttgcaaagaatgatttacatttttgcttgaagaattgaaatgtaaattctttatcgttatcatgacttgtgttcttgttggaagggtcattctttcaattgggtttctgtcaaattaggtcacggttcttgcggtagcctctttgttttgttatcaaagaatcatcttttaagctcggcttctgggtaatgatgaaaggcatgaaaacaatgctcacttttgcaatcaacatggatttaaaatatgcagaattgaatttgcaggccctattcttggaatattgtaaagctgaggaaagtaatttttggatatttcaacatggatgcatatgactttataattaaatcaattatatgcaatagtggagcttatgaagttagtaatttgcctataggtagttatttatgtttaacaacaggtgctacatgatactttcttcttcatttatctttcgtttctctgtttgtcacctggtggagcttccatattgctaagcagtaattgcttcagaaaattttgcttttatttcaggcggccat

SEQ ID NO: 70347 - DNA, 450 bp, Prunus persica
  Intron number 1 from transcript ppa017744m (locus ppa01774 4m.g) derived from phytozome v7.0 (chr-ID scaffold_2; pos 1558860 to 1559309)
gacgctcttataatcatccgcctcttcaagttcgggtaattaattacttttatttttttctatttgttgtgtctacgagataattacttatttgcccatgcactccttattcttccttggtaataaagtagtccctcaaaaatgttgtctatggaatatagaaaaaaatgtaacagatttgtttaatttacgaggaacatgttccaatgaacgcacaacgtgagaagaaacatagaaacatagattgaggacctgtagggaaaaatagagctggggagtttgagaattcaaacccatgataatttgagcttgattgggtcatatatcttctctgctttctgggcatctttgaagtatgctttttcttttcaatgttttgttgacaattctgctgtttaaaaggtattaaacatgcattctcttgctttgcagtataaaattctttgtggt

SEQ ID NO: 70348 - DNA, 569 bp, Prunus persica
  Intron number 1 from transcript ppa009908m (locus ppa00990 8m.g) derived from phytozome v7.0 (chr-ID scaffold_6; pos 4950841 to 4951409)
tctctagtatctactactgcggccatttggatctggtaacgctcattttctagtctttgaatgcttttttttttttttttaattactttagaagtttggatctttttctttatattttcgttgagatgaagcatcgttttctgatttctcgttcacaatttttgaagttgtagaaatcaaatattgggttttattttgtccattgtaatgtttcttcaatgtctatactttcctggatttgagtgatcttcttgctttaatcgggtgtggggtgtgaatgtttttgcacctttgataacagaaatgtaatgtgtgagtttgttaccttttcttttgttatccagggccttttagttttggattttttttatgttttggaaataaaagattgaattttttgtgaggtttgggtttgaaggcattgtgattttccatcaaaatgaagttttaaaatgtaaaacattggaagttttattactacttttagcatttaggattttttggttgaagttgtttatatgcttaatgcttttcttcaattcctctggtttgaagccttctagatcaag

SEQ ID NO: 70349 - DNA, 559 bp, Prunus persica
  Intron number 1 from transcript ppa015291m (locus ppa01529 1m.g) derived from phytozome v7.0 (chr-ID scaffold_7; pos 11251636 to 11252194 reverse strand)
tcttaacctttctaaaaccactggcttgatagaaggtaaatgaaaactatctcttgtttcttgtttttatcctggatttagataatacccttaaaattagagaatcttatttggtgtcagtaagatttggatatttttgagctactgaaatatgggagttatttgattgattattaacagcattggtcacttgcatgcagtccattttaaacagaaaaggatggaccatttaacttcgaataacgatgttcgtagttgtctgaaatattttaattatgtagtactactaaatatcagaacaaatgatggttttgaatgtcctctgtagtctgtctggaagaatcattaaatagatcaagcaattggggttgtggaaaagaagataaattgttttctgattatgattatatgtttaagtttagtgatttttaaagtaaatctggaagctttgatcgttttcggttaatgaaaattctctaagatgatacttacaatataaaacatatgttcctctctcttaaaaatgagtttctttttgtattaggggaaagagaatact

SEQ ID NO: 70350 - DNA, 677 bp, Prunus persica
  Intron number 2 from transcript ppa010007m (locus ppa01000 7m.g) derived from phytozome v7.0 (chr-ID scaffold_1; pos 40930953 to 40931629 reverse strand)
ttacagacgtttggccaaattttatcacccgggtttgttcctttatcttcattagaaatgcttttcaaacctttttcatatctgtaaattgctagtataatcacaaataaaaagaaacattatgtaaggaaatgatgtatgtaaaaattagtggttcaattaggtgaaaccctttttcttgaatctggtggccataatgaagggtgcctttgttttattttttatttggtcatgttaattccaatatgagaacctttttttaatttttttaatacaatcgatattctactttaatctaatctaaattatggggaaggggattcgaacttgggtgcagagtggggagcacatccgccctagccaacttggctaagtccatgtctgccaacatgagaacctttttgatgcaacaaagttatagtgcaaaacaggaactattggaagacattgagaattgttatttgcttttcttccttaattttcatgtaatattttactatctttccttgtgtattagatgggtgcatgtatttttatttcttttaaagtttggtcgtgagtgaatgctctttgcaatatatttgtcccctttgctttctattgatttttgggcttaaaattttgtctttattctctgaattttaagttgatctggttgtctttctcttttctagtct

SEQ ID NO: 70351 - DNA, 672 bp, Prunus persica
  Intron number 1 from transcript ppa010073m (locus ppa01007 3m.g) derived from phytozome v7.0 (chr-ID scaffold_1; pos 27869940 to 27870611)
tcttcttcttcttctttttcttccttttcttctctgtaagcatctgtttcttctttccttgttcttattatgcctttcactgctgtttgttgcagtttcagtaatcttagattgcatggcattatgtatttcttttatgttaataatctttgtgttttctaagttgcttgctgtaatgggatgtgagttttttattcttttgtgatctgggtatgcctgctttttctgtgaaattcataaatttagtagctttatgggtttgttccctttgatcttcagattacgatcatcataaactttggttttatcgcagtgttgaactcaattaagactccaagcgcacagtgattgttttttagtaattatgtttgatgagccctgatgttatatgaaattcatccgaattatgaattttgtggactgtaaatgataaagatttttaatcccctaaggtaattcaatgcccattagctgcaagtggacggctatatcatgtttactcttctgacaaataattgaaaactttctgttgcccagatggttgttatatagttttgcctgatcttcctttttggctaaaaatttaaaggtaacgttgcgtttattctttttattctgtctaaattttgatccttttcttgtcgcaatagtgctgttaaacttgttggaagc

SEQ ID NO: 70352 - DNA, 465 bp, Prunus persica
  Intron number 1 from transcript ppa009225m (locus ppa00922 5m.g) derived from phytozome v7.0 (chr-ID scaffold_1; pos 34637468 to 34637932)
gatcaaggccaggtacgtatgtgcattttcgtttaagtaggtctgtaattgttgttatgtcatgttcttgatttatgattttgttaatctggtaacaagtttttgattcttgatcaagcttctctcgcattttcgtttgcgtaggttttgtagttgttgtatgtcgtcttcttgatttatgattcttgtttttgctgttgttttccttattttgactttgatttgatatttgttttcgtttgggtaggttttgtaattgttgtatgtcatcttctggttaataaattttacagtgggagggcggctctgttgtttttgtgcaatttcgtttgagtaggttttgtaattgttgttatgattcttgttaattttttttggcttttgctttcattattttgacgttgattttttcatttttgtttgtttgggtcaagggtttggtggatagaataagtgagttaggtg

SEQ ID NO: 70353 - DNA, 983 bp, Prunus persica
  Intron number 1 from transcript ppa022748m (locus ppa02274 8m.g) derived from phytozome v7.0 (chr-ID scaffold_6; pos 18386584 to 18387566)
tgcttcattgatgtgagagaaagggctttctaaaaggtttaagcgagaatttgagatagtatagtgttttgagcgagcgatgggtttctaaaaactccgcgctcgcgaagttaaagtgaatttttgtttagcgcctcctgaaaacacgatagtcctaataaggtatcgtcataattttaaaaatcaactcaatacatcggtgaattaggtaccttaccacgacggttttataacattcgttgtcttttaaaacaccgcaacaatttttatataaagggtcgtctattgggtgtcgtagtttaacaaaattgttgtagtgttcctatttgtacacactctatatgtagtatatatatatccctccttgaaagaagaataaacataccagtttaaaccctaattacttttgagttggtatcaaagtgggtttcgatatgtctctacaacatcaaaacccaaatcctaaaaactacctatttccactgcacctagcatatacacccaaacttgcgccgtctcatatctcttacagttgttattgccacctaatcttctgctccagtcgccatctatcgctatgccagatgtcacagaatcttcttcaacccatattgtaatggttcatactccaccaatctacctatgggattcaaattgaatggatccaaatatgagatgtgggcttcgatgatcgaactctatgctactacataaggcaaattgagttacttgactggcgacactaacgcccctgattcctaagacccacaatttgggaagtgaaaaattgctgatgctattgtgaaaagttggatgctgcgaactatggaaccgagtttgttgaatatgtttcatactttacctactgctaaggaaatttgggatgttgttaatcagatgttttataatggctctaacatatcccagctctatgaactgtggtgctaggctacccgtctcaagcaaaagggtcttcctgtctc

SEQ ID NO: 70354 - DNA, 252 bp, Prunus persica
  Intron number 2 from transcript ppa008513m (locus ppa00851 3m.g) derived from phytozome v7.0 (chr-ID scaffold_6; pos 2778889 to 2779140 reverse strand)
ttctgtgggtgatcgcaagaccttaactcatccaggtaaccctcaagttatgtcatgcttttctaattgggacccttaattttgattatgcttttagggaaagaaattcatgatttaaagtatttgattaagtcgaattctttgatatgttttcttaatgatgctgcttttcttttctttagcagagctcattcactgctttatttttgtttcgtattcatgtagaaattaaaaacaaaaagctcaagagca

SEQ ID NO: 70355 - DNA, 500 bp, Prunus persica
  Intron number 2 from transcript ppa026448m (locus ppa02644 8m.g) derived from phytozome v7.0 (chr-ID scaffold_6; pos 3717301 to 3717800)
agcatccaggtctgttgaatcaaacaatcaattagttaacaaatcttctattttctatttttttaggtgactaaattgatgatcagttacttcatttcaaaagctataaacaatgtataaacaagccaatgcttcatggaaattagttattcttcacttacaaagtgctcaatgggaactgcgcagaaactatgaccttacccagcaaatatctgacaactctcctagatcaaagaagatagttagaaagttgtaaaaaaattgaataagggtaatcatggaaaataaaactcaaattttttaatgtattaatgtatcattcaaaaatttaattaagaggaataatccatcgcacatgagaagaagtgagaagttccaaccaagatggttacggtgaaggttgctagcattcccctatttaaatatctagatagctaaattactttgtatctttatttataactaaaattacatttgattaattgcagaaaagataactg

SEQ ID NO: 70356 - DNA, 290 bp, Prunus persica
  Intron number 1 from transcript ppa002174m (locus ppa00217 4m.g) derived from phytozome v7.0 (chr-ID scaffold_9; pos 1691088 to 1691377)
cacggcgtgctgatactttcgagaagttaaataaagtatgtctgattctttacttgttacgagatgtatcttataatattgcagtgtgtagggaataaacttactagaactggaaaaaaattggtctgtcttctaaatgatatgataattctttgctagttacttcgattgtttgattaattactcttgttcgtgttggtatttatcagttcctgcctttttttgtgtgcatgttgtggcatctccatctttcagatcggccaaggaacttatagtagtgtttacaaggc

SEQ ID NO: 70357 - DNA, 867 bp, Prunus persica
  Intron number 4 from transcript ppa009448m (locus ppa00944 8m.g) derived from phytozome v7.0 (chr-ID scaffold_8; pos 4695177 to 4696043)
tgaggttgacatgggtagataatttttctgaccctgttttctctctctctctctttttaaatgagttaattcacatttccctaattgcttaatcagacaaatgaggcacaagtatttgttcaagttctatgaatatttcttctctctctctctctctctctctctctctctctctctcacacacacacacattccatgtgtgtgttgggtgtgtagcctacgggttttgtccgacgacattcatacatatgcaagcagcatgtgcaaacacagccttttgccttgagcagaagatgtgattgtccatctccccaccagggtacacagatttgacttttcgaaagtgttaaaaatggacatttccagaacagatattcagagcatggttctgctttacacttgacttcctttttgctaaatacttcatatatgtcctatagattttttatttttttaactttatatatgcactgctgggtgtcctctcttgttgggggggccagcatcgaaatccttttgtactattctctagattagacagtttttttttaaagaaacgtgtaaaagttatttccggacttcaattcagtgctacatgatctttcattttttttacaagacttcaatttcctatctctcagttaggagttgacctatttcaaacctgtgttccagtaaaacctgattcggttcttgctgtttctgtatctcactttctgatttttccccttggcgtcctctgttcaactcatagttcagtttctaatcttatcaacatgccaaaaagaagaattttctgtattgagactttcctgaatggactttcatgagtatttctttataattttgcaattgttttcaggtttg

SEQ ID NO: 70358 - DNA, 846 bp, Prunus persica
  Intron number 2 from transcript ppa016309m (locus ppa01630 9m.g) derived from phytozome v7.0 (chr-ID scaffold_3; pos 17782523 to 17783368)
tcctctcagattttggcaacgctggatctataacagttagtattttgtattctcttcttttttctctcgtatctcttctcttcgtagtatcaaactaaatttttcgtgttaaagttaccaactaaatatatgtgtgtgatttgatttattttgtattgcaaggataatcgaattgagactgaaaaaaaaagtagatattaattacattaatacgaaatgcttctattttttctctatatatattcattagatttcattagatttgttatgtacatatgaaggagtgcaagtctgaatattcattggctttcattgttcacaagacagtgtcttcacacacacacacacacacacacacatatatatatatatagaaatagatctagaataatactacttcagacaagtaggaaaatgtattgattggattgtgttgctttctctttagatatacaagtacaacaacctcaacctgctcctatcaactctaatgttcgtgtaaattttgaagaactagaagatgacaaaagaaatcgaagggatctcattccctcaggtacgttacccatgttcatcatacacgtacaattagtatatatagagtatagcagtcgaagtaaaaaagttctataagcatttttgtatgttttgcttttcttttttataaacatctacggatttcacaatgcagttacgggtttcttccaaggagttgttaagaatcttctcaaactgttaggtaagaatcttctctagctacatcgaacattattgattcttggtttaattctcacttttgtaatacgttgtagattaatattgttttcactgttaacctaggaatcc

SEQ ID NO: 70359 - DNA, 901 bp, Prunus persica
  Intron number 1 from transcript ppa009838m (locus ppa00983 8m.g) derived from phytozome v7.0 (chr-ID scaffold_1; pos 8412965 to 8413865 reverse strand)
caccaccaccaacgctctcggtgcctcaagttcaggtacgcattttatttttatatttcttgattttattttattttaattccttctttgtttggcttacgctcagtcgggtctgtttgtgttgcacgaaaaaggacctctggagattttagaaaatcaatgggttttaacgatgaaaacagactgagcactgaaaatatttttgcccttttattttctggaaaataatgggtatgtgaattataaattttcatgggctaggtggttttggagccttggtaggtagtattttctttggagcattcatagatttatgagctaaagatttttgctttttctgtttgtaaacgaagatgggtgaaaagctgcgtacccaattcaaaaaatagtaacttgcgtggaatagtgtcagattttcagctgagttatctactgataatgggtttgaagcttttgttgtgtcatttgcttaactcccatcaaactgttaagctaaacttcctttcgctttagaattaggtgtttttagttttagataccacagaatatgtaatataggtggagtagcacataaaaacatcgaacctgtccatcacagtttttgttgtaatgtaatttaccaatttttagttgcaatccaatttcggtgcttggtgtccaaaatgatttggatattacaactatcaaagacctatatttgtaatttgttttgaagttttatatattttaggcgaaagacaaaatcgttggtcactagatctgttcatttgatgattttgttcaggcactgccagggctactcataccacaactttttcataggcagcttgggtgcagtttcgtttttctttttttcctacttatgattgagtagtttggttttctggttcaggtactgcaa

SEQ ID NO: 70360 - DNA, 770 bp, Prunus persica
  Intron number 2 from transcript ppb009195m (locus ppb00919 5m.g) derived from phytozome v7.0 (chr-ID scaffold_2; pos 7942458 to 7943227)
aaaagctccctaagggccaagagaaggtatgtcgtcctgcaaaaagactgctaattattcagcatttgatactccaagtaggatataatttgtgaacagcaaccataatttactgagcaacatgttattagaaatcagattgattgtttttttctggaaaaattatttttatctgaaaatagcatcagaccagtaaaaagcagtgacaattaatgcaaatgataaaaagctatgattttgatcagatgcgtgaaattattagaaatttggagattgaatttgggtttttggaagagaaagagaatatgtgtttaggtttttggattcaattagaagaagaacaggcacatacctgacctgagtttgatttgagagttgagggttgagagtgaaatatggactagctcatattatatgatcacttcgttgcctatcgcgatgttaggaatgtgagatatcttggcccaatcttgtcccatcttattcttacaccttttctccagggcagggcaaaagaagatacgcagatgagaaagagatggtggcaaaccctcttctggcaggaattccagacttggacacgatccaatttctagcacttgaagagaagtgagacgtccaagacccttccgtccaaagatttcagagttgaagagatgctgagagtgtgaagagtggtagggagcagctgttccttgagcaacgtctccaagacatggtcacttccactgatagaaaattgttcaagggagacaagtgcttgcaaaccc

SEQ ID NO: 70361 - DNA, 640 bp, Prunus persica
  Intron number 1 from transcript ppa009654m (locus ppa00965 4m.g) derived from phytozome v7.0 (chr-ID scaffold_8; pos 10512988 to 10513627)
tggaggtgggttccgatgggaatgagagagagaattagggaggtttatgattaaagaaaaaaactagaaagaaaaaagggatgtggacgtgagttgcgatgggagagagagagagaacgagggaggttgttgaataaagataacaaatagagagaaaaaaaaaaaaaagaatggggaggttgggtttttgattaaagaaaaagaaaatagagaggaaaaaaaaaaaaaaaagataaacagaatgaggaggttgggttgggtctgaatctgatgatttttttatttttggtttaacataattttagcctttaaaaatagcagaattttagttgtttttttatttattttaatattattgttttaaatttaattattacaataattatttttagtccgacacagcaccaaacataggtcttcactatttttacaatctagcttcttagtccgatgcagcaccaaacgtaggtcagtacttaatccagcttaggccaatccgagttaatccaagacagtcctaaggtttagtccaatccatgacagtccgccgtaccaaacgatcccaaaaagaaaacacgccagtcgtcttcctcgcagagtcgcagccaatttgcatactcgcaaaatttattcaggttca

SEQ ID NO: 70362 - DNA, 472 bp, Prunus persica
  Intron number 2 from transcript ppa009654m (locus ppa00965 4m.g) derived from phytozome v7.0 (chr-ID scaffold_8; pos 10513852 to 10514323)
tgcgaaacaagaagctcaattcacagacccaggtataatttcacttcacgcatgtatatttgtgtttctactgacagcatttgtatttaatttattcaattttgggggtttttttttctgttcttttctttttataggttgattgttaacgttcaatgggtagttgtaatacggtttccattttaatgagaaactctgcttctgattctctatcggaaaagaatgatgtctttatttttcttttgatgttgggctgtccatccttcatttagtcttaaaaagttttgattttctaatcccctctttattgtcatatgtccaaaatccagattcaatgagcaattttcgggcatttaagttgctaaattacattttagaattcaaatttcaattaatttgtgaccaaatgctcgtattgtttgtttgtcttttcacagttgagtggcaaatttctgccattagggctattcgt

SEQ ID NO: 70363 - DNA, 648 bp, Prunus persica
  Intron number 2 from transcript ppa010554m (locus ppa01055 4m.g) derived from phytozome v7.0 (chr-ID scaffold_2; pos 9559669 to 9560316 reverse strand)
atcaggcacgtttgatttatccatttgggatccgtacttttgttatgaaagttattctgtgatgtcatgttgtttgctgcctcattaggttgttcatgcttttggcagtggttggatagtgtaaggttgtttcagatccatcttgcttgtgaacttgggtagtttgtttcctttgatgcatttgtttagtctttctattttacatgcattaaattgcttgtttttcgataaaaggaaattctaaaatgatcagtaatggagttcatggaatttttgtttgtctcacaagttaatgaggttgtcatgatcattatcactgtgaagcaaggccaagtctgctcatgtttttatctgtagtttatagtgcaagatgttgtttcctacagcaattaattttgaaacaactgggaagatgatatgttctgacgtatattacttttgttctatgtatatttggattgtcaactttgagttttcgcacaaattttctgaattatacagaacactatgagttgtattcaagatgtcaccgtaacgttttatcatttttctgagggaaatacggtataattttgatgaactgaaattttagctatgctgaagtgttatttttatattctgtctgtccaggaaactgcatactggtca

SEQ ID NO: 70364 - DNA, 469 bp, Prunus persica
  Intron number 1 from transcript ppa010554m (locus ppa01055 4m.g) derived from phytozome v7.0 (chr-ID scaffold_2; pos 9560485 to 9560953 reverse strand)
aggtaccgtttcttaaccaaagccttctcgtgcgtttggttaccgagaaaaacaaaacaaaaagaaggaaaattttatttcttcgaagtatggaagctttgatttctttgattttcgtgcagtttattggtagccaaacaagaatacaaaattaagagatgaaacggggctttaaattctgcttcagtctttctgagcatgtgcttgttttgccctaaatttggcaaatttcaagaatatatgttttaacattgtcacacatttattttccaatgctggaaaaagagattttttaaatattaatttgtagttagacaactaagtccatgagcataatactacactatacacatacaacatacatacacaaatataaataaattgtgaaagtttctcttgttctttaaatttggatttgttttttggtgagcaagtcttgaaggatttcatttccgttttgtagcttgtt

SEQ ID NO: 70365 - DNA, 449 bp, Prunus persica
  Intron number 2 from transcript ppa010832m (locus ppa01083 2m.g) derived from phytozome v7.0 (chr-ID scaffold_1; pos 44281119 to 44281567 reverse strand)
gatatcaatcagattcgtgaaattttgcctcaccggtgagttaccttatctgcagcatttagggtcaaatttggttttcttgtgttgttttgatcaatcagggaaaaataaaaaaacaagcaagcaaacccaccttgcagatttttattgaacttgataatagaattttataatcttgtgtttactgttttcagtggagtcaaagccattgtttttatcatttttcttccctatgttttagttgattatttatgttttctgttgatctcgaaataataaggaagcattgtaagatatattattcagtaagggtttttatttatttattttttatttttatcatttaattttcttgaagaaacccaatttatatttgaattttaatgtgcagttttgttttttcttgttttttaggtttccatttctcttagtggatagagtgattgaat

SEQ ID NO: 70366 - DNA, 900 bp, Prunus persica
  Intron number 1 from transcript ppa005470m (locus ppa00547 0m.g) derived from phytozome v7.0 (chr-ID scaffold_5; pos 12556743 to 12557642)
caagtttattagcggcggtgctgatatcatcgcaggtaaacaaacatattttctccaaatctttttttttcctttgaggtaatgttttccaaccacatagtaaatcacatcattaacaattttctttcgcttaaaaagtgtgaccttaataataccacatatctctgatatgtatacgtgtacggtgttatgtaaatgtggttctaattagtgttagttgtatatgacacgaattgtgattcctaaatgtggtacggaattgatattattgatgatggaatatggggatgaaatagatcgttacataaaagttttggggttactttttgcgaggaagagacaagtttcatgtgaggctgttgctcttttccctcgtgattcttttctggcaatgcttcgatagcaatcaggccaatatgtttctgttcgtttttgtttgcttgtgtttttttttttctcagttacaaagttaaaatgtttgtttgtgtgttttgttaaggactgtgtttgtttggtatcgttttcccatctgcacccaacttcgtggcttagcatgggtggagcggaggagtttgagtatgaattgtattcttcctactccaagaaccaagagtcttttacgtgatccctgattttattttttaccctttgtcttttgtgtgtactgcaagattccatctgatatgtttttacaaaaataaacaaaattgaaccaaaaaataaaaagcattaggattataatataatttagtcacgtccttttcagttttcaatcaagaattaaggtagctaatcaattcaatgtcttttattattatatttgcaacaaattactaaatttttatgccatcaaactggtacacaggtgtggtgtgtgggccagcaagcctggtgaactcc

SEQ ID NO: 70367 - DNA, 607 bp, Prunus persica
  Intron number 2 from transcript ppa000114m (locus ppa00011 4m.g) derived from phytozome v7.0 (chr-ID scaffold_7; pos 18567270 to 18567876)
gaaggtctatatttgtagctcgactaataattcccttctctccccttcactctattcccccctttaatatacagatttgcagaatgtagttattatgcttgtatggcaatcatgttgaattcaacttttacatatgcgtggcatctttgtaggcctcaatgtcaaaacatttttgggacattccttgtagttgattcatagtgttcgagctgaagtcattaatcaactgtatcaattttcttgcaattgtagtatgtttaagcatagagggacacctagtcttttcttttatcttattttcaatttaaatacattttgtgcttcctatttttgtaccccgaaaaaaattatacgcatgtcgagctgcaatggttaaattttattcacatagttttagatcatgatcaggccagaaaacagcacaatatgtctgggtttctttttatcagatccaacagatttggattattttatctaacaaacggtaccaaatattatcattacatgagattaaaatcataatgatgtgatcagacattgttttgacttttggaatctcttctgttttgtagttctcttgaaacagagggtggagctgcaaaaactg

SEQ ID NO: 70368 - DNA, 504 bp, Prunus persica
  Intron number 1 from transcript ppb023496m (locus ppb02349 6m.g) derived from phytozome v7.0 (chr-ID scaffold_1; pos 29086045 to 29086548 reverse strand)
accgcacttagtatactgcgcgacatcattgtcaagtaacttcggaggaataagtatgcagaagaaaagtttgtgcgccaatgccacacactaatgcgattgtgtggctaccatttgtgaatgaagcatcgttgtcaactaaagaccttttccttttcccatttgctgctttaacaagtttttttttttgtcattaatctccgctccctttctctccaacaaacggtactaaaggactcaaagtacctcaaaaagtaggaaggctccatcaggacagcagtagctgctgctagatcattttctacttgcaagatgggattgaacttcttaccttcctgctctgtgtgaggttcttcttcttgctctgtttaagcaacataacgaagccatggcttgcagtattgatggcctaacaaggagctctcatgatttggaatcaaaatgaagtcaaacacttcatcactttctcctggaaccagtctcgcctctgctgaatctttatcc

SEQ ID NO: 70369 - DNA, 571 bp, Prunus persica
  Intron number 1 from transcript ppa003339m (locus ppa00333 9m.g) derived from phytozome v7.0 (chr-ID scaffold_1; pos 31017129 to 31017699)
gtcttattcaggttcttactctctctctctctctctctctcttcatctctgttagctgtctctatttcgtattaaagttttttccttggaatctgttttattgattaggcttcaaaatttggtctttgatgtgaattaattgaggataattttgggcaagaattgggtttcttgttaaacatgtttctccttttagtttgaggatggtttggctcatgacctattccagttttctttaactgacattcaattacaaagatgcctctagtctagtttgagtttgttcattagagtgaatttttagattgagaacctgggaaatgtttgaccttgagtcaatttgtatttgggaaagttattattgaattaggtgtctgcttaagtttaattatctgaatttaactgggtatcctatattttctctttacgttttgagtctcatgacttctgctggcaagacatttacactgcagcgtacttctctttccttttaaaggattttcttccacatttatttatatgttaacggttccaacacatgtaacattattcacatgattgcatcttcagg

SEQ ID NO: 70370 - DNA, 482 bp, Prunus persica
  Intron number 1 from transcript ppa010748m (locus ppa01074 8m.g) derived from phytozome v7.0 (chr-ID scaffold_2; pos 23528481 to 23528962)
gcggaggtctctcatctctctatcataatctatgtgttaatttttgtaattattttgctgcattcgttttctttgaagattaggaatatgtattcaattttaattttcttttatttaaaattttcaaagccccactggaaaatggaaatgattgaactctctttgcttgtgaatatgatgaaattgcgagttataacttgcttctccattaaaaatgagtgttgaagtaaattgatatgggaagtaacagttcaattagatactgttgtgttagcttggtgataatagctgctatggaatctatggtttctttgtatttttttctaatatttttgggtgtcaactcgaagacaatctaatcttaacaagaagcaagcaatacttctcattttacattattttgcctgtttccattcccaaattcattcattattttaagatagaattatttggtcatcccattactttgattcttgcaggtc

SEQ ID NO: 70371 - DNA, 680 bp, Prunus persica
  Intron number 1 from transcript ppa004819m (locus ppa00481 9m.g) derived from phytozome v7.0 (chr-ID scaffold_8; pos 16637344 to 16638023)
cgcttggcttggcttggcttcagatcgaaaacaaggtaggttttcagatccgtacgtaattctcagccacctttgatcttaatttccttgattcaattccaattgcaaccgtctgatgataaactccaatgggctcgaactacacgtgattagagttcgtgttcgttcaagcttttttttttaaatccaaagttggttaattttagcgaattgttgaaatcagcaattggatgtgatttatattgttgttgtttcctcaaattttgtttcttttgaacaaattttggggcacttagtttgttgctgagaaaaggaggggaaagaagaaggtcgcattgtcaaggattggagtttttgttatttgggttcggggacactataatctacacaacccaaactattttcagtatttagacagttaaattactgtaattcaataatctattttatgttactctctgtttctgatattcatacaaacttagtgttaattaggcaaaattttattgctatgatctaattcttcactcatttgattggactgatttgcaatgttgctttaggaagtgatcctagttgacatcttataaaattggtttcacaattcgcagttgctttggatggcttctagtggtttttattcataattgctgaatttttttttttcgtgaagcttgcaa

SEQ ID NO: 70372 - DNA, 500 bp, Prunus persica
  Intron number 1 from transcript ppa007754m (locus ppa00775 4m.g) derived from phytozome v7.0 (chr-ID scaffold_1; pos 46608879 to 46609378)
gtgctagaaaacaggctcttgattggattggaaaggtaggttcttgttcttctttttgtttttttttggggttcttttcatttgatggtaagttttatgacatgggtattattctccaatcagaaagagcttttcttttcaattgtttttgggttcgaagaaataagggtgctgggtttttgcaagtgaaccttaagtttaatgtttttttggggtaaatttttatgtttgggttttggatgaacatggttctggttgtctttcatttggacatctcattgtatcccaataattcttagtttggcttggtggggaatctttttttgttttgcttttgggccaaagccaaaacagaaattggaattttaccctttaccctgttcttagatgtacatgccaaggaccaagccagaaaaagaggggaaaagtttgattatatttttcttgggttgattaagttaatgattattgctaacattgtttttggtttcaacaggcaa

SEQ ID NO: 70373 - DNA, 917 bp, Prunus persica
  Intron number 1 from transcript ppa024896m (locus ppa02489 6m.g) derived from phytozome v7.0 (chr-ID scaffold_2; pos 23828618 to 23829534 reverse strand)
ggttcgagcccggaaggaggtactagttctacattttaataatgcatgtgggtttgttttttaatacaggatttgcacttggtttcacgatttaagaacatgcaggttgtttattgtacgttggccttgcctttgttgttctgcttttagattcttcttttttccttaaaaaagatttctattttcctaaaaagatgatctttttatgtcgcaaggccaacgagctcagtgagtatcattatccgtattcatgtttttttaataccggttgtcatgagtatcattggttcacttgtttattctatcgactttcctgaattataaaccaaagttgttatttttattgcttgttgtcctttgtccgaaccagtacttgatatcaggtttgtttgtgctttctaatcttttttttgggacttctctgatattgtggtgtttgttaagtaagtccccctccccctaaatcgtatttgggcaagttaagttagacggttttattgtgaacacaatcttttaccatgaattaaatgattactaattgtgtgaacatttgtacttttgagtatttaagtgctatagatggccaatgatgcgttagccacagcatctagctagttctgatgcagtctgcttctcaatatagatatttaactcaaaagattttttctttcatgtcttcttttgttttgttttttgttttttgtatttcaaataaggaacttgtgatttatggagttttcagtttggatttattgaggtctttacttatatgtttgcaagttcatgccttttcagttcattcatttatctcatttgcaatgtatctggattcctattttgagggatgatagaaatttctatatgctgtgcttctaatagaaagaaaactgatatttctcactaatggttcaaagagg

SEQ ID NO: 70374 - DNA, 794 bp, Prunus persica
  Intron number 1 from transcript ppa1027188m (locus ppa1027 188m.g) derived from phytozome v7.0 (chr-ID scaffold_4; po s 1402789 to 1403582)
gtgggcttttttacctcatggtataacaaatttgtgggtttagccttgcaagatgtgctttaatttccagggaagaggtaattccagtgtgagttaaaattgtaattatatctaaagctcatcatctgttgcagacctgtttcaggatcaaacaatcattcagaacatcttatttgacctaggttgcatcccaatccacctttctgaattcttttggtgggatccagcatccactaaaaggagactcccatagtcaagcactgagaaaactggtggcagcttaactccttgcctgctagagaaaaataaaacatggagacggggagagagaatgaggaaatttgctgcatgagtaacggagaataaaatattcattcagattttgggtttataataaacttttactgtttcacttacttatggtgtgctaccctaacaacaggttcataaaatattcattttcttggaaggtttttggtctgcctcttattccttccattgtctcttcaccaggaacagacatttgcctctctctctctctctctctctctctctatgcttattcatgtcatgtactgagaaacaccagtttcaaagccagcactttcaactttttcttattctctccttggtatcattgttcaactcttttttctcctttttgggtcaatcttaaaaagttccatcttttccagactcgaacttttgaggttgcctgtatgttatgctttgactcgagattttcatttttcttgtgtttctgacaatgcaagtttgctgtgatcttcaagtcg

SEQ ID NO: 70375 - DNA, 695 bp, Prunus persica
  Intron number 2 from transcript ppa1027188m (locus ppa1027 188m.g) derived from phytozome v7.0 (chr-ID scaffold_4; po s 1403609 to 1404303)
gtggacaaggtaattaataaatggtgctctgattatttactctggtaataattcatatctgttaagggttttgactgttttcccactgaagaaacttgagctttaatatgttccttttttccttttctctgcaacatgatgttcttaaattttctccacctatttattgttttgtctgcttcagtattcatatgggtcatgcattcaggcttgtgctaccttctttctattgatctttatccactccatctaccaaggcggtcatgcaggcctcatgattttgtatatatttcccaaaactgatatgtctaataatcctttccttcattgaattgtagagtaaataggaccaccgcacaatttaatgtcaacagtgacctcttgcaaaatgttcctctatattccctcacttcgttacttacttactgggatatctgacaaggtttctcaatcaaattaattaatgctttttgttggttctgtagcaattcacaaagttttcttatcttgttcattaatgacaacatgttaccatgcatgcctttcttgttttccacctaaatatttgtctagaaccagtcatcagaattctacttctcaagcttgcaattacttgatattttttagaaaaactttctatgaactcatgtatatttgcagaaaacgttggcgtctttctccggtagatttagcaa

SEQ ID NO: 70376 - DNA, 738 bp, Prunus persica
  Intron number 2 from transcript ppa000598m (locus ppa00059 8m.g) derived from phytozome v7.0 (chr-ID scaffold_1; pos 11745516 to 11746253)
aagccacattcagcatagattaaccgaacttgaaggtgactggtttatgagaactacacaccgagtgtttcacattcttttgctcagtatgccattcgtgttaaaccttgtgaataatttttattcagcatctgatgacatttgaatttttggtaaagcagcgagataatttaatcaataggttcctaattgttgttgtggaataatattctattagctaatcaggcggtaggcagtgggatgcagttgggtttgttactatgttcaaaacataagaaggaaaaaagaagagaagaagaagctaattctttatttattgatgtcgggtgtctctttgtactctaaacaatgttttagagtagatgtggaagttaaagattggctaggcctcaactcctgtggtgaagaggggtgagaccgggttagggtaggtcttatgtttgaatttttctcttgcaaaagaatgaagaataatcatgtcttaacctgcattgcatttaattcaaagaccacatcatttttgcattcgggtcatgtcttaacctgcgatgtatttaatataaggaccacccagaaagtatcacttcaacctgtgagtagttgtctaaacttcttttagagtcccataagtgtttttatgcagtaaaatttgatattatggtctagaagggtgagccattacttactaatgattttgaatcagaattaccttcaagtagaggagaggacctgcagaca

SEQ ID NO: 70377 - DNA, 455 bp, Prunus persica
  Intron number 2 from transcript ppa007522m (locus ppa00752 2m.g) derived from phytozome v7.0 (chr-ID scaffold_1; pos 2332645 to 2333099)
agaaagttaaggtgattcttctattcctctcatattgtcttattttaagtgctgactttagatacgtgttttcattttgtgtcttggcgcattcgttgaggtgttaagcataatttttttccccttcagattctacgctgtcttcactccaatttttgacaaaccaattgtttgacctctgattcactgtagattgtttaaacatagccgaagtcattgactccttacaaaaccatgctatacatgatttttcttgagctcttcgcttaattcacatgtcattactgggtcagggggaatgtgctatgtttatctagtgcaatagagtactagctgcacttgttcgttgaactatagttactttgatgtcaaagagatgctttgcttctatataataattggtgttctctattttttttccagattgagttgccgcctcctcctgttggcgaagg

SEQ ID NO: 70378 - DNA, 994 bp, Prunus persica
  Intron number 1 from transcript ppa022774m (locus ppa02277 4m.g) derived from phytozome v7.0 (chr-ID scaffold_4; pos 2799701 to 2800694)
tctttaatcggttcctttgttgctagctatacattgtcatgtggacaaacgattcgatgagcacccagattggttttgttcaaaatgcttaatttaagctcttacgaactttgtgaagcacacaaggtgacaatgaccaagagaaagtagaaacctagttagctagctacatgtacaatattcaagtgtgatttgtttcttcacatttaattcaccttctttatagcttattgacttattgatcatcacacttgatttagaataatttaggctatttagcccttacacttaaattgataagcttattggctctcaacatagctttatttgggtaactcttggctccctaatagtttgggagttggcttctttactcccacatagatagagagttgattggttcactccactttgcttgggaaggctacaagtccttttatagatgagagtagccgacgtcaccaggtccaccgacttggtctcttttactccagccacaagtgtgtggcttatattagaaacttctatattttacaatattatttttgtggctattgtttagccatcatgttctaccgccatagtctagcaacatgagtgttcttgctctagagagttcttctaacttcaattctctgtctagccaacatggtatgttctccacaactctagaatcatccttgtattcatgattcttctagaatttcaacactgacattacaagtcaagcaccatatctgagatttttttttatcagcttctgcttctctcatgtaactttctgtctttgaatttttcttttgcagctgagtttctggaaccaattgttacaagtctacaaagtcgatctgttttactgtgggacaaacactagattaggcatatttgaagtgttaaagatgcagagtttccaaatgctgaagcggaacacacgataaaacttttcgattcatgtcattgcaatttgcaggaatatcgggggaactccaagaac

SEQ ID NO: 70379 - DNA, 775 bp, Prunus persica
  Intron number 1 from transcript ppa009827m (locus ppa00982 7m.g) derived from phytozome v7.0 (chr-ID scaffold_3; pos 5051671 to 5052445)
acgtgcacacagtggtccatctttagaaaccctgcgtaagttctttttgttgatgtatttgtttgcttgtcctccctcagtaatacgtcaaatctggaatttgattatcggcactcaaaacatcaagtttgttggattatatgacttcttactgaatttatacacatgctattacatgataatccatttttcttttaagcttagtaaattttgtgaaactgaagtgaaaatgacatggaagttgattacttgagaatctgggtagatatactagtgcatttctatccactttacaaaatatttttgtaaaggtaaataagccattgttcttaagttacattgtctggtacatacgccaattttctttatatggaattttacaatcttgtattcttcctattatattgtttaattcagtgttgaaatgatgaatgcagtttgtttatctttttctaataaatccaaattactgacctattcatttatggtatgctattgccaatcccaaaattttatgtaggtcctgaaacctattaagtcatatttggtaatctttaatatgtcctgtgattaaaagttaagtaggcattatcttgggatttgcaaggccaaaacttttgtgattcttgtctagtattgagtgatgaaatagtaagtttcattgatttgtaaatgttagtattatgtcaacatgataatatctggtcctgtaacatgtagtctatctcatatcatcattctgttgatgatgtaacagctactacaagtttagaag

SEQ ID NO: 70380 - DNA, 851 bp, Prunus persica
  Intron number 1 from transcript ppa012292m (locus ppa01229 2m.g) derived from phytozome v7.0 (chr-ID scaffold_5; pos 17200732 to 17201582)
tgtttgggagttgggcctccacaagctgggtcagggtaagctcatatgtgatttctatggctttgtttggttggtgacctaaccctaaacccaatacggataaattaatcgaaacatacgagttacaacagcccgctctctcggagatatcttccatagttgggacttggattggatgggatagctcagttttgtgaccttaaaaattgctgaccaagaacaaaataagaaagacattgacaacaaaaaattaatgtaataaatccttttaacgttaatttgacattaaaaaaataagccctgacataataaatactagcattaatttaatgttgttcttccttaaaatgtagaccctttctgttgtttggcaggacggtttcaaaacaggaattggttatatttggacagaaatttggttttacatgtcatactaggacacatgaataattttgttacaaaataagcgttacaataagttttttttaatcagaaaaaattacatcggtaaaccatccttcaaaatcaaattgaaattagcgttaaaatgaccaaacggcccttgttactgttgtggggtcccactattgtcttattgcagggaaaaaaggctgaattgtaattgtaacgcaaaactgatgcagccaagctgttctccaattcggtcgtcctcctgccctcttaaatggctcttcggagaaaataccattttagtccctggagaataaagaaaaaagagggtggggagtggggactgaggggagagcagagagactcagaaagactgggtttttctcgtgtgtgcgcgtgtgtgaggctgagcctgagggtgaggagaggacacattccag

SEQ ID NO: 70381 - DNA, 688 bp, Prunus persica
  Intron number 1 from transcript ppa005959m (locus ppa00595 9m.g) derived from phytozome v7.0 (chr-ID scaffold_5; pos 15161777 to 15162464)
tattgaagacttcccagcttgtaaatcaggtaagtttttttgtacttgcaagttgctactttcaaactttgtcatataatatacctaccattcaggaagttgactggccatcagaatgtgttaactcaaactggccatcatcagctagtataatttaccaaagaaattctagtttgacattacatttcaatgaaaaactgtgtgttggcctgtacttttatcgtaaaactggagccatgtgctcaaactaatttgctgaacttgaaatatcatcaattcatttgtaattcaaatatcatcattcattgtaattctctcaggtggaagcggctctgaatgaacagaagagtataatatttacaggacactctacaggtggagcaattgctgcgcttgccacaatctggttcttgcaaaactacccgaatgcgaataatggagcattctgtgtgactttcggatctccccttgttggtaatcatattatttctcatgctcttaggagagagaagtggtctcaatgcttcatacattttgtcatgagatatgacattgtccctcggattttgcttgctcctctcacccccattcaacaacagtttgagaaagttctccccttcttcaatccaacatcccccaactttaaaagtgaggttcttggagcatcgccggaggccttgcatttcta

SEQ ID NO: 70382 - DNA, 992 bp, Prunus persica
  Intron number 1 from transcript ppa006170m (locus ppa00617 0m.g) derived from phytozome v7.0 (chr-ID scaffold_3; pos 1867561 to 1868552 reverse strand)
ctctttaccaccctggcctattagctccccctcaggttcgagctttctctcttctttatttcttttcctgtgactttgattctgtttctgggtacgagttttgcttggattttggtgttgatctttgagctccggttgtctttctatgtgattgcattatggaagctagcgacctagggttaagttctcttctttcttgttttggaagtacctgatttccaagcttggatttttgatagtttttgttgtgcgaacgttctaaatttgattttttctcgatagtggaaattgagctagggtgttgagtttgagtttattttttgaattttctcttctccgtgttatgttttggagctaagcggagctcgagtgttggggtaaaatgattcatgtttaattagattaatcattttttttaaaactttttcggaattcaaatatggacaagcattataggcatctgtgcaactttctcatcattatgtcgtagtgaaatggcaataaaaatatcgtactgatttatccattctgaacactggtttttttgaattgtttctaagtatgttgttcctggtgattttgaaggctccagtaagttgcagaaaagagtttcaaatatagaagtaaaccaaatgctcattttgacctatcttagaattttgattaactgcgtagggttgcccttttttacgttaactttagttttcctgccaaccatgtttttgtcttgcataatcattatttttcacggcggagcactagtgttttaaattgcccttgttagtttctagtgcaagtacctatttaagtggattctgctttcaggttgaagtactcctgacttggttgataaagaagtaggggattttagtttattttgatttaggtttcttttattttgcttgtattttttaggtttctttattttcttttctttttcatatttttattttgcagatagagccaatcccaagtggaaatctgcctcctgg

SEQ ID NO: 70383 - DNA, 593 bp, Prunus persica
  Intron number 1 from transcript ppa010888m (locus ppa01089 7m.g) derived from phytozome v7.0 (chr-ID scaffold_3; pos 13506667 to 13507259 reverse strand)
caaacgatctccctcctctcgtctccgatcactcagtaagtctctccagacccttaattcaaatttatttattgattttgcttttttcttcatctttttttgggtgcacgagattcaaattctatctactttaaaaaaaaaaaaaaaaatttgtgattggatatgtatggattgattacggatttgcgttgatgaatttgagttttgtgggttgtaaatttttgtttaaagatttgtagcgaaagtttgaccttttactgtttttgtagttttttatttttgtgattgattgttgataaaactgagggatttatgggttcaggtcaatccgtcaaataattgttccaagttgtttgagttaaacgtttactatctgggatgatgataaagttctaagcttttgtttaatgggtctcaattcaactaaatttccaagattttgagcaacactttttgctgacaattaaatggcgcctagttctttgtccaattcagtttagttgaattgagtaatataagtacgtaaaatttattttgttgtataatgtattggccttaaggagacatacctgaagaaaaagtgaccaggtagc

SEQ ID NO: 70384 - DNA, 451 bp, Prunus persica
  Intron number 2 from transcript ppa026281m (locus ppa02628 1m.g) derived from phytozome v7.0 (chr-ID scaffold_8; pos 15171329 to 15171779 reverse strand)
aggttcgtgttacttcttcaaatggttgctttagactctgagttgtttttggttgctttgcttgggagttgggaatgattgattgtttggcatctgggaaaacaaagatacacaaatggagtagaaaagtgtgcatgttgaatgaactttaattatctgctagacccaagacccaagtgattgcctagttgaaatagaaaaggaaaataaactcaaccctattttgaataattagctttctctttgtaacaatttactatctagacgaccttagtttcacatataatatgtatctccccaaagggcaagagccatcaactagaaaacttcgatgaaagaagatttcaaagttcttctggcatctaccacttttacactatcaaaccctgagtgtatgaatcttgaaccataacttgtatttctaatatgtggaccggttttgatatactag

SEQ ID NO: 70385 - DNA, 595 bp, Prunus persica
  Intron number 4 from transcript ppa018334m (locus ppa01833 4m.g) derived from phytozome v7.0 (chr-ID scaffold_1; pos 21399781 to 21400375)
ttcgggttctagattttaagaaggtgaaaaacaaggtgagtcattttaagttgtcaaactcatgttttttgttttgtggcatgatgcttcttttctctatggtaccaattatgagctggtataacatacttatggaacgcccactactttgtgtcttaaagttgtttatggttgattatcttttgcaattccaactatcatttatcctaaaccttaagatgtcagccagacttgtagtttaggttactgaaaaataagtttctgtaatgtctgctcacccaaactttggactacacactattattcttattttgtaccttcaaaaagctttgctcctttcaaatgattgatctgttgaatcaaaggcttctgcttattttcgacctagtttcaccaaaaaggtggaaatatggaatgctcccccaggaaaggtcctgggttcgagtcctaaaaaaaaggtggaaatatggaaatctgttctgactataagatttagctagtgccttttgtatctatttacctggattgattattctttggtcctgttccatcaatcataggagagattggaagcacaaactttgttctcatctaa

SEQ ID NO: 70386 - DNA, 633 bp, Prunus persica
  Intron number 1 from transcript ppa001693m (locus ppa00169 3m.g) derived from phytozome v7.0 (chr-ID scaffold_6; pos 2481055 to 2481687 reverse strand)
ccaccggtctctttgtcgcggcttttaacaaaggggtaagctttcatcttccaaaagcctccaatgcataatcccattcatgttttggagatccagttgttgcccatcatgggaaaacttaaaatttttgtgaagtgctgaaaaatatgtgaacttggtgcttagttttacatcactttctctgtgtttgacacttgttatgcttcttccaatgctgcctctacaccattgcaaccgctatttttctgttagattgcaatatgattgatcaaagatggtttgcatttggaaatggtgtcaatttttttgatgggattggttattatgattggaaataagagatagaattggtggtgcttcttggtgtgtatgtttgggttctagagtttgtaacagtatgcgtgtcatttctggtgtattttatttctggtgcttcttattgcttgtttctgtggcagtgtctgtatgacacttggtgtgatccaagatggtctacatttggaaatggtgccaataacagattaaaaatcgtgcttcttggtttgattgtttagcttgtagagtctataacataatgtcttgtttagtttgttctattgacattcattgacaccttagtgctcatctaggtac

SEQ ID NO: 70387 - DNA, 356 bp, Prunus persica
  Intron number 1 from transcript ppa023403m (locus ppa02340 3m.g) derived from phytozome v7.0 (chr-ID scaffold_8; pos 13495882 to 13496237)
actaaccggtggcctgaatatcctccagaactaaggtaactcaatgatcactaagaagaacgtgcttattttaggtaatcacatcacataattatataaagatgaaaacaaaaaacagagaagcaataaaatggttaaagaaatctagaacacctgtgattcataatgaaaatgcttaggagccaatcaaagaacactagctctcaattgaaaatataactgtttgtgcagtaaggaacctttgcattaaagggttaaatacaattttggaacttgatcacttatatgatctaataactagacactgcatgctttgagcagggtggcgtgtgaagagtatattgaagaagtagaaa

SEQ ID NO: 70388 - DNA, 544 bp, Prunus persica
  Intron number 1 from transcript ppb017681m (locus ppb01768 1m.g) derived from phytozome v7.0 (chr-ID scaffold_8; pos 15517225 to 15517768 reverse strand)
aaaatttaggtacctaattatattttccactctctgcatctttcagaggatattattctattttgaatttttatgactttggtgatagaccaccagaaaatcccaatataaatgaaaaataaaaagaaattaaaggtgtgtcaagttgatgagactggcagtgtgaagaaagataaaaagtgcgtgctctgttttctctgttttttttttccttttacttttttgggtaacctgggttcaaagcagaaactacagagcaactagcctggcccaagagcctcaaaacagaggaaggtccccatcaaaagcagtacatcccaatttaaaatcaacccaaattttattgatgaagggtttgttttttagtatattgtgtgtatttcactaatattattgtttttataattctatagtttttaatccgcgttagttgtaatctggcacagatattgtgttcaacttttaattagtaaaattagcctcagtatttaatccatactttgttgtaggtccattatcctttgactctgcacattccatcggc

SEQ ID NO: 70389 - DNA, 385 bp, Prunus persica
  Intron number 2 from transcript ppa012183m (locus ppa01218 3m.g) derived from phytozome v7.0 (chr-ID scaffold_3; pos 5294951 to 5295335 reverse strand)
gaacccggtttcaagagggtgagatagaatagtgcatgaaggcatcaatggtttagtaccaaataatattttgatcaaagtagatttgtcatgccttttgatttgtcttagttattagtttaattcactttggctaatttatacttttatcataaaagaaggatggtgcaggctctacatattgatagaagagagaataaaagttctcccttctcttatgttactgtatctttctttgagaaaacaattcttgatactcctctttgttgtacctggatttatctctttagtaatgtcgtttctcgatctatatatatgtttctttggccgctgaactaattataagaatgaatatattttgcagggggatattttgttcttgcac

SEQ ID NO: 70390 - DNA, 819 bp, Prunus persica
  Intron number 1 from transcript ppa1027225m (locus ppa1027 225m.g) derived from phytozome v7.0 (chr-ID scaffold_7; po s 6357758 to 6358576 reverse strand)
tgggctcttcgtcgtgcttctcttcctctcaggtatatatgtaactctttcgttctagggttcctgtgttcatcgtagtagttttaaaggttttagggacggaatttaaattatgggtttcacaggttttagggtcttcctacttaagagcgtggattatgggcgtctgtgtttttattttattttatttatttttgaattttgtttactagtgtaagtttatcttgtatatgcaattagttaaccctatcggaaatgtaagagagaattttctgaaggatattaaaaataaatgttttctacatgctacctttctaaaagcaaatacaaaagcagaggaaaaagaatggaattcatggagtgaaggagactgggtaagttagtttctttttatcctaccctattaaaaattgtcttactggttatgagatatggcaacataatttctgatgttgtatctctctggatatcttaatatagagaataacaactagagaagttaccgttgtttctgtaatatttcttaaacatacaatgttatctttcttgtgtctcacaggaattcataatatgattgtactagtagaagcttgactcccattaccatcttatgaattttataatgtatatcatttttagtatatatgtcctgctatttttatttatttcattttgcttttttgcaggctgtgtgctagtaaaattctttattttttggttacgttatgttgcctattattttgttttgtgatataatgtgatacttagttttccttttacgtccaggagccaagcatttaacataagaagttctcgtgc

SEQ ID NO: 70391 - DNA, 357 bp, Prunus persica
  Intron number 2 from transcript ppa009045m (locus ppa00904 5m.g) derived from phytozome v7.0 (chr-ID scaffold_8; pos 21297457 to 21297813 reverse strand)
tacgcgagagagaggtcgaagatttgtttttgaaggtaattcaaaattattattattttgcttgaattgatgccaacaaataatgctatgcgattttgcgatgaagttgttatttggaatgcatttgtttatgcttgcacatgtagacattgggaaacaacagaattttgaaattgggatacaacagatgtgtcttttttttcccaaaacctgtttaatcttgtattatctttcttcgatgtgaacaattgtgttctatggtagtggagtggcaggtgttggatggatgggtgtagagtaccctaaagaataaggaaggtttacagactgactgaagtttctaattttctttgcagt

SEQ ID NO: 70392 - DNA, 957 bp, Prunus persica
  Intron number 1 from transcript ppa009159m (locus ppa00915 9m.g) derived from phytozome v7.0 (chr-ID scaffold_7; pos 17469272 to 17470228)
gctccctcgtattggcgattggatctgtaccggttagacctcacacctctctctctgtctctctctctctctctctctctcttctctctacgtgtgcgttaattttttaaatgttaaatggttagagttcttgggattttggataattcagggatatgggttttaagggtattcacgttgggttctgtttgaactgtaccccgcataatagtagctacttcagctctttaagatagttttagggtcaatttttgttgataattgagaattttagctgagaatgccatctccttagttcaattcattccgtggctcccatcttcagtgaccttttattaagtttgattaaaagtctcaatctttgaaacttaaacaagagaaggagggtgatattcctaaatcgttaattgtgttttgttgagagcagatagtggttcagtatggcagttgggtgacatgctctgttttgtaaataagaatgtaggggaaggatgatatacaggtctggagcttaattttctaataattaaaactcaaatattatcacccctctctacttttctcaatttcctaatttaacaaatcgacagcttttttccagctgcattcactataatttcacatcagtatacgttttcttatatagctgtgctagtgacatgatttattgaacgaaagcacatagttgttgttcctgcagcttttgtatttcgttgcttctacttttctgtcattttgaaaaaataggaacttgctatcaattaggttgagtggtttttgtttcttgtatgtgtgttttggtgtgggatggactggttggtgtgcgtatacatggcttcctttcttcttcctggctggattgtgggttgggtgtgtatggcaatggatcaataggttgcactaacaacaattatgcatcaagagagaagtgcaagaagtgcgggcaaccaaaggagg

SEQ ID NO: 70393 - DNA, 421 bp, Prunus persica
  Intron number 1 from transcript ppa012720m (locus ppa01272 0m.g) derived from phytozome v7.0 (chr-ID scaffold_5; pos 17101301 to 17101721)
ttcacctaaccagggattcaatctcgctaaatcaggtacttttctttctgggttctttgaattttgagcaaaaagttgaattttactcaagttctttataccatcagttatgtgttctgtatcaggtcgaatccatttatttatagagatgtgttatctgaaaatatacatgattatggctcaaagctataaattttgcggtgaatttttctggaaattggaaaataatgaatgaaataaaggctaagaaaaaattgataattgaagcttccgttttgcgtattaggaacaaggcacataaagattttgtgctttaaatttaacagtggtttgttttctcactaaacaatgctggatttgttaatttcaatgtttttattgcaatttatatggcaggggataaacattattttcataaaca

SEQ ID NO: 70394 - DNA, 442 bp, Prunus persica
  Intron number 2 from transcript ppa012847m (locus ppa01284 7m.g) derived from phytozome v7.0 (chr-ID scaffold_7; pos 21751996 to 21752437 reverse strand)
gcagatattatcaggtgggtttgttttttctgcaacctagtgaaatagttgttattgtaacttagatttcgggcctcttttagttgttttgtattgtttcattttgcaatgtgagagcaagcctattgtttattgcattgcatttgcggatgttttcaaagtgaacttgttagatgctattttgctataactttagggtcacgatgatgccactgaagcttcctgttgatatatataattaatttgtatttcatacctagaaattagaaaggacaatgtatcgcaaaatcatggatgatactttcataggattctgtcctttttctatctccgtatgttgtctagttggtatttctttctgaatacaaacaaattcttatctcattttgaccagataaaattttattataaatcaatttggtatatggtatagggtcaacta

SEQ ID NO: 70395 - DNA, 683 bp, Prunus persica
  Intron number 2 from transcript ppa009820m (locus ppa00982 0m.g) derived from phytozome v7.0 (chr-ID scaffold_2; pos 23948612 to 23949294)
aatcctgaatagtaagcctccgatctcttttcccttttccctttgtttccaataacttttgcccctctttgcatctgaatatatttatgccataaataaaaaatcaaaaataaaagtggttatttttcctgctgttttcctttggattctcctaaagcatttgttttttttcgtccttacaacaattattctttagatccgtgatgatttagggctaaattgtaatgggtgtgtggtcaatttgtgtttccttttttaaaaaaaattatcgattttgttgaaattctgtttgttgacataagaaactgaagaaattgaaacccaataggatagatttccagttactttcatttccttgtgccttatacttcaattgtgatcactgaaaccgaaagcagcgtaattgatttattttgatatcttaaattttagcttggatcgtgttcttgaggttaatgggtcaactaaactttggtttgagatcttgatgttcagttagttcatgggcttagtcaatgcaatttgctaaatgtaatgtaatttttggctcaaccaaataacttaagttttggtttgctactaaacctgttgaattcagatttaaagtattgcaaatgaatgattatgttcaaatgttctcttctgcagtgattacttgtttaaacttttactgattggagact

SEQ ID NO: 70396 - DNA, 913 bp, Prunus persica
  Intron number 1 from transcript ppa023050m (locus ppa02305 0m.g) derived from phytozome v7.0 (chr-ID scaffold_4; pos 29702723 to 29703635 reverse strand)
ggaactatattacttacgccaccactctccttcaggttcctcctctttttcctcactgctatccagccacaaacatgcccttttaattatttttgtttcctcatttgttatgttcatattgtacaacactttgtgtgtttgtagaaaaaaaacttctacccttgaatgaaaatgactattatgttggaatatgtaattattttttctgcgtgaaatttccaaattgtttatatcttttttttataattaagtatgggggcaaagccccaagaaacagactacacaaattggtaattgtttatatcttttagttctgcgggtctctcatggttttgaattgtaccacccaaaaaaaaaacagagagagagagagagagaaaaaaaaaaaaaaaaagtcttatgttttttgggttacgggaaatggagtgccaagatgacacttaaacgatctttggggactggaaatctaacaaagaaggatgaaatgaatatgaactattttgtaggtggaaacattaaaattgatgctaacatccagcaaacatgacaacggggtttttattatgtctgacaagttctaacctctatttgcctaaaaactaccacttgtttccgatatccatgtcaaactttaatcctacacatttgtgggcatagattggattaagtttttatttgattgcaaacatactcttccctctcttctggtccatgtattgtcacatgtttaatttgcagtagttctatatacatatttgttacttttttgctttgggttttcacaattgaggtagaagttgcaacttcaactgcctcccattgtttctgtctgtggttagtatttttccacattaaatcctttttttgggctctaccttaaaaaatttgtatcttctgtaggagaaagggtctg

SEQ ID NO: 70397 - DNA, 1026 bp, Prunus persica
  Intron number 1 from transcript ppa018834m (locus ppa01883 4m.g) derived from phytozome v7.0 (chr-ID scaffold_3; pos 8922915 to 8923940 reverse strand)
aaagtatttagtgttaatgccttagactcagaatcagactattctagtaattcagatagtgaattagattaatatatgtgtacgcttgaagaacaaaaatagcattaggaatttaaatacgttaatttaggataacctcaagaatgtaatcaatgtaagaaaatagtggtaaaaaaaatattacactgagacaatagtttattgtaaacattgttataataatacaccaatagaaataaatacagctgaaataatagataacaataatgaaaataataatagccctaacatagagaaactaaagacgaatttgttaataacaattaattgtgagttagaattgtcaaaagaaaataaaattcaaacaaaaactatgatatagatacacgaagcacaaaaaatgtaataaaagaagaggtagtgccagaacaatttacgcaaaaattagttaaaccagtaagaataatacagtttgatacaagacctgtatatttaatacactgtattaataatataccaattaggatagaaagacaacagtttaatttacccttaacttttatatccctagtaggatcatatccctttatcttaggattaaatttcttaaaaattttacaataaggatttttgtatacaccttcagaaattacattttttaagaaaggcataaccataacaaatcaaagtaatatattatagtcttacaatagtattaacattgaagaacaaaattttaaatactataatatggaagaattagaagaaataaatgaacaaaagatagatgaacaaaataatttagaatatgatgatataatatttgaccatgaatatccaattgtaggagaaataaagcctttaaaaattatacaaatagatagaccaaatactttagaagaattattacaattagctaaacaaactagaatgatgggagaagatccccattcgtattgaaataagaataagatattagcaaaattagacattattaatccagacttaacaattgaaacaacatat

SEQ ID NO: 70398 - DNA, 583 bp, Prunus persica
  Intron number 1 from transcript ppa003760m (locus ppa00376 0m.g) derived from phytozome v7.0 (chr-ID scaffold_1; pos 26289330 to 26289912)
tgatcgctccaccttcaacaaccccactttccaaggttcattttctttaatctctctctagaatgggatgcaaattttgaaattttgatttagtttatctttcggaattcagttctgggattctcttctttggttgaattgtttgttggttggttttatttattggaatttgagctttccagagacagaatgctagttttaattttccttgtaagaccaattgatcaatttaagctatgttcctgttttctggaaaaggttcagtcttcaagaggatccttcagttctttctggtgactaacaagctgaccaccctcccaattggaggcttttgaaatcatcctcggagctagttgatagacaacaagaagaaattgcttatgttgtctttgtcttttattacaaatggcatgttggaatacaatctctctgacaaactagtcaggctttggcggcattttcttatcaaacgtttttatcctcaaattgcatgctactgtaattttttcttacggccatagcccctgatttttattaaaatgtgatagcttccacagaaagtatcgaagaggcgtggtttgat

SEQ ID NO: 70399 - DNA, 740 bp, Prunus persica
  Intron number 3 from transcript ppa002669m (locus ppa00266 9m.g) derived from phytozome v7.0 (chr-ID scaffold_1; pos 2751168 to 2751907 reverse strand)
tggagctacaaaagtagtattcaaccatctttgtatgttctggagccaacctcaaagtagtttcagtcaacgtatataactttgattttctaaaagcatagtgaagatctaattttcattcatttctgataccttatttcgtttgttctctcaatatttttgtttatgtgacttaatgcccctctgtgagaggcagagagagcttaaggtccatcattcattctggatttctgtatattgaattagaaatttcagtccctctctggatgtctatatttgttttttgttttagggttgtagaggatgattgtggcatccttaatgctttacccttgcgcagttgtaactgttaagttaacattgatcccaaaagctaaggtgatagcaaattgaccagtataacatacaccacaactaatggttatttttcagctcgactaaaatgaagatttctcttgtaatatcaatgacatttcacaaatttcactcatgaaatgaggtcaaagattttgttatcttatagttgaaggcacatgtcacaaatcaaattgaaaatgattttatttagtcggcaatcagcgttgtgctggagaacagagcccttatctgtcatgcatgctaggtgtgttgatgcttcttgcaaattgcttcaaggtgtttcgtttctttccaatttgtaaatatactattgcttttccttcccagatcctatttcacttgtttgtgatcacaacatcaaa

SEQ ID NO: 70400 - DNA, 836 bp, Prunus persica
  Intron number 2 from transcript ppa012759m (locus ppa01277 4m.g) derived from phytozome v7.0 (chr-ID scaffold_3; pos 684719 to 685554)
tatttctcaaaaccggcatctgaggtgagcttaatatcagatcagttgccagattttataattgttggaagaaatgtttttgctcaattagtcaaatcaatgccattcattttggattctatctggtggaatttaatgttttgggcagcaaataatcaaactaatttggggtaaactggattaactgaggctatttagtaaaggtttataattacagaagttaagctgctgcatatacgatgactgaagagaaattctttttcttccctaaagtagcaaacatattttatgaatataatgtaggttgaccaatgcctcaatatggagcgtaatgaattacagtttctgttgggaacatctgttttgagcttgttcactctgcttcagatcaggtgtttaaggccatggttaattcacagcccttcattaaattatcatgagaggtgtgtgcaagctctgaatttggatgctaataaatcatcaattgttgaattgatatatttatgtgagaaaatggatttggagtgaatgtcaaatgtgatcttttagtatgccggtgatttttacttggaaagagttgatgctgtgttgtgggggctaatctccctggttcaaatgaaggtgctgcttatcttagaatatttgttttgctttcctgacaagcagttaataactatgcagaaataaatctgtcctgttctagatggacttgttccttcaattttaatattggttaagcaaagctattgcttgaaagctaattatgccttggttgctgggatacgcaggctcatctggtcttgtaaattgtatgtaggaagacaaaaggtgcattg

SEQ ID NO: 70401 - DNA, 609 bp, Prunus persica
  Intron number 4 from transcript ppa025158m (locus ppa02515 8m.g) derived from phytozome v7.0 (chr-ID scaffold_2; pos 3972025 to 3972633 reverse strand)
ggaagccaggtcaccaagcttgtacgagctggtgggtgagttgctatatccaataattcattttttaaatttgttagttttatgaaaatatagtcatggttttcatgatttttgagtagccaagacttttgcttgttgggattttcctggtttttcaagtataattagccctggttctttatccaactcctgaaaaatgcttaataatttattgtggctggatgtgttgagttaatttaaggatccagttgttaacacctatgtttggattgttaatgtgcgtgattaaagtaatagctcacattaaaggttcatttctcaagcataggctgttacttgaaaagaacctaaaagtaattttaatatgtgtcacccacagcaaccggcgccaaaaaggttggtaacttcttttgtcagcgttggctgtgaagtgcagttttgatcttgtgagagaaatatataaaatctaattattttttttcatttgatgattttattgctgccaagtatgtatgaatgtttagaatgtgatcctgtgtttcttatatgagttaacaaggaccatttgatgcagggcccttgctcttgctcctttggtagacaggggac

SEQ ID NO: 70402 - DNA, 611 bp, Prunus persica
  Intron number 1 from transcript ppa002645m (locus ppa00264 5m.g) derived from phytozome v7.0 (chr-ID scaffold_2; pos 18161926 to 18162536)
gcaattttctggtcattgtcaacttcacaacaagggtaattttttatattttattttttgagtatttatttttattttcattatatttctcaggtgaacaattctgtcttgtttcttgagacatctctgtctggggatttttatggtgtttagctttagttggggatgaatgccatattttttttggtacatttcatggaaaaagctttcagtcagtcctagactagaagaggtacactagtttttgagtaagtaaagtgataaagttctgcagtacagaaaaggataagattaaaatggattttaatgctttttaagaactcaaactctcaggcaagtaagtttcagggcaaagattaaataaatttggaaggaaaactggaaaatatggtagtgtgaaaatgacagttcggaaacttgggaagggaaaatatcctattttaagaggaatgcacttggctaggaattcaacaatttctacccatgtgaaatctatgtccctagatactttttttcttagcttggtatcagttattgttgctaggacaggttttttggttgattttgtgttcaccctttacattttgatcactattttgtagggtgctgga

SEQ ID NO: 70403 - DNA, 602 bp, Prunus persica
  Intron number 1 from transcript ppa018733m (locus ppa01873 3m.g) derived from phytozome v7.0 (chr-ID scaffold_3; pos 18420546 to 18421147 reverse strand)
ttttaggtaattaagcagtttacaatgttttgcaacttctccattttgctggtgtgaaacttttgttggtgcaatttgaatttgatcatgaactctttcgattttgttttttccttcctgtccacttttgtatctgttgggttgggatccaggactaatcttgagtcttgacagcaaaatatccaagtgacatgtaacaaatttcttttgaactttggtttgtggctctccatgaaattgtaccaacattcatggtaatttgtctccctgtaaaacaattagcttaggtgaccagattgggtgtgtaagaagtttttggaccgaaggaaccaagaaattctgctgttgtggcaatgtccaagttctgcactcaaatttatacaagtttatggattggaagtcttctcttgagcttgagcaccttcacctcattttgtatccaaaacgaaatgacgacgttagatgtgttagaatgtttacaaagaatcctgcccgtgtagttatctaagatgacttgctaaccttctaattgttgtgcctgctgatgtagttactcctaaactatgctttgcaggtggtccaggtagcggaaagagtacaca

SEQ ID NO: 70404 - DNA, 825 bp, Prunus persica
  Intron number 1 from transcript ppa019187m (locus ppa01918 7m.g) derived from phytozome v7.0 (chr-ID scaffold_3; pos 17892295 to 17893119)
ttctgaagagctgaagccttctgattctaaagaaggtatactcatactggatttcatattttctttttcatacatggtgttaaggttgaaagatttatttttttttttttatcaatatatttatatgttaccctcctacatgtaaaaataaaatcatggctccgcaactgatgattgttttgggtctcatcctcaaaatttcataatgcccgttttaccctccagcagcaattaattttatggactccttaattactgcatgtatattgctggttttatttctatggtgggttttttcagttttgaattttgaggttcgtttgttggattcttttcttcttttattttctgttcccttctgttcttcttttatttttgtttactagttttcattctccagtcaaccgtgctcacaaaatgggtataataatatataatattgtgcgatatttgtttaattttaattttttgggtgtagcattctttttctttttaattcgagagtatatatctgggtattaaagggaggtgattttctcactttcattttctccacttacactctcctttactttttaatactttttaatcaatattagaaaaaaaaaaaaggatagaaatgtgagtatttgtacgccaaatgtgagtatgtactatttatctttgttgtagttaatagataataatttttatgggctaacatataaatatggtagcaaaaccaaagaatgctactaaccaaactgtcattaggagcttagatatgcatagagcaatgtatgcataatagtctcagatttttattctttcataatattagtaagt

SEQ ID NO: 70405 - DNA, 979 bp, Prunus persica
  Intron number 1 from transcript ppa021591m (locus ppa02159 1m.g) derived from phytozome v7.0 (chr-ID scaffold_7; pos 16081443 to 16082421 reverse strand)
gtcctgctctcgactacttaaatctgtcatctcaggtaatgagttcgacagactcacagatcacaacatcacatactttgtccaaaatatgttaattttaaatgttttttaatgttagattttaagtgtcctctgtaaattattttaccccaaaaaaaaaaaaaaaattaacggagcctcaccatttgtcggtggtaaattttgacactacaaacccattttgctagtactgttaaaaaaagattactagtctattaatccttaaataaacatatcgttactttttatatctttaaaaacaatatatataaggggattttatgtgtaatgtataaatgctaggtttgattttctaaagggaatttagttttaaatttcgagttctcattgtacataggtcaaccccaactcaagataattaattaaacccatcagattaaccaacaataacacgaaatgacatgacatgacatgatgatacaaacacgatatatataatcctttaatattaaagtccaaatgtatcgaccaattgatatatatataatctttcgactttgatataaaagaatatatatatatatatgataaattactcaaatggtcctcaagtttatactcgatttacattttggtccctcaattaaattattctttcaaatggtctatcaactctatattattcgctctattggtcataccgttatattctgtcaatattcccgttaaatatgagggtaaattggtcattatttacccaaaatttaggttaaatctaacagaaaattagacggtaggaccattggagcaaataatatagaattgatggatcatttgaacgaataatttagttgaaagattaaaatataaatcaggtataagtttgaagacaatttgagtaatttaccctatatatatatatatatattaataactacgtgtttaaaaaattatacagattttgaacagtctggatttg

SEQ ID NO: 70406 - DNA, 518 bp, Prunus persica
  Intron number 1 from transcript ppa011706m (locus ppa01170 8m.g) derived from phytozome v7.0 (chr-ID scaffold_1; pos 45799060 to 45799577)
caatcactggtaattatttttcttgggaatctgtgtcttcaaatcttgtaattctgatattgtacctgttctgtataatatgtctatatggttatgtatgtatctacagtttttggtttatgcgtgccaatgttaattatgtttatgatttggtttgaattttgtgagatacccaaacctttgaattgccgtagttgggtgaattttcctacaagcctagctcaagctcagcttatttaggtattgtggcactggcaacccccaaaagagtgatttattagtgccttggcgtgtttgctctctagttatttggtaatggaagcattagtgttctttcaatttgaagagatcagtttgcacattcccttagatggtcactggcttaaacttctttactatgtttgatgacttgtagacattcacctgcttcattcctctaatacaaataccgtgctaatggataatttgtttgtatttttccagtgacagagctgtcccctcgtcaaatattgatttgc

SEQ ID NO: 70407 - DNA, 467 bp, Prunus persica
  Intron number 1 from transcript ppa019531m (locus ppa01953 1m.g) derived from phytozome v7.0 (chr-ID scaffold_1; pos 39660119 to 39660585)
accccgtacccgttctggcccataaggctgttttggtcagtacccatttcgctaacttgctgctactttacttgatcacttaatttttgttcgaagtgtaacctgccctgcccctctgttgttgcccaccagctgttcgatcatttgctccaaagaaactcctggcacagttgggcaatacttagctaaatttgatttgaaatggctaaaggagtttttttatgttaatcttcaatatttaattattttttaaaattttaaaaagacttggctatacagaaattgtagtattggaataatttggccagagtaattttctctctctcatggctagctactagctggtttttggggaaagattattattctagctggtttttgttcaatgaactctttgaattcctcttaaatattatgtattttggcgttcactggatcaggcgaaccgttctccagtgttgagagcc

SEQ ID NO: 70408 - DNA, 472 bp, Prunus persica
  Intron number 1 from transcript ppa020621m (locus ppa02062 1m.g) derived from phytozome v7.0 (chr-ID scaffold_6; pos 8395391 to 8395862)
gaacttgatagtggttgctaccacatcacttgcaggtgctttactctcatccactcaagtttgatcaatcttttggtttcttctgtcctgcttcagtttctttaaaaaacaaaaactcaggattaaccttatcaccttaaaagtcaaatgaggaattagtgataatctactctaaaataatcttacatacaaggaggaagattcgaacctaggtgcaaggggacggacacgctatcctggccaattgtcctaatccaatccgctatttgaccatgtatataataatctgaaagagatttatcacatgagggggatggttgagaagcaaccacacattatttgatgatcaagccatatatatattattgggtcgctcctagtaaaagttccaagtttttggttttggatacttgaatatccgttccctttactctgttgtttgtctctaatgttttgcaatgtctttatgtag

SEQ ID NO: 70409 - DNA, 255 bp, Prunus persica
  Intron number 1 from transcript ppa006335m (locus ppa00495 5m.g) derived from phytozome v7.0 (chr-ID scaffold_7; pos 21584363 to 21584617 reverse strand)
ctccacaacaagtgagaattcactgctatctcaataactgtttggtattactgtagaaagttaggcacatcatatattgttttccagaattcaggatgtggaaattatgattcctcatttctctagacaatttctttcttcttgttttttactcacaagtggtataatgtccttgctcgatattactgttttgagttctaatgttcttgtgtatttacactcattcattacaggtgcatatcacccaaggtgact

SEQ ID NO: 70410 - DNA, 847 bp, Prunus persica
  Intron number 1 from transcript ppa005799m (locus ppa00579 9m.g) derived from phytozome v7.0 (chr-ID scaffold_8; pos 18342008 to 18342854 reverse strand)
agcggttaaggtatgcgcctgttttaaccaacatatatatgccaatgcttcatgatgaataagtaatatgcgtagtgtttcattcagctaaggtttcagatcaagttgagggtcctctgtttacattttttttttcctattagttgtttgtccctttcaatgaaaactcaactaatggttttgccctttgtggtctgatggtgtcatttatgcattcattgtctgttttccatgttggccatgaatatagagacctgtgaattagtgttgtcttgccacatggatgctctgttagctgctaactaaccatgaggcatatgtggccttgtactgaaaactcgacagttgacatggtctataaatcttactatcttagttatgtagacttgtagaagttttaaaattgttgtaatggagaaaaaggatgcctttgtttactttagtcacctaagatgacacttttttttgtatgtatgcgttttgtgtgacaagtagaagtactgaaatggtcattgttcagcacattttccaatttgcacaaaatgcaatttcatctcattgtgatctgattagaagtttttataacttttgctcaccgatgatttatttatgtacttcaaaatattaccttgatttgttttggatattgttcagtttcttcagcctttgatttcatttatataaaaaaacatctcactttatttctttctatttattttaagaaacattgaagaaagaagtgtaaaggggttatgcctcaaataatattgctgccttttattgtgtttcacagatagatgttgcatattctgacttgcaaaatattgatggttgtagatttcaacag

SEQ ID NO: 70411 - DNA, 604 bp, Prunus persica
  Intron number 1 from transcript ppa002466m (locus ppa00246 6m.g) derived from phytozome v7.0 (chr-ID scaffold_3; pos 1930734 to 1931337)
tggcatttggaatcagctttcttctgaagaggcaggtaaaatgctttcatggccatcgtttcgttactgtgctgaattcagtgtttgattagatttcatgtttattgcttgtggggttctctgttaatgtgctgaattcagtggttatgttgatttcatgattatcgttgtgggttctgcactactttgttggtctttttcatgattatagatggttattgcttttgcgcaactcatttacatatatctattttctgaatataatactcaatctagagatggaaaaaaaggtggttgatttatgaaaagctccattctaactgagagttagaaatagaatcggtgaaaaatgtgacgttatattttgcagctttaaaaatcattactccattcttctttaggagatcaatgacaatgaaactggcatttttgagttcaaatgttgtttgccaatctggagatgacagattttattgtttgttccaaattgttaaattagtttttcatgtttataccaggcgagtgaatttattttattttaattttttggtttggatgaataatatttgatactatactgtctgtactttgcagggaaacttgc

SEQ ID NO: 70412 - DNA, 487 bp, Prunus persica
  Intron number 2 from transcript ppa009303m (locus ppa00930 3m.g) derived from phytozome v7.0 (chr-ID scaffold_5; pos 5891522 to 5892008 reverse strand)
caccaatcccacactttctccttctcatcttcaaggtcagtacatagaagtctgtattttgctttgaaatatatgtgaaagtggattttattggtgattattagtttctagagtaatcagaagcatggagctgggttgatttatctttaatcccataacatgtgtttggttgctgcggagagaaaggaaaagaaaaaatagtccaattttggccaaaattttgcttataaaaaaaaaactgttgaaagtaagaattagttcatgggatgctttgatactgtgtaattgcatgtttgggttaagtagcaatcagagggagctaaaaatgagacttgttaaacttcattctgtgttacgttttctattttgtttcttaatattatttataaccaaaacgcagctaagggaaatttaaatattagctgaggtttatttgggttctttcttcacagacttgccaggattcactcgtagtgtttacaaacaa

SEQ ID NO: 70413 - DNA, 472 bp, Prunus persica
  Intron number 1 from transcript ppa026366m (locus ppa02636 6m.g) derived from phytozome v7.0 (chr-ID scaffold_3; pos 5431702 to 5432173)
catctttttgctcacaattctgcttcccaactcaggtaaaaaaaaactaaactaaaccaccccactttaataaaagactgtttagagcctgctgttctcattgaaagttgaaaaatacaaattggatttttcaattgtttgtgtttagagctttctgttctcattaaaagttgaaaaatacaaattggtttgtgtttagagctttctgttctcattagaagttgaaaatacaaattgggttcttcaagttggttgtgttttattcattgactgtcctcaaaaccaacctctctaattaaaattcttgttctgttttctgttttttattatttatacagtaccaagacttggattatttgagttatggcttttgatttaagtagctagcattcttcatttttcatgttgtgttttggttctgctttgaacattgccagtggattctctgcattcaagcaacaacagtgagagt

SEQ ID NO: 70414 - DNA, 560 bp, Prunus persica
  Intron number 1 from transcript ppa012755m (locus ppa01275 5m.g) derived from phytozome v7.0 (chr-ID scaffold_1; pos 32312559 to 32313118 reverse strand)
agatcgaccaggccaccctcttcgatctcatactggtccgtttcttttatccccttttctatattcactctcatctcgaatttattatgctgtgaacaattcgattaattctttccttaattgcgttagggtttctgattatctgataaatatgagttttctttctgatttgacttttgtcgagttagggctttatatctcccacaacccactgttttattgcacttctgatagtttgtagggcattagattcatgaattagcttgtctaattttgggaaagtataacatctgttgtcttctccattatgatttatgttcatatctttactagtcacttgatgaccactggatcacaaatttctttatatgttgaaaggtttgattatatatataactgaaaatttgataagcagagccacacgtagcttgtttgcgcgtgcctgtatttgtgatctatttcttttcctcttggttagtacaactaatagggagaaaaaatacttttgagctctgttgtttataggctgcaaactatttgaacataaagagcttgctgga

SEQ ID NO: 70415 - DNA, 637 bp, Prunus persica
  Intron number 2 from transcript ppa006424m (locus ppa00642 4m.g) derived from phytozome v7.0 (chr-ID scaffold_6; pos 20672009 to 20672645 reverse strand)
tttggacgtaaggctttatcctgtatatgagtcattttttcgatacataaatgggttttattttatatgattcttttgtctgtacctataatttgtttaataggtctgtcgccttcagataacagctattaatttggtgcttaattcaaatagtttccatatttttccccttgaagtttataatatttaatgggaagttacatttgtgaattataatgagaaagtaaaaactgtttaaaatattgttatttcttgtgaagtttattaaagtggattagactgaatggcattttagttcgcattcaaattagctgaaaatgtcttccatatttctttgtcaaacctacggcgtttcactaatgtagaagtatgtctccttgtctttttttccagaggtctcctgttagtctttttttccagaggtctcctgttagtctttttttccagaggtctcctgttagtctttttttccagaggtctcctgttagttgtctttaacttttatgcatataacgttttggtaactgaaatgtaggaactcaaaggccataaacttcaacactagacaatctcatttctctaacaaattattactttcacaggcatttgatcgggttcttcctttttctctccctga

SEQ ID NO: 70416 - DNA, 566 bp, Prunus persica
  Intron number 2 from transcript ppa027221m (locus ppa02722 1m.g) derived from phytozome v7.0 (chr-ID scaffold_3; pos 15153171 to 15153736)
ccctggctacgtgaaagaaaccctcagctaattcagtaagtgaccctaaattaattaactagaacaaataattagtagtatgttgcacacaggtgtcaaccctaacagtttgttttgattggattgtatttgtatgagatttgtgcagcttaagtttcttaattaccctttccaataatgaatgattatgaatgctcaacatttttctactacacaagtccctctttaatatattcttttggaaaatcatcatcatcatccagatccataacaaaaaaaaccagtgatgaattcattgttatgtatgatcactgatggataatttgacattttattgaagaagaggtggagaattttatttgattggtatcatatccaaggatgctatattttcccaattgtcttatcaagtgtttcatggctaatcaatgttattcaatgcagtggtgaagctgcaggcctataattagttacataattatttgctaccatatagtattcttaatttagttacttagtttccctaccttgggggctaattgatttgggcgttgaatggaagcaga

SEQ ID NO: 70417 - DNA, 709 bp, Prunus persica
  Intron number 1 from transcript ppa010234m (locus ppa01023 4m.g) derived from phytozome v7.0 (chr-ID scaffold_8; pos 16176353 to 16177061)
cgctctcctcctcatcgcagcgcctttcctccaaggtatctttctcaattcccagatctagatctattttctttttgtattgtctcattcatttcgtctgctgaaatatgattttatacatcgaaacaatttactggctagtctatggtcgttgcatgctgggtttgactttgttgatccatgcaaatgagatctgattcgattgcctttcgttttgattgataatgcgcgttcaattcgatgttacattgttttattggtttatgctcgaatttaaaatttattattgatgtgcagctttgggatggcttagttgagtttattgttaacaatttaattagttgaaagcgaaaaatcactttaagtcgccttttcagctaacatgcaatcgctttcgtgagttttctgaaagcaactttatatttgttaatgaacttttttttcccatgccttttctgccaaaacatatgtaatgcgtgcatgctgggttagataagcatacgttgggtcttgagttcaattggcagttttgaagcgtgatttacgtgtttgatgaggccttgctgattaagattaaggatattggtaatggtggaatgcatgatggtatttacatgtatttgatgtgaattcgaagctggttgtactgaatttatggttcttcctctttatagtcgccaggggtcagtctgattcggaagtggatact

SEQ ID NO: 70418 - DNA, 987 bp, Prunus persica
  Intron number 2 from transcript ppa024089m (locus ppa02408 9m.g) derived from phytozome v7.0 (chr-ID scaffold_1; pos 16437115 to 16438101 reverse strand)
gccattgtcaaaggtacgtatgaactacactatgtttaattgttcttgcagagaaatcagtttatttacttattttgatgaataaaaacagtatgaaagaaagtcccatgtacagaagtagtacacaacaatttgagagcatagagcaagtataaaatcgaaaagcaatgaaagggagtttcatagctcagaatgccacctttaaactttatccttcagctatttaagatggtccactggctttggtagctgtttgttttaattttctatttaaccacaagttctaaaggaaaaactaaaggttctattcctgaaatctctttattggatgctttcaaaaatctgctgtgtcatcctgagatcaaagcagtaactgatcttcgcacctggaagaaacaattaaccccaaacagagaagacaactcctcaccttttccaatctaaagggcttttctgagaaaaaagatgaacttcgctttgtatgcttccttacacatatatcatctatttacaaacgcccttgctctccgaataaaattatccactaagtcttctcaacaaatgccaccactttgggagtttttattctacaaatttacgaaatttgaggccttgatctctgagcctaacgaaaatctcattcctcacaaagaacaaaaatgctatcactgttactccagagaactaactgaaagcaatatgcaatggtcagattcaaatttattgactctagtagcatttgtacttattcaagaaagtcatattgttagttgtattttcctgatcactatagttttggaatataattattgtttaatatagttgaatggtataagagggccatttcacagataaacttcttcattgcgcttttgcactgtagtattttatggtggaaacttgggaaatttatcattataaatgggtgttcgattctaacctcatgttgaatgaatgtttcaggtccaagtagctttaatatccttc

SEQ ID NO: 70419 - DNA, 548 bp, Prunus persica
  Intron number 1 from transcript ppa015427m (locus ppa01542 7m.g) derived from phytozome v7.0 (chr-ID scaffold_2; pos 5888650 to 5889197 reverse strand)
aatctatctgggtttgataattcaaacaaaactaggtaacaatctcctcctctaatttgtgcctatttgattcattagatgagatgattggttattcatgtacttatgtttcgtttgggagtgattctggataggccagaatcacattttggaagaagaacctcccaagtacttctccagaaaatcacttttagtgattttaagttattttgggaagcagaccaaaaaaaaaaaagtgattctgggaaaaagcacttctcatgtgcttttccataaaatcacttaaaatcatttaaagtgattatttggagaagtgattctccataaaagtgattgttggactctcccgaatcacttccaaacgagcatttactttggataattcatgctaagcaaggtaactaagtctgtatttgtattactttctaggtgtgatgtttcaattatgagaattacattaattgatgcatacttactgtctattaattgtccatattgaatcaaatataccaggacggaggcatatttagttgagactgttgttgaag

SEQ ID NO: 70420 - DNA, 776 bp, Prunus persica
  Intron number 1 from transcript ppa003635m (locus ppa00363 5m.g) derived from phytozome v7.0 (chr-ID scaffold_3; pos 3162485 to 3163260 reverse strand)
ttcctcacttggttgattacatccctgacctccctgtaagtctgcaactctccttctctctcttctgcttcagaaaaacagaggaaattgtgtgatcagtgtgtagttatattttgatttttgatcaagttactgtaactgctaaaacacatgtgatcttcttcttcttccttgggcttgtaatttctgcaagttcagtgttgcggtgggggttgctttttggccatagtaggtgtcagccaaaacgaagcgttttgagatgactgtctgtgaagtcagtgcaaaaacctgtgatcttcttttgttcttttcagaattgtgttttaactgatgttaatttcttgagattttgtcgcctcagtacacggaattggggtactgcatttttttttttttggggtaaaaattctataaaatatataaatggttattattaatattttaatggtctagaatcagatggaaaagtaaagaaatttaattattattattaatcccaagttctgtgacgttttttttaaatattaaatttgataagaaatgggaattgaataatttatttgatcatatgttaggacaaaaggaaaaacctttcatatgttctgtccttcttaaaattactctgatgaacattagagatttattttatttttcattttaataacagttttcttgttttgctgctagaggaaaggatatctgtctgactgacagttttaccttcctgatgatatcttgcagacataccccaatccattacaagacaatccttccta

SEQ ID NO: 70421 - DNA, 837 bp, Prunus persica
  Intron number 1 from transcript ppa010318m (locus ppa01031 8m.g) derived from phytozome v7.0 (chr-ID scaffold_10; pos 714019 to 714855)
cccatcacggttctcttctccttttccccctgattttttatttttatttttatttttcattattattatgtatttcatgttcgtgattttctgatgtcgttgttttggatggattttcaattttgtatatatctttgttgttcggtcttatggaaatgaatcttgagtaaagactctatttttttcttcttctttttgagtacaacagtaagataagactattgtgaatagacatacaatagcatatgagcattgatttattgatattttgtttgtacgaattgaactaaagaaatgtcacagtgactgtaggtgacaatggcgatctgtttgtattttagccattgtctcactcagggcatggaaaatatgtcgaatctccaattgttatgtccctaaatttgttcccaaaatgtgtggtttgattttaaatagattcataatatgatattcaccgcctcctccccctccacaagaataatcctggggttggagtatgaacctattgtttggattgataggaatgacctagatgaatcgactacctctgaagaggtggtttgttgaagttaataagttttgtttgaagcaggtacaaaaggagtgttgacatcttagttctttacctctgcatctgtaatttttatgggtgaaaacagtttagcacagtttctttccctcggcatccattataatttagtttttcttctttgtagttttcacctgttttccttaattgtctatgaggagaacctttgtgtttttgacatttaaatgctgcatttaggtcaccatggcattgctgataatttatctgctatgtgatatcagggatat

SEQ ID NO: 70422 - DNA, 626 bp, Prunus persica
  Intron number 1 from transcript ppa011592m (locus ppa01159 2m.g) derived from phytozome v7.0 (chr-ID scaffold_2; pos 3914408 to 3915033)
tcctcgctgcccatctcgaacagcaagccatcgatgtaagtcttaactctctctctctctctaaagattaatggttttgtggtgcctctgtgtgtatttgagtggagagtcggataatttgtacatctacttgttgtaaatgccagtgctttgctttactttctttaccactggaagacatcatttgctgaatttctggatggatttgttagttaacttgaaaacttcaagtgggtattgaatgaaaatattatctcacttattttgtcttgtttctacatatttatatgttcaatcatattttacttagttaacatataacctttaaattttatgaccaaagatctcttgatttggtaaattacctgacccaaattgattttagtgaaggtatatatagttgaacagatgccaaagaatgaaagtacatgtaatgaaacacgtctacatcaaaattattctacctaaatgttttttctttttcaatgatgccaatggatatcaaaatttggatatttttcgttattactttctcttgttttattacctttctgataataggctgggatgtctttaactaaataccttttgttggcagcctgatcagccaacagttgaagaggaag

SEQ ID NO: 70423 - DNA, 605 bp, Prunus persica
  Intron number 2 from transcript ppa011592m (locus ppa01159 2m.g) derived from phytozome v7.0 (chr-ID scaffold_2; pos 3915085 to 3915689)
aagccgagggtaagtttattgtcaagttttttcttatcatcccccctccctcactctccggcctctctatcccttgttaaaaggatacatatgcatttattaattttctgggcactagttatgtggacatgtaataatataggttggaatgtaagccgtgcttttagttttaatattcaaaatgtattatttatacatgaactctctaacatttagattgtcaaaatttgtcatctctcacatcactgcaagtctgcaacatatgagccatctagttgggttgtttgattttacattaaaattttagtatgggttactctagcttataattttcatctaaggccacaatgctctggtcatacatgtgggcttagaaaaatgaaattttagagtgaggctaatggtttgaacaaatgaacttccagtggtatttgatcatacaaaatgaatgaagtttgttaatttacagtttgagtcatgatgcacctacctaagccatatagacattctcatcaaggacacaacctcacctggtttattcttctttaacatgttaactttctaattatattctcattgtttccctttgtgatcaggacaacaag

SEQ ID NO: 70424 - DNA, 360 bp, Prunus persica
  Intron number 1 from transcript ppa007064m (locus ppa00706 4m.g) derived from phytozome v7.0 (chr-ID scaffold_7; pos 21126354 to 21126713 reverse strand)
tcgcttcccctctctcacatcacgcctctgataatgtcagtttctatctttttcttcatttctagggcctcttattcattttctgttgcttcttcagctcttccctggcctttatctttatctttttattttgtctggaaaaaatttgttcgatttgaaattctgtttggcagatgagaaattgcgggaaacgaagaaaaatgtgatatccaggattccgattttgtgttgtctttcattttgttctgtttgatcggaaatcaaacgggggctggatcctttaaaatttatcattactttttaaatttatgtgttatgtaatttgattttcagagagttgtgcaaggatctatttaagaa

SEQ ID NO: 70425 - DNA, 518 bp, Prunus persica
  Intron number 4 from transcript ppa005632m (locus ppa00563 2m.g) derived from phytozome v7.0 (chr-ID scaffold_1; pos 22644717 to 22645234 reverse strand)
gaatagctgaacgcattcaacaggtcaatccgcaaaactagtagccctctttctttcttctaatatcgaaattgagaatggggtttagactgacttttaataggtggaactttccgcaaatttgattgatcgatgtgttttctatctgtattgtggaagcaatagtttgagtcttactgcattaggaggtttacttcattcagttttcgtatggttctatgtgtgcttcttgacctgctcatatatgaactgaatttcagtattagtcacgatttgtatatattcactttataaaacatggtgcacattgtggcaagatctattcaaaaggataactcactttccccaccccaagagagaagactgtctagaaccttactagacagtcttctctgtttggtttgtaatggaaataattagcaacattatctgtgaatcttgtaaattttaattcatattgattattgaattcaaattttgcagtcactaggaccaagagcacggagcttccgttcctt

SEQ ID NO: 70426 - DNA, 260 bp, Prunus persica
  Intron number 1 from transcript ppa005632m (locus ppa00563 2m.g) derived from phytozome v7.0 (chr-ID scaffold_1; pos 22645605 to 22645864 reverse strand)
agaattaaccctccaaggtaattcactctccgttctcttcatttttggttttgtttcctttatggggtttttttggggatgaattgctcttggttttcgttgaagaaaatgggttttgctcattttctttaaagttcattgtttcttgagctgcaattgtccattttgagtgtttttaatgatacagtttatttatatggtttcttcttgatatgggatttgtagggttaccgttgataatacctcaagcaggaaagcca

SEQ ID NO: 70427 - DNA, 463 bp, Prunus persica
  Intron number 1 from transcript ppa011444m (locus ppa01144 4m.g) derived from phytozome v7.0 (chr-ID scaffold_2; pos 20183705 to 20184167)
accccagcaaccccaacagcaacagcccactgaaggtgtgtttctgtgcttcaactgattctgtattttgttctgattataatctaaaccctttttttgtttttttaaggtcttttgtttatgcttcctaatcttgtaataacgatcttgtcttttatgggttgctgggaagaaaggaaattatgaatgaatgaagctttgacttttgttcaacacattttttcatctaaaaaacgtgtctttgattggatacagagatttaaattgacctgttaatctctaatcacactgcataatctctctttcaattacaatatttagattggtaatttggttttctttattttttgaagtgttcattgtttcttgctcagtatcctacttgttgtttgcatgtttgatttactgcttgctgcatttgacattttaccttttacccttttacctgcctgtggttaaagag

SEQ ID NO: 70428 - DNA, 663 bp, Prunus persica
  Intron number 1 from transcript ppa021383m (locus ppa02138 3m.g) derived from phytozome v7.0 (chr-ID scaffold_1; pos 43874525 to 43875187)
taaggggaagtcatttagagccggtgacgtgcttggttagtatatacaaactaaaagcatatatattattttcttcttctgcttagtaaattatatacaactttgaaggaagattatttgattgataattagtataggaaaattcatgaagttgggtcctttgttcaagttctttttccttttaatttggactgatttagagactgaattcttttcaccaggaaaagtacttctgaggcagaggcctagtgagcccatgttcggctaatcatcgataactcaagtgattaaaaatataagagtgatttgtaaatcgagtggttaaaagtttaaaaataatttgtaactcaagcagttaaaaaataaaataaatcgaaactcaagtgattaagaggtttttatgctgcaaccaaactctgtttcttcctccctttttaaaaaggaaaggaaaagaccaaaatgtttcacaagatacaaagtagatcgtaaaaactggcatgagtttgagaggacttggattttcttaattatctaaagtcaaataaattttttaactaaaccttagaattagcttgtactttagcatataatcttgattaatcttagtaccctgacctcttgcatatttgattatagttttcaactacgcgtcttctgctcaca

SEQ ID NO: 70429 - DNA, 715 bp, Prunus persica
  Intron number 1 from transcript ppa009285m (locus ppa00928 5m.g) derived from phytozome v7.0 (chr-ID scaffold_3; pos 15694461 to 15695175)
ggaacactgcccaggtaattataactcataagttgtatcaacttgtttctcctgatttctgtgagcataaattgggtcgctctctttttcgtcagtatgaattttataatctgtttggactaatgaaattgctctgctattcccaaatcggagttaatatatatagctaacaataggcaatttatttttgcggtcatgcaatccaaatctttgatagtgttttcatgtaaacttgaagaacacgaagtgatgagttagatgagggttttggggtaattatttagacctattttgttcagatggaaaatgaatctgagtagtgaatgccagtaagatgaggttggatttctctatgtttccactaaacagacttttccatcctattcttgtaatgttgcagcatttctatatttacattctactctgcatcaccatatagtccttagtgattttgggtacatctatttttctgaaccccaaaagagccttgcatgttttgattgaagagttgaatatctggtgtgaactacaaaatttagaatttatgtccccacttcatgtacaatttcctaatattataggaatgcaaatccaatatcctaattcaggtctatccttttttcatgaaccttttcataagtttctggccctgcctgaaccattatgaatttgatttataggtgaaaattggtgatctgggatttgcagcaatagt

SEQ ID NO: 70430 - DNA, 574 bp, Prunus persica
  Intron number 2 from transcript ppa010359m (locus ppa01035 9m.g) derived from phytozome v7.0 (chr-ID scaffold_7; pos 18862144 to 18862717 reverse strand)
tcgtcgtcaaggctgccacaacggtcgctcccaaggttgttatgtttgcttcttctttgtttttctattgcttcttgttcccaatctgactatggttcatttctttattattttttttttttgtgggtaaaatttggttgctttgggcaattttcctaattgtgtgtctaatttagtgatgataatgatttgaaaaacgagtatccgtacatgatttgaatttttattatgccatttgtagtgatgggctttgtattctctacttatatatgtttgaaactttagataatcgttgggttattgttagctcggcaatttgttatatttagggtttttactatttgtggtaggtttacctgtttaagtttcgagttatgtttgcccatctctctaaaagaacgattttttataaataaaaaattatggaagtctgtttgtttgtttggatttgttataaaattagctccgttattgaattcattgtgtcagtgttatatgtggtttatctgatgttcatttgttctgatccaattctgcagtacacttcgattaagcctttaggtgacagagtgct

SEQ ID NO: 70431 - DNA, 948 bp, Prunus persica
  Intron number 1 from transcript ppa000500m (locus ppa00050 0m.g) derived from phytozome v7.0 (chr-ID scaffold_1; pos 1542109 to 1543056)
ctcaccaagctctctgtttgccacttctttatcaggttcattggaatcctttacttttaagtatttgtttagtgatatagactgtataagtagtgagattgtacctaccgtgatatttgcccttaaaagcttacatatttagtattccaaaattagcccacatgaagttgagctcctaaatggtttaagcattatgcatctaggctagttagtgagctagaataggttctaaatcagtgaagcttgagcttcaaggatcattacaagttaggcttgatgagggagtaggatgtcttaatgattgcattagtgtttatgcctagacgttttttgagtttttcttaagagataatttaaaattttcttaatgaacttttttgtgtgagtgatgttctaacgttctgaaatgtctgtgtttgtcttaatatatgtatgcttatggtcatacaattcagtttccatgaactctacgatacacaactgctaacaaacactcaaaaagtaacagaaagaagagaaatcattacttacggaatgttaaattgagaccttaaaattggggaaagaatgtcgatgcactaggcgctgccatgtaagtttactatactgggaacatgaaatctttaagaacatttgttgcttttatgatatattttatggatcttgatgaaaagaaacatgaatcgtgtcaaaggtaattgtgtattatttgaaatatgttatttcaattaatggtggtctacaattcaatgatcgataatgctgttgttaattatctttatgtggttagcaatgtttgtatatttagccgattgaccctacattacatcatggctattggtttcttcatttttgtataatgtaaaaaatagttacctttaacttgatccattttatggtgtgtttcctgcagatacctccctccagaaattggctgcttatacaatt

SEQ ID NO: 70432 - DNA, 960 bp, Prunus persica
  Intron number 2 from transcript ppa004820m (locus ppa00482 0m.g) derived from phytozome v7.0 (chr-ID scaffold_4; pos 26495040 to 26495999)
gcttgtctcccttattgatacaagagcttgtcactgtaagaaccttcccgctacaacaattttcgagggtgtttgctattccttagttttctttttcttttttcgttatatgtgaaaaatatggtatatttctttgtgcataacaattctcactagtttcacttcagttagattgttaagaagaatgcagtttggattatgttgtgaagtgaatctaacctgacaaaaaattatatttgaatacacatgttgtatttctctataaagcatagaggattttgaagtttcaactcattgtttcagtgttttataaactgtatcatcatgcatgggattgctaaatttgcagcacgtgcgtattagaattgtgaaacttggtttgatgatttaagatgatatccttttggatttcggttcttactaggaaaggatataattttgcaagacaggggattcagtacaatgaatggatgtataacctcaaacaaaaacacgagcatatgggacccatcttaccgtcttttgttggcctagcttcacgtttgaaaagtactttatttgattttgattttgcttttctcgtttgtgtattacatattttctcctcaacaaggattagatacaagctcatttacatattattggacgtaggccatgtcattcatttcccttatgtaaaagtgctatttcagttcttgtatgtttaggttttcttagcatacagggcttctattttttctggtttcctttcagtcagtgtaaatggaaacaaaagcatgtttcataggtctggggagaggttccacttcatttcaacttaaggaaaactcttggtttgttgaaatgttgatactttgaactatgaaattggcttacaagtgcagtggtgtttgaggttttcgagatttcattagaagttagttctctgctgaattctgcaggtcatcacaagaatcaatt

SEQ ID NO: 70433 - DNA, 682 bp, Prunus persica
  Intron number 3 from transcript ppa019884m (locus ppa01988 4m.g) derived from phytozome v7.0 (chr-ID scaffold_3; pos 19488479 to 19489160 reverse strand)
ccctttataagttagtgcatcaatcaatgaaacgttaaagacctaggattccctctttgtgcctgcacattcatagccttagacagcaggtgaagccgtatgagcttaggttgagatttggatataggtctctggttatcttctaattcctgtgtggcagctttgttgtatttcgtttttgtcagactctggcagattaaataagctaacttagatgggaaatattgctcctagataccagcaactgagttggagttttctcttactttttgtgcttgcacgttcatagactaggaggtgagaatgaagttgttcaagctcatgccaagatatggacttaggtctgttgaatatccttctcacatattattcaaactaatttcgacctctatgtggagtagttctctttgatgttgctagataatgttcaagtacatttggatttattatatttatagtaggcatagtaaaattattctgaagatcacctgattattagttttggtctcccaaggttatgggttcacttttgtgcagtatacattttcagtggagtcgtctgctatcttcttcattatgtaagtcagattttgttttttaatggcttattccatcgatttctggttcatttagaagaaagaatcaacaccgatttcaacttgatgactacaactgcaggagt

SEQ ID NO: 70434 - DNA, 828 bp, Prunus persica
  Intron number 2 from transcript ppa008647m (locus ppa00864 7m.g) derived from phytozome v7.0 (chr-ID scaffold_7; pos 7810541 to 7811368)
ccaggcaaaaatagagcctggtttcacggaacttggtaagcagatatcctgcagtattctatgacatggctttctttccttatgtgttttgtagtttctctcctttttcaggatcttaatctgaatattttttttggtgtttctggctgttgtttgttgctacccactttccagtgtttatatcattttgtgcacccatcattacaggaaggatagatttgctcctcctatgggccctttgtcataatttattgggcaccccacaatagtttttgggtattttcactatttgtttgactgcttttgtacagcgcttttgtacttcttgatagaggcttctgttgtgaattgaaaactttacccccttgcttgaggtgtttttttaatattaatcagtgtggtgcattttgactttggagtcgtgtatcagtcataatgattcctacaaagcggctgcatcttttagattaatctattgtcatcaagaaacacatttgcatcaattggtgatgagaaaccaaacctatcggccacagaatccgaattcactctgcactgattttgaaattatcttcatagatttatcattctattctgagcttttccctgccccaatcaatgaatctaatgtctttgcagttatgtgtgaaggattatgaaatgttaatctccgatgtcaacttaaaaacatgaactctttatgcccccagtcaatagtttaaagggaatcttacagtcatattcagtgtttccgtatgctcagcttaacactaaaatcttgctgcatttccagtttggcagaagcttgaggaagagaatcgggaattc

SEQ ID NO: 70435 - DNA, 499 bp, Prunus persica
  Intron number 2 from transcript ppa020839m (locus ppa02083 9m.g) derived from phytozome v7.0 (chr-ID scaffold_6; pos 3695367 to 3695865 reverse strand)
agcatccaggtctgttgaatcaaacaatcaattagttaacaaatcttctattttctatttttttaggtgactaaattgatgatcagttacttcatttcaaaagctataaaaaatgtataaacaagccaatgcttcatggaaattagttattcttcacttacaaagtgctcaatgggaactgcgcagaaaccatgaccttacccagcaaagatctgacaactctcctagatcaaagaagatagttagaaagttgtaaaaaattgaataagggtaatcatggaaaataaaactcaaatgttttaatgtattaatgtatcattcaaaaatgtaattaagaggaataatacatcgcacaagagaagaagtgagaagttccaaccaagatggttagggtgaaggttgcgagcattcccctatttaaatatctagatagctaaatttctttgtatctttatttataactaaaattacatttgattaattgcagaaaagataactg

SEQ ID NO: 70436 - DNA, 634 bp, Prunus persica
  Intron number 1 from transcript ppa003006m (locus ppa00300 6m.g) derived from phytozome v7.0 (chr-ID scaffold_6; pos 22491373 to 22492006 reverse strand)
gcagggcccggctggcatcaaattaacggcctcattcttttattaaaattttattttattttgaatgtgaacctcatttttttaaaattaaaaataattaaaaaaaccccaaaactccccccaaatagtttccccgtcattggccacccgcgccacccgccacctcctcccgccccaccccctcaacaactccacctgccttcaataccctaatcacacacagtcttcatttccccaatcaaattcatcacatttttaagtaaaaaaaatgaacatataagcgctcgcttttcacaatgcaaatccgtttgggagtcggacgtgattcaggtactatctccctccctctttctctctgcatgttcgtgtatgtttggctgctgagaatgtgcaggaaaatgaaagtgaatgggaagaggaattgggttttccctgatccctcattttcgtttctcaattcggttaatttcgcgggaaaattgcaagattttttctttttcttttttctgaatgtgtgtgtggtttttgttatatatgcatagagtatttgatgcaatgtgttggtttatttatttattttggtggaaatgaatattggaactgtggattttgttttgaattttgattggtaagg

SEQ ID NO: 70437 - DNA, 952 bp, Prunus persica
  Intron number 2 from transcript ppa007871m (locus ppa00787 1m.g) derived from phytozome v7.0 (chr-ID scaffold_7; pos 4589726 to 4590677 reverse strand)
atccagaagttagaattagatacaaacttgaaaaggttggaccgctttgttatttatgcataatttgatgccactatttcaggatttgttttacgttttggtgctcctgatcctgttatcgctgtttaattgagctttctggttttgtgtctatcctcttagggcagcatttgtagcaggtttcgtgaaagttttgtttcttacaaaagaatttgaatttttacaaatttccccaagtttatgaaaaaacgttttctcagtaaccttgattctgataaccacagtttatggttacggctattatctcttttaggttttctatttttctctgttcataaatttctgcatttcctgggacatgaccatctcaaatgatgtaggacagaagcagtaggctgctgtcagattggtgtagcagaccaaaaccactctaggggaatttccagcaataagaaaactgaaaaaagagataataagcaataggatcgaagttggaacgtcgataattgagtcctaagacccaagaggaactctgaatctgattttctgcataaaagctgttaacaaagcctcttgaaagagtatttatactagagctacagcagccagaccatcctagaccttgattatttaaataggtacttaatcctagccctacaagatactaaaaatctcacatgactatttacaaaaaataggagcagaactctattctaccaactgaaataaaacataaaaataaaacaagacaaataatagataaagaaaacaactaaaacccaaactagttagatggcccacttagccttggaaagcctcttagatgctcctgcattagtaaaacctctagaagaaaatattcttattttctgcatatgtttagtttcccaagtacgtatgtttactttatctctgtcaacttgtgtattctttaggcaaaacgaaaggaagc

SEQ ID NO: 70438 - DNA, 368 bp, Prunus persica
  Intron number 1 from transcript ppa007871m (locus ppa00787 1m.g) derived from phytozome v7.0 (chr-ID scaffold_7; pos 4591077 to 4591444 reverse strand)
gccgcttctcgctcttctccgagtgccatcaaaaggtactcttttttctttcaccccagtttgtggtatagtttgttaatcatctattggactctcattgatcgttcttcctagaagttgtgtgattgtaataagtgccttgccattatgtttactttgctcttgtcattgttgatatcctattttgaaattttaaacttttgattgtcttaagtacagcctcatgaaattcttcacctttttctgccttacacttgctcctacaatatactttgaattttcccttgcatttcaaacaccactgatgacaaatcacgtctatcttttatacaggggctcttttgtctggttcagttgtctagcacaaa

SEQ ID NO: 70439 - DNA, 483 bp, Prunus persica
  Intron number 3 from transcript ppa009808m (locus ppa00980 8m.g) derived from phytozome v7.0 (chr-ID scaffold_8; pos 20884176 to 20884658)
gtgactactgtgacacttatttgacccacgattcggtaacacttctctctctctcctctttttggtttttgaatcgtatttgcaagtatgattttactttttccgagagctttcaatttgctttttgataatttttgctaaagttaaagagttaatcacattgagcggaattttttattttgggtttatgattctgggtttagtcaaaataaatgggagaatagagtagctgctagttgattgacgttgggaactttcgggttattgccatcgagccttttttagttgcccatgtgttcatcacttgcaactcacggatatctaattttctttttctgtatgcatgcatttaaaaaaaaaaaattatgtggcatctttcatgttaagcttactgtccgcaatgaggaagtgaaatcatgatcttctcaattgctgacaagtagttttcctatttttttcagccttcagttagaaagcaacaca

SEQ ID NO: 70440 - DNA, 347 bp, Prunus persica
  Intron number 2 from transcript ppa007542m (locus ppa00754 2m.g) derived from phytozome v7.0 (chr-ID scaffold_3; pos 6852304 to 6852650 reverse strand)
ctgtaagtctttatatcgttcttcttattcacttagatgacgctcagagagtgcagctgagtagttcttgttgtttggtctttgtattttcttagtgagcttcgcatttcacatgcaattgtcatacttagcattattacttcatggcatttggtttgtcactacagaagtcctagatgaaggtaattatcatcttgttaaattggttttcctgagaatggacacatattgaatatgtaatacagaaagtgcactaaaagtattctagtatactaatcttgccatagattatgtactatcttgcctatttacactaaaggtacttgacttttgacttttattgcagc

SEQ ID NO: 70441 - DNA, 797 bp, Prunus persica
  Intron number 1 from transcript ppa007542m (locus ppa00754 2m.g) derived from phytozome v7.0 (chr-ID scaffold_3; pos 6852766 to 6853562 reverse strand)
acacgctcaaaccaattagtgagtttgctgcgatccctagagccattgaattttcttaatttcttgtttctgaaatattaataataattattgccagcattttctcactcagctcatcgtcattgtgcttgtgagcctcgaatctgatttgtataattttactatttgagtaatttttattgtttggtccgtttggtttccaagacaacgcaggaaattgtatgcttctagttgtagaaattccagtgtttatgattgagtaaatctcgattttatgggcattttttcctctgttttcttggctaccaagtgggctcgaattggcatgttttgaattctactgcatgattggagtcgaaaattgtagtttagttatggtggtttggatatggtagatttgaaattggtggaataaatgtggtaggcttttatggaaattgaatcgattgggtagttttgatgagttctgagtagcaaacaagggatccattgattaatgtggtcttccgtgcatttattgttcttggtgatgtggtgtaggtgaatttcttctaaaactagactatatgtatatgaaattctacgggcaaattaagaaagttttgaatgctgcaattccttgtgcgcaagtgtgtgattagactcaaatgggcaggggatatgtaatatgttggcatgatgaaaattaagaaagaaatgtgtgtgtgtgtgtgtgtgtgtgcgcgcgcacacaagtgcacccatgcatgtggatttcaaaatgactgtgttgtttgatgatatggttgcagctgcaa

SEQ ID NO: 70442 - DNA, 923 bp, Prunus persica
  Intron number 1 from transcript ppa010780m (locus ppa01078 0m.g) derived from phytozome v7.0 (chr-ID scaffold_5; pos 6726556 to 6727478)
aaccaggtaatgcaattaatctccttcattttctcatcaaagaaaacccataattatttggtgttcttcggattatgcactgtttgtttctggataaaacttcggaaaataaaatcataaaaaaagtatataaattttcttagaaaacagacggagagctagggcttgtgcgtatttgatgtggaaaatggaatgcttcgattagtctgacatgggttttaaaaagtcatttaaaagttgttttttttcatgtgtgtgataaaaatagtatgggtttttggaattagtcaaggacttgttgggtctgagactctgaaatgaaatattctatagtagtttcaactgaccctaaaccactctatcagagaatctgtttagtttctgtagtggaaaatgttttggcaaagaggtatgatcattttcctttttatttgtaatgaaatttttgctttgagggagacctaattagtgaatattaccttaataaaaaagttgaaaaagaaatcaattttggagataagtgaataatgataatgatttgtactcaacataagggacgtatttggtatattatgagggatggaattagtttgggaagttaagtaatatcgccgtattgtaaaatgatcaagttcttgagaaagcatgctattgctcattaaaactccaaaaataaagaacaaattaaaaaccgtacttttcttcattttaattacatgcactgttgtttgttctaaatgctttattgtaacttagtttgttgatttttcataaaggttatatctttataaaaaaaaatccgttgtatgtccttaagaaaggttacctcactctgtaatttttaatatacataactaccaaattagatgtcagaaagggtattttttcaatgcagttcctttggggtctgggtcttccagagc

SEQ ID NO: 70443 - DNA, 842 bp, Prunus persica
  Intron number 1 from transcript ppa006193m (locus ppa00619 3m.g) derived from phytozome v7.0 (chr-ID scaffold_3; pos 11351608 to 11352449)
aacaaaaagggtaccccgcagggcactgtcaaagtgtgagtctttgttcaagatatattagttatctgtataaagttttttttttttccaaccgaaattatgattttggtatgtgctaggattggtttttgattgaattgatgaactgggtatgtgttacattaaggatttgactatggttatgaatcaggcatgttcaagatttggtattttttaaatcaaatttatcagcttggcatgtgttatacttttttttgttaaccaaattcctgtactgggcattgtctttagttcttatatactatcctggctgaatattaaatgacttactctgcttcatgcattggaattgtccgtttaattatatagctgggagctatgtcaaatttaagtttatccgtttccaatctctaagggcagaacctatgttgcatgctaaatttgcagctcaattgtttcatctctgttcccgagtctttggagctcattgtttagactgttgtttatggaaagtttgatgatttgcagcatcaatgattatggacaattaaggcactgtgattatcatccatagttttttctttggcttttccttttgtattccctagaaattgattttagtgagaaatcttggtttctatttcagaatgtttgttctagaaaatgcaaaatccgaatactatgaagtgtgcaatggagaagatcctcttttttcttttccaaaatataaatagtctattatattaatctgatgtttcatacccccaacttatcttttatagttaatgttccatttgtgttttacaggcctgagtcattgggtattgttgttggaattgttt

SEQ ID NO: 70444 - DNA, 355 bp, Prunus persica
  Intron number 1 from transcript ppa017632m (locus ppa01763 2m.g) derived from phytozome v7.0 (chr-ID scaffold_7; pos 20476177 to 20476531 reverse strand)
gtggagtcaatatcaagttgagtcacacaatttcttgattaattttcaacccatttttgcaatgtgtttgtattcttattctttctttttatgccattatgttcctaagtggttcattttttctcactctcaaaagtcaaaaccctgtcagttgattatcttcaatttctgtaaaatcatggggaagttcatttctttccccccatgattctggaggtgttgcttgttctccttgctttctatctctcttcttttaactgttactatgactgttacctgtttccaattatgtctgaatgatgttaaggaattccttgaacatgctaaaattattatgacaattgagtttgcaggt

SEQ ID NO: 70445 - DNA, 547 bp, Prunus persica
  Intron number 3 from transcript ppa021728m (locus ppa02172 8m.g) derived from phytozome v7.0 (chr-ID scaffold_1; pos 26202647 to 26203193)
aaggtaccctttttctaacctataagttgctcgggctcgagtaaatattcaaaatccgtttatacatccaattgttataatttgtttttttttttgaatagttacctcttaagggattattgtcctagtgttcttctagtgtatgcaacataaagtagtttgagattaatgcatttgaaattaatcgaagcctatcggaatttttgtgtgtagtgaaacctaggtttgggtcgtctgccattttattccatgtgttctttcatagtaaacatttcggagaagaagtattagttcctttaatattttaaaatatctagtgaaactggacttatctatttcgagatctcaatcctgctcctatttctggcaggtggaatttttgttattcatgttgatgatcacaaatttgtgtgttttccgtgataaatttggataataatgtcctgaataaagtagttataagtattaggcatttatgttcctttttcgttggttggtaatgacggttaattatttagaggacctgaaggacctatttgttacagtt

SEQ ID NO: 70446 - DNA, 913 bp, Prunus persica
  Intron number 2 from transcript ppa010295m (locus ppa01029 5m.g) derived from phytozome v7.0 (chr-ID scaffold_5; pos 15599514 to 15600426 reverse strand)
taacggaggcctcagtgcgcgggtaagttgttcagatcttaattttcacatgagcgcataagcgttgttatgagtgctagaaactttctattatctggattggatattctaatgcttggcatatcaattaaaggctggaagcgttcgtgtgtacttaagaatggtaaagcttgtcctagtttagttagaaacttgatgatgcaaaatagtgtaacattttgaaaaggagttgcaaattgaaaatttagaaatggggtttctgaaggattgatgaaaaagatacagggtagggtacacacattatgacgtggaaccagtataagtttcgtccccgtcaaaatctacttaacttcggggaatgttggatgtgctgcccactaaatatgtaatttggccgattttgaattagctttaatagaaatatagctgcaactagtgatggatacattttggaatagaatttgctcagagaaagtttatggtattcatgtgaaggaaagaatacctatgattcgtttttgacagatagcctttctaactgattagtggattgaaataaggtggatatcttgacagaagtgctcacttaggccctattatgaacaaagaatttgattccctgttgataaagctgatttctttcagataaatctctttctgatgtggtaatactgtttttatttttaaatgccacttgtactttatttattttgaacttcatactgcttcatgcgttataaaagattttagagggtcttccaaaagtcatttagaataatggatgtaactcatccaagtggcttaacatgactgtttattaggatgaaaaaccactctgatttcttggctagatgtttacaaagctgtttgatgtgcagcgcttgttctggaaaaaagattcaggggaaaattc

SEQ ID NO: 70447 - DNA, 382 bp, Prunus persica
  Intron number 2 from transcript ppa007975m (locus ppa00797 5m.g) derived from phytozome v7.0 (chr-ID scaffold_7; pos 1936202 to 1936583 reverse strand)
gcaacattctggtcgccacctcctgggacaaccaggttcatgttctttttcttttcttcgtttttctttttgtggtttttatcagttataaaaccttaggttctgtttgtttgctaagaaatttatttgtagagattttgattgaatttctgtgaccatctcattgaacttgtggtttatggagaacccagaatataagacaatgtgctatgaggataacataaatttttttgggtacgatctgcttatgtaattcatgttaactgaaataagataaacgttgggcattatttctgctcttttccgtttcctttctttcgcaaccaaacagtgtattgttaggatttagtaatgactggtggtgttcccttgtttaggtgcg

SEQ ID NO: 70448 - DNA, 993 bp, Prunus persica
  Intron number 1 from transcript ppa025188m (locus ppa02518 8m.g) derived from phytozome v7.0 (chr-ID scaffold_6; pos 6538787 to 6539779)
ctttaccaatatgtgagttttagcgttaaacactcgcttttattggtcttcttttgtttattctcaaattcactttttaattgggtgggagtttgtgtttatgttaatggtagtagagttgactgttgactggtgtgcattgtttgttgcattgcaaatttgaaatctttggctgtatgaactattgggtgtcttctgaaacagaggaaaagaaaaagattgtgcatttgacaattttggaagtgggatagaaattttggggcttactatatgtgggtttgtttgggagaacattataggagattgagcaggaagattgtgggcaactatgagaagtgtgaaagccaattactaaacatcaatatgagtgagttgctgttttggtttttggttcagtgtttgggttgggttaattggtcgaagtgcaatctaacaagtgtatgtcatgtcatttgtgacagtgttttggagtgtgttaatttagcttcgtgcagaagctgcaaggaataatcccaaacaacttggtatttgggagaattaacagttatcttgttagacctatccttcttttagtctgttgtgttaaacatttgctgagcttgctgcatttgtgtgacaaagccaattttgggcaaattttgggttcagcaatgattcggtcatgcagttatactattttgttgttgttagaaatttgttaattattttttggtgatgtgttctgtcaaactttgttggttgtattacaggataaatatgtatttttttctattccgaaggagaaaacccaagttctgttatttttaatttattttcctccttattgatagtataattcatgtcttaacaagtttgctgctctcatcactattcatgtttatgaaataaaatacgggggcataacagaaaattccatttcgtgccacttatgtagatgattgacatcttttaaatacaggtcacaaacagagtgcgtcctggaaacagcaaggt

SEQ ID NO: 70449 - DNA, 846 bp, Prunus persica
  Intron number 1 from transcript ppa009840m (locus ppa00984 0m.g) derived from phytozome v7.0 (chr-ID scaffold_6; pos 17149564 to 17150409 reverse strand)
caacgctcaatagaggctttcaatctacttcggaggtacacactctgaagccctttttgagaattttggtttcttttctagtgttttaactcaggggacgtgcaattcttctggatcgctgaaattcaatctttattttggaaatactcgtttcaacgttttgggtttatgctatgcagattatattacatgttctttgagttcatattgatgtttctgtgcatactttatacatatttgtatatttgttaaatgtctttattattccccaaatgtatcttgtttgaaagataaagtatcttttgaaatagtttatgtgctcttagcaccgttttcttgcaagttgattctgcaagggcaaattctatatttggtggtggagcagttttcactgagttagtgtccaatggaaatgtgatggattaccacaatccaaatttctcattttgaaaagaaaaaaaatgaaatatcttgtggtagtagatggtaatgtcaactatgtgacatttggctatgttttggtactcaggatttttagcagcaggagtttgcataggatttctgaacattaatttgaagtggctgctttgggttgtttcgttcgaagtttatttgggggtttgaatttaagggattaagaaaatcctaaatggtggttttctcgcttatatgtgaaacggtgttaaatgttcattcacccttttggcaagcataagacattcttagcccaattgggggatactgctcaaagttctgtttcatgtttcctttagcatctgagtttctactgaatcatttgtgcctgatataggtctggcctccctaagagaattcattctcgtagtt

SEQ ID NO: 70450 - DNA, 843 bp, Prunus persica
  Intron number 1 from transcript ppa005679m (locus ppa00567 9m.g) derived from phytozome v7.0 (chr-ID scaffold_1; pos 2203914 to 2204756 reverse strand)
ccgaagctttcggcctccggcaccgacattgttgggtgagtttcttgctgtttcagctttcaatagtaaacctttgtaaacatatttgacttatgttacggtttcgctctgagtttatagtttttaaaaaaaatttgaatttgatgttttcggacatattagtggaggacatattagttcgaagatgtaatctagtcatacttttctaacatactgaaaacacaaatttaaggacttccaaaagatttagcaaaatgaattccgtgtttgttgggcagatacgcaagaagccacacatatgatggctgaccggttagggctagaacgcacttggaattttgtggaactgacttagctctgtgatttttaatggcctttcggttttacagagtaattgcctattccaaagttggaattttgaatgtggtgatgttatgatgttagaattttgaatggcttttcggttgtttcttctttatgatgggatttttacaatctttttactcgggttggatggttattcatgttactggggctatttgtattattactgctatgttagtctagttttctggggatgtcagattactgtgtactctttaattcacttgagaagcaagaaatattttcttttgttgagtagacactggaaatcaaagagtaaccccttttattagttgtatggatgttgcgatccgtataattttactgtttttgttgtctcttattgttgccttgaaaactgttgtgcttggaatattgatgtctctttcattgattcattgcctcatgataccttcacttctcacagatccatcactagaggtgccgagagagtccagg

SEQ ID NO: 70451 - DNA, 916 bp, Prunus persica
  Intron number 1 from transcript ppa000532m (locus ppa00053 2m.g) derived from phytozome v7.0 (chr-ID scaffold_2; pos 2126337 to 2127252)
attcaattgaaggtgaggaactaaaaccattccaatttcagtttcgtatttggattaagagtgttttcatgttgctggaagttttgctttgtttcacgttgtcttgttaaattttggttaatggagttttttgttgctggaattttgtaaatgtttgggatataactgttaagtctgtttgattcagaatcacattcaatcttcagatgaagagttctatgaagtgggtttatgatcgtgaataaggggatttcatgtgataaaaataatatgaagtactcatgtaatgctagtatattataaatgcatttagctattttctttattataaatttcaggttctacatgcaatatttattggaaatgatttagccatgtcatttagatgtttcgactttgcaaattatacaaacacacattgagtatgtataataattatgtataagcaagctcatcgattggcctgacacattttgaatttttgttggagttttgttgcattggtttttggtaaaaaatcattttctcaaatatgaagagtgaatagggaaacatggtatgcagttgtgaatatgtgtagaatctgacattgttcagaaactgcatcatggtatggtatatgagcttgagcttgacgttgcatcttgccatcaagatgagcttttggtataggaacatgggacaggaatcttgtacctattcccaagccttgaaatcacgaaacatggtctacgttataggcacatagagggattctaattggtataatggtttgggtccatgatgcagaaccccccctctctaagttctgtgtgttattttatcttatcattggcttggaatcttacttcttttctatttcttttagaagatatctgatgttcgttatgtgatgtaggatctcttaaatactggt

SEQ ID NO: 70452 - DNA, 896 bp, Prunus persica
  Intron number 3 from transcript ppa026914m (locus ppa02691 4m.g) derived from phytozome v7.0 (chr-ID scaffold_8; pos 19298523 to 19299418)
accggaatcagctcaggcagggccggaggtaaaacattttgtttaattctgatttaatatgtagaatatgtctctcaatttaagcactatcaaaaacagcagagtatacttcgctcctcatatgctatctctatcatgcttagagggttatattaattacaagaaggggtttcagttatattagtttttcttttagtgttatacctaagactgtgctgtagttgtttggaagttaagagggatgcaggtaagtgaggcttggagagcagtgcctttattttttgatatggcatataacagggatgagcagcctttgaaggggcagagaatccttttctattcaagatggtgtctctaggttgtgcctctcatggcttttagatcatccagatttgtctgatcttcatatttctgtggttcaatagatgctattgatttcagaagctggttttccttggatcattgggacccttttgcttactctgtacttggtttcatgctttgccttgttcaaatatattttttaaactattaaatttcaaaatctttatgccatccaggtgctttagattcttttttatgacaactgtttttgcattattcatgctcacctacatacatgttatgtcttctccatcatgctccagcccattgaacatttgttttgtgagccatatgccctttaaggttcaagccttagtttataaaattcttcatctgagttgccatataggtataagtggttttccatattccaattgattttttttttttcctttaaataaaaaatcctattggcatgctgtccatcttgcattctttattttgattgaatatcgtgagttcatgtataacgttgaccattttagggagcagtacagcagattgaaatctga

SEQ ID NO: 70453 - DNA, 570 bp, Prunus persica
  Intron number 2 from transcript ppa013039m (locus ppa01303 9m.g) derived from phytozome v7.0 (chr-ID scaffold_2; pos 13078959 to 13079528)
ggggtttggtgcctcaacagagtcccaatctactggtaagtaaaaagttaattgacacttttgctgtccctcagtattccggtgcatgctttgcttttagatttaatgtcaattttttggtagttgtgacaaagactatctttatctaaagacagttgaactggatatgtttaaattcagcctgttctgtttaaagactatcttttcttctttattacttgagatgcatttagatgagggaactaagacatgcgttcactttggatggaattttgactcattatattctgtaaatcttcatatcaattgcaatattaggccaaagtttgtcagttctgaaggttacacaactgtgtcgtaaatggatatgaaacaatccttgattgcattactttgtaattctagtcagtctggcttgaagtggctatgattaaaatgctatagttcatgactatctttgcctttctttctcagtttttgatttttggaatctaatcagacagtttacatatttttttaattcattaatggataggaaaagcaaattctatatcagtggaagctttggag

SEQ ID NO: 70454 - DNA, 788 bp, Prunus persica
  Intron number 3 from transcript ppa013039m (locus ppa01303 9m.g) derived from phytozome v7.0 (chr-ID scaffold_2; pos 13079562 to 13080349)
gtttatccgtaatataccttttgttatcttttgtgctttctaattgtgataaatgattttgttctggcatgttggtatggttgaatctagcaaattagctacaaaattattattgttgacacttgatacctttgtaaattttggaaagtcgtcaacaatttgatttggtgaacaaatctcaatagttgcatcaaattttcaacgtatgcaattcacatgcagcatgaacttgtatatcttgtgtgaataaatgttagatccgtacaatatcttggtttatttgccaaataatttttcaagcttgtcatataatgtctagtcatttgggctaggataactttttcaaattgaaagtttcttggtctattggttgatgcaaaccatttattactagaagattagaccttgataggaagggcatagtccttgggcaaaatccctcaccttggttagttccattatcaaatttcttattcatcccttttatttatttcttgcaatatttatgttgtgataaaagatgttctacaagtgttacctttgttgatcaaaggttactttttttgcttaaaatattatatagttgtaagtctacaacatatattgtaatactcttccagttgtctacatcatgaaaataccgtttaacatttctttgatttgacagtctcatgaaagttagacttcatattgacatactcctttagaggaacttaatcacatgtttttcttcctattagaaagaagattaattctgttcatatccttgtagctatttaccagaggag

SEQ ID NO: 70455 - DNA, 498 bp, Prunus persica
  Intron number 4 from transcript ppa013039m (locus ppa01303 9m.g) derived from phytozome v7.0 (chr-ID scaffold_2; pos 13080353 to 13080850)
aggaatccttccactttcaaatgtaagtccatctatcagtaacatggctttttctaggtaatctgggtttttcagttgtagccttgatatggctcatactaatgcacatcgcctgcatcagtaattcatttgtttgtacctggttagaaatcagttttgaaggtatcaagcaaaatagcgcttatcaagtttgcctgcttgaagcaatgtctatgtgccttcttggccatatgttgtcccttgtcattgtgaatgtcactgcataaaaccatgtgtacctagaaccttttcttatctggtcccttttcgtatgtacctagaaccttttctttctttttcaatactcagaattttgttgaattaaccgtgtgttctttctttataggggtgtgtttccactcttgcatttcttttttgtaggcctagagttcattttgtttctcctaacctgttgcttttgattattaatctgatcattatgcacatcatttgataggg

SEQ ID NO: 70456 - DNA, 401 bp, Prunus persica
  Intron number 2 from transcript ppa001392m (locus ppa00139 2m.g) derived from phytozome v7.0 (chr-ID scaffold_5; pos 13252423 to 13252823)
gtgtcttttacttccctcagggacacatcgagcaggttggctttcaaattctttattctaccaacgatgttttggcttcagctcacatagtttcaaattctttcattttcttccatttttcatgtctcttcctttgggtgccggtgcttttaatgaggttgatgagtaatcaattgttttttttttttttttttggttcaatacatgttcattcattatagatgtaaactgatgcgatttcgaaggggaattttgtttgtttaggcatttgagatttttttttttaactagcatttctggagtgtttctgtttttgaatatttgttcgttactaacaatcaatggtgttttctgggtcctgatcaggtggaggcgtcaactaatcaggtggctgaccaaca

SEQ ID NO: 70457 - DNA, 810 bp, Prunus persica
  Intron number 1 from transcript ppa005372m (locus ppa00537 2m.g) derived from phytozome v7.0 (chr-ID scaffold_1; pos 10135402 to 10136211 reverse strand)
acaaaaccctcgctcactctcatcatcttgcgcaggtccctacttctccatctctctctctctctctctctctctctctctctctctctctctctcctactgctagtgatatttcactttaatttttttttttttctgaattttttttgtttagattttcggtctgtttgattcgagtgtgttattgttcaaattttttagaaattaattttttccgattatattgacctcatttagttgttctttttagttgtaaaaaaggagcatttaacagatttcttttagagcttttagggtttttgcatctcggtccgtactgtggttttcacagttttctatcgttaatggatcttggtggactttagggttttcctcttcctctttgttattttatttgtcaattttttttggaaatgctatttccaaaaatagcctaaattctttatgatgccacacgcacgacccacaaccatcatatattttagcttttggcatggcattcttatttcttctgacaaaaatgtttatcgtatttttttggtttttgacatatatttttctttgtttccattggttggatttgattcatattcttgttcaccgtaagtttgatgtggttttgcactaaatgcttttgggtttttgtagcaaatactattatgtgtttcttgatttgcagttttagaagaattgtgcgttagtccatttggcagtatagtgtctgttttcaactaagtgccgctctttttattaacaatctgattaatttgtgcagtttgtcactcttgataccatccagttgttagctga

SEQ ID NO: 70458 - DNA, 865 bp, Prunus persica
  Intron number 2 from transcript ppa002981m (locus ppa00298 1m.g) derived from phytozome v7.0 (chr-ID scaffold_2; pos 21168886 to 21169750 reverse strand)
gctatctttcggaggtatgaaaaatacattttcctgggaagtcttcttaacttcagtcactctactggaactttttggattaaatgtttattattattattttctaactatgattagggctcaagccgtctgcatctagctcatagtgaaaatgagaattctcaagaaggtgagggcagtactaccatctgttggttttgtatcatttcgttatcaaattttattttcttctcccctccattttacattttatgaaattcgtatgcaggcaactttggtagtagtagtagtgctttatctgtgcagaacagcgaaattcaattggaacttgtgaagaaaacaaaaaaattagacaagttgaaggaaaaggtaatggtcatggatattactttaaagtacatgtttttaagaagattgcttctgtttccaccctattttgctcgtcctaccactatctttctccgcctcccattaaatttttattttttcatttttttgatgatcatgcttgcttggaaaaattcaggatccagatttttctaactttctgaaaagctatcataaggggtctgaacagctcagaaacaaagttgtaagtaatatctattgtgacgttgcgcttcaatttttgagtatcatttatagcagcaaagatgtctactgtttatattctaaagttaatttgtgtctgtcatctggtttggctgtttgatgtcccttctttttctcaattatgctcatgcactttacagtatgctgatgaggatgagatcagcgatgaggatatgcagccagataatgtaggtggtgtgaattttaatgggggcaagttgttgaccacctctgccattgattcttggtgtca

SEQ ID NO: 70459 - DNA, 669 bp, Prunus persica
  Intron number 1 from transcript ppa002981m (locus ppa00298 1m.g) derived from phytozome v7.0 (chr-ID scaffold_2; pos 21169808 to 21170476 reverse strand)
gaattctaagttcaacaaaaagaaaacttctaagagtaagctctctctcacatattttaataattcgatatgggaatagttattgaaagtttgaaacttcaataattagtaattagcagttgatttgattcttttagtgtgttcttaacttgggtttttgttgcatttgcatttagaatttatatatgcttatgtggaatatggtgtatgttgtgaaagctttggtttttgaatgcatgtaattttggggttggttgaattttgtagctttaactatatgcagtgtttcttacttctctgatttctgtattggcaaaatgttaattcaattgttgcaggaggtgggcaagaagatactgctaaagaaaaaaaaaaggacgcgatagagttgtctgatgcaaggtaagaagagggacgtttttctcatttaatggatttttcatttcatatacttgtatcgtcttctccacttatttttagtactatatgctttcatttggtagttttctctatcttttttttggggtctagacttggtagttttctcaatcggcattataagtgttataccatctgaaactgcattattaaaaggattccagaaacattaatttgaaaaaattgttatcagaaatactgaagctgaatacatagaagacaatcctcttg

SEQ ID NO: 70460 - DNA, 697 bp, Prunus persica
  Intron number 1 from transcript ppa009317m (locus ppa00931 7m.g) derived from phytozome v7.0 (chr-ID scaffold_4; pos 23002997 to 23003693 reverse strand)
tcccaagggtacaggtgcctcgtaatatccaaacccattatttttttacttcctgatttccaaatattagttgggtttaaatttttgtttttgttttctgttgttgggttcttgagaaaagtggagaagtaggaaaaaggaatgaaatttcttgcactcatgttttccgttgcttagaaaatttgggaattaaaatactgaactctaacactgaattaaaaacaagcgcacctcactataatccagcaggatatgaatgatcaaaatgcttttgtcacaaatgagctggcttgtgaggctcaacaaatcctcttgttgagagtacttgtggttgggttgtagttaaagtacttaaaatttgaatcttcttagcactaccaacgtaatgaaaatagggtggagttgattgaaagattggagtctttattttctaagactacaacacgtctctcaattgttttgctcttgcgtgattcctcttcttttgagtgcacagtattgctccgtcttcttttcaatgactgtttataaaatatctgagggttggttttaaaaccagtgcacgacattggcatttggtttctttgttcatttctactgctaagttgctttctgttgtgtatattacatttccttgttcaagtgttctaaattctattcctttcagcttcgtttagtgctgaaagtagctctggag

SEQ ID NO: 70461 - DNA, 1041 bp, Prunus persica
  Intron number 2 from transcript ppa008746m (locus ppa00874 6m.g) derived from phytozome v7.0 (chr-ID scaffold_1; pos 24399725 to 24400765)
aatacaagcaaagtgggattgacgttcagtgtcaggtattatttttacttctgatattatcaaatttttataattgaagatggtagctagctcacttggtagtgtcttgggtaattgatgcactatttattgggcaaataaaacatgtttacacgagcttaatattaggtaaactgtcaacaattgaagctcaattgagcaaactcttatacgattgagaaaaaaaaaactgtagaagtgttgtgtcatgtgttgcaatggagttgcccagtataaaaagtttggccagttgttgtccaaagtgggataccattatgcaatgaaaaactcaatcatttcccaacctcagttggtctttccttgccaagtattaggtagaaactctctttccttggttttcttctttatgccttcatcgagttcacaaatttactttgaggatatcaaaaaatttgccctcccacatggtagttatatgtcgatggttaagtagtttcagaattttttttggtatctgctttccttttcagaggccattgatgtatcgcattgaacttcatatattatctgattgcatcacaggtagtgtaaaacctgtcatggagttgttgttggtaatggaaaactgatgccaacacaaattaggataggtgcgttgcaaattgaagacttctgaatgtgaatgacattcaaagagtatgttagtaatgttgacatggtccatagttaagatgagtcctgtgcgttgtacttcctgcctgcctaggtttctgatcatacccatgagctttgtggtttagtgatatgtggggttagaaaatggtggttaaacatttcctagattgtgtgatatataaaagtattccgtttagatgatattaaatacccttatgccctgactctctatatgcgcatcgccatattttggccactaatctgttgagcattggatgcttgccacctgggatgattgttggtattgactttgctttgagtttttttatcatcaactgaggagtttgtctttgcaggttccattgt

SEQ ID NO: 70462 - DNA, 409 bp, Prunus persica
  Intron number 2 from transcript ppa016605m (locus ppa01660 5m.g) derived from phytozome v7.0 (chr-ID scaffold_2; pos 10159441 to 10159849)
ccgacggtctctcaggtgagtaagcttgatgctattgttgagtaactttgattcattatagtgaattgtacttctttctgagttttttatgttatatatggatcgctatactaacttttcggtttagttattttgatttgaatttcagaggatttcatagttcttgtggtcagaggatgttcctataactcaagtgccaaatatcataagcaaagatatccacaatagctagctattttattcttttaatcgcaaaagcaaatggatattagtcattaccttttcctgagttctgtttttaactctgattttcgagaaaagaaagaattacgctttcaagttagcatttgatccttattttaatttttcttcaggattatcaagtttgatctttcatctccagctgtaa

SEQ ID NO: 70463 - DNA, 545 bp, Prunus persica
  Intron number 2 from transcript ppa013021m (locus ppa01302 1m.g) derived from phytozome v7.0 (chr-ID scaffold_3; pos 4016100 to 4016644)
caccctcaccctacaaccctcttcaggttccgttgctaactaccctaaattctttgaatatacgtaaataatgtacttaaaattaagaagaaaaaaaaaacagaaaaagaaaatataatacatatgcttcatgagagtcgaactcagacctcccgcttactaaacgggtgctctaaccaactgagctatgaaagctgttgttgacacaagcaaaattttatagaacttaaacggcttattttaaaagcagttttcttttatattattatttttagtggaaatcctgacacattaaactttatatttgtctctaatgttataacatgtgctatataatcaaatatcatgtatatattaaccttggtcatgttggtccaatatttcccaattattttctaacccaagctaataattaacaattgaatatgtaacccaagttggttcagttatttgaccaagtcatcatctaatttaagcttgcatggctatgaaatgctaatatttatgcagagcaagttctttgagacatttgctgctccattcac

SEQ ID NO: 70464 - DNA, 352 bp, Prunus persica
  Intron number 1 from transcript ppa008486m (locus ppa00848 6m.g) derived from phytozome v7.0 (chr-ID scaffold_3; pos 13371074 to 13371425)
cagcgccagctgagcaccgagcagaagaactcgaggtaattttgaaattggactggaaattaaaatacccaaaatttaatatttggtaattttgaacttcaaagttttgctgattaatgggttttgttagggttttgtgagcttttaacctaggaagattagattttttttgccaggagggttgttgaaattttatcaagcaagcttaagtttgttaatttgggtttttgtttgttttttctatttcatttctgaaagattgtctatgatttttaaatggaattgtaatgagaagattgaatagttgattttgttactgtacagagggcagcacttgttagtttgagtagac

SEQ ID NO: 70465 - DNA, 566 bp, Prunus persica
  Intron number 3 from transcript ppa008486m (locus ppa00848 6m.g) derived from phytozome v7.0 (chr-ID scaffold_3; pos 13371846 to 13372411)
agatcagaagggtaattatcttatttgttttcatgcctataaagtacttattttcctggtgcttttcacgaccctagtaagttgtaagagtatctttcatggaaaaccctccttcttgaaaactaatggccatctatttgtaacccctacttctatattgttagattgtttgtggactgcctggaatacggtttgtatataaatgcaaagcttatattttgaaagtaatttcttattttatctgaagcattcctaactgatggcaattctctgactctgattagtgatgggaagttataaaaggctcaagtgaagcctttcaacattttgattgatgatgttttctatgctcttgtctaatttattgttcctgttgaattgaaactcttagtgaggtgttgttcttaactttgtgaatatcttcttaaataattaaattaagtgttctcagtatccaattgcatgcattagctactattttatgttgtagttctatgctttctgtaaatgcatgctttagggatgattgtctgtcactaatttggttccgatgggtttttgcagga

SEQ ID NO: 70466 - DNA, 761 bp, Prunus persica
  Intron number 1 from transcript ppa003113m (locus ppa00311 3m.g) derived from phytozome v7.0 (chr-ID scaffold_6; pos 3882549 to 3883309)
ggtgacgttgaagaggttggacctgatattaggtaagagtttcgatttattttttgtgtgtgtaggtagtagagtttcaaggttttttttttggttgtacccagtacttcaattttgttgggtcttctacgaatgatattttttgagtttatgggtctctttgaattgtttgtattttgggacaatttccgtgtaaactaaaagagtctgctttttttatttttgtgtttgatcttccttcttatgaacctgttgatcagaatctatggtatcgttgcaactatggggaattgggcatgtggtttttgtttatatgctctgcatatgagctttttgattgtttattttagtttcacttattgtaatccaagtcttttaggaattgttagaggtcattatagaaagagatggtttcgtttgaagggttgtttggcagaatatttgagaaatattggattttattgttatcttttcccaagttttgtttggttgctgagaaagggtgggagagaaaaagaaaagaaaaaaacttttagtattttgttgttggttgtttgagccagcataacaaaagtgtccacttttactgagcctaatacaattgattggctttgactgctaaaaatcaatcttcgtttcgatttcttcccatcaattctctcagtgggttattgcaattttactgaatggagcatcctttgattgttaatgactgttgtatgacagttcggatatagaagaagacttgaggtgtgaaaata

SEQ ID NO: 70467 - DNA, 820 bp, Prunus persica
  Intron number 4 from transcript ppa001307m (locus ppa00130 7m.g) derived from phytozome v7.0 (chr-ID scaffold_4; pos 3610083 to 3610902)
ttgaggattcagaactgaaagcactttttgaggtaattcaaataaggcagagctccttgtgttttattccagtaatacccatatcctttgttcacttgtctggtatgtctttggtttccataagttctgtgcaagtttgtgatatattacacgtgcttcctgagtagaacttgacactgttacaattatcaagggttctcttagatcctcgcgcaccttttatgaaaataaaagaagtttgtcaagcgaggttaacattttacaaaattgtttcataaaaagaaactatacaaactgtagtttggatttgtctacaaaaatttgaaaagaatctatgggcatatatattagggagactttggaaaaactcaaaggagagagaaattttttaaaagaagtcaaaatggacaaaattgcccttatttatttttggatttcttaatgaatcatttacatttgcatgtctttgatttgaaagtcgagaggtttttctgtcttttttgaaaaaggtttggctttttccaaaagtgaaagtttttttatggctaaaacctaaatttacttatatattatctactgaaatttaaggcgatgtcaaatggtcaaagatgtattttgcactaaaagtttcatctttaatcttttattatctcatttaggccttgctatatctacaagatatgaatgcataactacttatgaaggtctgagagtctatcaagatttttgttttattggctgagcataaatatttgttttccttctttcacaggttcaatgttatatcattcatttatttattaatctattttgcagcaat

SEQ ID NO: 70468 - DNA, 349 bp, Prunus persica
  Intron number 1 from transcript ppa001768m (locus ppa00176 8m.g) derived from phytozome v7.0 (chr-ID scaffold_3; pos 21764589 to 21764937 reverse strand)
tcagtcttccttctctatctcctccaatacttcaggtatctaattttcaacttcaaattgtttctttttctttttcttttccttgttttttagaaaataaaaaccctaaaatttgttccttcacctcatcgaattcgaactattagtttcctatattcacctcagcaaattggcagtttggggaaaaaaaagaagctaattgttttatgacgacctccctttcctgtcaattattgatcttctttaactcttcaggaaggtgtttgagttttgtatatttcaaattgaatgttcattaaattatttatcagcaggcccatcggtaccagctgctgaagcttctgctgga

SEQ ID NO: 70469 - DNA, 735 bp, Prunus persica
  Intron number 1 from transcript ppa019886m (locus ppa01988 6m.g) derived from phytozome v7.0 (chr-ID scaffold_1; pos 35760395 to 35761129)
tctcttaatactgacagaataggtcacgtgagacagtttttaaaagtgtggatgatattttgaaacgttttaaaacacaagtggtaatcagagacaactttgaaagtataaaaagcatgtacataaataagtcataaatttattaagaagtgaaacttttataatatagtaagttggcagcttttcattttaaaaaagttaaataaaaacatgggtattttcatttgacaccacacaacaaccaaatccattttctctttcttaattctaaaatgaaaaaaaattaaaattaaaaatccaatcagcaaacataccaaccaaggggcttgaactctattatttgtagggcaaaattgatttattgtcagttgtggccagctgccactagttgggtttttcagattttttaattatgaaaatacatgtgagttggataggtgtcttgttcaatactgtctcgttgtatcttattgatgttcattagttgattaaaatccaagattaagcaataaattttaatgacgcaacaatgaaaataacatgagaggttgatatttgatttctatatcaagaagtacaaaacaaacagattgatcgtattgcagaactatccaatctcatatcaatagcaatggaaagttcattctactattacattttgctcttcgccatctttcttttcctcaagaactatttgcagaaatttagcaaaagactcccaccaagccctggtct

SEQ ID NO: 70470 - DNA, 492 bp, Prunus persica
  Intron number 5 from transcript ppa006350m (locus ppa00635 0m.g) derived from phytozome v7.0 (chr-ID scaffold_1; pos 12411350 to 12411841)
ttcattagattttgttgaagaaaaggttggttttccgttggtgaaacaatattagttttttttggatcagactctttggtagtatgacaaggcatgcaagccaatttgtttgatacaaatgggtttgaatggagacctataatctgctctttcttacaagtctgtgaatagaggttgaatttaattacagttatctggtgtatacacatgttgtaatttatccctttatccctttaatgttacagttgttgaaagttcccagatttccatggtgtagtaatctgcacattatgtgatcccttgttggttgtttctttgttcttttcattttctcacttttgcttgactacctcaccccccaggttgtatatgatatctttatttccataagttgggaatgtttgaattttatttggaaatcacatatgtaatctttcaagataatagctgtgtaccatttgtaggatctggagaaagcaaaactgggtgcag

SEQ ID NO: 70471 - DNA, 984 bp, Prunus persica
  Intron number 1 from transcript ppa020438m (locus ppa02043 8m.g) derived from phytozome v7.0 (chr-ID scaffold_1; pos 2410367 to 2411350 reverse strand)
aaagtttacaagacagagttgtttttctgaagagagtgagttccatataagaagatctctttactggccattcaattgttgatttcgaccttcttttcataaataccttaacatgctttatatgttattaatgaatatctctttctacaacatcgtaaatttgatatgtaccctgtgctttcagacagtggatatatatgctgtagctcttgcatggcggatgtttaggaattgatttgactgtatctatttaggagtggaagtagaacattcatcattacagacttttcttcaaatggtataactagaatcctacaaacatcgttgcctgatgcataagcatgaaagggttcaggtggcctgtattgccttttctgtcatggtcctcaagatgaactcaggtctatctataggccatccagtgtatcagatttgtcagtttgtttgtcaacaccattattagctataataatgtttatgaatgcattcaggttatgatatgctcgattattaacatcattggataaatttctgtgatgcatagagtatcattgaataattgtacaggaacagtccccagaagaggtgcagtgtgttcaattacattacgtaccgtaccgacactgcttgcctatttaccattgataagtctagatgcacctgatcacacgtttgcaaactcctgcaaacctatacataccttcaacaatgtcgcatatactggcattagtgttatacaatatgagttcttgcacgcatggattgtacacaaatctgatgctagaaagaaactgttcctcccgatgttattgatttatatattagtgcagatagtaaagagatgggctggagtttgatcaatgtttaaatcttacaaaatgaaaatgttgtacttgcctagacaaaggatttaaaataaataagtaaataaaggaaagaatggaaaatgatctgggttttatttacagttaacaggtgatatac

SEQ ID NO: 70472 - DNA, 794 bp, Prunus persica
  Intron number 1 from transcript ppa009473m (locus ppa00947 3m.g) derived from phytozome v7.0 (chr-ID scaffold_7; pos 21243798 to 21244591 reverse strand)
tcgaaaaggaggaagaatatattattaccttgaaggtattctttttctgatctcatgttctagtttttcttttttctttcttctatagttgtttggttcctgataaattttttaatttagattatacaagtttcataaagcatctaccttttatggtctagtctagaattcaaaataacatagaagaagcctctgcttcacaagcttttctttcgcattcatctgtttcctttctctggaaccaaacagagtctttaggccatctaattaattatcctttattttctagttttatctttaaatttggatatttaattgctagatttatctctgaatcccgagtttatcttgcgactcgtattttctaaatttgacgcaaacctaaacggggaatcttctattccacgtttctcttttcgtttctcttttggacggaccgttagtcattttggctttgccgttgcttttgtgaaccacacttatagtgaaccacacttgtagtcatgtgtgcgggaggctggctgccacctgtcactttgaactggttcgcacctcgctttgtatggctgctgttgcttttgctgtggtattttccgttagttaacaaacacaccgtttggtacagtaaataaactcagtgccaacttgcgccttgtgttactaataataatgcatcgctgcaattgcaaatatttttttcttgaatatatattatacaatggcaggaaatgaatagtattatatgtgtatggaatgcaggagatacaagacagggtggcaaaagcaaagcattc

SEQ ID NO: 70473 - DNA, 620 bp, Prunus persica
  Intron number 1 from transcript ppa009993m (locus ppa00999 3m.g) derived from phytozome v7.0 (chr-ID scaffold_3; pos 17449928 to 17450547)
ccgtcttgatcctgctaataagctcttttttccatgtacgccccttaccttgtctgctttaatcatctttgttgtttgtataatggttttgattttggtcatctatttcattttctgagaattttgaaggtaaagagtggaacttttgtttcttttggggtgagtaattagttgcatgatgtctgtttttgagcttacactggtttcatttgccaaatggttatctgggtcttcgacatttagtacatagagctgcattctttgttctttgatttgcttaagttgcatgatcttttgatttcatgagttaaagacttacagttgttccaattgttatgctgatctggtcggttcttattggtgtctctatttctgatattctctttctttagtttgtttctgttgcatgatgcatccatttgtccagtgtggagtggtttgattgatcctaatatgggttgttcttacattgttagcatcaccctggatttcttataagatgttcactcagataatatttgctaatcattagaaaagtgtaatgcttgctcaattcctttgccgattgatgattcaagctagttatgtttttcctcactctctgactgttttctctgaag

SEQ ID NO: 70474 - DNA, 787 bp, Prunus persica
  Intron number 2 from transcript ppa012957m (locus ppa01295 7m.g) derived from phytozome v7.0 (chr-ID scaffold_3; pos 6481876 to 6482662)
gcagggtaagtaaactcatgttcttcaagagtaatgaccctgatattagtttacttaacatctcgttttggacctttcatgagcattgggttgcttcttgaagtttgtgaagttgtagtttttgttctaattttgtattgtttaaaaactggtttcttacttaagtaaatgtcgaagttgaatttattttcttgttacatggcatatttataaatgcgttatctggtatggactatctgttgttgatctagttgggtagttggggttgagtgttaaaagccagaatattagttgaattgataaaatatgtttcggctatggctgcaaaaacttttaggttagatttctatgaggagattatgaactgtgtaagtatctgaatttagtgaagaaattttcagggttttgttatttttctgagttctgaggtacccggttgggggggggggaaatgctatttgtgattgaattttgtttgacatgaatattgtttaattgtttgatcatattgttatttttcagagctagtttgaattatgtgggaggaacagatctctgttcacaatgagtcttcagatatttaaaatcattctggaaaattgttgtttgataataaatggagagacggtgttgatgtcttatatttatctgtgctggtatcatggttcttttgtttctatggaatgtagtctcatgctaccaaaaatggtcctaccatttctgattcatgggtttcaatgtctcatttgcagtgaagaagctgcagtgtcaactgaggcagcgccag

SEQ ID NO: 70475 - DNA, 568 bp, Prunus persica
  Intron number 1 from transcript ppa016969m (locus ppa01696 9m.g) derived from phytozome v7.0 (chr-ID scaffold_3; pos 8206285 to 8206852 reverse strand)
cctggggtagaaattgatcgatctaccttatggaagagagctagacaggacaaacatggtaacatccctgatccaaaggtggcagagaaagcaaaattaattgtaagcctactatcactctgttttaaatttttattaaactgtgaattattcttattacgtcgtatgttatatttttcgtcgtgtgaatgatattaccacgtcgagaagtttttaaaaacttcgttaaaggtctaaataggaatcactactaattttctgtaattatagcataagacgtcggtggttcattttcgcgtcgtttgaatgatattaccacgtcgaaacttttttaaaaacgtcgttaacggtctaaataggaatcactatgttttctttaattataacataagacgtcggttgtttattcatttcgtcgttttaaataaataaccacgtcggtataactaccgtcgtgataagttataataacgtcggtttatacgttattgagtcgtgtgaaattgtataatacgtcgtttgtacataaataaccgtcgtgtgtttttttgtttatctttgttttagg

SEQ ID NO: 70476 - DNA, 550 bp, Prunus persica
  Intron number 2 from transcript ppa011557m (locus ppa01155 7m.g) derived from phytozome v7.0 (chr-ID scaffold_1; pos 72608 to 73157)
tgaaagaaaaccttttcaacaacataattgaagaggtataccttcccacccattccatattcttgtgtacgtacacaaataacagacaaaagataaagataaagagttttgctgctttcctaataatttgatttatctttctgttgtttttgtttttcaactataacgcttacggtagtattaagaatgtcattactggtagcatacttagttggttatcttccccgtacaatcatgatttctttatttgaactgaaattgtaatctgaattgtaaccaagataggatttagcccattctctgtccttgtccatgcaatatttgtactcaaatattcataccaactttaggtttctcgttgcctagtgactacttatattaagtcaattacaagactcagtagttctttccttatctggtcagtacatttgtattgaaagctgtaactgttgatgctctcaaatcactttatttggtcaatttgttttttttcttcttttatgcatatgatacagcccagtttctggaaagaccccgagacagcaataag

SEQ ID NO: 70477 - DNA, 480 bp, Prunus persica
  Intron number 1 from transcript ppa006311m (locus ppa00631 1m.g) derived from phytozome v7.0 (chr-ID scaffold_8; pos 7822438 to 7822917 reverse strand)
tcctcagcgaaaatctcaagccccatctttttcaggtcacttttctcaattttctttctgttgggttattgtcatttggtgcttttggtgatcgatttgtgatcagtttgattggttctttgttgggtttgcgtccttttttcatgagacagtttgttctggagtcaacggtttagtctgagtttgttttcttttccttcaagtctgaagatttcatatttgaattcttaacatatttattggaattttgaggttggaggatttggttttcagatttagatgctttgaaaatggacattcggattgtacccagatagattttcatgcaatttccgtgaaaatcagaccattaaatctccccatgttaattgtttttatttgttactttgcgtttatcagactcagacatgttttgctatatttttaatgtataattaactttcaggaagtcaaccgtattcttttgggtctgaatcgcgg

SEQ ID NO: 70478 - DNA, 921 bp, Prunus persica
  Intron number 2 from transcript ppa014093m (locus ppa01409 3m.g) derived from phytozome v7.0 (chr-ID scaffold_1; pos 42471864 to 42472784)
tgtgcagaagtgagttctctatcccttttactactttcttcatcttttttttatttttttattctgttttattgattatttctctctttattattgcattcatacgtcccattgagtaccatttttcacctaatggggtttggattggaaattggatcatctccatttgtgtagttgaagaatcatgaatcactgtctaaattgcttcatagtctcatacaatatgtgtatatgtataccatgaatcgctgtatatgtataccatgaatcgctgtccaattgtgaaaactgaacagttgtgttttgtgctaacgcttggggagtcatcaaatggggcaattggggttgcttgaaccccccaaatcttgcactttcaccttgacaataacctaatcttcgcatcaaagtgcttggtaaatcatgtggtttaactcatacaggctagccagagttcaagccatatatagtgtgtggtttcaaatagcaaaaagcggaaagatttgtgtaacctaaataattcatttatctacaaatacctgtagacaaataggcaagagtgtattgttacaggagttatgcagctagttttgagtagttggatacagttaggagttagaacttaaatgggattgaaggaaggaggttttgaccacacaatctctttttaatctacagaagagaagtcatataaatggctgtcttggcatgttgctttaccgtgataaaaacttcgatagagaataccgttaagactcttaccttgtgagctattatttgtgttgtgattgtttgataatttctggtgttagaagtgtcaatttagcaattcaagttacatttagcagcaagttgatagatatatcctctaattttatttatgtttcttctgtgtctagatcatcgaggattttcagaagtgtc

SEQ ID NO: 70479 - DNA, 785 bp, Prunus persica
  Intron number 3 from transcript ppa011311m (locus ppa01131 1m.g) derived from phytozome v7.0 (chr-ID scaffold_6; pos 9240783 to 9241567)
ctcagctgctgatttgaaggacattctcggatcaggtgacttttattttgaaaacctttttttcttttaatgtatgactcaaagttgcattattactgacttcgttcaatagtttttgttgaatttggattgccatttgtgggtttggtttgcttttgatattttaaatggctttgtgatgcgtttgtaattattttaatcgcgtcttgatgatattagtctatgtagtcttttatatttggattaactgctgaaccatattttagggtctctcagattgagatggtttaattatctaattttgacgggggcagctctagtgctagagcaccttaacccgacatctatggaaagagttatagtcttgcgctctcgctcctttgaatattgtgcaatactctgtccctctgttagtcctcgttaaatttgtcttgggttggcattttggcactattcttacaatctataggcctgtttataattgaattttctatatcatcggagtggagatgattttttattgacatctggtcattcattagtcaaaaattcaaaaagctcatggtttcctgtttaactagtgcagaagaacctcatatgtgatacatttaacattttgtgtaaagtcttgacaaagtaatggttgcacaaaaagatgcttaacatcgtgttgtccataggaatttttaagaacaaaactggtgcataattatttgttgcgccaaattttttgcacttgcacattaaattaagttttggtttgtttacagttggagctgaggccg

SEQ ID NO: 70480 - DNA, 923 bp, Prunus persica
  Intron number 1 from transcript ppa007814m (locus ppa00781 4m.g) derived from phytozome v7.0 (chr-ID scaffold_1; pos 37260492 to 37261414 reverse strand)
gggccggtgacctcagcttcgatttcaaaagccgggttagtcacactcatatactctctcatttgtttttggaaaccgggtagagttgtctgtcacgtcaacgtcatgacgtggcatttaatattttgggccctaaaacgtcgtcgttgtggtgttgagaatgaatattgaatgatagtgttatatttatttaccaaaaaaaggtcgtgagatattaattagataattaatgaaaaacattttaggtagctggttacatcatgcatgatgagaggatggagaggctcatgtcaattaacatatagaattccaacatccaataacaaatatttatatataattaagaatttagttatgggaccatggaaacttaaaatatgtttttgattattaaattgttaatcccatgtcaaatgaaagcaacccaattacccgttacatcttagttgttagcgcttaaacttagtgataattttttttttttttcaaagtcagaagataattcagtttgaattttttgtctctcgtaaatttgaaaggaaaaaaaaaaactcgtccatggtttttttaaaccattaatttgagcccaattgagttaggttgtggccagtagccactggcacacatgtttataaaaataaggtggatgttgataccttgagtaagcacaaccaattgggcatccacattatttagtttcaattttttgccttgttattttattccctttgtgttttatattattgatttgttttccataaataagtcagtgtctcagtggtacagtgggtggcttttgagactctaccaaaagttcttagcagccattacacgacaaggacaaaatgaagtgtcaaattttgatttctagctaagcacatgaattcacagtatatagatatattccataaatgcaggacata

SEQ ID NO: 70481 - DNA, 934 bp, Prunus persica
  Intron number 3 from transcript ppa007974m (locus ppa00797 4m.g) derived from phytozome v7.0 (chr-ID scaffold_6; pos 2103030 to 2103963 reverse strand)
caaggcgcttattagcacacttggtttcacttttggtgagtaaggcatctgtttgattgaaatttggcgtaagttgttggtttaatattctttcaggtgttgcagtatatgttggtgctctgctttgtttgagtagttggaattctttctatgcacattgtaggtttcaagataaccttaaataataatagtatgttattttttaaattcatgcagttttagaaaagaaactattctagtaagtttggctggtgaacttaaaagtatgaatgtggtttccttgatgcgagaccgaagggatggttggtgatgaatgcagaaatggacgttatttgaccaaggacctatagacaagtacagccatgtcaatggaaaacaggtccaattgatgggcataacaaggttcatatggatacattgtctaccaaattgaacgggcttgcttcttgttgtcgtttcttgctagctgaaattctaaaaccttttaaaatcattaaatctcattcttgttatttggattatgtgacaccaaatgtctatagtatgtgggttggaaattatttctccctttccctttttgcttgatttttgtttttctttgaatcatttaagtgccccccatattgcacacattgtggtaatgtcgtcagtggaaatacattgaggtttaaaaaattatatattagtgaaaaccaccatatgctagcaacaaattacaattcaaagaatggtgaaatctcaatctgcttgtattaacgttatctggaaaggttcgagtttttaaagtgatttgtttatcgtaacgtttctttacattaatgtcttgatcatcatcatcatatatgactcactttttcaaatattaatgtacttactgattcacattatgggatacacagccacaactttgacaagctggcatcttctggtcaca

SEQ ID NO: 70482 - DNA, 1037 bp, Prunus persica
  Intron number 1 from transcript ppa010826m (locus ppa01082 6m.g) derived from phytozome v7.0 (chr-ID scaffold_2; pos 19626851 to 19627887)
aaagcccagatctgggatactgctggccaagaaaggttttataaatctctagctctctctcaactttttttacttgaatttgaatggtgattgaagcttaagcactattgtatgtaatgcatggagaatgttgcttccccagactatctgacaatataaaatgattgcgttgttaatctgtgaatccgaactattttaattttattcagaatgtgtggtttaaatttacaatctgacaacataattatttgtgctgcagtgtaagtaagtatgtgaagagaacattactatctaatccataatccacattactatggaagcagatgtaactgttcaagcacattaatataatactttttggtttaaaacttgtgctctgtgtagggtatatgaaacatgaattatgaatatatgattagaggttttaatacagtgtatatgtgacataatcaacatttgtttctgatcaaaatgtgcaataaataaattaaaaaggggccttccctattggtggatttgggatctaggtctagctagtggcactgtgccaaatgaagataagaccagcttcccagcttttgtgcttttgctatcagtgtagttttgcaacatgacaaaaatgagttcattagtaatttagtatgagcccatacgtacagacatacaggctgcttcttcttttttctttctacttttctctagatgacagacatgaatgtgcacagggatctgtataaatggtaaacaacctgattttatgctggtactgttgttatgtactgagctctctctctctctctctctgcatatcattaatttcagcaacaacattaaatgtactgcacaagtgcattcaaaacttgctgctatagaaccaatctcaaaattaaatctgtgggacagagtgtaggttgatcctatttattagatttggacaagaattgagaaaatttaaagacaaatatacttaaagaaaagcatgtttgttgatggtccttgtaggtatagagcagtaacaagtgcatactatagaggtg

SEQ ID NO: 70483 - DNA, 1050 bp, Prunus persica
  Intron number 1 from transcript ppa006891m (locus ppa00689 1m.g) derived from phytozome v7.0 (chr-ID scaffold_4; pos 16609619 to 16610668 reverse strand)
cttgattcgaagctcctttcagctcattgcatcaggtacctctttccatgctctccaagttttcagagtgagagtgagataagactttgcttttgattttcgtttttgttggtgtagctacgttattgggaagtggttgttcggattttgcttggtttcttggaaaccatacggggcagaaggaaatggtggaaaattttgggggttgtgaatggttgagttgactaaagaggcactagagcttgcgtcttgcagttgggttttaattttcgggtttagattggaatctgtgggttggtttgacttttctttactacgatcgttggcaattttttttttttttaatacctacatacatattcaggcgtttggttttagttgttgggctggttctgagctttgaattctgaaaatagggttcgcttatcaaattccgatctttttctggaccttacgtttggttgctgacaaaaggtaagcagaagaaggggaagagaaacaaagagttgaagttttgttttagtaatttgtaaaccgtacagtacgacccatctgagcatgatactttcttcgaagactaggatttctttttttcgttttcttttcaaatgcaatttcggcaaacgattctaagcaataacaattacctttggaattaattgcttgattgttatcaatttgatttgatttctgaagccgcttactttttgaaaggttgcattgcgtttctgtgtgaggcatattagcattctcatacatgagagtgttaatctaacattttttttttttttgggactgagttaatctaacattctttctaatgatttttatgtccatatgtcatgcttgctgtacctgttactgtttactattaggattagtagtgatctaggcatatttttcttattaggaatggtattaccaatttgtcaacagtcttgtacctgcttaggatatcctgtttattttcagaataaatttgtatgaattagtctgcttattattttacttgcagattgcagaaatccccacaccaatcaattgaaggtt

SEQ ID NO: 70484 - DNA, 800 bp, Prunus persica
  Intron number 1 from transcript ppa023998m (locus ppa02399 8m.g) derived from phytozome v7.0 (chr-ID scaffold_3; pos 2851874 to 2852673)
aatttggtcctctgcccaataatcccattggcaatgtgagtatctggggcagtatttgaactgagtactgcttaatttttgctaattttgttgggttctggaaatttatattttagtgtttgtgatttgcctatgcgtctcttggtcgtgtttcaattggggcattactcaagttcttcgatttctcatttcgttctttaaattctgttgttttatgaagtttcatagagaaaaaaaatttgtgcttgtacttttggtttgtgttctccttggttagtttcggattgggcattgctcattttcttcaaattttaactattttctgtaggttatggaatattttataatttttctgatgatcttgtacttggtttgtgagtaattcttcaattgggttttgcttaaatccttaaatttattattggcagacttaggagtatttgtttcattcttacttttaattttttcttatcttttacgaggcaacgttgagctgacttttggttaggtgcagcttatatagttcaaatcatattccttttgttactttttgtagaattattacttcgtcaactaattgggtttcctgtgaaattattcatctggtggggttgatgttttttggagtttttgggatagtttgtgctccccgtatgataaaatttgaatgcttttaagcctttccattgggatatttggaattttcttcatagtagctagtctttaatatagatgcagcaattatcttaacgttttcattgcattgaatggtccaacattgcatcaggttattgatctgg

SEQ ID NO: 70485 - DNA, 967 bp, Prunus persica
  Intron number 2 from transcript ppa001682m (locus ppa00168 2m.g) derived from phytozome v7.0 (chr-ID scaffold_1; pos 44694828 to 44695794 reverse strand)
tgcagtgcttgaggtaaacattcaaaaaatatcagcctatgtttttcaagttttttgttttttatttaatctttttgtgcggtggaaattttagctatgctttcacccatacagtggtttacttgctcataaaattggaattataaatacgacgtggttgagtttccattttcatacgactatgtcgcatacagtttatcattgatataaatttacaagataaggatatgaataaatagattcatgctttgaggacatttttgcactggtcagctgtatatattccttttgcagttggagaagaattccacttcaaagatcctattcccattaagtgttttgtcagaatttcaagtgtcactctccgatgcagaacagttaagacattacaaactatcaatatcatggcattcctggtagttgacacgttcacataaaatatgtcaaaacgaaagatgcaaaacaaaaaatattgaggaactaaatctttatcgtacgtttaatgacctggtaggaaagttcagggcttgcacagttgtataatttcactttgttatatgaggtctgtccgtgtttcaaacttcagtgaaattgcttttctacctattttcaaattgacattgacctcccctgtttgcaaattttcttgataacctccagttagtggttcattgtcaaatggatgtaaactattttttgggtggcattctattgacataatatagtatattgcttcattattatccggatcaaatcttttattgactagattttcttttgagcaatgatcttatactctgtagtttcgtcaaataattatttgaactaagcttgttctctttcaaattttggtgtcattcctccatatgaagttctcacgccattctccaatgtttaattacttttgtacgagttattgcacctattcacaactgaagtttgatagattgtctttagatatttgcag

SEQ ID NO: 70486 - DNA, 589 bp, Prunus persica
  Intron number 1 from transcript ppa021132m (locus ppa02113 2m.g) derived from phytozome v7.0 (chr-ID scaffold_8; pos 2862745 to 2863333)
aggacagggtaacccatccttggatagcacacacaccaaaagagagggtaacccatcctcggatagcacgaacgacccatctctcatttcataacttagctgtatttcaaatagattaatttgtttttttaagttaatattttgttttgggggcgataggcttcaagttgctaccaatataaagaagaggaattccactgccaatttggaacatgtgctctaccacaaaatgctgaatcttcaaaatgtcaattccttttaagtttgtattggttggttggaggcatcattttgattgtgtttgtttggttgttttggcatcatgccatgttttctagaattaattgagcataatttacaaagacaaaaatgtacaaagaatgcttttgacatttctaaaatcaaatgctgctttgtttcaaatttattaggcagaattggtgggtatacttatgcttgtctccatcatatgacatgacacaactctcatgtagtaggggatgaaaaaacatttgccactaatttggtaaatgactagatttcttttcatacaggaaggacgggaattataaaccaacggtaatcgcat

SEQ ID NO: 70487 - DNA, 696 bp, Prunus persica
  Intron number 1 from transcript ppa000279m (locus ppa00027 9m.g) derived from phytozome v7.0 (chr-ID scaffold_3; pos 1840903 to 1841598 reverse strand)
ctcgaggtaaaattttgagattggtcaatttctctctgtttagttgctgataaaacgtgggaaaatgagcgaggcaatgcgagaaaagtaattgaaaatctgggtctggttctgtgtatttgtgtgcgtatgtatataagcaaaattgaactttgcagagtgaaaaatgaacttattttcttcttcagttttctgggctcttctttttctttttgttttttctgtgtaatcaagtggaggattaattactgggcttgtttttggttacccagagtatacaggaacgaagagacgtagaggttttcaatttttcagtttaattcgatcttttggcatatgggttttgcacgagtgtgttcaggcgttgtacagagtcttaatttgaatatttggcttaatcgtagtgcatatttttatttttatttttggggggtggaagctggatgttgaaattattagaatttcagatccagctctttattttcacaacgggtattttacttaaaggggaatttattaatttcctagagtttttagctgcggtggcgtcttatgattaaaagatctggtcattgaagctaaatctattcttgaactagacttgaagagttgctatgtggactcaacgaaaatgttaaagttctgcttgtaaaatttgtagttttactccattctgtcggtgggttctagttgttt

SEQ ID NO: 70488 - DNA, 765 bp, Prunus persica
  Intron number 2 from transcript ppa010570m (locus ppa01057 0m.g) derived from phytozome v7.0 (chr-ID scaffold_1; pos 45580577 to 45581341 reverse strand)
acattgcaggtctcctctctctctctctgtctgtttgtccatctccgtacacacgcatctcatacatgtgtgcacaaatttgaaggcgtatacaaacatagaacatgcaatgacgtatgcactttttttttgttgaggtcaacagactcaacagctcatttgcagatattagcccaaaaaaagaaaagaaaagaaaaacacgtatgtacttaacatgttatattgaagatggttgtaatactgaacaagtgcgttttgattaatctttttataagtttttttattttgcaatttccctcctactttcttttgataattagaagaaaagtattccactttccataaacataatgagagcaaagagcttcctccttctagataatgatgctcagcactcataaaggttcgagttaataccagacaagagatagaccttccaaagagcaagcctcttttgaaataacgcaattcatttttaccagaataaatgtaacgaaatattttttcccagattttgtgcattcttttagaagaaaaagatttgttcatgtttgcgagtaccttctagctatatgctagaggtaaaaagtgatctgtaacgtactaagcgtatttttatatgttcaaatacttatctgatggaagcattgtatatttcttagtctagtttaattcgcagttcgctcttcattttttgaaccatattctaaatttttgaatgcttatgggtcttaattagtttcatcggcgaggtaaagtcgagat

SEQ ID NO: 70489 - DNA, 477 bp, Prunus persica
  Intron number 1 from transcript ppa005010m (locus ppa00501 0m.g) derived from phytozome v7.0 (chr-ID scaffold_2; pos 520447 to 520923 reverse strand)
tgctacgactcgcgttgtaggaggcgttaggcaacgtaagtcctcagtcttttgttttttttaattatattcgtttttcaattgtaagatgcgtaaacgaaattgtgctaagaacaagatttttttttttttttgggggggttcttttagaatatgatgaacgattctgcaatctgcatactgttatgagttagtttctctgttttcctactgaagttgtaagtttcagttagtgtaagctagaatggtgccttttagattaatttgattgttaattatcatcacttacttgataccgacatcagtttaggattgggagaggctgtgttttagtggaactgataattgggttgtgtattttactgtgatggaaatttaatttagccaaaattggaatattcaagcagttcgatatgtgatgcaaatttgtggataatattaggttgcttgaagatcctatctcctgaagaacttgag

SEQ ID NO: 70490 - DNA, 970 bp, Prunus persica
  Intron number 2 from transcript ppa022056m (locus ppa02205 6m.g) derived from phytozome v7.0 (chr-ID scaffold_4; pos 15337273 to 15338242 reverse strand)
gtgcaagtaacatgctacatatgaagttagtattgaagtttctataaattacatttctaccattaattaacttaaaacaagcccaacacaaaatttccaaaaaaacccaaaacaaacccagcaagccactttagaaatatacccaaaaaccatttactacatatgaaattagtattgaagttcctataaattacatttctaccattgattaacttaaagcaagcccatcctagaattttttgaaaccaaacttaaaaaaaaaataataaaaaattcaccaaaaccaagggcctgtccccatgacccttcattctccatcaaacctccgcaaaccatgtcatagaagtacattattaataccatgtcataaaagtacattgttaataccatgtcataaaatacaatattaatactatgtcataaaagtacattgttaataacatatcgtagaaatacattgttaatacaatttcatagaaaaaacattattaatacaatttcatagaaaaatattgttaataccagttcatacaaaaaacttaaaaaaagcctagcaagacatccgatatactttgcagccacctccaattgtccacagcttcaccaaatacgatcgcaaaggcaaaaagaaatacctctacaagaaaaaaaaaaaagtacactgttaatactatgtcacagaagtatactgttagtactatgtcatagaactatcttcctagtaaaaatcatattttgcatatcataaacttcaagtgcatagctatatataaagcaaaatatagagcatgctttgttactaaaaatctgttaatactatgtcctagaagtacactgttaatactacttactggaagttaacgactgttcataccacttacagataacaaattgtatactacaaattaacttaccagcttgttgcaatttacaagagtcatatattagacccacaaccacccaaaaagcc

SEQ ID NO: 70491 - DNA, 614 bp, Prunus persica
  Intron number 1 from transcript ppa016554m (locus ppa01655 4m.g) derived from phytozome v7.0 (chr-ID scaffold_4; pos 12668407 to 12669020)
tgttgtttttacatacacagaaagccttctcccctgtaagtactataaatgctttcaattcataatattttctaatggttgaagttcactgaccattatgtatcttctgcgagatatatgcagtagaatcttatcttaatcggaacaagtggatgatcttaacttatagatagtgcaaccattctcaaatttgggcatggcatgaactatgcagtttctttggtttgtttacttatgaacttcatcatcttctgacatgtctttgcatatgttaaacaggtagctgatttctgcattttgcaagagaggaggcaaataagcgaaaagcataattttagtcatttgctgttttgtttccagcttgacaacatttctggtgggactattatttgttttgaaattctctcttttattttgttattttacttttggacttctatacttttgagtaacagatgtttatgtatggttgtgttgcttcctggatatgttgccctgttaattctaccatgtgcttgcttgttgtcttttccatggtagttcgcgatggctaagaattctacacgtctgacatttcgttctttggtttccacaagacaggtttacaagagtga

SEQ ID NO: 70492 - DNA, 878 bp, Prunus persica
  Intron number 1 from transcript ppa002235m (locus ppa00223 5m.g) derived from phytozome v7.0 (chr-ID scaffold_1; pos 37036618 to 37037495 reverse strand)
tgcaaccacgaccctgtgtacgcgtcgcactcgattataatctctcttacttgtttatttgatcactgtcccatttgttagttttactatgtttttgatgtgtttgtgattatgcctcatctatatgtataatttaaatcaaactgggagtgagggatgggggttgaatttgatcgaacagttaatttgtgtttggttgccgataattgaaggatagaaacccataaaaagtgagaacaaagaagagaagataacaaaatttgaattctacgatttattacaatttgttttataagaattggatctggctgcgagctttgtgatttggtgggttcaatatgcttggctttggatgtttggttcttttggcatttgttcagctgcaatgttattcaatttgatgcatattaatgggttttttgagtgataataagtgattagtatgtgttaatgagctaaacgttttacaattggtcgtcggattggtaatacttgtcatttcgtatttttctattttcatattcgtatggcttaagtggttggtagtagccatgtgatatgatttgcgtcgaaaagtgagcaaaccattgaagtagaaccgcccaaacaatagaagtaggaaaacatgtattgatatgagaatgctttttcatattttagaatgtaaaccaagcatgtctgacaatataagtattatcatagttatgtatttaaaatgagaatgctttttcttcgtcttttgtgcatttcaagtgttggtgctccaacatctaattttagttattgttacgggctactggatgcatgtctacctcaagtgattctttttgttctagattacctagattgaatgttttcacatatcaggcaagcaaagg

SEQ ID NO: 70493 - DNA, 633 bp, Prunus persica
  Intron number 1 from transcript ppa010646m (locus ppa01064 6m.g) derived from phytozome v7.0 (chr-ID scaffold_1; pos 11293340 to 11293972 reverse strand)
caagcttgctattcttctcgcctctgacatttttggtacttttcctcccacccgccactcaaaaatctatctttcttcatttgtttcagcattttgcatttgtttcttcattatatgatatgggttcatgtgcctaactgtgtatttgagtgatctgttggtgtttttggtttattgggtactggattttcagttgtgtatgttaatcgctcctctgagtatgtttggttgactgatgaaggaatcattttctgacttttcccttttcccctttcgtctttggattatgtttataataaaaaattaaaaaaatcttgctagtctcaatttggtcatgaaaaaaaatgatattcgtaactgctttgtgatgaaagctttattttttgcctttgtatgtttacttgtgtccccagtttctgtttctttcttccttccttctttccccgtttgttcccagttgcgaattcgaaactggggtgaaggaagtggtggtattagtgtaaaataattgagtttcaattcttcctttcttcaacttcaagccatctacctctactataattgcttgctttgatatattatcaggacaccacaccacttgctaatattacatgttgattttccatgcaggat

SEQ ID NO: 70494 - DNA, 1014 bp, Prunus persica
  Intron number 1 from transcript ppa008281m (locus ppa00828 1m.g) derived from phytozome v7.0 (chr-ID scaffold_7; pos 14342598 to 14343611)
tgagaagctcattattgatactgaccctggaattggtgagtttttccgtttcatttcgctcgtctttgctgttttttgtgttcctattcctgcttctatcctctgtttggttgctgagaaagtgtgggaaaaaggaaagaggatgtgattgaaaattttgatttttatgtgtttaatgttatgagtcgtggaaagtgagcaacttgcctcagctaagaacggttaggcacttttgctacatttgcagcagacaaaaggagttttccatttttgatgtgtttctttatcgaatgtttaattgtttgtatgtgaaacagtgatattgacgttgtgggaatctttagcaaataaagtaattgcattgtggaattatttgttggtgttttcaactatttcacctggctgggaactggaaattgattagaagcaaaggaaaggatggttgtttttttcttcttctcttattcgcatgctttattaatgagtgaagtttgaaaaagaaaggggatgaaatattgtttttgggtgtcaattatgttttaatcggaatagctgataaattttacagtgctatttggttaaacaatttgctttctgcgcttctaatgatgagttttgaatctttctttttctttttctttttaaatattaaagtatgtctagttcctgcaaaagtgtttcgagagcatctgctataacatttgaaaaggcaagaaaaacttagagagaaagggaaggggggaggtgttggcggcagtgttgagaagtttatttgctgttattctcaatgtattactatgcactctaatgaatcagtgaggttgcagaaaattttgtaattcctgcataaaattggatccaaataacatttctgaagttggataaaatgatattggaaaaccttcgggttatggatatatagatactggtttatgaacagcttgtaatgacttatttttctctgttctgttctcgacatgttccatgtgtgatgtttctattggtaataaacag

SEQ ID NO: 70495 - DNA, 520 bp, Prunus persica
  Intron number 2 from transcript ppa000384m (locus ppa00038 4m.g) derived from phytozome v7.0 (chr-ID scaffold_2; pos 26332932 to 26333451)
tatctggattggctgtgaagtatggaatatgtatctggtttaattctattcagcattcattattgtggttgtagttgtacaaatattctggccagtgttctgggtgattgttatgtaactcgtgttgaattgtaatgaacaagcatacaaactcgtaatgctttggtacttctttgcatgtaaagtaaccttgtataagtttctagacatattgacgcagattgtaggtaattagtagaatgttatggaagtctcccagcacatttcaggcatgggtgatttcaagtaccatgtccctgaaatttgaagtggtttacaaatcaaaagtaggcatgacatgctgtcgatgccttatgttctctcggtgtatcaatgttaaaatgagtgaaaaaatagaaaaagttatgtgatacagatgctatagtagcaaatttatacaacttttagtttgattatttatttgttgtttttatgtcataccacagtcttgctccattagttaagaaggtcagcgagcaac

SEQ ID NO: 70496 - DNA, 547 bp, Prunus persica
  Intron number 4 from transcript ppa001665m (locus ppa00166 5m.g) derived from phytozome v7.0 (chr-ID scaffold_5; pos 4223344 to 4223890 reverse strand)
ttattattactcccacaagagaacttgcaattcaggtaatacagttgcattgccagttgattttcttcatgtaattctcagttgcatgagtgcatatgttgacattttgtatagtttgatgcctgctgctgcatctcttgttatgatcgagtctaggagttggtgaagatagctggaaaacaacagttttcctgccttatgttttgtaacttttctaaaataagcctttggtttttatagtaaaagaaggttcattcctagtggatgcagcagaaatttcaattttttacaagctgggacgcagcagaattttccatttctgaaaagttatccgatgtttatttttgcattctctgggaagcaagagcttactcatccctttccagattgtttttcaacataaatagcggaactactttttgaataattggaacatatgggttttataatttttgtgaaccgtgtttgatttggaatctgcatgtggggaattttcatttttcattttccaggtctctgatcatcttaaggcagttgccaaggatac

SEQ ID NO: 70497 - DNA, 708 bp, Prunus persica
  Intron number 1 from transcript ppa026216m (locus ppa02621 6m.g) derived from phytozome v7.0 (chr-ID scaffold_1; pos 28619400 to 28620107)
ttgtagcttcaaggctatccaaagattttgagtctgtgcattctcaacatgcacagattagggagaaactcgagtacaatcattgattgtctcgaaaaggatatgctggattggaggatcaattggaggaaaccatgcctggggtagaaattgatcgatctaccttatggaagagagctagacaggacaaacatggtaacatccctgatccaaaggtggcagagaaagcaaaattaattgtaagcctactatcactctgttttaaatttttattaaactgtgaattattcttattacgtcgtatgttatatttttcgtcgtgtgaatgatattaccacgtcgagaagtttttaaaaacgtcgttaaaggtctaaataggaatcactactaattttctgtaattatagcataagacatcggtggttcattttcgcgtcgtttgaatgatattaccacgtcgaaacttttttaaaaacgtcgttaacggtctaaataggaatcactactctgttttctttaattatagcataagacgtcggttgtttattcatttcgtcgttttaaataaataaccacgtcggtataactaccgtcgtgataagttataataacgtcggtttatacgttattgcgtcgtgtgaaattgtataatacgtcgtttgtacataaataaccgtcgtgtgtttttttgtttatctttgttttagg

SEQ ID NO: 70498 - DNA, 656 bp, Prunus persica
  Intron number 1 from transcript ppa000298m (locus ppa00029 8m.g) derived from phytozome v7.0 (chr-ID scaffold_1; pos 11321443 to 11322098)
cttgttcttgctctgctttcaacaaggtttgttcttttgttttctgttttgctgtttgaagattttgatttctgggttttagttttttttggtgtttcggttatagtcaggttcttttgatatattttcagttgggatcatataaagggtctcaatttgttcaaagctttcatcttttatttttccttggactgtttcggaaaggaaagtaataacagaatcttaatcatgttgtgtccttgttttcgacataaaagatatcttggccaaactggaccgtattgttgtgtttcagaatttcagtttactagtggagtaagtccttgtgattacacattttaaccttaaatttcagacctttcttaccttttccccacatgttaaaaaataggctgcagattagattactaatataggctgcattttgcttgccactaatgttctgtttgtttctccagatcaagttatgtttacttttttcttaacggttcttttgtgtgtgtgtgtgtgaggtcagtgttcataatgcattataatagcctcttatgttctcacttgtgatacactgcttgttttcttgcgttgtagggaaattctcatgccctagtaattaatggtcttattgttgtctaccactctttctacagggtcattcc

SEQ ID NO: 70499 - DNA, 436 bp, Prunus persica
  Intron number 2 from transcript ppa011341m (locus ppa01134 1m.g) derived from phytozome v7.0 (chr-ID scaffold_7; pos 12538161 to 12538596 reverse strand)
ttcaggtttaatgtagctgtactttgagctcttaaatactgtgtctagatgcatgtttcccctgttgggtagtcggaagaaaacatagcgtatgtgttgctaaatgtcggtaattgggactggcttttgttaggttttagatttgtaataagtgcatcctgtgtgtccttgtgttgatttgattcacagtaggtgtaacttagtaggctaatgctaacagttgattttcttattgtttggtgcccttggcttcatctttacactgattttaagttttttcgtgttttttaaaaataatttattttggtaaagttttatggacgtttagataattttcatgtgttagacaaatactgaaatctatttcccttgtatatttaaaatgataatcatgttatttgtaacatataggtcagtgacatttcactggcggact

SEQ ID NO: 70500 - DNA, 856 bp, Prunus persica
  Intron number 1 from transcript ppa013989m (locus ppa01398 9m.g) derived from phytozome v7.0 (chr-ID scaffold_2; pos 14930313 to 14931168)
agggtttagctcctccatttccataacccaaagtacgttttgtttgtttcgcaactatattgcataggtttgtgcatttgaaatctgttgatgagcagccgtctcgaaatagatctgtttttgtattgtttcattgtggttggggaaattgtgcattcaaatcacatattttttgtactgtatttcttttcgattttgatttatgggttcaaatgggaattgcaaaactggaagatatagaggggtggaagtaatttttgactcagagagcaaaacaaatattgggttaagtccttcaaaatatttagctgtctaagcattctggtgggttgttcatgctttttcccccaattagtgtggttgtcaaatggggttttctctctgttgcactgtgagatgtagaagtaaactgtgaccttagatcttgatatagattgttgaaaaggaaagctttgctgattctttgtgttatagtccaagagtttagtttcatggtttgaagatttatgggtacatcattgtaggtagaggacttggagttaaaaaatagttgttgcatttacccttgtttttagcatctgtgccttgtaccttgtgttctactttggtttagaagaaaattcatcaagtgtggcttaatagtatccttgctagttttgccttggtgattgcatctcaattgatatggatcgtgtatatgaatggctttagctttatggttatagattgtgtttttattttttcttctttttctaaatattccactaccaacttggatttgattttttactttccactttttttcctctgttgttgtgcagacaaagagaaccaagaaggccggtattgttgggaa

SEQ ID NO: 70501 - DNA, 385 bp, Prunus persica
  Intron number 3 from transcript ppa021437m (locus ppa02143 7m.g) derived from phytozome v7.0 (chr-ID scaffold_3; pos 18456095 to 18456479)
tctgccactacagtaagcaagttgatcctcttcttataaaccagtcttcttttatgcacagtatttgtaagaaagtgatcatcaaaacataattatacaacttgcaatctgcatccacattatataatctgatatctggtgtgatgtcaaaacataaatgagcagaaaattcagcaagtttctgaagatgcaatataagttaaatgactgggaagataagtttctaatctaaaattttgaggatgactatctattagcgggaaacatctttgatcccgtcttcagcaatgtctctcatatcatatccttgtctatatatctcaatttccaaaatttcaagttgagatccagccattttattttgatgcagttcatagcatacaaa

SEQ ID NO: 70502 - DNA, 787 bp, Prunus persica
  Intron number 1 from transcript ppa000741m (locus ppa00074 1m.g) derived from phytozome v7.0 (chr-ID scaffold_4; pos 3393704 to 3394490)
tgaagcacaatctctgcgtcttgcttctgcagaaggtaaatactggctcttcttcgtcttctgaatgtttttccaagttggtattgctgatactgaaaatctatgcactaaagcctcaatttttgttttgaaaaaaaggaagcctgggttttttttagttgtgttgaacagcagagaacagagtgctcaatgcaaaagtttgtctttttgattgagaattggtagaacattttagcctttctagtgttactgtgttagagcactcccagttcaatgtttgtcagtataaacaaaaattagaacccatataattttacatgttggttagattagatataaacttacaaaaaagatttaaaaaaagaaagaacttgttttcatcctaaatttatattgattcaaaagcataaaggttacaactttttaatcggaaacgaaatgaatgaagctaaagagttggacctgaattttctttcatcattacaactggaaatggatatgaaattcaatgattgagagagatacagagcatgatctgtatcttctagagaagtttactaggttagaatggtgggtggcagaaggcccaagcccaatcactattagtattcggcttcaccattaatttgggccaatatcaggctcaatcactctacttttctttaaaaaatgaaaaataaactcggccgatgcataaaaaacacagaaaatggaaaaaataaaaagattcatgatttgatttgtgtgcgcagtggaagcactaaaagaaatagcaacacaagtggga

SEQ ID NO: 70503 - DNA, 798 bp, Prunus persica
  Intron number 2 from transcript ppa002110m (locus ppa00211 0m.g) derived from phytozome v7.0 (chr-ID scaffold_3; pos 19478817 to 19479614 reverse strand)
gctcaaagtaattgtctggttcggagtgtcatctgtaggtgctgttgattgaaacttgtgggaaagattgttaacaaagaattaacttgacatgaaattgcagtcttaaacactgcctggtattattctttgagccattgttgcatttgctacaatgggttgagtgtcttgtatagccctgcatcatatttccacacattgttccccaatgcagtaatcccttttagtggctttcaattctatgcagtatatgtcctttataagttagtgcatcaatccatgaaacgttaaaagcctaggattccttcttttgctcacacatttcaaagccttagaaaggaggtgaagccgtatgagcttaggttgagatttggctataggtctctggtgtatcttctaattcctgtggcagatttgttgtattttgtttttcatttccattttatttttgtctttgactctggcagattatataagctaacttagatgggacatattggtcctagataccggcaactgagttggacttttctcttactttttgtgcttgcacattcatagactaggaggtgagagtgaagttgttcaagctcatgccaagatttagacttaggtgagagtgaatatccttctcacatattattcaaactaacttcacacataaaccttttatgcggagtaattctctttgttgttgctagataatattcaagtagatttgaatttattatatttatagtaggcatagtaaaattattttgaagaccacctgattatttgctttggtctcccaaggtt

SEQ ID NO: 70504 - DNA, 504 bp, Prunus persica
  Intron number 1 from transcript ppa016583m (locus ppa01658 3m.g) derived from phytozome v7.0 (chr-ID scaffold_6; pos 3672535 to 3673038 reverse strand)
ggataacttcacccacgagcatccaggtctgttgaatcaaacaatcaattagttaacaaatcttctattttctattttttttaggtgactaaattgatgatcagttacttcatttcaaaagctataataaacaagccaatgcttcatggaaattagttattcttcacttacaaagtgctcaatgggaactgcgcagaaactatgaccttacccagcaaagatctgacaactcctctagatcaaagaagatagttagaaagttgtaaaaaattgaataagggtaatcatggaaaataaaactcaaatgttttaatgtattaatgtatcattcaaaaatgtaattaagaggaataatacacaagagaagaagtgagaagttccaaccaagatggttagggtgaaggttgcgagcattcccctatttaaatatctagatagctaaattactttgtatctttatttataactaaaattacatttgattaattgcagaaaagataactg

SEQ ID NO: 70505 - DNA, 465 bp, Prunus persica
  Intron number 2 from transcript ppa008503m (locus ppa00850 3m.g) derived from phytozome v7.0 (chr-ID scaffold_4; pos 993150 to 993614)
ttcttgttttgtctgctagggagggtgttgttcgggtactttcctccttgacctctctttttctttgacttgactctctttcttctgtaaaacagagatctcaagttggtacaatttggttttgatctttatttagtaaaatttgacaagaactcaagttttattattcccttttcagctaaaagataacgaggattttcacagatttttgtccaacaaataccactaaagctgttgttaccttttttttcttgtggtttttggtacatttttcatattctgttggtctgtaaaacagagatctgaactatttgtacagatttttatctatttctgggaccccaaggctgtttccttttaattgtggatttggtagatttgtcaagtacaattctcttaattattttcgactttattactgtgttctcagctaggaggcccattcatccctctcaaaactggaag

SEQ ID NO: 70506 - DNA, 608 bp, Prunus persica
  Intron number 1 from transcript ppa007758m (locus ppa00775 8m.g) derived from phytozome v7.0 (chr-ID scaffold_1; pos 8085495 to 8086102 reverse strand)
aacccaattgccagaaccttctcatcataccaaaggtgaggcctttcttccctctaacttctcctctgcatctgtttgttttgcataaaacccctcaattttgctgttttacagttttttttttccttttagatgcactttttctaattgggccttcttttgctttgatttagtgtctatgtttgttgttgaacaagagggaacactgaagagattaagattttgagtttttgagttttgtgttatgttgtaaaactgaatctatccacgacacaagagttttaagaagaatgttaactgagaattttgaaattttaagttaatctgttaagtgaaatgattgatgaatgatttgacttttgatgcagatttcctttttgttctttttctggtactatcttgtcgttgtttgacatgtggaataggaagaaacgggggaaagttcagtgacatgttgaatagcattgattggccttgtctcaaattatgccaaactaaataattatccacaaagcattgattttttttcagaaaaatttatcatgcactgtttatctttgcaaaattgcttacagtgattttgaagtgttcctttaggagaagagatc

SEQ ID NO: 70507 - DNA, 639 bp, Prunus persica
  Intron number 1 from transcript ppa012891m (locus ppa01289 1m.g) derived from phytozome v7.0 (chr-ID scaffold_1; pos 31732649 to 31733287)
gactctcttatcgcaggtacctctctctctctctctctctctcgttccgatctctgtaaatttgtgtgttgtacagcgtttcttgtcaccgtctctagttttgaactgtttgatgatgtgataataattttcgatttctgattgtgctttgataataaagggtgacttctattgtccttctatcctcatttatgcggaatttgtaggaattgatttattatagcaatctgaatatttgcggaataagtcctttatgtaaaattttcactttgacatatcatctaggaaagacaaccataggccacctaatagaccaaaatcttgcaacagacgaaactcttattacaatcctttgcatgattagtggaacaaaaaaggtggatcctttctttcatttaacataagttttgcaactgatttcgcacactagtaagtagagaaaagttttctttaattttgcccctacaccctcctgtataatgttttactctgagaccactatgttagggttagggtgttttcagctcatattatagtattcgaatcaatccttaatttttggaactttgtttctttcaccatctgctagttaatacttgacattcctgccatgttgtgcattttcagaagctgcaacat

SEQ ID NO: 70508 - DNA, 695 bp, Prunus persica
  Intron number 1 from transcript ppa001815m (locus ppa00181 5m.g) derived from phytozome v7.0 (chr-ID scaffold_7; pos 13299532 to 13300226 reverse strand)
cgctccatcgaccgcttctctcttcagtacttcaagtaagcttcctccttcctctccatttcccatcagttagggttttacatgaatttttgtaccaattccccttttaaactaattaattgtaagtaaaattgagcaattgcaacagaaatggtctaatctggcctctttcagttgaacaatgctcactgaattaagtctccatggtgtttttccctcaatttccctaaatgtgctgagcgaatggcttgttgggctggggaatggaagacctgaacaacatggcgggcaaatggagctattctgaacgtgtaatttaatttacatttgagggtatagcgggtggtagttgaattttagttcctcgtccactttcccaaacctgatttttggaaataaagtggaaatgtctatattggaccgaaccatagaatgaaatttttgtcataggaggatggtatatcattggtaggtttgttgtgcattaaccaagcagtatggtgttgcttgtacttttggaagaaaaaggaagaacaagtagagatttataggagagggaacgagagggtagagaagtcttatgaaaagcatgcacacacaatttcctttgattggcatcatcatcatcatcatttattattactaatacttaaaaaaaaataaaaatcttgtttatggatataggtacgtaatca

SEQ ID NO: 70509 - DNA, 969 bp, Prunus persica
  Intron number 1 from transcript ppa005989m (locus ppa00598 9m.g) derived from phytozome v7.0 (chr-ID scaffold_6; pos 9815301 to 9816269 reverse strand)
tatattacccgtcaaattcccgcagttctttactggttagtttggttcgtttgtttgtgatagtagttgggttttgcattttgttttccttttttcctttttgtgcttttgctatgccttaactctttggtaaagttgatgctagctgggaaattcagccttttgatttagttgtaatgggtatttgtcaaagttgggtaaatattgaatgtttaggatttcaaagcagtgtgaattatactgttgttgattaacagctattatggttgcaattggttttctcatctagtgtttctgatgctgcattgttgcattgagtaatgttgagctattaggcattataatttctaaatggggaaagctttcataggtttactataagacagtcacatggatggggagagccttcttacgctcatgcttgttgatgtcataaattatctctattttctaattccatgtctgtgaaattaaagtggccttttggaatcataagggtgcacacaggcatatggtttgcattcttctagggaaaagcagagggccaccgatagaaaggtttaagttgttaatagacttaaaatgggtttgtagtagttattctcatacttggaaatattgttccctctggaagtaagagttcatttggtttcagtatcttacattatatatgttccttgccctacctaattattcgtatatattttttctaatataattttcatggttgcttgaagcagcgtgtttgttgctttcttattactatcttaactgcttatccatcattttatatgtgttgctgtagacaccaagaagctgatatgaaagttgtgtttaccgtatatatgttatcagtttctacagccattggaaaatcgtgttaacagttactgagttgagttttcattttgattcatcctttaaaagctaatatgtatccacttacattcttttaggcaagagacgacc

SEQ ID NO: 70510 - DNA, 443 bp, Prunus persica
  Intron number 1 from transcript ppa002541m (locus ppa00254 1m.g) derived from phytozome v7.0 (chr-ID scaffold_5; pos 16811613 to 16812055)
agtgcagctgtgatttccatttctgtcttgaaaaggtgtggtcactctgaaccaatcaatctgacaaatttttcatgcattcttaaacttttatgtgatttaaatttctgggtcactgtttcctgatgatttcatatactattgtcggagtggtacttgttggtccttaaattttcacttcctttttatatttctttacttttggcggttgggaaggagttcttgaatcaatgttaatttgtaaatatcaatgaatcgtgaattattaacttattggtataaagaatggacatttgcctcttagcattataaagaattacagagttcaaagttctgcaatttctttcctgttatattcttctttatataagcacaatgaagtgttgccattggtatttgtttatgcagctaattgggaataatatagatttttaatctctaaa

SEQ ID NO: 70511 - DNA, 464 bp, Prunus persica
  Intron number 1 from transcript ppa001153m (locus ppa00115 3m.g) derived from phytozome v7.0 (chr-ID scaffold_2; pos 4202333 to 4202796)
aatcaggttagacttcaatctttttttccctcagtctatcataattaaggtgatatattactttttagttacagaaagtttccttgattttgttttttggttatttactcgtcttactaccatcctgcagtttctttaaagcatccttgccgtgtgtgttttgaatatttatttgttgattttcttcttcatgaacatcaatagaggttagtttgagcactcaaagtttgcccttggtcgaacatctgtaggcatgttattatttgatttagtttcactattgattcaaagtcacttctcaattttgcaaataagagttgaacttttgttttgtttccatcaaatggcctctcgttttcaaactatccaagtttttaatatatactgactaacatttgcctttatgttcataaactgctaaatggtcagcctaatcctgggttgccctcaactcatcatcggag

SEQ ID NO: 70512 - DNA, 350 bp, Prunus persica
  Intron number 1 from transcript ppa003383m (locus ppa00338 3m.g) derived from phytozome v7.0 (chr-ID scaffold_3; pos 20280576 to 20280925)
cactgtgttagccattggaaccgagtgtgatattggtatgcaacattcggcttcttattttcttatgaactaatttttcatgtggttttgaattgtttattgaaaagaagtgggaagattttgttgacaagaagttgtaaaacttgcattttgagaaacttaattattaagagcttattggattgaaatggaaacagaatgcagtttgtttattttaaatatttcactagatattacaggtagcatcctcattattgtgactttattatcttaatatattatgtaccttaattcatgagttatgcaattaaagagttctttttccttttctccatgatgcatcttcagca

SEQ ID NO: 70513 - DNA, 951 bp, Prunus persica
  Intron number 1 from transcript ppa002592m (locus ppa00259 2m.g) derived from phytozome v7.0 (chr-ID scaffold_2; pos 25494315 to 25495265)
cttggcagtcaaacggagatttgtcgaagacataggtaacgtacctaagcagtacttgctctttgagtaaccgatccggttgccattggcatcctcttctgcaattccaagatcagagcatatcgccgataagccttgcaagtccatcttctgccgaactttattgttttcgaattcgggttcaatagtttaggatttctggagaggatggcgaataaaaggatttagcgcgagagcgatcggatctcagtgaaagggtttattgtgatggctctggtggcgcgaattttgatgtgaatttcccgcgcttttcaatcgctctggtggccttttttagctgaggtggcaatttagttgtacaggtgtcagtttattagtggagctgatctgttatcatcgttgcacaaaacttgaccgaaataggtctatcccgataactaattgggtgggttcatccaattatactcagaaaaattggttgggttcatccaatttgcactactaacaaaataaattcagtgcaaaaatcaaatttgctatgcattatggctgttgaattactgattcaaacttaacttaaaataaattatattgtcaaaaaaaaaaaaattatgggtataggaccttttttgtattgggcaaaaatataatcaccttttttatttatagaaagtataacataatataataaatatacaacgtttagtgaattagtaacatcaagtgaggtgcgaaaactaatcagccaacataatgaagaatattaaagtgtggggtttatttgcaaaccaacccaatatgcccactttttccagaggcccaaacatgagtaatgagaccaatgagtctcgtgacccacccgttcacttatgacaaagctctccgctttgatagaagttgaacaacttttacttagcaagcgctacgtttcgtttattcgatacaaccaaa

SEQ ID NO: 70514 - DNA, 309 bp, Prunus persica
  Intron number 3 from transcript ppa003605m (locus ppa00360 5m.g) derived from phytozome v7.0 (chr-ID scaffold_1; pos 27522913 to 27523221 reverse strand)
tgcagcactggtatgctagttattcattgttttttagccattgatgtactgaattattttgtgtttacttattagcactagaatgttgtcttcggacatactgtccttgatgtttgaaatgccgtgtaaatacagatttatgtgtaaaattgaagatgttgaataggatactacaaatattttcaatgtcataggttatgtatattttatgtgaaccattaattaaagctttctggctggtgttctgtcataattgattaatatcaagattcaactgatttgatttacctttgattgttggcagggtgg

SEQ ID NO: 70515 - DNA, 425 bp, Prunus persica
  Intron number 2 from transcript ppa011753m (locus ppa01175 3m.g) derived from phytozome v7.0 (chr-ID scaffold_1; pos 1849932 to 1850356 reverse strand)
ttcgtcttcccgtttttactggattgcaagtaagctaatatgctcccctcataatgaactacaaactgaacacttatcctatctcaatggtttgaaaacaataactagtgcttggataattattcttcttccctgcattgcagtagaaaattactctttttcatcttttaaagatttcctttgtccccaaaggggtgggaaaattttgatgcatccacatttacctgaaaattttgatgcatccacatttacctaatcaaaatgatgtaagtagaaaagtgatctagcaccgaggccttttatgataaaacctcacacacggactttacaagtggttaagttatcaatagtatacgtgtcagcagtagtagtgggccgctgatctgtttcttgaaatcttaacatggatgtttattgtttgtagt

SEQ ID NO: 70516 - DNA, 183 bp, Prunus persica
  Intron number 2 from transcript ppa014748m (locus ppa01474 8m.g) derived from phytozome v7.0 (chr-ID scaffold_2; pos 24183123 to 24183305)
ttaaccgtcactaaggtctcaatcccacacaaacaaattcagcattttgattcttcttgtattaagtgtctgcctcaattcaatctgtatttcctaattacgtcatcgtataataattttttttttcaattatgtttttctttatttaatgaatttttgtggtggtggttcagatcccaaatc

SEQ ID NO: 70517 - DNA, 718 bp, Prunus persica
  Intron number 1 from transcript ppa010038m (locus ppa01003 8m.g) derived from phytozome v7.0 (chr-ID scaffold_3; pos 12787220 to 12787937 reverse strand)
agcctccgtcactgtccccaacaagctcggcgactgtaagtctgtttctgtttgataaacgaaaaaaaagaagtctggcgctgtttggtctcccagaaactgccggaaaatgaaaaaatttcaatggggtctttcttggtttagccttttgtagagtacccatgtggcagatttcgtagcattgcaatttcagcgcacataaggcgccaaattcatataaactgaaaattttgtgaaacatttttgtagagaaaagcctctttctctttacttgtgttcgtttttacttaataagttgtgtttatctgtgtactggaggaagaaaaaatgaatgtgaaggattgggaatttgtggttatagaaattatggacattatgtgaaaagaggctatctttaccttggagctttaatacatagactgaggggtacaatgagtttgagattcaggttatggaatcaaatttaaccaaagaaaaactgatattctgataggcattgaagagtttataagatggcaggaaacgtctgatatctgtgtcgatttaaattctcatattgctttcattgttgcatagtggtttataattgttgaggtgggaaattgtttaatgtgtcactgtacttttagtggtgcatttaaatcatgggcgcgaatgattgattgtttaattgtctctcctaggtccattttgtcaaagggtgttgttgactctagag

SEQ ID NO: 70518 - DNA, 581 bp, Prunus persica
  Intron number 1 from transcript ppa006271m (locus ppa00624 4m.g) derived from phytozome v7.0 (chr-ID scaffold_4; pos 14838395 to 14838975)
ccagttcttctgagttagctttgcttaatttcaaggtaaggttcggtgtctgggccttgaacttgttaacgtgggttttggtctccgatttacaagaaatttgtgtttacttctatatcaggccgaagttttgggtttctgtattcttcagtatctggtgttgcttaattttttggtttgggttttgtgggtttttctgaaagttcattattgtaatgtttggcgtctgcattctaaattttgataatttgtgttagtttcaggacattctgagatttagatttgtgggtctggtggcccgtatcgtagaaggtcacaatttggcttggacttgaggcctagggtttagccaaatttctaatttctaatttatgctttagggttttctattttggaattggctttttgttataatatataaatttgtcctcaattttgcttaatccctgagccggtcttccgaattaactatctgagtctaaagttaaagctttctacttaaaatcttaaattggagttacttgagttttttcagaaagatctttgttgtgccttttcaggttcctttcctgggtgttttc

SEQ ID NO: 70519 - DNA, 501 bp, Prunus persica
  Intron number 1 from transcript ppa016428m (locus ppa01642 8m.g) derived from phytozome v7.0 (chr-ID scaffold_6; pos 17153067 to 17153567 reverse strand)
cttactttgtggacctctccaactgcggtcctgtaaatttatcttctctacttttattattattatttttctattgatttttccttggtagaatgtttaagggacattttgggcttcaacttggacatgcttctatgaacttagaatttttagtttgatatgtctttttatattcacttttttggtccacgtaaatggtttcataaacttagaaagtggtagtaaagggcttgtagctcaaaagcatttacttatgcgtctgaggtcctaaatttgattcccccttcttcaatatcgcttatataaaggaaaattgtttgtacaaagaaaatgtcagatgagccatttgtaagtacttgagttgaattttcaattttaggttgaatcttttgataaaatttggtcatttaggctggtccaacttccaattaggccaattttcgttgaaccaaaccaaccatataatatctaactctaaactctagcaattttaggttttgg

SEQ ID NO: 70520 - DNA, 690 bp, Prunus persica
  Intron number 1 from transcript ppa011449m (locus ppa01144 9m.g) derived from phytozome v7.0 (chr-ID scaffold_6; pos 21619816 to 21620505)
attcggcccattcctcctcagcctcctgcaaaacggtgcgtacgtttccgttctccaactctcctcttgcaatttatgatcagtttagagtaatgggtttctcttaatttattcttctcaatctaaaaatttcgacctttagcatttttgttcagtttgcagtgatgggtctctcttaatttacttttataaagtgtataaaaaatcggtcggaatttttttttcctgacttcaaagaaaacctaggcacgctgtcgcccccttctctctctctctctctctctctctctcacgaatcgaccaccaccaccaggccgcgacgaccccttgcccacccgcgaccccctcgaaaacacccgcgaccctttctctctccgtaattatcttttgctgctgtacatgctttatttattcctttatcaatgtaaaattttgatctttagcatttgttgttcagtttaaaccaatgggtctctgttaattcctttatcaatgtaaaattttgatctctatcttagttttattgttctcaatgttaaattctgatcttttgcatatatatatatatatatatatattttttatcggttttaaagtaatgggtccctgttaatttctttttctcaatgtaatgtttttggttttgggtgtttaggtgaggcttgtggtaaaggggagggtgcagggtgt

SEQ ID NO: 70521 - DNA, 522 bp, Prunus persica
  Intron number 1 from transcript ppb007318m (locus ppb00731 8m.g) derived from phytozome v7.0 (chr-ID scaffold_8; pos 21243682 to 21244203 reverse strand)
ccattagagcttgggacacccgcacattccaacaggttcctttctctaattgcatacataaactggtacctctgtgtctggacatatgtttatgttcttgatttgtttttgttttattgttaatgctgcaggtgtcttcttttcattctggttcttctcaagagattttcagcttttcatttggaggatcagctaacagtcttcttgccgccggatgtaacactcaggtgctgcatttattgtaagagttttgatcacgcttggtgtctccattcattatttgattaagattttagcagaagtcattgcttccaccattttgtccacattgaaggaagagtgtatgttagtttttgttctaaaattccagagtataatccgcttaatgtttcacattcactctttaagtccatatgcttatgtttgcttatccttgcttatttcgatggactccatataatttgttttctcccttcttgctgtatgacttgctatatcagatactattctgggattggagga

SEQ ID NO: 70522 - DNA, 574 bp, Prunus persica
  Intron number 2 from transcript ppa010216m (locus ppa01021 6m.g) derived from phytozome v7.0 (chr-ID scaffold_3; pos 16342803 to 16343376 reverse strand)
aaagttgaaggctgcaactgaagggcttacacaaagtaggtccaatattctcttttattcatatcataatgcctgaactagatgtctatgttaacatgatcactaataaaagagggttgattgaattaaggcgtaatgaataatgatcagtcggagaaaatatctgaagaaaggaaaggtctcttgctgaagaaaatatcttatttctgatatatcattatactactcaacctcatttcacatgttattggtcttactaattaacaaccttttatgcatctacaactgtcatttatatgccctcaatttgttcttctttggataatatctggggagcctattgttgttatcaagttttgacgtgagcctattgttatcaatttttgacgttgtgtttgtattcctgcgtttcagttcttcactcggtaccctgaaagacaattctaaactcatattttcctaattctgtaaaaatcaggagatctgcttgttttctgtgaacagagtcctaatgtgcagtgtcttctgcttctctgtagttggaaaggcattcgctgttgcaacagcagtagta

SEQ ID NO: 70523 - DNA, 932 bp, Prunus persica
  Intron number 1 from transcript ppa007292m (locus ppa00729 2m.g) derived from phytozome v7.0 (chr-ID scaffold_2; pos 18361195 to 18362126)
ttcctggaacccacgtcaaaacagaagtctcccaagtaattattaatcctctctctctctctcactgaagaattttcattttgttggtttgaatgtgagcttcttttcttctatgatgcatgctagtttttttatgttctcttttcttcctataaattcatagactatagtttcacatgttaaaatttttcttatattttctatgttttagataacccttttgagatctctgcatcttttttcttttttctttttattttttctggggaacttgtgtttgcagttcaagttgtagacagtcttctgccactcactctgtgtgggtcacgtggtagtggaactgtccactacttgtgtcgttttggcaaaaaataaaaaagaagacgcgtcgttatagtttcaattcgtcatggttatatggggttttatttatttattgccaaattaaatataatcaaatataagttgtgtttttttttttttatagatccgtgtgcatgtttaaattgtaccacatgctgaatttataaacttatcaggattttttgtgtggcaatttataaatctatcaaaacatacacatgtcccctgtctctggttggtttattattactgatcccatatgaaattcattgtattgatcttaatcatgaactatcaaggagatttgactagatatttatctgtttaactgattactgaattgggttttgatttaattaattgggcttcaatatatagaaaatccattaatttaggcaataatcagtgaagaaaaggaaatcacagaagaggtgatttatggtgttacatatcaaatattatatcaggtatatatatatatatatatatatatatatgccttttcaatgataaaatctgtttgccatatttcagctcattggtagaactcccattgtctatctcaacaa

SEQ ID NO: 70524 - DNA, 672 bp, Prunus persica
  Intron number 1 from transcript ppa013926m (locus ppa01392 6m.g) derived from phytozome v7.0 (chr-ID scaffold_1; pos 28441151 to 28441822 reverse strand)
tgtatcgattgctcatctccgttctctgcaatcgggtaatttttcgtcgtgcttttcgtccttattactgttgatccctactttatagcttatgtatttgtaattcgatttgatttatatgaaattgtgtgtttgagaatgatgtagctcatctgatcggtgtcggtgtgggtctgatttatctgtcgtttgtttactgaaaattttcttctttttgttccatgtggccattgaaattgcaactccagaagagtgaagcgtatgttaatctgagatggatagcacatccatatacgtaatcttaatttaattgaatctgggctttgtcaatttgtgcttttttcttaggaaatatgaaagcaaagctcttgcaatgcaatgcactctcttgaaaaaatgcagttccaaagatacgctttatgcttgtttgtgtatcagcaatacttgatatgcaaattatatgaaatcatattcaggttatgcatcgaagttgttaatttttttatttttttatttatagaagtagttcttatttcacatatttaggttatgtctaatggtcccaacatatctctagttccctgcttcaaacaatgtctgcttgcgctttcatctttactctcgttttaatacgcagcctggtggttatttgatttcttaatcctcaagcag

SEQ ID NO: 70525 - DNA, 324 bp, Prunus persica
  Intron number 3 from transcript ppa006546m (locus ppa00654 6m.g) derived from phytozome v7.0 (chr-ID scaffold_2; pos 26278248 to 26278571)
agatagtggtatgtttatcttcccttttgcttctgataactatgaagattaagaatctggcgtcttatttagagccacagttttggtttgagtctctgctaagaagcttttgtcctgtattttgatgatatttctgtgttaattttctggtaataagcaaatgtctgatgaggggcatgccttcagtttgcgtacccttgtctttaaacgttgttacatcagctttaattaagttctattttctttgtaagttagcatattaggttaagaaatattttgagcgggcatcattttgcagacagggctcaacaaggctgctacagc

SEQ ID NO: 70526 - DNA, 907 bp, Prunus persica
  Intron number 1 from transcript ppb014708m (locus ppb01470 8m.g) derived from phytozome v7.0 (chr-ID scaffold_4; pos 25447104 to 25448010)
atttacaacgttttcaatttcttaacccggacgtggtttgttgttgtgataagaatattttattatttttatatcaaaatattcaaaataaatttaaaataaatcagaaaaatgcaaagtcaactcctatgaagtcattgatatattttcttccccctaaaccttgaaaaaattcattttgaataacaaaaatttaaaatgaccatccaaaacaaaattgttttgatgagtcataaaatcacttctagttttatggtttagggtttagagtctagggtttagagattaaggttgttatttattggggtttatttttaaagtataattgttgggtagtctagggtatatattaggctgtaaaaccataaacccttttataaacttaattttttaaattatataatttagttttaagggtttagggtattaatttttaacgacggtggttgagtcgtggaatacatatgttacgtcgtgcagtaaaatatccgacatggtttatactttaaacgacgtcattttaatatgtaagtcgtctattataatttacaacgttttcaatttcttaaccccgacgtggtttttcagtcgtctttatatcaaaatattcaaaataaatttaaaattaatccgcaaaatgaagcgtcaaaataaacggcgttacgttcagtgtttccgtcgtggaatattacatttacgtcggttcttgtagaactttcgccatggtttttctttcgacgttttaaagagcgcgctctctaaaaattttcgcgcgccctaaattttttagatttggctcttattcttatacttctaaccctgaaccctaaaattttctcacttctgctctaattaaaagttgcactctccaggctccgtcgaatctgtgagctcgtccaacctgtaa

SEQ ID NO: 70527 - DNA, 688 bp, Prunus persica
  Intron number 1 from transcript ppa005121m (locus ppa00507 4m.g) derived from phytozome v7.0 (chr-ID scaffold_3; pos 2846785 to 2847472 reverse strand)
attaccggttagagcgcctgtcgagcttaatttctcatctaagatatattagatattgattttatttatagtccaaattggtatttttacttgttctttttaattttgagcatttctgttcactttgggggcgcacttagggcttttcattcaattctgtgatctaggtaactggagatttgtgatattttatacggttaagcattttgttcatccgtctttctgagcaatttgagctcgatttgcggcatatttttgcaaattaggatctgggtctttgcgagctttgaatttctgatgtgggtttttcgtattaaagtggagtgattcaattttcgtctttagggagtagaatggaacgcatatatatatttctcagtctatttggtgtcttttgctattttcaacttatgtaacaatgttgatgacatactatcgaagaatctaatatgttgctgaaaaatcagttttcaagactccagactcttaccagaaatgaataaactagttttagctcggtcgcaaattttttctagattctgtcagtttaatttgaggacaataaaagcatctaaattaataattgtgttattcatttgatgttctgtagatttgtaacttgtaacttgagtttgtagattctgtttttgacaactgtgatttattacccatttgtagttagtgtaaa

SEQ ID NO: 70528 - DNA, 644 bp, Prunus persica
  Intron number 1 from transcript ppa007831m (locus ppa00764 4m.g) derived from phytozome v7.0 (chr-ID scaffold_7; pos 10622297 to 10622940)
gcctgtgtggttcatcttgcaggtattgtctggttttctatttatctgtgcaataaactaagattgaagtatagcaaatcatttcattgggtgatttcactgtttcatttgttgagcattgaaattttagaatttagaaatcaattgctagaaaatttgaactgttggtatgatttgtttatttatttaaaatggttacaattcaaataggactttgttctacttgtgtactgttttcaaagagtaatatttagtataaagtgctaaccagttttgggaaaccatgtttggaactgttcttgttttccttgaaagattgatgaatatggttgcagaatgtaattgttttgtttatatcaagtatgccattgctggaaactatatgattgattgggaaatgtaattagttcttctttgggtggtaatgttgagaacatcgggagggacttcttggatgacttattactttttggtatgacctggtccttctgcattcaacccaatagagaagccccttgaaatacaagccaatagaattcctttacagtagcacttcatggaattactttatagcctttggggttacaatttgtaatttcttttttgcaggaacaggggaccatacatttgaaagaagattgcgt

SEQ ID NO: 70529 - DNA, 881 bp, Prunus persica
  Intron number 1 from transcript ppa004223m (locus ppa00422 3m.g) derived from phytozome v7.0 (chr-ID scaffold_1; pos 33764494 to 33765374 reverse strand)
ttggtccttcccgttgccttctcttttcttggctggtaattaatttcacaacctcacaagtactgatttttattacccatttcaccttgttagctcaagcttcataaaaattcttcctttttgagttaaatctcattcaagttctcttttttcataataatattatagacaattatccagctttagaattatgtttcttggcgttttctgcttaatgctgcagctaatgtgcttattaatatcagtggtggccctgatgggtcgctctccaaattgatttctttcacgttttgatctctctatctgtccctctctcacatgctactgagaggaatttgactaaagttcttggctttgtgggtctacttgggtaaagtcacttcatttattgaagattatcataataggtttcaatttgacaaagtaaaagaacatccttgagagatgtctcacttcgtccctttatcttttgcttttccacagcttcaaagatcctggaaatatacagatgccagccctatcgcatcttactggggtcactcatgattttgttatttctttttgaaggaatttagacagaggaacctttatactttggttatagtatcacttgtttattctcttcactgcaatagtactcggcttgcctttaactttttcattttatattatttttgcattataattttcaaagatttgaagatttgaacttttaaagtgcttgacactttacattgagataaaatttaccaagctgctaataacaattgaagaataccattatctgaaaggtttggagtacttgaaatgaattgacctcgttcgtttgtttgactacgtccacaggagttggggaacactttcgttaaccatagcctact

SEQ ID NO: 70530 - DNA, 537 bp, Prunus persica
  Intron number 2 from transcript ppa008015m (locus ppa00801 5m.g) derived from phytozome v7.0 (chr-ID scaffold_1; pos 27486527 to 27487063 reverse strand)
ttgtttttcttaattactatccctaagccctgcatgtatctggcctgtgaaagtttaaatttttatgtagagtagaagtgctgaagaagcatctgatgcttttctccaaaacacttatacgagctagaagcactttgaggtttttctgtcgatcgttgtcagaaacacttctagtaatactgtcagtataagacaagaataatattgatcttgctagctaattgtgattattgactagtctagctctctgtcatttcccacaagttaacatatgttgtgccattgacctttttgttttaattgtgaactttcggttaagtatatcttaattgattcgtaattacatgtaatttgtcacaacttacacaattattctctgttttattttttactattttcttattaaatttcgatttcttctttcagaagaaggaacacgtaaactgaaggttatcaatcaaccaaactcacaccctccaaaatctttgcgacttcgggtggaaagcccaatcatctgcgatcgtactgacatacgct

SEQ ID NO: 70531 - DNA, 514 bp, Prunus persica
  Intron number 3 from transcript ppa009734m (locus ppa00973 4m.g) derived from phytozome v7.0 (chr-ID scaffold_4; pos 268648 to 269161)
gaattggcgcatttgtcatcaaccctaacagagaggtatatgtataacttaactctgctgtctgctctgcttcccgggccaccatttatcatttcatcgttttatcctcttcatctcaatgtcaagtgtttttcttcatataaattccagaaactcgtttcaaaaacaacatttttggattgtgcggttctaattgtttcagatttactatagttcagctgagtcattaggtgtgacctagtctttaatattgcatttggcaggggcttaaagaaggcattttctctacttgcatagtcctaatactgccttactgattctcaagctatttgacatccattttattttgtttctgagatgatcagtttcagaagggttccatatacctgcaatgctttggacttttcactacatttgttgttttctttgactctgctataatggctgaagtttttgggtttgtaaacattcaatggcaggtgctagtagtccaagaaaagagtggactgttacg

SEQ ID NO: 70532 - DNA, 915 bp, Prunus persica
  Intron number 1 from transcript ppa015623m (locus ppa01562 3m.g) derived from phytozome v7.0 (chr-ID scaffold_7; pos 9514123 to 9515037)
aaaaacaccacgcaaaaagaaattaacgagagcaagttacacaccccataaaatgccccaggagaaggcaagttttccatttgaccaagatgttcatgaagatcatctacacaaatatactcatcctccatgtattgtttagggcctttctcagaacagcttcctgaacggaatacagacacgaactctgccgtctcacttgctggtgacttcaagcccatacttccaatatctgattcctaagaaaagggaacatagaggaataattagttaatgtactacttgttcgaaatagaggcctaattcaaccacaaaactccaaattttggagtcaatatactaattaaagcatcttgtgtcaactaagcattatatagttgacctaggaaagtacctctgtatgcacacggaaacatgcatcgcatacgagagcagatcaaagagaggtagtgatgactaatgacattaatttgctaatatacaacagaagacacaaaagggttcaacttgagagagagaacttgatctacttgcagctagaaggatcaacgatccaaaatggcatcaactacctacgcatttctacggtttccatttgaagcatgcaaggaaaaaccagatcagtttgcaaacagcaatccctggctacttgaacatcttgaaaatggtttccttatagtttctaggacgccattcattcactcgacattaggcaggaaatcccagattcaattcctccacaatgcaacatagacttagaaggcctcaactcaatgaagaaaacacaaacatccgtcagcatgacatacatcaaatgcatcttcttaattggaaatgtacaataatttacaaacccaattaacaaaaaagagaagattaggaaagaaagagaggacggcacagggcttcactcag

SEQ ID NO: 70533 - DNA, 555 bp, Prunus persica
  Intron number 1 from transcript ppa024972m (locus ppa02497 2m.g) derived from phytozome v7.0 (chr-ID scaffold_5; pos 1566737 to 1567291)
ccctaagaagcgtcgagcgcttcgcaaagatcaaagtacaaccctcttctttgctaatttcttccagttagttaattttgttgtaatggagataacttttgtttattttatttatgcttttgtcgactttacagtaacttcatgtgaatttatttctgattttgagtactttcgcttgaatcttcgcttaaaccctagactaatatcaacttgcactgctactgggatactttgattcttctcatacttcgttttgggtgctaatcattagtgtggaatctgttaaggataaattgcatactacagagcaatacaatgttgttgtttttttaaaatacttgcttgagttctgaagtatactttcccaataaaacttatttaagggaatgcatcataacatatgcttaatttctatgactatgatcatttaagagttagtctgagatggaaatatgttttcaaaatcatttcaagctgacacaaaactttttggcatcaatttcatctaatgggagttctgtcttcattgtctatttgtcagattatttgcaaagg

SEQ ID NO: 70534 - DNA, 568 bp, Prunus persica
  Intron number 2 from transcript ppa025379m (locus ppa02537 9m.g) derived from phytozome v7.0 (chr-ID scaffold_4; pos 9815407 to 9815974)
cggctgggcataagttcacgttttcactgcacaccatgacaaaaatcgatgctttgaggagaccgtttctggtgtgtgtgctttctctgtttcaattttatctatgatattatggattcatggtatctatgtaaaatagtagtggggtttacttgaggttggattgtgtatggtacaaaaacatcgaacaagagtaaatgttttttctttttcatatgtaagtttgtttgaaagttgaatgaaagatttacatgatgacctactttacaataaaatgttgaaaatgacagtttcaagtcgtcttggtgtgtgtactctcagagaaacaggattagaaacacagacctgctataggaacttcatcaaacagggtactacatatataatggataccacaccgtgggattggaagatggtttatacatagttagaacaaacatatcaaattttcttttctttccttgtccttatttctcggtttcacagtgttcaacagtcatttaaaatcagtgcattgtttgatgttttaatgtcatttggtttcccagtatctttcctgttactgtat

SEQ ID NO: 70535 - DNA, 958 bp, Prunus persica
  Intron number 1 from transcript ppa007158m (locus ppa00715 8m.g) derived from phytozome v7.0 (chr-ID scaffold_7; pos 21336103 to 21337060)
tcttcacgtcttcttggtcttctccactccaattggtacctttcttttttctttcatcagattgttgttattcaattgatttgtggagttgggtttttatggttttaactgctatctgcttgaatttgttgaattggatggttatagaacagtgtatatctattctgtgtgattatttacagtgggtagttggtttcttgaagaaattgggtttagatatttcagtggttattgattttgattgctctgtgatagtttcatattaacattggtcaattttgagatttgggtatctctctgtatctgtttttaggtgaggattgattggctttctccttcattggttatctgaagttgtgtgtgttttttttttccttagtgaaagagatttgactgaagtttccgtgactctccgctagatgctgtagtcttttctctttctgttttgttcttctcaaatagaataatctgttttctttattatacaggtttatataattttccagttgattactcctacttttcaaagtgtacagatgatactacagtcttttcaatgtttaagaatctttgaagattaaaaataaaacaaaatctacttgtttatggttattgggtattatcacacggtttcatgaaaattcaaaatgttcagtttaatgattccatttgaagtggtgtgctttccttgaaattgtataaacagaagagatctgtctcccttcccattaaaaaaagaagatggagagcctattttacggtggaattaagcccaaactggttctctacgaatctctgtggttggttgactggaataattgctatgctaatttgagtgtaaaatatggcacataatatgttgccattgtctttcattaccacatgaacaaatggttgatggtgctgtttgtgttctttcccagcctctgtggcagtacaagcattcactggagcctat

SEQ ID NO: 70536 - DNA, 566 bp, Prunus persica
  Intron number 2 from transcript ppb020290m (locus ppb02029 0m.g) derived from phytozome v7.0 (chr-ID scaffold_6; pos 4024861 to 4025426)
tctcgttcgcgactgcttcttcgaatcttgaccaggtaagttttctggtctctcttattccttcttcccctttgggtcaagttcgaatcttgacccaggtagtgaaagtttgggtatagccgtttgtgtggttttgcaatggttattgtcagagtctcttattccttcttcccctttgggtcaagttcaaatcttgacccaggtagtgaaagtttgggtatagctgtttgtgtggttttgagtttgttattgtcaaagctctggttgttgtcaaagtctgggtatagctctggttattgttatcataaactctctctcttcacaaatcatgcgatcataacagaattaatggtttgaaattgttctgaatgatctggaatagtatgtttcttttaagccctctcgtgtcaagcaaatggatttttgtcattcatcttgttttctcatggtagagcacaaagttgcatttagtttcctacaattttcacatcatcactagctgaattattttttaattgtaaattgtttcaggtggcggacaatttctatagacccaatttgaagaa

SEQ ID NO: 70537 - DNA, 912 bp, Prunus persica
  Intron number 2 from transcript ppa011959m (locus ppa01195 9m.g) derived from phytozome v7.0 (chr-ID scaffold_1; pos 34090438 to 34091349 reverse strand)
cagcttcaaaggtttagcattttccctcttatatagttcgcttttccatttttctggatctcgtcttgggtagacccagtttgtactgatcattacaatctctatatactgaattgctataccagttaatctttctcatattttttatttcttcctttttatgtgtttatactttcgttggtatgaaggtgctattacccatgctaagtcaatacaaagtctactaaaattaaaggggatagctggttttatatgctttatgtggaggcactaggtaaattttatgcttcatgcggccttaggctgcaggtggtaactcttccaatttaagctaagtagctttatgcagtgctaggcccaccggattttaacatcatgatgtcaactgtaatctagctgaacatgcgtttgccatatttcttttatttgtggatccttatcttggatcattttatgggtagcaggatttgttcaggatgagggcaatgggctggatgtcaaatattgttgctagtcataattttagtcgaactataaggttgctgtgctgatagtagcattatgttatcatcaatgcaagcttcttgtctgaagtaatgattacagtggccagtaatgcctcttttagtacaatgcaagcttgaggtcaataataggaaatttggataatgatggccacattagtttactagaacacattctggagttttgtttttcttttgataaatttgtccacaatggaagagaatttatatcttgaaaacataatgtgtctatgatgctacattatttttattgcagtctcctaagtctgtcttagccagcctggagctagtccagcacttgtaagaatacttgattcaaatattaagttaacctttcactttgatgcaggcaggaatatttggtaat

SEQ ID NO: 70538 - DNA, 871 bp, Prunus persica
  Intron number 1 from transcript ppa026944m (locus ppa02694 4m.g) derived from phytozome v7.0 (chr-ID scaffold_7; pos 3160759 to 3161629)
aggtctggcaatagatgaagacgctggtatatttatcaagtactagagcaccgacttggcagatgactaggtatttaaattcatgggaagagagggtggcctacatcaagcatcctgctatcctgtaacatattctaggcctactttcattgtgacaaagataatgcatgaaggggatgtgcaacctcaatgccaaaaaacagaggaaaccccaaatccttatcttcagaaactagtccaagatttgtcttcgcttgagaaataacagctgagggaagtggagaagcgtcgggggtgggggaggttggaggtatggtggggctgggttaattttttgttccaacttttaatttttatgttattctattcttttatatataggattttaaaatttttaattaatttaaaaagaaagaactttttttattaactggaggccacatcagctgaaaaaatgggacctatgttgccacgtcaacatttaacggacttgttaacagtaagaatagcagatgtacctatatgtacgtttttcatgagtttgtgtatgaatttgtagagtcctacaagtttgggttccaatttgaaacgactgtcaaagtttgtagggtttatgcagttaaccctaacaaataatttactatgtattttaggttcattatctttgagtctttctatgtaaaatgattaatgttttaggttgcatgattctatctttccacatttttaagtgtattaatttgggtcttttaaatgattctgtatcaacgactacaaagggaactactttgtagggtttgaaagtaagttaacggtgaaagaaattaaagttctcattcatatgtgaagagtatttatcaggtgagtgcta

SEQ ID NO: 70539 - DNA, 690 bp, Prunus persica
  Intron number 2 from transcript ppa019798m (locus ppa01979 8m.g) derived from phytozome v7.0 (chr-ID scaffold_4; pos 5950264 to 5950953)
aggctcagctccattttaagcaactatctttctaagtaagtttcagtttgatttaaatatgtgagttcaaaattccaaaaatgaacagggagcagttgtaactatctatgttcatgattttcctataaattaaattatgaaagaagggggatttggtggaacatctaagtagtagaagaaaaactatgtttcctttctttttccctttagctagcattgtactttggaccaattttgttttttttaatcttgttctttaagaaaaaacttatgaagtattgttcatcatttgtttcattgtaaaaaaaggagatttggaaaaccaaataccagttaagtatagggtatgtccattttatgtttctaaaatgaatcatatgctattagagcccgtacatctactattaccatagaatcatagttgttttacattgtctgttggattgaccacttattcaaataggtttcaattcattttttggcatgctacgtgctatgtccactgttttttgcctaagcactaaaacgagcaagtacgtagtgtttccttgtgaacaaattcttaaatgcgtatgtgtgtgtgctttctatgcattattgaagtttttattgttagtgtgtttatgggcttgtattgtttctagttatgactttatttgtatgtcttgatcctgcttgtgcatcatagat

SEQ ID NO: 70540 - DNA, 717 bp, Prunus persica
  Intron number 1 from transcript ppa000601m (locus ppa00060 1m.g) derived from phytozome v7.0 (chr-ID scaffold_2; pos 26446571 to 26447287 reverse strand)
tcgctgccttctacggcaccggatctaaggaggaggtgagggcttcttgctcctttctcgctctactctctgtttcctttccgaccaagtgtggccaatttgctactgcaatcgaggttttgggcccatagggtttaagcctgccttacgagacctttacttagataccttgtgctttctgtttggttttcaagacgttatgaaaattgaagctctctcagtcttagggtttaacacttgaaagccgcttttatttttttattttttattttattttaaaactttagacgcaatcaggacttagcttcgatgtctttctctgggaacagttagcttttgatggatttctgaacattacatatctgcctattttgtggtcttctggtactgtgattaagaagagagatttttactgattggttgatggtgtcgtaaatttgtatgttccgcttaaataatttcaaaaagctagaaaaaatgggttttgtatcctttcacattcttagctttacaggaattgttatttttattttaacctactaatccaagcaacttttgttattcttagcgtaggttttgtatttgagtaatcgacgtgttggtaatattctgggctgtaatatagttttttcaagtagtttattttctaagagtatttttcccccaaatgttggcgatgcagaggacagctgcagaccatatattgcgggacttgca

SEQ ID NO: 70541 - DNA, 933 bp, Prunus persica
  Intron number 3 from transcript ppa013774m (locus ppa01377 4m.g) derived from phytozome v7.0 (chr-ID scaffold_5; pos 15042113 to 15043045 reverse strand)
ttcttaccgttgtcgttgttgctagtacgtagtgcttttgcttatggattatgaatattttatctttttcactagcttttcacaaatttaatttaccatgatacttgtgattagacttacctataaaattcctctgactttctgaatggtcttggttgcatgaagccttggtcttgtggaatctttgttgtaaataaaaaaaatgttaccagcagttttgttataatgtttatgggttagttgttttcctagtctttgtctaacctatatatgatcaattgattcgattgcatttattgtctggttagtaaactctgcagtaaaaccagaaaacttccagcatgcataaaaataaagagggaggtggggtggggtggggtggggggtgttacattttcttgcccttgtagcttaagcttagaacttgcattcccctcaacaatgacatttgctttttaggggttgcgaagtgtgtttatattcacacatgcacattcacacacttatccacctccaaactagggagagaatctgttgtttttatattaatggaaaaatatatataaatactttgtcctatctgtgtaagtggccttgacaacaatgaagaatagcatagcaatcaggatcatcatgacctgatcagagaaccaaactagtgttggtcagctgttcaaatttgttttgactaataatcttgtgttcattgatttcaaccattccgtttctacctccaagataggttgaataatggaatgcattttatctgttaattgaagttaatatggtatcttgtgttggctaacgtgattttatatgtgtgtatttgtttggttatacaaatgggacaatatcaaggaattgctgtcttgttttgcttgttacagtgttccaagtgctcatgtgtctatgatgtttattcaggctgctgct

SEQ ID NO: 70542 - DNA, 421 bp, Prunus persica
  Intron number 1 from transcript ppa009415m (locus ppa00941 5m.g) derived from phytozome v7.0 (chr-ID scaffold_4; pos 21154077 to 21154497 reverse strand)
ctgacactttctccagaaaaatgtatgagtgctctctcctaatatatttttcatttgggttttcttttctgttttgtttggttgctaagaaaatggtggattaaaaagctgccgatctctcgtttatgtgtttgtgatttacggttctggattcaacaatatttgacattttcctcttatttttattattcttcatgtaaatattttattcattcattgttgttttgtttggttgctgagcaaattgtggcaactaatggaaatggaccatccatttgatcgcagagagaattaaaagaaagtttgaagtcaactagatactgatttaattttcattttaggtgtataatttaaatttcattctgattttgattaattttccgtaaaatattatgcaggaacactgtgcgtgcgtctaaca

SEQ ID NO: 70543 - DNA, 1033 bp, Prunus persica
  Intron number 1 from transcript ppa003251m (locus ppa00325 1m.g) derived from phytozome v7.0 (chr-ID scaffold_1; pos 18032179 to 18033211 reverse strand)
ttcgcgacaagtctcaaatcatcactggtaaaatattttcggagtttcattgttcatttgttttccttttcgtgtttgtgttcgtgtttggttggttcctgtctgagaaaatgcgagaaaattttgaaagaattggtaggcttatgactgaactggtgcaagtgcttgattccggctttaagtattaggttttgatttattcattcgttttctagttttcattaaaagggttgctatgaaaaatgcaatttagaataaaagttgaacagagttcgaaagtattaggagtttttcaacattaaaagtaggtagaaataagtattagtgggatttagagattataaccgtgaaaaacaaaaaagataaaatctctcaagaattatgggaaaccagactgaaggaatggaaaaataaacctaaaattaatgtacaaatgtcgtatttgtcaaaacgtctgatttacaaatgttgtatttgtcaaaacgtctgattcatacctcaatgccaatgttttactcaggtagtgtttggttgctgagtgaccattagaatggaatccaaatgggaatgaaatgtggacatggaaagaggataaattgagaattggtacaaaaggtcctttaatatcatcttacccttgattatttgcaatcttttcaaaatttctttaacttaaaatccctaaaaagctatctaccataaaccggctaatggccagatgaaccccactttggtcatggaacaggagagaagaaaattataagttttcattttttattttttttttccatttaagaaataagggtaaaatagttatgatgaaatttgatgggtatataatctgagcagtaattgatagcccttgcctttagctatatgggtaacttctctcccttgatatctggttgccttggttaggagatttttatcatttcccataatatcaaaacttgagtttcgaaattaaatgtgtatattatgaccgacatctcttgcagctatcgaaggttcatctgtagtgttctatttcgat

SEQ ID NO: 70544 - DNA, 506 bp, Prunus persica
  Intron number 2 from transcript ppa006956m (locus ppa00695 6m.g) derived from phytozome v7.0 (chr-ID scaffold_1; pos 38355310 to 38355815 reverse strand)
tttaccagcacaatttcggccaccgtccctatcaggttcttttctcttttgcagttcgatttttgagtccaaattgaagctgttttattttacagtatatagatgtaagtaaatgtttgtgttgtttgtttgaccactgaaggatcaaaagtttgtatatttatggttacccaatttatatttcttgcatttattctcttagatgctcaaagtttggagtttttgaggtttttggtctttgtcttccaacttgctctatattgggtcagtttggatttaaaccatttgttcaaaaatgtcctgactagtgactacctgtagtcatgcgtccaatattggggttcaaagctgcttttgccttcccattattgatgtttggattttcagcttcttagacagggtatttagtagaactacctgaattcaccttgtaccaacaaattaaataaattaatatttgtgtccgtgtagggtaatatccagagccttactgctgccgatctcga

SEQ ID NO: 70545 - DNA, 674 bp, Prunus persica
  Intron number 1 from transcript ppa009769m (locus ppa00976 9m.g) derived from phytozome v7.0 (chr-ID scaffold_8; pos 10373953 to 10374626)
gggttcggacgttagaccccattggccattttaaagtcatttcaagtaaatcaataaccacaatataataacttgaaaatgagagctctagcaaaaacaggaaaaaagaagtgaagataataataataataaaagctaggtgagcggagttgtacttacaaatgtttgttattgaggtgcatcgagattattgtttaattacagttgggttaggttttttgaagttggttttgaagggctaaagttggttaagaatgacaaaattgcattacgctaaatcccaaagcagcctaaacaaagtttcgtccttgttccctacaatgagaaacaaatgagtttattaattgcaaaagaaaaatacaataaatttgcatgaaatattcaacgtgaaaatcatgaataccaattgttatgatattttcaccaataagacgtaaagtctttggaaaattgaagagttctaaattagcaattgaaaagttactggttttatattcgactcacatagatgatgattatgatatatatttgtgattaatttgatgttttagttctaatttatttgattgtgatagtgtatctttgttgtgagtgtattgacccgttgtaagagtatcttataaatattgaaaaaaaaaggagaaggctcccgaaatagcacggtgtgcatattc

SEQ ID NO: 70546 - DNA, 960 bp, Prunus persica
  Intron number 1 from transcript ppa011694m (locus ppa01169 4m.g) derived from phytozome v7.0 (chr-ID scaffold_4; pos 5916084 to 5917043 reverse strand)
ccaaattggtctgtttttcttcttctgtacaaaaagccccctttttttttttttttttttagagcattctttctgtttaattttatacaactctgtgattctgatttgtcttgatatggtcctgtctctgtaatttcatttgggttttagttaattttgtagttctgatcgttctgtgtatgattgaatgagaattatgatgtgggtttggtttgtttctcacggaaattgtttcgataatccattactgtcatatttttgtgataatttgagatgggtatgattggattttcggctgtgaattttggattgccaaccttccttatcgcttttgttggtctgcatgattgtgcataatattcagatgcttgccttttttttaatgacagttcatttctgggtttacgttatattccttgtgcgtttgtgggttttctttcattaattacaatgatgtaggctaagaatagttctttactttcacttttaaaccctggaaatggaaatcagatgctattatctttaacatgtaaattttgcttttgtttttatatttgtatttgtgcttgttagcattctggctgcaacaaaagtttgttatgtttcgtagctgtttagactgaagtattactcttctgtgctcttgtttatcttggtccggttctgatattcgaacccgagggtctctgagaatgataaacatactgtgactgcgcaagttgcatggctatcttggtctgtgatgtgtaccagaaaagagaatgtttggtttaaaggttgtcatttattttaaagttgtttcttgaatatacgaaattactaatttctttctacgtaggcatatgtagtttagcattatgcgacgaaatcttttatttatctgtttattgtttttctttggtttgcctttagtgatcatcagagtgatgtttgatattctgcttcaggtgcttcttgggg

SEQ ID NO: 70547 - DNA, 729 bp, Prunus persica
  Intron number 1 from transcript ppa023853m (locus ppa02385 3m.g) derived from phytozome v7.0 (chr-ID scaffold_2; pos 19069258 to 19069986 reverse strand)
tacaagctcgtcggagacaggtaacaaataaaaacgtcaaattcaaaaacactggtttttattttttatttttaggcaaactataaatgtgccttcaaacttgggaagcagagcaatagaaatagttattgaaatgtgggcacaccatagccaagtacaaaaagtttctcatacgatattatctgagttggtgagtgagtcccgggtgactcctcctcatgcatttatgtagttcatgatcatgtgtctgccagccttcacatttaagaattcttcacaacatgctctagtggtcatggaaagtgttttaaaaacaaaaaagaactgaagaacttttgtgttgcacactttcatacgtacaaatttattttacgtttttagagaggagaatgccagtatgatttttttggagtgtcaataacatgtcaagctcaaataatttttcttgttgaatctcttctcatagttttctttgttatttgagagagagaggggggatacaaacttggtccaacaaagtggagagagagaagtagctagaccaattattgtacatgaacatgatttgtccagaaatgtttgtggtgtgcaagaatcctatgcaaccaaataatgcatttttaatcttattcagtgcaaaacattgatgtggttttggaaaatggttttctaacaatacttgtatgtagctcaggtggggtcttatagctgggaggattccaggcagga

SEQ ID NO: 70548 - DNA, 966 bp, Prunus persica
  Intron number 1 from transcript ppb024158m (locus ppb02415 8m.g) derived from phytozome v7.0 (chr-ID scaffold_2; pos 12033509 to 12034474)
ggttcgggtgcgaaaatggaaacaataaatggaatttgttttattgtttattttaaacaataaatggaaatacaaatggaaggactataattccctcaacaaacaaatcacatggccccctaatcagtacttagacagaaatatagatgaaatctcaagaaatctatcggcaagttttatattgactattttaaacgagtaaaaaaattaaatcaagagacgaaataattcaagagagtaagtttgaattgcctaataatttagggggcaaaacggctaaaaattctttatataatacatataaatttcattagcagcatgcaaaacgaagattttatgtgagcattattcttgacttgatgcattgcccatggatttctgctagcaaccacatatctatctgaccatatcgtatcatattttatgaaaacgcggctttgaccgttgaccgaagtaccagagacagattgtaaagaaaaataaccccatgcggatcagagtaagacaaaaacgtaatgagacaacctcaagactccaaggatactgtgtctaattaattagtacacactaggtgttccgtaggcataaatgtacgtagtgtttatacatttctcctccgatgccattatttccccgcaaagcccacgaaattgccttttatcttcaattcagagcatgcaattggccttctcgtcaatgatcgcttggaagaaactcattgacatgtatctattaagctcctgtcagacgcggctttgacctccaagtcgtgacaatagaaatgcagcagcagcttgctagcggattgaagaagtgtgtctaaaaatttatctctccatggcaagcacttgcagattatgtgttctcgttatagtaagtgtattcttgcttggttttagtgccatgtttgtctatattctttatggtttagtgcgtataactggtacatcaattacgaagagccct

SEQ ID NO: 70549 - DNA, 1002 bp, Prunus persica
  Intron number 1 from transcript ppa008784m (locus ppa00878 4m.g) derived from phytozome v7.0 (chr-ID scaffold_1; pos 31579185 to 31580186)
cgtatccgttgtccgccaaaggcttctttctttaggtgaggaaccggaaaccacatcgtctcctccgttcaagttttttattttatgtgtgatgtttgatgttttgattccaacagtaaatctatgtttttagttgtttgaaaaggttgatgggtttcatcaatctattttgaatgttcagttgcatttttcatatgaattttcccatgttcaaactagttaacaaatctttaattgcttttatgcttggtgattcttttgtttggccctaaattttaatcgggtgacctaattgtctcttcattttatacaattctgcagcaattaagtgttcttgatggtttttcacatccatgctcttttttcccctcatttcaaatgcacaatcactattagtaagggaaaatccttttctggtactgagcgattatgggtgattcacaaacccaggttctgaaccaattctcgattacaaatcaactcgaccttgaattggtttgggttgatattcacttggttaaacatctactggaaagaacatgcaacgttttctctctccatgtgtgtgtatgagagggagagagagataaagaaaattcataatttttatttttgcaggaatgttctgttttcttttttccttaatgctgaaatattgaacaaagaaattgttttcttatttttaaaagcttactgaaagagaaaagattttgcataaattactcaatttgcagcagtttttgttttgtggattgccaaacattacaattttgtcgcctttgtttggtaacactccatataatgggaattcatacacagtcgttattctggtaataggcactgtgaaagtaatgttaatttaaaatatatggtagccatttgactttctcatactctctctttgcgaatggtttccctttttcgacctattatttatgtacttactctctcttttaattttgttcagctgaattaagtacttaggtgcagtttgactaaccc

SEQ ID NO: 70550 - DNA, 384 bp, Prunus persica
  Intron number 1 from transcript ppa004952m (locus ppa00495 2m.g) derived from phytozome v7.0 (chr-ID scaffold_5; pos 14574662 to 14575045)
ttttcgctacccattttgggaaatccaaagttcaggtacttaatttctggcacaaagttgaagtttttactcttttttctttggttggttacactgggagcttcagcatgaagctgatttcaatgaagtatgttagaggaattaatcataattaagaagattgacaatggttattagatattagctaacccactaccccttacttttggtttgttttgttttctgtggggttggagttgaataaatggtttaaaggttcaggcttttgatgtttgatctatatatgaccatgctagtctgggtttgctatctaccttttaaagatgatgtgacgttttgctacttttaggttgcggattgtggtactagagaattcacagatca

SEQ ID NO: 70551 - DNA, 437 bp, Prunus persica
  Intron number 2 from transcript ppa004952m (locus ppa00495 2m.g) derived from phytozome v7.0 (chr-ID scaffold_5; pos 14575147 to 14575583)
tgtcgctatatttgaaggactggcattttgtaaaggtacaagttagaatccactctttgttgatagggagttataactatgggcagttgaggagttagttgtggcattttaatgctaagttaaaggataagtttattggtgacttgttgctttcttcgtctttgctactgtctgcttcagatgtatgtggaatttgagtctctatgtttgataagttcatttacttgctcaaaaaaaaaaaaaacaaaacaaaacaaaacaagatgtatgttcagggcatgtcagctttgatagtctgtcaccttgcccatatcattgtgtctagtctatgtttaatatgtgaaaattttccagttcagtcgcctcacttgttctattgtcctattgtattctgatctccaggagtacccagaattcgaagcatacacaactccggt

SEQ ID NO: 70552 - DNA, 635 bp, Prunus persica
  Intron number 2 from transcript ppa018471m (locus ppa01847 1m.g) derived from phytozome v7.0 (chr-ID scaffold_6; pos 27923745 to 27924379 reverse strand)
atttccagagtattatccagtttcaagacttttaggtattccaagtttggtactttttgtgatgcacgttccttgtgtgcacaaatttggggatgttaagatcaatcagataactggaaagaaaggatgaaaatacccaaaggcaccctcagacgtcatgcttataccaactggattttgagtcggctggttcaagttgtgttgctaacatatttgcatgtgaatcaattattaagctcaggaatacgtagccttttggaaacttttgcagctaaagtttgaagtctctttattctaagatgttttactgaggctgtttctttacttccctttttttgagaggtggggggatggcaaaatacttccatagtaaaacttctgttctgtatagcttttatgacggttgttttaaacgttctttgtcgtgctttcctaggtgggtttctcttgtagacatcttgtgcttttggtttatgactccatgttttgttaataattccataattctattatataaaaatactgaagtttctttggatattatgtttctctttcttcgtctatatctctctctcatgcacacaaattttgacattcagtttcatctttgacatagggtgtgttgaagtggttgg

SEQ ID NO: 70553 - DNA, 571 bp, Prunus persica
  Intron number 1 from transcript ppa018471m (locus ppa01847 1m.g) derived from phytozome v7.0 (chr-ID scaffold_6; pos 27924474 to 27925044 reverse strand)
ggccgctcctattagaggtttgaaccttaaaacctcttaattcagttcgaactttcgatacccgtttggttttagtcgcatcatctttgccgtggaagtattaagctttgaacttttgagaatgtggtctatttgctagctgggaaagagtggaaaaggagagggtgagaatattgagtgttagaaatattttatatattgggaactgaacaagtagaaaactttaagtaagctgctaattttttagtttgtaagcatttgattttgtgcaaaagattggattttttggttaactcgctgaattgtccgctgaacgtttaaactacttagtgggatatcaatcttctctttttattctttaaaaggaaaaagtttaatgtaggattatcaagcattactgttgttaaattggttttttgctcttcaattttgatctttttgttttttttgtttttttttttggggtgctcttgttattatgattatattcattgccattataattttgaactttgagatgagcctttttctaaagccttgaatttgtattctgaagggcgcctttggattc

SEQ ID NO: 70554 - DNA, 953 bp, Prunus persica
  Intron number 2 from transcript ppa011081m (locus ppa01108 1m.g) derived from phytozome v7.0 (chr-ID scaffold_2; pos 8959880 to 8960832 reverse strand)
gctcaagcttactcgaacacatcctgaccttgcaggtacatagtgacatgtgcttctggctgaaattcttgtatttcataactgcatttttcttcccagcaatcattcttttgatttttttttttcttgtcatttgtgttctggtagctttcacgcattcataattactgagtttttttccttctctggttgtaagcttttacatctcttatcacgaactctgactaatttgactgatctttcttaaagcctttgtacttttttataatcctaaagacaattctcaaaagatataaggaaagttacttcaaactttttcaaatgaaaagggttggattgggagggcttgtattctagcttcaggagtttattgaggttcctaatttgttctttttggaaaaaaaatgtttagcaatatttaattgtgttcttaaagcacaaagctgttaatgatattttattttcaatttgagcttgacgaggtgcatctcttgctcaaacctcagagctacgtattactttgtgtgtggatctatgacctctaacagatccaattgtccaatgtatcttcattttcaggccgactgaaccaatgtattctggtaatattattcctggattatccagagggtttctgacttctggttgacaaaatcttcattgcttgcagctagaaagtactgggttttcttagcgattctcatttacctagtgtgcctgcattgaactgcttaaagaagctaatgaatgtagctacttcagtgtgtatgtaacatgtatcttagattggttattcgtcgtgaatttatgatgcatattattataagttcaggaaacaacttgtgatttctcatattgtttcaagtgcagtcattgttagatcaacgttagcttcttgatatacgagttctgtctcaggtttaaagggacagtcaaataagaggctgatttca

SEQ ID NO: 70555 - DNA, 998 bp, Prunus persica
  Intron number 5 from transcript ppa011702m (locus ppa01170 2m.g) derived from phytozome v7.0 (chr-ID scaffold_2; pos 19548128 to 19549125 reverse strand)
gatcaaatcccgaccccataaaacttcaggtgaggtcaggaccctttctataatagagggaaaggaaaatgcatgtatcataatctgaattcatactttaaatatgttggaatttgttgcagcaactgctaaatctaaattttgagtcagcagatactagaatgtaaatggtacttcggattcggaagtcctagtttccatgttcgattgtatgtttgagataagtttctggatgaaatggtaattatgaccaaaatgttgttgaaggaatcaaagatcaagactggaaaaaggctttaacagttcgaaattgataattcttttgatactcggttgacaaatagatagtatcaggggtagattttagcagttctaaattgccattgcatagactcggtgttaaacataaattttctaaattcagttgtctatggatagaaacttctaaatccagtttgaaacacaccacataatcttctctcccaacagaggaaagaagatataatcaagggcctaccatagtgctaacatgatgcattggtgtttgcttgtaagatttccactggactttggataatgatttatcatgtaacttctagagagggacatgttctaggccaaagacagtaaaattgggctaagcatggtgctggagtgagatgatttttggcatggtgccactttgttgactcccttgcatagcaaggatgaacaatgtttgtcaaaaagagatgtcacagttgaacatgttcctgagatgcggggatggaaggtgtatatattagaagattgagtgctgttggagatcagatagtttggaaacataattaattaaatatttaacgaattgaagtaaccttgccatgatctttgacctcaagtggatgtttaaaaaatgtaatacagcatctattttgctattattcatgctgtaatgttctcctctcaaattgcctgctgcagcaaagagacaaatcgtgggcttccagttctcttaa

SEQ ID NO: 70556 - DNA, 930 bp, Prunus persica
  Intron number 2 from transcript ppb024299m (locus ppb02429 9m.g) derived from phytozome v7.0 (chr-ID scaffold_5; pos 8048552 to 8049481 reverse strand)
cgagtaagctcaatttctctttgagaaagacatccaaattattgtctttgagacatgagagactgagagaggaagaacttggaaccttaaatgtaaaccgaaaatgaatgaaagcgacaaatttatagaataaatttttaaaaccaacggcggtccttacaaaaaaaccgccgtttaaattgtaaaatcaacgtcggtattatcgacgtatattacagaaatccacgtcggtaaattaataaaaacgacgtgttaaataatctaccatgacgcgagttattacttatgtactttaatttttgagtttactacgacggtacctacaaactactgtcgtatttatttatcacgtccgaaattaaatgtaccgtcgtattttgtaatttatacgtcgtagttatatgtaaccgccgtattatttttttgaaatggttttatatgtaagaaacttttcgtctacttgacttacacattcgttgtttttatattcttattttatttaaatctgtcatccaaaaaagaaactttacatattgcagaatattaatttccttcgttttaaatttcctccggaaaaaaaactctatttataacgcactgtaattgaaaaataaactgaaaggtcacgggaaaaaaaattctattcataatttaaaaattaaaatccacgtcggttatattaaacctaacgacgttaaattaaatgattccacgtcgaacggaaaatattgcgtcgtgttagttaaaaacgacgtagttaaatgtaaccgccgtattatttttttgaaatggttttatatgtaagcaacttttcgacttacacatgcactgtttccaaacccgattaaaaatttcaatctcccagagaaaccttttcgtcttttttccttgtcagagcattgtcagagtttctcatcgtcttcctctcgt

SEQ ID NO: 70557 - DNA, 493 bp, Prunus persica
  Intron number 1 from transcript ppa002968m (locus ppa00296 8m.g) derived from phytozome v7.0 (chr-ID scaffold_3; pos 20937593 to 20938085 reverse strand)
cctgtacgtaacgcattaattcatggttgttagattttttgtttatttttgctgcttagtataattttgttgctaagtaaattgtcaagtatcttacttcagttactgttttgggttctggaaaaagcatacctctctatagcaattttaataaaatttaataacttgttaataattttgcggtattcgtgtgaagaaaaaaaattgcacctttttgtataaccaatgagttgatctggactctgtaagcaaatacttgaaggttgttgtttctaattttgtgttttcacttggcatagagcatgggttataaaaatgttaacttttttgtgccaagtgtatgttattttacccttgctggcgtgcatactaataatcaatagagatgcgtttactgatcttcttgtcttgtttgtatttctgttcatttgaattgatgacctttcacgttctcacaggtctgtgatttacagttctcggagctgataccttg

SEQ ID NO: 70558 - DNA, 755 bp, Prunus persica
  Intron number 1 from transcript ppa019135m (locus ppa01913 5m.g) derived from phytozome v7.0 (chr-ID scaffold_4; pos 11031879 to 11032633)
gaggaaagtatccaagtaaactatacttttactcgaccctcttaagtttttcgtgccacaaaatacttgcagaacccttcatcggttttctagcgcaaaaaaaaacatgtccatctatatttttataccactgtgaaaatgaaaacaaaattatagtttgagattgccctgaaatgggttaacctgttatttttggatgaatgttttcctgcttcttgcttcacttgtcattttagttcttgtttgtttattgctcttctatgatttaagaagagaaaaaaaaagggattcaaactaatttgtatctacttccctctagtttttggggttccatgaagagttggtggagaccttgttacttgcaaacctaatttatgatcctatttcttagtgtttgtaggacattgacttgtcaactttggatacgcatggctgagtagattattattatcattactatttttttatacaaacgatattaggaaaatgagaaatcaaacttaaaactttgggatgcaaggataaatatttttagccacttaggctataagccgatgaatctaattttttataatatgtttaaacaaaattatttaaatataaaagtcttgaatagatgagtttcaattctacgagtgatgttgtccaaataataaaaaacttaaatatttttcacataggctggccatttttggtagcacatgtgactaataacatgcttgtattgcagcaagagcctggttaagcaagttcaa

SEQ ID NO: 70559 - DNA, 532 bp, Prunus persica
  Intron number 2 from transcript ppb024678m (locus ppb02467 8m.g) derived from phytozome v7.0 (chr-ID scaffold_1; pos 8512843 to 8513374 reverse strand)
gattagtatcagaaggtataacagtctgaaaactggttctgatctttccaaatttagtgggcacctatttcctatgttcatctgcacgctgtaagtcttgtgttcaatacttgacacattacaggatgcaatagtctcaaaagatgtatcttcaacaatcatactggtggatgcgttaagttctcttggggtgctgagatcaattttccatgcatttaataggagcattgcagaagtgcgtttgtgaccacctttcacttttgtacgatagaatttatcgtcagcgaaattattatgatcattcatcactacactttgttattatttgggaaatactttgtcattatttgattaatttgaatgtgcaatttataagtactagacgccaatatctaataagttgctgttattgaacaacgtagggcacatatgacactgaatggatcacacttgacttaaaatgatttgatctttgctgacggaagacaatcttgctcaggcattttgttctgtcagagagttgcaacctgca

SEQ ID NO: 70560 - DNA, 743 bp, Prunus persica
  Intron number 1 from transcript ppa004885m (locus ppa00488 5m.g) derived from phytozome v7.0 (chr-ID scaffold_2; pos 10508624 to 10509366)
ggtcagccagtttccttgtcatcaccgatcaccaggtttgctttttcttttctttcctctgtttgtgcaaaaaaaatttctttggagtttcctgtcgttgaattataatcggtcgaggccatgacgccttttggcttctctagggttcagaaattggggctgtcttatgggatgtgactgtattgattgggtagatatcttggcaattccatcctttgttgttttcctaaatctcttatctgtttcagctttgcatgatttatgtctttcctaattcttcttctatgacttattaatgatttgcatgaattgcaaattatactttcttgcttcctctgcatctttgtctcgcgctatatggattcttcaaaattccggcctacaattgaatatgtttagcattttaggatgataactgaaaattgtaacgatcgaagatattttttcgtttttcttttttaagttatatggtctttcctggatccaatcccatgcttttgggatatgcaacattatttggtcaagttgaatgcttttacttttttccccttcgttgcttctcttatactctctgaaagttaagctagttgcgtcttagttcctctagaatattgcacatatggttgctttgaatgtactatgtctaacttgtcataaacatgcttctttattcatctcgggtttcctttggttctttggaactttcttgactgagatggatgcttaaaactcaggttgcttct

SEQ ID NO: 70561 - DNA, 1021 bp, Prunus persica
  Intron number 1 from transcript ppa013579m (locus ppa01357 9m.g) derived from phytozome v7.0 (chr-ID scaffold_3; pos 19460514 to 19461534)
gcaatcgcggttgaggttgaaaggacaagtctttggttagtagatttgttaaattcttgtgattttagtttgtgggtttggtttttaggagccattcgggctctcccatgtttcatacgatgtttcggtcctgttttttcaaatgggtttgtttggttttgtttttgtgtctctgcttctttggatttctgttcttttattgaattggttatctagtacaagttatcaagttgtaaattaacttcatcttttttgtctgtgcttttttggacataccatagttgagtgaatgtttgtgtatcattagctcccaaacttgataacttacaagtttaatgtagacttgttattggagatacggttggtttttcagattgaagtacttgaaatttgacccttcatttcgaatgctacctccacaaataaattgggaaagatgtgagtgaagaaatataataattaagaacatgaagtcatcgttctctaagtttctcttcatatgaataatggaacatgatatttttcctgttctgcaaaaaaagttgtttcttcttgcataactatgatgattctctgctgttacccgagcttgtttatcaagagttctatttccttgttcaaaagagtatatacattattggtatacaatccgttaaggtaatccgtgattggttatatttatcctttctgtacttcaattttatcctgggagtaggaaacccgtgtattgttcctaattagagaaaaagaaacatgcatgtcaagttcctgtcatctgtttttaaggtaccttaaataaagttgtgagaggaattcagtgttaacaaattgtatgtatttaacctttttcacacctcaactgtatatgcattcatattgtgcatttgctttattgtttgaaaaggttaaaccttgtgcatcttattaaaagaaaaaaacttatttgatgcttaccactgatgcttaccgctgcttagtctgcttcattttttatcttcaggtcttgttgaacactttggtt

SEQ ID NO: 70562 - DNA, 866 bp, Prunus persica
  Intron number 1 from transcript ppa015515m (locus ppa01551 5m.g) derived from phytozome v7.0 (chr-ID scaffold_1; pos 14500310 to 14501175)
acaaagagaacaactccatcgaaaaggtataaggaaatcgtagtgaataaaaaaaatatatatctagaatattttcagaagctacaagcaagagaataaaaaactaaaagatccaaaaaatcaaatatttagactaaaacatttatccaatgcgtcaatcacaatttgatcctctacattcactactaatgattagcaaagagaatttgagcaattaataattaaagggtattttaggaataatggtaagtgtaaagataggattgtgttttttcaaatttacatggtgaatgggaagataaggtgtgtggaaaaataagacatggagtggaaatagcagcactcatcttcatttatgatgaatattatgagggcaaaaatgtaaaatacttgtatgtgtttggataatttcatttggatttgtggcatggaaaatttatgagtttccagcactacgaactagatcgtcacaagtcataaatatgagattggtgttggccgcacaacgatgtgtggtttcctgtaatcgttgatttatgaggtgtgctagcgtggttcactccacatttcctgaatacataaattttcaaattcaaaaatatacaaaaatcttactttttaaagttatcagagtaagtgacttgttcatacattatactcttctacataatttaggtagaaaataatggacgtcgtttattttttatttttctataaataataataataatatacgattattttgatgaaaataatgtactaaacttgggaaaataaaagctcgtccttttataaaaaaaaaagtaataaaatgtggatggtgcttggaagccagggaccacggagggtggcgttggtgtggttgt

SEQ ID NO: 70563 - DNA, 602 bp, Prunus persica
  Intron number 2 from transcript ppa019178m (locus ppa01917 8m.g) derived from phytozome v7.0 (chr-ID scaffold_5; pos 13888676 to 13889277)
acaagattagccccaacccaaactgcgcaaagtacgtatcaaaaaccccacagtgctcaactagggttgcctcaaaatttaatctaatttgactgccaaccattgcattttgatgtaacggttttatgtcatcgaaactccaaattaatttggtttgccaccaagtgcttcttcaaaaattactttcaaagtaacgcttctataatttataagcgcttttaacttaatttgccaaacgttttgtcgttatttgatagcggttttagtcattttcagaaacactcgaagaatccactaggtttataatcaattccgagtatataaatttgggttggcccattttatttttgggtgagcgttggtccatttaagacaagtgttttattaatagcccaaactccaatacgcagctgaaaacattaattattggacacaccgcagtgatctagaaagaaaaagatgcgctgagctggcagctccatatctaccacgtgtgaaagtagtagatggcttccggcgtcatgtggcggtaaaaagtcaaacgcaacacgtggtcgacaccgccagttactttctcaaattggccacaacagttttctcgt

SEQ ID NO: 70564 - DNA, 665 bp, Prunus persica
  Intron number 1 from transcript ppa023094m (locus ppa02309 4m.g) derived from phytozome v7.0 (chr-ID scaffold_2; pos 15645719 to 15646383 reverse strand)
caataactgctcttctcaagtaagtattattatttttattttctttatacaagcgatattttactttaatataatctaatataaattactgggagggagattcgaactcaagtaagtattattaactttacaaaatttgtaaatttttggggtatgattcttttgatggggatatgttatctactctgttgtggaactcaaattttgtccacagaggagatgttcaatcaatcccatgcaaagcagtcaagattttacttattttcatataatctaaatctttagctttattttatgtttatatttccttggatgtctttcacttattttacttgatgattatatttcttctcaccttaatttagttttatgtttttggaaaactgatcaaatttcccatgcaaatttcctttagctgacttgatgaaatgaagggagggaaaaactgtgttcattaatgattgcttacacaagcttaacttaaacattaataaattatttgaatgatatccagaataaaagaatactgtgttcataattaacaaatcacaaagtgaaagcagattttaataaattctttttgttcctttgtgattaaggatttgattaacttcttgttgagacttgaatgtttgtgatatcatatttccatcttgaccagtttt

SEQ ID NO: 70565 - DNA, 958 bp, Prunus persica
  Intron number 1 from transcript ppa007748m (locus ppa00774 8m.g) derived from phytozome v7.0 (chr-ID scaffold_8; pos 3887486 to 3888443)
actgctttgttcaggtaacatttcgtttcaactgtatatatttgaaccccttgatcaaatggctggttgctaatctttaatgggttagtggtaggcttccatcttttttgatcaagttttttttatgtttctctctgctaaattcataggacagggcatcgttttcttgtcaaatatcagacttttcctcaaaacctggaccgcacattttaaagtaaaattatttgtctttggtcagtttaggggtttttcattagccccattttaccgacagaataaaaatatattgatgtcgattgacaatatcacaacataacattttttttcaaaatacaaacttatatatgccgaaagtaatttgggcatcatccaaagaaatgccaaaatgaacaaaatgcctgctactgcccacagaggaagttcaacttattggcaattatttgacttgagctgcccctctcaaactagttcttgaaccactttaatctttgatgtgttaattaaagtagctagtactgctagttgaattcttttgtcagtcactcattttctaatgaatttttttaacttaaaaagcatggaccacttattttcttaggaagttaatacagtgttgggcaagttccttgcaccgaagttcgaattactttttcagaccaaaaaaaaaagttcggattactttactcataaattctattaatttagagtagtagattatcacttatatatataagttaatacagtattaacaacgcatttgtgctcactccttaatttaatttcgtaatccaaactggtcaaattttatgttttcttcattttattgacatacacatattgtgttaatgagttgttaatatcgtattaatttactaacttgttagcgcatgagcataaatacatttggtaaagagtttgctgtaaatctaacaaaagaaagttgaataataatgtaggg

SEQ ID NO: 70566 - DNA, 311 bp, Prunus persica
  Intron number 5 from transcript ppa010661m (locus ppa01066 1m.g) derived from phytozome v7.0 (chr-ID scaffold_7; pos 22544309 to 22544619 reverse strand)
tttcctgtattcatttctctctctctctctctctctccccctctctcttgctccgtgtgtatgtgtgtgtttctattctctgttcttcgttaatattcccttcttccaatgaaccatctgatatttaaaggacaccctgtttttatccctttacacattaaatttttttccacttttattgaaattttgtttgttaaaatgttttgaatttcaacatttatcttttttacatagtttctgatagttctattgaaaacgaattttattttctggcagatcagtgatcatattggtggacccccttacaaagt

SEQ ID NO: 70567 - DNA, 875 bp, Prunus persica
  Intron number 1 from transcript ppa007538m (locus ppa00753 8m.g) derived from phytozome v7.0 (chr-ID scaffold_10; pos 22174 to 23048)
tgcttttaggcgccatttccggcttttacccacaggctcgtgaactctaagcctttttcttttccctttgctttccgtgttgtccccttccttggttttatttgtttcctatccgatctcttttgtattcttagtttaccttgaatcttttaactgatttcaatttgcagagctcctttctttcattttcttgctattctcagtttccctttgaaattatatgatgaattcctgtttactgagtctgacaatatgaaatgggatttagtgtatcggatccaaagtagctctgttttgttcagtctcaaactgggccgattgcgtaattatgacctgaggtagcgacttgaataacgtaatgattcccctttatgcactcttgcaaaacaatccaacgactgatcctatggaaactaagatttctcatatatatatatagagagtgagcttcagttgagcaatccctcaaataagcttattacgcatactatgagtaatacataaagatcaactaactgatgaagtgagagagttgacaaaaacgtcaaatgctattcttcattgtaaatatactagctactatagcatgtgggcaagggatttgatttttagggtagagcttcctagaacctcatatactcagttgggaaatggaaattctcttccctgctgcttgtgtgtgttaatgtctaaaatcagtagttgaggccaatttaatcttcttccgtgtttatgtcaattggttggataacttgttttctctacgttcattttagaagtcattattgaacctaatggttgctgaccagaaagaaaactaacggttgatcatctccacagttcattgcagccaaaccagttaccaagagtaagct

SEQ ID NO: 70568 - DNA, 793 bp, Prunus persica
  Intron number 1 from transcript ppa009660m (locus ppa00966 0m.g) derived from phytozome v7.0 (chr-ID scaffold_7; pos 8140776 to 8141568)
ggaattaaggttttcccgaaaaatcatcaggtacatgtctctttatggtcatagtcaaagtcaatgcatttatatcatggaacatatatataaagccatttttccattatggatagctggccacggcagtgaggctgtcagtttcttgtgttagttgttaattggtgctccctcttgctgagtttgtttggggctgccccattctttgtagctggttcgtttttttcattttcaatatattcattgatttgcccaataaaaattgaacctttatttgttgttatttgctgaatgtggcacaaatgaaaaacaaatagagttaggagatgggttgtaaagccagagcaattacaagggaactgcagaaaagcaattacaaagggactgtaaaaaaaccaagacagtagctctaacgggaaaggaagatagtttcgtgtggcaattttcgctatatgaatatgttttacagattatgcatccaaatatttgcaaatgtttgtatttttcattaatgtgatattgctatatatttgtttgctggaaaggaaaagaaggcgaatatgtagtttcaatgtactaaatccagtcatgttcacctacattgctgcaagagacaagaagtaccctattcttcaattgctggacaaaacaaattatttactcatatattaacaaacttggatttaattagtttttgtactgcttccatgttattatattactcttatagttccccttttcctttctctttatcttttccattaacatcatggacaggtagttgaagagtgtg

SEQ ID NO: 70569 - DNA, 513 bp, Prunus persica
  Intron number 3 from transcript ppa011659m (locus ppa01165 9m.g) derived from phytozome v7.0 (chr-ID scaffold_1; pos 1018755 to 1019267)
aacaaaaggttcgtttttttcttctttatatttgtttatttccctaatcaaagtcatagatctatgtagcccaatgtgatttatcatttcccagctctttttcgttattagatgtagccatttagttagattttattcatttatgtaaataacaatgattaaatcttgttactttgacaacttttttgcatcgttttgatgctggaatgcattatgtatttccatttcttttgaatctattggaatttttatttgcaattgtaatatttgagctgattgtattggcacatcaatatttgaattataaaccttttactccagtggtaagtgatgtgggctagagaatagggaccctatgttatttttcatcttcatattactgtatgatactgggttataaattggcaagcgagttcattattgggtgcacacgagatcactatttagtgtacatgggtctaatttagccacactgcagggctggtgagctatctgccgctgagctcgacaacc

SEQ ID NO: 70570 - DNA, 274 bp, Prunus persica
  Intron number 3 from transcript ppa011833m (locus ppa01183 3m.g) derived from phytozome v7.0 (chr-ID scaffold_2; pos 18405317 to 18405590 reverse strand)
caactgcacggagcacctgtgtatttctatgtccgtatatcttctcactccaacttctctttttgttacatattatagtttgctcatcattgtgtggctgactgtttaggactcatagtggaaataattgtatcacataatattaggagagtggaaaattgtgcttgtttctcctaatcaaattgtggtctattatgcgtattaagatttcattctctttttaaaactcttttcttcagtgtccaccagttttggaagagcaagagtccttaag

SEQ ID NO: 70571 - DNA, 574 bp, Prunus persica
  Intron number 2 from transcript ppa011833m (locus ppa01183 3m.g) derived from phytozome v7.0 (chr-ID scaffold_2; pos 18405681 to 18406254 reverse strand)
tatctgtttgtattattcattttagcaaaggaaaggtattgaggattctgtctacaggtcatatttttgttctctgctggaaatactataagttaggtgattgtatatgtaacatcaaagaatggaatatgttttgaggatttgaattcgaagtgcaacaccagcactaatttcaagtacacatgcttcgaaatttcatatctatcatggtttctattgctgtaattcatagcatgagatttctggaatgatagcatcatgggtgtagcttctattttgttggctggatttggttcctctgtctataattttgctgctgacttctttacgatatttttctgcctgtttgtggccgtattttctatctgtcaactcttatgtcttcttcttacctcttttgagggttattaaatatgtttaagcactttgttgtgactttttttcggttttagtaacataatatcattttagttttgtagtatataatctccttaactcataggaacatattagttcttttgaatctatagcatttgactctccagtcgcctatgatgccaaataacaggaagct

SEQ ID NO: 70572 - DNA, 833 bp, Prunus persica
  Intron number 1 from transcript ppb017785m (locus ppb01778 5m.g) derived from phytozome v7.0 (chr-ID scaffold_8; pos 21448968 to 21449800)
gcaacatttttctcagacgtgatttacgcccactggtgaaattaaaattaaaattaatctccaaattagtttcaaactaattaattgtgtgttattatttttcttcactaattactattgttaattgtttgaacagatctctggtttcggtcgagctacctggcttcatctgaagcaattaacaaagccaatcaacaacaaaaagtacgcatatagcttcttaattattataattaacccatgcatgatcatgttttacttgttatttatatattaatgtttgcaattggtaggtgttcacttcgggattatttagacctcgaatcaattgctctagtaaaatccgacatcctatcctatggtgtcttgcttttgaggctgttttgcaaaacaagcgtgccacaggacgacaaaactctgcttgactgggttagttgttctaaacctaatgcctaattaaataataacagttgatgaatatgatacatatatatatatatatgtgtgtgtgtgtgtatgtatatgataggcccgtccactgttgatgaagagagcattccatgaattactagatgaagactgggaggatgtagacatgcatgaaatgtttagagtcatgtgcaccgcctttcagtgcacaatgccttgtccagatttgagaccttgcacgagcgaggtaacaactccatcgatctcattaattgttaaacttaattttgctacccaagagagttgcacttgcaggcagttgctgataaatttttgttttttgttttctctctctctatttattttcaggctctatcttatcttaaaggagaaattttttgtga

SEQ ID NO: 70573 - DNA, 743 bp, Prunus persica
  Intron number 2 from transcript ppa016771m (locus ppa01677 1m.g) derived from phytozome v7.0 (chr-ID scaffold_3; pos 19648435 to 19649177)
gaaacaggtacctacagctacccttctgagatccccatgtagttctatttttgttatgatctatacggttgggtttttttttttttctgtcggaattcaattatgtgtgtccaatgccatgcacatctggagacaggcccatggtactcacatgctatgatagatgcttacgtagggtccaggccaagcctcatctggggccatgacccacgatgttatccactgtagtcacatttggccacaaaactcaacgaacttaaatgaataatgaaaataattgggatattatcttatgaaaacaattttaataaattgagattggaaagagaagataggagaaagcaacaatgttgttaattgagtgaatcctctctataagcgggttaggctagttggccaaaataatgaactctctgctcttacatttattttcgaatcccccttcttgtaaattagagtaatgtcggagaattacattttaaatatcatttgtgatattgggaaaacaaattcaaaatgattacattcccaaaaaggctttgttttttggggaggcatggggtaaaaagcatttggtccagttttcagcaaagtaccccaagtttagtttatggtagtgggtttaggaatatataccataataatagcattgtaccgcaaaaattcatggacctttctgtgtgtgtattcttcaatgctttctttcaggtcccaatctattgggtagctcaactagcaggatc

SEQ ID NO: 70574 - DNA, 919 bp, Prunus persica
  Intron number 3 from transcript ppa006654m (locus ppa00665 4m.g) derived from phytozome v7.0 (chr-ID scaffold_3; pos 20105231 to 20106149)
gctttcacgtatttctctctctctaaattttctttttagagaatagacaacattcaagttttctgtttttggtggaaaacgagttaaagttttgttttttcactaggattgtctttactattatattttttctttaaaaaaaaaagtggcactcgttttcttgatgcataaatttctcaatacagtttgtattgggatgcataaattggcatctgtgaatattcatcgaattgaatatgaggatgttataaacatttacacacattttttttttaaaatgaaaaaggaaataaatttttcttatttaaagtttaacataattgttcttacttagaatgttgaagttaagctggtctctatggcaatactaatgtgttgttggtcgtcaatgtacatgggtaatgctaaaaaccagaccaagtcgccaagcttttttttttttttttaatgaaaaaggaaataaatttttcttatttaaagtttaacataattgttcttacttagaatgttgaagttaagctggtctctatggcaatactaaatgtgttgttggtcgtcaatgtacatgggtaatgctaaaacccagaccaagacgccaagctttttaatttatttcctgacatgattattcaaatccgcccctatcacgaatcacaaccaatttatgaagtggcacctgacactttatcttcttttattggtcacataaccaaatactggatttgaaatcaacataaatttgatgatcttatttcttctcccaaccctctcaaatggacaaaaaaggttcgcaagaatcactttttatagaatagtttagaagtttttgaaagtttatcacatttttctaatgtaattttgatgctgataaattttgtctgttatgcagtcaagaataaagggcagaaggtgaacttgg

SEQ ID NO: 70575 - DNA, 705 bp, Prunus persica
  Intron number 1 from transcript ppa002673m (locus ppa00267 3m.g) derived from phytozome v7.0 (chr-ID scaffold_1; pos 39174021 to 39174725)
tcaaagctccttggtttcgctggtaagctttcagctttttcatgtttacgtgttaagtttcaagattgttgacttactatatttgggggtttgtttgaaatttgtggtttcaaggctgtttaccttaaatagttgtagatcagagatgaaattttgtgacttgacatgatctagcttgttgattagtcgggttttctggttttgttgtgaaattcgtgcatacatgattcagagtacgagttctgatttcagtttcatttttgaaatgatagtttaactgttattggtcatggatcttattttgctgtaaaaagtttaggactcttgaaggcttaagtaaaatagttgtacgtttgaaaccttgagatgggatgtgccttctggttcatgtatttaattttaggtttaatcttttcctcttttgggtgaaatttattgctttggataagttaaattaacgcgtcatggatctgatgtgagatctttaatatgaatagcttattgctttgaatgaaagtctaattgtgaattttttttttctcgtttgatattctatgcatatgtattggattggatcttcattagtttactgcaaaactgtatatagggatttgtatcatgttagataactgacgctacttgcagttacctacctgccttgtaacatattatgaatgctaatattatgttcttggttaacaggta

SEQ ID NO: 70576 - DNA, 620 bp, Prunus persica
  Intron number 2 from transcript ppa016620m (locus ppa01662 0m.g) derived from phytozome v7.0 (chr-ID scaffold_7; pos 15420865 to 15421484)
tgctgatcgacccatctctgttagagagatagtacgtatgactatcatttttgaattattatgtagagccatttgctatttgtgatggtacaaaactaaattattgtacgtcaccaatgcattcattggattctggttgaatttcccttgatatttgaattctggttgccagtacaagtgagaattattaaatatgcaactttatatatatatatatatatatatgttcttgcaaccaccaaaccaaagtaagtcaccaaagtaagttgggacacatttatatataattgtgtttgctgtccacattgtgggaagaaataaaaacacaaaagaagaaaatgaatcagattcggcatatctctacgagtaacgttggaccaacatgactccatgggatctgcgatgcctcgaaattgattatatccaaaaggggattctcttcaccaaaccagcagaggaagaacacagcaacggtttggtgcaacacctcaaagcctccctttcccttgccttgaatgtcttctacccgcttgctggccgtctggccgtgactgaaaatgaagataaaaccactacttgtatttccatcgactgcaacggggcaggatcccactttgatc

SEQ ID NO: 70577 - DNA, 630 bp, Prunus persica
  Intron number 1 from transcript ppa010046m (locus ppa00940 1m.g) derived from phytozome v7.0 (chr-ID scaffold_8; pos 7691266 to 7691895 reverse strand)
aggtttacgtcttcgacgaagtttctcctgataaggtaaagttctttcgcttctgggtggtgctcaatttgagtgtaactgtttttagacttttgcttcattctgtactggtgatttctgctttgttttctttgctatagtggtgtttagtctgatgggttcttgttttgttcttggctagaccttaaattacttgcttttctttgagaaaatgcgttttgattagtttgtgggaatcatgcagttaaagtaagttctttgagtggttcaatgtttgctgaacatcataattggtttttttatttattgtttatgcatatgggcaacctgtgttatgaattaaagtctttaggtgttaatgagaggggttgcctgagagacttgagcatctgtggttgtttttcacaggtgcaggccgtactactacttttgggcggatatgaaatcccttctggcattccttcaatggggccggttcctcttaaccagcaagtgtgtacttatatatatatatatatatatatatatatatatttatgtctaaatcatgcaaaagtttattggaatgtagtctttcagttgatgttattttctttcactttgttgcgataatgacatctcttacagggt

SEQ ID NO: 70578 - DNA, 486 bp, Prunus persica
  Intron number 1 from transcript ppa007698m (locus ppa00769 8m.g) derived from phytozome v7.0 (chr-ID scaffold_7; pos 21810850 to 21811335)
agaaagaacttgatttattcgttagtttgtttaaattaaatctctttcaacacttaatttttcatttcctatgatcttttcttcttgtggtgttgttgaaagtctacaactttatttatttcgggtctggatattttagtgggaaagtgcaaatttggttgatcaaaataataatcagagtgtcatgtaattagtttcagtggcaacgaagaatcctgttgttcaattctccaattattcatctttacaagtgctttggagaatcctttactctttaattaatttgtgtcatatttcccccacttactaattttgattagtggcatgccatggaatcagaatctgttctgcaaataagtatcgagtcttgttgatgtaaatggtttagtcttctaaagattaaatagtttctgatatttttctcaacttttcctctttctcaccttccctctttgtctttgttcattcggctactgtagacaaact

SEQ ID NO: 70579 - DNA, 777 bp, Prunus persica
  Intron number 1 from transcript ppa004958m (locus ppa00495 8m.g) derived from phytozome v7.0 (chr-ID scaffold_5; pos 630709 to 631485)
ggcatatcgacgcctgatatctcatttattcgacggtaagttcctatctcattaaattttccatttttgtgttttatacgtcttgattttttggtagagtaggcatttctgcttaggatttttcttttctttttggcgtttttgggctgtattttcttatttgttccttgtttcttttgggcttattgttttggattgattttgaggcagtttgtttatttattggttttctggtatgggtttgattttgttgttgttgtgtgattattgtgctcctgtgcatttttttggatgatggtttatagggttcccaatatgcattgaaattttcctttattctgatgtatttggtcagtgaatctttgaatgtttaaaagaaaacaggggttgtgttttgtcaattcgttgctagtggttactttttccccgttgaatgctcccgcagatcatgagaaacccacatatatgaagtgaaattttttccttcaaattttgtacctaatttgtgatttgctattagctctgttttgatcttatagaaaagaaaggggtgttttgaagaaattcgaagtctatgtttgagtattttctttttcagtttttttatcttctttgttccagaaaatgtgtcagctctgtcgagcctttttgttagaaccattgcttatttatggatgttggaaatctaaatacattatatcaagttaaatatatgactcaaagctcagcacatccattttttatttatagaacttcgaagctcagggctgtaaccac

SEQ ID NO: 70580 - DNA, 454 bp, Prunus persica
  Intron number 3 from transcript ppa011489m (locus ppa01148 9m.g) derived from phytozome v7.0 (chr-ID scaffold_6; pos 937031 to 937484)
gagtctcccgctccactaccccagcgcatcgacaagtaagaaacattaatgctttaattgaaataagaaacaaatatgctaactttccaaagcttgaactatgcaagaaatttgatgattgggattggtttgaagcagcttttgttgaactaagaacgtgtgtgttattctatttttcttttctctgaatttagaaatttaatgaggtttagcaaaagaaaaaaagagttcatgctttgaaaggtcccttcccaaaaataaataaatgagaaaattgatcaatccttgaatcatatgggacttgtgtagttggtgtttttgctgatactattagatccgggtttcaatactttattttcacacaattctcaaccagacagactatttgtgaagggaatagagccaacattgttccaagtggttatgttttgattgcaggaattcagcttcgccg

SEQ ID NO: 70581 - DNA, 554 bp, Prunus persica
  Intron number 1 from transcript ppa005804m (locus ppa00580 4m.g) derived from phytozome v7.0 (chr-ID scaffold_6; pos 26539085 to 26539638 reverse strand)
gaaacgagctcgccatccaagcttcgtcttctcaggttcactaactttcctttcactttccctcattccaaacactccatatagtctttactaattcccgctccacgcttataattcgtacttcttttttgttcgttcgattttcctccgagaaaactgatagattaattatttggttttttttatcaatttattgagtcattgcggcgttcaatttgatcgcagttatttgacattttattattgtaattatgatgcctgatggtagaatcatttttacttttcgttaagtatagatctctggcgtatgattagtaatttatattttgaaaaaattcttgtctgtaggtgataaatgtttagggttttgcttatgcatttttagggttttggaagagcatgagtggcagctgtaagaatattgggtgcccataatcggatattgcaatgcaacaaatgagttactaatcatttgttatcacgacagatgctaaagattttgtccccctatctatgcagcttgctttgcatactctcaattcgtcacggtctgc

SEQ ID NO: 70582 - DNA, 232 bp, Prunus persica
  Intron number 1 from transcript ppa015154m (locus ppa01515 4m.g) derived from phytozome v7.0 (chr-ID scaffold_1; pos 44709295 to 44709526 reverse strand)
ctctgattgcttctcacatcctctcccaccacaaggtttactaatttttttcttaattttaatgttgtatcgtcgatttatgattttttctgaattgggtctttgattttgagtggtatgctgttgtgggtttatttggttttgtcttcgaaacgaaatttggaacttgggttgcttttagattgattgttgtaatttttatttattttatttatatatttttgggtgtagg

SEQ ID NO: 70583 - DNA, 999 bp, Prunus persica
  Intron number 1 from transcript ppa002461m (locus ppa00246 1m.g) derived from phytozome v7.0 (chr-ID scaffold_1; pos 39646034 to 39647032 reverse strand)
tagaatcttcgagccaattggcagaccaggtgcttactctagctctcttcctctctgccaaaatttgtgttgacaaaaaccatattttttatttaattagccaatttggaaaccaggactgcaatattctagtatgttggctgatgtcccactgtttcaagttgaattttaacggagttacacctgagcaatggtaagctgtttttaatataaacagaagaatcagcttataaatgataccagtaataacaaggctcatgaattttggatccatagtgaatttaaaatttctttataactcgaacaatgaaaatttggttggcaatataaacaaataaacgtaaccatcagtactcttctcattagcgcatttgagagctcattaggctatttagggggatttgttagtaccacaggaggaaaatgaaagaggtttattttacagggataattttgaaaggggattgattggttgcaaattgaaattttgtgctttgttaaggggtttatttgacctgaagctttcaaagttgtgattagaacctagaacaattatgagctttttgccctgataaaaaaaaccttgtttgtatgattattccttcctgatccatattggctcaacaagtaccagaaccatctattacatatgaattaatatattagaaaattaatggttgaatgctatgagctccattgatggaatttctgttgaaccaataactacagtagttgatactgcttatcaaaatggtgatgagctccggtttagttgttcagatattgatactttaaatatggctaatttggctatgatgagctacaaatgtattgtaatctacattgttattgagaaaagagatatagataatttgcgggttccatcccttcaatcctcaaatttttctgtccagtggtactttttggtccttgtttttatcaatctatgtttgattttttgcagcgtctaaaggaacctgtggacacagcaatacagaa

SEQ ID NO: 70584 - DNA, 752 bp, Prunus persica
  Intron number 3 from transcript ppa013085m (locus ppa01308 5m.g) derived from phytozome v7.0 (chr-ID scaffold_8; pos 18370989 to 18371740)
atatactttctgcttgtaaagaaacaagtggctgagtaagtattttatatgtttcggattttcaagtattttgcatcagcgttatttaataagagcatggttctgaatgattgattagttgttgagaggatttaggagtattcttctaaatggtttactgtcagatagtattctgtatgagtgacagggcaggaggctaggtgatgaatttctatctgatttgtacacgagtgtttggtcacctacagattgctcctgatggagctctagactcttatcctcttcctatcataaggccagaaaattaatcaagcatatgttatccactaatctcaacactattgaaaactctacatccagttggcattggcttagtcaatcacataggctgtgcacctccaccatttgaatcttctaaaggaaagcaaactgagttgacgtatcaaaatttgctttgttgggaatcagatagcaccaagctcatgatttagtctgacaacgtgaggcttataatggatcttgactatcttggaagttttttgttgacaacaggatgatgtgtgtgtaaagggtaatttaaaaagcataatatgttcctgtcttctttttgaaagatagagaacatcaatttacggatgcaagctagaaatagagatgcataagagtccatgactaaatttctccaaacatgtgtcgttcttcttttgaacaagttcctttagataatgtttagtatcttcatattggccagc

SEQ ID NO: 70585 - DNA, 670 bp, Prunus persica
  Intron number 2 from transcript ppa025789m (locus ppa02578 9m.g) derived from phytozome v7.0 (chr-ID scaffold_4; pos 26530807 to 26531476 reverse strand)
aagtatagcaaagagtgcaaagagtggtccatctggttaattgatgtattttgctttgtgcaggtattggtaatctcctagctgcatttttattacccatccttatgtattattttggtttaggtgtaactggtgcagccctttccactgttatatctcagtatgtgattttcaaaacagtttctgttaatattccttttttgctttacttcgcaaatgaacatattttggaatttctgttttcagatacactgtcaccttttgaatgatctagtttttaaataagagagctatactattgcctccaaaggtgggatcattgcaatttggtggatacataaaatgtgctcagttccttttctttttctttaaacttttaccctctcatatatctgaaaatataagccctttttttcaagtgttctgcttcaattatttgcttgactatcaacactatcataatatttgacttttttcgttttctgattgagcagtgcatgtatctggacagtgtgtgtcttaatgtttcattttgtctttgtgatgctagttaaacctcgagataattctctcttgtcttccttttcaaagttctttccctaattgcttttgttttcaactctgggatgatacaggtggttttcttcttggaacaactcttgctgttctt

SEQ ID NO: 70586 - DNA, 922 bp, Prunus persica
  Intron number 2 from transcript ppa013055m (locus ppa01305 5m.g) derived from phytozome v7.0 (chr-ID scaffold_18; pos 43569 to 44490 reverse strand)
caggtaggttccaactcccccttgcaactttcattaaccccctaaacccccaattgctcatttgtcttttttatgattaattcattgacttatttagaagagtcctaactttgaacagagacatacaacaaacgagttattattctttagcaaatatgtcgctcactttgtttattccattcatttatacatatatgcatattgtatgacttgaagactttgtataaatcttcctttgctctatgcttgcaaattgaggtagttcatgtgaagttttgcaccttttaatttaccaggaagttcgaagttggaacttatttaagggagattagttaaaagaaagaaaaaagttgcatagactaatttgggttaattttattaagcaagaagcagtctttaacttccactctaacatcaaattttgaaagtctccaaactgactcccaagcaagcttaagtattaagttatttcataaatcttatatcttggaaaggtttggaggtagaactcaaaattgatcattatactgactcaagcatgaacttgtttgctttcgtttctctctatttttagggcctgttggatggggaataacgtttatttttaatatataatatatgctgatttctgagcacaacaatacattcttcgtttgaagcaaagcctagactctggagggagagagaagcgctgttcttttatccctgttcattgtggtgcttagaagtttgatgggccatcatggccatgcagaatagtacgatttataatcaccttaaattttgataatgtatatgcctcttatccttatttcatttttcatttaggaactgtttccatataaattgactttgtttgttaaccctgattttgaatgctactggttaatttctggtttgttatcttgtcctgtttatatag

SEQ ID NO: 70587 - DNA, 731 bp, Prunus persica
  Intron number 1 from transcript ppa013055m (locus ppa01305 5m.g) derived from phytozome v7.0 (chr-ID scaffold_18; pos 44653 to 45383 reverse strand)
ctctaggagctcctcccctacgcgttatccatcaggttttgagcatcaacacccttattctttattttgtcttctattttctttttctttttgctttaatttgcatatcatgcgatttttctcctctcaatctttctggatctgctgtttgatttatgttgaattttcccgattcctgcaaatattattggaaatttcctctaaagctgtgcaatcgatacacgtttctcagcaaccaaacagaggattattcccggttaaattaccacaaaaattaaaaagaagggaaaaaaaaatcattgaacaaagattgcctgatgatgattgattgaaattattctttttgcattttgaattaccctggtgttgtttagctccagcctccctccagtgggtaagctttcgaattccagctacaaatataattaaacaaaagattaggcaagaatcttcatgtagggatttatgaaggcaaaagtttctatttgctaagatagccagttctcagttcgagtttgggtctatgcagtttgagccaagttctatattcccatatagttacattttttacaatttaaggatacataatttgtcccaagtcaagcgtacatctttaatttcgtcaaattgatggaacatattttgaacatttttgagtggctgtcatcattttaactttttcaaattgcattgcagatcgttgtgctagagtttaaacgctagagaggttg

SEQ ID NO: 70588 - DNA, 847 bp, Prunus persica
  Intron number 1 from transcript ppa012930m (locus ppa01293 0m.g) derived from phytozome v7.0 (chr-ID scaffold_2; pos 18958949 to 18959795)
tctccagaaggaccccccgacctcttgcagcgcaggtacaatctccttcttcttcaacccatgtttttatttttatcttttcgttgggttttagcgtttactttcatttttcatggtcctaagcttctctcgaagctcgatctgtgaattttcattcttttgcagatatgggtcgttgtaaaatgttagattttgctatgtattatgtttgcccgttcgcttgcttggttttgtttgtgcttgttgcagctgaagctattttctttcaaaaagaattttgggttgggtggaaattatcgttttgattacatgtttacagtgtttgtgttattaaggcaatgaaatatagtatcttttcttcatcactggttcaggagggattttgggtttgttttgcttcaaatgtaatttgtggaaaaattgttgtaaaattgtgaagttttggtgttgtaatgtgctaattgaaatttgacttgagccatgcagataattgtgtcaaggattagagtgcatactatttattatatgaaggaaattgcagcctatggtgaatttgtcttggttgataatcattgacctgacattgagttgtgtcctaactaagacacaaagataaacaattttgtagaaagatttttttctttctttctgaatttactgaactttggaagtaagaataatttatagataaacagagccgttttgattatttctagttgctgaataaggcatgcatttgaacgttgtgtaataaatttatttataataatatattagtaattgtttgctatgagacgattttgaggtacactacttgtctttgatgacagggcctgtcgctgaggac

SEQ ID NO: 70589 - DNA, 719 bp, Prunus persica
  Intron number 1 from transcript ppa010688m (locus ppa01068 8m.g) derived from phytozome v7.0 (chr-ID scaffold_5; pos 2783510 to 2784228 reverse strand)
tctaataataatcgttgtctctttgctgtttaaaggtcagtccctttgctctctttagtgatctttctgcaattcatttcttcgttcttctttgggccttctaatttctacagttcattgttccaaggaacaaaatttctgttcttttcattattataaatggaccagtctgatttggtgttcatgtgtgattagtggattgattgtttcaattttgagttttacttacgttctttttggttttctatttcaattttggatttgatgttcattagtcatttcaagtttgagttagggcattgagagtgtatggtatggacctttttgtgctccactatgaatcaacgttttgttaattaatatttaagatctttctcttcaaactaaatgctttgcacttccacatttcgcccctaacactaaaaattcctggatccacccctggtagtgcatatcaaacattgtctttactgtacattcattcttgacatactgtagacaaatgtatttagtttggaatccgtttgggaggaaattgtattatttacctatacttaattaaattggattatatatagctttgtgagactgtttctttcagttgattggttttacttttgtgaggatgcagcatatgcatcatttgctttttcttttatctgttttgtttataaagtttaagactgaaaggattatctctgctgcagtagggtagaatt

SEQ ID NO: 70590 - DNA, 789 bp, Prunus persica
  Intron number 1 from transcript ppa010176m (locus ppa01017 6m.g) derived from phytozome v7.0 (chr-ID scaffold_2; pos 26311086 to 26311874)
gcctctttcaagcaagctcaggtcttcctctcatattatagtttttttttttcgtctgtattacaaattacctatgattggattggattggatttctatagggaaatttttgagaaaagttgaacctttatcataaccccttcaaccccatttggcatttggattacattataatcccaatatttcattcttgtttctatcaattttctgtaatcaaacacgggcaaagtttatttcacgggaataaattgttcttttgttctttgacgttgcttaccgtgattactttcagtgctggaaaatcttggcttggttgaaacctataattcttcaaatatgtggttttcagataggatcgaagtatacaattagtaagcaaaaaatgatgcaattagtcagctcaaagtttagaacttttccctcctcttgttgactttaaactccaatttgattacttttcacattttttagttttaatttcttgtgttgtttaagctttgaaaagttcttatgttttaaggatttgttgaaggggcacagttttttcatttcgtcatttatgttattatgaactctaaagtttgtagttaaggaaacctatcccatgctttaattgtaacctaattaaacagaaaacatgttccctcactatgatctcagattaatttgaaacatgggtagtgtttgaattagttgtcgtggttacttggtggagcagttctgttgatatatgcaatgttcactttgattgtaggcccttgctgggggtcccttgatacaagctcgcaa

SEQ ID NO: 70591 - DNA, 834 bp, Prunus persica
  Intron number 4 from transcript ppa013019m (locus ppa01301 9m.g) derived from phytozome v7.0 (chr-ID scaffold_9; pos 1297309 to 1298142 reverse strand)
tggttgagttgcagggtgagactgatccacttgaggtaagaagccaagtacattttactgctattgctttgcttgcgtatattggtagttgaattgttttcttttgggtctacccattaagcttccagctaccaattattttgactatgttattgtgctgctgcttttattatgacatgcacaaaacaagtgcttgcatataggattttgttttagttattgtcttcttccgtacttctttgtaagcactcctttatataatttgaataggaggtaaaagtgaacaagagcagaaacttatagtgcaattgtatcagaatagctagtgtggtggataatgcgattaagaccagaaatggtgtcactggcaaaatgaagaccataaattttgtgttgtaacttgtgagtatgtgtgtatcatccaaatgatagcacaactaatgcaatgcatacaaatagtagttatagagaaattttaaatccttgtttaatgaagtaatatttatatatctctttcaaatgtgcttttaaaatcgaaagaaagtacatgagtatgctccgcatttttctgcttttggctttcttttggcttactgggtgaagctcatcgacctcctttctgtataaaaatagggttccatcgtccgctgaggatgatttttcttcggataaaagaaaacatattggtagtttctttaagttgaaaggaaattatggtattgaatctgacttgtgagagctccaattgttagtacacaacttgataaaataaaatattgttcccttatgtctacactagtatgatctctttcattttgaatttcttagattgct

SEQ ID NO: 70592 - DNA, 588 bp, Prunus persica
  Intron number 1 from transcript ppa004955m (locus ppa00495 5m.g) derived from phytozome v7.0 (chr-ID scaffold_7; pos 21584809 to 21585396 reverse strand)
acttacgccttcccctccttccattccaactaattgtaagtacatgtttctcttccctgtcttgtgctctcctaaatctcaccaagttattattttcgggtactctctctccctctcctactttgaacttttctttatttttgtttgatctatttaattgttagaatatttagttctgattctctgattcattcagtggtaagtgattcttcttcttcttcttcttcttgtttccagctcaacttgttctctgtttatgcggcgttttcattgttttagctcgttttgttctgtgttaatggttgattggaatgttgattgaaatgattgtgttcagctgtaattaaattcaaatcttactgggattggttgattcttgattgattagcatttgcaaagttttacttaaatcggctatttttatctctctatctctacgtactttgtttgaataaagtttcattcttcatcttctttgaacgattttattattgttggattgcaaaatttcagaaatttaatgctcgtcactctggctgaattgctgcctctcctttttgatgcagttagttttactgtaattgctga

SEQ ID NO: 70593 - DNA, 830 bp, Prunus persica
  Intron number 2 from transcript ppa013522m (locus ppa01352 2m.g) derived from phytozome v7.0 (chr-ID scaffold_5; pos 13470681 to 13471510)
tgttgtacagccagctatagaaaaggctaaaacaggtaagatttccattatgatctaaatctcagaaagtttcgttgcttgtgggttgcaaagactacttaatcttgtgctgttttcagagttaaatttgatatctataaatgaattcgatgttgttatatcatatacttctgaacattgattttgggtgaattgtgcactggcttgtttattgcagcctttatgcctggagaatttaattgtaaattcctcttaaaacttttgaaccattgttcaacaatcaactaggaaactaactggtacaaaaagtttgtcatgtggacgttgtcattacttattagcatttggtttgagcctatgagaagtttgctttctctcgtttccttcaacaggagatatatcttctatggtgtttactccagcaattcattgttattaatggcgtgtatactgtctgtgaaaggggagcaacctaagatcagaaaagatttgagattaaagaaaggcttataatgaagacaaccgtcaataggagagagccattttgtttatgaccttactatgtcttcccttaggaagaacaattaacttcccaagaatggagggatgcatatattaaaaccatccttgttggttactgctatttgtttggaagtttttcactcaaaaagtaacaacgtgggttttactgatcctaatagttataaatggcaaaactaatttggaatgggattaattaagtgaagttttgttgccctccacatttgattttataagcttgaggtttctgaaaagcttgtcatggttattctgaacagaaaagaaggttg

SEQ ID NO: 70594 - DNA, 606 bp, Prunus persica
  Intron number 1 from transcript ppa000622m (locus ppa00062 2m.g) derived from phytozome v7.0 (chr-ID scaffold_1; pos 12259874 to 12260479 reverse strand)
ggcgcatttggcatcttacccgtaagaagaaacaggttcttattattaatccttttcctcctcttcgtgtgtttgtgtgtgtgtgtaacttgggctttttaactttagaaatggttaattctttgtggagatcatgtttttacagcaatgtcaattgtttgattagtgtttctcccctgttttgctaagatttggaaataaataattagtaatttcttttttaagctaagttgatttattaattcaatatcttgaagtttgaggcaaacattcatacttgtacatggaagtttgtaaatctgtcctagtgttagaatacttgtactgtatgcttatcctgttcatactatagcactaaattttaggccgaaccatgtttttgaactagttctgtctgaactttctgaaataatcttcaaagagagaggccaattcactttttccccatggttgatggctatctgtccaagattgtcaatgggacacattttcccctctagtttttgtttactttagttttggagaagatgatagcttggctaatacactacactcgcatgactcttgttagttggagatcgaggaacatcaacggttagcaaaccg

SEQ ID NO: 70595 - DNA, 201 bp, Prunus persica
  Intron number 1 from transcript ppa012561m (locus ppa01256 1m.g) derived from phytozome v7.0 (chr-ID scaffold_6; pos 377576 to 377776)
tcaaagcaggtaattatgtgctacgagagggcaaatagcaaatcaaagacaatagttttcgctctttgtgcttctgtttttggtttttgctacaactctccaactgtttgatgaaatgcttcaatgaaaaaccttaagcttttcttcttttttatttacatttcagggtaccaattggccaaatcgttgaacgctcagaag

SEQ ID NO: 70596 - DNA, 412 bp, Prunus persica
  Intron number 2 from transcript ppa000176m (locus ppa00017 6m.g) derived from phytozome v7.0 (chr-ID scaffold_3; pos 20315272 to 20315683 reverse strand)
ttcgcaagacggccgagaaattgcttctcaatcatgttagtattatctgcaatttgtcttttcattgttttgaattgcttcataggaattgtagaatgtgatgttggaaatttgggtttgagttagggtttgtgtgcaagattggtggtgggagttgcagagtgatctttcctgtctatttgttcgacttataatttgaatttattttgattgtaatttggtgtgcaaggttatttatgtttacagatctcttttcttgttgaagaattattgtgctgtcgtttgtttatagcttgaactgcttatgaagactaggtagttgaaaataaatagcatatatttctgttattgatggtttgttttagttccagtggatttatctatatttggttgttgttgatagcttaaggcc

SEQ ID NO: 70597 - DNA, 632 bp, Prunus persica
  Intron number 3 from transcript ppa014678m (locus ppa01467 8m.g) derived from phytozome v7.0 (chr-ID scaffold_1; pos 43139247 to 43139878 reverse strand)
aatttgagcaattactcagtgtggcaccatcgtaggtagcacttggattttcttttaccaatttaagtttaataattggaattggaaaccatttcaagttgattgtttgatccgaatatgttgtcaccaaacagctgctttagtctgaatatgatctatttataactctgactctgctgtgatctcagtaaattatgtttcctcgtttttgttacttgtaattttggttcttctcttgctgcttcttttgttttgttaacggattgtaacatgtcatgcatcttcttgtattaccattttccaccaacaaacccatacatatagtgccaatgggttcctacctcagtggttgaggtgttccctctccccctcagcagcaccttgaaaaacccaagtaatatttccccacctcccagcgttgaccaaacaaaaaaacccgtacatatagtagttcacaaggctacttttttcagtttacgttggaaatatatttacaacatttggaaggctcaattatgtgattccatcttctgcgttatgatgcacccttgcttaaacatgtttattactagttgaatctaattgaggaacttgcagagtacttctgtctggtttgctgaagaaaaaggctc

SEQ ID NO: 70598 - DNA, 755 bp, Prunus persica
  Intron number 4 from transcript ppa002904m (locus ppa00290 4m.g) derived from phytozome v7.0 (chr-ID scaffold_7; pos 21440014 to 21440768 reverse strand)
gcagtacattattgtcgttttgtctacaggtaaaacaacctgcacatgatttttaaggcctaattgtatatgtgttgctactgtttgtttggttgctttagtagacactcttgctcgtgcaataagtaattggaataatctcttcaggagcttgtgtacatgatatacttactatttagagggtaagccacaacggttgcctaattggtgtgcccaatgttcccaatgtggtgtgatcccaatccgtatgaccaatgtggaagtatatatattaagtagagaagtcaaatcatattatgttacaagactcccaagtacattttatactatcagaattttttcatagcccaacagttatttcagatatttcaatctaaaagggaaaactaaagaattttagatattatcttactgtgcaagaacaatttgcacacaattcaagaaatcaactagatatgctaacaaatcttgtacatggtctaagcttaaacgaaagaaaaggcatggaatgtgtatcatcttggttttttctttgattgcaaattagttttagcttcactgtatctcgtcacgtttttctaaatatagcatcaattcactatttctgcagctaggtacctatgttctgttggttggtttatttaggcttatatctaaagctgtatactcttgtatgatgttttgtttatatttgtatatgtggtctgaaaggaagtatttttcaggactcgcgtttcctcctctgtatttctaca

SEQ ID NO: 70599 - DNA, 466 bp, Prunus persica
  Intron number 1 from transcript ppa015816m (locus ppa01581 6m.g) derived from phytozome v7.0 (chr-ID scaffold_7; pos 20329171 to 20329636)
gcctctgctttgcaatccattcgagaaggttgcccgtgttcgaacccatcaagaaaaaaagaccgataaggcagaattaccattaatattaatggaggtttgctttaggagtttgtcttcatatttctggtttttttttttttgggcataatgtccattttgctaggagtattatgaattttcgggcatattgtgccccatttaattagggttattaggatttgatagcattttagtggtgataggaatgacttttgagaagaataaatatacacggccaaatttaagatgtgaatattggtatgggaataaaaaaaacaaagaaatattgcttttggttttattactgttcgtatgttccaagagcctaaaactcaaattgacttatgtttactgtaattaatatattttaccccagcaagatggttaaatttacaagtcagtaatagtctctttcagtcaaaat

SEQ ID NO: 70600 - DNA, 716 bp, Prunus persica
  Intron number 3 from transcript ppa010629m (locus ppa01062 9m.g) derived from phytozome v7.0 (chr-ID scaffold_1; pos 26875939 to 26876654 reverse strand)
attcgtattctcaggagactgcttgcttgctcagtgtgagtatttcttggactcattgcaactttcaattcttgcaatcctatgtttcatgatcaaattcagcataatcaacataggttcagtcttaaccttaggcttcttagttgtttcctgtcacgtgttctcttgttaacatttgtgtagaacttccgaaatactgaggataatttatgcttatatatagcaagagaaagataacaccaccgattcaccttttattttgtccgatcgccaccttgtgctcttgtaggaataactttggcagaagatagaaaattatactaaagaattcagttatgggacttggatgctatccaaatgtaaccttaggtttttaggtacaggctgaattcgcggaccttaactaaataggctattgctttgatgaaagatgttccagcttatcacagtagcctgcccttggttatatcacgttctcaccacctccttttaactctagttataacgttgtattgatcattgtgtggtttgttaatgtagttcttattgggttaacccgtgtactgctcagagtatcttactgatgacaagatggattattgttctttggtttcttagggtcttcattctgtttgatttgtgagctattcatgctttgtccttaatctgttgttgtctcagggtgccacaattattgatcaagctgtttgcataac

SEQ ID NO: 70601 - DNA, 530 bp, Prunus persica
  Intron number 2 from transcript ppa011184m (locus ppa01118 4m.g) derived from phytozome v7.0 (chr-ID scaffold_6; pos 10616522 to 10617051)
atactctcaaccgtgtgagaggcgaagttggtgaggcaagtctttgtgcttccctggaattttgattgtcatttggtctttctaacttgtttcttcgactatttgccaattatttttgtctgggaataaggaatcttcacttgctacatgtcatttttgcctgttgcttaaacaagtatttgaggaaaacacatctgtcatttagaaagcaagtcaattggtgttgtccattcaaagatttcttagacacattcatttgtttattgaactttcacagctagtttgcagtctcaatgcacgatattttatataaaaatagttatatgctttgtagcattcaagtgatatggtatttcgttggctttataaactttttgttttcccttttcaataaatttctgattttgctgccccttcgttttttcttctattgtttaggtttgtgtttcatccttcaatgcatttcttgttctgtgtttggtttgttctaacagtcacttaaattttgatatgtctagatacgaactata

SEQ ID NO: 70602 - DNA, 770 bp, Prunus persica
  Intron number 2 from transcript ppa023991m (locus ppa02399 1m.g) derived from phytozome v7.0 (chr-ID scaffold_6; pos 2053948 to 2054717 reverse strand)
gtacatattttcaggtgggttggtccattatatatatcttatcttttactttcaaaattaatgagcatttttgcttctttatgtcatttctttttcccatatgaatcacatcaataacaagtctctaaccttgaccaagtttgactcaatctgtgtttgatatagactgcatatgagattcaaaagacaaatacaacaaaatagagactacatatctttttattatttgatcaagccaccatgatgggtgatgagtagcacaaactgagggcagtggtcctcttgctgtggtccatcctcagaaaaatggtcaagtagtagtaggctcagtcagctaataagaagcacactgcacactggcgcaatttagcacacagctttgaagaaattacttagtttttttcttcttctggtttattgtcctcttctgataattctaatgcatctcggtaacttgcgcctgctgtgctcagcgcctaacctgcaaaccatgttctatatgactcccgtgaacaaattgttcttggggccaggcgcacgttagcattcatgaagctgcaatgacatgtgagatattgtgaccacactcagtggtcagtgcacataattaaagaactgtgtgcgcaaaagggttggtgttaattgtgccataattgctaattattgggagatttaattctaatttggtgcaggaatttgggaagcaaagtggcaattatatggaggggaggatcgatatgagggcgcagaggctgaacattccgttgagc

SEQ ID NO: 70603 - DNA, 438 bp, Prunus persica
  Intron number 1 from transcript ppa001818m (locus ppa00181 8m.g) derived from phytozome v7.0 (chr-ID scaffold_1; pos 39161248 to 39161685)
tcctgtgaggtgcatcatctttgatcagtatagccaagcaaattaatctgctgtactcaacttttgtttgcacaaattttactgtcatgccaaagtaccatgcataatgtctaattgaaactgtttttttttttttttaattttatataattttatttttataaccatctttcaatggtaaaagtgtctgtacaatttgtggttattcttttctggtgaagtgttcttgccctgataatttttttcccttacttttgactctgtcgttgcacaaaagtcacctaaaatctttgtagctcaaatcaagaagttggtgctgtgcgggcctaaacaggtatattattaatgtcaatctcattttcctccaaactactgatcaatctatttctgttcataaatttaccttaaatattttgtagattgttggatccaaactct

SEQ ID NO: 70604 - DNA, 329 bp, Prunus persica
  Intron number 1 from transcript ppa015313m (locus ppa01531 3m.g) derived from phytozome v7.0 (chr-ID scaffold_10; pos 625519 to 625847)
gtcttaggagatcggtactttttcattcccaaaatagtggttttctctctatcttttggatgctttttaaagtagattatagtgaagctatttcttaaatctcatggagttgttagatggcagcactgctgttttgaaagttcatttgcttaatatcattcatttcaacctatgatataaatatcaattctcttctataaaataaaaataaaaataataaagaaataagtttcttttttgttgaaaagaaataacttattgcgccttgtgtattttgatatcaataatttataggtacgagtcgcagtttatccaagatatagttgaag

SEQ ID NO: 70605 - DNA, 922 bp, Prunus persica
  Intron number 1 from transcript ppa015931m (locus ppa01593 1m.g) derived from phytozome v7.0 (chr-ID scaffold_7; pos 3881432 to 3882353)
ccactccacggcacctccgatccgaacttggccgggtaatttttatcgtcattgctaataattcttggataattttatcatcaaacgtagagggcttgagtctcttgttaatactgtttttttttttttggggtgaaaatgttaatgctgtttcggttgttgatgattgatggatttttagagtagggaatatataattttgtttttcataatttatgttgactaagtttggcttgcttctggaagttctgggcgtccttttcaattagggacaatggatcttgtgtgttttgtatttttaatataaaataggacaatattgggcccaaaaatctatttgggaaaagggatggaatcatcatgcttgcttacagcgtagttgaggatttccaaaaagctggaagagcttggtttcccattttacccttggggattgacgtcgtttgggttgtggtgtttttgtttgagcaagggtaaaacaggaaatcaaatttgtatgatataactcttttggcttttttgaaaacccctcaagcagtgactgaggaagaatcttttaagacacatcatgcattaaaagcatttgccgttttagtgaaaattaaaagcttttgcatggctatcgagggaaaaagaaaaatgaacgaagaatgccattctcggctaaaagggataagaggccacatggtggtccaccacggaccactgaaagagcatgaatatccctaggtaggttaccgccgcttttcaaccaaattgttggagaagagaagctcatgtttgccgccaactctttattactttgatatcttttgtagcgtcagatatggaatcatgtttgacttctgctaatcacttttgttcatcttcaattcttccatattcaggctttattataccaaagtcaaattgggctctccgc

SEQ ID NO: 70606 - DNA, 702 bp, Prunus persica
  Intron number 1 from transcript ppa005165m (locus ppa00516 5m.g) derived from phytozome v7.0 (chr-ID scaffold_1; pos 44131709 to 44132410 reverse strand)
gcaaagaaggaattctcgaggactttgccactcaggtgattcttcattcacttcttactatatataatcttactcagctactctctatgtttggtttgtgagaaaattcttcttgggaaaattaatggaatttgaagttgccgtgctaggcttagttgaagtgtgataattttttttttgtgggttatgaattgatgaattagtgaattaatgtcggcgttatatgagtcgtcatttgaggctcaattgagaaatgtatattttttctcagttagtataataaacagttacaattaaaaagtttgagttcaattgagaattttctggtgatggccgactgatagataaagcatttcctttcttcgaatcgctctccttactgagatctttaaggtggaatgtccggactaagttgtgttgatttccatcttagtacaaaggtagactaagaattggtggtcttctgttgttttgcacaactgactaaagtaatcaaacgtgccaacaagaaaagcaataaggagcagtgcattttttatctgaattgtggctgtaagggtcatcaggcagcaggcaacatagcaatctcatcaagtgctgatccggaaatacatattgaaaataggtattcttcagtcccgctcttgatatagatgtgtaattatcttttgattgaaatactgcagggtggagatcggaaag

SEQ ID NO: 70607 - DNA, 774 bp, Prunus persica
  Intron number 2 from transcript ppa016498m (locus ppa01649 8m.g) derived from phytozome v7.0 (chr-ID scaffold_3; pos 2398670 to 2399443)
gttaatagtgcaccagaattgaaaagtgcttcacagtgcgtgtttttctgatccttatgttgtcactccatagaaactgtgttacatatttctggttgatactgctttttttttttagaccacgttttaaataaacatgatgtttgtgactgtgtttaaattgtagtagaaagtctagaaatgtatgctatgtcttataaaacattttagattatgggtgccaaagatggagggatatattcctgaatcccaacatgctgctgagaagagccctttcaattttcctcttttttcagacaacttgaattaagaattgaaatacgtttgcttatcttggactgggttgaaacacagtttcagggggcattagaaatctttgaaaatgtcaaagctgtctaaatttcttaaactagatagagccagtgttgaccttttgtgtattatgatacagtacggtaggaggaaatgagctatttactacagatccagcatgtttgtatgatatagatgcaatcgtgcaacctctattgtgatagacattgaaatttagtttgttcgttagtttgattgttccattatttatcacaagttaaaactgtgctatttactgtcttaaccattcaaaaaaaattctgtttttatttatttatagagttgatagccacacttgttaatgtaattcttctgccttatggataggtttttgtttgaggtatcttcaaggtacttgatccattctttatttattttactatgttcaacaggtacgatcca

SEQ ID NO: 70608 - DNA, 665 bp, Prunus persica
  Intron number 1 from transcript ppa013904m (locus ppa01390 4m.g) derived from phytozome v7.0 (chr-ID scaffold_3; pos 10844844 to 10845508 reverse strand)
ctaccggaatcttactccctgagaagtccgccaaggtatacttaccattttaatcaccccctactttctcattattgtgtttgtttcctgagaaactcgaggataatgacataaaatgaaaattagagtagtctctggtttctgggatgtggatcctctttggaacagaattgggtcgctggtgtttgactgataccgggctatggctgtgggtttttgttttcttggattttaaagtagtggaatgttagatagtataggcttttgattttttgctctctctcacattttaatccttttttgattacttttatggtagcaaggcaagggtcttgttttaaatccacatcgaaacatatatttcttaattggggttttccttaattaatttatttccctcttatacagaaatttggtagaaacagtaacatgaacttaggccttttattttatgcaatatgaatgtggctttgctgttaaatgaattccagtctgtctcaattagaagagtccaaaaatgatattttggaagtataatttttctcctcaaggagaactagtaactggcatgcatggattgaaatatatgttgtttttggaaaattgaatatttcctgctttacactttagcttaactctggaaaagtcattgccgtgggtcctgg

SEQ ID NO: 70609 - DNA, 335 bp, Prunus persica
  Intron number 2 from transcript ppa001625m (locus ppa00162 5m.g) derived from phytozome v7.0 (chr-ID scaffold_3; pos 9190864 to 9191198)
ataaaaaagattgctggactggtgagaaatttacctgtttttctagatgtactttgaagttaccttgggtgcacttattttttctgtttgcttctttgatgcctttcgtccaatgttttcaactgtcgaagactgccgcttacaatgttgtactattcatgtttctgtgatcataaccaagatgagtcatgagcatgatgccatgtagatctgttacctgattctggtcagatgctttaatacatgtttaaattattattattaagagatgatttaacttcgactgcaatgcctatacaggtttcagatttttataagcggccacctgtggaaag

SEQ ID NO: 70610 - DNA, 759 bp, Prunus persica
  Intron number 3 from transcript ppa003391m (locus ppa00339 1m.g) derived from phytozome v7.0 (chr-ID scaffold_1; pos 4011289 to 4012047)
ggccctaaggttctaccacaccccaccgttttgtgctacgctgctattcgtattatatttctgctgtttacctatcacattgactttttgtatttattaatgcaatcttttgatcttacataggatttcgaatttgagatattagtgtgctcagtttgcattaggtgcaatccaatgattttatgaatgtatgatgtccaacttggcaatacagtgtattggttgacatgtctgtgtggtggtgctttactcatgttgggtaaatgtgaatgaatctactggttcctaaactcctgtagtatttttaataaatttggcaatggaagtaggtgaatcttttcaaaatattttggtcttcgtagatgtgaatgtaaagaccaattggaggcttgggaaatgtttattgcttgtatttgagggagctatttcacagcactcatggaaagaagcttaattgccatatgtttctctcaaattctactttttttttattatatacaatcaaacggttggaagaaaaatattgagaatcaacgagctcaaaggcctttaatagttccccgtatctgttttccttgtcaatagaatatagatttagccatttgcttatatttaattgtcttgctcatttgcatacttttcatagtttaaatcaattgatatgttgtgttcctgtattttccttttcttatattaaaataaaaaattaaaaaattaaaaaactgacatggttgtcttttttctatgaaaaggggcgta

SEQ ID NO: 70611 - DNA, 507 bp, Prunus persica
  Intron number 2 from transcript ppa005557m (locus ppa00555 7m.g) derived from phytozome v7.0 (chr-ID scaffold_1; pos 39927201 to 39927707 reverse strand)
catctgacatatacgaacacttgcgtgactctgaggtttgaaatatttcttccaatgaatgatcttatatataaatattgcttttaattttgtaaacttcctttatattactgataaacacattttacacatagttaccttcttatgatgtattaaagtctttcaagctttttctaaacatttttagtattttttgggagtttagaaatgacatgtatgctacattcttaaaaatttttgaaagttgcagcaggacaacagtattgcgaacgcttttacaaaatttgattgaactccatctctatattagatacagattcttaaaattttatgcacaaatttgtctactgcacaataaattttctgcaactatcttatccagttatcttatatccgccctgttctaattcaagtgctcatcactatctcatgttcccttccttttatccacttctgtgtcatttgctttgtttgatattttggtttcaggcaaatagaaggccctcc

SEQ ID NO: 70612 - DNA, 1021 bp, Prunus persica
  Intron number 2 from transcript ppa010855m (locus ppa01085 5m.g) derived from phytozome v7.0 (chr-ID scaffold_3; pos 9776155 to 9777175 reverse strand)
cgactattggagtcttcaccgttgtgatcctcgcggtatgtcaactttggcctttttgctttcattagaaactatttgactctgtttgtttcccgagaaaaaaaagataataaatttaagagtggtctctctgatgtatttgttctgctttcttgaagcttgagcgggttgagtcgagttgttgagcagatagtttcattgggtttaaataagggaaaatctgaggtccaagatattatcattcttgtacttcttcttcaaggttttaaatagaagtttcttgttgattttaatggtgttttcttggtagttgactgttgtggggaagttatgctaattagctaaatacacaatgaggctatgtggtagattagaatttaggaagcgggttaatagctaccaaaataaaactttattagttttaaggtaatgtatttaacattttatacgttttcgtgtgtgaggctatcccaagtttttattttctccacgaaccaaatgtctctttggaaattatcattttgagaaacttttctcatttttttccttttaatgtcaaacaagaatgcaaaagtttcaacttcatctaagaaccaacatgtaaaaaggagggattagcaatgagggaagatgaaaacatgcaaccaagatggtttggtcatgtgtaactagttactctggttgataagactattgacattgcacttgaaaagttcgtggtgctgtttgaggtcgtgagaaaagatttaatgaatatgggtcaaggatgtgaatatagaggagtagtaaagaacaccttatttggttaatggtacatgatttggggagggccttgttatgttgcctagctttagtttacctatatatgtatcttgcagctttttaaaatactttttttataaagtttttatcaatctcattaatggtttagcatttacttgatcaagttgaccttttgatctagaagtttgttttggttgttaaagctgtggaggacaataatactcacaccttttaagct

SEQ ID NO: 70613 - DNA, 890 bp, Prunus persica
  Intron number 2 from transcript ppa011378m (locus ppa01137 8m.g) derived from phytozome v7.0 (chr-ID scaffold_8; pos 21696494 to 21697383 reverse strand)
accgtcgaggtgacatttactctctactctttccttcttttaatgtgtctttgttaattgctccttgctaattgctacttgctgagtgttaattgccacttgccagctgctacttgataattgctaaatcatgtgcattttattccataacttgacaaaatattggcctagctaccagatttttcattcttgtctctcgacaggcaaaactaaaaccaatctgtgactgtgtgttaggttcaaattcaaattagtgcttgttttaccaaacatgtatatatatatatatacagtccccttctattgagggatccctcaaataattttatttgagggacgccctttagggtaccctacaatttttttctcaatgatccaaactatctattttttaggtcttcattcatagatcatccttacaaaaaattagacaaatcggaaaccgtttcgacatctaattatgtcttacaaaatcaatgaacacggtgcttcaagaaaatgctaaaatttcaataacttaattgagtggtcaaatgatatcggattcaagtgattttttgtagagatgatctttgaatgagtatctacaaaatagacggtttggattagtgaaatacaatccggagtggggcctacaaggagtgtctctcaaataagcttatttgagggatccctcaatggaagctctctatatatatatatatatatatatatatatataataataaaaacctgtttgtgtgtttattttgttacattttgttagtagctgacacgcatataacaatgagactggtaatttgttttgatcataactagaaattgctctgattgcacatgtttgtatagcagcatgtgatggtgctctgttaattgtaattgtggtgcag

SEQ ID NO: 70614 - DNA, 709 bp, Prunus persica
  Intron number 1 from transcript ppa003623m (locus ppa00362 3m.g) derived from phytozome v7.0 (chr-ID scaffold_6; pos 464118 to 464826)
agcaagtatttctctaatctccggtataagggtataagggtatcaactaactaatcatatgagagaagaggttgatataaagaaagagtgggagacaccacttggctctccttaacgtagtatgggcaactgttttttttttgtattttgagtttaagtgcatcagttaactcatcataagagaatatagatagagagaaagcggcactacattcgggatagaataaatacttgtctcttcttgatgtagtatgtgcaagtgtttttcctatcctggatgtaagtgcatcatctaactaacgagatgagaagaaaaataaagagaaagtggcagtaaaccttggatatatgagaaacacttttatctttttaatataatacgagtaagtgtttctccacgaatccctgtccagtctccatcccttcatcaaattaaaaaggaaacttttccatagtcaaccgtcactcctccaaatccgtcccgtacacgtgtccttttagactacatgtgtacggtagtcgaacacttgtccatttacactctctttcttcacatgcacatgccctcctatccctccagagtcacacacactcaaccaccaccactgtgctcataactcgagataaacctgcgtttttgaggccttaacgccgttaattttccgttcactcagaaagaagaagaacgccaccgccgtcaccttaaacc

SEQ ID NO: 70615 - DNA, 915 bp, Prunus persica
  Intron number 1 from transcript ppa014750m (locus ppa01475 0m.g) derived from phytozome v7.0 (chr-ID scaffold_7; pos 21540171 to 21541085 reverse strand)
cacattcttttcatcagttaagtttcacatatatgttttccttcatttctgtcagtttctttcttgtctaaacagaggtttttcttttgaactcaattatttttttcttccgggttttgacttttgatgactttcccgactgagagggtaatgggaaatttagtgtctatattaaacaaaatctgggacatttaatgttaattgatttattatgaatacaaaaatgctaacctataacatggtgattagaaatgacaatataatcgaaaaatatcactacactataagggtgtagtgtgtcaccttaacacaacattcaagtggtatcagagcaaaagcaaatagagtgctacaacatttgatcggaatggactccataatgtgagttgtcacgaaaaaaatttgcaccttaaaactttccataatttttcaaataaaattcttgatttatggttaatgtatatatggaatgaaaatcttctaaaatcagcgtttaccaatttttgttccaatttaccatttctgttgtccttaatgattcagcattatttaagtatagtaattgctagagagtagagtttatatatcgagaaattttaaccgtgagagaatgccaagggtttaaccttaatttggctgccgctaatttcatccatgttgatttctctactcaattcatatcattaattaattggattcaaattactaagcctattttgtcgatccattgccttgatttcataccatgcaggttttgaattttgtagcactaaaatttgtgcacctttattaatccattttcttatgtatatgtgacatgcttgaatttgggttagcaagcacaaatatgttacttaccaaaataaataaataaattttggttatgtatgatgatggatcaggagccacgtagag

SEQ ID NO: 70616 - DNA, 869 bp, Prunus persica
  Intron number 2 from transcript ppb018112m (locus ppb01811 2m.g) derived from phytozome v7.0 (chr-ID scaffold_2; pos 26178275 to 26179143)
ccagtgctgctgctcctgcagttgaggagaagaaggtgagaatgtcatacatgcatagatttcagtcttgatgattttgtatacctaatataccttgcttaagactgctccttttgtttaagtgctctgcatcagtgtatttattattctagactttttatgtatgacatataaaatatacaagagttttgatgattatgaaccttggctttccttcttagcatttacattttgtaagttatgattcttcgcgacattgcttgaactttcattgtccggaaaggtttataattgtagtgatttgatttatatgattgacatcactattgttggtgggttgcctaacttcgtttttcattcttggtttgtgtatttacaggaagaacccaaagaagagagtgacgacgacatgggattcagcttgtttgattaggagagttcatatatgagttgagctgttttttaaaattttattttagacaatttaggatcaattgaagttgaaatttttgtttcaagttgagaaattttttcccagtgttgtacgttgaagtggctctcactcgtcattccatatatgttctaaaagcttttaacttggcaactgagttggaagaagatattgatagttttgttttaatgttggttttcttcagttgaaattattcagcgtttttatgtgcacgtctaaacatggcatgcaactctagttttagaccccgatcaattgtgtttttgacattctaatcatgtgcctgaaattgttaatggtctattgtcgattcttcttatcatgtgtgattagctttcatggtacgtgctagtcttgtccagaagtcgctagaaattggaaacgtcctcaccggagt

SEQ ID NO: 70617 - DNA, 608 bp, Prunus persica
  Intron number 1 from transcript ppa010416m (locus ppa01041 6m.g) derived from phytozome v7.0 (chr-ID scaffold_8; pos 829208 to 829815)
acaatagagactcttacaatactttggtttctgaggtagcattgccctctctttttgtttctctacctcttcattatgcaatttgtaatatttatttaggcatagcctcctttgagttatataaagggattatctgttaagggattgtttaaaattttgaaattttagataatttaatcaagtgagttatgtcccagccaaggagttgcttttagccaccagcattttgttatattttcattctcctgagaagttcatagacttttgagttccagcagcccccatatggcatctttccattgagttgggttgtaatttgtagaaaatgcctctctattgtagtatgattttgagtatactgctctgctagggtcattgatttttcagaataactattttgtcctagcacaatgggaaacttcacatgacattttaggatttattataagatctcaaccgtgtgattgttgaatacttatgttacgcatgacatcttagctgttctgcatcctctcacttttgacattggagttcatgaaatgccaaatgaacattttatattcttgtttgcaggctgttagtcttttgggtccagcaacattcgacgc

SEQ ID NO: 70618 - DNA, 520 bp, Prunus persica
  Intron number 1 from transcript ppa010929m (locus ppa01091 3m.g) derived from phytozome v7.0 (chr-ID scaffold_1; pos 27842266 to 27842785 reverse strand)
gaagcgttgctcgtctgccaaactcagggagtcaggtaacacaaatttctccaaaattttgtttggttaacgataaaattaatggaagtttggatattttcgacgttagcattaaatacccaaattttattcctcgaatttcttagtaaccatttgtttttcttaaagtgaattttttttttgcgatcttagtaaccatcagggatcggatcgcgaagttacaatcgtcgatacttttcttacttagttagctaatctttacttaatttccgaatagcaaggtaattaaaaccgtcaataattcacaaatttgggcgcttcaatcccttgtgtgaaggttattttgaattacgtttgtttgaatgctgtattcattagtttatgtcttcttgcccagaaactgtttgtgaaaatgtttcattggcaatatctcaatttgttttgtgcttgtgaaggctaagtgttgtgctacattctgtcggtaggggtgacgattacaagtaaaagaggagagttgcca

SEQ ID NO: 70619 - DNA, 835 bp, Prunus persica
  Intron number 2 from transcript ppa014425m (locus ppa01442 5m.g) derived from phytozome v7.0 (chr-ID scaffold_5; pos 4728664 to 4729498)
tccccatcaacaacatcattgttggatctgtttaggtatggaattatatctgaatcttcgtctgatcgaattcattgattgaattattgagattaatttgcatgcatttgatgtctgctttattttttgtccgtaattttaccaagaaattcatttgaatcatgtttattttgtaaaatacgagtctttgaatattaggattcagatcaatttgtcttgggcaagcgcttgcaaaattgaatgtcaaattgtgttttttgttcaattttatgaacgaatccaaaatatggagctggcatatacaatatgtttcaaagggtctctaatattgaaattcttatcaagttttggtttagcttgttggcgcatgggtttgaaacttttgggtgtttcaccacattatgagtaattctagggtttggataattggccattggttttgcctatgtagatgaggggatgttataataggaagattttcttcttgtggcatgatcgagaagtttgagttctggttttaccatgttttggtgtattctactgcctcatgtgcatatcatagagttggattatcaaacccagggcagttaactcaagctctgattatatgtgcaaccaaacttgtccaatatccatctgacttgaacgattttcgttagttaaatgttttgtggatttagtaatgtccattgatattagtgtcattttactacggtttttttagatagtagtgttttaataactagttcttatccttggatgtagagtaagatgtggattgttgactgatttttcttttttatataattgcaggtcatctgctgaagttagaaag

SEQ ID NO: 70620 - DNA, 414 bp, Prunus persica
  Intron number 2 from transcript ppa000634m (locus ppa00063 4m.g) derived from phytozome v7.0 (chr-ID scaffold_4; pos 5222392 to 5222805)
agtgctcaggcagtcctcgaagtcgaaaggtaccgaacgtttttattattagttgttatgttgggtaattgatggactatgcataactcactaaaagtcagttagggtagtcttttcatagctttatgaagtacatccaatttgttttatcaaattaaaaaggaatacaccacttcataccgtggacccatatgcatatatgaataaattttttccctctggttggaaaataaaattggaagaaacacttgtgtcatcaaatcctagattttctgcattttgagtgttaagaatgaccaacatcaaattaggatattaattttctttgttcactcatttgaattgcttttgtaagaaatggattcatgtgcttaaatggaacatatggtcctttgtgttacagatatcagctag

SEQ ID NO: 70621 - DNA, 966 bp, Prunus persica
  Intron number 1 from transcript ppa006648m (locus ppa00664 8m.g) derived from phytozome v7.0 (chr-ID scaffold_9; pos 954937 to 955902 reverse strand)
tgaaggacttcagacgcttcaatcacgctcttgaggttcaaatctttcttaccgacttcacagtttctttccttgttttattttggttctttgcaactcctttttatatatatatgtttctataggtcaattcaaccagttatcaaaacgattggaatatattatcttttatttataaacctatgcagttgggttggtattttgttactttcatcagttgcgtgtgaatgttgtgttattcaggtgtctgcaatgtattatcgacaatctgaaatttaaatgtatgaactgtcacaagatccaagccttgctcttttttttatttttttatttttatttattttacatttcttgctttgaatttaccaatttgctgattcatgcggtgcaaagttggtgaactgggtgatgcaaatgataaattgcagcaccaccaaagttccctgcaaatattttctaggaaactgttattggcactccaaaaaaactcatcatgtactcctcctctatgagaacataagggaaaaattcaactgcaaggaatgtagagtgactattttggagtgccaataacagctccccttttctaatattttgtattttttttcctctctatatgaaaggaaatatcagttaccgttactgaaaatgtttaaatgtggtatcatggcatatcgttggcggttaaagattttttgtatgatccaattcatctcatatatttggttcattcattttacaattcagcatttaccagcatggaggggttgtttaggcattttacttggacattcattgaacttttggtatggcccgtcttatggtgagtgattgttgtagtgaattgtaattagatgaactgggtcggtgtgacaaagattaattccaaccttaataaaaatgtgtttagactgccagcttctaattattctgtgtcttccttttgttatttagatatcccagtgg

SEQ ID NO: 70622 - DNA, 930 bp, Prunus persica
  Intron number 1 from transcript ppa023025m (locus ppa02302 5m.g) derived from phytozome v7.0 (chr-ID scaffold_2; pos 3295434 to 3296363)
ggtatgggaggaaagggaatgatttccattcctgacttcccctgcgtttacttgcaatcaggaatgaaaaaataagtgggccccacctcaaaatccgtaatcacattccctcaaaactaggtatcagatcgactaggggggactagtcgatacgattcccattcctgctttctcttattaacttccaaaaatacccttaccactttactataattccaaaataactcaaaccctaaaaaaaataaaaatacacgctagaaggagttcaaacaactcaaacccttaacgttacaacacatgtgacttcttttgtgaattttatctcacttgatcaaagatttcttagccaggttagcttgtctagcttttggttcagaataaattgctgataattttctttgataacggattccctcttactgattaattcaaaaccccttttcctatagcttttggttttgggtgaattttatatatgtgatgtggtgaaaatgtgtagggcattttagtaatcaaattaatttggattctgattcatgaaaattagtaaacaataacaatgggaatcaaccccattcctttactaatttcgtatgtttagtaaacagcttaatgggaatgattcttcccataccgattcagtagttccccgattcctaaattatctgattccttactttctccattactgatacgtaaacatgccctaagagtaagagactttctaccccacctggaatatgagtcgttctgtttctttatttgtcatgagattatatttttattttatcaagtagatatcataaattaagatgggttttttttttcttccaaaattttagatgcttggcgctggatatttgagtttttacagttttctagagtctgtaaactatcaaggattcttcgacttcgacgagtcgtcgccag

SEQ ID NO: 70623 - DNA, 445 bp, Prunus persica
  Intron number 1 from transcript ppa026845m (locus ppa02684 5m.g) derived from phytozome v7.0 (chr-ID scaffold_8; pos 21128828 to 21129272)
tgagacaattccagattctgatcagagcatttccggtaactccctcatttcaattatcgtattatgcacattttgtaattattggataagcgtttttggttcttcacctgcgtagatgaggaagaatctgaccaagattggcccaacaaacgccttacccttgacggatccgccaagaaaaaggttttcatttctatttttaattcttaattttgcttcaatgttcttgatttgtgtgtatgtgcatgtatcaatgcatcaatgtgtgtgtatcgttttatgtagttagaattttgatttcttaacaggaggaattaccgctttcatcacggctagaaatgctcaaaggtaacatgtttttccagaactggctgctagcgttgtactgccgtaggctctttgagcagagataatgtttgtttaattgtttctgaagctggtgcgc

SEQ ID NO: 70624 - DNA, 267 bp, Prunus persica
  Intron number 1 from transcript ppa016298m (locus ppa01629 8m.g) derived from phytozome v7.0 (chr-ID scaffold_5; pos 9646574 to 9646840)
ttggtgacaaacttggtaattacattatgaagaactccacaaacttgcagtttatttattttcccttttttttttcttttaaattaatctaagttatgggaaggggaatttgaattcagatgcagagtagggagcatatttactccaaccaacttaattaagcctatatccgttttttttcggtatttaatcgtcggtcagggaactaattcaagacattgtgatttggttttggtgcagtttttaactatccaaaaggagctcaca

SEQ ID NO: 70625 - DNA, 683 bp, Prunus persica
  Intron number 3 from transcript ppa001584m (locus ppa00158 4m.g) derived from phytozome v7.0 (chr-ID scaffold_7; pos 20182042 to 20182724 reverse strand)
ggagctacaaattcaaggtttgtacatctaccccccagtatacgtgtaatcacacacaatcatgtgcgagcctatgcataattgcctgctcacaaggagaaatagttaatttactgacagaatctgtagtgtaggtaatcagagtttaacatgcaatcatgaaattaggtatcactgtatcagtaaaacctgatatcgccttatcagtcatacgtatgggacctgatatcgccttatcagtcatacctatgggtccacggaaggaatcaggtcttctgattaggtcttgtgggaggtttcacgtttgaatcttaccccattgaaaagtatttagaaactttgtaccttttagatttgatttcatgagtgccatttgatagcaattcatttgtgcaaaacatgtgctgtagtggtaaaccctcactggcaaattgtaatcagctgtctgcagttcctttctggaaaatggattttttcttttattgcttgtttgaattttacagctcagcaacttgcggaacctaatatgtatactatcaatataagcaatttccactggtttttggtaatatcataatgtttctgttgccaatgttgaccggtcattttgccgacgttgtgtaagtgataaattgttatttccttcagggaccctgtctaaacaacacaaaaagaactctcct

SEQ ID NO: 70626 - DNA, 686 bp, Prunus persica
  Intron number 1 from transcript ppb007262m (locus ppb00726 2m.g) derived from phytozome v7.0 (chr-ID scaffold_6; pos 24351800 to 24352485)
ttcttgaagctcttgttatcgttacgccttttgaggttagtgcatttgttttcaagttttcaattgcaaatgatatatatatattttttgggaattctatggttatttgaatgtgggttggatttgtgtcgtgggtttcagttgataattctagaaaagcttaaaattttcatttgtggatttctctatgctctggcaattgtggcttaactcagttcattaacagagaatttaaagaatttagaagctgggcatttaggggtcttcagtaattacttcgaaattttgatgactgataagaaaattcagggaagatagtaaatcattttgtttattgaggaaccagcttagcctttgaattgctcattacacttattaaagtcattctcttcattgtttgtaagcattggtttgaagtttgaacatgtatggactgtaagcatcaatctgggattgcttaaattcttctgcaagttgtattagttaaatttagtttgcagctgtcgtggttagctggttaagttactttaagtttaagttgctgatctgttcattgaatacaataaaaaaattatacatgttcattatgagcattgtcttcatgaataatgggaagacttaagaagttgatttggaattttattggtgcaggtggtgaaaattagattgcagcaacagaagggatt

SEQ ID NO: 70627 - DNA, 610 bp, Prunus persica
  Intron number 1 from transcript ppa006329m (locus ppa00632 9m.g) derived from phytozome v7.0 (chr-ID scaffold_2; pos 1746757 to 1747366 reverse strand)
ctgacagtcacagcctcactcacccactgacccaggtatatttacaaaaacttcttttaatttttaagttttcctgatttaggatgtaattagggttcaattaaggtttcaatctagattttaatttaaggtttaattcaggtttgaagtgggggtctaattgagggtttaacttaggtttttaaattcggtgggttttgatattttcagctcctgaagttttacattttcactttggtatgttgcttttgggattaatttgttttggtttctctatattctcaaaatgcccatctgatttggctgttgattttggaggtgttttgtttgtttttgtttaatggatattttcaagagaattcttttgatgaagaaaaaacataattagataagatattcagcttagaccatgttcaaatcctggttccagccttgtcatccaaaccttgtcgaatggtgaatgtgggcaatctcagcattccaagtcttttcattgagccttgttcgctttgtttttctctttggtagctgagacaactgcaaataagggttgcactcggtcatttcaagtcatatctttgacattttcaggttaaattcagtggcaatc

SEQ ID NO: 70628 - DNA, 660 bp, Prunus persica
  Intron number 1 from transcript ppa013001m (locus ppa01300 1m.g) derived from phytozome v7.0 (chr-ID scaffold_7; pos 22072938 to 22073597)
atctgtacctcaccacaacctccaccatcatcaaggtcagcacttatctctctgtgcatctgattacattttcctcttatttaacttctacaactacgtttcggtttagaagttctgtgtggccgctgataattttaattgaaaaatgaaaaagaagaaaagatgaatggggcattaataattgtctaaaatctgaaactggcttgaaggcattttgcattctgtgatttttcttgaaagctacaaaattgcttctggaaattccaagtaacatttcatgtccgaggatttttgcagtagagttaacatcttctgtgtgtttgtataactgttaatatcttttgttgtctgtttttgacgtgggcaccaaatttgacttggtattattgtgcatcatcggcgtgtaaagttcactttagtaaactaaccatgctcaaaggctctatctaattctttaagattctctagttattccttaacaagtcagaactactagtgttatatttttgtaggtttttattgctataagacttgtttaggtttcagtgttggagcttgcaagtctggtaattttatcttttgccgaaattttttatatggctgacatctgttttgttattttcttgtaaccagggcctctaatttcaacaaacaagcaca

SEQ ID NO: 70629 - DNA, 651 bp, Prunus persica
  Intron number 2 from transcript ppa013001m (locus ppa01300 1m.g) derived from phytozome v7.0 (chr-ID scaffold_7; pos 22073601 to 22074251)
tcagggtatgtagatatttctttttccaattctccatactcattttcactgtccatatggaatatttattttaaaggagggtgcgagtatttttagagatcaaagtgcgatcctgattacttggcctgagaagtagccaaaatttatcttttttactggtaaactgcctttcaaaaatttgatacatatcaaaatgagggtacatcttattggtctagacctgtgtggtttggatccagatttgcagaatgtgtggcaaaccgctgaattatagttgtgtgcctctagggaccttttgttttggactgtgggagtatgtaatggatgagtgagtgaaggcttactttagttaattatgttttagaatgtgtgttttttgatactaggatctgtgcacttgttctgcattttatgctgtatgtcctatagaaggaaaattaagaagcccttgcaagttgtcttttatgatatcttctttggtcccttaatatttcacttactggatagtgcttcagtattctttttttttttcttttttttttctgttgtgatttccttaggatttatttggtttgcatgtgtatgtctatgtcaagtcaatttattgcttgtacagagaagaagaagttgttgttgctgctgagcctgctg

SEQ ID NO: 70630 - DNA, 685 bp, Prunus persica
  Intron number 2 from transcript ppa017295m (locus ppa01729 5m.g) derived from phytozome v7.0 (chr-ID scaffold_1; pos 44235053 to 44235737)
gaaggtacgtacgcctttgcttgctacatcaatgtgtcaacattaattcaaaggcctttttctccttacttctttcattttcttgtgtttcttttttccttggatttgttgacattaattgcattataaaaggtttactaatatgtgctaatacgataaaaataagagatatttagttatatacctattcttagcacaagtgatatagataccctacaccatttaatttctataaacaaacccgaaaaaactcaaaaaatgacagcaagccttattgaatttaattgtgattactttaatgccctactgagtgttttcgttttttattttttaatgagttttggagttgggcttgttttaaaaaatcgatggcagctttgtaatttatatgaagttcgaaacctctttgttatattgtaaatgagctttgggtgtgtttctaaaattcatttcatataggttttttttataatttgggcccctatattgagtataatagtgaatctccctaaaaataatgaaaatttctttataaaagtgcaattagcatgcgctaataagtggtggtttaaggggtagtttttacattaagcaaatgattaatacttttgggattttattttattttttaataattcttgttataccaggagttacatcattcagtatcgacctagagacaaag

SEQ ID NO: 70631 - DNA, 767 bp, Prunus persica
  Intron number 1 from transcript ppb011639m (locus ppb01163 9m.g) derived from phytozome v7.0 (chr-ID scaffold_1; pos 40863996 to 40864762)
agcaattaaacaagtatacaataaatgaaatcctaaaattttgcataccgaatgttatgacctttggttattatttgtattgtacttaatttttcaaaggagtcttatttatttttaacaaattagattttttacattgttttttattacggtatttacaatttgtgacttacagtccattatcaccatttcattttatctctaaattcaaagttttgcgttcgaatcctccgagaaaagaaagagaaaagaaagtttaacaattcgattatggttattgcaatttcaattttattggatactctatttatttcatcatagcagattagtcttctttcatcgaaatccatagcaaatagttcggaattcaaaattaatcttttatcattggtggaattcataatattaagcaaaattatgggggacaaaacacaagtccttgccaaagcgaaaaaaaaaaaaaaaaacggaattgaaattaaaatatgaaaacaagcaattttgcgtactttttccactccctctccgcataaacgcaaaccagagccatttttgttgggttctctgcctctacgtgttcctcatccaatcggaaaaggtatgatcttccctaagaagaatcgctctgcttttttctgttcaattttattagttgattttatccgtaatagttgtctttgattttgctggataggttgccatttcgagctctgagtaaaccctagcacacagatcagcagcaagtagaagagattcgcgcatttcac

SEQ ID NO: 70632 - DNA, 753 bp, Prunus persica
  Intron number 2 from transcript ppb011639m (locus ppb01163 9m.g) derived from phytozome v7.0 (chr-ID scaffold_1; pos 40864841 to 40865593)
ctacgtcacattcgtcatcgccggcgctttcctcggtgagcgggtgagactcagaacttagattagggctacttcactggttctgacgttttagtttttcgtcttctgttatctttattttggtcattagctgtttggttgctaagaaagtcttaaggaaatgaaatttgcttagatttgcgatttggtcattttggtgttgttgcgagctcagaaattataatttggtctatggattttttgaacctaaactggccttgtcattaaaaggagtgattattgcaatgttagtgaaaaatagatgaaacttgatgttgtttcttgtgatttagggtttcaatggtttcatatcttaatcaaatgcttgcttgctgtgagagacataaatttaagctaatactaaaaaatatatttgtttttaatgttgtgttggttcccaagttatatgcagtactcgtagacatttgatttctgaactcagtcaagttgagggtcaaacattatggaattatagaaatagaatctaggctacatacggagactgagaagaacttagagtttttggcccattttatgatttaggactgtgatgcgttgccctttatcagtttttttttcccttttcaatttgttttgtattgtttgcttctaattttcatttggtttcttctcttcctctccgaacgaagaacaaatatcggaagctctgatgtattttatttcttttcatttgctggtttcaggccgtggatt

SEQ ID NO: 70633 - DNA, 687 bp, Prunus persica
  Intron number 2 from transcript ppa021046m (locus ppa02104 6m.g) derived from phytozome v7.0 (chr-ID scaffold_1; pos 30987411 to 30988097 reverse strand)
atcagggcgaaggtacatacaggctcacatttttattttcaaatcattcgtccttaagtttattatgtcttgtatcttttcttcacatcgagtggttggttcctcttacagatttttaatttttaaattctttattttttataatgactagtgtgaatggatgtggttactctagtttatcgttttgttctttcattttgcatgcattacttacatttgggatgcgatagggtagctggaaactttgggagctgaaaattgtagttcataacttcacatatgcatatgcagaaagttgtaaaatcagcattgcaaagccatgagtcatggataaaaggagacatcttgaatttattcctaaaagttagacatgtcatctttaagatgtttatactggagttatgctttaaaagaccgttgtcattgtgctttatttccaaccattgagattttgcagcatggaaaatggctacatgtttgtcaattgaaaaacctcttgtttgtctgtctggtggaggtatgatcagcatgtaaataggcacgatttcaaaggtagcaaaattgtgaaaccacggtagcacgtcgaagcatatgcttatccaagttcactaatccctggaaatttgacttgtgcgacattaattgtttgcaggtggaacttttgccctgtattcatcactttgcagg

SEQ ID NO: 70634 - DNA, 738 bp, Prunus persica
  Intron number 2 from transcript ppa010377m (locus ppa01037 7m.g) derived from phytozome v7.0 (chr-ID scaffold_4; pos 3820750 to 3821487 reverse strand)
tttacaagagttttgtgaggtaacaatttcaaattattccggtataaatgatctatgctctatgaaagtttagttaaccagaagtaatcaaataattaaaggatttcatcacttcagtgtatttttgctattgttattcttcagtgatgccactttctataataatctggagactttaacatttagccactgtaatttggttgttgctgctgttactcatctaagcctctacggctacggtgaagtggttgagcagagactcatatttgggctgcgggttgggtagtagaactagaatctcactgatattgattagtttcttaagctgaatattttgcacctctcttattcctgtacaatgtcttgagtgccaggccatagatagaaagatgtcctgcaggaaatgagctgaataaacctgagtttgagacaaatcctgctaaaggataaaataatatagctttagacctaagctttagagacaaaagctaggactctggttcatcaataaatgaaagtatgatttggcttagggttttttctcccattttactatttgtctgtttactaacgagtttctccatttatgtagtatgtttcttattgcttgattctaatcatttatagtccttgcaacggatgctgattgcttgattgaaatctctatgctcctggcaacagtcatctcatgattttcactcgtgttccttttcttcagggaagtacacgaagaagcaa

SEQ ID NO: 70635 - DNA, 384 bp, Prunus persica
  Intron number 1 from transcript ppa010377m (locus ppa01037 7m.g) derived from phytozome v7.0 (chr-ID scaffold_4; pos 3821764 to 3822147 reverse strand)
cccgggcccacaagtacgtatttttctttctttttacgcaatttttgtttctgggtttaatttccatttccttaattatgcgtaatttgctagtattggtgtaattctgggttagggttcattttggtatctagggttcttactgttgtctgagtataaattatgagtcttttgggtgctgcttagatataagatgaaatttttgagctctctgttttggaaggtttgaattttatcgtccgctgccaacagtttcttgtgcttcttacaatatgaagaactttaaggatagtatccctagtctttaatttggcttcctgctaagatcaattttgtgtttttgttggtttatattcagagacaagcttgagctcaaagcagtta

SEQ ID NO: 70636 - DNA, 180 bp, Prunus persica
  Intron number 2 from transcript ppa017368m (locus ppa01736 8m.g) derived from phytozome v7.0 (chr-ID scaffold_1; pos 25534058 to 25534237)
tttggcataagcttgatcatcctaacattactaaggtactacgacaatggttatttgtttttgcttttcgttcttctgtctactctcaaatatttttatctttatttgttattaattctttttctttaattttcttgatgattagtatattggagccacaacggatatcgactctgcctc

SEQ ID NO: 70637 - DNA, 904 bp, Prunus persica
  Intron number 2 from transcript ppa013466m (locus ppa01346 6m.g) derived from phytozome v7.0 (chr-ID scaffold_1; pos 19103788 to 19104691 reverse strand)
tgattgtagctctgccaaacgcggcggtgatcttggttagcacctaactttcagaaagttcaaaattatggtttaggtttacaattgtgttttgtcattataaattatcccaataaaggcattaaaatgtgggaaatccaaacagaaaacgtgcacaaaactgtttagttacagactgcagtatattatctgaaatatgagcttttgatttttttatttgagaggaaacttagtttggtggaccaaaataattacaattcttgtggacaaggtgttcactacaaaccaaacagctaatgcaataaacctttagctatcaacagtgaaaaatcttggtaagaacagctttccaaaccctaagatagccaaagatggaccaaagctccaaataggccaatgcccaaagtaacatttaaaacattacgttatcagtttatcccataaaaaatttctctctcctcttatggtcttcaaattttttaaaattcttcaaagtacaacacccaaaaagtagccatcacctcccagttctgcaacacccctgcctttttccctccaccaaaagccttgtgcctttcacacaaaaaatctgtgcaagtcgttggaattacccaactttgcaaaagaatgacttccacctgattagttatggattaaaaatgaaaatttctttgtgttattacgtacgtattgtctaactactgttaagtaacatgttgatgagttttacttgtgatattttccttctcatctatcgttgctagtcatgtaaattatcttgctggaaagagaataggccctacataaggtctgtattaccatgatcttattcctcaaataagatttaaattattgctgagatgcatgtcatactattgctgcaggtccttttggcaagggccag

SEQ ID NO: 70638 - DNA, 649 bp, Prunus persica
  Intron number 1 from transcript ppa003328m (locus ppa00332 8m.g) derived from phytozome v7.0 (chr-ID scaffold_6; pos 7574305 to 7574953)
ttacttcagctgccattctctgctcgcccagtcaggtactggcttcttggattgtctgctatcacgaaagtgaatgaatttgtatgtattgggtatcatttggtctctcatttcctctaaaccaaacattgacctctgtggcttgaatttcttcgtagctttgccttgcacctgcctgcccttaattatctgggcattttgcttgtgtttttgggtcgcatattgacatcatttgaggtttaattgctttaagctttttgggttttgtttggctcaatcttcttagttccataattgtatgaattaatggtgttagcggagcttgtggaggacggtgaatgaatttttgtgttttgagtttcatctggtctctcatttcttgtgaaccaagcatgtgtttaagccctttagcttgaattacttggtagctgtggttggtaattggtttttgttgggactgaagaaatatgcaggtttaataatctaggatgtttgtgtgtagtttggtcatattaacagcatctgaggtttatttgccttaatctttttgggttttctttgttttggtcaatattaaaaattcattctttggtgtgaattaatggcgttgccagagtttgaggaggagggtgaatcagcagcaaaataa

SEQ ID NO: 70639 - DNA, 1008 bp, Prunus persica
  Intron number 1 from transcript ppa015222m (locus ppa01522 2m.g) derived from phytozome v7.0 (chr-ID scaffold_7; pos 8066945 to 8067952 reverse strand)
tggtttccagcaacaaaagcaagccccggcaggtgggacccagcagactgggctggcccgagggcaaggcttacgtcagccctgcatccaatttttttttaatcgtccacgtggcgcgcgctgggctctccgattagattttttccagcaatccaacggtagccaatttttgtgcaataaaaaaaagaaaaaaaaggaaaaaaataccaaaaaaattactgatttttttttctctataccttatttccattttcaacacttaagtaaatgtctttgtccttttactttcatttatttttatattactccatttacttaagtttacaatgtaaataaggaagtaccccacatttggattcaaataaaaatactagaaaatcaaattcccaccaaatcaaaatatgaaaaatcggttttagtgcaaaatacgatttaggctaaaaatgatggctcataagtaaatatatacttcatattaaaattccataaaatcaagttttcttatttgatgtgtaaggaataaaagccgccaaaaattatcttgagaaaatgattattccgaaaaccatttttcatacttagtcaatattgcacctccgcaaaattaaaaaacatcataaaatgcccagttcttgaacgcgcctcacgcacgctccataattttcacagatcccatttttcgctggtttcatcagctgagagctatcaaatttggtggttcctccgccattttttttttgctctttgtgctcatttgagccatggctgaaggacagcctggggtttttatggaactcccccgcttttctaagcggatacgatcgtcggagaaactcagttcagtgtgcgaagtcgaacctgtttcgatggtcgattcgtctgcttaaattctcccgccagcacctgtgccccagtttgtgggttctggaagctttcgtgataagctcatgaatcaagtaaatttggccaagaatgtgggtagtgatgttgactccttggaggcagatt

SEQ ID NO: 70640 - DNA, 653 bp, Prunus persica
  Intron number 1 from transcript ppa025409m (locus ppa02540 9m.g) derived from phytozome v7.0 (chr-ID scaffold_1; pos 40402482 to 40403134 reverse strand)
ctcttggctccctttgcaaggcctgcaagcctgaggttagttttgttattttttctagggattatagtttatgttccaagaatttttaacagatcaaacaaagtgagagctcaaatgggctccatggatttttatttgtttatttatttatttttgctctatttgatagatcctaaaagttgcaaaaggcagggattgttctcactgtgtttgatagatcccactggatctttctttctcctttacctttgaatgctgttcttttctggtccccaaccttacattgcttttgtgaagagagggacaactttcaccttcagctcattttaattttcttttcctctttttctttggtttttaatttttgaatatttcttttttgtcttttctcttctttagagggagaagaaggctaatgattttttttcagtgacaagttccctctcaattttttccttctttttctttttcttttcagtgtgtacttttcagttgctttgcctttttcccagaaaaagagaggggacatgggcttctggtctgtcacttacaattaccaagtcatgtgcttataatgttttttattttttatttttatttgttggggacaaaattcaggtggaagtggaagcacttgtgatccaaggaccaag

SEQ ID NO: 70641 - DNA, 699 bp, Prunus persica
  Intron number 2 from transcript ppa004512m (locus ppa00451 2m.g) derived from phytozome v7.0 (chr-ID scaffold_7; pos 17477033 to 17477731)
ggcaagaagggtgaattgaaaggtcagtctttgcttttggaatgccaatacagtgtggtattcctgttgatatttcttgctgtttttggacatttgctttatacatccagttttttataggagttttctatgtatgctaatttgatacatgagctttatgtactaaatttccatacatagaaaagcataatgtttttattgcctagctagaatgtaagtaaagacgttcaaactctataactaagttaactttgcagggttagatcttattacttactgcacataatgtctttggttgcctattataaaattatatttgttgtggccctcaaggtatatttagtaatcattttagttgtaagttggcaaaaatactttctatgtggtatatgccaggataagattcccccgctgttttcttgacgagttgtaagttatctttaatgtattgttgatacaggaaaacatacaaaatttattatttagcttaaacttgtttttatgctagttaattctgttacatggaacttttagtatatccttttaagttttttttttcttttctgaatttgatttccagttccattctaatatattgaattttttttttttcttttcttattgggaaatgtatatactgtttggctaacctattctgaacttgttgcagcgcgtacatatacagcaccccaaaagtgg

SEQ ID NO: 70642 - DNA, 965 bp, Prunus persica
  Intron number 1 from transcript ppa003066m (locus ppa00306 6m.g) derived from phytozome v7.0 (chr-ID scaffold_5; pos 10808222 to 10809186)
acggcaaccgatacgacctggtaagtttgcgttttgggctcgggttttgggagtttgtgtttattggttgggttttagggctttgatttatcgatttcatggtggcttattgaacgcattgtttgattaattgggataaattgaagaactgttagcaattgtgaattttggttattttgtttcttgacactttcagtttgggttttgattgttgagtttgtagggtttggctgattcgtttggtggaaaaacgaatggttttgattcattgcttcacagatacataaatatttactctccattgtttggaaagtgttgtttaagttggcattacggtagcatttactttcggaacttctttgttcatttatagggaaatttaagaaactagaatgtgatttttcagtttcgtctatgtttccctccctgagaaatgttttttttccatggtgtgggtatgttacatagacatgggttgagtgtcagatgtgggtatttgtctaagcttcaggttcacctgttttccttagatttttctatttggagcagccgtaccattttcattgtcttgtatcattgacatgattaagttggggtaaagattgaagttaagtgtctatgtaaataatttgcattgcttatgtcttgctgttggtataatgtatgcattccttacatacggaagattctaatcaagtgttatatttgtcctgtgcaattgctgcacatttgtatgctctgaaaatgttttacaaatgttgttgtttcttaaatttctctattgctgcttgtttttatgtactgtcttcctatttttcttcttgatattgtggtaattaggtgtttttctccgtatatcattttgaaaaggttcaggttgaaaaactttcattttctgggaatggtatcactttgtttatttcattaattttttggtgctgatcctgtaatcattttgtaggagg

SEQ ID NO: 70643 - DNA, 997 bp, Prunus persica
  Intron number 1 from transcript ppa020911m (locus ppa02091 1m.g) derived from phytozome v7.0 (chr-ID scaffold_2; pos 10194579 to 10195575)
cgattaagggccttcctctttcttcaactcccgaggtttctacttttctgttttttgttgttgcttgctttggttaattggtaatgggcagttgcgattttcacaaagcatttacttaatctttcattctctagactctggtgtgatttgctttgttcaattgtacatacgtatttagaggtaaactttaaaaagtttggtaatgtgctttgactcaaggaagcctttttctaagtgtaaactttcagttcatatacgttggactagtttcattactgcacacatctttttttgttggttgaatttatcaggggaaatagaaggtcaaattgaggttgggtacatttttcttctttttctacccatatatttatgtataacttttttgtctataattaaacacatgctttcacagaaggtttgactttgagcactttgaaggatgcatagcacatggttgtgcttcagactcttaaatagaagaaataattaatggtagcaatgtagagtttaattgtccttttgcaaatgttagtccatgcctagtgaaactcctcattgagcatgcttctatgattcttgtattaaaaagatggtgtgtctcttgaacttgtcaagttattaggcaatcatcttactatgtttctttctcgtttgatagcactacgttgaatgttgttgatgtctcagaagttaatgtggttatataacccctagtattttgtgggcagggtgacttttgagtaacctggttgaccaaaatgggtaaactagataatggatttaattttgacatgaatattattccaatcggaacataagaactttttggccattgaatattctaagccaatctgaataaaggatgtttgcctttcgtttttttctgtgtcattttgtttgcctcaacattatcatctgaatgcaagatttgaaggatttattcagcatttcttctttctggtttaggttgctccatcttcagtgcctgacagca

SEQ ID NO: 70644 - DNA, 556 bp, Prunus persica
  Intron number 1 from transcript ppa006011m (locus ppa00601 1m.g) derived from phytozome v7.0 (chr-ID scaffold_8; pos 11619102 to 11619657)
gtactagagactcttcttttattagagcaactcccaaatcaaaccaatcactaaataatttggtgcagctggtttaggctattggtttgaagtccaaatcaaaaccattttgactgccttatatatttttcatccgtataatttatggagaaaaattaaactaattcacattgcgctcatttatatatgatatgtcatgatctggtatatgatatgctaaataaacatatgttgaatttgtaacactatgtagctatgtgagatgtcgagtatcgttgatcttctttattgttaagtttttaaataaacaaatgtattttttaaaagaatatttcggaatattatagagaaaatgtgtttagtaaaatagtagatctagagccaaagggtaacatgtgaacaataatactttgatatacccatctattaaattttttgttttaatcgtgttccaaaaagaaaaggaaaaaaaaaaaaagagtagcttgcttgcctgacaatacaaatacaaatacaaatagctttgcccagctgagatttcttcctactcctcctc

SEQ ID NO: 70645 - DNA, 695 bp, Prunus persica
  Intron number 3 from transcript ppa024224m (locus ppa02422 4m.g) derived from phytozome v7.0 (chr-ID scaffold_4; pos 15346752 to 15347446 reverse strand)
gttcctactatccctgttcaacttcttctcactgggtactcttatctccggctcaagttatccttgttcggattctttgcttgataagtatttaatatgcctatttggaaggtttgtccatttcatattgtttgattcaaaactctcaactattcatgtcaattgtcaaattctacctgagttaaaataatcttcgctggacttagactgcccatgtttagggaaatgtttagactgtccaaaagtgtttattggttcttaaagtccttgaagtcctaacatgacatatttttaattgaaaaggaggccaacaaaactttaagaaactaatctgaaaagttctccattcttttactgaatgaggtttccattgttttctattgaatatcgaagttaaaaaaatctagtagattgaagagttccgttggttggcttatgcactcatcctataaaagaacacataaaagtgcgaaagttaattggttgaaaagtcttcttgttttcatgcagcctaaaagatcaccaaatttgtagatatctgctaaaatcagctttaagtttgaggggcacacacaaaaaaaaaaatcccttattcacattattgttgtattgctttcatgcacaaaagaatatggtaaaagcatcggtggaaattgtggttttcaaaatttctgtctgaatttggttttcagggc

SEQ ID NO: 70646 - DNA, 666 bp, Prunus persica
  Intron number 3 from transcript ppa018098m (locus ppa01809 8m.g) derived from phytozome v7.0 (chr-ID scaffold_6; pos 16975163 to 16975828)
agaaagaatttttcaggtatgctgggttatgcatgcatataatttattacagatgtgaattaagtttagaaaatcatgttttggaaagtgattttgtgtagttaaatcatttttaattgatgggtgatgggtcagctttagattgaatctaaatgatagagacaggccacttaccacaaacagatggactggaaatttcccttatctcctctcgtcccattttggtagctgacctaacaacaatctgttttgattattaattgtgatatatttgtatgccaaggaaacactaatcgtacatgtaccaaaacaaatctaaaagttgtggatcccactaatatgataaatgtcttctttgtttacgtttaggtttactcgcaaccttatttatttttaacagataagatattcagtcgtagatcacatctttgagttactaatatagaaaaaaagtgagaatagttttgatgacgagtgttactatttcgctaaacttggagattttcttgcttgatttcgagccttaggccttagcatgtagaaaaatcatgatttaagtagactttgtgagatttgatgagcataatgaaaattgtaaaagatgatgctattttcttatctctgctatcagataggcaggctagtccggggattcaaagcctaaac

SEQ ID NO: 70647 - DNA, 603 bp, Prunus persica
  Intron number 1 from transcript ppa015825m (locus ppa01582 5m.g) derived from phytozome v7.0 (chr-ID scaffold_7; pos 16225205 to 16225807 reverse strand)
agatgttatacaaaaactcctatttttagcatgactctagatttttcccctatttgccacatatatcctatttttatccagcacttttcccacaataatgatccaagcacgaagatggcggaccaattttggtccattgaccaagtcaaaggccaacttccacttttacctttttcttcttaaccgcccttttttctgttgctccgttcctggtggcgggtattatccaaaattagatttacgacctgcgccaacttgttgccacctaagctccgtaggacacaacattaatttttaccaccagaaatcacacaacagtcctacgtggcgtcacctgattggccagctcctcatccacaattaccacgcaacaaaatatccgggctcaaacgtgcgcggcaaatccaaatttttttcccttcgattttttaactaaaaactaaaaaaacagaaaaaagggaaaatcccaggctgttgctattcctcagctttcaaagctgtcggcttccttcacacctggtttttcctctttattattatatttcaccctatatgtaaagcatgaaaggctcatcaagaggtaaccgcatattctccgaagag

SEQ ID NO: 70648 - DNA, 646 bp, Prunus persica
  Intron number 1 from transcript ppa020769m (locus ppa02076 9m.g) derived from phytozome v7.0 (chr-ID scaffold_6; pos 23157146 to 23157791 reverse strand)
gcctcaaagctactggtaaattcttcatagactacaagactatatgtatataaatatgtgtgtatagtatttgctttcttgtaacatggtttgtcgatgcagataagattttcatattgctaaactatgaatatgtatcacgcattcaaacaagaattaacatatattagctagctttttgtatagtgttttttttttcaatgttagaagaagttctaagttcgaatccacatacctcgacaagaattaacctaaataattgtccagattcaccatatcctaacatgtttttcttcatttgggtttcatgataaattttaagcctaaatgtgatattatatattcttagtgattgaaacatttggtaacagaaaagactaagaaacaacttcgttttttttttttttaagaggaccgtttctatagagaggggcgatagtatactaaactcacacacaatatacggatgctaagacttgaatccagaatctttcttggaatgagtaaatgttccaaaccactacactagtgggtcttttgcaaataagaaacaacattaataagttgccaacatcaaatgtcttgtaatgtatccttatgtcgactttttccttcttgaatatgtgcatgcaggcaatcgattgac

SEQ ID NO: 70649 - DNA, 955 bp, Prunus persica
  Intron number 2 from transcript ppa017459m (locus ppa01745 9m.g) derived from phytozome v7.0 (chr-ID scaffold_5; pos 1534408 to 1535362 reverse strand)
ggtctttgattgggtcgtttctttgtttcatcaaggtatgattatcaaatcgctgaggtagcttttattctacttgtagccgaaccatgttttgattatgcttttattttcttcttcttttggtactaatttttttgattctgcttttgtttgttcttttagttgttaagaatgattgttattttgtaattgccatctccaaattccttcctcttgttatcaacgtataaggcaacacttttcttttgttgatgagagatgtctcacagtgggatggttttccagtttggcatcgatgatatttatagaatgcaagaaaaagaagattttgctaagggtagaaaatatagcataacaaaaagggtgaatctttagtttcctaatgtatttgttagtttcctagattctttagttttgtaaattctagtaggatttcaacttttccagatttccagacttttagttttaagtttccatttttatttgggttaggatttctgtttaagcaagggatttttatcctattatgtctaggttttagtttgctataaatacccccatgtagttctttaaaatgcagatttgaatgttgagtaaaccttttcctagaactctctgatttggtcctttcgatttatatttcttctcctcgatctcgatatacttctttgttctgctgtttctgccctttatctcgtcttttcgatctatatttcttctcctcggtctcttatattcttctcctcggtcacctacgggccgtactacgtcaattggtatccagagccaggcctcaatttcgcttgtgtctactctctgccatggcaccccaaactgtggccagcctcgcggaacaatgtcatgagttccaagacaaaatttctgacgatattgcctgcattgaaacccaattctccaagctcagcgctgaacaaaaagaagagttggtacaggt

SEQ ID NO: 70650 - DNA, 810 bp, Prunus persica
  Intron number 1 from transcript ppa023201m (locus ppa02320 1m.g) derived from phytozome v7.0 (chr-ID scaffold_3; pos 3136505 to 3137314 reverse strand)
ctacgcctacgtcaacttctactctcactcccgtaacggaaacgacactcaaaaccccactcttttgtcttcgttttctgtttgacaatgtatagtagctctgcttcttctgtagatttctcttgttatgtgactgtatcttcgttatattggctgttttttgcttatggttccttgtagttttcgattttgtgaaatgggttttctattgggttttattttggttctggtggctagggatcttttgtctagctcttagttgttcttttttctcttttttctcttttttttggggattttcttgtttaatggtgaaccaactttcattttcctgaaatgggttttgggtggtttcgtttcttgggctttatgtctttttgtaatagcattcttggttactcaagtgtctgaaatgggtttcggtggttttgtttctttttcgcaatggcaaccttggttacccagtttctctgcttcgggtttattttggttctggtggctttgtttcatgttattttggttgcattttcttgcttaatggcgaaccaactttcatttttctgaaataggttcttggtggttttgtttcttgtgctcaacttctctgtttggattctctagttagatctcctcctctgtttgcatatttgcatgtatgcttttttgtttcctggccagatttcttactctctgagtttcttatgtctgctttcatgtttgatttctgcaccaccttttttgatacgttctatttgatctttgatgcgtctgtttactttgagttatctgttttgatcagcatccaaggct

SEQ ID NO: 70651 - DNA, 1045 bp, Prunus persica
  Intron number 2 from transcript ppa011671m (locus ppa01167 1m.g) derived from phytozome v7.0 (chr-ID scaffold_1; pos 29535929 to 29536973)
accacttggaccgtcttcttcttcgtcttctcctggtaaatttaccattttctcccccctcttgttttgtaatttcttgtttatcttattagtaatttagtacacactggtcccactggagtgtcttaatctcagctcgagggttggatcaacggtcataatccttccatctttagtagaacttagaaggaaggaatcaggttcaatctactaattgggtttccaattatgaccaaattacttattcatttggttaatatgtcactcatcagttgtttacgagccaccacctgccctgctctgccctgtccgccgcctacatgtttcttgtgatggcgaaaatctgagacttttgcacttgcttttaataattgccacagtgccactctacgtttagatgatctaatggtttattggagttgttacacagttacagtgtattcatttttgtttttcatttgtctggaatttggtaaagaaaagttaaagtagcttaagtcatgatttagacccaattcccttactttggcccctacctttacttatcgtttcccctttatcgatccgagagtgctttaatttcaacatctttgacattacgcattgtggaacttatcaatggatgatacaggagcatatccaaaacttttcccaaagtttggttcttaaacaatgttatagacgatatggcagtatcttgttagaaataagcgtggggttaagtgggtgtagatatgaacacatgaaacactatcgcttcattaaactacgttggtttagagttgggactgttttggtatctctagcattacttacttggaatagtgacaacccaaataaacagtatggattccgctcgtaacctccattgtgaatattatttttcccttgttactcttgcgcgcttgagccttgagtgaatgctgttccctactctctagtattatgtttgtgtaaatgatctcatttgcttcattttgctaaatcaaaatctgaagactctgaactatgaattaattaggacaagctttttgggagccgaggc

SEQ ID NO: 70652 - DNA, 783 bp, Prunus persica
  Intron number 1 from transcript ppa018333m (locus ppa01833 3m.g) derived from phytozome v7.0 (chr-ID scaffold_88; pos 7580 to 8362)
gaggctagaacgaaacaattggtagaggctgagagggagcatttcctgagtcagctttcccaattaattctcaattttgatccaagcatgcttaaacccagaattagccaaagtcccaaaaatccaatgtctgacacagcaagctgctctggaggtgatgtgagatccctacattttgaggatgatactgccaaaaatgggaaacatcaggaataaaaggtaacatatctgaactttgaattctctgtttttttttaaaccattagacgtcgttattattaataaaaccgtcgtttgaaatacataccacgacgattttaaacgacggttttaaaaataaaccgtcgtttgtatttcaataccacgtcgtatttagtttacttgttttacacgccattaaacgtcgttatttttaaaactttgtggtttttagacgacagagttagtcattcccgacgtaatagatgaagagaagaaagaagaaaaacaagatgaaaaggagaaagaagatgacgaccaggtatgttcacataactttgccttttttatttgtttttcaaaattccagacgtcgatatttttctttaaaccgtcgtttgtttacaacttagacggcggaatttttttttaagacgtaataaattattcaccacgacggtttctccacgtcgtttaaattcttttcagacgacgttttattccttaaaccgtcgtttttattgaattaccacgtcatttttttatttctttaaacaggttattaaagttgttgattattcaaat

SEQ ID NO: 70653 - DNA, 917 bp, Prunus persica
  Intron number 1 from transcript ppa012852m (locus ppa01285 2m.g) derived from phytozome v7.0 (chr-ID scaffold_2; pos 8266377 to 8267293 reverse strand)
gcctgcatctcctcttcgcaaggcctcgccttcaggtgttcttctcaactctctctgttcgcatattctattattaattagtttattcttgacaataactttgtcagaaactccttttataaactgtaatccctggttgcttcttggttgtaagaactcaaaaatcaaaactatccgaacattaaagtgaaaaggaacaccaaagtaattgaaagttgctgttttttttttttttttttgattaatacatgctatattaggggagatggaaatcaaatctaagactccgggtgcaggataaatgttgttaaccaattaagctataagtcacttgcaaaagttgcttattaagaatcaaatatggttttcgtggatcaaacggaaacgagaggggaataattttttaaggaaacaaaatataattagctatgtcctttctagaattaataataaaaaactaggatgctaagaagaattagcaaaagaaatacgagtgctcggataataagttggtagaagttatagtttgttagtcaaatacacttagttttaacggttgggttgttgcagagaacaagaaaggaacaagttcagttgaacaagggcatatttaacattgaaaattcattgagtgaaacacaatttgagcattcgatttgaaacagaattgacaatcgagtctattaccattacaatcttttcaaattcttcttcctctacaagtttttggaccaaaaagaaagtcgctctatttgacaataattcaaccacccccaatgccagataaaaaaaaagtataaaaaataaaaatttatatacagaagttttctgatttcctaatggcaaaaagaaatctgtgaccttgttaaacaagtttcggtactggttaacttctaaaagaattcgttgcagaattt

SEQ ID NO: 70654 - DNA, 899 bp, Prunus persica
  Intron number 1 from transcript ppa003907m (locus ppa00390 7m.g) derived from phytozome v7.0 (chr-ID scaffold_3; pos 2932993 to 2933891)
ctgaggtacgagtagtgggttctgtttggtttctgagaaggttttggaatggagtaggaaaatggaatcttgggttttgcttgtataatgtttttggtgtgagaatggggaagtgtcagcttagtggagcatatagattgtgggaatgtgtttctagtgccagttgtgttgctctcacttctcatttgattttgaaatggatatgcgatgttgtttttatctatttgctgatttttttgcgaagttaggagtaatacgagatggtaagtatattgagtcacagttagttttgaagtgaattgaactatgatggttgtgaatccttgcttaaacattccttctaaattggtgagtggagctttaacacaaatttggtaggataggaggcatggattactgaattattctagcttagtgatctatctaaatggttccttggcacgaattgtgaaacccattgaaaaactagatcatgaatgacactaaaaaaggaaaagcagatcacttgatatattgcactaattttggtctgctggagattcgttatttgaactaaatcaaatcagaatggaatattaggttaattgctttccaatgtgtctgttcataatatgtatggaggttttttgtgagtgacgttagccttggaaaagaaaacagaaatagcattaacagaagcaatgtttctttgctataagttgctgttatatataacttgagatgatgtgcaacttgtatttggtttcgacttttgtttgatttcccattcccacacaattcataggctagggaatacaatagaaactatatcatgttctttttaataacttttcagattaaaacatttcttgggtgaaagtgcaggtgataaaggtaaagacaatttctcctcattggga

SEQ ID NO: 70655 - DNA, 607 bp, Prunus persica
  Intron number 1 from transcript ppa022069m (locus ppa02206 9m.g) derived from phytozome v7.0 (chr-ID scaffold_5; pos 14081311 to 14081917 reverse strand)
agtttaatcaccctcgtggaaggaaaaccaataaggtatacctcccttctttttccttcatcatcatttgcatatgtatgtttgtggtgaaagattgagactttttatgtttgcccggcctcagttatcattatttcagctgagaagccatgcctgtgtttctatagtttattggtttagtcgttagtgtataatatgtatgtgtgcatttgctataatgtatttatcggttagtatattatgctgtgatgatgatttttatcagcggaattgactcgaaatgaagggacgcaccaccttcatatttgcttaaaatgatattgccgtagaagagatttttgcggtgattcaaagctaaaagcctgaaactggctttgttgttcttttttcttttggtcaaactggcttttttctttacatgcatctttgtggtgaaatttgttgtgcttgtgccagagaaatgggggctttgggtctcccttggtgtttgaaacgttgatgtttcggcctaatatgattgcaggaaatatttctgttgtcaatgctcactttctgtttgttggtgttttgaaatttatcatattaattgaaggtgtctaaggacaag

SEQ ID NO: 70656 - DNA, 731 bp, Prunus persica
  Intron number 1 from transcript ppa011208m (locus ppa01120 8m.g) derived from phytozome v7.0 (chr-ID scaffold_6; pos 15681036 to 15681766)
gctctacttcttttcataatttcaaagtttcaagggttctgtttttcctttgaatttcccattgattcttaacgattttcagtgaagttcgctattatgctttagctgagaacatttgtaatctctgagaaaaaagtgtaaccaaaaaataaaaaataaaacttgggtttaagctttgggtgcgtgagatttagtccttttagtttgcttcatgttattttgatttatcaatgtggtagtttttcttcttcttcttttcctttatttttgggataattgttaattgatggtgttgttgagtcacaaagaaacagcctctgttatctgtgcataaatattattggagttcagcgtttaaatcccagaaaatgtttgtgtgagattaaatgttggttagtttctctcaaggttgggttagtatcgtgtcgaatctcgataattaacaacttgttgaactttggtttacagttttcctccattctttctaagaaaaattcatgtttactgaaaactgtgatgttgtatgggttacatgtaattcaaggattctttcaccatgtctccaattcattgacttcgattatattatagtcagtgaatttacaccgaaatgacctgtagaattatatgaagtatatgctggcagtttattgatgactaaatggataactaagttccttgtatttcctatttcagttaaagactgctaaagaagaggttgaccttgcatt

SEQ ID NO: 70657 - DNA, 610 bp, Prunus persica
  Intron number 1 from transcript ppa006915m (locus ppa00691 5m.g) derived from phytozome v7.0 (chr-ID scaffold_7; pos 15290268 to 15290877 reverse strand)
tcctcctcctcctcctcctcctctgtcgctctcaggttcgttcttcttttttcttgtctcatttccttactgcatctaacttggtttcgaaaatgtccattggatcttgatctcatatttcgcaattgctttagacaatatagggctaattgatatgtgcttttttgttagcataccatctgtttgtttagatccaattcattcattgcattctttggaatgtgtacgtaacgttttgatttctctgtttaatgctttgaggatttggtgttatggttttgtagctgcatgatctctcattttcgttgttagatcttatcaagaattctgctgtttaattagatcttagatttatggtcacaatttttttgtttgccttgatttgttgccgatatctgttgataattctgttcatcaaactctagattttgttgaaatctaaattctcatatcatcagttagatattgtgcatgatttaacaggcaatgagattgagtatgatgggaattgtttagacattacatgtgcttctctgttgctgagatttcaatattttaatgtcaaattggagaattaacacataatcttttggtcttgatcagtttagag

SEQ ID NO: 70658 - DNA, 266 bp, Prunus persica
  Intron number 1 from transcript ppa020232m (locus ppa02023 2m.g) derived from phytozome v7.0 (chr-ID scaffold_2; pos 22083714 to 22083979)
gatccacccaactggcaacaacaggtaagggttttcattttctcaacaattttttcttctagcttcttcataagaaaaaaagttgaatttaaagataaatattcttaccctttttcaatctatatcttttcttgaatataccagttattgattttgtttatttttgaacttttttgccttttgatttcatagcaaacaaatcatcaacaacaaggaggttgtaatgatcagaataatcatcagcttcctccgcccccacctcaaga

SEQ ID NO: 70659 - DNA, 621 bp, Prunus persica
  Intron number 2 from transcript ppa003002m (locus ppa00300 2m.g) derived from phytozome v7.0 (chr-ID scaffold_5; pos 5054894 to 5055514 reverse strand)
cattgttgggcgtgattttcttccgagagggtcaggttaggtttatgcctgggtgaatcgtatatctgctttctgattattgattttcaatttttcgctgtttggctcttgagaaagcggaggaaagaaaacgaaaaggaaaacaaaataatattaaaacaagtcaactacttttcaacgtagaggagtaatagtcaactgagtcaaagtaagcaatttaaaattgcttaaattatggtttaaatttatcttttgattagaatatcacacggccactctgaaggtttgctctgctgattgttaattttcaattttgcgctttttgggtcttgagaaagcagaggcaagaaaatggaacaaaaaataaaatgttaaaagaaaagtcaggtatttgtccacataagaacaattaaaagtcaacgaagtgaaactaagcaatttaaaattacttgtttgatgtttgaatttgtttttttcgttagaatatacacagggacacactaaaggcttcaaaactaatttatgctttactttgctccctcttccttgtcgagtacatgaagctgttatgttctttggtttgcagggattgtgacgagaagaccattggtcttgcagctg

SEQ ID NO: 70660 - DNA, 537 bp, Prunus persica
  Intron number 1 from transcript ppa006943m (locus ppa00694 3m.g) derived from phytozome v7.0 (chr-ID scaffold_1; pos 10756962 to 10757498 reverse strand)
ctgggaagctgaccttccccatctccgtcaagcaggtctctttttctatctcaaggaaaaagaaagaagctttatattgatttgagtttatggtcgaatttatatttgtgtttgatctcgctgcattaacagtttccaatatacaaaacatgatggcggtttcggtggaaattgcttgtttttttttctgggatgcttctggtgtgagattggagtggactagttaggataattcttggtccttctatgtcaattgctccaaattctgtctttgtaatgtttatagaggatagtggctgaaatttcctatccatttcctatgtagagtgtttatgagctaaatttttagatgacagtatagtgatacgaagagcctaagatcatgtcaatcttgttctgtgctctcattatgtttgattttctgattggaaactcttgggtttgccaaaattttgatttattgttttctacctttgaaatcttctttttacatattttcaatatctgttttttgctggctgcagcctggtccaaggg

SEQ ID NO: 70661 - DNA, 804 bp, Prunus persica
  Intron number 1 from transcript ppb007280m (locus ppb00728 0m.g) derived from phytozome v7.0 (chr-ID scaffold_2; pos 19230147 to 19230950 reverse strand)
ttcactgacaactccgctggctccgccttttgctggttctctctctctctctctctctctctctctctctctctctctctcaatttgaacttgaatttcgaaatttcgtgcgcaaatgcgtttgaatgtgtttgtgcctatgtgtttgagttcatgaatcatgaatgagattctaagtgatgacttgtgatttgatttgaattattttgctgtacaaatgttgtttctgtgtatttgagcttctatctttacgtctacatgcatgcgattcagaaatgaaggatttagattaaaatcggagctgtgatttgaatttttctctattttgctcgtaatttgaagctgaattatgctttgcatgtgcgttgttcttcgaactttatggacttcgatctttctaatttggtcaaaattttgaaaagttcatgattcagttagttcaatttcaagcacagatttgagttttcgtagagaaaaatatgtttacagagaacggtatgatatatctgtttgttagttgcagaggaagctgttctagtataaatctacattgatcgatttctaagaatgaaaactctaggtgttttggttcctgtttggttgccgagaaaaacagagaaaacgagaaatctacatttttcacctgagaaatcctgagagtccctctgtgtttaatttggaaagcatttcaacagtaaccaaacagagcgtaactaattttcgaattttcagaggccgtaactaattttcatttgttgtatttaaaaaggtacgaagaggacgtttggacagagatcgccaagt

SEQ ID NO: 70662 - DNA, 596 bp, Prunus persica
  Intron number 1 from transcript ppa001458m (locus ppa00145 8m.g) derived from phytozome v7.0 (chr-ID scaffold_8; pos 19062247 to 19062842 reverse strand)
agggtttatcctgccaaaccctaggcttaatcctggttaggtttctcgtcttttttgatttgctgctaagcgtgtagtctgtgctttgcttctttaatttgactataatttctttaatcttcaatgagttagtggccttagtggtgttagtatgtagattgtatatcaaacacacataaatttggtacagttccttgttttaggttctcttagaaaattataatttcgattatgaaattaaagagtggtgcaacatattattgtttattggaaaagggagaattcatataaattgttaaaattcatcgagattgcttgatttttttttatcctatccaatataaagtgtaaatttcaatgcaatgaacctaaacttcgtttcccccaacgcatttatatggattgggttcttcttgttttgattgattagattgaagtcttgaaaggattatttgcacacttgttctgtccaaactgttagtgagagatgtatttaagtgtgccactcttgctgtctcaattgttgaagagcttataagttttttgtttatattcttgcagtttgcacgatactagagcaaaaatttgatcgtcaa

SEQ ID NO: 70663 - DNA, 753 bp, Prunus persica
  Intron number 2 from transcript ppa004501m (locus ppa00450 1m.g) derived from phytozome v7.0 (chr-ID scaffold_8; pos 10437650 to 10438402)
cacatccggtaccgggatacagtaagaattatttggaggtttccttgattctcttgcttttcgacttgggttttcttcatgcattgtttgattccgtttacttgaatgtgctgagttgtcgtgttgtctaatgttgtaggtgctatggtatagaaatgttattgaggttttgaaaagaaacaaatgttgtctccatgtggttatgttgttattgatatagaggttttatctatttctaagagctccttagttgagaagttgcttaaaattttctctgattaatgtacttactatggtgtgtgaagaatatccaccaactgaggcggtgttaaggctttgaggtcgaggcagttgcatgtcagttgcccgtgttttatccattttaaaccaatttctgttctgtttattacatgatgcttggaacatgtagtatttgagatggctaaattcctttaatctttggcttaaacatctcaccatttctttgggcataagattttacatggatatacatttgaagattggtacaaccttttgtcgtgcttttagattccatgcctttgtttttgttctttttaagcttctgctgggcttttcttttcttcttgtatacttcatgcctatagtaattgtatttcttttccctcttttctaataaatgttttacttgccatataattaatcctggacagcatttatatccttaattttcttttgtatgcaggggggattttaacttgagcaactttgaag

SEQ ID NO: 70664 - DNA, 940 bp, Prunus persica
  Intron number 3 from transcript ppa011100m (locus ppa01110 0m.g) derived from phytozome v7.0 (chr-ID scaffold_2; pos 114664 to 115603)
gctcaagcttactcgaacacatcctgaccttgcaggtacatagtgacgtgtgcttccggctgaaattgcttctcgtatttcataactgcatttttcttcccagcaatcattcttttgatttttttttttttcttgtcatttgtgttctggtagctttcacgcattcataattactgagtttttttccttctctggttatcacgaactctgacttatttgactattctttcttaaagcctttgtgctttttgataatcctaaaggcaattctcaaaagatataaggaaagttacttcaaacttttccaaatgaaaggggttggattgggagggcttgtattctatcttcaggagtttattgaggttcctaatttgttctttttggaaaaaaaaatgtttagcaatttttaattgtgttcttaaagcacaaagctgttaatgatatcctattttcaatttgagcttgacgaggtgcatctcttgctcaaaccttagagctacatattactttgtgtgtggatctatgacctctacagacccaattgtctaatgtatcttcattttcaggccgactgaaccaatgtattctggtaatattattcctggattatccagagggtttctgacttctggttgacaaaatcttcattgcttgcagctagaaagtaccgggttttcttagcgattctcatttacctagtgtgcctgcattgaactgcttaaagaagctaatgaatgtagctacttcagtgtgtatgtaacatgtatctgagataggttattcgtcgtgaatttatgatgcatattattataagttcaggaaacaacttgtgatttatcatattgttttaagtgcagtcattgttagatcaacgttagcttcttgatatacgaattctgtctcaggtttaaagggacagtcaaataagagactgatttca

SEQ ID NO: 70665 - DNA, 858 bp, Prunus persica
  Intron number 1 from transcript ppa004144m (locus ppa00414 4m.g) derived from phytozome v7.0 (chr-ID scaffold_4; pos 2015671 to 2016528)
cttcgcctctctcaattccgtgcttcttggatacggttggtacttgaacctgatcttcaacatgatctatatgttttcagcttgatctgcttaattcttgatatactattttggttttattcaattttgcttttctttttttgttttcaatgtattttctttattttaatatgtttattttcgatctatttgttttgtgaagactcaatcaactggagttatgtgtcagactccatcaacttcttcagttgtctggcattttatataaacaatagatatagcacaaatatagtgcacgtttaacttggtgttttagtgaacttttttctgcaagatgtaaaattttctacgaatgttttcaacttaattgttaaaagacacttgttgtcttgttggattaaaatgttacaagcccgtgaagacagttggatcatctaagtggacgcaattggatgcagatcaagagtcattttagtttacatattgagataacccaagtgaacagaaatatcatgttttgggttaagttccagaaatatagggtgacaaatttcacctctgaagttaaaagtgtcatcttgcaatattcttttttaaatgctttgagcaattgaaactagcacaatgaagtaaagaatctgctttgacaatgaaagtcatcgcctttcgagaatatgttgttccattgtttttgctttttctctgggcctaatccattgtgattttggtttttatttaagaggattcttgaagtcaatcttaacctttctaatttatgtccctttacttagctggtaatgtgggtttagtactactgtacaactgcgtggtttataatgtgtatttatcaccatgcag

SEQ ID NO: 70666 - DNA, 257 bp, Prunus persica
  Intron number 2 from transcript ppa001473m (locus ppa00147 3m.g) derived from phytozome v7.0 (chr-ID scaffold_1; pos 9925525 to 9925781)
ccgtcgagagagagttccaggttaatatctccatctcttcttttgtttttcttttactcacaattcgatctgctatgttatttgattgcttagaaagagcagcaaaaagacagtattttttgcattttttttgtcaaaacttaatcaaaaaataaagatttagataagatactctgcttagctgaaaaaaaaaaaagattttttttctcttattggccacaggttcttcaggcattgggtactcatacactggttcc

SEQ ID NO: 70667 - DNA, 1015 bp, Prunus persica
  Intron number 1 from transcript ppa019341m (locus ppa01934 1m.g) derived from phytozome v7.0 (chr-ID scaffold_2; pos 5597587 to 5598601)
gtggctaaaatcaaagggtggactacaaaggataggttagcattacttctttttcccctcgactcaaaagctctccttggagcacatataataattgtgaatttatattttatatatcacctttgtaggagggaaagtgacttataattccgttctatttgatataattttgtagtgacatttaatttgcctggacctcatgcatgaaaatcgtacagaaaaatatttcatgataacattcatattacccattcataaaaaagaatttatatggggaggctaagtttattttatgataaactaaaaaatatactacattgtttttcattactgcagaagaggattggaacttgggaacattgggaagagaaatttttactctatccaatgctatttgattatatatacacttttttaatcatttttatcacgtattgatgaagtttctttggcttaatccaaaatatgcatcgtaacagtgaggagttcttaatttgaagtcagatgctttcgtaacagagggaaatagttttgaaattttttttgggtagctttctatttctaatcatattttaggtcacagtgaggagttcttaattcgcagtcagctgttttcttgacagagttaatgatattatggacaacaacttattacactaactttcgacgataactgatgtgaaagtgattcagttgttttcattctgcgtcttctatgaactttttttattcatagcaagtaaaaattttcgtagccattggtatctcaaagttgagcattattgttccattaaggtgttcttagtttttgggttgaatggctgtgatgcaatgggttagccctgagtccaatccaaaacttcttataaaatgcaggcagagctaccactcggctactagaggtggtggcaaaaacacaaaatgcaaagtgtatttttattgctttttgtctatttatgactcatattagttcagccatgcatgaccttgattattgtcttttcctcttgaagat

SEQ ID NO: 70668 - DNA, 1053 bp, Prunus persica
  Intron number 1 from transcript ppa024279m (locus ppa02427 9m.g) derived from phytozome v7.0 (chr-ID scaffold_3; pos 16865966 to 16867018)
gtccttttactgctatttccttcccttctcgtagggtacctacaaattaatcacttcattcatgtccttatctgttattgtagctgtgtgatactatattttcctttagaaagagaaaaacaaataaacaatcaccttgtaaactggaccaaatcctccttccccgagtttgtttgtgatgttgattttgttcattgcaatcaatatgctatcaaaattatagatgaatagctccgatggatcttggtatttatgatatattcttgaagagtgtctcttgaattctccgtagtatatcaatactcggcattcgcgatatacctgaaattttgtgtattgaatatttatttgttatttgttacttattagtggttacttttttagtgatttcataatgcaaaatccatttaatgttgtattttttgaagcccagcccttctctcttgcccaggcccttttctaaaccctaaacataacacgcaacctctcgtcttcttcaatctcatcgtcgtctctctctcgcgcctcatatcaccatcgtcatctcgtcccagaccttggagttccaaaatggccttttctttcttctaggcgccagcgcccgcctagaccgcctagcgcccgcctaggccatttattcagatatgagtgacagtttgttcaaggatttaacttttccgagaattggaaaagaaagagacgatgcttacattgttcctacaaccttttggttattagcaccatgattttaactgtatctgaactttgtgcagacatatactcaaagttgctccaccagtgagtttgatctctcttaaacaccgtagttaatgcatctccagcaagaacacacacacgcatagagagagagagagagagagagaaagcataaagggcatatagcttttatgtctaattttagggtattttgacttgttccaatatgattttatgattcttcctttcatgtttactgttgtggtattttgactttgacatatgtattttggttgttcagcagatcaagtttggttggaaaattgtagttggctc

SEQ ID NO: 70669 - DNA, 860 bp, Prunus persica
  Intron number 1 from transcript ppa008635m (locus ppa00863 5m.g) derived from phytozome v7.0 (chr-ID scaffold_3; pos 19623389 to 19624248)
tttcgacatatttgagatttatcgccgatactgtggtaatttcctctacctctttcgtatatttatttctccgattgtcatttcacgctcttgttcattgattttatgctctgaattcatatttagcgccaattctttttctcaaggttgttcatttatttggctatgaaatttgaatattttgtaggtttttttgatgtgtttacaaagccgttaattcctttctgctgggttgtcaaaagttttatttttggtgcgagaaaatgtgaaaatgggcactttacttttgcgatgttttccttactgaagttgggtcgttaattattctctgtttgatcgctgagaaaatgtggaggggaattccagtctgaaactttggtcttttcagtgtttagctcacgtgaagacctgcagtgagctgaatttaatacgtcaatctgcttgtttgagattccaatctataaaaatcccagctttgtgatagatatggtgcaaaggctatatatttcttgcttcctttgtcttctaggctttgatcaattatcagcttcatctcactgcatgaaagttaatctttttatgctagctaattgcatttgtcactgtcagtgaactacaaaaaaaaggtttcggattatctttaaccatcttagaaaataaagcaaatgcatttctgatttcatttagcttgtccttggatatacttcctcaaacactctacctgcacgcaggaagaaaagctttctttttgtttatcagatatgagttgtttgttatgtgaattatcaccagtcattttaaaagtttcaatttggattattaatgagtctagaatagtaattctgactgttaaatggcag

SEQ ID NO: 70670 - DNA, 915 bp, Prunus persica
  Intron number 1 from transcript ppa019793m (locus ppa01979 3m.g) derived from phytozome v7.0 (chr-ID scaffold_6; pos 6074425 to 6075339 reverse strand)
actactcgtcagctggctttcttcctcctcctcaggttaattaattatatattataaataatatatctctctcatttattattttttcctttttgatttacacagtgatgagaaatgttctagttggggaaagagagagaatattcttctttcttccttgtaatcattttactttatgcatgcatatatcataggtctgtttctccatttgggttttgagtaatgttttagcttaattctttcaaatatagatattttgtcctatatataggtctcttcccccttccaaaattatttcaaagcactctacttatcataaatacattactaacaccacattagcatgacataatatagtgattactttatggaagccctacaatacaaagaccagcacaagttgattttgcagtaagagtgtcacactaatagagaataaagaaataaacatatatttattataatataaatatactgtaatagcacgtgatcaaataattacttataatttcattaattacctggccatggaagcaaatttgttttattagttttgtttttttagtataagcaatagtttaaactatatgaaagaaggttctctaacacactactatgattttacgggagttcgaacctgatactactttagtttgtaaaccaatgccacttttttcattggtctagagactccattggcattaattaaatttttgtaagagcattaaattcatgaatgacaacttaagagcaggccaacatggattaattcccctcagcccacatacaagttcatgaaaaatacagaaactaaagttatcttattttgctgctgatttttttattttattttgtttgaatgctctctgtttcggcttgaaactctgtttctggttttgaaggtgggagttgaag

SEQ ID NO: 70671 - DNA, 472 bp, Prunus persica
  Intron number 1 from transcript ppa006661m (locus ppa00666 1m.g) derived from phytozome v7.0 (chr-ID scaffold_6; pos 26117437 to 26117908)
gagctccaaataagcacggtcgcgatcaagctctggtatttcacttttagtattacttcttaaactgatttttttcagagatttacttttagaatatgtttgggagctgagaaagctgaggaaaaactgaaaagaaaatgaatttcaaaatttactggcccattgaaagatttttcatttgaatttggagttgtaattaaaccaagacttcgatacgtgattggaaatgtgtttgatgtgtaaaggtgaaaaagtttcagattttaagaaaaagaaaaagaaaagcttatgttttgtggtttttgtggttttctttttgtgtctagttacgaatatgttattaggtatttagttaataattgtagtctactgggtttgtattttttctgttcgtccgttgtttccaggatttccaggggtttttgagtgacttgcaggactgggagctttctctcaaggacaaggacaaaaa

SEQ ID NO: 70672 - DNA, 928 bp, Prunus persica
  Intron number 1 from transcript ppb022068m (locus ppb02206 8m.g) derived from phytozome v7.0 (chr-ID scaffold_8; pos 7329263 to 7330190 reverse strand)
catcgtcttcctcttgctttcattgcacgcaaaaggtaagctttcattttcactattttggttgctgttttgcatgctcatacgttttttgtttgaaaaatctttttaccttttttctggctaaaatcatttaacttctttccaagttcgataaaatatacagacaaagagggaaagtttccaactttgaagacaactacctcaactaaataagacgacggtagcttcttatttacgtggttaaatatgtagaccacgacggttcgtcagtcgttctagcgtcgtctgaaaattgacaaagttgtttttaaaattatagtcttttttttatttgcttgtttaattgcaggtttgatttctctgaacaatggtttttgtttttccctaatttgataaaatataaagaaaaagaaagtagggttggtatctaatatagacgacagtatcttattgttttacgtcgtgtgaatgttaataccacgacgtcatattaaaataccgtcgtctatataagattccaaaactttctttcttggccttgtattttatcaaattagaaaacaaaaaccatggttcagaaaaatcaaatctgcaatcaaacattcacagagaaagaaagaagggttttggatccttatatagacgacggtatattattattgacgtcgtgtgaacatcaataccacgacgttatataaatatttcgtcgtttatagttaattatcacgtcgtttataagttattattacgtcttattttatattatttcgtcattgtttaattaccttaattttaaacatttattacgtctgagattatttcattgcgtcgtttaaaatcatatcatacgtcgtattttattaataaccgtcgtttgtgttcttaatcttttcctgaaatattttcacttgcagttttgtctgtaaaa

SEQ ID NO: 70673 - DNA, 468 bp, Prunus persica
  Intron number 1 from transcript ppa008262m (locus ppa00826 2m.g) derived from phytozome v7.0 (chr-ID scaffold_6; pos 26649704 to 26650171 reverse strand)
accgagccaagtggatcttcacgcctgaagaactggtaatttcacctccatattgtctttgcttttctgatttttatgttcagttagggcctgtttggatgctgagggaatgaaggaaaatagagtttcttttatcattgttatagttgttttaagtttaactaaactaaaaagttttgtttttttaaattaaattgattttgtaatcttcgttgttaggtgttcttgccttatgctctatttgattgctcggggaaacaatgaatgtggtttccaacttataaaatggagcaatttagatgaaattaaagaaaaaagctttttttttgttttggtttaaggcttatttgagttgggactttaatgtttgcaatactttgaagttgaattgaaatttcgtatgtgcttattagtgtcatgttctctgatataggtcggtaaatacaaggctgctaatcaaagagcaat

SEQ ID NO: 70674 - DNA, 1027 bp, Prunus persica
  Intron number 1 from transcript ppa010388m (locus ppa01038 8m.g) derived from phytozome v7.0 (chr-ID scaffold_4; pos 9010933 to 9011959 reverse strand)
actgtgacttagcaaggtacaatattattaccaccattttcttcttctacttattattatcattattattaattattgctttcctttttgctgcaaagttattatttttgcatactactatataatcaatttcgttttaaaaaaaccaaaaatttgcgacagagagcccatcatagacataggaatattatatatatatatatatatatatatataaagtagtgcttctctctcacaatgattttcctgggaaatttaatgtttggctgcatggaaaaagttggtgctggcagcctttgataggtcacattacatctttggtttgtgtgaactgtgattgtcttcttgatcatgtgatgactatagagattctttctttttctttttttgtcaaatatagagattctttcttcaagtcccactcaactcatgcccgctactctactcatgtgacgattaatcaaactatttattaaagtagtaataataaagttcacgggccctttatacctacagatactgccatgtactatctatgacgtgcaccttcaatcataccataatgagaagaacaacctacttagatcgggatgccattatttcaagtcaattcagaattaatatatttacgttttaattttttcttataacagtatgtgattgtcttaagatacaaaagtatattcatcggcctagaggccctacgtaagtcttcaaaaaagaaaagattgtttaggctataaaataagaaattggagtaaataagatccaaattattgttttcctttttacattattttttgtgcatttactgagcctgcagcctggcattttcctgtcattgaactttttatacagttgtaggttgtcacggaggtccctccaggatgaatgataattgtcattttcaacacatacacaagtgggcatggccactactaattaattcagatgtaacattttaaaacgtaattagtagtttggttttgtaggtttgacggggttgactttttagaacgatttagag

SEQ ID NO: 70675 - DNA, 575 bp, Prunus persica
  Intron number 1 from transcript ppa007367m (locus ppa00736 7m.g) derived from phytozome v7.0 (chr-ID scaffold_5; pos 9361350 to 9361924 reverse strand)
tcagttcgctccaaatttctattttcttttctgaggtactccctttttcttttttttcgtttgattgcagaaaaaacgaaaaaaagcaaaagaagaaaagattctattttatgatcattgaattgatgtgtaataatttgttgtagattgtgatcgttttgttttggtttgattcttacatgaatatagggatttactttgctatagttgcaggaaaaagtttctaggattggtttttattgggaaatgttattgcaacgtatgatttttcgtgtttttcttattgcgtggctattagtaacatagtttcgaataaaaaaacgatgcatgatcttttgattatgcaaatttttataccatgattgagaaattgtctgcatcaatcagtggtgatttggtcttctatttgctgtctaaaccacgtgcttcttggactcttagttgtaaattcgttatagtttaattctgaatttcaagttttatgtctgtagagtgtggaaggtacttcttaccatatatctgttaaagttttggtttgcctatttttatttttcaggggttgtagtggttagaag

SEQ ID NO: 70676 - DNA, 848 bp, Prunus persica
  Intron number 2 from transcript ppa011472m (locus ppa01147 2m.g) derived from phytozome v7.0 (chr-ID scaffold_8; pos 15026954 to 15027801 reverse strand)
tctgccacttttaccgcgaaaattggccctgcaaggtatattttacattttttgtttatttccactatttacattttttgtttaagatatggttttgggaggcgtgtttgggtgtaattgtttaacttgtggggtttactgagttaaactgtaaaacttagcatatggacattccaacctatttggatttttcattaggggagaggggaagtaatttaggtgttgtgcttcataattggtaaagttggtgttggtttagagagggaaggattcaattttagtgactcttttaaggtacacagtagataataatcaaatcattgatcattgataatggatttgcagattaattgagtttcgaactgtttttacatctcttctttcttttttatttcaaaacctggcatttattgttccctgacttgtttttggaatcccttttctatttggggtttgttgattggaagctaaaagctatagaaattgttcacaaatttgtgaatgtttttgatatcaagaagtgttaattatatcttagatgcatgctgttgaggagaggtagaggtcattgatgtcaaggtattactgctaaaatgtttatggggcttgcatggggactttgagtaggtacctgttatgagttgcttattcacgaactgtttgacccccccacctagaagcattgggggattttaaacaatcggttctggctgttggaactattcagtaaatttcccaggttcaatttaataactacattcaagctaactcaacagttaggacaagtaatccatatttacagttcatttgtaggtggtggacaagcacttgagtatattggcgaagca

SEQ ID NO: 70677 - DNA, 478 bp, Prunus persica
  Intron number 3 from transcript ppa002687m (locus ppa00268 7m.g) derived from phytozome v7.0 (chr-ID scaffold_8; pos 16769073 to 16769550 reverse strand)
agttagaagtaagactcagttaaatgatgataataaccaaatgtttaataataaggattctaagtaacatggtgctggttgttaaataatgatacatgaccaaatgtttcgccctttcatatttcacgtagctgaagttttgattcttctgctcaaataagttaagaacatcgttaccttttttttgaagatacaaaagatgctaagtttgtacctaagggggtgtcagatgttgagtttgttaatatgatttcattcctccttggtcatctggatgaataattgaatggtttgttatacttaagtttccctggaaatgatgaggcggaaaacttgtgtgcactttaacattagatgcttaatatatgtttccttaattgaaatttacccataaagcattttggttttgggatatcataattatttgatatgtttcatctaatgcgtgtgtgataatttttgataggcactgaacttg

SEQ ID NO: 70678 - DNA, 1042 bp, Prunus persica
  Intron number 1 from transcript ppa005015m (locus ppa00501 5m.g) derived from phytozome v7.0 (chr-ID scaffold_4; pos 25695010 to 25696051 reverse strand)
ttcttgaagagggcgctgtaattctgggatcccaggtgaataaaatattctatctattctattttctttactttattcaatacttttttcttgtttgtttgtttgttttccctataaaatgattaattttcgttaaggtttaggaagtggttttcttgtttgtttggttgtttgtaaagatgggtagcatatgtgggttatgccgcacggtcacggcaatgcgccctcttctgcacacaagttcgaattcccttcctgtaaattaagttaatttacagtaagattataacttatgtaaaaaaatgggggtttattttttaattctgggttgaaatgggtaaaattgaaactcaatcctacatgaaaacaacccaagaaagtaagcaaaacagaaggacaaagaaaattactgtggaaatggtgttttactttttctttgtttgctgttgtaatgatggcatggattaggagtggttttgttactcattacaaatggaggtcactgttatcatgttcatattgaagcatcttctattaacaaaggcgttgagaaagttcacgggtgcctagagggaccccacacccccacccacccaaaaatgtttaattcaagttcaacggcatgattctcttcccttgtgttgtgtatataatatattgcctcttttgtactttgttttgtttttctggggttctgccttcttttgttactttattcatctttcaggcaaatgagatgagttgattttattttattttccagacaaaagaatgtgttgattttaacaagaatggtcccaagtgaagagcaatttgtgtgtgtaatggtagtatttttccattttgtaatgacgaatataataattatcgcaggctctgtctctgtgtgtcaatcaaataggatgccaaagataatttttccatctcaatacccttaatcaattcttacttgtttaaaacacctaataaaatacaattttgtttttcagtttttgattcatcaggttgatttttgccccttttatttataggatccgaagca

SEQ ID NO: 70679 - DNA, 775 bp, Prunus persica
  Intron number 1 from transcript ppa003367m (locus ppa00336 7m.g) derived from phytozome v7.0 (chr-ID scaffold_3; pos 17513552 to 17514326 reverse strand)
gttgcctccaagcttctggtgctctgtacgctcaggttctcagttctctactttcccctgtttcagtgattcgttttcctcctcaattcttgtttacccatgttaacttttcctttcttgtttcgatctgtttggcttctgagaaaaatgtaggactagaaaatgagatggcaagcttgaatttcaattttttttcttccctaggatataatgacattcttttttaagttttggttgtatttgacttagttcaagtatcattttttctatttcccatgaaagcaaaatggcataatccataaactctgaatccaaatttttctatgaacctcagttttcttagccacacaccagagacttagcccttgtttggtcactgagaaaacggaattagagaaaatatattaattgtaaatgtttaacttattctttcactgtggcaaagaacccgtacccctcatgttattcctttgcttgcttagtctgtaggctaggattacactgaatgtacatattccaagtaacgtgatatagatctactaataaaagggctaattgaagaggtgcactagtttattactttaacttttttatttgtttttgaactgttacttttttttttttcctagttaacaccaaaataaacttttttgaaagtagacagtagcttttcttgcctcaatgtaatagacaagcaaatatagacaaagtgttgatcacattttctgtttggtttattttttggatgattgcagtagtggaggtctcctggcgt

SEQ ID NO: 70680 - DNA, 861 bp, Prunus persica
  Intron number 4 from transcript ppa000135m (locus ppa00013 5m.g) derived from phytozome v7.0 (chr-ID scaffold_3; pos 5890299 to 5891159)
gttgaaggtaggtgaaatcggcagtcttgtaattcagcatcaaccagactggcaacaaccatcttggtgccattttggctttctattattttaagtcaattactattttgggttaagtgttttaaatatcagaaaagccaaaaagttaattgtcacacaaagacaacgtgtacgatagtttagcatgatccttcctcccactaaacaaagttaattggacctttgcatgctagattattataatcgcactggtaaaaaaaatttatgaaaagagttttaactcttgcggatttagattagtctagttgccctcttttgcactcgagttcgaatcattctatgtatagtttagtaatttaatatatattactttatacaattttgttctaatttatggtctaattaattgctttattcttttgcattcaagttcgaatcattctatgtatagtttagtaatttaatatattactttatacgtttttgttctaattatggtctaattagttgctttattcttttgcacctgagtttgaatcattctaagtataatttagattttactttatatattttttgttctaatttatggtctaattagttgctttattcttttgcaaatcattctctgtataatttagtaatttaaaattttactttatatattttttgttatgattcaatttctttgtatcaacaagacaacaaaaaaaaaaaaaggaaaaggcaaagaatatgaaacctttttgttttgtttccaaatttagcagataggtacattttcaccaaatttcatcatgtgataacagtgtttaaactttttcagaggactacaccgataaagcccaatccgaggcccac

SEQ ID NO: 70681 - DNA, 463 bp, Prunus persica
  Intron number 1 from transcript ppb018052m (locus ppb01805 2m.g) derived from phytozome v7.0 (chr-ID scaffold_1; pos 2046435 to 2046897)
cgtagagaaatcccaacagttggtgtaggtgcaatgtgaaaggaaaaaaaaaatatttattgtatttttgtatgtaatgtgttcaaccaaatgggccccaaacgttaaatatgatcgagttactcaaaataataatattggagaatcaaattgataaactgaacatacagttgaggccgagggagagagcactgactttacattcatatataaataaaaaataaagtcgcgatccatgtgtgaaacggtagactggccatttcaaaatagtaaattagaggaggatccgctttttgcgtagtttacatgttaccgtccatccgtcagatgaagaagcaaaggctataaaaaggtacagtttcatagtggacaaggcacattcagctcacttgcaacactttgaagccatccctagttctttctgtttctgcctctgcttaaaccccatccctagttcttaatc

SEQ ID NO: 70682 - DNA, 428 bp, Prunus persica
  Intron number 3 from transcript ppa018545m (locus ppa01854 5m.g) derived from phytozome v7.0 (chr-ID scaffold_7; pos 691346 to 691773)
tctcctccaattcttcaggtggtgaggttgattgcttgattggtttcttgtatgataattaatttcatacttacttcatggctttctattgcaagtcgcattctttctaatataattggctatgctggtgtttttttgaaccttatgtggtaatgatattattggatgtgggacgcttctagttttctctatggtttcttaatagattccaaggcaaaaatgtttatgttgtagaaaaagatgtctactagtttgatttttcaggtcttagattgaacatgcaacttatatctctttcttctcccttcagctgtagtaaacttggatatcatgtttttttttgggaatgtttataggtttaggaattcccaatcgtctcactactgacttctcttgatatgcagggaattctacctcgcctaaagtca

SEQ ID NO: 70683 - DNA, 397 bp, Prunus persica
  Intron number 2 from transcript ppa016876m (locus ppa01687 6m.g) derived from phytozome v7.0 (chr-ID scaffold_2; pos 20317217 to 20317613 reverse strand)
ctaataagcaggtcatcattttctcttctttttctctctctcttttttttttttttggtttctttttcctttttatggtttttgttttccagcaccaataacacaatgctgctctttacaacatgatatacatgttgtgctatagaattttagtcataatgaattactaatttgcagctcaaaggggtttcgaatttaaaatcaatgaatggctcaaggctcaaagtcgaaaccccttggagccaatttggtttgttttgtaaatatgcaaaactaggagacggccgcttgcgttggaacgccatttgattttctattgcctctactttcattacataattggttttccaacttaattatatccagagggacttcgttctctgtcgcttaaagaaaa

SEQ ID NO: 70684 - DNA, 578 bp, Prunus persica
  Intron number 1 from transcript ppa005324m (locus ppa00532 4m.g) derived from phytozome v7.0 (chr-ID scaffold_5; pos 15814223 to 15814800 reverse strand)
ccattgcctttcaggtaattatgaacttgctttgttttaaattatcagttaatgcttgctctgtgagctttgcatgtgggagttgttcgcaggaaattgcaatttgattataaaacttagaggaagaaagcaacttctaattcaatttgcactcaattgttgtgctttgtgttaacgtactaggcacattctttgatttgaagttgttttctaacattctggctgcttgcataaaagtattttcttttcttggtatttatttggctgaattgactgtatctatgtgagtaactcaaaattgagacatggtttttggtatgcatttctaatttgtcctgaaaaacgtagttagcttagcatacagaacaagaaaaacccttttagagaaaatgttactgaatgattagctagtttaaagttttagttgtattttctatacttggtcaaaattttggtaaaaggctaaaccccggctgcattgctgaagtatgattaaatgtttacacttggttcagtgttgatccattctaattaaattcttggtttctgccttttgcaggagagaatcaaaatccctg

SEQ ID NO: 70685 - DNA, 889 bp, Prunus persica
  Intron number 2 from transcript ppa002901m (locus ppa00290 1m.g) derived from phytozome v7.0 (chr-ID scaffold_1; pos 27431022 to 27431910 reverse strand)
ggcctctacactcctcttgtaagctactttcttgaatcccccattttatatgattttctactcattttttgtggtttaagaactgagatccgtgcttagttatatatgcctaaaataatttctccaatctgggttcttgctccttcctgtgtgtttcatttattttggttcttatccgcggattcttcgagatgtcatcaactcgttgctttagctgataagggaaatgggttgcttgtctttaagcatgtatatgtgccttgtacggctcctgatttcagttgcatgaattccaaacttgatgtgttaaaagaacagagttttttgcaactttgtgagcaaaagcacatcatttggttttcgtgtgacgtccttctattttgttgatatgaggtcgtttgaaattttgaagtaattgctgcaattgttgcaaactcctcttcagatgaaaaatactatctttagtccgcgcagccgtttctttgatagcaaaccagttgtgttaattttatggataattgagttgaagtttctggcgccaatctatgttgctctctattttcacggccttgagaatctagaccacatttaatttcacattgctggtgaattttgatagaaagaagtatgcagaacaaaaggatacttagctcagggaaatctaaagatggtacgaaggcaatcattcgaaatagatggtactctgttttaattcatgaaaggtgaaaaaagaaaaagaaatctaaagcttcaagtagtgtgtttgatgtgcctgtcaacgaaatatatttatgcttgtcacgattgcctatgatatggtatatttacctatgtattcttctcaataagaagtaacgtagctcccttttttttttcttcttcagattac

SEQ ID NO: 70686 - DNA, 425 bp, Prunus persica
  Intron number 1 from transcript ppa008713m (locus ppa00871 3m.g) derived from phytozome v7.0 (chr-ID scaffold_6; pos 22747490 to 22747914 reverse strand)
ctagcaaccttaccgctattgtaactggtcagctaaatttgcattttcctctgtgaattaattctgctgtttgtttcttcttcttctttttttttccggtctttgtggggttctttatttcattggatgtttctgtttctggtgttaatggccttttttctttttctttttttgggttttttttttggttagtaataagaagaacaaaaaaatagatatgacccaattaaacatgaaattaggagtggtaatatggcttttgaatgcaaatttttgcaaatcattttctgaattgtgttgcagagctactctgcatatagagacggagagcaagccaatatgcctctttctagtttgattaacatttctgttcctgtttgtgaaatgcaggtggggcaagtgggattgggtttgagacagcaaga

SEQ ID NO: 70687 - DNA, 860 bp, Prunus persica
  Intron number 4 from transcript ppa006230m (locus ppa00623 0m.g) derived from phytozome v7.0 (chr-ID scaffold_4; pos 10709738 to 10710597)
ccgaacattacctacttcatttaaattgtttactggtgagtgttgactttgttctcctctagttatttggacttctggcaactcacaaaaatttaagtaggcaaaatcttaaaatcttaatgttgagaagattaactgatataatgtgtgcatcagaaattttgtcaaatgtatgtttccattatgaccttatcttgtatttcttgttgcttaatttgtctttttttttttcttctgctgagaagtggcttccaggttactagaattgtatttagtgagtcttttggtggatttacatataaatacaacatggcttgaactgtttgtttgtaacatgtctgctgggtttttattcccaaggaaaaggttttatgggaaggttgaatttctggggatgaatttgaaatttccaaagttcaagtttgaaccattggaccaatttggaaactggatatatttactttgaacaattctagtgccagaatacatgaggaggatcattagatcacaaattgatgaattgtttgtttgctatccctaacaaactaaattgtgttggctctttccatatatgttgttccagtgcaacttttgatctgtacaaaattaaagttaaaataatctgcacattttcttctaaatatagtctaccagtagatattgaaggtggtttgataaatatgtcaacaaatggcagttctggttcgaagaacatagtaacatgcacccctgcatgaaggttcaagaaagaaatttgcttgtacttgctgcattgtcaatcttggttctatacctgcattgtcactcttggttcctatcttgcacaactaattaaaatgcttctccgttgcaggttcagc

SEQ ID NO: 70688 - DNA, 914 bp, Prunus persica
  Intron number 1 from transcript ppa024530m (locus ppa02453 0m.g) derived from phytozome v7.0 (chr-ID scaffold_6; pos 20693235 to 20694148)
gtcctctgtggaaccatccagtgagctttctttaggtactttcttttccattaatcttcacattttattgcgcttatccacactatgaagttataaaatctagggcttttattactataaacagaaatttgaaaccctgaaattaatgttttgtttataatgtttgtgttgctgggttgctgagcttactgaggaaaaagaagaaagttgaaattttgaatcttttgctacgaatttgccaagaattcgaactcaaaatataggttttccctgtaaaatgggaggacacttgtttatttggttacttaatttttcttaagaatcaagaccatggaaaatttcaaattttggtttggtgttgcattttccttgtggcaacagaagtattttctgattttctgaatataaatttgtgggttttcttacatattactatatattttggtttaggatactaaatatttttgtattgcttactacttccatggaatcttttgtgtgtgtgtgtgtgtgtgtgtgatgcttgattatatcagtttattctttctgataccactgctacattataggtgtcgagtgtattaaagtaggattttcttttcggaaccaaaatgtgcctcctagatgaaagcttttggtaggactcaagatcccacattggaaaaataacctgtcctagggtggtttaagagctcttgggcacccttcctttacaagccggttttaggggcaagttctacccatgggctcttaacagatttgctggacatctttcggagattagttcctttaggcagatgtcaatgacctatttcatggtgactgagaagttttacactttgggtactcatacccctttcttatctttttcatttgcagttgctgccgagtctgctaggttacaattatctcat

SEQ ID NO: 70689 - DNA, 788 bp, Prunus persica
  Intron number 1 from transcript ppa022383m (locus ppa02238 3m.g) derived from phytozome v7.0 (chr-ID scaffold_8; pos 7863759 to 7864546 reverse strand)
acactatagttgacttttatattcagtaagtttgacctggctcctttcaagtctttcttattttggacctagttttgaagttgtacgtattcatgttgcaggatcttaacattattgaccttataaactttcattttgtcatccatatggattcagtgttggttatggcgatctcttgattgtttacaatctttatacaactcatgtagtatatagtccacaacaaaacccccaatttttaggtcaggaatccggtttttattagcaacaagtattttataccttataattggaaacatgatatgggcatttagaagttaattggagattatggaaactggagaagatatatataaagactctgcttagaaagtgacaatgccttgcaatcatcatggttttagatcagtagatttcaaaatttgaatgctgtagatgaacctatgatattctttgcttgaaagaaattgacttcatatggtctttgagattggtaggtttctagtatcagataataattgtattctattatttgattggaaaggagtagcaggttttttaggtctaaggaggagaggaagttcatttcatagtaggacttcagtgaggaatctgttttttttttttttaaaacttaatatcaaaatggaacagttaaaagatatacatgcaatgaggtcgtagcttctagttcctcttttatatctgactacttccagatagtaagaaattctgattttggcttattggcagatacttaaaaagtaaaattcaaccagaggaaaagc

SEQ ID NO: 70690 - DNA, 767 bp, Prunus persica
  Intron number 1 from transcript ppa002178m (locus ppa00217 8m.g) derived from phytozome v7.0 (chr-ID scaffold_2; pos 24469119 to 24469885 reverse strand)
gcagatcattaacgttcgttaattcgctctctcaggtttgcctctggatcttattcgtcccattttcattattttcttccctttttttttcccaattcccccttctcgttctcaagaaagaagcacggaagtaacagaaacatccaagtttatagtttttgaattttctgtttcctttttggaccaacaaaaaaaacattttccttggggagggtatcgatattctgaatgataaaatattttgttgttgaaaatttttcatcagctttctttactgcctaacggaatgcttctagttgatttccggcttgtgatctgaatgatgttttcaattcaatttctttgagctaaattgcatgggaaatatttttggaaaatataattttcctttcgaagtcagaatttggggtgattccgaccggatatggaatttctcctaagttttggtgagaaacctgaaattctaaaatttgtggttgggctttgaggaatctagggtttagttgccatttagagctttccatatttcatttgcctgaaatgtctgagtatttgagttgaatttaattggcttagatggtaagccatattgggtgggaatgagaaagagctgagagtatcaatgtttgaacagaaaattttgtaattttatttgataaatcacagaacaggaagataacttttagtatttgatggtcgatttacgcaatgcatataattagggtttaaatgtggaaattgtttgtggcaggtataacttcttcaat

SEQ ID NO: 70691 - DNA, 907 bp, Prunus persica
  Intron number 1 from transcript ppa016978m (locus ppa01697 8m.g) derived from phytozome v7.0 (chr-ID scaffold_2; pos 17158936 to 17159842)
attcctgaagatcgaggatcttctcctcatttcaggtaagctaatctcattcatttgcattttttttgtttttattttcaaggatttgaattttagaaccctagggctgtgtttggttccctagaaacattgtggaaatcaaatggaaggaaattgcatgaaatcttatgctgttaaatatctggctatggaattcatgaaactggcaatgtttttcgttttgtttgcgttgctaggaaatttgggtttcagtgttgttggtgctgaagggttcacgagtatgagtaatagattaagtgaataaatatagatacacaaggataagatagaagaaaactaaatttagcttagtcaaattgttaagctgggttggttgagtatgaactagttgtgaattttgttggttggccagtagctgcctggtttggaaaaatgtttaaatcagaaagtagtgatgagaattgcatttgtatggaggttctctctgtggttaggtctaggttaaggagttataagttttcactttgtaaaactaataaggagcattaaaataactggtctagtacagaagctgtcctcaggagctaaggttcaatgttgaaggaagacgtgtagttgctggatggcctagttttcagtttgggtgttggtggaataaaattccttttcatccccttccacccaaattaaaaaaaccctataatagaaggacttatgaagtcctgagctttatcattttgtacctaatatgtcagcgtgtaagcacaatatttttcttttttcttttgggcaagatgagcatttcatgtgtttttacttcattgttctttttgagcacaactaattataccaatgatcttacttcaatgtaggcacacacccgtgcaaataatccatattatcggca

SEQ ID NO: 70692 - DNA, 406 bp, Prunus persica
  Intron number 1 from transcript ppa009880m (locus ppa00988 0m.g) derived from phytozome v7.0 (chr-ID scaffold_7; pos 22046427 to 22046832 reverse strand)
gacctctcaatcaacagacccatcttctcaaacaggtcagtttcttaagttataatgcttcttgaataatcaaagtaaggaatttggcctatattctataaagcgaagatttttatctcccctaatgctatcttggcggatatgattgttgttaatgttaggaaatatggggaaacttgaaggaaataatctacgttatacatgtgtggttttgttttggtgctaaatgaaaggctcagctgaatggccggatagttacctctgtttctgtgggagtagtactatgatattgtttgcagaggaatcttgtttccactttttcctttgattactttaagtgagcagagttgtgagggccttgacaatattttccctggattaattgtggttcttcttgttgataaag

SEQ ID NO: 70693 - DNA, 302 bp, Prunus persica
  Intron number 3 from transcript ppa006433m (locus ppa00643 3m.g) derived from phytozome v7.0 (chr-ID scaffold_2; pos 22219398 to 22219699)
gcactgttaaggtaatttcttttcttgaagatggttactgggcagttctgtgactccttgatggaatattttgttataaattcatgtgaagtttatttatctcatttgaatattttgtttataaaaggggcaatttaggtgcctcactaaaaaagtactaagaattttgcactttttgataaaattttgtggcttggaattcatgaaagtgatggtaatttgagattagcataatggtggcttaagttgtgccactaatttttgcagttattgataaagttggaggataacagattgattga

SEQ ID NO: 70694 - DNA, 987 bp, Prunus persica
  Intron number 1 from transcript ppa018895m (locus ppa01889 5m.g) derived from phytozome v7.0 (chr-ID scaffold_5; pos 12170893 to 12171879)
gaggtatcatcttttccatttatgatttatgttccatttttctatgctttggcttttctctatttcttattctgatttttattttatttttggtttttggatttggattcttagtaaattttgtgtcttgtttttgtggttttagctctactttctcccactttcatctaattccttaacacccagttttcatttttgtatttctagcaaacccatttcctcaatctgcattttgtatcaatatttcactaataagttgaagcgtagaaagaaagctgaagcgtttaatgttcccctaataagtttgttagagaataactatccaattagttgtagacttttctatcatagcatagtcaagttacatgtgaatgaagaggtgagttttctctttgggtatgatagtgttagaagattctaatttcttttttgtttcaacaattttctgtagcatgaagaggccttcgtttcttattcactatttcatttttttagtggttttggttttgtcttaaaaattttaaaatctttagaaactagactgtaattcccaagtagggttttctggctttttcttttagatatattgatttttttcttatgcggcatctctgccatggtttgtccttagttgatatgtactgttgggaaaatctcttctactggtccccttacattcttggtgatgaatgaaaatgtgtctgatttaccaaatcttattttctagctggaatttagagagcattcttatgtaatcaccattctactatttccagattcatgattttaggataagctatttaggtggcattttaacttttatccttgtctataaatttgatgcataatttgtttaacttgagcctatatcatcttcagggaattcagctcctgataacagaactacacattgtcctagtgttcacaatggtgagcacggtgatcatgcatgctcatttgtagaaaacggaaacggaaggcagacta

SEQ ID NO: 70695 - DNA, 364 bp, Prunus persica
  Intron number 2 from transcript ppa019465m (locus ppa01946 5m.g) derived from phytozome v7.0 (chr-ID scaffold_1; pos 32491466 to 32491829 reverse strand)
gattacaccataacattctgcccttccacaacaaggtaatttatattttattcataattagtgttatcttctttcccaatattcccgttttgcttttcctgcaacttttttcatgtactaattatactaatcttttgtgagccacaagccagcagcgactcattactaggaaaccagattactattgattgcttttgattgttcttcaatgttagagaaacagccataaataattattaaagaaatcagctacttgggttgggttgggttgggtgggtctcatttacattttctctacttataatttgatttatatgtggtgcatacagtcaaaaatctgcaagtacgtctacaacaacaagta

SEQ ID NO: 70696 - DNA, 564 bp, Prunus persica
  Intron number 3 from transcript ppa008296m (locus ppa00829 6m.g) derived from phytozome v7.0 (chr-ID scaffold_1; pos 41237381 to 41237944 reverse strand)
ggagggcagagtacaaaccggaggagattcgttgggtatgctatcatttattgcttgtagtccgaattcacatacacaatttctgccagattctaccttttcatcctgcttaaaacaggttccctactctgatagcgtactagtagtcaaatgaagcctgatatattctgcaggttgcatcctttgtttttctttctttgttttcagtgcatactgaactggcttatatggttgtggttcagtgtactgaacctgagtcaattgacctttctggattttgtaaaatttcaaccttccacacctattagcagttctttctgaattcaaccccacctatctagtaaactgtaagaaaattgatagacactcagagtccagcatagctataattacttcaaacccagataattacaagggtcatctggagtcgttagggttggaggttgtcgatccatgtcaagttcttctagtatatgattactgaagtaacaatgttcttacaaattcatcatttccatttgtaatacaggaagaggtagctcgtgaagcagaaacagggaaaat

SEQ ID NO: 70697 - DNA, 1023 bp, Prunus persica
  Intron number 1 from transcript ppa000745m (locus ppa00074 5m.g) derived from phytozome v7.0 (chr-ID scaffold_1; pos 35546939 to 35547961)
gtttcgaggctgaagctattcgacgcaccaatcaggtttaaatcgctttctattttgttttttccttccttctttttcttttttccagctaattagtgcttatgattgattagttgtccttgatccaaaaggtacttaccatacttgtaaacgactgccagaagtctagaatagatcaaatcattaatctgaatttgaaattgattaaagttccattcatgcgtatttgtagatttacatttgagttatttgcatgctgaacaaaatcaaatccacgcatatatggaaagttgaggcgcatcttgagcaacttattttagatgtaaggaagagcatctctgcttatttgaaaagatttcgttatgggggtgatatgttattcgaaatttgagatcatgtattccaggtggacggtgaataatcctttctgttaacagatccagttgtcctgcaaatgttattattttcaatcacagcttgaacaaatagccatttggtgttgtcggatttcactgaatgttgaaccatgtggaaatggaaaatcctgagaaagtaacttgccactgaatttggtatagtgatatggagtgtgctacgatgaggttccataagaggactcaaacgtttattgcttgcatgacatgagaatttgttttggctggatgtctgggaacgtactatagtcttgaacaatatcatttccagaaccatgcatggtgaaaattttcagtaattcagctgctttaaatgatcttatgctgcatgtaaatgaatataagttcaattcctcggtgaacagtagttactgtatcatgaactatgaaattaaggtctactataaaacaaaggaaattaaggtctgccatactttctgtagaaatatatatcttactgtcttataaaggaaaattatgtttcttactgtggacttggttttctttttttttcttggttttttgcatccattcttcttcggttgaattaataggaaaagtttagagttgcagttttggtttcacaagc

SEQ ID NO: 70698 - DNA, 330 bp, Prunus persica
  Intron number 1 from transcript ppa015563m (locus ppa01556 3m.g) derived from phytozome v7.0 (chr-ID scaffold_12; pos 391337 to 391666 reverse strand)
gtttaaggtcagaacttattcgaaaactagagccaaatagcacaagttaaagtacaacctttaatagaaacttcaaatgcagaatgaaaagaaaatttggaataaaggtcggccctaattaagatgtcttattcaacttactttacagttagcacgctaatcttcttgttacctctgctctctaatggtttggatttgtatggcttctcaaatttcaaagattcaagggttgatttttggaaaaatagagtaataatcttttactcatgtttctttttgtataacaaaaatgtaggaggtcgagactatagtattaccccggcttaaaga

SEQ ID NO: 70699 - DNA, 717 bp, Prunus persica
  Intron number 1 from transcript ppa014540m (locus ppa01454 0m.g) derived from phytozome v7.0 (chr-ID scaffold_2; pos 23568437 to 23569153 reverse strand)
gtcgtttggtacaaaaccctctggtacccgtttttcatctgcatctgcttatctctttacttttagtttgttaatggttgaattctatggacttcaatttgagtgtggttaattaagcatataatagtaaaagtctggttcctgttgtcaatgtattgttgaagttcttcatttggtgcttagctgaatcaattgcatcatcgattctcaagtcaaacgtaggagagaaaaacagaccaaaaaacaaagtaggagaaaatcaaaattggataatgcttaaataaactcaaacttttggctggtgacaagaaatctaataatgttgcaatgtttagagacaaattacatcctaattatgaaaataaataacaaatcctaactgtataaccacataaattactgaaaccatgctttgttctttaatttttgttcacaggaaactgattggataaacgggccacttgttgggatgaaagagaccccagtgttgctccactgctgcaccaggcttcatgttctcattaaacatggaaaacaagtaagtctcggtggagttccccggccgccttggtgttccacgggacgataagacgtggcttattaggttcgaattgtatatttgtgcattggccggtgttgtcaccttcccattcccatgggagggccagcctgtctcggacaccacgacttggacttggggcgcccctgctttcccca

SEQ ID NO: 70700 - DNA, 740 bp, Prunus persica
  Intron number 2 from transcript ppa004073m (locus ppa00407 3m.g) derived from phytozome v7.0 (chr-ID scaffold_4; pos 4238487 to 4239226 reverse strand)
tttcaatcatttcaaggtttgtattctctccaataaattcactcttacacacacacacacacatatgcatgtttgtatgactctctctctctctctctctctctctctctctgcataacattgcatattggtcactgtggaatttcttctgtttttttactaattgtgttgctttagttttaggcgtcctttattcaagtctctatttccttgtgaagtgatttctttagtaattaaacatgggcgatttctttggttgaagttttgtttgattgtgctaacaatgccgggactaaactggccatctggctaagttgagatcagaacttttagttggggaatttataaacttgttttgcaaatgctactcgggagcataactttttctttgcatgaggaaagtgtttgtgcttgggctgattttgtttgaacctatgcattaaagcttgccttgtaggcttgtaatcttccagaatcaattgcctccctgcacgcccagagccatgctactgggaaccgatgtatttatgtcattttagtgcttgtattttttatattactctatgtgttgaactaatttctaatgtctggctctggtaagatatttcaaatggtaggttccaaaatatatatttttcttcgtcacctttctttttctttttttaaaccgtttactgttgtgctaattttatgtgaatagcacaggcatcaactgtaagttcatttccagttggattatt

SEQ ID NO: 70701 - DNA, 868 bp, Prunus persica
  Intron number 1 from transcript ppa010091m (locus ppa01009 1m.g) derived from phytozome v7.0 (chr-ID scaffold_7; pos 20744181 to 20745048 reverse strand)
cgtcttcctctatttcgcaccacaccggccgcgaggttaatttctattgctgtttatttagggtttgttttctgtttgattgctttgtgtctgtttgcttgatgagaaaattaggaaaattggaagggaagtttaaattttttgcataggttgcgaatttaggttcgtgggtttctattggaattggtttatgggttgatttttgtgagagagtttctaattttgtgtttgacttagtctgacttactgtttctcgaggccattggaggaccaaactcagattcaggtgctatcttgtttctgatgttttccatcagttcagaagagacttctggtgttctgaatttgacttctttattacgttatggcccttacaattttggtatgcatttgattcaatctctctgtctgctccagcctccaagtaatatgctaagaagatgaaatatttgagtatgtttgggcatttcaacaggaattgagtgacaacgttgtgttttactttgtttatcaatctgttttaagggtttttaccgcatcataacactgataacaacttaagttgcgtcttgtaatagttcatcaagagccgttagattgtggtaaaagtatggtcctactttgatgcagctctaggaattttctttttacttgtgcatagacttatatcaattttatatcattgatatttttctggaatttcttgttgaggacttaaagttcgttatttttggtggcccaacttgagacataagttttctcatgctttgtgtgcgtgtgttattctattaatcttcctaacactcatactatctcttattatctctgtgcagacattttccaaagtagttagaagttgggcatcaaa

SEQ ID NO: 70702 - DNA, 985 bp, Prunus persica
  Intron number 2 from transcript ppa008315m (locus ppa00831 5m.g) derived from phytozome v7.0 (chr-ID scaffold_1; pos 42121821 to 42122805 reverse strand)
tgggcaggttcgagtgcttgttgttggcgactcaggtagttgattgtgactatataattctcttcctttgtcttcttgtttcctttccttttactattttttttttggttttttgcaaattttaattgatttgttctggattgtgttgtatgcttgtatgtgcttaatgatgttcataattagatatagaatatggatttggttagaactttggataccaaattgttgtcaatatgagtttaggtacagttctgatcagagtggttgctgccctttggattagttcaatttaacatttttggattaagaagcacaactgtgctagagtgaagaaactttggtttcaagtgagtgtcaaagcaacatgaatacggaagctcaagttacacatgagaagattgcatatagtatcttatatgttggttggagaattgtagattggatgagttaagaaagaagtgtagattgaaaaagtttagaatgatattgttcttatgttggagactgatcttttcattttaagaaagatcaatgcctcctgacattttggaaatatgttggccagatatggacgaaacctctacctgatttgaccttgaatcagcattgaatatttgatgcttacccaatcatggagtgattctatatacgttagtttcaagtatcaagatcaattgctgacatgcttgattgataaagtatattatcttagcttactagaagggtagtggctcacctgtttatgataatgctttgcacaaaatagtatttgacaggcggaaatgcaaccctctgaatctataatttgacatgcacacgtctgcacacgtaattttataatgcatgccggaaggatgttctttatccaatctatgccttattgtccattacatctcataatttcgggtgaaagtatcaaacttcatctttggattttgatcaattggtaggtgttggaaaaagttctcttgttcatctgattgtc

SEQ ID NO: 70703 - DNA, 965 bp, Prunus persica
  Intron number 1 from transcript ppa006168m (locus ppa00616 8m.g) derived from phytozome v7.0 (chr-ID scaffold_2; pos 18547873 to 18548837 reverse strand)
gcgttcccctttttggaagctgttatcggtacttatccatttcaatatctccttccatttattatcaatatttgcattttctttgtcttctttgatttttttatattaagtttttgaactgcttgcttttaattgagggtcatcttcttcttcgtcttgttgcctattattcagatgtgtgttgcttcaaaatttcgttttgtgagtactcatttgctttttgtttcttttttggactgagaactcatttggttcattttgtggattgtgtttaagttttttttttttaaagaatattttttccaaattttggttttaatgaaatcctagggcttttcaagttaaagtttttatctttattgtctaactgcgattgttgttatgagcttggtgtgcggtttctttgtgggtgtttggattggttttcatgttttcagatagaagaatttatgtttggtttctaggaaaatgtggaaactttgttcagtttggaagtttgaacggttgggttttatcaaaatgtggcatgacaacttaaaatggtttacctttaccgctttctttcccatgaagtatgaattgggcttaagatatagtttctgctttatatactcagcttttattggtatctaaagacggttagaaaaatagtggtcatcttaagaaatgggaagacttgtcaactacactccccagcccccctctcccccttttttctttttattttgtcccttttctcgctccattgtggtcattctttctgttaattttctcgtctatgctgcgatttggtagtttttcagtttcctttcaacttttgatttgattgttttttatctcactttcttttgaaatgactcccagcgtcttcggagcttcttcatatttgttttatcttttccctctccccatcctgtttcattgcttgtaactgcttttactttctaatttttattacaggtttt

SEQ ID NO: 70704 - DNA, 934 bp, Prunus persica
  Intron number 2 from transcript ppa013229m (locus ppa01322 9m.g) derived from phytozome v7.0 (chr-ID scaffold_1; pos 3197890 to 3198823)
tcgtcgtcattgtcgacgtccttgaccagaaccgagtaccttctctttccttttttctctatcaagttttcaatttttgttaattttgtattgcgttctgtttggcaactgaggaattgtaggaaataatttttgggattcatgctttgctgttaaattagcacgttggatagtattttctgagctaccaagctgagattttttcttcatgagctgggttagttttttgtattttgtatttttgaatctcctaccagcggatagatttacaacaaactaaacaattccttaaacattaatggttttcttgtatttgattatgtgaatgttgcaattcaactgaaagattgatttgatattaaataaaagggtttagagtgaaatatgaatacttgggagtttgtttttcttccttgtgttgtatatgccaacttctctgatgtatcgtgcgatgtcttttggttttccgaagctgtaataactattttgctcattagaagtataatatgactaccaggggcttttcttggttctctatttgctgggaagtggttattcttgtcagaatttgttttgcactgattagaagggttaaatcttttggcagcacataaccctctttactatggcttttcttggtttgtaagtgggaaaatttggagatatgaacttttcatttaagtccaaatgttagcatgatttccaatccaacctaaatcgattgggtttgtctagtttattaatgatttggttggtgttggtctggtaaatcacgactggagaattttgggttggtattgtattgggcttcaatccgatccaacccgatctctgcccatccctagttgtatgttcggttaacatgcttcacatctccttcaacatatttataatgtttcttctattgttaattgtcctctgtaggctcttgttg

SEQ ID NO: 70705 - DNA, 554 bp, Prunus persica
  Intron number 2 from transcript ppa011871m (locus ppa01186 9m.g) derived from phytozome v7.0 (chr-ID scaffold_2; pos 22680737 to 22681290 reverse strand)
cacccactgcaaagggactttgaaggtactcaaccatctattgtggctcattttctgcttttgttgttgattttcagtctgagtcgtgtaacttggatgcatcattttgattagattgaaagcaaattggatatgttttatcccttctcttctgctacattttttagctgagcattattgatttactgttacttcctactggatagggattgctatattcgaggattcttagtacaatgcaaataaacaataatctcgtgtatgaactaacattttgctttgtgtgtgtgtgtgtgtttttttttccaacttaattagaatgccttttttttttttttggatttttcgtacaatacaaagggtattgtaatatataggattatttgtgccataaagctgaatccttttttattaagatatgcaacttacagagttgtttatggaagttccttcgttcttgtgcttgtgcaacttacagagttgtttatggaagttccttccttgttgttaagcttttgcaatttttatgtttacagctgagcaattattcctca

SEQ ID NO: 70706 - DNA, 998 bp, Prunus persica
  Intron number 3 from transcript ppa011033m (locus ppa01103 3m.g) derived from phytozome v7.0 (chr-ID scaffold_2; pos 17181554 to 17182551)
cagaacaaagggattggctaaaggtatcacccatatttgtgctcactgttatgcaactcactttgcaccaattattgaaagaaaaacgatagtgaatttgcaatttgtgtcttgaatatagttaaaacattcattaataagcttactgttaatggtagctcttctttaaaattgtgcacaattagtagatactctggttttatagcaaattctattactatgataggacagctgtgtactgtaagaaaattgattgatttggcatttgacattttaattaattttcaacagtcaaacggcaggatatgattcatagcaaggacaattcttttatatgagtacatgtgatgcaggacaagagatagaattagcgaggaagtagagagaatagggaactaaaacaatgatcaaattaggataactgaaaccaatatttttaatcacaaccacctatacctacagagaaaatactttgatatagcacttccctagttataggattaaatatatgatgaattgtaaccaagagtcctcaggtggctcaactccctgaccttgagcactttgatacattgatgataattggaatactcaattgcctcaaaataaatttgaaaaataactcaacaatgctttgatataccaagagaatttcagaggcttaactcactgacctcgggcactttgctgtattgatgaaggttggaatccatgattgcctcataatagagttgaacaagatcaaagaaacatataatttcttccgttggattttaatcttccatctttccctttagaatgacttttgtagcaattggaagtcaagtcataggaaattgaactcaatatgggtaaaaagaaaagggaaattgaaaaggccaagagctttgatacataacagttagtgatgtattacatgtttgttgctactaatgcttgttaaaataatggtgaattctctgttgacttgtttcagagtgcacaacgaaaaggattgg

SEQ ID NO: 70707 - DNA, 463 bp, Prunus persica
  Intron number 2 from transcript ppa004916m (locus ppa00491 6m.g) derived from phytozome v7.0 (chr-ID scaffold_3; pos 13452648 to 13453110)
aagcatataaaggtaataatctgtgcttctacaatttgttgttacgttttcttctaatttagtttgatatatcttgcaatgaagtgaactatccttttaattccttggattaaaaaaagaaaaaagaatttgtagatcacaacttaaatcatcagaattggttccatactaatgagatttacttttggtgttcctaaatagtaaatcttaacaagtgacaaacattatacactcacacaagtagactgaattgaatgaattcttgtgtggcatattattttatctatttatatcctcgcaacaagcaagaatccttacatagagattaactttgaacactgctttattggttgtgaactgttgtttctgtagtgatttttcttttggtctgggtatgatcagtgtgctcactttcactattatttcagctcataaatttgctcaagctattgatctgtataca

SEQ ID NO: 70708 - DNA, 789 bp, Prunus persica
  Intron number 4 from transcript ppa004916m (locus ppa00491 6m.g) derived from phytozome v7.0 (chr-ID scaffold_3; pos 13453356 to 13454144)
ggaaatttaaagaagcactaaaggattttcagcaggtgctttgtgtagaactttttttcctgaaaattgtgaacaatatttatttaacttttctagtattgcataatactgaaagaagttgaaagctttctttattccaacaacccttttgacatcagaacacataaaatatctgcttgatattgatgtaccgatgacaccaggggtttttaaacaatctattcatcatgtgaaatggttctctgcctagttgattgttttgtacgatatcaaaattgtacatctaatagcattattggtatacatgagtttaagtttctgaagaatctgaggaagatatcatgtatgcacattctagaggacttgatttttgttcatttaatcaccatcaagttgcattttaattgtctgttaggattttagtccacaatctctatccttatcctttgtgactcacatgtcttatatacccaatcactggagcatagctaaaatagatggttcgtggaaactggaacggggtagaaaatcacaattcataaagtctttaagcagaaggttgaatgtgataagacaagcttaggtcaagtgtaaaaaaaaatcataatctacaaaaactttatatttataattatcattttttctttcttatatcaagaaactagagataaaatggaaggatacttcaggaaatgtgttctaaattttattttggtaacaattgtcttagatgtggcattgcataaattgttctacttcatgtaaaataggtcaaaagaatctgtccaa

SEQ ID NO: 70709 - DNA, 439 bp, Prunus persica
  Intron number 2 from transcript ppa003384m (locus ppa00338 4m.g) derived from phytozome v7.0 (chr-ID scaffold_4; pos 13612312 to 13612750 reverse strand)
ccattcgccacctcggcttcgacgttaaagatgtaattctttttcttttcttttctcaatatttatctatctttgctttgctttctttttatttgaattcattctcataattccttacattgagcttctcatacttaaccattcaattccttcactaacaattccatatatattttgaattgtttccattctgctatgcctcatttgtgctttgttccaaagttttatacttctaagtggtttctttgtaatgatgggtaaattttgctgttctttaaaatttttaaattttatttttatatgttacagattttatgaaaaaagaaaagaaagatgtagaaaatcgattcatataaaatttggtaaatcaatgaataaagttttaacacaaattcaaaatgtaggttcaaactccagaagacattctcaacgccaaccg

SEQ ID NO: 70710 - DNA, 768 bp, Prunus persica
  Intron number 2 from transcript ppa010106m (locus ppa01010 6m.g) derived from phytozome v7.0 (chr-ID scaffold_7; pos 13125048 to 13125815)
ctcatcgttatctctcttttccttacctaccccattttcttcattgattaaatgtgtcaagtttccttcctccttttttttttaagcatataaattatttggtttgcatgttagagcgattagtttgtttcaacttcgtatgcaatgattgtggaatctaaggcttttgtgtaattaaaaggcaatatatatctaaaggaggtagatgaggtataggtaatgatcatatgctgcaatggcagatgtagttggtaacccaactcccagtttcaagttttggggtagctgaaggctgaagcacgggaaagatgggaactttgagccccataatctttctaataaagatttttggaaaagataaatgatttgataatgtgacaatagtttaatttcccaagcaactagctgcctctttgaatttgagctatgtcagatctttttaagtgctttgcttaatagattgaagagtaggggcaatgcctgatggctgatgcagtaggttattcattcagaatttgggtgtgtaagaattgtcttggatcgttttgtgcaagggggtgtctgtgtgtgtttacaagtaaagattcatttttaaagagggcccattttctttatcaagggtaggcaaaactcatttggagttcaggaattgtccattacctctaattttctgatacaactcagttataatatgaacagtttgcttaattaggtgttctttatatctttttgttgataaatatcctatttgtgcaaaaacaggcatct

SEQ ID NO: 70711 - DNA, 892 bp, Prunus persica
  Intron number 2 from transcript ppa012012m (locus ppa01201 2m.g) derived from phytozome v7.0 (chr-ID scaffold_6; pos 26411247 to 26412138 reverse strand)
atatttatctcaagcttctcgtcaaggtatatacttttgtctttgtgcttatttgcgtttatacgactttttgtatgtgggtatgatttcattgcccttaagtatcttacttgaagaatgcttgttgtaaaatatacatatactaaatatgtttaggaatggaaatatgtgtatctatagcaaatgaaagattgaatattttttgttccattttctgtaaaactctctcatttcgggtttgaataatttggtgtttttctttctgcaatgatgatatatgtgtatcccagctcattacgagaccttttgtaggtcagggaatagacttaacccacatctatctgagcctttcgcaacttcggtttgtcaagtctgatttataatgaaaaagtgcatctgttatttcttttaaggattttgaattacattccgatagaatagagcaccgtttggtgtaatttgctactatttgttttttttaatactttggatcgtttgaatttatttttcctttagaattgttttctgatccagattatttagaaagctgctttctttcattttgtatctcaaaattcttatagcattgtttaatgatgctgaactatggaggaaatgttccctgtgatgcttttaaaccatgctaatgctgattattgcatgattatatctttaacaaaattctgagggaactagcccatctttttcaaattttgttcctttgaggtttgttgaccagatatcttttagtcggattcatgatttctgccttatttctctgcttttgtttttcttattgtatactataatgatatggatgtgttgtctgattggatactcggtttttccttgatcagctctaccgctttcttgtccggagaactggaagcaa

SEQ ID NO: 70712 - DNA, 667 bp, Prunus persica
  Intron number 1 from transcript ppa001973m (locus ppa00197 3m.g) derived from phytozome v7.0 (chr-ID scaffold_8; pos 10192909 to 10193575)
aaaatagcattgtcggaacgtgtgtgttctttaagaacaatacatagtcaatataaaatcatcaaatagaagaaaacaaacataatgctttgagcttttgcaagtggaaagaaatgcgtcgaattcattattcaaaagattgctcatccaagcaaacttcttttatgaacaagctgctcacgcgctttacgagctaaacattccaaagatcaaacttggtcaagctaggtctgcccaaaaataaaagaaaaataataataagggaataaattgtatttaataaaaagattattttttattttattttatttttgtcttgaaaaataaaaatatttaaattaagcacgggatttggttgtgacttcggagtgcagcccaagaaagcttcctgctttctatcccaataaaataggcacataagggaaagtcagatcagaccacctcctttcgccacgtagcaccgcacaaccagctacacataacgcgacgtcgtctggctactataaaccacaaatgacaaacccatcagacgacaccgtttaagatagatccagaactttccacacgcatccttcgctcaatttccgcctcataaaagaacgccctcccaacaaaaaccctaaaccctagagctcaaaaccctccccgtttttcccctttcgagttc

SEQ ID NO: 70713 - DNA, 788 bp, Prunus persica
  Intron number 2 from transcript ppa001973m (locus ppa00197 3m.g) derived from phytozome v7.0 (chr-ID scaffold_8; pos 10193655 to 10194442)
acatcgcatcggcccctctctgtgcctaccgatccgtacgtctcttacccttgctcagattccttcaagttcgcaactttttcgtctttgtactctcgaccctagatcttctttcattctgatctgtcattcgggtgaaataacttagcttttttttcattttgttatataaatgtttattttatgaagtttttgttggttgtgatccgaggaattagaaacgcataagtgaacaacttcttttgaaatgtttaatattttcctccgttttctgagaggccaaaccgagaaacggagctgagggttttttaaaataatatatgtgtgatttttatctattgcgtgatcatctttcaggcttctggtgtgtgatttttatctattgcgtgatcatctttcaggcttctggtgtgtgattttgttgttttgattgggttaatgatagttacgaactcttgaagctctttttgactgtcatctttgcctgatgactgacatttagggcggtggagtactgttgtttttattgccaatttcaacaaagtttgaggatcattttatagagctttacatttcttttattttatataaattactgcttagttcagatgatttgatcaagatggaattttatttacatattggggcgatgtaatgggttatagtaggaaactcagttatatatgaattgaagttgtatatgattgttcattatgcatcgcagtgcttattatatactttatggttttgcagttgaatagcacttcaaattcatcacatcttgttca

SEQ ID NO: 70714 - DNA, 932 bp, Prunus persica
  Intron number 2 from transcript ppa004047m (locus ppa00404 7m.g) derived from phytozome v7.0 (chr-ID scaffold_2; pos 15487964 to 15488895)
gtcttcgtaacacttcttcagctactgtcgtggtatgtggtgaacatacagtttctatcatgtccatttccacaatcattgtcttcaactttattgttggagtggattgttgtctgatttacatattatgacacctatatatgaattttgagaatagttctccatttacctttaaacagattgatctaacaatgcctgcttttcagtataattttttagaatgaatttcagtagcatttatatccttgtcagaggacacaaagtttaatatatgctttacaaatgacacatttcattaaagactaattttttatgcaaaggaaaagcagagtggtagtttttttaaaaaaaagtgattcttggttcttttcctttggaaagttctctgttctttttccttttcctttaccattctctcgctctataattaagtaccagatgatccactgtcaattttcccctagttttcatggaattttgttctacatataatgctgtaaacttaaagattgttgttttaagcgtttgactttagattaaccttttcaaccatgcgctcttatttaagtttttgcaataagtgaccaccaacagtcaatttcttttccgcttcaggtttccggtgtaccttgtcttttggtcattataaacaaatgttgattctcataaaagataaaaataaaaaattctctttatattgctcgttgattgattgtatctcaacattgtacgttgttcttgttattgctttcaagggaatgtggttttgcagtataccaatttatatttaaaagtcttcctgctggacttctaagtacttctgtgttactgcattacagtgttttttctcattattctctctgtataagatgcacgagtacctgtaattatatagctccaggaactgtcacaggttgaaagtgctgaatcct

SEQ ID NO: 70715 - DNA, 921 bp, Prunus persica
  Intron number 1 from transcript ppa005921m (locus ppa00592 1m.g) derived from phytozome v7.0 (chr-ID scaffold_8; pos 11648542 to 11649462 reverse strand)
tcgctttctctctgtctttccagcctcgtctctctgtgagtaactcattatgcataggcttgcgttttgttttgtgtgtttgtgatgaccttcgcacatcaaaaatgaattttgattattgttattattttgttattgaatttcataatctagggattaatttgttggtttttgttttcgaaaatttggcgtttgactatgaattcgatatttcgtgcataaatttcggatctctctgacatgtgtagtgcctcaatatttactattttagggcattttttgattttttttgttttaatttttggattttggactcaatcttgagtttcctgaagagtagcagattgaatcgatacctgggcctctttatatttcccacacagttttactgttttgttcttggtgttgtcggtgttttcatttttggtgatggctggtacggtaccaaaccaacagtgtgttgaagaaagctttgagaatttatttttgttaatttttgaagctccactgaactacagaggttcattggactgaatatatatatatatatatatatatatattcaattaaagtatttttttaccccatttttgctgtcactgtgtatccaaccgggaaagggaaggactgtgagattcatgaagtgctttcaattgggtaacctttgttttcatttgttgttgtttccatatggaagtggtcctcagtctgaattttcatttagatttgttcttttttcgctttttggagtttcgggttctttttcctttcatgatattgtgtattgttgaacagaagtagggtttattgaaatccatcacttcattttctgtcctcttaagttatgcgtgtttattgtactatggatcatcttcttgatggtttgcttcttttactgtagttgcagaagaacagctggtt

SEQ ID NO: 70716 - DNA, 706 bp, Prunus persica
  Intron number 1 from transcript ppa002754m (locus ppa00275 4m.g) derived from phytozome v7.0 (chr-ID scaffold_4; pos 4389991 to 4390696)
ccttccatagacaaggacaggcctggtatgctttctgacatctgtaatttcatattctttatgatttctatatatgctgtggattctattaatgtatttatcataattataattgttaaattatttatttatttgcgtcctttaaattcagtctgcaaacttggatttgtatggcaagtaaaattatttatgtaaccttttagttgggagttattttagggaatttttttccagtctggtatctgttgcaataggatagcttgaacttaggcggtggatgcaaacatttctactgctttttttttttcttcttgcttagcacactttgtccctcatcaaaatctttatgacgcttgaacaaataacatttctggggtggttgtttggttgtactttcagttatatattacttcatttcataaagaattttgcatgttccggatatgctctttgggttattaagaccttctagttttctgttcctgcacagtacatggctgattgtacattctgtgtaggttgccttgggtaaaaggattttgcatgttttggaacctcgtaattatgatttgctgggtttatttaatttgattatcgatgcactgtatcacttcctttattctttcttatttgtagactgacattatatatacatcttggaacgattgtaggttctgcaccactgggcttcctagtgacattgttg

SEQ ID NO: 70717 - DNA, 968 bp, Prunus persica
  Intron number 2 from transcript ppa012878m (locus ppa01287 8m.g) derived from phytozome v7.0 (chr-ID scaffold_2; pos 16561125 to 16562092)
cccccccgagctggctgaagatctctactcaggatgtgagaaacccgaactctaactcttgaataagtaattgggttatgttgtgatttgtttggtaaatgagaaatttaagtaagttttgaatattttgctcaatttcattccgcactttcgcgaaaatgaacaaaaaagaagaagctgttcttgcccatttggtatcagacagtaaaggatcgttttttatctggtaattacgttttgtgggtcttctttagtcaattagcaaccgaacagagccttattagttcacctctctcggtctgtcttttatcttctgtgaattgattgatttatgagatgtatagtgagagaagcaaaagacgatcttttgatatttgattgagtttttctctccttttgatttggaatgattgggtttctattctatgaagtaacagattattttaatttcatttgggcacatctttccttgctgtctacaccaaatgaaagctcgagtctgattgttgtctcatacatactcatgatgttctaagtagcatcgagttttcgtacttacaagtctgttaatgccttgcgattgtagttgggatctttacaattctatcattgaaaaacataatgactgtttcttttgttttgttctagtcgagtggttttggcattttagaataatcaaaacttcaagtttgttttgcgttccatgttcatttaatcaattttattatgtctttatatctacaatgaatgaccacatacctttgtcgcaatggcaaatgctgcaaacccagtcctctttattgaatgaatgagagcatatttgattgtctgttaactactgaaatttccaagagaatttacttacaatgtaaaggaactaacacaaatttcaattttgtgtattatacttatcaagttgtttttatctttaaggttgaggagaacatctgcaagtttgccaagaaagg

SEQ ID NO: 70718 - DNA, 893 bp, Prunus persica
  Intron number 4 from transcript ppa005205m (locus ppa00520 5m.g) derived from phytozome v7.0 (chr-ID scaffold_1; pos 46302743 to 46303635 reverse strand)
tgcataaggcttcgttggaaaaagaagttcttcaggtatatgattttcagatcttggtattacattgatgcttctatattggtatctcttccttctcaagttctctgagatatcatgtttggccgtggttggttgagggttcagtgtcttttcaagtatttttgtatgtaattgccctttcatgctcaatttttttatcaaccatctaagaatgtagtattatcaaagttttgcatatcttacgaaaaagaaaattttcttataagtggtcttttaaaaatcttgatccagcagcgttgctctgattaagtagataaagggcatggcatgtgaagctatcttcatcatgtctatattgacatgtaaagctgtgaataagctttacaattagaaattctgtaggtcttttattttattcctgatgaggttgcaaattaaatattacttagcttaaaaaagaaaagtatttggtatgattattaagttgtgcactgggtagtttctggtattggaaatgcatatgaaacttaaggcagtttgtttgaggcatgcctatttttgttgtcatgtgtactcaaatatttgtttgcatttgatattgctgcaaaccagcaactggagatgcattttgcatttcctcttctattgaatagcacattctgggaacgtctgaagcttgaatattgggtagaatgggttgagatgcatatctgagattaagattgttggcattgtatctttttgtatatggatttaagctactaacatgctctgcttagtatatctggaaaagtttttcggttagattatcccgaatttatactatgtcaaggtgtatgaattttttctgggtatctttatgcatcgacagctcaaaaaagatagtaggaaaa

SEQ ID NO: 70719 - DNA, 477 bp, Prunus persica
  Intron number 1 from transcript ppa005205m (locus ppa00520 5m.g) derived from phytozome v7.0 (chr-ID scaffold_1; pos 46304053 to 46304529 reverse strand)
ttcaccaactggaaatcgaaaacaaagcttatcaggttgctcttttgttctttctgatttcatttttctttgaagtttggaagcctgtttggatgctgagaaaattttgaaattaaaaaaataaataaaagaaactggaagcgcgggtttcagcttgaatgagattgaattgatgtgagtttgtttggagttaattttgttgatttgaagtatgtttgactggtgagaaatgcagtaaaacagtgaaattggggaaagttcactcgagtctgtttggttgattaggaaatgttgcgaaagagaagatatgcaattgaattaatctgattatgtcagttaaaagtaatgtgaaattaaattttaaattttcaaaattttaaaattaattttgagtttcttacttgtgaaaatctcttaaatttcttctgatgacaattaacagaaggaggttgaggagctgagatacaagcttgcaaa

SEQ ID NO: 70720 - DNA, 494 bp, Prunus persica
  Intron number 1 from transcript ppa007881m (locus ppa00788 1m.g) derived from phytozome v7.0 (chr-ID scaffold_5; pos 16411972 to 16412465 reverse strand)
cacttcgagcgatacaactcagaaacacttctttggtaagccttccttttcgctatcttctcgcttcgattttttggattagaacggatcttatggcacagaaacagtgagaattaaaatgaaaagcatatagttggaagacatcaaccagttaacatgacatcagacataatatatatatatatatgtacagttaaattaaaacataaaatcttctaaatgcaacaatacattgatttttaatgataggtttaacaatacgtgtttggaatttgaagcagctgaaaacaaaattgttgctttatgaacagatattgttgggaaagaaaagaaattaaaagtttttgatatttaggggatgtataataatatatgacaatgtgtatacaaaatttgtctggatatgtttttgtaatgttttgcatagtacaattgtagaacatgtatgacttgtgggaaggttgtaattgatttattaatctgtcaatgtagta

SEQ ID NO: 70721 - DNA, 303 bp, Prunus persica
  Intron number 1 from transcript ppb019001m (locus ppb01900 1m.g) derived from phytozome v7.0 (chr-ID scaffold_4; pos 3218936 to 3219238)
gatcgaggtgagtgttttgatgttactgattctatttaattcttctaattccttttttctcccttgacttgtgtaacaaatgtcctttgtgcccaacacttcttttcattagtcctggaacatgtgcaataatattttaggtttgtcagcatgatatgtgctttctaattttttgtgcttaattagtgctatagctttcagaatttaccaagattgtttgctttagttctgtggtctaccttcaatatcttctttttgtttttgccagtgtgacacttaacgactttacacaaaagaacttcc

SEQ ID NO: 70722 - DNA, 224 bp, Prunus persica
  Intron number 1 from transcript ppa008200m (locus ppa00820 0m.g) derived from phytozome v7.0 (chr-ID scaffold_8; pos 21317757 to 21317980 reverse strand)
aaaccttagaatttcgccaaaaccatacgcccaaggtaataccatattatctccgtctgtttttcttttcttttctcttcagcttcatccctatttttcaatattgattaaatttgattaaatttgatattttatttgtctgatgaagccctagaataaattgctgaatgcgtgtgttttgttttgcagtattaatcacaaagctacgaagctgagattacagc

SEQ ID NO: 70723 - DNA, 811 bp, Prunus persica
  Intron number 1 from transcript ppa017081m (locus ppa01708 1m.g) derived from phytozome v7.0 (chr-ID scaffold_3; pos 4787758 to 4788568 reverse strand)
aggttcttgttgaagatcaaaaaccgtattgataggtaataagttcctccttatctgatattttactgtgtcatgccaatctatgaaaacctgttctatactgttcttatttattcagttagttataaagagaagcatcctatgtaggttcagattccagttaagtccaacctcctaaaatcctaatttaggacacatgaacgacgcatattgtcgcgtcatttaacatgtggatgatgtggaccttgtactatgaaagttttgaacatcctatccaaaaccaattgacaacggatggagaagctcatgatcttataaacattaatgtaggacttacatttcttggtttgggatagtactttgaacaacttgacatcagtattcgagcctagctagtttcaacttggctctccagacaggcttcacctcaagcctaattttattggagtttcaaatatttaatttgcttgattcaagtctacttttcaactttaaatctcgcattaatatacaagggaggagtatgcttctggtgtttgggctttgatagcaggtctgtcctctttactttccacctgagggtgttgaagaaaataattctaagtttgttagataccgccctttatatgaacgaatatacttaaattctgtatgtacataatatcttaagtttttggactgattctcttagtagaccagtaggggaagtataaaaatttgaatgtttcaatggagctccgttgatgaactattggtgtttcctgaatacttttcagagtaggaattgatcttccaacaattgaggttcgaa

SEQ ID NO: 70724 - DNA, 809 bp, Prunus persica
  Intron number 3 from transcript ppa015042m (locus ppa01504 2m.g) derived from phytozome v7.0 (chr-ID scaffold_1; pos 6861527 to 6862335 reverse strand)
aaggttgctcttggctcagctgaaggcctcctgtaagcataataaactatacacttaattatacagcttcttttattaattgttcaattgaatttgaaactattgactataaccacattaagggttgatccagtccaccataatataatcaacctaccaactctgcccttcagtataagcaccatatggattgaaataaaatattttatataacctgaattttttttatttagaacaagggaattcaaacttaggagcttctcccaaaaaaaggaaagaaaaaaaaaagagactttacagatgggagttcaaggtcaattgttttgcgtatgtagtaagatcaacatacaacagaaaaatgattatggtaattgatgatgattctgctgctttcgattatatttgagtacttgtgtttacaccatatacttattgaccacattgttaatcacatctttactatagatgagaatcatttgcataattgaaccattccatataattcaaattgtgaaggagggcggattatggggtgggattatagaatacgtcaagggttagatctcttccaatataacaaacaaaagaaaaaaaaacatttacataagttggtcttttcacctctattaaagagatccttcaccaaaataatgtgtacaaatattaggtcaattttttgcttttgttaccaaatcaaaccaaataaaattgtgccaaattctatatataccaaaacttctggcattcaattactttgacaattaaagtgttgatgctcattgtacttgtgggttttaggtacttgcacc

SEQ ID NO: 70725 - DNA, 502 bp, Prunus persica
  Intron number 1 from transcript ppa007985m (locus ppa00798 5m.g) derived from phytozome v7.0 (chr-ID scaffold_6; pos 27645274 to 27645775 reverse strand)
ttcccagagtacaactgggaagtcagggtttcgaggtaaaacccatttctgatctttgaattcaagtttcagtagcagcaagaaaaatcaaaactttgtggttacattgtatttcttcgttaccttctgttatatgtgtgtttttcagcataaacttaaaaccccatgtactataagcgagcacatagagtatagacggaccaatgtcaacaaaaaaacttgttctttcacagtcatcgggctccaacaatcaacatagatcacagcagaaaacaagaataagaacctctcaaggcttccctgttttctgggtttttagattaggtgtttagtttttcaaagattggcccttttttggattgagctctatttgtggttattaactctggtttaacatttctgccatttaattatgttatttactcccctccaattccaaacaaaaggtggttttgtttaacattgatttcttgtgcaggtttccaagttgggatttgggtgt

SEQ ID NO: 70726 - DNA, 548 bp, Prunus persica
  Intron number 1 from transcript ppa016463m (locus ppa01646 3m.g) derived from phytozome v7.0 (chr-ID scaffold_5; pos 15047121 to 15047668 reverse strand)
tgttctgcaactcttttgaagagttggaaagtgaggtaagtgcaatattctcactcagattttgatcttactttaattagctgaacaactaatttaagtagtttgtagattaccagaatacataacaaattgggtttatttcttttaagtaggaaataaattggtgagcgggaattttatattatatgtcagaaattaactataatttttttgtttaaaaaaaaatcataacaagcataatgaaaaaatctttcgtgatatatcatttctcttttgaaagtaatcaaatgctaagaaatttcagtactaaaagtcgtttaaatccttttagaatatttggtggatggtgtataaacaactaaacataaagaggtttgacttttacttgcttgatgatgatataaaactcatatttcttcaaagatctaaatcattttggtaaggtcaatattatgattatcagtgttttacttttcctatttgtaaagtaattgcaattctaaatgttcttattttaattcatctctgttgaaaagctcgtgaaggaa

SEQ ID NO: 70727 - DNA, 403 bp, Prunus persica
  Intron number 1 from transcript ppa019853m (locus ppa01985 3m.g) derived from phytozome v7.0 (chr-ID scaffold_1; pos 25079722 to 25080124)
gacttaaaacatcaaaaacaggtgagttctgttttagacttcttgactaaatttcacgtgcttgaaatatctaagaatctatgtccacagttgaaaaaaacaaaaaaatgtttcacaaccaacatgaatgaatttgttggtcaacaatttttaccacaaaaaaagaagttctgaatcaaattgaaatttactggaaatcagattactacaagggtttgataattatttgatatgatgtaacttcatttcattttgctttgttttctttcaatcttccaatactgcggatttatgtattcttacatagacaggtttatacacgcatttcagaaaattcacagatagttttccatgggagatgacggtcattgttttgttttttatcatcaggaatcagacccaa

SEQ ID NO: 70728 - DNA, 789 bp, Prunus persica
  Intron number 2 from transcript ppa009885m (locus ppa00988 5m.g) derived from phytozome v7.0 (chr-ID scaffold_8; pos 17275062 to 17275850)
agagcagaggggacctcccagttcggttcttggaggtgatttttgtgtttaatttcatatctactctatctcctcactctagctgtttgttttttgttctatatgagcttgctgttgttaagaagtttgctttgcatattttgatgggaattgggaacccatgaattgaatttccttggggactttgcctgcttttatgtattggattgcagtctgaaattaatactcactcaagtgaaaaagattcaagatttaaggtgtaggtgaaaaaatcattgaaaaattagaaattgagtatgggctcgtttggattgcagtctgaaatcatatctgtaaagagataataggtggaacataatatatgcatatatctgtttttgtgtttgtggaaattaatacttactcaagtgaaaaatattcaagatttaaggtgaaggtgaaaacttcactgaaatgaggaagtgggtaagtagttgaaaggtggaaatgtactatagggagttttgactttgatcatttcgtgtgattcaattgctaaccaattcttcagctaatatctaaaaggaaatttattaatgtcctgttctgctttctttgtcccttttctgattctctctgatgaattcaacaaccattggacaatatgagcttgttgctatttctatttcttctaagcatgttgatttccagtccaaatattcaaattaattctgtcgaactgatcccttttgttagagacaagatgagaaatatgacagatttctgtgattgcagggcaaaaagagtgcc

SEQ ID NO: 70729 - DNA, 667 bp, Prunus persica
  Intron number 1 from transcript ppa003966m (locus ppa00396 6m.g) derived from phytozome v7.0 (chr-ID scaffold_1; pos 35746820 to 35747486 reverse strand)
ctctgggctggagttctcattacggcgttggattggttggtattgagtatttactttcagttgatgtcgtttttcaagtcttatttggggtttttgtcttgttcatttgttcttgaactctggttttccttgcataattttgtccatttcagtccatcaccaagtgggggagtaattttgcttttctgaagcttgacttctggatggaatctttaattttctagctgattttcttttgattgaatggaacttaggctaattatttgaacaatgagcttgggtcaaatgacattaggttggagtgggtaggttgaaatttataacatcctcaccatttatttttcttcgtcataattgctggggtgctaagtctcagtttaaacccaacttaattaaaatgaattgtggttgggattgggagattaagttgggaattcatggttttgaagaattctgttacttatccttgaaaattgaaaataataaaatttcttataattgtatcatgttaatttcatgtcttaagtgacaatttgctctcttcttccatggcggatgggcatgggggagtagctggtcaatttggcccttcatggataattatgttaactagggtttctgtgttctctttcatgcaacagtttcatctttttatttcttgagaact

SEQ ID NO: 70730 - DNA, 1070 bp, Prunus persica
  Intron number 2 from transcript ppa010886m (locus ppa01088 6m.g) derived from phytozome v7.0 (chr-ID scaffold_4; pos 2477389 to 2478458 reverse strand)
tcgaagacgagcactcgtgcgaatctaaagtcaccgtatgtgcttatttatctctttttctttttttatatgcataatatttgttacataaataaagttgttgatttggttcctggaagaagaaaaagctatgatctttgtttttggtgttggtcaaatgttattgcctaatctggaaatctgcgattgactttttgattttatcaaaggcgtataactataactgctatcttgtcattgctttcttcttttgagcatgcagtcctgtattggtttaaaaacaaaatcgtagtttttcctcttatagaaagaaagaggaaagagacgggtaggaatgcgcccaagtatctttcttttttcctgaaatatttgaaatggttcatatgttagtgaaatgatctaattttgttgttttttccctttggttttttggataaggaagggaggaattaatacaaaggaatttccaggaattgcccatatgatgcatgtttaagcaaaggatagacttagatggttaatgtgtgacataatgatgatttatttgatagaaaacgtgtaagagggcttaagtagttgattattttcatacacaaaacctcaacacaagctgggaaatgtctcttggcattttctagaatgattgatctttgacccatttaatgagttatttctatgatgacttggaatatgactcttcatcatggtatcttctgttctttatatagaacacttccaattctcacccttcctctttcatgttatgtctgcttatatagaacgcctccaattctcacccttctgttcaactctaagccacattaagcttcttttttatttgagcgatgaaatggtgtggttggtacttctattcttttggtttttttcttctgtacttccaccattatccttgcaatgataaaactttgtagtaactaaacaaaaagtaatcaactttccttcattttgtgctaggtacttttaccctttatttctgattaatatttcatgcaaaaaaattactctcttttgtaggtttgtcccatttgctctgttaaagttgcacggga

SEQ ID NO: 70731 - DNA, 685 bp, Prunus persica
  Intron number 1 from transcript ppa003260m (locus ppa00326 0m.g) derived from phytozome v7.0 (chr-ID scaffold_6; pos 23481632 to 23482316 reverse strand)
aactggtgtttggaaagcctctctcttcatcgttggtaagaaacaattatttctcatcacctgtgctctgtttggttgctaagaagaaaccatataattgcatgctatttttctcgataaaattcttggatcatgcatcacccgttacaagaattacatcacaacctccttcgttttattatttatcttttctttcttttttgcttaatttgtcttgttgaagttcataacagaccaaaatattttgtcaaaaacgaataaatatattactttatggtgctttgaagtagaaccccagaaggtggaggagactgttttattcatgcatactaatatatatgggggacataaagatttacatgcaagttctataatatccgagactgcacgtgggaggggcctctgcagcactctagcatatgagaatcttcctttttatggatccaatttggccaccacaccctatttaacacacgtatcaaagaaagtgctgctattgtgttaatcaagattgattagataatttaaaatttcgagttaacataacataatgtattaaattaaatttatatatgaaggtgtaaatgcatgaataatatgttgagctctacaatttgattaactgttatatctgatccttgtgtttgcagcaattgagttcagtgagcggttgagttactttgga

SEQ ID NO: 70732 - DNA, 350 bp, Prunus persica
  Intron number 1 from transcript ppa004729m (locus ppa00472 9m.g) derived from phytozome v7.0 (chr-ID scaffold_3; pos 18257487 to 18257836 reverse strand)
tcacctggtgatattgcatttaaggtgagtttttgtttatttctttgtaaaatggtttctctgttataactattatcctggatgagcagtttcaatatgttgcactgccataagatgcaattatttcgttcttataaacagaaacttgggacttgatggttattggccccaatccagttgaagaaaatttaggtcacatattagcataaacaaggactatattattttgaccccatgttacttgctattgatgctctatccttcaggttatgcttgttctagtagacgatgctgttccatataataatctttgctaacttttgatctttagtctaattttgcaaccttgg

SEQ ID NO: 70733 - DNA, 966 bp, Prunus persica
  Intron number 2 from transcript ppb014910m (locus ppb01491 0m.g) derived from phytozome v7.0 (chr-ID scaffold_7; pos 19592492 to 19593457)
agaacgagtccagtaagtttaacccgagtgctgattgatgcctattttcttttctatgttctctcatatcatataatgttttcgcatttggaattgagatatctgttatgtatctacatccggccttctaattttctgctatcttcactctgtcacacggcgtcggtgtcaagcatattatataatgctttaactataagctcttttcagttttgtggcagttgggacccaataatattaattgaattccattttgaagcttgaagccaagaggcatttctttcttcctttttggttgtttgcatgtggaatgaatgatgcaagctgagaaagccatggccaacatctcccggaatgtgatcaagaataaaattaggcatctaataattgattatgcttcttttcattttaatcatttttttacttagaaatcctgataaccagaaacttctgaaatgaccaaaaaagtcatctctattgtggtcctagcctctggtagtaggtgcaagtgtcacactctcaggggccagaaaattataacaatctctgtttgccattaaagagcttgttgagagactttggttaggtaggacttaggagtctgcctaccgagtggtaaaggaacattcattgcaagaataattcttttcagccttagcaaagatgcagcctgccaaagaaacaaagaaatcaaatgcccccatgaactaaaactaaagaataagccatactaaggatggtcccaaagtgccaatcttcttatggcataagtgaaactaaattgtaagattctgtgttcgagttccccctcctcaaatatctcgcttgtaaatctttcttgggaaaaaaagaaaaagaaaaagataagggcttcacctagaagcctctgtgctgatggatatacaaagaaagcttgatggtgaaacagtgacgttgcctttttctttttaggtcgtgaaaatataa

SEQ ID NO: 70734 - DNA, 753 bp, Prunus persica
  Intron number 2 from transcript ppa012583m (locus ppa01249 5m.g) derived from phytozome v7.0 (chr-ID scaffold_6; pos 5470367 to 5471119)
agcgtcacgattatcggaccgccggatacactatagtatgtgccttttcggattcttttccgcttcaattttgtgcctttcttgattgggttttgtggtttaactgttgtgcataagatgatcgatttcggtggttatttatgtctttgagtgggattggatcaagggtgattgagattcttgtgattcttgttctgtttaatttaatttgttttggggattttcaatttgattgtagttttctcaattttgtgttttgacttttaaagttgtagttgaggtggcagatttagggttttgccctatgatgggatttatctgagcttgtgatatgattctctttcaagttagaaattgtgaaagttccatatttggaagttagtcttcagttacaaattgcttagtttggttcttagggtatgtgaaggtaaaggtgaggacttttaattagttgcacagttagactggatttttttattacaaatttcctatatttggaatgtggtttcaaattgggcacagtattggtttctgcaacgtattttgtttgtattatttcgttacttttatggatgggagtatcttctgttttcgctcataagcagagcatttatttggaaaattgccattcacttgagattttttgtggcatttaaagctgtgagttgtgttcatatcacattcatcattcatttaatctaattcgaattaatcattacatgttacctaattgcagtgaagggggattcttca

SEQ ID NO: 70735 - DNA, 690 bp, Prunus persica
  Intron number 1 from transcript ppa004088m (locus ppa00408 8m.g) derived from phytozome v7.0 (chr-ID scaffold_6; pos 11800659 to 11801348)
tcaaaattcaagctcaaacccatctctcatcagaggtaatttctccattccccgcgcacaccccccctcccccccaaccttttatttatttttcttattataaaaaagaaaaaacgaagcaaatgctaatttttgcagtttccatttttctaatatgatttgagtttgttgtaaatatttgaattttgattgtgggttaaactgggtatgtaaaaggatatatggaccaatgaagaactttaaacttgatacgtgttgtaagagattgaaagttttggttgttattgagataatttagcttcattttatgcatttttgtgggcggctgtagtctaagttaaatagatatgcttcagtatttgtatacggaattcatttgtggatggctgaaagttttaaaattcaagggggaataaattttgcatagaagaggaatcctattggtattggttaaatttttttgaagctgtaaatctaatcaaaatcagtactagaaattatttgaagcctaagtctggactctagcccatcatgtatattcaatttgtaaattactctgaatttctaaaacaaagtcatagatacaacaaatgtttcaattttcatgtttattgttataatcactattattaactagtaaaacttctatatgcaggtaggcattgcaaagcaaggaagtttgactgattt

SEQ ID NO: 70736 - DNA, 883 bp, Prunus persica
  Intron number 2 from transcript ppa011436m (locus ppa01143 6m.g) derived from phytozome v7.0 (chr-ID scaffold_4; pos 25835722 to 25836604)
aggcaaaaagctcaagcttgcaatttgggatacgggtaatcccaaatcaccgctcatcttcaaatttctgacattttttagattttacagtttttggtgcttgctcatatgtgattaggtcattttggaagttttgattacccaaaattgtatgataaattccggaaatgtgggatcgttaacgaaaacaaaaaggattgaattaaatacaaaatatagtttctgaaggatttttgttattgtttgtgattgcctgttaatcatttcctcttgttgcttggagtgttttaaccaaacgaaactagttttcttatgtgcattcaagtttctgttttttcccccggcttttaatttttgttatgttttttgtttatagtggttttcctctgaactcaaattgtttaagtgctcatgtgcaactacatgtgtttccaattatttccagttgggaatgaatcagaagacttcttctgcgttaacatttaatatgaatggtaggattccgattcagctctgctgaattgaagtttgagaaatttctgcagtcatgccaatgctatgatttgcctttaaacattcttttacaaatctatgtttggcttttggcttgtatgcttcttgacattgagtcttattccatgagatcatcttgtcatcattgtatggataagctattcatgaccttggatattgttcactgcttcttttgctaggaattcatttttcttgtaaattgttttattttttatttttttataggtaagctatccttcaccaattttctctttttgtaaagaggagggcttggactgccatttctaacaggttctaaatgtttataaactcagctggtcaagagagatttcgaacgttgacaagttca

SEQ ID NO: 70737 - DNA, 610 bp, Prunus persica
  Intron number 2 from transcript ppa010271m (locus ppa01027 1m.g) derived from phytozome v7.0 (chr-ID scaffold_4; pos 4289773 to 4290382)
acgtgtccgtggaggtcgataagctcgcggagcaggtaagcaaaccccagaactcactctgtcactgggtcaatgtttattttatgttggcttgttttttagttggataaaaaaatttggagtgaggtcagccgttggattgggagtgtgatgattgcatccaaagtgggtgagacagctgggcttgggatgttgaatcttgaccattaagctgggttttagtggggtccttttggattgaattgactcaggactttgttttgcacaatggatcatcttcctgtaaaacttaatcatgacctgggggcttcctgggggccaacatagtgatttcatgaaagcccagtttattttcaaaaataaaaaataaaaaatttgcgagagcccgttgaaatttgtcagtgaatcattggttgttgattcttcaatttttttttctatattaaaagagatgtttggtagatattccaagcctagaacaataatatggatgcattgtcctttttcagccatcacttatctgtcttttgattctttttggtcacataatacttatttactaatttcctctttttttcataggtctctgcaattgaaaaatccatctcaa

SEQ ID NO: 70738 - DNA, 761 bp, Prunus persica
  Intron number 1 from transcript ppa000406m (locus ppa00035 8m.g) derived from phytozome v7.0 (chr-ID scaffold_5; pos 17322216 to 17322976 reverse strand)
ctgaagacgaggtcaatatattttccttcgtttctttttcattttcgccgagtttcgaattgcattgaggctttgcaatttatttgaagaaaagaatttattctggattttaataattagttgtgatttctcaattataagaaaacgcggtgctgatttccagctgtatgcatttggtttcttgtttttttttttttctttcttttcttcacttatataaatagtgtgtgcaatctttgatatcagtgaatatgttgctgtaattgtgtgtgcgttggtaaagattgcacttctatttctgacattttgaggtattatgatcatatcttgacatggcgttgttctatttgcgaacctggataatgttttcacgtttctcatccaaatgagagttaaaattcaacggttgcgcttaaactgtattttaattttcaaaatttctgtttcttgtttaatttatttatcagatcggccatgtgacgtcaaaggaatatttgttttcctttgcatattctctactattatgaaattgattcgcagtttagtgccatcaaaacaacaattgggtgaaagccaaagcacaaaatgactatcatttagtatgacgttgagcttttgctaacacactgagcttctttgcaaatgaggcattgtttattgtgaatttgctccatctctatttcgtcatgcctagaggtcgtgacgacattaactttggaactgcaggtaatctttccagctcttgatatacgtgtgaagaa

SEQ ID NO: 70739 - DNA, 792 bp, Prunus persica
  Intron number 2 from transcript ppa004896m (locus ppa00489 6m.g) derived from phytozome v7.0 (chr-ID scaffold_2; pos 17196203 to 17196994)
aagtttctggtaacccagctctttcttttacgcataagttattgggtttttgtttatctatgcttttactcttttggttgtctgaaaacttcgaatttgagtgtcagatagtacgttctttaagaaccatacggaaaaataaaccaaagcatttgatttcatgggtcttgggttggacaaaccttatcaactagtacttcaactcaattttgggcaatttgatcaaatatgtttgatatgtaaacatggacataagttcttaacctgaaagaaacgggttagagtctatctgacttgagcaacatgaggagttcgatttaaacagtaagtatttcatgttttatatggttatttgtctaaattatttacagatacaacttatatacaacaagttacttttgtttaaattagttattgaagatttttctttaagtttttttgtgcaatctgcttaagatactttgatttgggcaacccgagaacttacttgggaaaacatatgcgaaccccccaggaactctgttccttgggcaagcatggacatatctcctaattcggccaacccactcacgtccaccctagttaagaatccatgggtaaaatatgtcccaataaaaccacgctgtaagaaaagggtcccaaaattttcacatactagtttaagatgttctctccgtttttaaatgtgcaacattctaggttgtgacactccgagaattagagcataattttgatttattttttgaaataatttcaggggttctattagttgttcctctggatttagcaata

SEQ ID NO: 70740 - DNA, 325 bp, Prunus persica
  Intron number 1 from transcript ppa002727m (locus ppa00273 2m.g) derived from phytozome v7.0 (chr-ID scaffold_2; pos 24264082 to 24264406)
agtaggtacactcacagcttttattttattttattttatttttctatttttattcttctttctttttctagcacaaggtctcaattaagtactaagttcaatgatttatttcatatttttgaattccttttgactaatataatcaatggtaggttagatacgtctccatgattaactttctgaatttgacatcattccaaatatgcttttggatttgtttcttctatgttccttattattgttttatatgagactaatcaaatttcttttcatcttccaacgttgttttttctttggctgctgctttctcctactgcagatccta

SEQ ID NO: 70741 - DNA, 368 bp, Prunus persica
  Intron number 1 from transcript ppa019770m (locus ppa01977 0m.g) derived from phytozome v7.0 (chr-ID scaffold_1; pos 8399249 to 8399616)
tccttctcacaggtctgctaacaacctgaaaggtaaattttttgtttagactttagactgtatgagaattgcaagtccaactcttttgcaagaacattctcgtttttttttatcctatggtagctcaaacttgaagagcacattatatgaaaaaatgtaattaaactcatgataactttagaacactcgtttgtcctctgtattaatcgaaaatgttataatgtataacactgttttcatactaatcaaataaagattatttattataccctgctttttttctttaacttaagaataaggttcctcttaaaaaacaacaagggtgttacaagtagaaatctaacacattttagcaaatttgacagttg

SEQ ID NO: 70742 - DNA, 580 bp, Prunus persica
  Intron number 1 from transcript ppb019068m (locus ppb01906 8m.g) derived from phytozome v7.0 (chr-ID scaffold_7; pos 12162892 to 12163471)
agatactctgacagtgctctgacaagaaaaaaagtcaaaaagttttctctgggagattgaaatttttaatcgggtttggaaacagtgcatgtgtaagttaggtagacgaaaagttgcttacatataaaaccatttcaaaaaaataatacggcggttacatataactacgacgtataaattacaaaatacgacggtacatttaactttagacgtggtaaataaatatgacagtagtattgtaggtaccgtcgtagtaaactcaaaaattaaagtacataagtaataactcgcgtcatggtagattatttaacacgtcgtttttattaatgtaccgacgtggatttctgtaatatacgtcggtcataccgacgttgattttacaatttaaacggcggtttttttgtaaggaccgccgttggttttaaaaatttattctataaatttgtcgctttcattcattttcaatttacatttagggttccaagttcttcctctctcagagacattgtctctcacatctcaaagacaataatttggatgtctttctcaaaaagaaattgagcttactcgcatcaaatct

SEQ ID NO: 70743 - DNA, 751 bp, Prunus persica
  Intron number 1 from transcript ppa000213m (locus ppa00021 3m.g) derived from phytozome v7.0 (chr-ID scaffold_2; pos 9892037 to 9892787)
atatattcatatattcatcgttcccaacgtcacaggtaataatactagtgttattctatccgtttcatttctgttaattcctcgtttggttcccaagaaaatggagtgaaaatatatcaaataaaaatggaaaattgattcttttgttttttggagaatgaatgaacaggtgttatacctggctcagttgattgaaaattctttttttttaaacttgtttgcaaaatgaagaaactgaaagcttgaagacttttgtttgtagtggttttccagactttgctctgtgttataacttatatgtaggcctttctttttatgcttagtcttaccattgcaactactgttttgttgttctttttccttttatattatgactttattttaaaaataatgctttcatgcctagtttggggaggaggaaaggaggcagcggctttgaattcgtgcattttgaaatagtaggaaaggaagaggctttccatgtttttgaactggtatatttgataaatgtataaagcactatatgtgtgtgtgtttatgtatccgtatgagcacaaaagtaatacttatttcctctctcctattagttgtttgtctttcggggcttttatgcccttcatctcgtgtgatattgtttagtggcttacgaaatgcagtgtgcatgcttattttttttccttcctgtgtttattcatgtgtggtgcttatgttttgggtgttttaataaatctttgcagaattggtggtgaaa

SEQ ID NO: 70744 - DNA, 876 bp, Prunus persica
  Intron number 1 from transcript ppa004535m (locus ppa00453 5m.g) derived from phytozome v7.0 (chr-ID scaffold_4; pos 5153891 to 5154766 reverse strand)
atctcatctccacggaatccgggcatcaagcgaaggtgagagagagagagcatttaatatttttcttacaacttgaccatgtttcccatgaattaattattactctaccacttaattataggtttaataattaatcctgattagtacttacattatcatcatcatcatcatcatcatcatcatcatcatatagattaaaaaccttaatgagaagtgggttttttcttctcctttttttgcaacttgtgttttgattgaaacatggtgaagtgaagatctagaagatagggttttgttatttaaagtatattttttggtttgactaggctctaaagtcttgaagagctctaaagtcttgaagagctagtaggctctctatatgactgttgtttcaggtgagattgttaagtattgtcaacattactagctctatagctacctaaacatgatatctttgtgggttttaatcaaagcatgaaaaggtggggttctttgctttgtgtcaaaacaacaatcacacacttagctttcatctttctttcttttttttttctttttttttttatatctggaaactacttttcttccccaacccatctgaagggatctcttttgttctgattggtattggccttcctttggaatatacaatccatctcttcctgctttctgaagaaagcaatccaaaacagtttaattccaacgaaaaaaggtaatctaaatgtcaagttagtccaaaccatgcatatatatatatgtgtgtgtgtgtgtgtagagctagaccgcttagcttaattagaacaaaaacatattaattatcttaatctaatcatatgagcaggaagagccaggcaaagaaggttgtgtgcattccag

SEQ ID NO: 70745 - DNA, 571 bp, Prunus persica
  Intron number 1 from transcript ppa018389m (locus ppa01838 9m.g) derived from phytozome v7.0 (chr-ID scaffold_6; pos 14133827 to 14134397 reverse strand)
gactaccaccggttgaagaatttaaatatgaattgggtgagggagatgcgaagtacattcgaacaaattgcgagggtatatgggccactgatcggaaaaaaagagcatagatgttggtttatgtgtgtggaattccaaaagtattgctcaattttcttaagtaagcagtttctttattgacatcatattagaatgcatttataattagaattttttttactgtaaacttgtgtcatttataatatgaatttttggtaagttggtgcatttataatctgtcttattctgtcttgttatgggttcatatataatctgtcttaatctatctgtcttgctatgagttcatacaatctgtccatatcagtgcatacatacaattaatgttttgctttgggtgtttatgtttgccttaatcaatcttgctatgggttcaccaaagaagattccaatgaaaccatcaaaagagaaaccagagaaccactcaaatataccccaatcaaatgaagcttcttcatcactaatacctgttaccaccacgagtgaagctaaaagaaagcgtggtccaacagaa

SEQ ID NO: 70746 - DNA, 577 bp, Prunus persica
  Intron number 3 from transcript ppa021443m (locus ppa02144 3m.g) derived from phytozome v7.0 (chr-ID scaffold_8; pos 2396867 to 2397443)
aaaatatttctcacaatcagggttcctgtcattatgtaacttcatttcaactaaatctcgaattgcgaaacaacatatagatagccattcaatcactgttctcttagttattgaatatctgattgattaatgtgtggcatttttactcctcaatataaatggcatccaaatgatcttttggttggtcaattgtgggatcctttgaatttgctagaatacattctgtaccttactatgttaacaaacacaaagtcatgcctaaacaattctctctgtatcttcttaaaaaaaaatgactcctgctgatgattccccctaaaaaaagaagagatactggtgcaaattccaaatttgaattgaacacaatttgcattatagccaggagaaatatactcaataaaaattttcattatagccaggagaagcatactctatttcattttcgttgtgtagttggcgtattaggcttgttatgcagagaatcattcttctttaatcttcttttattgttttcccatagcagtgagcattaattctgttctcattgaaaattgcagtgagttctttaaaaccagca

SEQ ID NO: 70747 - DNA, 485 bp, Prunus persica
  Intron number 2 from transcript ppa026826m (locus ppa02682 6m.g) derived from phytozome v7.0 (chr-ID scaffold_4; pos 1460307 to 1460791 reverse strand)
caattacattaggtatcattttcccttattttttttgtaattattaccaatagaagcgtgaactactcatcatagcataatttttttttcgtttgttaaaaaaataataataataattatactcaaagatcaacttatttaaaaatctttctggagcctaatgataataaatgcagagtcgcacgaaggatttccaacaattaaaataaaaattcctacaaaaaaaaaaattaaaatataaaaatcataaatcagattccatagttgccgaaattgttgatggcctattttttctcttgggttaatgttggatgcgtaatcataagctgattggattttatttgagtttaggtgaatattcaaagaatggttctcttagcaaaagggggaagatagcaattgcagtagtggctgctctagggctccttattgtagttttcttttggtattgcgtggcagggaggaagaaaagatctttggattgc

SEQ ID NO: 70748 - DNA, 781 bp, Prunus persica
  Intron number 2 from transcript ppa003688m (locus ppa00368 8m.g) derived from phytozome v7.0 (chr-ID scaffold_1; pos 37587613 to 37588393 reverse strand)
ccctgtggtgaaaagcaatagtgataagaaaacaggtaataagtgtatcataggcttcacaatataatttttgagctactgtatgatttttattttttgattggagttctgtgtgacaaggacactccttttccttagcccttgtttataagaagaatttgtatgtatcttttggtttgcgaaaggatactatatttaatctaactttcatttgagatcaccctttgggtggatctcatctgtttcaggcaaatatttctatgttagtgtccttgttactcaggtttcatttcaagttcattgcatcctataaaaaacaaaataaaaatcaagttcgttgcccttttttagagtagatctctttcatgcagttgaaggcagatgcaaagattctggagcatccataatggccaagtctctttttgcatcattgccgtgccagatacccaaacaggctgtactatttcatcagcagaaagatgattttgtgatagaagagggcaataatttccacaagcttggggatttccaaggacctattcatgaattctataatgcgtttaacattcataacaatcaccatattaatataggtctgcacccttttccaaaagatgatgtggagtagaattagatcatcattttcacagttgagagatgctttttaatccaagcattctaccatcttgcttctaaaaaaatatcattagatatagctgtgacatatatcttgcgacttctaagtttaattgcattgatgatacagctcctttcaagtttg

SEQ ID NO: 70749 - DNA, 631 bp, Prunus persica
  Intron number 1 from transcript ppa003688m (locus ppa00368 8m.g) derived from phytozome v7.0 (chr-ID scaffold_1; pos 37588477 to 37589107 reverse strand)
attctgtcataaaaaagagttagtgacttttttaacttgaatttatttcattgtttcacccgggctttatcttgtttggttgtgcccttagtcgcatcttcttgaggctattgccattggttgacagtggccatttgataatgtatttaagttttatatttcattgactagaagagtgggtaatcagatcagtttcactctgcatgttattttactggttttggagtaatttttcccttgcttattttcctttttgatacaagtgtatattggcttcagtgatctgttgtgttggttcaatcttcaaaaagcacaaaggttcaattcacttttagattgaaagatgtgtgtgcaatctagaagatgttggcttgtccaattttttattttttgaaaatctcatatgatgccttgctatcttgcaatcagaacaatgctagctaagtttgtaaactgcgaagtctctgtcaataaatccttatttatctgtttacatcgtttgtttactaataattacccttcagatatgcagctgttatgctgatattatacatgttatgttataccaactgctcaacatgtaattgctttaacaggcaaagcacttgagtcaaagcgggaaactgaaagg

SEQ ID NO: 70750 - DNA, 517 bp, Prunus persica
  Intron number 2 from transcript ppa011232m (locus ppa01123 2m.g) derived from phytozome v7.0 (chr-ID scaffold_7; pos 19919633 to 19920149)
aggtaaaatgaccgatttattcatcgatttttattcattcgtattgataatttttctcaaagtatttaaatttgtgtgattcgttcgtagctttgttagtttgatttggttttggaagtctgtaagtattactgtgtgtgactgtgtgtgccggcatgtggatgattctctatgggtttgtgaatagtttagaatgagaggctgatgggacatgaggaactcttcaattatgtagttctttatgttttctttgagttggttgatgcaattagattgctttctgaagatgtttttccacatatgaaatgaagtattgattttcaagttgatatcttggcttgtattgcaacaaaggccattaatctcagtagtgatgatgataacacctattaagttgacggaaatgttaattatctggatgaactttgtttctggttgtgtttacacctatttttgttcctcgtcagtagttgattatttcctcgatcaatctctctctgttgtacagacacttgaa

SEQ ID NO: 70751 - DNA, 946 bp, Prunus persica
  Intron number 1 from transcript ppb012107m (locus ppb01210 7m.g) derived from phytozome v7.0 (chr-ID scaffold_8; pos 8606511 to 8607456)
gaggtaaggagcaagtacctcctcaagagaagtcttcgaagataatgaagtcttcgaagaagatgaagtttgcttcatcatctgctgatacagaaccaaccagcgcgacaacaatctctgatgattcaaaggctggtcgaggtatgagcacaatgcctcgtgttgtgaagagaaaacttcagaaactgaggccaattgttgagtacaataaaagggggaaaggaattggccaagcacacagtgagatgcagtcctatattggtgtgttggcacgctccagagtcccacttgtggacttgaaatgggctcaaatccccaaggatataaaggagcagatttgggaagcagttgacattgcttttgtagtaggtcaagggggcaagaactctgtcttagcttctgctgccaagaaatggaaggatttcaagtctacactaatgaggcattatatccttccatacaccaatgacagggagagattaagccaaccccctgaaacatataaattcatagagaaagcacaatgggatgcctttgtagcttcaaggctatccaaagattttgagtctgtgcattctcaacatgcacagattagggagaaactcgagtacaatcatcgatagtctcgaaaaggatatgctggtttggaggatcaattagaggaaaccatgcctggggtagaaattgatcgatctaccttatggaagagagctagacaggacaaacatggtaacatccctgatccaaaggtggcagagaaagcaaaattaattgtaagcctactcactctgttttaaatttttattaaactgtgaataattcttattacgtcttatgttatattttgcgtcgtgtgaatgatattaccacgtcgacattttttaaaacacgtcgttaaaggtctaaataggaatcacaactctgttttctgtaattatagcataag

SEQ ID NO: 70752 - DNA, 628 bp, Prunus persica
  Intron number 2 from transcript ppa003694m (locus ppa00369 4m.g) derived from phytozome v7.0 (chr-ID scaffold_8; pos 11286100 to 11286727)
gttgccacttcgcttgcaagacaggttagtttctcttaggatattggaaaagtgtgcattgcgtaggtgttgataagaaaatgagttaggcatgaaactttcatctttcgggtattttttgtggccatattctataaacatgattcatgattgctgatatattagtctttccaagacaactacgcagtccagggaggtatagtcatttcagtcaatttatgaaaatggatttaactcaaagggtcatagttaggtggggacaagtttttcccattggataagtagtcttttcttgaaaattcattacaagacttctctaatagaacaaatataatgatagctgatgacttgcttgtgagaatgggcatggggttttgcctgtgagatgtttatgcactgtcagtgtgtatatttgttatcactactttgtaatttgtaacagactacatttattgctttggcatcaaatcgtgttttctttctttttctttcttttctttttcctgagacaaacttctgttatgtgtacttatgaattctcatgctggatgcatctgctactttaatcactattttccgtgacttttattgtatttctttgactatctaatattggtgcaggataaaa

SEQ ID NO: 70753 - DNA, 929 bp, Prunus persica
  Intron number 1 from transcript ppa012533m (locus ppa01253 3m.g) derived from phytozome v7.0 (chr-ID scaffold_4; pos 2646823 to 2647751)
cggtcaacgccagttctccactcccgaagatcttcgtaagccaaacaattcttaattttctctctttcttatttacagatttttttttgtttggtttcaaaactagttagttgaattattttgttttccctcccactttctggtgtttctcggtaaccaaacagaggattaaggcctgctggctcgttagatattgtgtgattggggtgtgttttgcagctactaatcgaaaaattctattgttgttgtttgatcaatttgtttcaggttctattttatgagtgattgcattgattcgaatgttcattgttggtttgtttgatattacaattaggagatcatgcaaacgaatttacattgttattattggttaaaatagggaagaaacaaaaaagatgttgtgaagttttgggagattgaatattttggctatgtgttctatgtaactgcaagttaaaattatgctatattggctgaataacccataaaataattatagtttattggtcccgtaaataagaaattaaaacaatttcaggcgtggtgtttcactattgtttgtcgatattgagttattgactcgctttaaatgagatttcagttaatagtgttatgagcaaaaagataccaatagaacttgtaaaaggtgagcaaatttgattcccatcttccttttactattgcggtggaagggaaggtgggatgatgtgagataaagaagtatgggcaagacatcgatctcttatggcctactacatgttgtcaaaagctctctgtgtgagttagagagatggagggagaatgagtgtttgttagtagtgcctataaatttgtagttggaatttctgtttagattggtatagttctcatgtgcgttctaatatacatttgcagttgctggtacctctactcgtcctcgcactttttca

SEQ ID NO: 70754 - DNA, 873 bp, Prunus persica
  Intron number 1 from transcript ppb015648m (locus ppb01564 8m.g) derived from phytozome v7.0 (chr-ID scaffold_6; pos 10099757 to 10100629)
gagaagaagggtaaatagtgcacgaaattgctgggtttttgcatgtaagagagaaagcttgctatctgaatctgagttgtctttggttgggtagaagaggccccttttatagccgctggaagccatctttttccaagaaaccctaatagtttctatctaatttggccaagctttttccttcatttctcctccccttctttgacttatcttattctagcaaaatcttcgctgttccagtgggagacttccattcccatccatctccttcctttctttctttctttttccatggccaggtctgatgggggaaaggaattggggtatgtatgctagttcaaagggtgcttctagcagctcacaggctaatattcattggttccttgaatgtttcttgcttggaacttgctccccccatgtgctggagcttcccagcagcttacacacatggatattttggctttcattgtggcttttgttttcagctaggtgctggagcttttatagatattttcttgagttgcttgggccttctaggacaataggttggtttatcaagtgaatgggctaacttcatcaattgttgggctattttggttgagttaatggactattttggttgaagtaatgggctatttttctctctttgtgttcactcacatatttgggcctaagaaatgggcttgagttctggagctcccaagcaaccccgggacttccatttctcaagccatcaatgggcctcatgtcaacttattaccatccataccacaacccactcaagcaagcccgggcgtcttgcgtggcttgggcccacttaagcctgtagcatggcgtgttgcttatttgcttggcgtggcatgtgtgcaagcgcat

SEQ ID NO: 70755 - DNA, 943 bp, Prunus persica
  Intron number 1 from transcript ppa017685m (locus ppa01768 5m.g) derived from phytozome v7.0 (chr-ID scaffold_2; pos 24363386 to 24364328)
gaatcaggtatgttttcttaaacaaaacttctctaggttactcgtgttttcctttccttaactttgtaaatttgtttgtttgcaagttgttgtcatgctatatttagtattgtaaatatgcgagccttttatattgtatcttgctattgcaaaaatttctagataattcatgtgtcctactcctataaatttgatgaatatttggtgaaataaaacaaaaaattatatcctaaattaaggaaaataaggaaaaagagaaaagcatgactctaatctaatactcagttgagttgaatttttggctacacatgttatataatcctatcatacaatattcgtggggaacctttcgtttttgtcaactaatgaatgacacacctgttttttttagaacctttcatataaagaagggtgataatatactatattcatgaccttgtctaagagagcaattactctaaactactacaataatggatcctttgcatgaaagacaggccctaaaacaccctaagctgccaccttaattagttttatttcaatcagtttttaggatgttgtttatttatatatattgttttatatcactgtgtgtgtaaggttacatccttctagatttgtctttagattttttgttctccatttgcttctgtaatttgattgttttttagttgtaacatgcctatcttctaataaaagaaaaacaggaattaatgcaccttttagtttgaaattcttttttactggttttcttttttaatttatatctttgtatcgttccatcaatttttactttctatgtttcaaatcatacggttatttttataaagctatggccaagatttattacacatctgcttcttcttcatcgcatctctaattgatttttttttcttttttatttttagattgggaaagtttgcctgaggagcttttagattta

SEQ ID NO: 70756 - DNA, 396 bp, Prunus persica
  Intron number 1 from transcript ppa006467m (locus ppa00646 7m.g) derived from phytozome v7.0 (chr-ID scaffold_3; pos 19415128 to 19415523)
gttccttctttgtaagtatctagtttgcactacaaaatttgagttaaatatggttgctatggctaagtaaacgcaagaaaagtagagaaattcagtcttttgttttatgttgtgtttgtcaagatggcaaattattcaactttctgagaaaaatgcatgtagttagctctattcgttgagttattggttttctgggtttggtaatgagagattgaatttgtctttttgctctgttttatctcctttcttcaacattttctgggcagtcaaacagataaattaagtgttcgaagaatcggcctaggcggccgcctagccgctaggcgggtctgggagcctgggcgggtcgtgtgatttcagattatttattagtttcagtgattttgtagcaatttg

SEQ ID NO: 70757 - DNA, 559 bp, Prunus persica
  Intron number 1 from transcript ppa008032m (locus ppa00803 2m.g) derived from phytozome v7.0 (chr-ID scaffold_5; pos 12081848 to 12082406)
cgcgtgaattcggcaaaaacctctcctttcacaaggtttggctatttttgttgaatttggcaattgggttgattgtgtgttcaatttgcaccctctccttgctttcagttagttgtaattgatttggaagaaactgacactctttggcttttgaactgaatatgtgtctgattactgctcgtttatacctaactttcaaaattgcaattataatttcttttttgttttctctttttggtgggtacataaaagaactgaattaaaaacttgggtttttaagtttgagtttttcatagttgaaaatttgggaaatttatataattccatgattttgtgttttagtagccgctgagaaagtttgcgtagagtttagttactttaatatatacttacagatttatgaatttaagcgctgagaaatagtaaaagttttgaactttttttaaggaccagtgtgttcactgttacttagatttatggatggtcatgaattctcataattatgtttccaatttcaaccgcaggtggacctccgggacaaaccagcactggataaact

SEQ ID NO: 70758 - DNA, 533 bp, Prunus persica
  Intron number 1 from transcript ppa025751m (locus ppa02575 1m.g) derived from phytozome v7.0 (chr-ID scaffold_3; pos 21044867 to 21045399)
caggaaacttattcagcatcactttgacttgagtatttgtctactctcattttcttcaggctgattgttagtgtcacatgtattatacatgctacccgattcatgaaagtcccaaacattgaaattggtcttgttcttaatttctcagcttcttttaaggttttacatttgcgtgagatacatttggttatgttccctgattctgcttgaacaattctactagcactttcatgctttgcctgcccatattctgactccacccagtgtatttattcctcacaactactcccagtcaggccatccatctttcacattcttgttccatatacaagctttttgttatatttaatctatatttttcactgaagttgctgatatccttataaaagaaagtgatttttaatttcttatttgtttgttttttttttcagaacttcatagcatccttctttgagtctggaacccgtgattcatcctatagaacgtttgagagatggaagctcatatgactcattcaatttcaggtgcttccc

SEQ ID NO: 70759 - DNA, 836 bp, Prunus persica
  Intron number 2 from transcript ppa018329m (locus ppa01832 9m.g) derived from phytozome v7.0 (chr-ID scaffold_5; pos 4954344 to 4955179 reverse strand)
gtctcccatacccatctagggcctttgatatcgcggtgtttaattccatggactgcaaatggtaagatcttgatgtaaccagcatggagcaatcacatttgatttccttagtttctgtattatatatatatatatatatatatatatatatatataattagagttgaattagtgaactcttaagttgaatacagatagtagaaaaacatatctatatctatttccatactcagatcatatggtcaaattaattgtcacaatcttgcctcgactctcaaggttgaccactgaaataagcttagagtcgtttggtaaacatttatacttgatttccattggtataagtgattactgatttgcacactttcattttgaagactatttttctatgtaacttcatgttttctatgagattttatgccaaaaagtgtaaataagtcttacaagggtgataaattgtctgcaagtcttacatatccggcaattaatttagttaccgaccgtgctagaattttattttcccaagttttcttttggttgatattgacttcctcaatccatcctcatctgttgacttcgatataaaagagggcttctgattgtagttccatcttttaactttgttttctatgtttcgacattcaagaatagcttatttactgaatatctctttaagtgctggaagttaaatgattcacatattgaacggctgtgtgtagatgggatgtacctaaaagaagttgattgggtgcttagacctggtggatgttggatcttgtctggacctccaattaattggaagacatgctacaaaacgtggaagtagtctaaggagg

SEQ ID NO: 70760 - DNA, 495 bp, Prunus persica
  Intron number 1 from transcript ppa015943m (locus ppa01594 3m.g) derived from phytozome v7.0 (chr-ID scaffold_1; pos 36758300 to 36758794)
gcaaatcccagaaaagaaagcgcaacaagttggaggtatgtgatgtgagtgtcttctaattaacttgacttggaaattccaacgggttccatattgaactttgctgccgcacatatttattcttcttttttactgatatatatccttgtttattatgtaggttgaatccaaatattcaaaacgcaggaaagctttacaattcccaaaagctggatttaacaagaataatggagactgtgcttgtaatgatcaaactgagcctgatcatcagttagaaaaaactcaatcaaggcaggatttggatgagattcatgaggtgtgcaatcaattatagttgaagagtatgatttgtgaaccaatattgtgaattctagctacaaagtttttattttttgggttttgtaaattgtatggcatgaaatctgaaactgtttatatgtatattttgttcttctgacaggacaaagtaaaagagagcacaaaagtaaattccag

SEQ ID NO: 70761 - DNA, 502 bp, Prunus persica
  Intron number 1 from transcript ppa005355m (locus ppa00535 5m.g) derived from phytozome v7.0 (chr-ID scaffold_7; pos 21255659 to 21256160)
aggtgagaatctgatgagcgaaagaagagagcaaaaattgtcagcttatttatttatggaagagggcaatttaattttagtgtgaatgtgatgctgcattttgattcttgatgtaaattattggttttctttgtttattttttgattttttgttttagttagggtttgttctggagtttagtaggtttagttctgtgtttgtgtgtaattactgggaatttgtcacaaagaaaagaaatttttttgcaatgtggtcgaaggtgtaaccctagaagaatctctatcaatgtggaatttgtttgagttaaaaccaacaaacaagacaattttgatagtttgtcgatcctacatttgctcagaaatcatatagatcatattaggctttgcaatttgttgattttattcttctttttatatgtcctgctaattttcagctttaagcttttcatttcttcttttgcaattagctttctcagccggagataaatttggaaaagttgca

SEQ ID NO: 70762 - DNA, 576 bp, Prunus persica
  Intron number 1 from transcript ppa002766m (locus ppa00276 6m.g) derived from phytozome v7.0 (chr-ID scaffold_8; pos 4495144 to 4495719 reverse strand)
ttgcctcttgcccaggtactttttctttgatttttcttttaaataaactgtcttggattactttttactatgtgggtcagttaaacttttgaatttggtgttttcttcagatgtaaagctcgagaatttggataagttatgttgaaacattgatttgattgtgttttctaccaccttgtatgccacatttgtgtaggttttaaaatgtgatgtactgagccacatgtgctttcttggcatccaccttctttccaaaatccgttttttcttatccagtttattgggattattttggttacttagatttttctctacttgctcacagtttcaccaatttttagaagcactccaaatacattctaatagattatgttatttatcaaaacaaaataaaaaaaatgttatttttcaagaaaaaaaggaaatcatgtgagagtatgatacattatattgatgctgtccactcttattttgaaagaaagcagaatattgatgcgaatgttacaactagaattaatcagaggaatgctttactctgttgatttttgtagctgttgagaagggacgaggcagaaa

SEQ ID NO: 70763 - DNA, 502 bp, Prunus persica
  Intron number 2 from transcript ppa006712m (locus ppa00671 2m.g) derived from phytozome v7.0 (chr-ID scaffold_5; pos 564372 to 564873)
ttacagcctacaggcaacaaagacccattttcttggtattctcttgggtgcttgaatttataaattataactcttttcgtgtcttttgatccaattttattattcctctcttcggtcccctagttaaatcaacgaaaccgcagcaaacaacttcgattggttgtgcgttctttctttcgtactttatttatttattttttatttaatttaaaaaaataaaacaagagattgagaacttcacactcttgctaggaccaggccgaatgttagggtttggattttccagaaaatatttctcaagaacagggaaaaccaaaagtgccattgcatgattctcctgtgttttgttaaattatgtgtttattttattccattcagcgccaggaaggaagcaatatatatattacttcattttattggtatgtataaaatgaacattatctgattgaatattgtattgcattcagatttcagagtgtaaaatcaaatcactataatttag

SEQ ID NO: 70764 - DNA, 476 bp, Prunus persica
  Intron number 1 from transcript ppa002352m (locus ppa00235 2m.g) derived from phytozome v7.0 (chr-ID scaffold_7; pos 8814445 to 8814920 reverse strand)
gaggagtttgcagccgctgtaccagaaaaccagaggtgtgccttcagtttcttctcgcctgcttctatccattttctgccttctctcctctggctaggcgtatgctttttcttcttttttttttctttttttttctcaaaactttgcttcttgttgtacggtgaagtttttgtatatgtatatagatatgaaaatgagtaaatgtaattttgggaatgttaaaaagaagtagttatgaagatcagcacgccccaattttgaatcccggctctatcacttcgcacaacaatttagcttaattacgagcggttcgcatttttttttggttttagattgtgatcattgattctaatgccaaattggaaatttttcaatagaacctacaatttgacataaggaattaccctttttcttttcctactactgagctttgttttcaaggaaatgaaagagctagctttttgtgattataggat

SEQ ID NO: 70765 - DNA, 575 bp, Prunus persica
  Intron number 1 from transcript ppa009749m (locus ppa00974 9m.g) derived from phytozome v7.0 (chr-ID scaffold_2; pos 16161102 to 16161676)
ttacaagtcattttatataaggccatctcaaggtgagtccactaataaaagaagcagtctgctttgcttgctcatctttatagagtcactctgtagtgagggttttatctaagttgctatttcgtaactgttgaatcaaactaccaatttaatctaacggttaaaaatagggcatcttcctacagaattctaccatctttatgattatctttttttaggttaattatctttatgactatctattggggtcaaaagtataatttttgagcagatgcttaaactaagaacacacaggtaggcccatgaacaacacatagaggcactttcctaataggaacctagtccacatgagaattcaagaacgaccaaaaagcaatcagtctctctcctttctcgcactaccatcaccaaaccacaatacaaaggaaagtgatgccgagttgaaaaaacaagaagaaaaaaagaaatggtcatgagcaaccttcagctagactactctactcagaaaacaatcttagccccgagaatcataatctcttctctgcttttccttctcttttcttcacttagcattc

SEQ ID NO: 70766 - DNA, 695 bp, Prunus persica
  Intron number 2 from transcript ppa003366m (locus ppa00336 6m.g) derived from phytozome v7.0 (chr-ID scaffold_7; pos 19748623 to 19749317)
aacagcaggtaggcactcacatgctctgaaatttgcgatttttaagtaattttgttggtgtttgagttaggcgagtgtgagaaaaacaaacagagcttaagaattgctgcattctttttttttttttaacatgtgtttgatattttcagttctcttaatcaaggtaaatgggctgtaagtttgtaactggatgataatcacctagaagcttatttagggatttagttggtcgaaaagaaaccatagataaacttatttcttatggagatttaaaagttaacacctttgacgcattttaatcttagctaccaataaaagaaaattctttagattgatcaaaggaaaaaaaaggtttatggtggatgatatttatgtagacttatcactccaacatttcttctgttggatatggcttgaagagtctatacaacaaatcaggttctcatataattcatctgtatcttgttagattaactggacaagggtgatgatttcataggattatcagattaggatttgaatttttcagcttaacacattaaacatggatcaaggctaatccgatccaacttgatagtatatcatttatttacttttatatatgagtgattttgcataatccttggcccgagattgaaagcttaactgtttgtttattaggcagttcttgaaaccgttgctagagttaagtccaa

SEQ ID NO: 70767 - DNA, 636 bp, Prunus persica
  Intron number 1 from transcript ppa003392m (locus ppa00339 2m.g) derived from phytozome v7.0 (chr-ID scaffold_7; pos 21702532 to 21703167)
tctcttgctcttctccttgatcgttgaattattgggtgagacttgtgtttcttttcccttgtaagttgtattgattatcaataagtgatcgctacagtttagccgatactattacactctctgtttctatttgttatcctatgactacttgtgttaactacgaacctgaaacaaaccaagagtaaaattttgaattatcatcgtacttatttcattatatttgttccgaaagttgatttatgatgtgggtaattttcctttttttcttctccttctttttattaatgaaaaactatactgaaagtatttctttttctgttaccactggctccggctggactggatagttcatccccatagccatgtgaccatgccatgacgagctcttgttattttcccagcatcttattttcagttcagggtttgtttttgtttgtttgttttggtatgacaagtataaacgttaatttccaatgtgggaaaatgaatcgctatgctcaacagtttgctagatattgctactttcgtttggctgctatttagtgtgttccacatatgatatgcatctattgtttaacatacaaataatgttgtttgtttgtttgtttttttcccttccaggaccgagtagagttc

SEQ ID NO: 70768 - DNA, 422 bp, Prunus persica
  Intron number 4 from transcript ppa003392m (locus ppa00339 2m.g) derived from phytozome v7.0 (chr-ID scaffold_7; pos 21703962 to 21704383)
tgtcagaacgtggacttaaacacataagtggtaaaatctctgttttttatttgttttatcttggctatttttgcactcaaccattgttcactgttgttgtttataatgtgctttattttcccattaatgatatggcttgtttctggagattacaagttatttaatttgatcttatggtccaactttttcgttgtctttgatgatctgattgttcattcaataggctcttagtttatggtatactggaatcacatgcagttctgtattcatgcctttcttctctattttgaactaatttcacttgaatagtcttttgtaccagttaaactttccaaattagctttttagttggatgatgtaaatgcttattctgaccttgctctgcaggtctgtcgaacctgaaatctttgagttttaaaagg

SEQ ID NO: 70769 - DNA, 430 bp, Prunus persica
  Intron number 1 from transcript ppa006449m (locus ppa00644 9m.g) derived from phytozome v7.0 (chr-ID scaffold_5; pos 17301224 to 17301653 reverse strand)
aactcggtcacggaggctttggtcccgtttacaaggtacggtctcctaaataactagctcagtcagggttaatctcggaagcgcaaatcaccagattagccctgtagtttgctgtaattgcggattaatttgaggacaaacatttggccttttgagattgaacgatagtttctcagattgattgagttctcactgcatctgacccgagagaatgttattttcatttttgtaatttttttcttcagtttttctgtttgcattcatcatttattggaggaacagtgccgtctgttcttcagatggttatggtatgagagtaaaattttgatcttttttttcttgggtaactaaatttgtgagctttactaatactttgttctattttcttcggattagtcaaatttttttttccaattgtgtgcagggtctg

SEQ ID NO: 70770 - DNA, 692 bp, Prunus persica
  Intron number 1 from transcript ppa002772m (locus ppa00277 2m.g) derived from phytozome v7.0 (chr-ID scaffold_3; pos 14264843 to 14265534)
aagcccttcatttcagctcctttggataattggaggtttgtttttccttcatccccttttgctaaaccctggtaaaacccctaaaaacccatactttcatttgagcatctgtgttctatttcagcttctgagtttgcattctttatgctctgtttggttacttgtataatttggggggataacattgaatttttgaggttcagggctgtagcttttactttgaaagtgaagtgacaattattttactacattttgtagctaatgttttctctcggcagccaaacagggggttgtggttaactaaattttctgttttgattcaaaattctgaaagatatgaatacatggtatgatttttcttgatggggttgaaggtgaaattgctgtttttgtatgcctctggagtatgctatcatttttgaagacgtgcaaccgtaaattatgaatgtttgagtataattagattaatttatatctacctagttgcattgttgtgcaattgaatttctctgcaatgtggcctttggcttgcatgctccactggacctgggaaagtcgggcttttgcatagaaatgactagtctgagaactctctgtctgatggtttatgtgtttattgtggtattgagaaataacaatgtgaatttttgtatccagtaaattgaaagcgtgcacaaattctattggtgcca

SEQ ID NO: 70771 - DNA, 704 bp, Prunus persica
  Intron number 1 from transcript ppa002307m (locus ppa00230 7m.g) derived from phytozome v7.0 (chr-ID scaffold_3; pos 21216551 to 21217254)
cagcagctgggaaagggcgggtagaggtgagaggctctcccccttatactagtctatatgtgcttttgcaaagattcaatcttttttcttctttcttcttttgaccaaaaaaaaaataaaattgacccagctgttgtaagctctgcttttccaaattgcgccctttatttttcctttttcttttgtgcatgattcatacacaagcatatatcagcttaaccaggtacaatttgaggttatgcggttgtatatagtaggatgaatagaaacataaattttgtgtggcttttcgtggttttattgcgtaaagcatatcatgaatgactaaatagagatttaactttaatgtatattcttgcttccagagatgttagatgacggattcatgattgttccgaagtttgattgatgcttattcagaatttactttgaaagaacacttcatttgcagttccacatcttatactttacttactatgtggatatattttccataaactttccaaaaggtgtaaaactcggatcgtttttagtaagcaccgttctacttgtttcatgtaagacagaggttatcccttccatgattaagatcaagattcaaggcttgacctgacttgaactattgcaatgatttgatccatacacttaattaatgtgaccaatcttgtcattcatgcaggttgtgaagtaccttttagcatctt

SEQ ID NO: 70772 - DNA, 1017 bp, Prunus persica
  Intron number 1 from transcript ppa007209m (locus ppa00720 9m.g) derived from phytozome v7.0 (chr-ID scaffold_4; pos 11140161 to 11141177 reverse strand)
ctaagttgctcactattgatcaggattactggcatgtgagtcaagctctttagtatttaattgaatttttatttatttccatgtgatttggttttgttcagtgtgtgattctagtgttctgtcttctgtggcttgctgtgtgagaatttgaggtgaagttggttcttagattagttctgttccttcttttttcttattcattctggttcttttaggttgcttatcattctctggttaattaacattagccgctttgatagtgagcttttatcaattgcctgcattgcttttttctttgagtttgtgctcttggagtgcgaaggtcaagcattttcaatttatttggtggaagttgggcaggtcgcctgtcttatgataaatgtgtgaaaatgttctaattataggggaatcctttgtcatggattgatgctgtatagtcaaattttgaagtgatgctgttgctgtctttatatgatcattcatgaggaagcaagagtgaagagaaattttataacttacatggaaataatgaagtggatgttgcttttgaaggattgtgattattcaaactttgttaaatccgataggaaacatgatctggaaatgttatgtcaaatcagggatggttttgcactgtagaataacaatcacggggagcaacaagaacatataatgacaagggatggaagatgagattagttagttgtttgtgaggctgaaagaaaaaaacaaaaacaaaaagacaataagagaatttggtgggggactaggagattgctgcattttcttaagttgatagtgaatagaacttgtcacttatggttagagtggtatgaagcaatatgtttcgtccggtccaattagttcgtagttatatttagaaaatttcattataggttgcaatttgtgatttgaatgtcttgattttatgattttctatgtctatgtgcactgcccttgtatcaatttgtctgcggggatttatgtgttggtactcttttcagggttggactctgt

SEQ ID NO: 70773 - DNA, 587 bp, Prunus persica
  Intron number 1 from transcript ppa015080m (locus ppa01508 0m.g) derived from phytozome v7.0 (chr-ID scaffold_5; pos 13765963 to 13766549)
tcgtctctaaggtaatgccaatttgattttagctttggtttgctaatttagggagattggaggacttagtgttggtttcattgcttggttgatttattattattggaattggtttgcaatttctaattccactgatttagggagattggaggacttagtgttggtttcattgcttggttgatttattattattggaattggtttgcaatttctaattccactgaccaaatctgtcgaaaaagattgggactgtagagaacattattattatttttctttcgttctggaatttgatggcttcggaattcagaatttagtttgagtttgtataatgaatgactcatattacttgatttatttttggatatgaaaacttattcaatgaccttgtctgggtttcctgatttgagagcttctagaaagaagataagatgaacagagtggaaagctaacctcgattagccacaatgttgtgttgatcttagttcccatccattctcgtacttatcttgtaatagtaactgttcatagtatcaatgttattgaatgcaggttgaaaagctaatacaggagctgcccagtgtgcc

SEQ ID NO: 70774 - DNA, 932 bp, Prunus persica
  Intron number 1 from transcript ppb022686m (locus ppb02268 6m.g) derived from phytozome v7.0 (chr-ID scaffold_1; pos 46439779 to 46440710 reverse strand)
cctctaaaactagtgttacaggtaccatctgccatttccaataggaattgcaagacaatcactctagcaataattatgacaataacaactttggacacttacaagtatatttttcttaaatggtgatgagtagaagtgttgatcaatgcttgaagctccctttaagaacctttgagtagaaaatataaggggttcttagatctaagtccaaaataattagttgtcattgaatttagtccacatgttttttgttttagatgtaagttctttgacttttattacttttttgttgtgtcgatttacctatgggggtaaataaagaaaacacattgaaaatctaaatttaatgcattatttcctcgtaattgaatttcataatttaaattttcaattctttccttggcaatatttacctaatatatggataaaatttaattaattcatgacagtgaaaatccacatattatactaattactcaggcaagcacccacatgaaattatgtacctaacatacaggtgaagagtgttattattagcaatggaaaaaacttagtgataaattgtgttacctataagtcagaaacataaattaaaagactacctataagtttggaacataaataagaagaccacctataatttagatacaaaaatagacaaataaaaattgtatgttacctattaaaaaaaaaggtacataaaatactattatatgttgtcgaaaatatgaaaaatacatatatataccatgcaataggcaagagaacaatatacctacaccatatgataatatatctacaagagtatgtaatatacctccaccatagggtgaacaaaaataaaatttgttaccaataagtcatgtgctactgtatttgcttccccaaaaacatgtaaaataaaggctcaagcaaattgtgccaaaatagac

SEQ ID NO: 70775 - DNA, 340 bp, Prunus persica
  Intron number 1 from transcript ppa003780m (locus ppa00378 0m.g) derived from phytozome v7.0 (chr-ID scaffold_3; pos 10020494 to 10020833)
tgggttttgtttgtgatattctcgacttcaatttggtaattaatttatgggtttctaaatttcctttctgataatccatgtaatggcattgttacaaatcactacgagcaaaatgggtttcttttgttgatcttcaattattgtttttttcttttaattttgttgtgctctgttcttgttcttcaatggcatcaccctaattttggtaatttctgcaatgaaatcagtttcattccatggctggttctggctggttttttagtgttataatctttaattttaaatgggtttttgttatctttgacttttcggcaatggggcaattaatcaccaggtaaaa

SEQ ID NO: 70776 - DNA, 646 bp, Prunus persica
  Intron number 2 from transcript ppa003780m (locus ppa00378 0m.g) derived from phytozome v7.0 (chr-ID scaffold_3; pos 10021064 to 10021709)
gttgaaagccagatcggtccaggctcgggcttctggtttgttaattgctctcttaatcatgctttttcatttttgcttatttgttagcttagagaataatatggtgagttctattggaagatagtatctgtctctgttttttcactttcaataaagatcttctagttgtctatttgttatccgtatctggttagtgatgtatgtaactttcttagtttactcaaattctagcctaattctattgttcgactgcgaggacgagggtttgtttcatactaattgtcacctcctcttaatgggttctgtcacagctgttttatggcaattttggccagttgggattacatgaaattcgccgtcaagagtatgattggaaaactatgttctaaactgttgttgctcactccatgaaaaagtcatttcaatttgttgtatcttccaaaaaaaaaaaatcagtaaaatctgtctctatggaactgtatatgctgtaaccaatctggatgcttgttggatggtgctgaatgaccttacatgtcagtttaggaggatgcatatgtttgttttcttgggatttcaatactttactgggccattatacattgggttttgattttattattgttcttactagtactatataatgcag

SEQ ID NO: 70777 - DNA, 473 bp, Prunus persica
  Intron number 1 from transcript ppa007235m (locus ppa00723 5m.g) derived from phytozome v7.0 (chr-ID scaffold_1; pos 30436453 to 30436925 reverse strand)
caaagactcaggtgagtgattttctcattcacttcattttagccacagcaattcttgaggatttcatttctcaagtatggaatctttgagcttttttttggtctctgaatcatgtgctattttcaaattctgttctagttaagcaatttttctttgcatggctggtagattaagatatgaagattgacttaattttatgacatcctattgttctatctgagtaattgtttggctgtttgcatagctagcaactaggacgagcgacataaaaatttattcaagtttttaccttgagtgtcccaatctaattcttcaatgttattatgccatcttctgttggcgtaaggatttcctgtaacttagaattttgaacaaatttgggaggtgggggaaacaaaaggcaaacaaagtttatagtaatttttggcttttaactaagttttgtttcttcaccctgtttcactttttagggt

SEQ ID NO: 70778 - DNA, 578 bp, Prunus persica
  Intron number 1 from transcript ppa016577m (locus ppa01657 7m.g) derived from phytozome v7.0 (chr-ID scaffold_9; pos 1458206 to 1458783 reverse strand)
ggaacagttcaggtgatttaggagttgatacttttgtttttatatgtgttgaataaactattggttagttatatgtttgaaaattttatttgggagggttaattcagcggagttcattcagttaatttgcaatgcgttaagactcagaaagatctctcactttattggacttcactgcaattaagcttttcttgaatccattatagcatatatggagatattggggataatatgatggttctttaattatataaaggaaaatgcggtgttctttttttccatcaataatttctggatatttcattactgttgtggtgcatgttatgatattgtggataatatggggcacaagttttgctaattttatgatttgtatccccttggttttaattgttgtggtcttgctctcagctcttttttcttcttctaatttgttttgtttgtccctttttaaagtcaccttttttgttcacaaatctggtatataggctgaatgtataaacataaagattttgagatgtcttcccgcacccatccccgcttctctaacaattattacatttgttttcagccgcttc

SEQ ID NO: 70779 - DNA, 451 bp, Prunus persica
  Intron number 1 from transcript ppa008042m (locus ppa00804 2m.g) derived from phytozome v7.0 (chr-ID scaffold_2; pos 25672957 to 25673407 reverse strand)
aagatttccagcgacaattttgctatcaaattcaagtatttttcgttaatttcatcgcaaaatttgatctgatttagctcttgatctggttttctttgcctgtgtggatgcgtatgtgttttgctgcctgtaaacttatcaatttttcctgtttgattttgtgagacgctgaggaaagtaataaaaacaggaaatgtgtatgtatgtttcatcattttgttgattgcttcttagataaactttagctcaatgatgcttaggtggttatatatttgtagcagactcaatttactggaattttatttgtaagaagttatttttgtgtgtggacaatttgcaaagaaaagggatcattttgagttacattggtatcttttagtgattttcatgtttttttgctgggcaattatttacagaagatttggcaccgaaagccagacgggtctattta

SEQ ID NO: 70780 - DNA, 550 bp, Prunus persica
  Intron number 1 from transcript ppa012708m (locus ppa01270 8m.g) derived from phytozome v7.0 (chr-ID scaffold_2; pos 23372311 to 23372860 reverse strand)
gcgtttctagagacgccaaaaaggtttgaattttatttttgggtttctttgattctgcttagtttttgctttcaaattgttatatttgttttgtgtgcatttttggattggaggttaagggctttaagtttaagtgctctgttttcatttagaaaattgattggttcttaatgtggtcactggtaaaacaaggcaaggaaggtttttgagtcctgtgcttcatattgtttgtttgggcttctaagttttcgagggaaagttattatcagttaggctaaaagtagaaaaaattttaaatttcgaatgcatgattctgtttttgctggtcttgttaccatgaagcattgacgaatgtgttcttgatgcctcattagggcttggttgctttgttgttttagcccatctgtttttttggggcaaacgggtgtgtgaagtatggttaaatctctatggcgtttatgtttgtactctgttcttaactcatcctgtacttgcgagttgtgcattctgaagacggtagtgatttgtctgtacttaggggcaggcttgg

SEQ ID NO: 70781 - DNA, 674 bp, Prunus persica
  Intron number 1 from transcript ppa005136m (locus ppa00513 6m.g) derived from phytozome v7.0 (chr-ID scaffold_8; pos 12224273 to 12224946)
agaaggacttactgattcaggtgaagcaaacaaaggtcagtctcactcgtaaatcgtaatgctttctttgagctagtagttttgagtgtgaaattatgtgtttttttttttttggtgtcattttgtttgggtgctgaattttcagatttacttatggattgtttggttagtataaagattcaacgaggtttatgttttgattatgaaatgttgattggatttgaaaaaacgggtgtttgatgttaaatattgattgggtcgtaaaccttatcgattatgtaagggaccatgaaaggagtgtgctatcttgttgggtttggatcggattggtgcgtgttcatttcatcttggtgagcagttgatggggaaaagaaatgtcatcgatgaaatgttaccaatgaaatgttagcgataattggggaaaagaaaatacgatatttggattatattagctataacatagtcgatcaattttcctgttcgaactttggtgttgccgacttttggggcgactcgaatgattaatgttacaattcttaggatattgtgaatgttagtagtaacaaggagtgtgaccttatctactctaaatgttttctatcttgtacttttccttgtgaaatgaaattcattatgttcaatgggaatgcttgttgttgtgcagaaacctgaca

SEQ ID NO: 70782 - DNA, 359 bp, Prunus persica
  Intron number 1 from transcript ppa019999m (locus ppa01999 9m.g) derived from phytozome v7.0 (chr-ID scaffold_6; pos 20437997 to 20438355)
tatacttatagtacggaaaatcctaacaaatatttagtacccaaaagaaaattccaattaattgttgaagatttcgtgggtgaatagttgcaattttttcatctcaacacgcatatctttccaaaaaccaacacaagagcagagcagattcgatggactcaatccaaaatgtcagccaaataattgttttacaaagcactcaaactttcttttatccatctttataagattatgaatttgatcatcttttgccattgtcattgttgcaaatctgctaagcttgccttgcagttttgtatgcaatatggagtcgcttatatcaataatatttgctctcttctttttattgggtgcatcag

SEQ ID NO: 70783 - DNA, 979 bp, Prunus persica
  Intron number 1 from transcript ppa024786m (locus ppa02478 6m.g) derived from phytozome v7.0 (chr-ID scaffold_6; pos 1861771 to 1862749)
aacgaccccaaaggactggcaagtagtaacctttggttttttggtaaccttttttaccactttctttagttacggtacatacagttactgtctaagagtccgttgaggttgactatttggttttttcatgataaaaaaacatgtgtgtcttaataatttagttgaccatacatcttttcacgtgatcagtcaaaagttcttattattttgttactgctagctagagaggttttgtaaggtatccgatggccttgtacgaaccttaaaactccctctggcctatttttatctaatcatgcactttaattaagctcttttatctttttgtgatacaagcgatattagaggatgaaacatgatttcatatacaaatgtaaaattttcaagatgcatatgggttataaatttttaatttttaatttttaaaaaaaaggtgttagatgatcatatagacctcccacttccaacttgcttttaccaataatcacgtgtacaagcgatgcatgaattgttacagatgcattcaaattatatgtttagtgttaaaagttaattatgttttagtttagcacattcatagcaatgtatcgatactgaatgttatctttctcctgcattttcttttcttatattccttttgtctttgaacttttcttattctcttaaaatattaatgtaggctggctagctcttccgagtaatagaacatttattagttaaaggggaacagaacggcaatagcaatcgatatttgttttaaatttgtcaaattgtaagtctaattatgatgaagacttctagtgcgttatctttttttctttttctttttttgacactgtgatattgagagataggagattcgaacacaatacctcaagtgcacggataacttgctttagtgcgttatatcttgattatatgtttattggtttattcttgtacaggttggagggaaaagtagcaattgtaacgagaggaa

SEQ ID NO: 70784 - DNA, 996 bp, Prunus persica
  Intron number 4 from transcript ppa018892m (locus ppa01889 2m.g) derived from phytozome v7.0 (chr-ID scaffold_1; pos 36746821 to 36747816)
gaataaggcacttggaagttctgaaatacctaaaggtgcttctcataacttcttgttgcttttatgtctaggctgtagtactatgcaagcttgtaaggcttttgtaaactggttaaatctgatttttgtatggtgagctcatttattatggccaaaatagagaaatagtgaaccacaaaccaaccgagctagttgaagttttgaactgtattatataaatttgtcattctattaccagccagccactgaatgtcatatctaataagttatttcaagtttgaactgtttctgtttcacataatattattcacatatcattttattccaattttaatattgtgcatttgaaagcagaagaaaagaccggaaacatatcagagttgggatttgaggcaaggtcattcaaagatggggcatggttagtatacaaacaagggtgactttgtcattggatttcttggtggtcctttatatttagttcatcagtttcttgttattactactataacctctaacttgttggctattagcatattttatggtacacctcttaacaaggttttcagcaatacaaggaagaccttgtgtttaattgggtgcgcttggaaagctaggcttatattaaattataaaaaaattgatatgaggcaattgatgcaggatttaaggaatgaatgaccatgcacactttaattaacctgacaacagtagaagtttaatgcctcaaggtctttttaaccacctcaactttaaaacaagaggtggggcaaaacatagaaggtataatgaagatttaagtacagtttcagtgcatgagtatttcctaaatctttgctattcaacttgttagtgaccatgaaagacttcctaaaatttgtgcttctttgaattgtatgttctgattgcctagtgcaaacatagctaccctgatagtaattgtaatggaaagaatattttctcaacactttgatgtgaatatgatgttttgccaattag

SEQ ID NO: 70785 - DNA, 831 bp, Prunus persica
  Intron number 1 from transcript ppa024846m (locus ppa02484 6m.g) derived from phytozome v7.0 (chr-ID scaffold_4; pos 14561198 to 14562028 reverse strand)
ggtcaacgaatccattactgccatttgcatcgtaataattactaattactgaattaattaaccgcctcatcaattcccatctctatgctttttttttctttaattttgttttttttaaatatttgtggggatttttagtacaagcgacagtctaaattacagggatgagatttttcacacacacaactatgatgtcatggggttcgaacttgagacctatagcctgcaagtcaggatcctttttcactagattagaccccattggctgtggattttatatttttttagtcgttatatcaaatgctcttaacctccattttcattgtctttccctatttcatttggccaagaaataacagattaattagtagccattgatgttcattaagtttacaccacatggtacattgtatgtgtgtgtgtataataaagtgagatagctcaaacactagggaatttaatttgcaaaaaatgtgcgtttctataatatttgtcaagtttgagtactaattaactatgagctccatataaatcaagtttaataagtaccctttttcttcacctactctcctagaagattgagtttttatgtggttattgtaatctgttagtacaccatatggtaacatggtcaactctctgcttcactctctgtccctagaaccatatcgaaaatgaaaaattatgtgagcttctttttctgcccgtttaatgctgagaattatgttgggcactgttgaatttgcaaacatttgggatattgctatatatatgttctgtgtctgatcatttccattgtctaaagtttcttactttttttctcaaacaggg

SEQ ID NO: 70786 - DNA, 875 bp, Prunus persica
  Intron number 1 from transcript ppa009155m (locus ppa00915 5m.g) derived from phytozome v7.0 (chr-ID scaffold_5; pos 12175411 to 12176285)
cgtggaaagcgctttatcataaggtatgttattggtgaatttatcgaacttcttgtatttgaagtatttgtatgttggtctttgttgaattttgatttgaaggcgaggtggtttccaattgaaggaatggtgtgtttggttgtagagaaaatgtgggaaaatttggaccctttgtgcatgtaagttaatcggaaattggttgggattgtgtgctttgttgttgttgttgttgttgttgtttatagtattggaactttgggtgtggcttgacgtgtgtagcgagattaggatattgcatgttactttgctacagttgtaagttgtgatgtgaaacatgtgggatgagattacgctattgtgtgtttacttatggcacattttgggtgcctgagagatgaaaaagaagaatcttgttttaactgcattggatttattgtcaaattttagctgcatgaagttttccttcaattaaatgatgaaatatatgtatcaaaaaatttaatctttgtttcttttatcttggtttaatgtgcagccaatttgtatctgatcttagaaccaaaaaattctgtatgatctgagttgcaatattgttacaaatattactttttttatgtctctttaattagagaagtactcgactgaatgtgtctgtattttgccgcctgaaaccataagcaagatttaattatttgaaagttattgagagatttcttgttgggatgtatgtttaatttaattttgaaaacagaaatttatccatctttgaagtcctaatgcatgtcagttctttattttcacccatcaaatgggtcctaagaatattttgttttgggtttttcaaattctcttctaggacttcacattggaacagg

SEQ ID NO: 70787 - DNA, 839 bp, Prunus persica
  Intron number 1 from transcript ppa002782m (locus ppa00278 2m.g) derived from phytozome v7.0 (chr-ID scaffold_6; pos 25844696 to 25845534)
atctctcctccagtgcttaccagttctcttttggggtgagctctcaactatcaaatatgtatattcatttgtacttttatctttgtgtagtgatgcatagtgcttagtgtagtatttggtgaaatggggtgtttggtttctgggaaaatgggtgagaagcagtgaaaattttggatactgaaaaaggaaaaatggaaatgatcaaatttgtttttcttttgctttgctttgctttgtcttgtgttttttggacaaccaagctgaagctataactgagataggggaaaaggaggacttttgtaaatgggttctaataattatagatgtggggtgatgagattttgagtctatgcaccatgagtgaggtcttgttagttaacttgtcttaaactcctaaaatccaaagtgctgaatttggggggcaggtctgtgaggaagatagagtaaggtcaagatggtttgagcttcaggctttgaggttatgacatttttatccatcttcctctttctctcatttttttgtctcattagattctagagggaataagagattgaaaagagggatttgggggtgagatgaaattgtgtataattttcattaccaataaaaatgtgtgtattggtgtttaattgcttcattcagtgtcattgactatttctagctcatccaagctcatcccataagtcggaatgggcagggactcgggatgggggcatattattctagctttatcagctccatcagggctagttttcatctgtactaattaaggaaaaattctttcttttttgggttgttcgtaggctccagcaaactacctccgttctgggtcgggtgg

SEQ ID NO: 70788 - DNA, 669 bp, Prunus persica
  Intron number 1 from transcript ppa004498m (locus ppa00449 8m.g) derived from phytozome v7.0 (chr-ID scaffold_6; pos 23936958 to 23937626 reverse strand)
tccctttgcaaggtatgttcatttcatcatgcataattcacctctcttttcttttttttcttcttctgggttttatttatttgtttataaaaaaaattcagtttttggattgtgggcatttaagggtgaaatttgtgagctgtttcttagctgaatataaatggtaaacattagaagggacagtgccattcatctaggatttattacaagtttggtgagagccttaatggcaacaatatgatatatcagctgctacacatgcatgttactggaaccattttaacatgaatcataacctctttttggctcatgcttttcactttccgtactttatttttttttaccacatttatttcacgatgcttgacaactgacacccccatacactcttcatgcaccaacccactttctttattcaatcccaattaacccttgtgactttgcacaaaccaaactttctttacaccacaagttatatacatatatacaaattaagcaatattttaaaggaggtatagattattgggtcatgtttggtcatgacttttgcatttcctgtttttaattctaacaaaattctgtttgataacaatttgacttaaagaagttcttctcatgttaacccgatgactctccttttgagtacttgtcattttgcaggaagggtac

SEQ ID NO: 70789 - DNA, 748 bp, Prunus persica
  Intron number 3 from transcript ppa004143m (locus ppa00414 3m.g) derived from phytozome v7.0 (chr-ID scaffold_1; pos 32099227 to 32099974)
aagctagtgaggagaaaggagagcgggctagactggtgagttttctgctttctgcggtattaatttaagtgcacaaaattgcttgtaacacttgcagttattttccctccttttatgtctttattcaagggacattccagaacagaaacacaggagagtaaacaaaatgttgcttttctgagagtgactgacagtttattctttaaaatatatgtacatgcttagattgcaagattttacttcactgcaaggcaatgtttgttaaataataatcgggatgggataaaattattgactagaagcatatcttttattcacactttctcgatccctcgggtttgagaaagtattactcattatttctttacattcttttgacctttcaaattcctttgggaagaatgaagcattacaccttaaacatacgagtggccatcatacaagatctcctcttgttttattttgtgtgtacaaatcaaatgttgtagtgaatcttctgtttgtcatttaattacttgtgttccccttttcccaaaaaaaaaaaaaagtgttcccatgctcttctgagatttgcgactgtcccagctaagtcgaatattgctcaattttaagtataggcagtgtatgttaggcacattcaatcctgttttgttgattggaatttcaaatgactatggatagaaggtgacttatccctctttgaacttatctataatctgtatttttttaggcgtcatttgtgggtgca

SEQ ID NO: 70790 - DNA, 644 bp, Prunus persica
  Intron number 1 from transcript ppa005482m (locus ppa00548 2m.g) derived from phytozome v7.0 (chr-ID scaffold_4; pos 10049353 to 10049996)
gcgagattatcagcgccgactctgttcaggttttagcaaacacacaatacccagttgttggtttttgttgttctctgtttgggtgctgagaaaaaaaagggaaagaaaatggaaaaatgtagcttctttcaaagtaagcagcagagtggttagttcattagttgggtgttcttgagatactaatttgtaagtatggagagtttggtttattgggtatttagtcataaaccattttacttactgatactaatagacaaaaagaaagttgacactgtgttataccaaatagatttgaattacttaagttgaaaatttgaattgttataatcaagcttgccttcaatgagtaatgctaatttctgtttatagaggccacaataatctagataaggaactgaaatgtaaaaaattccaaacaaatgataaacatcaggaaatacacaataaaacaactatgggcatcgaaatggaagacatctcaaaatatccaaatctccttcaatataacattgcgttgtttggattgccttttgtttatgcttataacacttaacaggcagtgcaatattgcttaaagtgattttgtttggtatggctttgtcgcctcaggtatatcggggacttgatattggatctgccaagcc

SEQ ID NO: 70791 - DNA, 797 bp, Prunus persica
  Intron number 2 from transcript ppa005482m (locus ppa00548 2m.g) derived from phytozome v7.0 (chr-ID scaffold_4; pos 10049981 to 10050777)
ttggatctgccaagccttccccaggtgatagacaggtgcttgcctaattgagaaaattgtacatttagtgtattcatctaccattgaaatttaatttatgataatatagacttctggattatgttggtttcagttgcattgtatgccatattagttttatgtttttttttcattttgaccttttaatgtttgtatctatgatgttatgtcgtgcttagattttacattttaataattgtaatatgattgttgtggatgtattgttccgccatttctgacttgaattttttaccctttcaagcactagcaattcatattatattctctaacaaatcacataatatcctcatttaattttatctcttctctgcaattcaatagttcatatggagtaagtctattgtatagactgcttgtctgattattaatgcagaatttcatatgtaggtagaagcctttatgtcctaatgaagttttgcatggaaaaaagaaatacttcatcatattgataaaacagcaagtttctagctaatccaaaatataacaaaaacaaagaaaaacaaaactactataattacaaagtaggtttgtttaacttgatactaaattttactgctaatgattgattgggcaacttctccccgtgtaatctcaactggtctgttttttgtaactggaatttgaccaaaaaattgtgtgttttttttttttgattttttataataaaaattcttattttttgtttttctttctttaatgcaggaggtgccgcatcatcttgttgatattttgcaccc

SEQ ID NO: 70792 - DNA, 839 bp, Prunus persica
  Intron number 1 from transcript ppa022434m (locus ppa02243 4m.g) derived from phytozome v7.0 (chr-ID scaffold_7; pos 18930783 to 18931621 reverse strand)
tttcctttccacttctcttgcaagctatcttgacagtatactctctctctctctctctctctctctctgtgtgtttagatctagtttgaagcaattgaatctagtttaaagtaattgaagatgggttttatggatttttggctgttttgtatgtgttagctgttaattgccttatagagctcttgtctagtatttttcttgcacatttgtttcatggaatgggtttagagaggctgctttgctgtttgatttgtagctttcttattgcatgctctgtttgattgcgtttttcaactgtatatgagataccaggaacataaacgagtaaagcttcaaatttggatctctgcactaagtaattattatgatgttgaatttctagtgctgaatcgtggatttggggtacaagagtggttcccaatttcttagaatggaagacatatctttgctgcataaacaaaagtagaaatgggataaatattttcttaaagaaatcaagattcaaaccattattaaatgtgagccagatgctgaagatgcactcattaaattaaagcttcataattagtggtttaatgtcactgcagaatgtttggtttctagtgcttttgtagctcttccttgaagcactggaatttttgttttttttgggggggcgggttgggggagaaggtgttaaactggcatgagatgcctacattttggttacatgtgattgcatggattcgtattatgtgaggtatatcagtaaactgattagagattgattcattacaaagcacttggcttattaggatttttgatttgtttttcagaaaagcttcttgtcttattgcgag

SEQ ID NO: 70793 - DNA, 1010 bp, Prunus persica
  Intron number 2 from transcript ppa013377m (locus ppa01322 2m.g) derived from phytozome v7.0 (chr-ID scaffold_1; pos 2968914 to 2969923 reverse strand)
ttgttgtcatcgtcgacgtccttgaccagaacagggtaccttctccttcctctttcctttatcaaagtcttactcttttgttcgttactttagaattgtgtttgggttctgtttggttgccaggaaaaactaagaaaaatgagagaaaaatgaattttgggattcgtgctttatgttaaattagcacgcgattcaattttgtggagcattaagctcgcttacctgaagtattttctgagctaccaagcagagttctttttgctgtggtttcatataatatattttagtatatcttctaagaatcattgatagattcaatgctatatgttttaaattgaaatgagcattgggaaattgttttttttttttgcgtctccctttctgttgtacattcctaatatacatgacatgttatgatatctttcggtttttagaaacttcttataactatatttgccaagtggactaggtgcaatgttaattttaaatcgaaactttcgttagaaccaataggcgtgtgaattttgactatgtattggaaagtgtttatgtttatcagaatatgtatacttgtgtacttaagtttacttcagcgagtctcttttcagacagaaatgggtggtttttgttgagcatcacaaacgatgcctactagtgcagccactattcaaatgctaatatagttattacttcttaatttttatgatggtcgttgccctattttttttattttgtctgtttcaggttatattcttggtttgttgattgagttgtttcagtttaatagtaatttcggtcagtttcatgttgagataagctgcaacctggtaattttttgttggttttgggttgggctcaaacctgaacttgtttccaagcgtggttgtcgttcacatatcagaaatatagctataaagtttctacattaatatcattgtatatttcatgattttgatccattggcaattctgcttcacttgtctccataggctcttgtcgattctcctgat

SEQ ID NO: 70794 - DNA, 454 bp, Prunus persica
  Intron number 2 from transcript ppa001378m (locus ppa00137 8m.g) derived from phytozome v7.0 (chr-ID scaffold_6; pos 7111729 to 7112182)
cgtcaacaattgcatactgtaagtatatgtttgttttcttctttttttctgtatttagtgttctctccccccacttcctttcttagtcatcgattttcctgtgtgtgattatcaaagaatttaaggaaagaattcaccttctcagaccaaaaagttcaaagaatttttttgttattatttttttaagccattatctggttggaattctattttgtccttttgcagtctttcttattgaaaaaaaaaaaatacttgcctcaagtttcatgtctttgtttagttctttttgacactggtacatttcagtcacattaattgcatctgcaagttgtgcatttattcaaattaaaggacgtagtatagccaaccgaattacacttagtacttgctagaactttgccatattggaccgtttgtaacctctaagtgattttctcgtaggcaccaactactg

SEQ ID NO: 70795 - DNA, 768 bp, Prunus persica
  Intron number 1 from transcript ppb022879m (locus ppb02287 9m.g) derived from phytozome v7.0 (chr-ID scaffold_7; pos 3629910 to 3630677)
gatcatcttcctcttgctttcattgcacgcaaaaggtaagctttcattttcactattttggttactgttttgcatgctcatacgttttttgtttgaaaaatctttttaccttttttctggccaaaatcattttacttctttccaagtttgataaaatatacagacaaagagggaaagtttccaactttgaagacaactacctcaactaaataagacgacggtagaccacgacggttcgtaagttgttctagcgtcgtctgaaaattgacaaagttgtttttaaaataatagtctttttttatatgcttgtttaattgcaggtttgatttctctgaacaatggtttttgtttttcccttatttgataaaatataaagaaaaagaaactagggttggtatctaatatagacgacaaaatatcttattgttttacgtcgtgtgaatgttaataccacgacggtgtattactattgacgtcgtatgaacataaataccacgacgttatataaataatagtttaccacgacggtgtattactattgacgtcgtgtgaacatatataccacgacgttatataaataatggttttaaacatttattacatctgagattatttcattgcgtcgtctaaaatcatatcatacgtcgtattttttaataccgtcgtttgtgttcttaatgttttcctgaaatattttcacttgcagttttgtctgttaaaatggtttctcaacaacaaactaaggattctggctccaagaagcttgga

SEQ ID NO: 70796 - DNA, 669 bp, Prunus persica
  Intron number 1 from transcript ppa008867m (locus ppa00886 7m.g) derived from phytozome v7.0 (chr-ID scaffold_5; pos 13088642 to 13089310)
cttctcagaaccattccttattctgatcaccagaggttggcttgcctttactttttacttcttatttgctttgctctcatttccatttctgatagagtagaagatgatggtacatgatcttgtcatagactctagctgttatctttttgagttttgaaatttcttcatgctcatgaattaaaaacacagcaaaacaaaaaacccagttgtgatttgtgcatttggattaggaatacatggtcttgtcatagactctaggtgtaatgatctttatgagttctgaaatttcttcatgttcatgaattaaaaacacaacaaaacaaaaaaccaagttgtgatttgtgcatttgggaacacattgtcttgtcatagactctagccggtatcatctttgttaattaagcagtttatttcatgaagtttgcagtttattctgtgagtttgcaatttcttcatgttcatgaatcaagaacacaagaaaacaatgagcccagttgtgaataaattttcttgtcatagactctagctgctacgatctgtgttagttatgcaatttctttcaagaattaaatgcaacataacagaaactccagttgtgatttgtgcatttgggaatgcatgcatgtgtgtgtaggtggtggtcagcagagaccgttgcagtggttactg

SEQ ID NO: 70797 - DNA, 579 bp, Prunus persica
  Intron number 2 from transcript ppa001303m (locus ppa00130 3m.g) derived from phytozome v7.0 (chr-ID scaffold_8; pos 11582874 to 11583452 reverse strand)
gcattagaatctaacaaggtatcattgatatacattctttactatgttatcatgtctctttgctctctgtgtgtgtatatattttatggtcttccaaagtggaaagacatgtttgcttggcctacggttggtgcagattgtgccaggtctctttgctttgatggagctcaaagtaacaacttccatctttgatctataggaaatgattgtttgtgcaaatatagtccactgatgcttcataaaactttaaaactttttcatttttcccatttaaagagatgtctcatcacctgaacagaccaaaacatgattaaaatttaaggtgagaggaaaaccctaaccatatttgagggaaaatgacagaaaaaaccaaaccttccagtaaatgttacatttttctaagtttgttcttcttattcaatctgatgtggacatgtggaaagtgtgtctcaatgtcaaatgactggtataagcttgaggattatgaatcttttgtactacaatgtttgatttctttccagagttccattcaccattttaataagtatcttacattgactttatactgcttctgatagg

SEQ ID NO: 70798 - DNA, 516 bp, Prunus persica
  Intron number 1 from transcript ppa025999m (locus ppa02599 9m.g) derived from phytozome v7.0 (chr-ID scaffold_1; pos 142248 to 142763)
aaagaaggagaaagtaagaaattttctatttgaaatactcggcattcctctaaccaaatataacaacgaagaaaataataggaagataaatgcccagcagcctaattagtgtcatcaggaagatgcacgaacttcaatttatagaatagtgtggggaaagcaaaatctattgttggttgtgatggacttgcagtttttagatgtcaaattgctaatgcattggtcggatggtcaatgcttaggacatgctcatacaaacttacagctaagggtattgctgaacatttatgctgtccttttcttgttgaaagattcttagattaaatgttgtattcattgatatgaacttatgctctctttcttttgactcctcaaggatgagattttatccgtgatagatttgattttgcgatgaaaacttctacagcatgttatcctgattgctggcataatttttattagttattggcaactacatcagctggatctcccactggaaaaagcagcaggtcatca

SEQ ID NO: 70799 - DNA, 896 bp, Prunus persica
  Intron number 2 from transcript ppa027152m (locus ppa02715 2m.g) derived from phytozome v7.0 (chr-ID scaffold_3; pos 4238122 to 4239017 reverse strand)
caagtaattaaagagttgaaaagaagctcttacaggtcagttatggtatgattttgcacttattcaatattggttaagccttggatatcattattactgttgctattatcattgctgtttttgttgttctcttcatccatttcttgtatctatgccatctattgatgcacagctcaagtgttatttcctgatattggggtgccacataaatgaatgtcccatgtgccttttcatttgttcttttctactcaaaaggattatgccagtttgcaatgtccctcaaaaattgctgttcggggacttgcaatcttacccattcttctgtagttgttatttcattgtattttcatctttaaatagttggtgcaatctcaacaatgctacatatgttattgttgcttttctaggttgatgttctgtgtacattgaagcctgtgttatctaacaaattttgagcttgtggagcaacgtaaacgttcattagctgcatgtatatttttatcttaccacctaatggctacatgtgatttctagtccgaaagattttaacttgctttcgagttattgatagtgtaacatattcattacttagatataacatagaatttctggcatctatcttgatactgtaattagttgagttgttggcgattaccagcttatttgctacagttgcgttagcaaatgttgcaactctaattatcagctgtgaaaatcagtattgacacctaatttttttaggaatgaatttattttcagatgtttttggtggtgtggaattattctctatttgcccaacgaattgttctttgtagttagagttctctgtttgttttccgtttgaattttaaaaatataaggaactgaactaatatttgacaatatgcaggccgaaa

SEQ ID NO: 70800 - DNA, 498 bp, Prunus persica
  Intron number 1 from transcript ppa021472m (locus ppa02147 2m.g) derived from phytozome v7.0 (chr-ID scaffold_4; pos 26736516 to 26737013)
gtgtactagccatttttgaaaatgtaaattatgtgtcaaccttccacttttattcttttattctttttttttttaagtcggataaatacaacatttaaattcgatcaacaacaatcttctcatttaaattatccaaaccaaaatatacaaaaaccagttttcattttaaaagttatccaaccaaaaatattatattttctattattttcattattttaatattctcttttccaatttctctttttattgaatattttgagtagacattgtttaagtttccgattttttatcatacattgctttttaggtataacataaacaagatggggtgatgagctttcattttaagctgttttcttgcatccaacttctcgtttagataactcacaacttacaacttagtcttgacatattcttcccttctgattttttttttttgttttgtttttgtttgttttgtttcatatctgaaggagggcacaacattgggaagattgg

SEQ ID NO: 70801 - DNA, 592 bp, Prunus persica
  Intron number 2 from transcript ppa009732m (locus ppa00973 2m.g) derived from phytozome v7.0 (chr-ID scaffold_6; pos 26832877 to 26833468)
tccagatccaggtcacctcaccgtcaaattcgaaggtacaattcctttctatttttgagctctggaaatgagtgattagtttgtggaattccttacccttttatttggttggcgcgaaacggagggaaaataatactcagcaagattagatgtggaaagaatcggtttgcaatcgttgcataattgtgttagccaatgtttttagccgttggaaaatttttttggttacaaactgttggattttgatgcaggaaaattgaattttaacgatgctttctactttcttggcaaccggacagcttttgtttgattaaaatttcagttgaaaatgtaaatttttattgccgaagggctttattgaatgatatagcggaagaataagcataattgtgaatgtagtttactagtattatttggcttgaagtggaaggagctcaataacctctgcttagatgggtttaatattactaacatccagctcagttgctaggttttgagtttgtaggtgcaaagttctatcattatttgaaataactgtatgatttgtaaaaatgcagattcaaaccttcagacatttcctccatctgaggca

SEQ ID NO: 70802 - DNA, 649 bp, Prunus persica
  Intron number 3 from transcript ppa009732m (locus ppa00973 2m.g) derived from phytozome v7.0 (chr-ID scaffold_6; pos 26833512 to 26834160)
ccggtacatactaattctgattttatttatggaaatgtgcgagccaggttttgctttgatataggtctttcccacgttatttgtgctctttctagtccagggaatactgtctttggatccattgcctaaaaagctttcgaaagctaagtttgaagtctttggattgatggttccatcatgaaggatgataagacttgattaggttggatcagcactataagtaaaaaagagatctgcagcaatagtaattaggtgtaccattgggagtcaacaaggttctagaataagtgtggtttttgttgtgatttagtcctttaaactgctaatcattggagagatgaaatttaacagagtagatgttcggaaaagaaaccttagaagagctgagatgatatttgaacaagaatgactgaaatctcctttgtgcctctgtttcatttcatatgtcacgagaaaatttagaccttttattcgtaaggagtgttaaaactactagccatacttctttctataagtgttagagtattttgttttactaatattttgtttattcttctttctatggatgtcatttgttggcatgttaaagggtaatagccatttttctctcctgatacagacacgttttcaaaacctgtatctggttctg

SEQ ID NO: 70803 - DNA, 838 bp, Prunus persica
  Intron number 1 from transcript ppa001432m (locus ppa00143 2m.g) derived from phytozome v7.0 (chr-ID scaffold_4; pos 10681421 to 10682258 reverse strand)
acgccaccgctctcgagccacgctgccgattccaggtcttcgttcttctaaaccattcttggttttttcattgctctgcattttgttgtttttgggtgttcatcattcgtttagggtttttttagtggttctgtttggttgctgaggaatgttgatggtgatgatgatgatactttgagttttaagtgtacttgttttatgtggacttataaggttttgaacatttggaagtatattgcaacaaaaaaagcgtacatgtggaattgtgtgcgtgtatgtaatgaactttgttttgtttctgaaaattggggaaatgaattatgttgaaagatttgatttttcttatggtccttgtgatattagaaacatagaatactaacccaattacttcaaaacagaacaaaagtgttcaacatggtctagggattgagttttagggtgttaattttctctgttaataaactaatcaacaccaacactggggaggatggtttctgaatgaatttgttttgttcttttttattcttttcggttgtaaatctagcaaagaacagagagaaatggaaaatggaaaaagaagcgtcttgaattatctattgtgttggtttcaaaggaaaatggaaactcaactcggtgtttttctaaggaacacttgacatattacgagtttcttacttttgcgcctaaaaccttgaagtccggttattatagtgatgtttaaacttttttgtagtgccttggtcttccattaattagatttttcatgtgctaaacggtttaattacacaacacattgatcttaaagagtatttgaaacaggaggaggattctgaagaat

SEQ ID NO: 70804 - DNA, 671 bp, Prunus persica
  Intron number 2 from transcript ppa022755m (locus ppa02275 5m.g) derived from phytozome v7.0 (chr-ID scaffold_6; pos 15518412 to 15519082)
ctggtttggaggatcaattggaggaaaccatgcctggggtagaaattgatcgatctaccttatggaagagagctagataggacaaacatggtaacatcccggatccaaaggtggcagagaaagaaaaattaattgtaagcctactcactctgttttaaatttttattaaactgtaaataattctggaagagagctagataggacaaacatggtaacatcccggatccaaaggtggcagagaaagaaaaattaattgtaagcctactcactctgttttaaatttttattaaactgtaaataattcttattacgtcttatgttatattttgtgtcgtgtgaatgatattactacgttgaaatgttttaaacaaggtcgttaaaggtgtgaatattgaatcatccctctgttatctgtaaataaagcataagacgtcggtggtttattcatttcgtcgttttaaaaaactaaccacgtcggtataactaccatcgtgataaattataataacgtcgatttatatgttattgcgtcgtctgaaattatataatacgtcgtttgtatataaataaccgtcgtgtgttttttgttcttacttttttatatatctttgttttaggatgaattgcaaaaataagtctcggaaggcaaagtcactgtatctgacagcaat

SEQ ID NO: 70805 - DNA, 588 bp, Prunus persica
  Intron number 1 from transcript ppa009474m (locus ppa00947 4m.g) derived from phytozome v7.0 (chr-ID scaffold_2; pos 23345058 to 23345645)
gagtcctcggctgttttccgatcctttaactgtaactctctcgctttctctgttttcatgctttcatatttacgtacatacatgcatagataatatatttttgtattttgaagcttaagcagtgagtgtgcttgcattagttgttaaacaatttgagctatgaatttattttgttgtttgatttcgtggacgaactgatagaagaaaaatcaatcaaaatgctgcagatttttcaaaaaggaaatagaagattttgattatttcgggataactaactaaactaagctggttcttgcacacgctgtttgtgaagggattaatgtattgaaagatatatggaaatggaggtaacaaattaggctccaacggtttgagatctgatgtgatattcattttcttgttatcttcaaccgtcacggatttctatgataagctttccgaagtggatctaatttaagaggacaaattgcataatctttttactttactctgcgaagtgcagactattcaactatttttgaagcttgatccaaatttggattcttataagacagtgtcaaattgtaggttctgtaggcacagtttctc

SEQ ID NO: 70806 - DNA, 564 bp, Prunus persica
  Intron number 1 from transcript ppa003900m (locus ppa00390 0m.g) derived from phytozome v7.0 (chr-ID scaffold_6; pos 20491432 to 20491995 reverse strand)
ttgctggcgctgctcttgcccatacccttgccaaggtaagaaaaaaaaaaaaaaaaaaaactttcccttttttggggtcaaattttatagctttttatggtttttgtttgtttgaagaaaacttcttcatgcgtagcgtgttgccttcagaaaacttgtctttgttttacaagaaatggttgcttattatgttttctttttgtgttgtgcataactgattgaattaggcatgccaggttttattatattctttgattcaaagttgatgacgcaattgtttagttaataaagttgttattttattgattaattaaatggagtttaaaagttcaatgtttgtacgggagattgataaggggtctagttaagtatggttgataacttgcaatgaaatcgctggcttgctaaaaattgggagggatggttctgtttttcacaaagttttggaaatgatttacatccttttttacccatcaacaaccattcagctcctgtaaaggtatttgtgtagaaatgtagagtcttactttatctgctgctaattgcaggagggaagacgtgttc

SEQ ID NO: 70807 - DNA, 820 bp, Prunus persica
  Intron number 3 from transcript ppa008146m (locus ppa00814 6m.g) derived from phytozome v7.0 (chr-ID scaffold_4; pos 6568806 to 6569625)
cggcaatttgcctcaatattccgtcaggcaagcaccaacgctatgcaatgcctcatgatataggtcacttagcaatggatgcaagtacttgggtatattttgatgaagatctatgcttacatatcagggttcttcatatgtctattcactattttctttcttgataatgtggtggatgtatgatcttttgacatagttctacagtagtttattggggaaggggaaaaaaagaggtacaatgttgggaacacaaacaaatatgtatgatcaaatctataatattgtgttttaagtagatattaactgtcctttggttgaagacataatcacttggactcaatagtgaggaacaatagcagcagtgtaaatcatttttataaaaagctagacattgttatcaagtttaaaggactagatcaatttctgtgatcagatgttcatgttgagtgatatttccaatatcacttacaagctaaatgagaaaaattcagttgtcacttgtcagaaagtttcttttaggtgaatattatgtttcagaaacgcaagagcaaggagacttataaaatgatgtattttctttttcttgctggaagaaaattgtgtttttgatataatgaattttctgatatctggtattactgccgtatctagctgcatgtttaagcagactttggtcttttctcattcagtaactcacacatggtatttccttaaattttcggtttgatgctttgatgctaaaacagtgataaaaatggtttatctggtaataagtagttaatctggccttacttggcactttccagatcactcagcacga

SEQ ID NO: 70808 - DNA, 343 bp, Prunus persica
  Intron number 1 from transcript ppa012229m (locus ppa01222 9m.g) derived from phytozome v7.0 (chr-ID scaffold_8; pos 290064 to 290406 reverse strand)
aagatcgttgatcctctcctcgaaatcctccgcaggtactctctttcagattcagtttttgctctcttttttttgctcaagtatttcttttatttctctaaataattattgcctaccaatcttccaatggaaattgtgcattttgattcttatgttaatgatttgattggaaaaaatttaatgcaataaggaagtttcttattattttgccgagaacgttcaaaacgaaattgcgtatttttcttctttgtcattattcgttaatcttattacaaaacactaaaattttatttcattatgatatgaaggggtgcagaacctaagctgttggccttctctgcag

SEQ ID NO: 70809 - DNA, 717 bp, Prunus persica
  Intron number 1 from transcript ppa019978m (locus ppa01997 8m.g) derived from phytozome v7.0 (chr-ID scaffold_3; pos 8904487 to 8905203 reverse strand)
tcaaggtcagtgtaaggttttctcttttttgtttgtttgattaatcgggtgtttctgtttggttgctgtgaaaatgtgggaaagttaacggacctgaagttttccatttccttgttacatatttgaatttgggatagcaattggcttctacgatactaactatacagtttatttggctttattatctttcatttctctggtttaagtttgtttctgggaaattgaataatttttaaatgtggttgttttttggctgaagaaatgtggtcgaagtatatggagtgtttattttaatttgcctttttcgttctgggtaaaatacatatgttgtacttggagatctggctggcgtatgaactcaatttggtttgctaaggtttgtgaggcaaaagatttaaggatgaaagttcaatgtgaactattactagttgtgacttgtgattgagtattaagtctaaacttaagtaagaacatctagaaatcatgaccatttttcacgtgcatattgagcttacagcagatgtttttgctctcagtccagttggatttatctttttttgttttattgttcttgttgttaagataatagctatattgtaattacatggatctctttagactttcttttgggtcatagtttacgtaagagtattttgttttgcatgtgtttcccatttctaatctcttcttctcatgttctagttgttttacaggcta

SEQ ID NO: 70810 - DNA, 844 bp, Prunus persica
  Intron number 2 from transcript ppa011182m (locus ppa01118 2m.g) derived from phytozome v7.0 (chr-ID scaffold_3; pos 19492139 to 19492982)
gaggtccaattcccactctttctatttttcgtacatgtgatttttatatgtagctaccccgaatttagatgatttagtttgtatttaattgtgccggtggcatggattttatggataaagtttcagtctttttgttgatttaagcataggtatcccaaacctggtggaggatcttaatgtacgtctgggatttgccttaattgtgcgacaactgacttctcggttttggttggtgggggatatgtgtttacctgatcactagactgttaatttgagatgatgctaagttgctaacataaattatgcttctttatttgaggttgaaaacttattaatagctctaggtttagtgatctcgaaagatggtggaaatcattaggctgatagagctccactggtttgaagaatcttatgcttaatgtgttaaaatggttgtttgaaagtagactttgcctatgatttattgaccaagaggaaaaaacaagaaagagagtggatgggatctggtattgcacattaattgtatgtctaatctaagattggggtcaatttatactctcaaaattttcaacaattgaatgccattgaaatggatgggagacgaatccattctgactttttggatgttgagtattgtagcaacaccagccataagtagtggattggagtgttgcaggtacaaaaatacagagaaaaaggtttttaagtcatttcatgcaatgatgaacttaagaataatatttcaaattttgctcgttgggggtttatacatgcttataatcagattttgcttcttctttaatctgcagagcaaaagaagcaaaagatttctgaaataaaggct

SEQ ID NO: 70811 - DNA, 851 bp, Prunus persica
  Intron number 2 from transcript ppa010987m (locus ppa01098 7m.g) derived from phytozome v7.0 (chr-ID scaffold_3; pos 21247780 to 21248630)
catctactctttagtgccaaccgttgggagaagaggtttgttgtgttattctttgcaatatgatatactctgtttctgagcttttccataataggacagatattgcacttgttctgattgttgttttagtttttaacttacgtcatgggaatgcaatgattgagttgtgtaaaaatctggtttgagttgagaaaccaatgcagcatagtgatcaataaaatatgttaattaaatcataagcacatatgtaagcagtgaaggtaacttcagttttatggctagtgaggaaacaagtgattgatatttttgtttctgtaggcttctagtctgtatgggcatccaaaacaattgttttacaggtcctggtgctggtttacatcagatttgacaataacctcatgtattccacagttatatttctgagctccctgaatgagaccgatatatggttgcaggacgttatttcaacaacgcatactttagaaaagataaattttgaggtgtttccatgttatgtttagcttacaagttaaactgaaccatctaaaccatctaatgattaagtgcagagtacaaatataaagctcggtatcatgtttgcttaggttttcatcatgtggcatggttctcttaggcagtgctttataaaagatggggaataacttatgaggggggaaaatccaagtcccttgttgtatggcataatcattggcttgttaatttgttgaatccctattttgattactataagagtgtgtgcacttcaatgtttcctgaaatcatttcttggatgaagaatgaggtggtcacaaatcagtgtactaaatctgtaatgtttatgcagatcattg

SEQ ID NO: 70812 - DNA, 270 bp, Prunus persica
  Intron number 1 from transcript ppa005019m (locus ppa00471 5m.g) derived from phytozome v7.0 (chr-ID scaffold_1; pos 32592359 to 32592628 reverse strand)
ttgacagcctcccaagcgggtactattcacacttcatacgacgccgtcaaaattataccttgactgtttgcttgttttttttataatttcttttctaaaattaatggctagtacattccattttctactagttttgttttgatgtcatgattgtgagttgtgaaaggtgtttactttgctatgcaaggaaacagagtattttgttctgtctctcaatgatcatgagtttagtgtttgatgtaatttcaatatgttttggaattggaagga

SEQ ID NO: 70813 - DNA, 671 bp, Prunus persica
  Intron number 2 from transcript ppa004764m (locus ppa00476 4m.g) derived from phytozome v7.0 (chr-ID scaffold_1; pos 2857411 to 2858081)
tgaacttggcgcaaacgtcaacgcctatcgccccggtatgtttcacttctgattttagagcttctgtattttgttttttttttttcctatcactatcactcttgttaataaattaattgcaatttgataatttcttagttgggtcgatcatgttgaattttatgtaattgtatagggagaagaaagaatggttattgaaaattaacaaaaaaatttgtattttgtggtcatagatattaaggaactgtaccaactgcagttgtcatcaagagccggaccaggccatagttagtaggctaacctttcctctaaaatgcagattctaagtccgaatcctccctcaaaatattgtgtgattatggagaactcatgtatggcaatagcaccatggatcttaagtcctaccgttgtactaaaaaaatttcccgtacaaaaaatggaacattaagattacatttatttcttctgatctctctctcctccctagaaacttattgcgtaatatttgctgcttattgtgttttaccaaatgtataagaaactcatcttgtaattaattcccagcattcttgagaagtgctattgtatactcatgcacctttatctttcgcttgcttcaacattttattattatttatatttgtcctcttctcaatgcgctttaggtcgta

SEQ ID NO: 70814 - DNA, 351 bp, Prunus persica
  Intron number 3 from transcript ppa005647m (locus ppa00564 7m.g) derived from phytozome v7.0 (chr-ID scaffold_7; pos 22121695 to 22122045 reverse strand)
agaagtctggtgttccacttgggtacatacacaaggtactcttttagatggcaaattggcagatagaagaattttggatgtttttgctaaaatattggtagtgtacatgcatatggttttctattaatttgttttgtagaggcattattaagttcctgtcagttctttcttttaatttttgaattacctatcccttatgtaaaagataaacttaccgttaggaaagaaacataaattttccatgtattcattttcagttatatgtagaatgactactcaatctgttgctatcttcttttacattgatataaattggaatttatatgtttctgcaggacttctggcttaata

SEQ ID NO: 70815 - DNA, 549 bp, Prunus persica
  Intron number 1 from transcript ppa1027143m (locus ppa1027 143m.g) derived from phytozome v7.0 (chr-ID scaffold_1; po s 1479120 to 1479668)
atttctctagcttcgtcaggcagctcaacacctatgtaagcatgactttctaggctgtcctaattgctcatttgtatgattttttttcaaagaaattgccatgttgttcttttcaatttggatattgtattcaaatctatgatatatttgtggggttcttttgggtttgactactatgtacattcatgctcatgaaacagatagaaatgtgtcatttttttaatcttttctgtctttgtttaatcaggtccttttttgtgtatttgtttaaggggttacttaaggtggacatattgtttgttaaatggcttcaaaagggaaagtgcagaaaccaatgtataaaatatgcatgatactgttacagagatggggtcagtttttgtttggtttttgttcttgtttttctttctgttggatttgtcaacttcaaagcttcttagggttgatctgatgcaatctaaaaaaattagtagacgcagccttttatggatttgatcaagaagaagttatttaattaatgtagggatttagaaaggttgatacagatag

SEQ ID NO: 70816 - DNA, 593 bp, Prunus persica; identical to SEQ ID NO: 70383
  Intron number 1 from transcript ppa010897m (locus ppa01089 7m.g) derived from phytozome v7.0 (chr-ID scaffold_3; pos 13506667 to 13507259 reverse strand)

SEQ ID NO: 70817 - DNA, 907 bp, Prunus persica
  Intron number 1 from transcript ppa007764m (locus ppa00776 4m.g) derived from phytozome v7.0 (chr-ID scaffold_5; pos 11810348 to 11811254 reverse strand)
aagtctctcgtcgctggtggagtcgccggtggagtgtgagttcgcagcaaatgctcttttttttaataagtaaaattattttcaagttttgatttttcgtggttctgtttagatattggttttctttttgtttccctgctttaacttcgtttgtttcgatgctgaatttgctttaggttttgttttgtttttttcatttttcatttgtggcctgaaaaataagtagactaaaaaagcaaccaaaaaaaagaaagaaaaagaaggcttcttttttcaagttcgtttgtttttcattgcctggaagtggaaaacatctagtttttaaatttgcactgtttatctgtttttggtacttttatcactatttgtttttttctttgtttcaatagaagcgataatttattcaaagcaagaaatcaagtgcaatcctctagaagaacatgcgcaatgaagtttggaggctcttcaatgtttgttagaagtatatcataaggaatcgtttatatttatgaccatatatttcaggaccaaaatacttgtgggaaatgaatggcacacgtgagaaggaaagggggattttaatgtcgtttgcatgcttgaattttgtgtatgaggattgtgtgtcttataatctctgtgttgttgattagctgtaagcaccaactgctagttgctggtgctgttattttcattagaggttcttgaaatggatgttagattagcaagtgtgaaggacgagttatataccatgcatgaatgtagttgtctctaggaattagagaaatttttgttgtgtcacatataacatgagggatgtgggtgaacttctaaccttatatctatctcttattgactacaactacatggtgcaggtcacgaactgctgttgctccattggaaagattaa

SEQ ID NO: 70818 - DNA, 543 bp, Prunus persica
  Intron number 1 from transcript ppa003093m (locus ppa00309 3m.g) derived from phytozome v7.0 (chr-ID scaffold_6; pos 1004911 to 1005453 reverse strand)
cccactcttcatccactctactgtttggttgtaaggtcagtcctcttcaaaccttctctctctctctctctctgttgcctaattttgttcatattattttgctgatataactacacaagtctttatcctctcgttatggcgtttttttgaggtggcttgccatgcccctcttggctgaagcttaggattgtgtgtttaatcttgactttttcaatttattttttcagcttgcgtttgttctctgcgttgtgtttcctcgttttaattaattaatcttgataatccagtttaaatcaaatgaaatgaaattgctttttatgaccggaaagaaaaaagaggaccccatttgcgttgaattagatatgctacgagaaatttgtctagctgccttttgtctatagcttactagcaatcaatttcatctcatattttatatattgttgtttggtctttatcttttcctttatgatgctatcaatttctacatggttaacaactattgagttatacaatttctgatgttctcaatttttacaggggtag

SEQ ID NO: 70819 - DNA, 544 bp, Prunus persica
  Intron number 2 from transcript ppa009940m (locus ppa00994 0m.g) derived from phytozome v7.0 (chr-ID scaffold_6; pos 3312234 to 3312777 reverse strand)
tctctcacttgtgggtggactgagtacttcaatcggttagtaaaaagctcatgcttattcatcgactgcttcaactacccatttcagcaatttcaaattcaaattgtcacatttaggaagattttgttgttcttgtttcgtttgtcaagtaatgcttatccaaatttgcttctgggtatttcttacttttgggttttggcttcaaatttgctttctttgtttgactttttgagttttagatagaagtctgatattggttaatttgctggtgggttttgtaaattagcttctactagtttcagttccctatccatcaagttgttgcgaaattgaggtttaatggtgtagaaggcattgttgggatgtgttcccgctgttttctaggccagttcttttgtattagtcatgttgtgaaaaaggcttttgatttttatggaatttcctaatttctgatgttcacctcattgctcagtaaatcagcttctgttctggagtctaatgaaagtcttggaatgtggtacaggtgcactttttgtagttctca

SEQ ID NO: 70820 - DNA, 727 bp, Prunus persica
  Intron number 2 from transcript ppa000010m (locus ppa00001 0m.g) derived from phytozome v7.0 (chr-ID scaffold_8; pos 20038849 to 20039575 reverse strand)
taactcaattagttaccatgtatgtattctcttctccttttcttatctgctgcattgattagtagataatttctcggaaaaaataacaaaaaagatgtaattttatgattcatatagttgcgataacattacctctgctgtgggtcaattttcctctgtaatagtgatgcaaattatgtacaaaatagctcctttaataagaatcaattcttgtcgattacttgttaatctcatttattgtttatgtgtgtactgaatttgcttcctggtgccactgcaaataaaaaagatcagttccagcatttaccagcaactttgtgttgctgaagttgggatggaaaagtattggctgtttactccactttattttccttgtatcaccggtgccattttacatttgtttttctcaattcattgcttggattccctttaccaaaatctctttatgtctagttggaaacctctattcgattttaattttaatttcatggagatgcatggttttgtttgaattttttaagtagtttctaaccttagataatgaattcctgttttagtaaaaatgaaattctgccacttatataactgtaagttgcaatttatcttattttgagtttattgagcttgtatcctggaaaaaagaaacacaatttttgttatagactaacattacaagttttgatgactcacaggttagttgaaacacatatattctcatttgtccttg

SEQ ID NO: 70821 - DNA, 995 bp, Prunus persica
  Intron number 1 from transcript ppb016764m (locus ppb01676 4m.g) derived from phytozome v7.0 (chr-ID scaffold_5; pos 507361 to 508355)
aaggtgctaaatgggcatttttcagaaaactgtttggggaatcaccaagaaagaaagcccgtggtgtaactattgtcgaacctatggcagaaggctagagttcaaggcctatggaggtgactgctgacttgcagagttcaaggccaataatgtttgaggtgaaggctgaaagttcgaagtctttccgaagtttatgataaagcaaagggagttaaaactctgttaagtcttaatctcttgaaatgagacaaaaatatttaagttgagtgttatgagagttgtttttttagtggtgtacttttgaaggattgcacttttaagttgtttttttcttttcaaatattgttggttgtacttgtttggaaatgaaatgaaatatgttttgtggaattgttgttgtcgtgttgccataagaatgttgttaatgtttggttggtgatgattataacattaaaagtggatgattataattgtgagttttgactagatttaaaaactgaaattagaatcaaagaggaagtatcatcatacttattgaagctaattcttgttgaattttggatatttgttgaagtcgagtgcggttgaatttcgggacgaaattcttttaaggagggtataatgtaatagcctcaaattttggattttgttgttattaatattctaaaaaatcatacgaggttaattaaatgtgtgggcaatttataaagttgttttggtgtgaagacttcctgtgtgtgtaataaactctgaggagtagattatgtaataagttgaagttttaatttattatataattggtgtgatataatatttgactcagaagagttgagtatgtatttacattgtgggtttggaacgagttgtactgtaataaggaaaaagaaaacaaaattcctagtacatgttgaagtttccgagcttcacgtcctggatctttttgtttgtaataattcaaaggttatttgttgtcgaaaatttgggacgtgacacat

SEQ ID NO: 70822 - DNA, 345 bp, Prunus persica
  Intron number 4 from transcript ppa000450m (locus ppa00045 0m.g) derived from phytozome v7.0 (chr-ID scaffold_1; pos 23234029 to 23234373 reverse strand)
aagattcaaagaggacacctggtatgtagtgtgtttttctttccttttgttaattgctttttttattaatttataaatatttattcttctcagttatgttctgaaaactgttatgctggtgttcctttcaaggaacctacactttgagcttgtaaatgggttcccgattctcatttttggaactgtagcataacaagataccatatgcatatatctaattctttttcataaatacatgtgtgaataacttctattaggtatagtctaagtaatgttcaaaaactacatggatattgttgtctctaatgccatattttgcaaatgttgcaggcagatctgactggg

SEQ ID NO: 70823 - DNA, 908 bp, Prunus persica
  Intron number 1 from transcript ppb012905m (locus ppb01290 5m.g) derived from phytozome v7.0 (chr-ID scaffold_2; pos 2584837 to 2585744 reverse strand)
acataatcttcctcttgctttcattgcacgaaaaggtaagctttcattttcactattttggttgctgttttgcatgctcatacgttttttgtttgaaaaatctttttaccttttttctggccaaaatcattttaattctttccaagttcgataaaatatacagaaaaagagggaaagtttccaactttgaagacaactacctcaactaaataagacgacggtagcttcttatttacgtggttaaatatgtagaccacgacggttcgtcagtcgttctagcgtcgtctgaaaattgacaaagttgtttttaaaattatagtcttttttttatttgcttgtttaattgcaggtttgatttctctgaacaatggtttttgtttttccctaatttgataaaatataaagaaaaagaaagtagggttggtatctaatatagacgacagtatcttattgttttacgtcgtgtgaatgttaataccacgacgtcatattaaaataccgtcgtctatataagattccaaaactttctttcttggccttgtattttatcaaattagaaaacaaaaaccatggttcagaaaaatcaaatctgcaatcaaacattcacagagaaagaaagaagggttttggatccttatatagacgacgatatattactactgacgtcgtgtgaacatcaataccacgacgttatataaatatttcgtcgtttatagttaattatcacgtcgtttatagttaattatttcgtcgttgtttaattaccttggttttgaacatttattacgtctgaaattatttcattgcgtcgtttaaaatcatatcatacgtcgtattttattaataaccgtcgtttgtgttcttaatcttttcctgaaatattttcacttgcagttttgtttttaaaa

SEQ ID NO: 70824 - DNA, 466 bp, Prunus persica
  Intron number 1 from transcript ppa008126m (locus ppa00812 6m.g) derived from phytozome v7.0 (chr-ID scaffold_7; pos 8608929 to 8609394 reverse strand)
gctacccttgccacaacaggttgtctattttctcacatagacaagaaataggaagagagaaaaacatgggaatatattattttgtgtttttttcttattatttaaagtattgttaattgtttctttaattctattatattattattttttatttgatataaatgtaaaacatgcacatcaccggaactttgtcaaaaatttctcttaaattgtagtatatactacatatatacatgtataccttgtatatgcatgcatgacttccaagtttgtagtgccttagcatacttttgttttgttcggatacaagtgatagtctaaaagctttcgcttgtctcttgtatgtatatatgtacttaattttttcagcatacatggatgctattaaatttctattcacaaagcgaaaataagaaaaactgacgtatatttgaatccgatcatgcagaagcaattggtgtttgtt

SEQ ID NO: 70825 - DNA, 271 bp, Prunus persica
  Intron number 2 from transcript ppa011273m (locus ppa01127 3m.g) derived from phytozome v7.0 (chr-ID scaffold_3; pos 21849436 to 21849706)
cctttgaggaagcaggggtgaaaggaacactaagagtatgttccattaacctaagtatttgttcttttttccgtaacttaacttagctagcctcttctgtctcaaaaaacgtaacactgataacgtatatagtatagtgctagcctaaagttgagaattaacatattattcattcgccatttgtttgttttttcaattagctaacacgttacacgggggatttctaatttgttcaggaaactcctctgggagtttgggagttcagaagcaa

SEQ ID NO: 70826 - DNA, 757 bp, Prunus persica
  Intron number 3 from transcript ppa015005m (locus ppa01500 5m.g) derived from phytozome v7.0 (chr-ID scaffold_6; pos 2768916 to 2769672 reverse strand)
tggtgcaaataccattatcggaaaccttgatactggtaatttaatttgatttaatttgttgtttggttcagaatttatgcaacattgaactctttggagtgtaagatcggtcacattgtttgcttttcttgatacatgccttgcccgttaaatcttgcgtgagtttttgaaacttgatttcatgtccacgtttttagcacatctgatttcttcgaattaaatccagaagttgacaatgatatagtgctgctgagttttatataattatgatactttgacctgaccctattaggtcagcgtttttcatatcagatagaaactttctgtagtgatatatcatggtttatatgaaacaaaccctaattgtgaaatgctgccaacccaatatggcattttgcataatgattttgaccaacccactttcatatttcaaagagttttgcaagttgatgtcaagccttgttttacttaactgcaagaaactcttaattcttagaaattaaccgctgtaagaaatgcagatcagtctagataactgactgtaacgacttcgtaatatatctgtgtttcaaattgtgggtattttcttcttctttttttctattaaaataccatatataatatttccctttctggtataattgtgcttttgcttccattatttgtgccatactgttcttgtgtttcttttgtttggcttgttttctttattgggtgtgtgtggtaggtgtttggccggaatcaaagagcttcagcg

SEQ ID NO: 70827 - DNA, 717 bp, Prunus persica
  Intron number 1 from transcript ppa023133m (locus ppa02313 3m.g) derived from phytozome v7.0 (chr-ID scaffold_6; pos 4383801 to 4384517)
ctctaagaaaggtgggtgagtaataagaaaagtacacataataaataatctggcgctgcgcagtgaccaaaaacaaaataatcaagaaaaagagacaatattctggcgctgagcatttacctaaaccctaaacccaaaaaaaaaaaaaacacagaaagaagaaagaaaatagagagacgcgtgctggtgcgaagaaagtgtcaaaaaatctatatgacgtaattgaagccaagccaagccaagtcgacaaatccattgcccacatgattattggccaatggaaacacgagaatagatatgtgttccggatgctcatcagcattgactaaaagcaagaatgaaacaaactacatggcgtcattggtgagtgtgtactttagcccccaagaaccaaacaaaatagagggagatcaaacaaaatagaaccaaacaaagagggagattaggccccaagaaccaaagggacacgtattatactcaagcctacaatataccccagctatataaagtccttccctctctgtacctacaatatcccacagccattgcagaaaaatgagaaatacttccactcattcttcttcttcttattatgagtccctaaaggtattcctccagaaaataatactcattattagccgcagttttgatcatcaccatgatgatgtttttgatgacccagaaagtacttcagctgcccccgaagccgaaccacaa

SEQ ID NO: 70828 - DNA, 849 bp, Prunus persica
  Intron number 1 from transcript ppa003915m (locus ppa00391 5m.g) derived from phytozome v7.0 (chr-ID scaffold_2; pos 12808543 to 12809391)
gcccggaatttccacgtacaacactgccacagtcggtaggtcattgcatactttttttattttttttattttaatttgccattcgaactcggtagtgaaaaaaaaatgcagtagatagcgatcacactatttgtggtgcggtggtgtgggcccgcacccacgtaattgtggaggatgggtgcgtgcagtacatgctggaacacactcttatgttgcggtccatctaagcaattgtaatttgtaaacgtaaagaatggtgggaaacactttcatgtgtttctgaagtaaaatgaactcattctttgagacatggaagtatttagtcggaatgggaagagagagagagtttattcaattaatcttgttaggtatgggtgcttaggataatggctggctagtactaagctaggggatttgagaggtattatggcattaagattttcaggtttattcaaaggcttagcttaagattccactacttgtcgtatttggtttggtattgctgtcgcacatgactctcaagacaccgagagagtcatgatgatattgccaaggaacatttttatcagaatatttgtgtgtcttgttttgagcaattagcaataattttgtcccaagacaaaacagagaaatgtgtttcattcagtttggcacttgttattattttgattctcatgttttctttctggtttgcatttttccacaacttcacccacgttttgtaggaaataaatgtgacatgaaagcaacaatttttccttgagctttttcctgttatgcttgatagtttcctgagcaagtgaggatgctaattgtttcttaatacttattatgcaggagttcttggtg

SEQ ID NO: 70829 - DNA, 535 bp, Prunus persica
  Intron number 1 from transcript ppa008857m (locus ppa00885 7m.g) derived from phytozome v7.0 (chr-ID scaffold_8; pos 17779541 to 17780075)
gttgctgctctggctcagccttcaacgttcacttggtgggtcttgttttcttgaattgttattaccttttcaatgcttgcatgtcgaattcttggggaattcagcactaggattctgtttttgttgtttcttgcaagtccaagttggattattttatatatatggatagagaaatattctttttttgctgggcaaggagttctgagggattaactttataaaaatactatttttggatacccttttgtatatgttaatgctgtatcattttctataatccatcatttcatttaactctcaatttctgaagctatacctgtgtggttttcaaaacataaaagttaggagctgggactgcttgcatgtgtttgattttaggcaccagagggactccgggtacctagtttttctacttgaagattttttttcagtttgttcagcagattacatgccaaacagactgtattttctcaagttttacatcagctcagcaatgtattaattcaaagttaatacagggtatctaaggatttat

SEQ ID NO: 70830 - DNA, 842 bp, Prunus persica
  Intron number 3 from transcript ppa003943m (locus ppa00394 3m.g) derived from phytozome v7.0 (chr-ID scaffold_6; pos 27324941 to 27325782 reverse strand)
ctgggtgcgtgttctgtcccgtttatatatttgtctgacaagtccatgcgataatgtgatggttagttagtccctgatatatagttgatgattgttttgcttttactatatctgtgcaatcctcagcacaagtgtttctatttagtaggtgtgcatattactatgccattttttttgtttgcagcttcaaaagcattaagttcataggatcttagtttatataaagcaaaaaacggattagtagtagcttagagtactagtagtaaaagaaactattctggtttatgaaagtctcaagatccaattatttttaaaaaattatatcagtagttgtttataatcatataaagaaaaagcatcagcatatgctctgtatacatttacaagtgttactatatggatgtctcaaggactcaaaattgttttagacttacaaattaaaccgtacttgtattgtgcatccagtgtcaggcctggataggcgtactgtccaatgggtttcagctccaacatatccataatcaaggaatattaataactatgtcattatttagttattccatttaaataagcatagaaatttgataatcggaggctttttatttatttatataaatgtgtagtgtactgaggctacacaagattatttatttccatcctgcaagcagaactccaattttcttgtttctgttgaagtttccatttgccattgccctagttactctcatattggtcactaatcaacaagacttgtcttcttctctgagcttatataattcatgttttggtctttgctatgtgtatcaggtttcaggtgaaaaagaagcagttctttgtaaact

SEQ ID NO: 70831 - DNA, 384 bp, Prunus persica
  Intron number 1 from transcript ppa003943m (locus ppa00394 3m.g) derived from phytozome v7.0 (chr-ID scaffold_6; pos 27326346 to 27326729 reverse strand)
ttcttcgaaccttcttggtaagcattttgtttatgaatggttggaaaatgagattctttatttatttaatttttatgtttttcgtttcgttgctgagaaaactgagaagaatgaaggaaagtcagctgtttgtcgtttgaattctaaaacattcaaaaagtggttatttccctacattttctcaattctcagcaacctaacgttgcttttttaacgtttagcattttgtatgtgtagatgcatgtaacatattcttcaaagcttctcttttcgttttctcattttgtcttccaaattttgcttttgaaaactcaaaatatgcttcccagctgggctgatagaagatgcgtgctttttcgttttaatgcagagttcataaggttc

SEQ ID NO: 70832 - DNA, 840 bp, Prunus persica
  Intron number 1 from transcript ppa003013m (locus ppa00301 3m.g) derived from phytozome v7.0 (chr-ID scaffold_8; pos 327483 to 328322 reverse strand)
ctgagtccgatatcgattctttactccctcccaaggtcgtctttcaattcaagattttgtatgttgtttctccattaattgggtaatgggattgcttggcatttctcatttcgaaatgggttcagtaggtttctgggtttttctgcttcctcgagttttagtgctgccttgatgtatatatcttgttactttcgaaaaatttgaatacttccaatgattggtaaatgaattctgggtttgttttttaagcgtagttgaaagcggggttaaggtttttgtttaatcttaaacacttatgatgagtttggataatctattattcctgttcggattagtaggatttatttatttatcccatgtagtagtgtagcattttagataggagccatttcccttgtttaccagaatgttagtattggcctaatcctattctagttttgaattttaaaattttcacgaaatgcactttggtatgcatttcgattttcaaaattagcctaatcctattctagttgagggtttagtagacttctttttccattgttttggttgtcatttgtactggtgccctgagttcaaattactgcattctgactaaaattttgcacctagtttttgccaattgcagtgagtgattgtactaataaccagaatgcaattattcttaagttagtgagttgataatgaaacatccagtacgaattacaaaagaaataagtgtggggaagttttgatattagatttattttggataaaatagcttcattactgacaactgcacctttttatgaaagtaatcttctaggtggagatagcagttgcaaaatttcaaaatcgagt

SEQ ID NO: 70833 - DNA, 844 bp, Prunus persica
  Intron number 2 from transcript ppa017791m (locus ppa01779 1m.g) derived from phytozome v7.0 (chr-ID scaffold_1; pos 2170907 to 2171750)
aggagttttcagcagagctggaaattgaaaccaaggtctctctctctctctccctcacaaaagtattacaattatttttttctggttcttttcttcaaatgctagcaaggcttgataaattagagagttcaaatcatttgtcccctgtcatcaagataaaagaaaaaaggaacaaatttgctcttcaaaattggaataaggttgctaaaagacattgccttcttgcttctcatgagctgtcttccttgcatattttcaacatttcagctctattaattgatttgatttgttttttcttatttagaagttaaaattagatttgagaaaaagaaaggaggttacataattgcccatttaatcacaaaagtattatatgtgtagttaagggataaaattaaacatacatggagtcatgtatatgcctaacataacttgaaattcgactctcgaactctccacgtttctctaatttcaaccacatgtcactctcactatttaccaatcaaggttgaatagtaaacccaaaatccccaaatatttatcacatatgatatgataccgagttcattattttattttattttggagtgacacaccaccttccgtttcttggccaacaatgacactgacacctacgtctaaaagctttatgcatggaaatagataggaagatatcaatagaaaagggcagtcttattcccaaattgaaatatagcaaaatgcacacgtggtctttctcaccagttacccctcgcggcctttttatatataattctgaacttcctctattttattgtacttgttgaaagattggggccgcggagatagaagaggccttgcaaga

SEQ ID NO: 70834 - DNA, 809 bp, Prunus persica
  Intron number 1 from transcript ppa005782m (locus ppa00578 2m.g) derived from phytozome v7.0 (chr-ID scaffold_5; pos 13446189 to 13446997 reverse strand)
tggtcagaacttacaagacctggaaaggcagcaatgtgagctaaattcttacttgggttttaatctaaagtatcgtttatgttagaaatatgtttgctttttcttgattttgctcacttttgtgatgtcttggtcttacccagttgctgaaattgaaagggttttgtttttctgtttggtttgattgaaatatggtagcttttctaatttggaagatgctgaaatatacagaattgagttgattgatttggtgtgtgattgcttttagaggatgggatggcaattggttttgtgattgactctgattagctttagttattgcttggaacacttgggattggggccaattctatttttcagctttgaatttagatcactgctttggcgttggcaaccatttaattctccattttagactccctttcatcatcaatctcttttactggggcatttgattctaggtgtgtaaatcaattatctagctatctttttccttttccccctaaaacctcttaaataccccaatttaccttttagccatacaatccggagaacgctaatttatgcaaattgaccatggtgcagcataaagggaggataacctttcttgtggatttcccccactttttaatatattatgattttgtttgtgattacatctcaaaagcttttcttcttgtttctctttcttttcttattagtggcagcatatgcgttcttttgctaatgcaattatgtttactcaagcacattgttggctgttccattctgcagagatttttacttggtggaaggcttatattcggacc

SEQ ID NO: 70835 - DNA, 929 bp, Prunus persica
  Intron number 2 from transcript ppb015283m (locus ppb01528 3m.g) derived from phytozome v7.0 (chr-ID scaffold_14; pos 190934 to 191862 reverse strand)
cgagtaagctcaatttctctttgagaaaacatccaaattattatctttgagacatgagagactgagagaggaagaacttggaaccttaaatgtaaaccgaaaatgaatgaaagcgacaaatttatagaataaatttttaaaaccaacggcggtccttacaaaaaaaccgccgtttaaattgtaaaatcaacgtcggtatgatcgacgtatattacagaaatccacgtcgttaaattaataaaaacgacgtgttaaataatataccatgacgcgagttattacttatgtactttaatttttgagtttactacgacggtacctacaaactactgtcgtatttatttaccacgtccgaagttaaatgtaccgtcgtattttgtaatttatacgtcgtagttatatgtaaccgccatattatttttttgaaatggttttatatgtaagcaacttttcgtctacttgacttacacatttgttgtttttatattcttattttatttaaatctgtcatccaaaaaagaaactttacatattgcagaatattaatttccttcgttttaaatttcctccggaaaaaaaactctatttataacgcactgtaattgaaaaataaactgaaaggtcacgggaaaaaaaattctattcataatttaaaaattaaaatccacgtcggttatattaaacctaacgacgttaaatgaaatgattccacgtcgaatgaaaaatattgcgtcgttttagttaaaaacgacgtagttaaatgtaaccgccgtattatttttttgaaatggttttatatgtaagcaacttttcgacttacacatgcactgtttccaaatccgattaaaaatttcaatctcccagagaaaccttttcgtcttttttccttgtcagagcattgtcagagtttctcatcgtcttcctctcgt

SEQ ID NO: 70836 - DNA, 677 bp, Prunus persica
  Intron number 1 from transcript ppa007939m (locus ppa00793 9m.g) derived from phytozome v7.0 (chr-ID scaffold_4; pos 26001078 to 26001754 reverse strand)
ggtcataaccaggtacattcagctggtcagttgtgcaatgcacacctttttatactgatttattgccatggttcttcattagtttacttgttagtttttctgttttttttttttttaaaattgaaaaatttcttggtcttcttcagttttgcatttctggggtttattgtaattgtttcaatttcaatgaataacatacttatataccacgcaatcaatgttttctaaatgtactaacattgcaatttttctcttctgagtaatgtgtggtgcagctacatgtgtagctggaggtcagcctgagctaagcttaactttagtttagatgcgcttctgctcaaatttggtttcacatggcaacattttttattagattttgaagtttatatattcatccatataaatacataacacacacacacacacacagagacagagtaatacgtatcatatgagtccgttgactgattagcctcattgttaataattctgagtagatgcaaatttatccatttgttttttgtttttctcttcatttaatggttgcaagttgcaacgattctgtacttatttctttctatgatggtgttactgttatagttctttctacttctaatagtctgaatttactgttgctagcaggagtctcatccagaatcccattttagagttccgtc

SEQ ID NO: 70837 - DNA, 887 bp, Prunus persica
  Intron number 1 from transcript ppa024290m (locus ppa02429 0m.g) derived from phytozome v7.0 (chr-ID scaffold_2; pos 25030347 to 25031233 reverse strand)
tttaatgttattttttccaagctaaaactttaaagctgcagattctgttctgttctgaaattcttttcaaagtgttaaagctgatgcagagttctgttatgttctgtacaaaccttgaagctagacagaacaacaaaagctactgatgagcttcagagcttatttgagacatggacttgaccttgatgtgtataactcataaatacctttctctttgttaaaacaaaatcaccaatcaagtaaaacagagacatgcatgttattattatgttaatgcccatcaaatgcgaagcattggaaattaacaaattaatcaagtagtcttggaccacttggtggttttgattaagtgtgtgaggtcctacatgccatgccaatgccatatacaaatgggggataaaatgatggttttgattagtgtcctccatcattccttcctgtggagcgtgtagttttggcaagtggaaagaaattgaaaatgcacagtggactggactgtgtctgtgttattaaagtgacacaggagagagagagacagagagcaggagcaagaggattagcttcggggtttgagctagctagcacaaaatcacgccttcccattccacgcgtgaaccctctttctcattctacctctccaacattattctcaaaacccaatatgaatatataagtcagaagccctctcctctctataggtctcttgctaccttcattgtatttgtattcatcttgaagctaccagaagcatgtctgtaagtttctctttccctctcttattatcttgcacaaacacacaaagcactcactgtggcagtaagaaaatatattgacaatgtggagattttgcagattgtggaggtgagagttccaaaccttgattgtga

SEQ ID NO: 70838 - DNA, 655 bp, Prunus persica
  Intron number 1 from transcript ppa024651m (locus ppa02465 1m.g) derived from phytozome v7.0 (chr-ID scaffold_2; pos 3549874 to 3550528 reverse strand)
agatactctgacaaggaaaaaagacaaaaagttttctctgggagattgaaatttttaatcgggtttggaaacagtgcatgtgtaagtcaggtagacgaaaagttgcttacatataaaaccatttcaaaaaaataatacggcggttacatataactacgacgtataaattacaaaatacgacggtacatttaacttcggacgtggtaaataaatacgacagtagtgttgtaggtaccgtcgtagtaaactcaaaaattaaagtacataagtaataactcgcgtcatggtagattatttaacacgtcgtttttattaatgtaccgacgtggatttctgtaatatacgtcggtcataccaacgttgattttacaatttaaacggcggtttttttgtaaggactgccgttggttttaaaaatttattctataaatttgtcgctttcattcattttcggtttacatttagggttccaagttcttcctctctcagagacactgtctctcacatctcaaagacaataatttggatgtctttctcaaagagaaattgagcttactcgcatcaaatctatgtccacaagaagaagcttgtcaactagccttctcacttccttgatcaagcctgataggacacttagtgcttctgaatactcctt

SEQ ID NO: 70839 - DNA, 771 bp, Prunus persica
  Intron number 1 from transcript ppa024907m (locus ppa02490 7m.g) derived from phytozome v7.0 (chr-ID scaffold_6; pos 27861869 to 27862639)
aattgggctgttctggtctgcacctctcgattctggtaattcaaactttgttttgctcttttcaacttgtcttttttctatttctgtgtgaaatagatatcgcccaagttataatttccgatagccttctaaaagtttctttacttttatcttttactaatttaattttttgataaaaattcgggtgtgtttgatatgattattagtttgcttactttgtggatcgtatccatccatgagcactttctagtttatttgctcagttttttaaccatgcttggcaacaatgcaaaagagaagttggaattacgtactgtatgaaccataaccatttttctagatgtggatgcatgaatgtacactaattcatcttcggctttggtataggtttaaacttgtgaaatggccatctactttttcagcgtttcatattttcaatgctgggggagttgaatagagctgtctctatcacatattcagtcttcttttagagagaaactacagttctttcaccttgcttggctctcttgcattcagtactttaatttaaacattattgaagcattaaaggacactaagtaaaaggaagtcttcctattttcatcttaagggttcattgaaagaatcaatatatatcactgaattcttgtaatcattgtaatgagctagtttgaagaatcttgagctacctatttcaatctctcatagttctacaatatcgcaatttgattaacctatcccaatgttgtcttcaggtttaattatcgacac

SEQ ID NO: 70840 - DNA, 834 bp, Prunus persica
  Intron number 1 from transcript ppa001507m (locus ppa00150 7m.g) derived from phytozome v7.0 (chr-ID scaffold_8; pos 10378764 to 10379597)
tgttggagtcggtgacttattttgaaagctataaggtaccctctaacatccattgtataattcgaagtttcaaactttaagctccactcattatttggtatttttcttagattagtgtttccatttctttgctttcttgagacttgagttaccacactaagtcccatctgatttgtggataaggctgattgagtttcttttctcaaaaaaggaaaaagaaaaagcactaatagaaaaacataattttttcatgtcagtgttactaagttaagtttcttgatgaattcaagttatttgtagcatatttggtatgtatttgtgagcgcattgttcgacttcagctcatatatttggagctaaatacttctttttttggattgcccaagaagatttgaaaaccgtacgtaacttttcagtcttgttacttatcctatttattacatgtctaccaaatgatgaactaaagaatgtttttttccttaaggtgaccacagggaacaattaaaagcagtttggaaaaattgacagttagtttggacttcaaatgctgattaatttgtaaaattattctgtcatttatttgttaaaactttcgccaatttttccaaataatatgtcaaagttttcaatccacaacaggaaatcaagaatccaaggccattaagttttccatgcttctttatacttcattttgatgttggagtcaactagtaatttgaaactgttctatgttcacatccttgttagagaactaaatggtggtagcactagtctatatcttttgctctcttccttgcagggatacaacactatcaaacaaaagagcccatttat

SEQ ID NO: 70841 - DNA, 523 bp, Prunus persica
  Intron number 1 from transcript ppa025403m (locus ppa02540 3m.g) derived from phytozome v7.0 (chr-ID scaffold_3; pos 14551260 to 14551782)
gttgcgctcacctccctcggccaggtctatacttggtcagtacaatagtaaagactaggcatttcttgcatttcatcacatgttgagtcgcattacattttgttgattgcaatagttgggttctcttgttttggtttttttatctgcacaaacatttatgcttttttcttcttggaagaagaatagcaatatggttgcaatgagcagattccgtccatagcttgtaaagtttgtatcaagggtaatagtttctagtctcgactatgtgcaattcaaggtggtgtttgaggaagaactggcccaattacatttgcttgtcatgtgttgaaagaccgatttgctattttaactctccaacccacatcaattttaccacagtccgcttcttctatccatttgatataattattgttttcatgtccactgcaaatcttttatgttcattgaccatattgctctattgattcatgcttttggttggataacttcatggttgtcgttaaacatgaagcttgcaggggtt

SEQ ID NO: 70842 - DNA, 707 bp, Prunus persica
  Intron number 1 from transcript ppa008737m (locus ppa00873 7m.g) derived from phytozome v7.0 (chr-ID scaffold_1; pos 33004230 to 33004936 reverse strand)
gtttcagtgattgccaggctcagctcggctcttcggtaaattttacttatttttctccgtttgtcattttaatggggttttgaatgcgttcgaattgaaatgtataaacttttgttctttgaattctgttagatatgcgatcctcctgttagcgtgtacaaaggggagtctatgcccaagaacactgaagaatatcttgtttctcgtggacttaagaatgccatttacactataagagctgaagatgtgaaagatgatctttttggcaagcttgtgcagtgcccggttgaagtaagttttcacttgtgagcttctgcaaagaaatttctttggaaactgttgggattttttttttataatgtgactgataatttcaaaagagaaaactatggccctgctgaggtttatggcatagcagttgattgctctttcgtttgtagcttattcataggctgggtgcattagtaagataacataattataatttatacgcgaggcagaggcacttttatttttaaggttggagaatgtaatagagtacgaccccaaacttatctgggcagctttctcctaattaatttgtttctccttccttctgattgtaaggttgttgtctttgctgatcatgtttttacatggtgggtttatgatgttttttctttcacatatcaggacccgtgttcaaagggtgaaacatctgttaagga

SEQ ID NO: 70843 - DNA, 820 bp, Prunus persica
  Intron number 3 from transcript ppa006861m (locus ppa00686 1m.g) derived from phytozome v7.0 (chr-ID scaffold_7; pos 17819359 to 17820178)
gcgcgtaaagggattgatacaggtacttcagtacgcgtaaagggtttccatctccctgaaagcatgttctttatagtttcatcttaaattatacatgacagattttgtattcctgatattgacttgtttaatggttcaacaagaagattgaaatgactaagcagtttgtgattcttgggaagagaactgtggtccttaatagtacaaagtggtattaatatctcacatgtcaggaggctaagatgttggcttcatgtcgggtacttagacctttgagctagtagatagacttgtaggctaatttttgcttttacttgaagaataaagatgtcatgggtaattattaacattatccgtgagaacctggcctgagagtggtttaagcggtgataaattttgattttatcagggttcacttagattgacttagagctgctattattttaatatttcaatatagaaatgattgagcacatgcaggtgttaccagtgttcagcagattgattacattagcccttcagaaaaaagaagcacaatttgaactttgtagaacaatttttaatggaatagtgtggagatctctgattatttaggagaagtccctttaaaagagctatttatttaaggtttttaatgcatcaaatttattattcgaggtgaaatatttttaaacatttctttatttttggtgtttaatggatcaaaatttatgattcataattgaatgttttattgttattgataattgttgtttttaaagaaaaaggatatttgtcttttgcaggtttctagatcgattggtgacatatatctgaaaaa

SEQ ID NO: 70844 - DNA, 598 bp, Prunus persica
  Intron number 1 from transcript ppa012472m (locus ppa01247 2m.g) derived from phytozome v7.0 (chr-ID scaffold_5; pos 5959825 to 5960422)
caaaggtaggaactactctgtccatgtaatttccatgcacttgtgatttatcatctaaatgttattctaagtaacatatattacctgcagatgtatggtcctgtttatcaaatttaaatgttaatttgacaacatagttttcagagtctgaaaatgttagtattcattgcattcccgactgttcgggggttgggttgatatagggaagtattagggagcttagagtggtttgcatggttacatagggatgcaattttatatgaagctccacaaatgagattgacactgaggatgaatcaatttctttggcagtcaggttgtgtggtcgtttctttactccttgtggtttgaatgtgtcctgaatgatgtcttctaattatgttcatatgtatgggattttctagttcaccaatgtcaaaagaaattatctaacacttcattttgatactgattgtgaaattgcattgctgtgtcggaagaagaagtgccatttaggactaagcctgctttacattatgtctgtttaaggaaacatcgtgtgcagctcaattccctgacaaccatttcttttctagatttttcgattttgtagatccaa

SEQ ID NO: 70845 - DNA, 929 bp, Prunus persica
  Intron number 2 from transcript ppa011768m (locus ppa01176 8m.g) derived from phytozome v7.0 (chr-ID scaffold_4; pos 8829884 to 8830812 reverse strand)
actcgtaaaaagggaacagagagggctttcactgggtatattatatgcttctttaatctggaatttgatgtttgttattgcagaagatccactatctttccaactttgttagctgaaattttgaacttgaaatttaattcatttttgggagcttttgaggacctactaggaagtttcgaagtaaaattttcatcttgcaagttatgttaggctcttcagacctaaagaggcctttggtaatagagggatgctgattagttctttgttttctctgcgatcttataccccttgaatcttgtataataggaaaatatctatataggatgtgggaaaattttcttgcagttcatgcattctagttatatggcatgcacattttccgctagctcagaagtagaattactagccatttttttcggtttctcgaatggaggagggcctaagcctgaccaaacaaagacaattattagcctttctttacaaacaattgaagaatggtcagtaattggctttgtttgcataataataagtcagaaggactttctaaccatgtcatgaggcaaacatgagcaagtttctgtatgcattttatagggttggaatctggcttccgacttaggaaaaggctgaggacgggagtacttaggatagtatcatagtatacagcataaaggatggatttttctcttttcagccttgatccttgctcgcccgcaaatatctttttaccaattgcaagcttgaatacatggtggaacgaaaaatgttgctcatgcttacttcccacacaagcacaaccaaacaactgatgttgatggagacagttagctacttgcgttcctcttatcaaatttcacctgttattcatgttggcctttttatcttaatcttcagggaatactggaataccaaaactcaaggaacttacc

SEQ ID NO: 70846 - DNA, 456 bp, Prunus persica
  Intron number 1 from transcript ppa005933m (locus ppa00593 3m.g) derived from phytozome v7.0 (chr-ID scaffold_1; pos 31944666 to 31945121)
ttcacgcccattaatcgtaatctctaccattccaggtgacgtctactctctttatcaacaatttttctttcccttattctattttttactgtgttccgatctttttgcacttcccatatgtcttttttgcctgaattaatctggctcctctgagttgcgctgaattggaagtaacagattcattgatttttctttgaatcttaaaatgggttttctgtttatttctttcatttcttgttttcttcgtggaaggaattagggctgatactgactgactctgtggttggctgctcagaaattgtagggaactgaatgcctgaatcttgttctggctattcactaacatttcatatctttggtttacttgatgtcaacttgttatgaatttatcagtttatttaaccttgaaaacatcataatcaaactttccttttattggtctgcagtggggatttg

SEQ ID NO: 70847 - DNA, 289 bp, Prunus persica
  Intron number 3 from transcript ppa005933m (locus ppa00593 3m.g) derived from phytozome v7.0 (chr-ID scaffold_1; pos 31945328 to 31945616)
acaggccaaagtttcggatccttcttgtaagtttttaatgtatttttatgcgttggattcctattaattagattttgcattcagggttggctgtttataggcgttaatgttctttgatttttcaagttaaaccaaggcagggatttccatgtacttcaacactatatcaaactgtagtaatgaattacagaatatttataatctgttttttagtgtatagataatctcagattggtaatggctggtgtttttgacagatgattccttgtcttccagagttttggacagc

SEQ ID NO: 70848 - DNA, 769 bp, Prunus persica
  Intron number 1 from transcript ppa002220m (locus ppa00222 0m.g) derived from phytozome v7.0 (chr-ID scaffold_6; pos 2978640 to 2979408)
tctttctccgtgagctcataagtaacgcctccgatgtacgtattttcaccttttattcttatcccgatttatcatttcagtattttctagtgtttattgtatgaatctttgtgttttgcttgtgaacgttttaaattcaacgatttagtttgtatggcttaggttagagatctgaacatgttaatttttatgctggggtttatgctcgttttaatatgggatgaaactaatttatttcttctttagtcgttacttttttagttaaaagtttgagaacaggattaggggtttttgatttagttgttctgttatggcttaaaaacactgtggcttatctgcttatggatttctgggttttgatttcacattagggttttgattagttctttgggtatttgtttcattttaaatgataatgatagtgacattgaatgtcaattgagtatttgagtttctcatactatcagaagtttgctatccctgtttgccctttttattctcttttagtatgtgttaaaagtttgtaagttgaatataataaggttttaaaaaaatatttaagttgcacgcatgattttgaaatcgctatctaaattgtctttagtgttcctggctcctggtgaattgatgttgaaaaactatgtagcgaattgaatttcctttagcttagttctaataaattgtcccatatatcttttttcacgtttactcatcgtgtgatgctctgtttgtaggctcttgacaagattagatttgagagtttgactga

SEQ ID NO: 70849 - DNA, 494 bp, Prunus persica
  Intron number 1 from transcript ppa013628m (locus ppa01362 8m.g) derived from phytozome v7.0 (chr-ID scaffold_1; pos 40124340 to 40124833 reverse strand)
ccatctctgtcatccccacctgctcttacgtctctgtcagtaaactaccttctctctctctctctctctctctctctctctctctctgggtttctctcaaaatttgatctttatggattaactttgatttttattttttttgggttttctaatctgattcatttctgggtcctattggtgatttttggccctgtttgtttccattcactaagacttttttctccagaactggaaatggtttgtttctgccttttgtgtgtgcgtgcatgctgtagtttgcctcattggcctatgagactgtttttatctattgttcattttgatgattaattcatagggaaaacaaatgtttttctggagactgttgaaaaaatactctctggttttgggtcttcttctcttttgttttctattttgggttgacataatttctttgttttcttttttctgtgttggcaggacacttttctcccgcggaacccttcctggaatac

SEQ ID NO: 70850 - DNA, 830 bp, Prunus persica
  Intron number 1 from transcript ppa021269m (locus ppa02126 9m.g) derived from phytozome v7.0 (chr-ID scaffold_6; pos 22354212 to 22355041 reverse strand)
tcctccacgctccaaagcccaggaggtaaaggctacgctctcacacacgctttgaaatttcttcttctctcaacgtgtctggtaaccctaattcttcgcattttctctaacaaattatatgtaattagactctctctaacaatccttcgtcttcttgctgctgatacttcggaacagagagtgactcagtcacgtcgcactcaaattcttcttttcaattcctctcgaagatcgattatccattgcttttgtttctcgaatttaatctttcagaattttaaactctgcttcaggattggttagtcttgaattttgatgcggttcaggattggctagtcttgaattttgatgaggttatgtggtaattgaggggaataagggttagggttcgtccaaatgcgtaatgtgcatggttgatcttcattttttgcttcgggtgtgtaatgtggcggaaggtttagaattttgagttggttgtaaagaaaatgagagatatgggcagtagaattgcaactctttttgaagcatgttgttgtccttgttgagtaagcgctcgttggaggctgattccaggtctgtagagttcagagacttattgtgtatttggttcttgtccggtttcttaattcacaatgccgggcaactgcaaccttcatatttgtttgtagatgttaaatgcacggcacatttgttttttctggcactgatttgacatcaagatgctgcgttagattttttttgtcatggaatcttagattttttatataaaagttttgttatagtttccatttaaaagattcatggagaaattgctgtcaacagggacgcct

SEQ ID NO: 70851 - DNA, 431 bp, Prunus persica
  Intron number 2 from transcript ppa018368m (locus ppa01836 8m.g) derived from phytozome v7.0 (chr-ID scaffold_7; pos 9937959 to 9938389)
ttcaagtttaggttaaaaaaatactataagatagggctgtgaaaaagattttgagatccttgcctcaacggtttcaaccaaagatcacggccattgaagagattcgtgacttgaacaccttgaaagttcaggaactcatagggtccttacaaacttatgagatgaaacatctaactcctaaaaatagcaagtttaaagtgttgcttttaaagttgtgaatgaagaagatgatgggcattcaaatgaggattgcaatgatgaggaattggcgattctcacaagactattcatgaactttctcaagaatcaagactcaaggaatcgagattcaaagaatagttcagatataaattcaaaaaataattttattgactctattgatggtgtgtctaaatctcacaggtcaaatgaacgaaagaactgaaaagaaa

SEQ ID NO: 70852 - DNA, 743 bp, Prunus persica
  Intron number 3 from transcript ppa021105m (locus ppa02110 5m.g) derived from phytozome v7.0 (chr-ID scaffold_4; pos 15726032 to 15726774)
attctcgctgacaaagcgagaactaaaatttgcaagtaagttggggaatcgacttattgtattcttgttgatgaagcaatagatacatctaagggcaagtgtagcgcacaagccctgccaaggcaacaggcccccggccagcccaaatccaactccagcgtaggaaaatgagcccaagcaagccctgggtcccaccagcccgggcaagccaacgggcagatcttgcctgggcttttgtccgaaggtgctgacgtcagcgtgacgtcaccattgacaggccccaatgggaatatgccacgtggtgcttcctggatgctccgatgcaattttttccagaaatcctacagccttgatttttttggctaaaacaattgcaaaaaaattcgaaaaaaatactcaaaaattctgaattttttttataaatacctaacaattttattcactttccacaccaaatcttcagacaaacccatctccttccaatattttcactttccacaccaaaatttctactacaaaatttcatatgtgcaaaaataaatatgaccacttacatcaaagccggagggtcgtggccaaatgttcgaagaggtcaaaatcttggcaacgagttaaaaaaaattaatttccgttttattcaattcaatgtctttttatatatatatatatttttttttcttgtatttccaatttcatttttttaatagattagtcaaggcaaaacaaaaatcctcaagtgaaca

SEQ ID NO: 70853 - DNA, 660 bp, Prunus persica
  Intron number 1 from transcript ppa013318m (locus ppa01331 8m.g) derived from phytozome v7.0 (chr-ID scaffold_1; pos 45521811 to 45522470 reverse strand)
tggtggaggtcttgagccccgagcagaccgtgaaggttttggcggcagttgctcagtttcaactcggaattagaaggttggggttgcagagagactctcagcagcagagctaacgttggcattttggcatttggatggatcatatcatcaaagctttaaataatttcttagtgtgcggggccttgattgagtttgagaaatggcaaattgtattttaggcccaactggcctttttgtattttcctttcgttttttatttgcttttttcttcttttgttttctacttccctgaataagtagattcagttcctctagtgtgttttgcaaaacatcatctactgggattttaagtatgatatgttatgttgttatacgttaatttcaaggttgacatgttatgttgttagacgttaacttcaagtctgaaatataatgttatagaagctaactttaaatttaatatttggtttgagctgagcgtgagcttgagtaatattattagagttgagtttgagaactttggcatttggcttaactcgattcatttatatctttaaatttggcatgttatgttatcaaatgttaaatttatagttgagtaaatgaaaacgtgtagtaatttcttttatagataaacaaaacaggccactctcttgaaga

SEQ ID NO: 70854 - DNA, 888 bp, Prunus persica
  Intron number 1 from transcript ppa002867m (locus ppa00286 7m.g) derived from phytozome v7.0 (chr-ID scaffold_7; pos 22623215 to 22624102 reverse strand)
gcccaaaggtaaggcttaatgttttcagtcttatatggggaaatatttatttattttattatctttctgagaagattgaatttgatttgacatcatgtatggttctgctatatcttctgtagttaataagtgatcatctatcaatatttgaaaccgtgtgttaattttttggtactgttgatacacatgctaaatttgtagggatgccacttaatatgtactgagagctattgtttttgccatctatttgagaaagtagttttcaattttttttctttgaccttttgcgtttgttgcgcagacttgtataacgacaaatattgctgtgtttttgcatgggtgtctgtactctgcatgggtccttaaagactacagaagtcttttccagaattgaagatgaagactttataactaataaggaggactaggtagattaggatgcattatctttcttactagtaggataaaattactttatttattgaagtttgtgattgaagtgtatagttctagttcgtttatgccttgctcttattcttaaattcttaatgaagtgagcaatttgttaagcagaaaaagtgcatatattcagtttttgtagttatcatattatagtcatttttatgtgccagttcatatgctttcagccaatctgtgtacgaacatacatgtagaaaacctgggagttgtgcaaaaggcaccacttgctatcaaaacttaagaatgcatagatttcgttctttgatgtcctttgattttcccttcttttatttgaatagtgtggtattttttattgtgtctgctgagcaccttgtcagtctttttccctttaatcctgtaattggtgtgcctttagcatcattgtttttttttttttttataggttgc

SEQ ID NO: 70855 - DNA, 642 bp, Prunus persica
  Intron number 1 from transcript ppa006791m (locus ppa00679 1m.g) derived from phytozome v7.0 (chr-ID scaffold_3; pos 20432396 to 20433037 reverse strand)
cgagttaggtaagttagtttggatagcgagttccaacttttaaagtttgaatctcctcccacaaattagattaatttagattacttcaactaagaaatttgtagatagagttcactcattttaagaactacatgtcttatacatataggtgagtttataaaaaattagcgagcgaaaaaagaagtgtgggaagttgcattatttcatctctctaagtaaaaatgcaacaagacttgctctttttctgagacacaaatactgcccagcacggtagaaaggaccatcttttgggttcggacatttgccaaaaggaaaaacagagtgttttccgacaagcacacggtacacgtgcttagcatgcataggaaaacattaggtgcacgatgcgaaaggacaaaagtctagaagggaagaacaaataaaaataaggaacgtttcgtcgcccccaccagataacaaagaaaagtttgagtaagagactgagattagtttgctttgcttattataaataaatgggaagagggctttgagttgcagacagcatagaggcttctctacttgtcttcagactttatatcactttaatttctgatttcttctaaggctttggtgaccaattttagcaggaaatccataaggaac

SEQ ID NO: 70856 - DNA, 901 bp, Prunus persica
  Intron number 2 from transcript ppa009049m (locus ppa00904 9m.g) derived from phytozome v7.0 (chr-ID scaffold_1; pos 41400052 to 41400952)
gtgacggacgaggaggtcgagagcttgaacaaacggtcagatctgcttcttcctgcttctgctttatgcttcttcttcacattttcttttctgggtgtttatttttcgaaatttggttctttgttttcgtttttgtggtcattataagtggactcatttgtggacctgcaacggatttttcttctcaaattcttatgattttgaaaaacaaaaatgaggttgcttttttgtttttgttggtcccaagttggttctagaaccctcttggtcttaaaatatattgcttttatttatttcttatatttggatattccattggaattttatttccagtaaattctccatttgttttataaaggaaatggattgttgaattgaagattgattaagtcaatgatctgtgatcgatttacctttatttggcctatgaatcctcagcaataattcggtccagaaaaaaagtcctcttcagaaataattcaattttttttttttgtattataaattttgcaaatttgacccgtgctttaataaatgagttaacattttgagttatgtatttataaattgaagagttgggtatttgttagttggcaggttttgttatttaggtaaaacgttagagttgtttttcttttgtgtgtgtgtgtgtgtgtgaaattagtcatgtggacaagtttaatttgttgtggtaaaggcttggatatttggtgtgtgtgtgtgaaattagtcatgtggacaagtttaatttgttgtggtaaaggcttggatatttgtagtgaaaataaacatgatgtggccatatgtaaagggctgtagttgtattaattgtgccgtttatctaagacctctaacattgttcactttcaaaatttccagcaaaccttgttcagggtataag

SEQ ID NO: 70857 - DNA, 940 bp, Prunus persica
  Intron number 1 from transcript ppa016792m (locus ppa01679 2m.g) derived from phytozome v7.0 (chr-ID scaffold_9; pos 670733 to 671672)
cactccttcgtttaacatcgattgctcccaggcaagtttttctgatctctcccttttgatacctctcttattccttcttccacttttctcatatgctctctctctgtctgcaacatttttcaaaggtaatttttcatgggtattgctttttctttgggtgttattgagaaatttcattgttagattgtttgttgggttgttattttctatctatcctctgtttggttgctggaaattttaggcaagaaaaagggaaaatcttccatttttgtgttttatgctgttatagattatataataattagtggcttcacttaagcggataatggaaagagaactaaaattttagctgcatgtgtcattttacatcaatttctcagcaaccaaatagtgtattagggtttgaatgtggattaagcacttcctatttcctctcttaattgtttgtttacaaaaattgcatcttttggttaaaaaaactgatattattcaagcttaacttgttagaacttgaaggcatacagttggcaactgcttgtttattttgcatgatggcccatgataagttagttttaagctgattttgagatttgatgtgatgaattaatattagcattaactactttggtaaatttgcttggttgtttggaggacatatgctgcagtaattgcaacagaattgggtttagtagatattctactggctcgagcattgctagatgataactaaggtttgtttgcttctaaatgaattgtgagttcattcagttgagattattatatttttgagaaagtatgagactcatcatatctacagtacctttagtttatttgagtatggttttaaatgcataaccattgcaactcatgcttgaagttgatcatgaagttttttatttatgtaggcttttgcaaagaaatacaaacttccacacacatt

SEQ ID NO: 70858 - DNA, 1002 bp, Prunus persica
  Intron number 1 from transcript ppa016979m (locus ppa01697 9m.g) derived from phytozome v7.0 (chr-ID scaffold_7; pos 13783491 to 13784492 reverse strand)
taacgtgtttagagaaggctgagctttctttgaaggttaagtctggaaaagagttcgacatcatatatgagattctctgcagcatgcctgaggttaaagttcttattctacacaaagagatcaccaaggtaattaaagagacgctactttcaagctcatgaattattttctatttttggaaaaagaattttatttgcaatttgtgatgaataatgctactcttaccacatttgtatatcacatctttataccatcttatgtggcagttgaggtggacagacacatcaattaaaattctttaatatttttttttcttttataatttattccagtatttgtttttctaattgccttaattaaaatacacgtcattgatttaattgatgtggcatataatatggacatgccacatcctgtattatagaaatgtgggataaaaatatagtaagtgtagcattactcttgttctgataccatgctaaaatataaaacctaatatgagaatatttgtttgtgggatttttctatgtattcttatccttgaaggatgtcatatttataatacaataaaactttaatgagcaagtaaataataaattcatatttctatttacactaggaaatcaggaattaaagtaaatcaattacaattataatataaattcttggtgtgaaaggaaagtaagtcaatagtccacaagtcacgccaacattacatacatggtatgcgttttttttattattccacatcttgcttgttttttgtccaaagatgaaattcttaatgatagttggttgtataatagcttgtttcacagcaggattaactgcattttatatgtttcgtatctatttttgaccaattaatgagttcaacttgattttggttgttttgattactattcttggaagatttttgggttctcttcatctttttctattttgggtttgccttttaacatcgcaggctctattaaaggaaggtcctataccaacactctt

SEQ ID NO: 70859 - DNA, 877 bp, Prunus persica
  Intron number 1 from transcript ppa009274m (locus ppa00927 4m.g) derived from phytozome v7.0 (chr-ID scaffold_7; pos 15597135 to 15598011)
atttctcaagcttcgtccgccagcttaacacctatgtgagtaattaatttctgttatttacctttttttgttataactaccgaactatgtctttgaggattatgcgactactctacaccaaacgaaatttagttttatttaccatcttaaattacgttggtttggttatttatttattttaaatttactgtttttacatttgcgccaatatatgttcaattttacatattagttacaaagatgagatcaaaactagaaattgataattttccatagagattcttgttctcttttttttattataaaaatagttggtgaagctttcttgtcaatttaaaaaaaaaaaaacgttgaaaataattgcaaatggtcaatacaatttgtttatttgcaactgggtattggttgagcctttccattttttgttggtgttgaaattgtgaccaggaataaactacaaataattatcaatccattaacggggaaactgcgactgagtaattttttagataagaacaaaaaattatggttgatttttgtgttatattaatcaaagatgacatcaattatgcaaaattattttatgtaaattgtaagatagtaggatctaaaagaaagagaaaaagaaatcatctcgtttatgtagttatattactgtagtattttataatttttctaaattatcggttgtgcaactcaataatataaaaaattgcaaacgtggcccatctgcctccatttttccaaatacgacggcggaaaatcgaagtttccaaattaatcaaatattccgtggacgtgttaaattttaattatcaattaactaagcgtgcgttttgcttcaattacagggctttcgaaagacggtgccggacca

SEQ ID NO: 70860 - DNA, 932 bp, Prunus persica
  Intron number 1 from transcript ppa002388m (locus ppa00238 8m.g) derived from phytozome v7.0 (chr-ID scaffold_1; pos 37372689 to 37373620)
acattttgtttgacaggtaattcaaatggtgcattgcttattcatggttttacagagttcttgttttgcattttcctgcatatgtgtgctttgttgcttgtgctttttatgcttttgggtcgattttgttgggccaatgtagctctgaaaagataagaattttgtttgttgagctggacctatgcgtgcaggagcaacagtcactgggaatttggaaggagtaatggatggaagaagaagtagagtcattatttgtggttgtagtttttgagcgtttgctatgctgtaaaatccatgtcgcggatgtatcatattttcattagatcattgaaggcttcaatcctgttacttgttatagttctttttctcaaaaaaaaaaaacaatttaattgatgggtaggggttcggatgatgtttttgtgtgaagaaatgagaaggatgatgccttcaatgggtttttgcactattatgcagggagagggaaggggttgtgaatgtgacctgtgttggaaggtgtggaaggcttaaaatgttaaatttataaaattgtaacaggggatggtggatgaacctttcttgagatatgaattaactcttctttcttgccacaggggttggcatatcatttatatgtttgtcatagctattgtctctttacagtagtaaagaacttgtactgaaaaaactcaatctgtcataccaagaaaaagtctctatctttgtttatgtgctatacaatgcttctagtatctagcctggagtgtatagttatgacgacaatgtgaataaagaacttagagatgtcttctcttgtttgtcttttgcatttgtttattacagaggcacttgatcgatgtgaataattctttgatcttcctctttttgccttcaaatttacagctcacatcggcgtactggtgaaggccttgata

SEQ ID NO: 70861 - DNA, 916 bp, Prunus persica
  Intron number 2 from transcript ppa012498m (locus ppa01249 8m.g) derived from phytozome v7.0 (chr-ID scaffold_4; pos 13844365 to 13845280 reverse strand)
tgttgtatgtaactcttaaccaggtcttgttcattctttttgtgtaggcatgcatgctcatgtttaaaggctttctgttgggatgtgaaatctcaacataatatcaaaattccctttacttgcttgttttaagcttgttacactctcgattgattagatatctggagttcttctatgtaatgtcatactctgaaacttcagttgtccgtttatgactgcacacagtcattcatcatacttccgtaaggggattaagccttgttcgttcatcatcaactttctgtttgtgattgtagtgtctatcaattatttagaatcatttatcttagttctgtacaacttaatcaactgcacttggacaaaaaaagcttatttagttgaagagaggaaaaaatacatcccaaaaaggttgacctttgacacatttgtgcaccatcaaatgaataatataaatgaaaaaatataatgaagccttttactggtattttcttatcgcttataatttaactatgtctacttcaaaatctaaatgcgctcagtagtttctttcccctgagaaaatatgagtctttcccttcataagatgatgtttgaacagttatatttgtagccttgaaacccttggtacataaattactctaggtgaaattgttaaggtaagtgacctcaaacaaagatgaaacatggaaaccacaatctcagctaattataatttaagaagatcatgactatatcctcagctttcaactttttgtgttacttatacttgataaaaagatgagaaatgataatttttttaatttttattacatcattctcagtttggtttccgttactgtccatagttttacaaaccatccatgatttctcatggagttgggttgcctgtatttaaaatgactgtttcttgcaggtc

SEQ ID NO: 70862 - DNA, 886 bp, Prunus persica
  Intron number 1 from transcript ppa011350m (locus ppa01135 0m.g) derived from phytozome v7.0 (chr-ID scaffold_4; pos 6199409 to 6200294 reverse strand)
tcaccagctcagaactcatactcgtcttctccaaggtacactctctctctttctctgtgtatatattttatgttatatacaatctataatgttcgattttggacgtgtgaatcagaaatggtagcttttgtgttttaatatcaaagtgtctatttttaatggagtttatatcgagctccgaaagtgggctcttctttgtttattagttttctttaccttctgtttgattgctcagaaaatggaatcagaaaattttaaccgaaacttcaaatgatcccttgcttcctgtctattctgtttttgattgctgaagacgaggcttagttgaagacaaagtctcaatcttgttattaaaagataccagaaaaacacaaagctgaagcgttttctatctcagaatccaaatgacgggattctgggattcaaaatttcgccccctactctcagaagtcagaaaccaaacattttttttcttcaattttaatgatttgataatttcttttgatataaatataaaatgatttgatggtcgaggaatgatagaaatttacttcacttgagatggataatgtattttgataggaaacgaactgatagttgaggaatgctagttttatttatttatttcaaagagtgtatttagtcaagctttctttttgttagcgtagtaatcttttcgttttattttttagatatccactctttcattctgtcaaacttcaatcgtttagcactaaaatgcctacgaattaactataacaaatgcatcaaacaggttgtgtgtggattccagcctcagataattgctaaagtgagtggcaaatgtgttcctcataggtcgatttccacttgttagagaacagactcttgtggcaaccttgaaaaa

SEQ ID NO: 70863 - DNA, 400 bp, Prunus persica
  Intron number 1 from transcript ppa012048m (locus ppa01204 8m.g) derived from phytozome v7.0 (chr-ID scaffold_1; pos 23816506 to 23816905)
acgtcaagaacattgctcaagccctaatttacaaggcaggtcccatttcttttgttttcaatagcttcgagtttgtgtttggtttccgagaatcggagggaaacggaagagagtaaaagttgaggtcttgtattgaatgccgattgaccggtcatctgtttggttgcttagaaaatttgatttttgttcgttcttatgaccagtagattttcctggaaagtggaatgtgcacttttttgttctttcaattttttttccttgattattaaaaaacaatgctccttggtgattaactagtctaccactgtcttggttacggatgatgagcttgatcaccatctgataatgattatatttgtttacagtctaagcaaaagcagaaaggagctcagcggctagt

SEQ ID NO: 70864 - DNA, 635 bp, Prunus persica
  Intron number 1 from transcript ppa009007m (locus ppa00900 7m.g) derived from phytozome v7.0 (chr-ID scaffold_8; pos 10925486 to 10926120)
ctgctggtatgaacccttccatcccctcaccttcttcttattttctttccaagattgaccatcttttcttcatctttacattaatattccaatatcttgtgaataaagacaaataaaaaacaaatttttttcttcttactgtaataatagcgttgttgagttgtaaaaaacaagtttttttattttttatattatatattatatattatatatttatttattttacaaatgatagtttaaattcaaacacaaaaaaaaaaaaaaaaaaaaaaaaccgatagtctaaatcattctaaagctcgctactctggacaactgactaaacttacatggtaccataccgttgtttggccggacaaaaaaaaaagtgcaccaccgacaacatgccaaattagaataacaaaggtgcagtttgatgagggaaggaaaagaaatgagtggcatgcgatcgttcctatgtttttggaccagtcaaatgtttgcttcacataggatataggaaaatcccgaccaaaactaatataaattttgttctttttgttttataatttaaaaatattgtcacttttatttgttaacttctgaatatatatgctgcagctcattacaagactgagatagacgttgggaacgca

SEQ ID NO: 70865 - DNA, 535 bp, Prunus persica
  Intron number 1 from transcript ppa006921m (locus ppa00692 1m.g) derived from phytozome v7.0 (chr-ID scaffold_1; pos 33491150 to 33491684 reverse strand)
tggctcgccatttttcctgaaggaactgattataagtactgcttattaccccccctctgcctttcttatcaatctatgcgcatgtattttcagattactatattgaatttatcatattcaagattatttgacctccagtgcttctttttctaacttcagcaaaagaaaatccatattgtttgaacttagactgttagtttcacaattttgacagttgacaatgagttcgagaatcctttctcatgtttatgttctgcaatgagatttttttagaatcctattctctgaaacccacagtattgcctaattttgctgcacttctctgcactgagttacctttggaccccatttctacattcaccagtcacctttctaacattggtttcatctcatactgtcataaggcatattcccaacttgcaaatttttatggtgcattcagaatattcttcgttattcattttaagagattaatgtatgtagatatttagttgttttgttttttacccccttgttttgtatacagtgaagaaaa

SEQ ID NO: 70866 - DNA, 733 bp, Prunus persica
  Intron number 1 from transcript ppa022574m (locus ppa02257 4m.g) derived from phytozome v7.0 (chr-ID scaffold_7; pos 11273520 to 11274252)
agtaagtagattattgtataatagtttatgattataagagagataaaaatcatgattcatatttgatatagatatgattaattgatttagttgcatttgtatgagcattactctgttgggatgagaccatgaattttgcacgttgtttgttgagtgtgttttaaggcatgggtttattagacttgtgggtttttttcaaatccttttttttttttttgggtaagaaaagtttggttgattgtgttttttttttgggtgataattattttatagtttattgcaataaatccttaaaaatattacacgggtttctttgtaagaaaagtttgattcgcagattaatcgttttttttcttccgaacaatagaggacggattaattttttgttgagtatgataattatgttaaaggttttttacagaaaaaaaaaaaaaaaaccccccataaaatgattcatgggaaaatttaattcccggatttgtttgttgaatgtgatatattattaattaaaaaacggttttattacaaagaaacccaaaaaaataatttatgggtttggtaagagaagtttgatcccggatttgtttgttaactcttcctataacagaagttcgacccttatgtctccttcccatcttttaagatatgggaaaatttgttctatatgtggttgcatgtatattcatgtatgtatggttgatgagtttgatatggggcgcaggagatttggttc

SEQ ID NO: 70867 - DNA, 453 bp, Prunus persica
  Intron number 2 from transcript ppa011322m (locus ppa01132 2m.g) derived from phytozome v7.0 (chr-ID scaffold_8; pos 20773867 to 20774319)
agtggttcgactacacccagtctctgcgccgagaggtttctgctttctttttcttttttcctttcccttttctacaagtttcgttaatatgatgatgattgggatttctactgggttttctctgtcgacctctgtctgtttatagggataaagatttctgggtttcgtttatttcagcaaaagaaacttcattgtttggagtataagattagttcgtgtgtaaagttaggaactttcatattgtttgacgcttttattgtttcggattaaaaggataagttgtttatagaaacaaatggatctttcttcagaacaaactgttattttgttcaaaactggatttgttttctcctttttgtttttgaattttgggtcgttgaaggaattttgatgattggatttttttggtggtgaaaagggattcttggacgatcagtttgcacagctaaagaa

SEQ ID NO: 70868 - DNA, 526 bp, Prunus persica
  Intron number 1 from transcript ppa002317m (locus ppa00231 7m.g) derived from phytozome v7.0 (chr-ID scaffold_1; pos 4898699 to 4899224 reverse strand)
aggtatgcaagaatcttgcccatttgtaatgccttttcttcttaacaagatagtgaagaaaattatgacagatatcacaccatttatataaatatgtgtgtaaagcccttctctaagtttcaattttcgtaagatttgacgataatatgtgatttcactgttgattatgtagcacagttttgaatgattagcaaaacatagcttatttcatattagtaatcatttttctctgtacaaagatttgaatggttaattatacttgatacttctttgtttgcattggtgactggctattgttttaaaatgatttgagtttcatgtacatgcctttgcaactaaatattgatgccaaaagacaaatctacatactgatccaaagagacaaaaagaatatcttaagagctgtggtatgaatgattgaatgtagaatgctgtggtacaacattcttttctaaattttgtatgatttttcatgcttactttgaaagaaataaaaagaaaacctttgctgttatttgaaccagaa

SEQ ID NO: 70869 - DNA, 680 bp, Prunus persica
  Intron number 3 from transcript ppa011973m (locus ppa01197 3m.g) derived from phytozome v7.0 (chr-ID scaffold_8; pos 12603026 to 12603705)
agcagagcaacaaaggtggctcctttattgggcaggtcagaaatcccgtttctaattttgtgttcttccaaatacactatctttgatccttaccactattgttacttcctttgtaagactactatgagatcaatattgggatattcttgggaaatttagatactatctaatggattgttaatgtgttttcaatgaattgactggaggcatgtttttaattgttcctttatgagattaatatcgcttacacaaagaatttctaggtaggtggtttattcccttaaattgaattctttttctaccctcctaagatagcctgtagaaagaaattttagggaaaacccccatagccatcttcttattagacaatatatggaggagaaaaagtacaaagcaagaaatgctgtggcgaagaacgccacattccattagatacctaactttgggacacttaaggtacaagattggcagaaaaatgcaggactactagagaggattttattaatgcatgtatgtgttaaactggtgcagatcagtgagttccttgttttggtatttgggtctttccccagttgtagttgctggcggcaacccattgtagaagtccacattataattgcattgtccagggttttcttgttcttttttaatgttgactctttttttgctacttgcagctt

SEQ ID NO: 70870 - DNA, 339 bp, Prunus persica
  Intron number 3 from transcript ppa023381m (locus ppa02338 1m.g) derived from phytozome v7.0 (chr-ID scaffold_1; pos 8118699 to 8119037)
tcagtggtattattaagccaggaaggttagtttcttttaccttggtttctaacttaaaaagttgtggctgctatagaatttaatgaattccatctgttgtatcaaacatgagtgtttctctgtccttatggagtttagcagatgtctttgtcgaaaatgggttctttaccttccaaaattttgaaaatgggaaagtaatgagcagacataatttttttttctttctttcaaattcttcagaaattttgatatatttttagaacactttaagaaggatattagaaaattaataagtaaccaacttagagttaaccaactttggcctctcttcactgcagg

SEQ ID NO: 70871 - DNA, 593 bp, Prunus persica
  Intron number 3 from transcript ppa008052m (locus ppa00805 2m.g) derived from phytozome v7.0 (chr-ID scaffold_7; pos 20942801 to 20943393 reverse strand)
acaagcacattgttcgagcctgtgctttctcagaggtgggttcttctatcatcatcatcgaactagagttctatttaagtgcaatgagcatacaaaagatgctaatttccatttcagagatcttatctgctatgttggtttcttgcttcaagctaaatgtgatatgtgatgtttatatttcactgtattctaaatcatatccacgtgaagtagctatctgcttaactcttgagtttaaaatgttttcttattgtggttggtgttatcctgggataagaggggacttctaatataaatgctagacttttggatatttcacctaccaagctcagttgtaacttgtaaggtatcaacgttttaagttttttcaaaggtatttggcctccaaactagttactcttggttcagatttcaaaattttctgagatctcatgctggaatcattcagtgcttgtgaaaactggttaattggtgctgaaacattagattatggtgtgccccttttttttaattatgtacttttgtaatctcatttgatttttattaatatggtagcaggatacacaccttttgcttactggaggagtagagaa

SEQ ID NO: 70872 - DNA, 463 bp, Prunus persica
  Intron number 1 from transcript ppa005077m (locus ppa00506 8m.g) derived from phytozome v7.0 (chr-ID scaffold_1; pos 46729253 to 46729715 reverse strand)
tattgggtgagttcaaaggttctttcttttcccaatttttaaaagtttttcgcttcttttctcggtcgtattcactgattcaatcctagtgatgggtttgggttttgatttattttccgagattttgaaagaaaaagaaaattgtttttctgctttgtttaattcaatgtcgtttctttaatttactgggtataatgtagttgtgcagttttccgagtcaaattgttcgtctgttttcactcgaaattccgttgtaaaataaaggaactcttttgttcttgattttttttttcttttatgggaaacaaaaagaaaaggcgtatttagttgattacactgaattttgttttgagaaaaaaataatttcttgttatataggaacaacagaacccagaagtgtgaattgcaatttcaatgtactgatagtgtgcttctgggtaaaagtagtgtttactctgacttg

SEQ ID NO: 70873 - DNA, 430 bp, Prunus persica
  Intron number 1 from transcript ppa015275m (locus ppa01527 5m.g) derived from phytozome v7.0 (chr-ID scaffold_1; pos 34927232 to 34927661)
ggtgactcggccgacatcgactccgaaacaaccaggttatcagataatttgtcttcccagaatctctcttcactttgctgcaatttagatttaatgaccatagatgctaaaaagcaaagattttacaaaaacccaaacttcataaaatcttaaatttatggtcttctgggcgatcaaagggcctctgtgtaagttttttattattattttgggtcaaagactttatctttatggccttatggtccttcttaatgttcgataccttagattaaacaaatgggcaatgtgcatacattttgttcctgcttaagcagattcataaaagggtctctgtgttctgttacatcaattgtctgcatgaattcttttgatcttttattgaattctatctgcagcaattcaacagcggagagttgttatagaaaacaag

SEQ ID NO: 70874 - DNA, 315 bp, Prunus persica
  Intron number 2 from transcript ppa015275m (locus ppa01527 5m.g) derived from phytozome v7.0 (chr-ID scaffold_1; pos 34927729 to 34928043)
gcatacattcttcaaaggtcctttggctttgacatgttatgcacttgatactgtttttttttttttttttttttttaaaaaaccattgtgcgtaattctgacattcttcaagtgtgtctttgtccattgtataaatgaaaatttcaaaaaatttgaaacatttaatcattaatcaaatgattaagaacaagttttaaacttctggattgatctacctgttctgtgttaccgtctgtcttcttgtgtttaaagatggtggggtgggatgggatggatctgacagtcttttcattttctctctaggaacgcataccc

SEQ ID NO: 70875 - DNA, 972 bp, Prunus persica
  Intron number 1 from transcript ppa013994m (locus ppa01399 4m.g) derived from phytozome v7.0 (chr-ID scaffold_2; pos 14031193 to 14032164 reverse strand)
gaagccggaaaacatcaaatcacatatttctgctggtaggaatggttggtttgtggtgttatctgatatgttggtttacttgtagtacaatttggtgggactctatgtttgattgtctctagcttttggggggaatttgtgcttggttctcactagcttcttgtggtttactattatctgttttcacggcaatacaatatatttaatttgtgtaaggactgaaccattgcttctagctattagtttctctttattcagagtagttacattattagagagcaaccccagaaacaattgagaaaacacctttagcaaacataaacaaaccgaacttacgatgatgtcttgagcctaatacaggagttactgtagttataaaagaaatatttcaaggtcgatttccattgtattctattgctgtttgtttatgcgattctatatgatgtcctgttgtttttgtagttgccagttggatcctttgctgtttgaataatatggagctcagcagtaattcttggttttgaggatggatttctgaattcttctgtttgaaacttttgtgcaatactattttcttatatggctgtaatagttgataatttgttgttttgcgataacatgtaactttgtggctgtatattggctttgatttattgaagcccagatttactgaagtggtgtatatcccaagaagatcataaagtacaagtacttgaatcatcatggccattagctctcccatagtttgttgatctttcccctgattttggctggtgaaaggggatgcatttccatcgtaaaatgaacaactttgtgacattactaattgagatatttggaactttcgtgcactgtcttttattgaagctgtattcttatttataatctcttttccttgtcagccatttttatcttaattccagttaacattatatgtttggatggatgcagaccaagcagatcagacatttt

SEQ ID NO: 70876 - DNA, 704 bp, Prunus persica
  Intron number 1 from transcript ppa020602m (locus ppa02060 2m.g) derived from phytozome v7.0 (chr-ID scaffold_1; pos 23761601 to 23762304)
tgcgatttcgaaacgattacattaagcagataaaggtaagatcgtttagtgattgatatatttcttcctgctgctgcttatttaaaatggtttgcttgatgattgtgttatgaagaggttttccgtgctttgcttcatatatatatatatatatatatatatatatatatatatcaatcccaaatgcgatcttatgggcagtttcatagttgtgtgaaatttggtaattcaaatttatggtcttgaatgtgagctaaagttgtcaccttttggctgtgatgagtaaatattatttatacaactctgtaatgggagggttacatggtatgtaacataatgtacttaccaaaattcagcatccttcctttctacttcgaaacctgcagaaagcataactgaagtcttttgttttcgtgttctctcaattttataatgttcatcaatgcccataggcatagcacattcacctttctgttatccattcaacaagtaactttctttctttcactaactgcagcctgcaaatattgaaaagacttatcaagtatagattcattgtcgtcagataactatttcatttgtttattttaaaacatctagacattgttggccagaagtttccagtaatttactatgctaagaatttccctggataccatatcttcacagggttctttacgcttgctcgtttggtgggcactgcc

SEQ ID NO: 70877 - DNA, 515 bp, Prunus persica
  Intron number 2 from transcript ppa016424m (locus ppa01642 4m.g) derived from phytozome v7.0 (chr-ID scaffold_4; pos 15743932 to 15744446)
ggctcgaccccggaagaaggtactagtgggttctacattttaataattgttatgcttgtgggtttgtttttttaatacaggatttgtacttggtttatgcttgcaagttacatgggctttcttttgtttatttatgaattttctttggatcttgaccattggttttcatgatttaagaacatggaggttgtttattgtacattggcctggtccttgttctgcttttagattcttctttttttccttaaaaagatttctattttcctgaaaagataaatctttttatgttgttgcactcaaaggatctttctttcatgtcttctctttgtgttttgtatctcaaattaggatcttgtgattttatagagttttaaatttggatttattgaggtctttacttatatgtttgcaagttcatgcctttccagttcatttgcaattttgagggacgatagaaattgcttctaattctaatagaaagaaaactgatatttctcactaattgttcaaagagg

SEQ ID NO: 70878 - DNA, 550 bp, Prunus persica
  Intron number 1 from transcript ppa000118m (locus ppa00011 8m.g) derived from phytozome v7.0 (chr-ID scaffold_8; pos 20151898 to 20152447 reverse strand)
gcttcaggaaaatcttacaggtttgtatataactggtttgatttgcaattttgtttcatgtgtttctcatgtatgtggagtaaagtgaaactccctcgtcagacatcataaatttttgatcatgtaaaccacattgcatattctggcatgattctacttctttctgtcaagaaaaagaattaaaaaatataaagaatacttttttttcttaactgttagatttaacatggattgttggatggttaagatgcatctaaccccttctcaaccactgtgcatctcatccaagttagtgagaacttggaccttatctaaggtagttagtagtttagaactgtatataagctgggggattttcagtttctgttgttgatggttcaacgatatcagtgtgatcatactggccttgtcaaatgttatcctgatgtgttgagaagataatcataatacttgacagtttcatctagtgcatctctctctctctctctctctccctctcttatttgtataagtgtgtataatttattatgtttcaaattcttgaacagat

SEQ ID NO: 70879 - DNA, 1029 bp, Prunus persica
  Intron number 1 from transcript ppa025733m (locus ppa02573 3m.g) derived from phytozome v7.0 (chr-ID scaffold_8; pos 3646256 to 3647284)
ccaattcctcaagagcaaagcctaaaaaatccaatgtctgacaaaagcaagctgctctaatgtccttcaattggaggaagacaatcccataaatgatgctgatgctgatgctgctgaaaatcgtcaatatgaaacggtaaaatctctgacatttgattttttcttatttttaaattttaaatagacatcgggtttaaatttaccatccatcgtctattttaacctagacaacctttctattgtgtagcgacgttataacatttacaccacgactgttatgtatgtaccgttgtctataacctttaccccgtcagtatgttctagaaatcgtcgttgatattatatataacgtcggttttgtttatttgttggagttgtctattttacttcttgtacaaactaacttttatttctttatttatatttcttgttacaggatctctcaaagattgacatgccagctcctctgttagccctatgccaatatgtcgagaccaagttgaagcttgctaacgagaccattacaattcacatgccagaggaagcgtttggcactgagcatgatacctggctcttgtgtgaagacgttttacagtttgcttccatggttgagattggatccacagtgattgcactatagatgaggtaattctagaaattcaattttgtttttttttttttacatttcctttcttttaaattaaaatttcgtttaattgaatttcatatatttaattaggtacctatttgactatttaaaaatggaaaatatggtaaaccttgttggcctcgtggaccctggacaagtcagctctcaatctggaatgttatctcactgttcaaaatatctttcagaccgcctgaaaatgcagatggggatcaattttacttggtgccttataatccagggttagtccccttctatacttggtcccttgtaataattttttttttttttaaagtatatttaatctatatggatcattttgtgtaggggtcattgggtgttaataattgtgagacctgcaa

SEQ ID NO: 70880 - DNA, 670 bp, Prunus persica
  Intron number 1 from transcript ppa005274m (locus ppa00527 4m.g) derived from phytozome v7.0 (chr-ID scaffold_4; pos 6799454 to 6800123 reverse strand)
caacctaacaagcattttacagaggaagctgcaaggtttgcactctttccagttcttctgatttctttttagctaaattattgataatttaattttcttatttcttaatatgtatgtgatctttgctcagtatttttgaatttccttacaatatcaatgagatttggttggagttactggtttgatggcttcaactcacgatttgaagcagcacagtcagtacatttccagcctttagttgcattgtaagggatgtagatttcatataggaacccccttttttttcttttgaattgcaagagtcacttcattaaaggtgtatacgtaatgtagctatatagcttgttgatggtaatgtctttggtttctatcatttcttttttccagacagtggcacagcaaagaatggttctttctgggtgcagaaccgcatatgttataggctgagagatagatttcttattatcaagcatgatgcaacttaattgttaatctgctaaaagcccctccctttcttaagtgaacataatgaaatcatatcttcgctgtggttgttctatctttcttctcattctaattctgttgcatgctatgtctaagttcgttgtgccattcttagatgtttagactgggcaagaggtttcttacgttttatctttttgcagatttt

SEQ ID NO: 70881 - DNA, 622 bp, Prunus persica
  Intron number 1 from transcript ppa020488m (locus ppa02048 8m.g) derived from phytozome v7.0 (chr-ID scaffold_4; pos 26596622 to 26597243)
tcttcaccgctcccgtccgcaagttcgtccctcaggtcacctcacctcctccatttcttctcaatctctctctctctctctctctctctctctctctctctctctctctctgtgtctagtgtgtctgtctaggtttttgatatattagggctaggttttgatatattgtcttcttattggtggttttgtcaagttcagagtttgtaagtaggaaaaaattgggtgctcgtgttttttgtggtgtgcgtgataagaaaagtgttcgcaaatttttactattttgtgaatttgatttttagtgaacaaattcatcatttctggattgagaaggagactattagggtgcttgtggataatgcgataaaaaagtatgaagctttcatggatatcatatggaaatacattattattttgttggatgcacattagagtgatgagataacttcttgtcaaagatgtatggtataacaggggtgtgtaaatctgcaattgaatatgcagcagcaatgtttgccacttattttttactgtgggcagaatttgatgaaattatacatgtctgtcggtttcaaattcaaataatttaggacaagttggatatcaagaggacgttagaggaggt

SEQ ID NO: 70882 - DNA, 963 bp, Prunus persica
  Intron number 2 from transcript ppa013355m (locus ppa01335 5m.g) derived from phytozome v7.0 (chr-ID scaffold_3; pos 21689285 to 21690247)
tctttcttacgaggctggtatgctcccttccttgctctctactctctagtctctacccgccatttcagtctctttatcttcccttgttcctttctactttttagcccttaatttgattaaaagtttacctaatttatttccaagttcctacctttatttggattagtgtccccgtacatgaaataaggtttttgcttttgatagtttagttagtagagtctctatctcggattgaatcctcaagctttactatacgttgtatgttgcgctatatattcacttaggctggtaattaattggttttggtatctgtggaaagttgagtctttttccctactgctagattgttttacattcccctatatcaaactggttatgaccctgttcttttctgcactccaaatcttgtgcacagctgagattcttctcataagacaggagtacaacatgttgctttttcatttttctcctcatataataaacatggcacactcttcatttgtgaagtttttcacattcgaacatgttgccttggcaccaaagtttttaaccttcgaacatcaaatcatggcatactcctcatccaaacgagccctattgctataatttgtagattgaacaaaagtagatcatgtgttcttttcaatccataactacagaggggtttttgtaacttctcttcaggcgtttgtatattgttccctgtatggcccttcttcaaaatgctatagggtcatctgaaaagatttgaagaatagataatctattgagattcagaaatttcaagcttgcccccttttttggcttctctttatgttttgattctgcttttggtttgttaaatcttatactatcactcacaattatgttaaaagcttcaatttgttattccttgtagtgtttcttttgtatgagaggggaactaatgagttgtttcttttacatgtacagtttggctgcgct

SEQ ID NO: 70883 - DNA, 244 bp, Prunus persica
  Intron number 1 from transcript ppa001571m (locus ppa00157 1m.g) derived from phytozome v7.0 (chr-ID scaffold_7; pos 21550365 to 21550608 reverse strand)
ttccgttggcataacgaaactctcaacgtttggacgtacgtaatttccttaacattatttcaaattaagtttgttcattgtttgattgattcatttctttaattcgcttttaattctttgatgattttggattttggttgatggggttttcttctttagtttctttgaattgtttatatctattttattttattttatattatttgcaggcatttgattggatttgttctgtttttgggtttga

SEQ ID NO: 70884 - DNA, 803 bp, Prunus persica
  Intron number 1 from transcript ppa003091m (locus ppa00309 1m.g) derived from phytozome v7.0 (chr-ID scaffold_2; pos 18590670 to 18591472 reverse strand)
tagaggtaccatttcgatcatatctacctctctgtctttcataattggctgttgcagttgatgtttagtagcacaaaatgtgcttcattttgaagtttgtgaatcgaataaggttgagtggtttaacacggagtatctaaaatgtgaaatatgtaacatttgaatgtgctttcatagttcatattaattttgtcgagagacaatgttcttcttatgcttactgaagcatagtatgatggaaatgtggtggaatttatgtttgtgctgtcctaatctatgttctgagcttaaaatgtattcagatgggaaaaaaaagtttagatatattcattgtgatgtttcaagcttaaagtgcgcttctttaatatttattttgggacggatttgggtaggtcttatcaaagtagaatgcattacttgtggaaacttatgaaattgtgtacttttacttatttacttattgggtattttggctgttgtgtggtacttgctactagcctcaaattcatatgaattctgaaaagtaattttttgtagtatctttaaatatttttcactatatattcgtcaaaattgaagtgacctgtgaactttatgaaactttatgtgaaaataaacttgtttttccactttcattggtggtaattgaatgagattgacattgtgtattttctagtttcaaactaccttttgcgtctcacatttgattcttaaggttgaatttattattttttctttaaactttttgcctgaaacatgatatctcaggtgaacggaaaagtgagcaggtcttccataagctt

SEQ ID NO: 70885 - DNA, 789 bp, Prunus persica
  Intron number 1 from transcript ppb017176m (locus ppb01717 6m.g) derived from phytozome v7.0 (chr-ID scaffold_7; pos 8092270 to 8093058 reverse strand)
tgtaagtcgaaaagttgcttacatataaaaccatttcaaaaaaataatacggcggttacatttaactacgtcgtttttaactaaaacgacgcaatatttttcattcgacgtggaatcatttcatttaacgtcgttaggtttaatataaccgacgtggattttaatttttaaattatgaatagaattttttttcccgtgacctttcagtttatttttcaattacagtgcgttataaatagagttttttttcaggaggaaatttaaaacgaaggaaattaatattctgcaatatgtaaagtttcttttttggatgacagatttaaataaaataagaatataaaaacaacaaatgtgtaagtcaagtagacgaaaagttgcttacatataaaaccatttcaaaaaaataatatggcggttacatataactacgacgtataaattacaaaatacgacggtacatttaacttcggacgtggtaaataaatacgacagtagtttgtaggtaccgtcgtagtaaactcaaaaattaaagtacataagtaataactcgcgtcatggtatattatttaacacgtcgtttttattaatttaccgacgtggatttctgtaatatacgtcgatcataccgacgttgattttacaatttaaacggcggtttttttgtaaggaccgccgttggttttaaaaatttattctataaatttgtcgctttcattcattttcggtttacatttaaggttccaagttcttcctctctcagtctctcatgtctcaaagataataatttgg

SEQ ID NO: 70886 - DNA, 500 bp, Prunus persica
  Intron number 1 from transcript ppa004466m (locus ppa00446 6m.g) derived from phytozome v7.0 (chr-ID scaffold_5; pos 2980822 to 2981321 reverse strand)
tcccggtgtgagaaaggacaggaaatgggattgatcttattttattttattttattttactaatgagtagagattaaaaaataaaagaagcaatttccaaagattaaaaaaaatagagaaggaaaaaaaattattagtgataaaaagtgaaaaaagatcaaagaaaaatcattgaaagggttggtgggcagcttgacgaggttgaagttgaacactgctggctttagccagcggtacaacgtcaaaacccaactactgagagtccgagagagaaattagaagcacttcaaacttcacaaattgactttgcgatcttcaaagaggggagagagagagagagagagagagagagagagagagagcaatggaggccgtgtaagtttttggattttgaatcaaagatttgttgttattgttgtaagaatttttgtgattgattgaaaattgttgttgaaatacaaacagggttgcttcagctccagggaaggtgttgttgacgg

SEQ ID NO: 70887 - DNA, 921 bp, Prunus persica
  Intron number 1 from transcript ppa013334m (locus ppa01333 4m.g) derived from phytozome v7.0 (chr-ID scaffold_1; pos 30412539 to 30413459)
tcgacagcaaacgactcgctcttgcccttaagaaggtcacatctttgcctcgatcagattatactttttctttgtctttctgggttttgatcttttttgtttgtaactttgtagtgtgtgtatcagagttaaaaactcgaacttggtcatgcttacattgttaattgaagtattttgagtaatgggtatagatcaaatgaggtaaactacaaatggtccagtttcggtttgatacatgcacgaacacgaacacaagcacataaccataaatatatgtatatggaggattttcaatctcaatgtttgcagcataggttctgatatatttttggctatgttttcttttattaatccttctgggtttttaatgataaaaaatcaaaggggatttatctttattcaggattttgagtgtttataagaaaaaaggaaaaaaaagagaaatgaaaggacttggtccacagcttactatgggttgtcaaataagcaggcattttctgtctctgagacttgaattgagctttgtaagtctcaagcagattaggttatgcctgattgacacctcagttatcattctctgttcttctaccagaacaatttcttgaataaaattgaattcctctctctcagactctcacaaacctcagtttatgacaaacttcttgataaattatagcttcacatcgttttctggctttgaatgctcacgttgtgcaagcaagcattgcagtgtaaatgcaatttttagctcccttgttcgtcaaagatatcaaattcacaaagactaatttcctatatatatatatatatatatatttactacatttctcacgagtaactcttcttctttaaccctaacgtgctccgacatatagagagatcacaatgtatctttattacttgacaggaatttgactcgtc

SEQ ID NO: 70888 - DNA, 902 bp, Prunus persica
  Intron number 2 from transcript ppa010436m (locus ppa01043 6m.g) derived from phytozome v7.0 (chr-ID scaffold_8; pos 20492468 to 20493369 reverse strand)
agaagattgagtttcttgagagcttggctggaacggtaccattgtgatttgttttgatttagaaaggattgtgattgttgtataataaaaattgatttgattgatttgaaaaacggacttacagttttgacgtcacttgttccgactcaatttagatcaacagttagtgttattgttaagtcaattgcaaatctgttgtgttttttttgtgcctattttataaactttactcacatggtaattttgaatctttctttctctttgtatatgaatttcatggataagatagaactagtgaacctaattgatatattttatgatttaaaggggtagcaatactctttttacttaattgaaactacattttagcatttggtgtctctccgcaatggttattcaaatagcaaatttccactaacagtagcatacagctttaataagctttatgctaattgaataacctaaatggttattttagttacataaaagacttgtactatttggtggagctagaacaagttggcagattggcatattgattacagatatgctcgttttggtgaatatgtgtcaagtttgttgtgtctctatcaatggaaattttgtgtttccaatgtaaaagatctagtgaaattccaataattataaattagctctagtgagccgaaacagattgtataactggacaagttggaaataatatgtttcatgtagagttacagttcatcattaggattttggtacgatcatttatttgtcacaatagactgcattaatccttccaaaaaagtatttgcttgaagagtgactagtcttctactaaaatgagaaattattttctgtatttgattcatgttatgactttttttgttttggcaggtaagcaaccgacggtctcgaag

SEQ ID NO: 70889 - DNA, 618 bp, Prunus persica
  Intron number 1 from transcript ppa022815m (locus ppa02281 5m.g) derived from phytozome v7.0 (chr-ID scaffold_6; pos 476079 to 476696 reverse strand)
taccggttgtcaccggtgttgttattgccagtggggtaagaacatctccttcatttttattttattaaatttattgtgagtatcaatgttgcccttttctcctcttttttttggattggacctcccttttgatgaattaattttcctgattgggttgtattcattttgtgtaatttagttgatgttcttgcttcatgaattttaagggtttcttttcttccttttttttattgatttcattgtcataataaattccttaatttgtttccagttaagacgtaaatatattttctcaaaatttcgtttgactacatattctagctgcaaattacatatgtcagtctaacaatagttggttgtatgatcattatgagagagggttattgaaagaaaaacggtgtatacattcgttggatgcaagaatttctgaggggttagtataaactctgtaaatttgtactcattgtttgctttttctcactgccaaaaacattaaaagcaaggattttgtttggttagatatctttgttgttgaagttgtgagagtgagagctgttgatcattactgaatattcataattttctctttccattgactgaagggagaaccaagttttc

SEQ ID NO: 70890 - DNA, 614 bp, Prunus persica
  Intron number 2 from transcript ppa012764m (locus ppa01276 4m.g) derived from phytozome v7.0 (chr-ID scaffold_6; pos 4853041 to 4853654 reverse strand)
gattcggtaagaacttagtaaactcaagtatacaaagaaacctttctgctcttctacagaactttttgcactctgaatcagtctagtccaatgctaaatatgtttcaatggcgtgtaccctcttggatgctgcctgtggcattggagtatcagccatgacaatttttgtttttatctttttagtttttgatgagtaatctggcaacatgcatttacttgaaacctttactgaaggatcttttggtccaattgaccattccaattttcaactgattatccaaataactgtcttcttcagacactgatgaataaagtgtctagataaaccaagagatagcttggaccagtctattaggtctattttagcacgttcttattcttaagcccttcgttgtgcaggtaattttttgagggatgttcaaataacaataggtagatttgtcctctctgtgagacatcatacaggccataatgtttgctttgcattgccctccaaatttcagctagcatccatttcttgtatcctttcttaatgcaaataaagttatagttgtgtcataagtctttttgctgttacagaggacttctttaaagaccttcaagaagaattccag

SEQ ID NO: 70891 - DNA, 561 bp, Prunus persica
  Intron number 1 from transcript ppa012764m (locus ppa01276 4m.g) derived from phytozome v7.0 (chr-ID scaffold_6; pos 4853814 to 4854374 reverse strand)
ttaataaggaggtgattgatagtttctgcactcgacccaatttagttatgtgtgtttttgttctgttggttatagttagttgtgggattgctagtgctctagcttcaaattaaatatttttagtttctgggtagttttgttttccttatttatttatgtttgtatccaattcttaagtattcaatttgattttgtgtcataatttgtttttccattaaatttccgcttaccaagtttgaagagtgtcaattcattggaggaggcagttccgtttcttgtagagaaatgactccccaaacaggtggtccaaggatgctattacccaaatcaaattttgtgattttatggtgccaactgtctaagcatgtattttgtctgctaaaagtgtgctttatgctcttctagatttccaattacccccacccccttttgcagtattgtattgtctggtggtttagggatatgaattggttttctgaatctgttatgccttctctctaaagtggtttggccttcttgtaatggtttcactagtcgtaactttttcttttgtacaggcaa

SEQ ID NO: 70892 - DNA, 686 bp, Prunus persica
  Intron number 1 from transcript ppa005328m (locus ppa00532 8m.g) derived from phytozome v7.0 (chr-ID scaffold_8; pos 14658739 to 14659424)
cggtgagctttttatttttgtatttatttttgtctgtatttttgttgttgcgcatgtttttttggggtcatgttctaattggattgagcagactttgaccctggaatgtagtgaaagcgttatgggcctgtttgtttgtcttttctctgaaagaaacgattttgagaagaacaaaaatatttttcctttttcagatttatgaaattgcgtgagactcgttcataattggtttttatttttgtttttgtggctggaggacttgtttgtatgcgttgttgtaaattgcagtgcctttttgttcagcaaatttgtaatcttttactttttgttgaacggaaacatgtttcctagaaaaaaagtctttgctccaaaaatggttatgcatatttaagtgattgtagcatgtagattaaaagtcgataatgctttgattgagtccatcttgataatctgcacctataaaatatgtgagctttttccattagcataacgaaacggttcacatatggtaattgtagtttaggattatggcaaatgcgattttcctgtgtacgatacagaatttgtgaacagaggtattggtatgcctcatgtaatgctgctgctgcgttttgcttcttagtaatagaatttatgtgttttggattgaagggagttgctgggcgttctcaaccgttggtgcagtg

SEQ ID NO: 70893 - DNA, 768 bp, Prunus persica
  Intron number 2 from transcript ppa014688m (locus ppa01468 8m.g) derived from phytozome v7.0 (chr-ID scaffold_3; pos 7809067 to 7809834 reverse strand)
tcaggataggagggctatccacattcacattccctgtaagactaattatacctctcaattttaccttctttttactttttgttcgtgcgtttataattagtttttcatacgagtgcactgcatttgacactaatacatagattaattagtattttgtgagtctcgcataaacaatagagatgattatcttcaactagaccaacattatttttcgagtctcgtataattaattttctctacaaggacactgcatctaacattgtttttttttttttttgagtcttcaagttaataatgcgaatgatgacaattatgcttttataatgcatatctctaccagctgtttttggtaggtaaagcttaatacatgaactggaagagcaaccaatcaaaccaacgttggtttgcatatacaatatgccttagttttattatatctatcttcctaaaccatagcctgtcaacatcagcacttaacaacaggaaggtatatgataaagccttagacaaaccgttcatatatatgaatcacattggtgagcatatggtgggaataaaactaatgtggatccacccacctattagagcgggtccaatctctctacgaatcgaaaacaataatgttaagctcaccaaatttatgcacttttacataaacaatattttgtcacataagagatactaaggagaatatgatgaataagattattaaatatcctagaataacttcaatatttgcagtattgttccacaacctgcaggcataca

SEQ ID NO: 70894 - DNA, 463 bp, Prunus persica
  Intron number 2 from transcript ppa024170m (locus ppa02417 0m.g) derived from phytozome v7.0 (chr-ID scaffold_1; pos 46428965 to 46429427)
gcaattacagaagaaaatcctctgcctcaaacctggtacttgtttcaagctctcaataatatatatatttattatcaaatcggttgtgtcactactgatacccagattttgtttctttaatatgtgaaaattcctagacaaattctgcagaagttgaacaaggaacccatgtagaattactgccttcagtcaagtaagtatatcttccaatcattgctctttgatatgaattattgtgcttgaaatgtcacattcttttttttttttacctcacaacctctattattttagttccatgtttgaatatctggatcacaagaaatatgatttaatctgtctttattgaaaagaggaaattcattttcacccaaaaaagaaaacagaaattcatgactagggaaactcttgaattttaatcttatagatatataatgataccactaagagctccaccataactgct

SEQ ID NO: 70895 - DNA, 228 bp, Prunus persica
  Intron number 3 from transcript ppa006422m (locus ppa00642 2m.g) derived from phytozome v7.0 (chr-ID scaffold_4; pos 1735368 to 1735595)
aaggtaagttcgctttcagaagatattagtctaaaattttattatattatgtactaatattagtttcttccaaatatattctcatgaaaagaataaaagtttttgcttggtattatttgtgaatgaaagtcttcattgtcgagctaggtttgattagtttgtatttgcatctaagtgaagtcatcctttttaagcttttatttttttactcttaagctgcagattcct

SEQ ID NO: 70896 - DNA, 413 bp, Prunus persica
  Intron number 1 from transcript ppa005068m (locus ppa00506 8m.g) derived from phytozome v7.0 (chr-ID scaffold_1; pos 46729303 to 46729715 reverse strand)
tattgggtgagttcaaaggttctttcttttcccaatttttaaaagtttttcgcttcttttctcggtcgtattcactgattcaatcctagtgatgggtttgggttttgatttattttccgagattttgaaagaaaaagaaaattgtttttctgctttgtttaattcaatgtcgtttctttaatttactgggtataatgtagttgtgcagttttccgagtcaaattgttcgtctgttttcactcgaaattccgttgtaaaataaaggaactcttttgttcttgattttttttttcttttatgggaaacaaaaagaaaaggcgtatttagttgattacactgaattttgttttgagaaaaaaataatttcttgttatataggaacaacagaacccagaagtgtgaattgcaatttc

SEQ ID NO: 70897 - DNA, 666 bp, Prunus persica
  Intron number 1 from transcript ppa025949m (locus ppa02594 9m.g) derived from phytozome v7.0 (chr-ID scaffold_6; pos 8712433 to 8713098)
ccatcgacccccgccagatccaaagacactttgaggtctgcttgcccttcttcatattcaaaattgaaaacccatttgacatttttgcttttatttgatgtttgttttttgttatagaggaaagtaacccatgatttaacaaaaacccatttgcattttgcgctgtttttgttcggaatgttgtgttttggatttgttgtgtgctatttctatgaattagaggtttttattatgtgtattggactctctccgactttccctgtgtgaaattcagaattaatgggtttaaaaagtacatctttcaaatattgatgcatgaaaagttttattttttaatttaaagaagaagatttgatcttttgccagtggttgtaatggggaatagagaagaataaaaggaagatgtaagtaaaatcaaactcgagtataaggtcttcaaatataaatacagagcagtgggatgcaaaataaacttttgtttatttattatatgatcttttttccatcttgaaacctaaatgctttatgttgcatctgtgaaatagttgaaaaccttagtgtctctgcaatccttctctgttctgtatatgtgtataaatgtaagtacatacgcttgcatatttcctacaattaaattgtttacgttttggaaattgcaggaatttt

SEQ ID NO: 70898 - DNA, 985 bp, Prunus persica
  Intron number 1 from transcript ppa026996m (locus ppa02699 6m.g) derived from phytozome v7.0 (chr-ID scaffold_5; pos 1455290 to 1456274)
cagcgtccaagactcctccattggcctaaaaaacggtacgttttgctgttccattttttcatctgtctgtgattttcgcactttcacatttacagatataatcgcatgtgtgtttgattgataaaatgtccctaacaatcggtacgctcggctagggtttagttttttccctgtttttttccacaaatctctgtgtgtgcatatacaagtatgtatgcttgtgaagttcttatgtatttggtatttggatcatatttctggcagtgtatgtaatttctatcagaaacattatctcaaatgtgtataaatgaatgtattttgtgctgctaagttgttgtagtttatatctgtcagttctcaaggaacggggtttaattggacaataaattcttgctacaaaccacaaattatttagttcggcaagaaatccttctgtgagcttgaaaataaagcagtattttaaagaacattttgcttgcaatctaattgttttttcatggtaaagttttcatcatactcattagatgtaatcttccaccatatctttttatattgcgtcgaaacttgtaagttacagtactaagggttaactttgttattaatgttctgtggtcaacatcatgcaatgttcttaaggtcttgagatcttctaggtaataaaatgagaaagagaaagagatgagtcagttcaatgtttataatgtcttaagttttctatcaagtaattttctattttttcaaagacttttttatacactagttgcacttaggtgaaattgctatctgttctacttatgttgtgcatacaacgtgtgtgcatagacaacgttttagcacacccagtttacagtcttcatacctgaattttagttaaaattaaaacatccgtaggcataagttacataaaactcttcttgtcttctatagttgggaaatcaaacattttgaatgtatcgacttctgtatgatattgcagttaggtcat

SEQ ID NO: 70899 - DNA, 544 bp, Prunus persica
  Intron number 3 from transcript ppa007610m (locus ppa00761 0m.g) derived from phytozome v7.0 (chr-ID scaffold_6; pos 28193447 to 28193990 reverse strand)
aggtacgcctaatattttccttcaaataaaaacccccattcattttcttggaaacatacatgtcttcttttatttatttatttatttattttcaagttggatcaaattaaataagaacaaaatgtgtctcttgattagtcttggatatccgattttgattttctattgcataatcaaaaggaagtggaatatgttatatatataaattgcatagctaccgagaacattaaattgcatagatatataaatttaattgttgaaatatttaaatgtttatggaccatgactttgacaatataaattattaacttctcaaaatgccattctctagatgataatagattgtgtaatatttcaacaaattcggccacatttgctaacaaacagttttaatgaaatgttggatttgtttgactaagatagtgtgtccgcctctcgtttactcgaatttgttaaaaaaagaaagagaaaaacccttccaagaccaagtaatgaaatgatgattatttgactgaaagttgtatgaattaaaatgatatatagc

SEQ ID NO: 70900 - DNA, 962 bp, Prunus persica
  Intron number 3 from transcript ppa008970m (locus ppa00897 0m.g) derived from phytozome v7.0 (chr-ID scaffold_4; pos 3815026 to 3815987)
gaaggtcactttgattgtttatctgtgcaattagcatctatttccttcactttgtggtgcaacttttatctttatgaagtcctttaattttcgattgaggtaattatgcaaaggggttatttgtttaagttcaatcttaaccaaatgtcgtgagttggtagattttgttaggagttaaatgcatagtggtgtgtaatctttatccgagagcaggtcaatagctaaagaaggttgattttcatgacttattattctagttgtctatctttatccgagaaagtaacatctagtggaaaacttttactgaatgaggcctctcctgatgattaacaaggttcatagactgtgccatcagacactggttctggtcaggaaagaatttgattaacagcttcttcattagaagagtcaccgttctggggttttaagttattatgcatgtgttttttaatcggtatgtatcataagattttcactttagacatttacaggtagttaaacataaagtttgcacaaccttctacttgaggctgagttgatacctgcagaagaaaacagatttggtatacaatcttatagcaatgttgcagttcattgtacctccctaggatacatttgtttgcattacttttacgttagcaattgactgatgcttgaaatatgtctgtggaatccggggtattagcctctggctagtaattgaaggaacatgccttgctcaaacatctagtggaaaacgagctcacactttgcctttacttcaatacagatttctattcttatgccactaatatttaatggttctatatatgcacaactcagatatttgatattcctagaattgcacatctgcatttgttttttctctggtgtactttgtgctatttgataatatgttgatgtctgagaaaggttatttcaatacaggttgataattttggcacagtcaaccttgttgaagc

SEQ ID NO: 70901 - DNA, 621 bp, Prunus persica
  Intron number 5 from transcript ppa000290m (locus ppa00029 0m.g) derived from phytozome v7.0 (chr-ID scaffold_9; pos 830134 to 830754 reverse strand)
aaaacattctcattggtgctggctctattgttaaggttaattctactgataatctcaatatgttaaatttatgaacaattgaagcaaattaattcattttcttaagtaatcttatcgttgttgcttttttgtccactctttatactttatacaagtggtgtgctgtttagaagagatagctaaggtggtttaaaataaacttcatctatgtttaagacatgtataatggtttgcctgtttagaactttcagtttacccactttatgaaaaatataggtttgcttttgccttatgatcattagttcaatgtggttgatatttggcgtaacttctcaaagttgagtactcatgtctttctcatgtccatcgtatgaactatggaactatgtaaattacttttgtagtggaaaatgactattgtactattttctatatagtaatttattatgttatcatttatgttgttaagttctcatggtgagatatctaagtagttccttgtgttcctagtagagcttatacaagcattcttatgtaagtgcataagtgcatatttggtatcagataacttttaaatcatcttgtttgtcacagctctgtgattttgggtttgcacgtgca

SEQ ID NO: 70902 - DNA, 635 bp, Prunus persica
  Intron number 1 from transcript ppa010937m (locus ppa01093 7m.g) derived from phytozome v7.0 (chr-ID scaffold_1; pos 33884178 to 33884812 reverse strand)
gctcggccttggggtctaccattccggtgtacaaggtaatgggttttaatgggttgcccttcttttcttgctttctggctttgtttggatgctgagaaagtagatctgcgtgtatgttttgttatgaatgaaacagaacagatcgtttgtcttaaaatttttacgaaaatccaatcatttgcactttgtgatgtgttttgtgtatcattttaaatgctcatttggatctgggtagcgtaatttcgactcagctgaacttgggtttcatctttttggaagaatcaaagagattctcagtgtttgattcacaaattttggtttgcacaataaagaaacagagtgattttaagcaattgggcaaatttgaattcagttttcatgcttttggtgtgataaagtgaaaaccatccatctcaaataaactcaattgtaagcaagtttcctcatttcgaatgattttcgtatcgcggataataaaaaaggattgtttttctctagttaatccattgacttaaatttttatggtagacttggttatctattgactctctcacatgtctatctaagctcctgcttacatacgtttgtatttatttattcacttaagaaaattttattttaatatgctgtagtac

SEQ ID NO: 70903 - DNA, 664 bp, Prunus persica
  Intron number 3 from transcript ppa021844m (locus ppa02184 4m.g) derived from phytozome v7.0 (chr-ID scaffold_1; pos 36690448 to 36691111)
ctgtcatttttacgtttgggtcatattgtctcggggtaaatataagttcccaatgatttcttctaactgatgttattcatatttgggtgtggagtacaatttcatcattaggagtttcacaaacagatttgggttatgatccacaacggtatgctatctatttttggtgattttatgtgccattctaaaatttgtcaagcaaggatccatgcttcataatgaagaaactggtacacggccaaaatgcaaaggaccattgctaatattaaaatctaccggaaagtcttttataatgagatattatttggatctcattcaatgaaaagtcattaccagtggatgtgaacatgtataacatctgcggattgatctatgcttcagtctttgagaacagttagttctacaatgttgaaccactcttatatcattaatcttactgtacaacttgctgctgttttgagtataaccaactgtagttttataaaggattagatgttaatgtgaagccttagatttttttcttgctttggttatttggtccaactactgagtgagagactatttttgccacttcttgcccacttttcatgttttttttttctttctacaataaccattctttatttgtttgatgtaagaacaaatttattattttgacaggttc

SEQ ID NO: 70904 - DNA, 479 bp, Prunus persica
  Intron number 1 from transcript ppa018708m (locus ppa01870 8m.g) derived from phytozome v7.0 (chr-ID scaffold_1; pos 22045054 to 22045532 reverse strand)
ccatcaatctcagtggcttgaagctactctctcaggtttccaccttttcatcttcctcaatccccatctaggctagggtttccagtaccccgcccgaagttcattagtttttgcacgtttgatttgttacattatgcacacagattattttctttgtttcctcccgtctctagatttacattagaattctttgatttggatgatttcttgcatgcttaaaattcagttcttcatggtgcaaatgttcatggctcatcatagtgtttttcggtcgtttcgatattgtacaaacttaagaatccgtttgatcttgccccgtttatcaaccgtggggagcataatattcacattctaatagcaggattattgaatgggattttgatttcagttacatgatatgtcacccaaatgaagtggtgaattctaaccacgcagagatgtgatatacttttgcagatttgaacgagaagactaagctc

SEQ ID NO: 70905 - DNA, 956 bp, Prunus persica
  Intron number 1 from transcript ppa012611m (locus ppa01261 1m.g) derived from phytozome v7.0 (chr-ID scaffold_3; pos 15301879 to 15302834)
acccaaaagcttaagctccaaaaatctcactctctgtaagtctgatgaagctcagctacagttaaagctctagtatttattttctatttatgtattcattttttctttttctgggttcttttgaaaatgatttattttttctgttagcaatcaaaagaaggtatttttaaagtttttggaaggattagtaggaagaattatagatctcaagttgccttatgatacatttggttgctggggtttatttgtccaggaaattgggttgtgtgttgagatcaagttgcttgttctatctttctagtctttaatttggtattgatcttctattttgaccgtgttgagcttcgtcaaggtcacagttttgttagatcttgatgataaaaagaagccttttgaatggtttttctgttcctctctatccaattttggcattggtttcttattcattgcattacaaggtttcgaaaataggatccatttttgtttctacatgctcatcttctgcttccttccaatttttattgactgctgctgggtttgagggaatatagtttctactcttcatcaatcccactgaccattttgaacatttgagttatttcagttttatttttaaaacatttcattaacattagaaaatattgaatttcagttttagtgcacaggttgcatgaacctgtattttgtgggtttgctgcagatcggtagaattatatcccattggttgcatcttcatgatctcacagctatcattttttattaagatcgttttcagttttgtcaaattttgtttgtgcttgataccaattgtttgtatagtgaaattttgagcttttatgcttaatctgtttgttctcggtttcatcgttctttcttctctattatataaaattctaataccttccctttgttgtattgcaggttggatatcaagaagattttggtgacatttcatc

SEQ ID NO: 70906 - DNA, 821 bp, Prunus persica
  Intron number 2 from transcript ppa006529m (locus ppa00652 9m.g) derived from phytozome v7.0 (chr-ID scaffold_1; pos 42458867 to 42459687 reverse strand)
atcaaccttttcaatcctgtgagcttctctctctctctctctctctctatggatttttgtttgtatttatgagcctgaaaatgattgattatagcttttgtgattctacttgactgtcttctacctaccgactggatcattgatacattaattatacatataattgtttgtttgggtttaatggagttggaattctattttgctttgtttgctgtttggttgctgagaaattgtagaggaaatggaagaaaaacgtatctttttctctctattcttttgtttcccggccgccagactggttgcccatgagttcaattttgtacaggttatgggaattgaacttcaatatgggcagagactatgttacaagagagaaaggcttcgaatttgaggctgagttatgattctctttgatcatagttgcacgagtacatggacatgggaatttacttaaaagcgagatagtcctattgttgtggaatttggattagtgaatcacttaaaattgtttccctctgtttgcttattgagaattttttttggaaaggaaaagctcaacgtttgttgttgttcagagattttaatttctttggctaagaagttaataatgctgcatcaattagtttggaagaatgcttatgactactttaaatcacttctgctttcgttctgccttcattgtttgctttcttattttccctctgcttcctgatacggccaaccgatgctcttgatgtatcaaatgcaatacaatgagattgttacttagctcagtgtttttgtcaggcctccgcactgccagatccaaagaacagatcttt

SEQ ID NO: 70907 - DNA, 811 bp, Prunus persica
  Intron number 2 from transcript ppa012774m (locus ppa01277 4m.g) derived from phytozome v7.0 (chr-ID scaffold_3; pos 684719 to 685529)
tatttctcaaaaccggcatctgaggtgagcttaatatcagatcagttgccagattttataattgttggaagaaatgtttttgctcaattagtcaaatcaatgccattcattttggattctatctggtggaatttaatgttttgggcagcaaataatcaaactaatttggggtaaactggattaactgaggctatttagtaaaggtttataattacagaagttaagctgctgcatatacgatgactgaagagaaattctttttcttccctaaagtagcaaacatattttatgaatataatgtaggttgaccaatgcctcaatatggagcgtaatgaattacagtttctgttgggaacatctgttttgagcttgttcactctgcttcagatcaggtgtttaaggccatggttaattcacagcccttcattaaattatcatgagaggtgtgtgcaagctctgaatttggatgctaataaatcatcaattgttgaattgatatatttatgtgagaaaatggatttggagtgaatgtcaaatgtgatcttttagtatgccggtgatttttacttggaaagagttgatgctgtgttgtgggggctaatctccctggttcaaatgaaggtgctgcttatcttagaatatttgttttgctttcctgacaagcagttaataactatgcagaaataaatctgtcctgttctagatggacttgttccttcaattttaatattggttaagcaaagctattgcttgaaagctaattatgccttggttgctgggatacgcaggctcatctggtcttgtaaattgt

SEQ ID NO: 70908 - DNA, 685 bp, Prunus persica
  Intron number 1 from transcript ppa005865m (locus ppa00586 5m.g) derived from phytozome v7.0 (chr-ID scaffold_1; pos 14089335 to 14090019)
tcttttcatttgcacaacaaaccttctgttttcaggtaggtgtttcttccctctcctgttatttctctcaatatcacgttttatctcccacttttttaattcctagggtttctgcctttctgggtatttcttatcaatcaatttagttttgttgttgttgttgttctggttcttgtacttgttgttgctgttgtttttattgttttgatttgaaaacactgatacatgttttcaagtcatgctcctttcttgttggtgtgtgtgtgtttgtgtatctgccgcactttgcctttaattttagtcagtgcttgtccctgttattttctttccctttcttaaattgtaataacaatcttgtgaatagctgaaaattttgcaaatgtttgtcaagattttgtttcacaattaatagttgggcttcccataatataagatagaggagctataaaattttcaatatcatgtagagattcctgtatctgctgccatatatatgttaatatatattcttctttgttcatcttgtgggaaggtgggttttgtttttccttttctatatctgttaatatgtatatttggaaaaaggaattacgataaagcatgtctttggatgtaattggtgattattaaacgtattggaattatgtttaagatattgaaattgtgaacttaatgcagatagacc

SEQ ID NO: 70909 - DNA, 754 bp, Prunus persica
  Intron number 1 from transcript ppa011651m (locus ppa01165 1m.g) derived from phytozome v7.0 (chr-ID scaffold_6; pos 23139394 to 23140147 reverse strand)
gagacctacgaggaaaacccatctcaaatcgacaggttttgatttctgggtttctattttctgctgaatttaatgcctttttactcattttaaagatcatttctttgtttgtgaactgttaattgttactgttatctgatttgatgaagtagatgaatttgatcccatagcgtttaaatgatgagttgttttgttgagtttcggctgcaaagtagctaaatttggagttgttattatcatctaggatagaatttaatgcaaaatgttttttccccaaatataagtagttagttatttggattttaaaaggggcaattttgagatagagagaaattggatctcctactgtcccatccttggcctcacttggtcactgatccaaacacaaaattgatttatttattttttttcaatcataagcggtctttactcattgctagtgtggaaatagtcatcagacagtataattttacttgattgcttgcttgctgggtggtgtttggattggatgaccattcagtttgaagcttgatgcatagttcatgccctgatttcttctgaaaaggacatgaattgagtttacttctgattgcttttatgcctttcagttctgtgactatagctatcttaggggtttttttgggttaaaaagctaggaaacctgaaattttttacagttcttgtttgcctaagtcattggtaattacaggttttactcatccttgttctgctattactatcttaaacagctcac

SEQ ID NO: 70910 - DNA, 455 bp, Prunus persica
  Intron number 4 from transcript ppa000890m (locus ppa00089 0m.g) derived from phytozome v7.0 (chr-ID scaffold_4; pos 5347952 to 5348406)
tctgcgttgacgatattgtaagtagtgagggagcatttatttaagttttggtagaaattttttatctgtcaaatactttgatgagtctcattcccttgtacaatttctataattggctctggttctattttcctttatctgttttgtaagctttaaggaactacttactaattataatctttgaggtaagactagctgcttggtgattggctttcctttttgtttttggtcctgatatataagttggaatgatatttcttgttggtttatttcttcttcgaggacgtgaaacatagatctcccaagtgagtattacaccatacggtaaaagaagcacatagtactatacagaaagttattctgtttttatcctgaattacaccatacagtaatatctttaattgatatatttccattcaggtcaattgcccaaaattcattctctggacccatcc

SEQ ID NO: 70911 - DNA, 653 bp, Prunus persica
  Intron number 1 from transcript ppa016526m (locus ppa01652 6m.g) derived from phytozome v7.0 (chr-ID scaffold_2; pos 12301775 to 12302427 reverse strand)
actgaactgcagaaggttgtcttaacatgcaaagtagtatctgtaccagttctctagcgctgtgatatagttaaccagacatgaaacttggccccaattgcatccatcctatagaaagcaaaagtccaaattctttcgtaattattatctaatgaaattgcagaccatggcatttgcgcgtcatgatataaatcgttttagtaaaatgctaattattttattaccattttcttaattccaaatctttcttcttcttttttctttcttaatttacacttaccatttccttaattgcaaatcaaagcagaggatcctgatccgtattcaaaggatacagttacttcaaaaggctatattaagtgtacaagttaagaaaaagttggggaataccatgtactcccttgtattaatgaattacatgcacattcatatgaatacatcaagcctaattatggtaggaaaatattctatacagagattaaaatccttgtgctacaagaaagctaattatgaggagaagaatctggtgttgacccatttgtgtgttgcacaaggaaagcgtccaaaaaaacatcaaggaaaaaattgggaaccataaagcctagtgtaattaattaggaaaaaacatcaaggaaaaaacatcaactgcaaca

SEQ ID NO: 70912 - DNA, 329 bp, Prunus persica
  Intron number 1 from transcript ppa016423m (locus ppa01642 3m.g) derived from phytozome v7.0 (chr-ID scaffold_1; pos 35112647 to 35112975)
aaggagtaaaccaagatagtgccattctttaccaggtttgtgaatatttctttcccctttattatatggaaggaagcaaaggaattgttctgtgtgtttctctagctgctcatttcaaaaccatattgtttgtttttcgctttgtctatacataaatatatagaatggcaaggcttgttttcttagaaaatcatcagcaatttcgtttcaaaagcattcatgcaaagcatgttgcataatcgggtttcatattattttactaggcttctgaaagtctgttgattatagctttaacctcttcttatttttcttgtcttttcaatagggct

SEQ ID NO: 70913 - DNA, 361 bp, Prunus persica
  Intron number 2 from transcript ppa026869m (locus ppa02686 9m.g) derived from phytozome v7.0 (chr-ID scaffold_1; pos 24393712 to 24394072)
ctgcctccaaagcgtgagttttcttagatctttgtttcatattttgcttcatttgttttggttggagaacgaacctctcaaatgcattctatatgttacaccagtttgattaatttgaagcccttaaagttttgctgcccttcttatcataatttgttcttgaacaatttgggacaaattaaacattatgaaaaaagatggagttaataagtttaccatatgatctgtcttggccctcttgggaaacccaattcatcttagcaccttaaaatggggtcctaactaattatgaagttctctgcatatcgtaagttgtaacttacttcatatattgagttatggcattggcaggtacatttca

SEQ ID NO: 70914 - DNA, 270 bp, Prunus persica
  Intron number 1 from transcript ppa023547m (locus ppa02354 7m.g) derived from phytozome v7.0 (chr-ID scaffold_1; pos 34793625 to 34793894)
tcgcatatactacactcccactggcactgacagaggttctttaattttccctcccccgcatcccatgaccgccaaaatttcattttcccgaacaaattgcacacaatttccacttgctttctcgcattttcttagcatccaaacaaaccatgactacatcaattgaatgatttataatttatagcatttgattatgtgcatattatccttaataatctttgtgttaattggataatttgtgttttttcctaattaattgcgttccaggca

SEQ ID NO: 70915 - DNA, 757 bp, Prunus persica
  Intron number 1 from transcript ppa020493m (locus ppa02049 3m.g) derived from phytozome v7.0 (chr-ID scaffold_3; pos 6232785 to 6233541)
ctccagaaatcgtagttctcaccattgaaaattggtgctctcaactcaccaccacttgatccagccatgttagacttagatctgcagaactcaagctcagctgcagcttcaatagcttagcacagagaaactcccagtattacaagatcaaacctggctctgaggccatgttagcatattcagaacattatcatgcatatagattcaatcaaaacatgtaataaatctcaatgaaaatgcagagagcttttgagtaaagagaggtcagatttctgtgtgtgagagagagagagcttttagaagaatgctagctgtatcagcccagcaccaaaacatgtatatatcatgacactgacaaaaaccgttagggaggagatattccctattacatcactaaatctagtcattcaatcattaccctataagataatgacaggtggcaaaatgctattacattctctgctgtacacttggactatgatccaaggcagccttcctaacaagaatagaaccttcatattctaattccatcacagcagctacacctatacaccaacagttttcagtcccaaaaaacatgtctaacttcactttctgatgaagattgctatggaaattgttgtttatttatattttctaaattagtttctgatatttcatatatgtatacttttggggatacttagttttgtgatatatcgtatcctattctgattctgaaaagctcctcttgatgttttaactactcccaggttca

SEQ ID NO: 70916 - DNA, 1027 bp, Prunus persica
  Intron number 1 from transcript ppa009764m (locus ppa00976 4m.g) derived from phytozome v7.0 (chr-ID scaffold_2; pos 22995694 to 22996720)
aagcttcctccaacttttcttcattgtgaggtagtactaggaaggaggatgagagacgcccacttcttttttgttttattgttttctttttataaattcctcaattttattttataatgaaaaacgctttaagtattatcttaaagaaaaaaaatcccgaatctaactgttattccacccaacattaaacatttgataataaacagctcttttatagtttgattttcaatgtgtttttcactaatagtaaccagttgctatgagtaatcatgtttttttatattataaaaaatataaataatagtataaactataaggagatgaggtttatcacacactacaaagatgtcacgataattcgaactggagaccagtggtttgcaagacaatgtcattttttactaggctagaccccattgatccttctccctaaaccatgtatttttgttttttgagaataactttgcctgtattttttttttcctttcttctagtacaagtgatagtttaacctatagggaaaggagggggtttctttcacacacataactaagatgtaatggagattcgaacctgataacctttattttcttataaagaagaacaattcatacacagtacacagatattataacttgaactcaaaacctttcatgaaagaacaattattctaaaccactaaactagtggttgtaacctgtattcttttaataatgctagagaagaacaactttcaaattgcattatgccaaaactcttaaaatattaggccggccaaaacagaattaattttttaaaaaataaaataaaaggacttgtgggtttcgggtcaaaaattacaagctcattatgttgggttgatgaaaactaaattttgggccacaattgtagtcatccggcccacacctcacgctttccgtttttggctaccaacccccaacccaacccattaaaaaaactaaaagagtagccttattgccgccttgcacaagcgtcgtgcccttcgtacggaactttgcacaaactg

SEQ ID NO: 70917 - DNA, 1015 bp, Prunus persica; identical to SEQ ID NO: 70014
  Intron number 1 from transcript ppa014231m (locus ppa01423 3m.g) derived from phytozome v7.0 (chr-ID scaffold_7; pos 9816315 to 9817329 reverse strand)

SEQ ID NO: 70918 - DNA, 854 bp, Prunus persica
  Intron number 2 from transcript ppa005938m (locus ppa00593 8m.g) derived from phytozome v7.0 (chr-ID scaffold_8; pos 12647954 to 12648807)
aggttggtttaagcattgaagcatttcactggttactatatcaattatctgttttcagtctcctttttaatattcagaatttccttgaagttcactggttactatatcaattatctgttttcagtctcctttttaatattcagaatttccttgaagttggtttctgtccagtatgcatgcattgcttctttaaatcttctactaccaaggaaaaaaaggacatttctttgaagaattaatcatttgggaataacagaaacagccataatcactaaagtgcgtatccatctcaatgtattacactcatgtctttgttacaacaaagccaattctaatgcaatttaattcaaaagggtttggatgaaattataatgctttattgacaattgcagaattatcatcatatcgtgtcatgaactgttgctagatgtgagctctttatgaataacttctgatctttctagaggtgtattttctgctgcttccttaatgacagaaagaatgacttcactaaaatgagcatattgtcaattgctagcttctgtcattaaggatacaataatgctcacagaccactgtcatacactgcactgatatgactgtgaggttagcaaaatcatttttgttgaaatagctattctttacatatgtttttctactcctcttatctcatagtatctacaaggtttaatgacactcaatattcatatccttccttagaattcatacgtgtttctctaggtcatagcttttcttccagcattttgagcttgattaaagaactgatgtttttgagtatgttattcataatgggtacaggatccagcggctgtggtcatagatcacacaagcta

SEQ ID NO: 70919 - DNA, 810 bp, Prunus persica
  Intron number 1 from transcript ppa008531m (locus ppa00853 1m.g) derived from phytozome v7.0 (chr-ID scaffold_7; pos 22607652 to 22608461)
aggtaatttatctacttgatgcacgttcactctgctgcactgcaggattctcatgattctcctagattagatagtagatcagttgtggttgatttattccttccatctataatatattcaaaccaaacccctgaaacaaggatcagccaatccaattattggactctatattattacatctcaccaccatggcccatacgtagggaagaaacaagcaattagtttaatgtacgatggaacaaactgcaaaaggggcggccattatcttagagaaactgatgtgggtgcaatgcacttgcctgatcaaatagaccacagaggcacaaggcaatattccaaaaaatatttcacaactgcactcaaattgccagagacaaatttatgatatatctataaattgcaagagtatttctcaaagtgcaactatatacatgttctgtgtatggtgtcgttgtatattgactataaatgatgatgtactcctgctctgacttcccctggaacattttgcaacttccccttttagcaagcatcataagcattcttatggagtattagcgttgagctttcacatgttttccgcacagaagcccctgcagttgcaaataaaactcatggttaccttacacataaaatggaaacgaacactcaaaattgaacacaagtatcacaatggtttttttcttttcttttccggttaacagtgtcacaatgctttaccttgctacattgacttcttgctcttgtaactcagtttataattttctgtttgcaggactagacaaggatttggcttgaacagttaaactt

SEQ ID NO: 70920 - DNA, 545 bp, Prunus persica
  Intron number 1 from transcript ppa002647m (locus ppa00264 7m.g) derived from phytozome v7.0 (chr-ID scaffold_2; pos 19593264 to 19593808)
ttcgggtatttgtcacaacttgaattgcattttggattggaaatgttaaatggaatttgatatcttattgaaatttagattgtgcttattggtgaatgctggttttcaatctgcaatcttgttttttgttccttgtcgatatgtttgtatggttttggtgtattgacattcatgttgtaattggttttgatgcaattatatcggctcaagccaacgatttaatctaagttagtattgattgttcattgttgacttatttactccataatcaatatcttcttctgcttcatataatttcttgacatgaattgtaatctgtcattccctgaatctggtttttgttttcaattttgcatgtcctttgtattatttattatcagattgcgctaactttcaagccaatttggctgactatatagataatttattgcttctagcttgcccattttattgcttgttagaaatgagaaaattgtttttgtgttctcattcagtcattatttcttctttgattcatttattctctttttcttggtaacagtaca

SEQ ID NO: 70921 - DNA, 652 bp, Prunus persica
  Intron number 1 from transcript ppa005735m (locus ppa00573 5m.g) derived from phytozome v7.0 (chr-ID scaffold_1; pos 31988077 to 31988728)
gcattcaggttttctttctcgattcttgtcccctcttttctttttctttttctttttctttttttcctcaaaaaattataattaatatttactgattaatgtgattaatatttgatttatgatagttttggtatgtatctgaatctgatgaacaaagacaaagtaacgatgaattaattttggttcgttgaccaaaaaccactaagaaacgaacgtgtctaatcgtcgtatctgttgcttttgtgaatgggaattggaaataacgtgtttgcatttatttcttcttactgccgttttagttgtctattcccacttttcttgctaccgtagctatttaaaagtaaaatttgaaacttgtttttttaattaattcattatagtatttttttgttcttttttctccaccaaataattcaaaagtgtttcgcacataccaattttaaatgtttcaataaagtcgtataaggtcactgttctcttttttgttttgttttttcccttctggttaaagatttgttatatatttttaatctcaactcttgaatacggccaaaactagaattacgtgactgatgtattatcttaatttctgggtcgtgttgacaatgtgtatgcagggccttttgcaatacttccacctggttgaaggctg

SEQ ID NO: 70922 - DNA, 942 bp, Prunus persica
  Intron number 1 from transcript ppa025399m (locus ppa02539 9m.g) derived from phytozome v7.0 (chr-ID scaffold_4; pos 1428582 to 1429523 reverse strand)
ttgtacctgtaattagtgcgataaatacgcgtgttactttttactcaagaaattcaaacccataatatgaggttaattagagtccatccatttcagttaaaaaaaaaccttgcattcttctcgcggtgtatcaaatagtaacactctatagtaattttttttaaaataaattaattttatgattagacaataaaaaatactttagtatgattgtgacattaatcttatcgttcatctatattatatctttcgaattaataacacgaatgataccgtaacccgcaagacacatggtgtttaagtcatcacctaatttggaatggcactaaaactaaaaattgaatcaaaagtccttcccttattaactgttgtggaaattatggcatgatccaagggtcgaaagtgatgatgggatgtgccacatttcttttagtgggaccattatattgacaagccaacaacaacacatgtgcacttgccatcttcccaagcaaaacaaagaaaaactgtgcaaccaaaaattacgaaagtgaaagaaaaaagaaatagaaatgtcatctctttcaagcgaaatttcttaagattcctttttcagtcacatctcaatcactttctggctaaaggtaatcttctctaatcatacggccatggaaccatgatctaaatgctgatatctcccagtttcttaatgcttattgacaataattagtgcacccacctttccctttttcttgtacatgaattgcttgctcacacattttcttcccaattggataagatttgtgtgtatgtgaatataataacaagatagaaagatacagttttgggttcacttattatgcagaaattttgttgaattctcagtgtagtttcctttctctcattccacaagtatttgccaaatcttaatggcattctacagctccagccactacgagactg

SEQ ID NO: 70923 - DNA, 997 bp, Prunus persica
  Intron number 1 from transcript ppa003096m (locus ppa00309 6m.g) derived from phytozome v7.0 (chr-ID scaffold_6; pos 1416419 to 1417415)
aactccgttgcttccagaccgtcacctgctttcaagtaagcccaactctttattttacacctttgatttcttgaatatatggaatggaagattcaatctgatgatatggtatgttttgtcttaaggacagtaagttttcttttttttgttttgttgaaatttggatttgtgttcatataatatgtagtgtttgtttgggcaaattgggatttgggttcttttgccaatatcaaggatgaaaatatcggccgatatatccttcttggcgatatatcctgataacccccgatatcgtcgatatttaccgatatttcccaataccagataaataactcagaaatttgtcttcagttttgaaagtaatcataggtcccagccactgaatcaatgtcaaaaaccaagctctaatacttagtagcttctcctttattctcttctcagtcatttcggctatctttgactattcccctcctctctctggttgatcggtttcttgtgtgtttgattttatttttcacctaatcttctatctttcatttcctttatcattaagtctgattcttgtaatataatgttcggttatatattaatgggttgggttgggttatgtttgaataatgttgtctttgttgtgttaagtctaactgtatttattttcaagattttcatcacgcattatatatatacgtacatttcatcatatgcatatcttatactttgtatattctgaattttattagttcaatacattcattgataatgtgcttaatatctataaaagtttcacttcaaaattccgtgtttgtaagctattatctatgttttttgtatcgctgatacctaaaatgacatcaatatatccccgaaatatccctaaattgaaggcccgataatatcgatatcgccaatattttcattcttggccaatatatacacccaagtgattgatctggtttgtgtgatttgctatgtcaggctgtggtgaataacttggaag

SEQ ID NO: 70924 - DNA, 804 bp, Prunus persica
  Intron number 2 from transcript ppa025860m (locus ppa02586 0m.g) derived from phytozome v7.0 (chr-ID scaffold_1; pos 27050571 to 27051374)
agctagtctttattgaacgtatttgtcttctcgtattcatataaagcatataatcaaatgtttttggttaaatagttatttttcctctttctgttggttctgtatgaaatgagatgatgctaaaagaacttgccatcatcctgatattttgtttggctgataaacatttgagttagtaattagacccttttgtgtcggacaagaaaattaataggtgtagagttgaagatgacgaaccaagtcagaagatgtaaagttttctttcagacagctcttttcattagtttaattttacatataggcagtgtgacgacgaggcattagagggcttctcatgaagtatggagataaaaaagcaattaagtgaagttgttattcatggagagctttggtgctatctatggtatgactgcagatgagtttaaagtatgatctgattaatggctgagatacctgctgggatgttgaaggttgtgtagatgatgtcttatttttcccatgacctacttttgttctcaatcatcatattgattgtagattgataaaaagcataactcagcgtacttttcttgcacaaggaacaactatattattttataagttgattcttttttggcaatttgcatgcatttgttgggcattctaatcatgtattttgagtttgtcgagttgcacggtgtcctggctgcataatgcagaacgtacaattgaatttttttagtgagacaaattattaattgaactatttctctttgttaaatattttcaggactgtgagcgcagagcactagtaaagctattccg

SEQ ID NO: 70925 - DNA, 1036 bp, Prunus persica
  Intron number 4 from transcript ppa009201m (locus ppa00920 1m.g) derived from phytozome v7.0 (chr-ID scaffold_7; pos 1273819 to 1274854)
gaaggattcattctgttcatcgccactccggcgtatttacttggattctcttatagttttactgtcaaaagtgggctctacccagtcctactaactgagctcagtaatggttcatttttctttaggatcttaatttatctaccattgttaatcaaggatgccaagattatgttgtgggcatgcttagatagataatatgttcgatggtcacttataatgtggggaaatccatattcctcattgaaaaatacactttaggcatcaacaatattacttacaagcgaagttttttatatagaaattacactatagcttgaactaggcgagaaaggagttcacttttgctgttgggttatctgaaagttttgttgctctggcctctagctgctttttgggaagaaaataggtgtttctcttgctgcttagaagtataagatgaaatcttaaaactttagcagtcctggtgctcagagagtctgactacatttcacaaatcgatagactgtttctttttcagccctaaacaagagctactaacattgtgaatgtctttgatgtagcctccatatcttaagtctgtacacctatgcttatcactaggattctgaaataaaagaaagtagcatacagagtgctgcttatttgaaatgccgcctggaattgaaaagtcactagatatggttggaatctgcaagactgggctagcctgattcttatatccctgggtgcttcctttatgatttcgttcgtaggttatggtcaaactggtgatatgatattctaagcagcatgtggatttgtataaaccattgctaactgtagtttgatacatcatagacagatattgagatattcatagaatgtatgatattttgtgccagctttagattttttgatatctcatgagatttgtctgataattttggtggttcaattatgacctatcaatcttagcgagagagctgacttttaaatttagtttttgatgcattttatgatgttatccaattacaggcagttgctggattagcagcag

SEQ ID NO: 70926 - DNA, 598 bp, Prunus persica
  Intron number 2 from transcript ppa007842m (locus ppa00784 2m.g) derived from phytozome v7.0 (chr-ID scaffold_1; pos 17444277 to 17444874)
ttcttcgacagattttcggtcccagcgccgataaggtccccctcttctcacactttttctttttcttttaatattttttggggttcaaattatttatgtgtgtgtattttgactctggtcctttgttccgctactgagaagatgtttgaaggaagagagaagagaacaaaatcttttcttttgtgtcttctttttcacctttttgcagtttgttttggtattaaaaaaagaactaatagaacctgaaaaaaaaaaaactacaaggaaaaatgctttagctctttacctgtacggtgacattctcctgacaagtctagcagaatttgacaagtgtgcatttttttttttctcaataagtcaaaacatgcaaattgtggttagcttgtaaggattggaatggctccttgcatctaacaaagctagagcatatgcaaatgtctcgaactaattaaactagcatttaatgtaggaattgtgatattttctgtatttttttcacaagaatcccctcagcctggcgtttgaaattttgtacattgtgatgacgtttgagaaattcttctgattgtggttggcaggtgaaggtggaaaataggac

SEQ ID NO: 70927 - DNA, 501 bp, Prunus persica
  Intron number 3 from transcript ppa007842m (locus ppa00784 2m.g) derived from phytozome v7.0 (chr-ID scaffold_1; pos 17444878 to 17445378)
gaaagttgatgtaagtttcatccacttttgtattgatgcgattaatcatggatgctatagaaattgttgtttatatgtcatttaggtgatgctatgttgatttctgacttattggtaattactgttgatgttttgccaatttatagaacatgctaaagcattacgtttctaaatcattacacatctgattaattgttttttaatgcaagttcaactttaccctctgtctgattcattttcttaactttttcaaatacccccgaattggtttttattttaatgctcactttatttcaagacattttggcctttttaacttatacaacaattatttatgtttatgaaagattcttttttcttctaatatctccttgttcaacttaaaaccattggttccatgaatttcctttgattttattttcttgtgttccatttgaactagaattttcctatggtttattttcaggctggaagtagaaccattgatatagagctgactac

SEQ ID NO: 70928 - DNA, 568 bp, Prunus persica
  Intron number 1 from transcript ppa011842m (locus ppa01184 2m.g) derived from phytozome v7.0 (chr-ID scaffold_6; pos 26220470 to 26221037)
aggtttttctttcgtttctattctcttcataaattcgtgtacgaatgtttttgggttttggtgcttttgattgcggtgaaagttatgatttttcaatgcttcaatgatctttcggaattattggtatttcgatttcaattgaaatttttattctttattcgcttttaatcaatgcggggtctgtttgattgctgggaaagtgaaggaaatgaaaagattgaccaactgaatagttttgagagtgtagttgttaattcttatagaattgaataaaggatttgagcttgacctgaacttttttatgattatctgtaattcctatgattttgggtaggatcagagcctacactgaaaattattgaatgatgaagtagagtttaagacagtattgaccgactcaaattgtaatacttttgtatgaagaaaaaggaagaaacaaatttactcttgtcacttgctttgatatttttgtgataattaggatggaatttgattttctgattctgggtcttggtggtgatggattattgcagagattagttcaacaccagccgacgcagtatccgac

SEQ ID NO: 70929 - DNA, 881 bp, Prunus persica
  Intron number 2 from transcript ppa011842m (locus ppa01184 2m.g) derived from phytozome v7.0 (chr-ID scaffold_6; pos 26221130 to 26222010)
ccaaggtattgttgatgatataatgtaagaggttacattgatatacctgttatatggcaactggtttttgtatatatgaactgtttgagctttagtatgctcaatgagaagctttgttcttgtatttggcaatagtgatttctgaaggaaagattctaagtccctgagtgcatggggttaagtctgggaatgtttgtgcctccataatcccagataaaagtttttagtgtttatctgattcatgggaggccgatataagtaatggtagttcgctgatagcaccttttgtgtttagaaggtatgctaatagtaccttaccatacatccttactttgcaattttctttatctggattaataattggttaactacaaacagattccttatcagaagtgggaataaacctttgtcctcgatgactatgtttcgaaatcaccttgtttctttttgacccatttaaggattctattttttaaggagagtgtatagtagaaccgggaagatgtagttaggtatgttatataacggttattctcgaataaggtcctcagatagagctaagttttcgagccattggaatatgaatgacttagatgcattgaaggatctgtttctaagttgttagagcatagatttaacggctctgaaacaggtccttcgcagaggatatctgattgttatgtacttgaccatcttttggaacctttaattggacagatttttgggatttgaattgttgtcttaagaaagaatggtatttctgctaataagtatttgagggtttatttcaagttatgctggttttgccttgctgcttaatattatgttctctttatgttcatccttggtaaatccattttgtctttgttctgcaaaggtgg

SEQ ID NO: 70930 - DNA, 756 bp, Prunus persica
  Intron number 1 from transcript ppa004986m (locus ppa00498 6m.g) derived from phytozome v7.0 (chr-ID scaffold_4; pos 12790755 to 12791510 reverse strand)
tacccaaaacccgcttcaaaatcaaggttcttttcttttcttttctttttctgttctcttttgtactgctggaattcaataaaggttgattctttagatacccattattttaatttggatctgttacccattcgaaaaccaagatgttgccaaatgcatcagatttgataatgggtggtgcgagattttagttaagagcacgacttggtgttaatatggatcacaaagtgatgtgcaatgggaaaattctatagaaactagtttgtgcaattcttatgtttgtaagtattctcaggtttggacattttatctctttctccttccccatatatcatggtacgttggtaaagccaactttgctaactggatcaccaaagtaccacgaattggaacacttgacccggatcatgattcccagaggttaggggaatctgttaaccccaataggaatattatttgcttgttttaacgcttgtaaacaacaagaagcttttgaatacagtttaatagtttaaacatgcggagtatatcaacatgggtatttctgtacatacttattgacccaaaacaaaaaaaaaaggggtgacattctaatagtttaaagatgcattatgtatgctataaagggaaatgtctgcaattttcccattactccataaggtattcgttttctcaatgccatgatgtgtttcctccaatttcaactccttgtttttatttgcctatgcaggcaggcaaaactttaagtgtaaggaa

SEQ ID NO: 70931 - DNA, 739 bp, Prunus persica
  Intron number 4 from transcript ppa009251m (locus ppa00814 6m.g) derived from phytozome v7.0 (chr-ID scaffold_4; pos 6568887 to 6569625)
caagtacttgggtatattttgatgaagatctatgcttacatatcagggttcttcatatgtctattcactattttctttcttgataatgtggtggatgtatgatcttttgacatagttctacagtagtttattggggaaggggaaaaaaagaggtacaatgttgggaacacaaacaaatatgtatgatcaaatctataatattgtgttttaagtagatattaactgtcctttggttgaagacataatcacttggactcaatagtgaggaacaatagcagcagtgtaaatcatttttataaaaagctagacattgttatcaagtttaaaggactagatcaatttctgtgatcagatgttcatgttgagtgatatttccaatatcacttacaagctaaatgagaaaaattcagttgtcacttgtcagaaagtttcttttaggtgaatattatgtttcagaaacgcaagagcaaggagacttataaaatgatgtattttctttttcttgctggaagaaaattgtgtttttgatataatgaattttctgatatctggtattactgccgtatctagctgcatgtttaagcagactttggtcttttctcattcagtaactcacacatggtatttccttaaattttcggtttgatgctttgatgctaaaacagtgataaaaatggtttatctggtaataagtagttaatctggccttacttggcactttccagatcactcagcacga

SEQ ID NO: 70932 - DNA, 507 bp, Prunus persica
  Intron number 1 from transcript ppa008729m (locus ppa00872 9m.g) derived from phytozome v7.0 (chr-ID scaffold_1; pos 40967108 to 40967614 reverse strand)
ataaactactacggcttgggcggaaattgaaagaggtaggtctagcaagtcaaaatatgataagccctgaaagtgacactaccatactggtgacctaaatgtcttttatttaaggtatattatatttttacttctgattagaagattttttttttccaccctttggtctatgagtgagctaaccctggttgtaggcgtattctcccatgatcctaactacagcttcctcaatcaggttcaaattccccttcactaaagaaaaaagcaggcttttacttcttaagataatacttgttgggagtacaagactaaaaggatgttcacaatctcctggagtgataacttgtgatgaggataatttaaaatcaaattttccctttccatgactatacgaggaaattggtttttttctatttggtggctcttttaatcatcaaggaatgcttaaatttgtttgagtttgttgcgctgttaacttaacagtattggatgcttctttgcagattg

SEQ ID NO: 70933 - DNA, 911 bp, Prunus persica
  Intron number 1 from transcript ppa021751m (locus ppa02175 1m.g) derived from phytozome v7.0 (chr-ID scaffold_1; pos 6947173 to 6948083)
agcgcagtgcaatttaaagaagccaaaggtcatcaaagctcctggtggtgctagggtttcttattcctagtttaggaaaatattggattttgtttcttaccgcacaagatcttaacaattttggatattattaaccttaatattatcgccttaaaaaaaaacatatctacagtgcatcatgaagttggggcaatttgtagacaaagaaattttggcggaataaattccattagataagaaaataattagggttcggtggattaaattatgggccccataattcgccgatgtggcatatgactcatcaaaatcggattggttgtcaaaagtgacacgtgtcgacatccgacagagtgcatcaaacggttcaaagtgaagacaaaattaaaggaaagaatcttctgtgattaactttgatttaaatcaaatattaatcaagtcaatcaatcgaagataatttgattaaattgccaaattattggaattcattttaaatcaaatcaaaatcccacaaaaataaggttttaaatagggaaagctatttaggtcaagcaccttacaggagcctgtaaataggaggcctcaagacgaaatagaggagcttagacagaccaagcattcagaagaaacagaaaactctctgcattcttcacctcactttggaagagccaccaagcacaacaaataagtgccagttcctccaacctagaaaaatccaaacaccaaacaagccttgtgctacccgtttgatcaagatcaagtctctacgacccttatatcaaacacaaattttctttaaacactttgaagatctaatcagagaatttaatacaaagattgtaaccctaaatttcaataatacaaatattattttgtacacatgttcttgtctcatttgtcataggaaattc

SEQ ID NO: 70934 - DNA, 469 bp, Prunus persica
  Intron number 1 from transcript ppa003684m (locus ppa00368 4m.g) derived from phytozome v7.0 (chr-ID scaffold_1; pos 44764968 to 44765436 reverse strand)
cagtggttgctcaattcatcaagaacactgtaagaattttatgtttaattctttaattttattattacgtcctgaaccctaactcgcctatgaaaaatgttctaagcctaaattgttttcggctactgcaattcctagggattgaaaattcagaattttcatataggtccataaggtcaattcgattaattttgcttggcatttaagcaaattccgtacttgaatttggtaaaagaattcagtgtttttttttttttttttttgtttgaatcttattatcttctgctgagtttaatacctgaatcatgaactgaaaatgaataacctcatgtgtactggaaattcttttacttagtttgagatatttgattgtgctctgtgttttttttttggtccttgatattgactactttgattattctttctctttctagtttccttcactgaaattttcatagacaacaagtga

SEQ ID NO: 70935 - DNA, 741 bp, Prunus persica
  Intron number 1 from transcript ppa001948m (locus ppa00194 8m.g) derived from phytozome v7.0 (chr-ID scaffold_8; pos 21071437 to 21072177 reverse strand)
ttcttcttcatttttttcccaaattcttagcgaaggtaccatctcctcccttataactccttctcattgtttggaatatcgtaaactcatgcgcagccctcttgttcttgttagtttgcttcgatttcagggttttctcgttcttttgtctctctcatcttcttgtaatatttgtttcatgtttatctttcatataggattttgagctattgtttcttcaattatatttggtactgccctttgtagtgtactttgtttttcagggatctgttttttcattctttaaaaaaaagatttttcgcttttcttcggtcgcattgtattatgttttgtgcagaatatatgaattcaaatcaatggttgattgttcatcatctatctagggtttcttgcttttttcgcttttattaagttttaaaaaatattaaatatacatatgcatgtagaattccagttgtgggtttctgaattcgatttctgggtaaacatcacgcatccttcagttatgtgcccttagaatattgtccctgttcatttattgttacttattggtagttgttacggactctacgattggtatttattcgtcaatcatttgttatgactattgggtgttaatctggatttgttccccaattaaaacacgcctgtactcaaactcaaaccatgtgttaacattttaatgattttctttctgtgttgatagaattatagttggaggatagcaaatcctttattgca

SEQ ID NO: 70936 - DNA, 490 bp, Prunus persica
  Intron number 2 from transcript ppa000461m (locus ppa00046 1m.g) derived from phytozome v7.0 (chr-ID scaffold_1; pos 39429347 to 39429836 reverse strand)
agaaacgcattaggttgcgaagtccgcctgagaaggtaatccatattaatatgattacacgagcttatatacttattgattttctgttgcttaattgtttattagcgcctaatttagcatattttgtcattggcaaatttaccagtatgttaagcaagccttagaaaataagtgctcgtgtcgaaaagaattacaagaactagtatacagttcaaaaagtttatttcaaatttgaaaaactatgacaatccgattcgtgttaatatttataagttaagttgacaatggctgatgaggtagatctcatgtcctggggttattgactacaaatcctaaactctttgcatatgcttgacactcaagtttaaatttttgttgagcaaaacttaatcattggggctttgattaatgaacaattacctcttgtccaatgacatatgctattttatatgaaggtttttgagtattttgcatcctctagtacgccaga

SEQ ID NO: 70937 - DNA, 597 bp, Prunus persica
  Intron number 1 from transcript ppa023890m (locus ppa02389 0m.g) derived from phytozome v7.0 (chr-ID scaffold_2; pos 17092010 to 17092606 reverse strand)
gggttagcaagtgtgattttgctctgggttctaaggtctcatcatcaattctagttatttgaagttgaaatgataaagtctcatacttttgttggtctgtgtgagatttgatgtgaaaagtgaagcttcgtttatttgtttactgttgatgctttgcttttttgtttttatagtgtttagatgaatagattatcaactgtggagtttgattggttagcttttattttttattttttttgggagccaaaattgaatttggttcttctgttgtcaatcattggtttccaatctagtagggtatattagaattccaagaagtcactatcttgtttagagtctaagaataaaaagtcaaaaatgttagactcttcttgagtttcttatagacaacttggttgagattagaaactgaaagtagtgaaaaaggaatgtcttttaacagttcttcacatctttataattatggtaagcattgaatttttgtatggatagttgagctatgaatcttttttttttactgttgtttatttaaaatggtttttgtgatgattgggaatttcagataggaggcaaacgagttgggattgttggattggg

SEQ ID NO: 70938 - DNA, 626 bp, Prunus persica
  Intron number 2 from transcript ppa005954m (locus ppa00595 4m.g) derived from phytozome v7.0 (chr-ID scaffold_2; pos 26730561 to 26731186)
acgacaaaggtgattttttgatatcaaaataactgccatgttactcttagagcatctccaatagtaaactaaactcttcaaataaaagtttgttgacctatgtggcaatttgaaaatgtttatttgctactttaataatttatgctctacagactcttcaattcaattaatgtaatgttattgaaaagaatgaaaaatatgaaaacatatgaagctttcaaaagagacgttgttaaattacctagtcacatttatatttggaatttaccatataaacaggaaacccctttgcatttgtactctgatgtattcaagttataattgtactaaatcatcggttcctccattccttaagtagttctgtatcaaagaatctaagtggtgataaaatccgcttcccaggttatgaattcgattatggtgtgcctacctaattagaaatgaaaacttttggcaaatgaaataatgtgaaatttaattaaattataattaataatttactagggcattttaatgtgtttgtaatgtatgaagttctgcatctcacacccttctatctctctatctctctcttggtttttcttttggcagacattgcaaagaaaaaaaagaagaaaagtaaaagc

SEQ ID NO: 70939 - DNA, 820 bp, Prunus persica
  Intron number 2 from transcript ppa007092m (locus ppa00709 2m.g) derived from phytozome v7.0 (chr-ID scaffold_6; pos 13271847 to 13272666)
cggttctgattccactctgattccccatcttcttggtaacttttaatccctcgttttttcattgtttttatgagcatgctctgtttctgccaacggatttagcccagcataacagtggtctaagttcgaattcaaatccccatgactccatggtagtgtgtatgagaaacccaccttcccttatagtttaaactatcgcttgtattaaaaaattgattgtgctctgtttcttggacttaatttcctttaaattatgacattttctgtgttaggcctttgcttttttgtttcttggacttgaattatttgagaatcggcatgtgtatgattgaagttggcgttcttggttcttctgtttttttgggtgggaatttgactagtagacgctaaaccatcaaagaaaattcgacttccaaccctcaaatttgcttcaactttcttctgatgaaggaaaaggcatagatgcttgtaagcatgggctggcccaaaaagtatataaatatgtagagcctggctgctaattgaataataaacacaatttatcagtgtccacttcagtaaattacggctaaccaaagtaattatgtgaatatatattagtgtgccaatacattcatatatcctgggaattttatttaaaacatgcttattgctacctatatgttcatgcatcatgggaatttgaaaaaagaaaaaagaaaaatgctaacaaggcatctgtttattctgcactgcagtaactagaatcaattgtgtggattttaatttaatgaaaaaagggtttgcacttacatatttgtttgtaccaacagctgagaag

SEQ ID NO: 70940 - DNA, 580 bp, Prunus persica
  Intron number 1 from transcript ppa008818m (locus ppa00881 8m.g) derived from phytozome v7.0 (chr-ID scaffold_1; pos 11163180 to 11163759)
cccagaccgtcgtcgaagttagagccctcgagaaggtcttgtattctttttttcttttttctttttataaatttagggttttcgctattttcatcgccaatttcatgctttcattctacgtttcatcccaattttcctttccaatgtctaaagtcacgttcttgcaatgaaaatgttcttgttcctcaatacattttcaaattttgttatactattgggctaaaacgtgtgcttgcctttgctttgtgggtgcttgtgtgagcattattgcacttatcaatagacaattgccaatggggtagttttagatggtattagtgcaagcaaaactgtaagtttggaagtgcttttcaagtcgagaattgttcatgagtatgcaaatttactggctttcatttccccaactttgtctgtagtggtaccactacttgtgagattcataatctagtatggtttttgaaggggctatattatgaaacttttgtttagttaatgatttgaatttttttttcttcttttataagatgctactttgcttattataggctttggaagaagttgaaaagaattttgggacaat

SEQ ID NO: 70941 - DNA, 578 bp, Prunus persica
  Intron number 3 from transcript ppa008818m (locus ppa00881 8m.g) derived from phytozome v7.0 (chr-ID scaffold_1; pos 11164053 to 11164630)
aaccatttggagttactagactttcttgtcgtgtggtaaggttatttaatgctttcatgaatacttatgtttaaaacatagatcctttacttttctccatttggcacagtttggcgctcttcgtttactgtcatgttacaattatgaacttacggacatcattttgttcatctttgcaataaactacagtaagcagtggtttagcagatgctacttaaccttatactccctgtttcgtgagtgcatatgtttttcttcacaattttgactattataatctttgtttttaaaacaatttgtgcaactagagtgatcttgtccaaattcttgctaattttgacacttgcagtttctttacttaaatttgcatgctttttttattgctttcaagtgaatgatggactcatgcgtgcatcttagtgtaaatttggccagcagctatggccaatgggaaattgtcttaatggtctactcatgtcatcatacttttttaactgatagattagtattgcatgacacttattggtttctttttgtgagcagctacgacaacaaggagattgccttgaattgtggaa

SEQ ID NO: 70942 - DNA, 406 bp, Prunus persica
  Intron number 1 from transcript ppa000610m (locus ppa00061 0m.g) derived from phytozome v7.0 (chr-ID scaffold_5; pos 14625643 to 14626048 reverse strand)
cggcctcctgcacaaattgtagcttcagttgtaaggtttgttaaactcttatcacatcttgaagctagtttttgccttgaattttcggtgccttatctctctctgtttctttctgtgtcactgactcactctggttttcagtgactaacatatgttttaatgcatttatttaggaaagtgagatacaaatttatgcagcaacaaataactcaaattttcttttatctgtttattttgtaccagagaagaactcttgttattaaattaaaaaatttcccttggtatttcctaagtaattatcttagtataatgctttatcatttttttcctttatgttttatgttggagttctgttgtttcttatactgaaactgaagaccgcatatatattccatgatgcagctgg

SEQ ID NO: 70943 - DNA, 569 bp, Prunus persica
  Intron number 1 from transcript ppa019307m (locus ppa01930 7m.g) derived from phytozome v7.0 (chr-ID scaffold_1; pos 32887831 to 32888399 reverse strand)
tcttgcctgcgttcgtttgccatccaacacgtcaggtaaacttgtagtttacaatacaaacaaatatataacaaaattacaccatcaccattcacccaagcttaaagctttcgcttttatttataaattaattaaacttgagagtattttttttcttttctgaagaggactgtaattaattttgctccatgaagaaagttcaacaaactcgtctgttgcctaaacaaggtaacagcaagatggatcttgaggaaattaaatctggactctcgctaggaggagttgccatcaaatctccatatggatcgtttgcgtgtgggaaagtccacctagcgagctaactccatagtccacagtcacccactccactcttctgcttttcttcttttcattcttattctttcactgtttgttagtaaaactgacgaaaataataatgtcccatgaattttctttcttctttatttcttttaacactcaaatacatattacttaagaaaacttatttatttaattttctctgttgtggtggagtacatacactagggttggaactggcacaatttcca

SEQ ID NO: 70944 - DNA, 552 bp, Prunus persica
  Intron number 1 from transcript ppa002703m (locus ppa00270 3m.g) derived from phytozome v7.0 (chr-ID scaffold_5; pos 1043915 to 1044466)
gatctaatcatgtgattatcatattacgataattaggcacaaatcgatgtcgttgttggttgccgtttttcttttttccttgtgatgaaaaaaataatatgaaatttatgggcttgttttgattttgctgtactttgagaattagcatctttagggattttcgcgcgaaaacttgaagctgtttttggggagggagagagtggggatgcgtttgacttatttcaagttttggacaatatatttaattttattaatttgtttatttgaaatctggggtgggagggattcagtttctctttatttcctaatttaaatttcttcataattccttagtaccattctagtgtattatatcgtactatagaaagacgcaaaccattttgtctgaaaaagcttcagtttgtcttttcttgatttaattttcccttttctttttcaatgatgacagaaataaaattatattttcttgggaaatttcatttcagcattgacataggtcttaatggtttctttgcagagccaggaggttttgaaagcgacagacagtactag

SEQ ID NO: 70945 - DNA, 591 bp, Prunus persica
  Intron number 1 from transcript ppa008394m (locus ppa00839 4m.g) derived from phytozome v7.0 (chr-ID scaffold_1; pos 45671689 to 45672279)
tctttgtttctcttcctctcctccaccaccaccaggtagggaacacctatttgcagttctcttcttcatctcttatcttctgtaaattcaattatgctttgtttttttttcttttgcaagtttgcttaatctcttttacttctcgaccaaaaaaaaaaaaaagatctcttttacttcatgcctgcctctgctctgatctgccatccatctctctaatcaatcaatcaaactgggttttaagttttgtatgattttgttgttggttatatatttatttatttatttattgatgattgagtggtgaacacaattggttatccgtttattcctccataagatccttttacagtcaaaaaaggtgaaatctttttagctgtaaagccaaataattgtattttattctggtgttgggccctttattctagatttctgaacacgaatgttaattgttaggccatattcttctgaagatgtgaaggtctctttcatcgtactgtattgatatatgcttgcgtgctctaccctgtttagggtttttttttcttcttatttatttttctgtttttggggtgggggttcattggtgcagat

SEQ ID NO: 70946 - DNA, 365 bp, Prunus persica
  Intron number 1 from transcript ppa024563m (locus ppa02456 3m.g) derived from phytozome v7.0 (chr-ID scaffold_4; pos 10149883 to 10150247)
ctctaaaggggagccttggcaggcagctcttgcaggtacctttttttttttttctccacctctaattcaactgtgttcttagcagaagtttgttatattttatctaagaagcgcatagagtaatcaatcaaagatagcttactatatcaggttctttcaaactccctaccactgtctggttgtcttcctcttttagccaacaaggatatctcataggatgcatgatgtagcactatttctacaactagttctttgaatttttgtttgcaaaagcaagaactacatatatgcaattccaatgtcccttacattgattaaattaaaatgcagcaagagatcttattgatacacatcaagtgcaagca

SEQ ID NO: 70947 - DNA, 568 bp, Prunus persica
  Intron number 1 from transcript ppa006650m (locus ppa00665 0m.g) derived from phytozome v7.0 (chr-ID scaffold_7; pos 20504125 to 20504692 reverse strand)
gagctccttcacagctaaagctgcttctttggaaggtgaactttctccaccttctttgagcaaacccagcagctcataactgcttcttgaccaaccccattttcccatattgcacaattcactttattgcggtggataagtttgagttgttttgttttgtcaagggtgccctgtttcagattaagagctgtttagagttatatgtagtgaaagccagaaaatttgagaaaaaaacattacaaaaagaatttatctttataatgaattgtttccaaagtttagacattggcattcaatattaaaagtgctaagaatttgatataaaatcaggtaagaggaagtggactaaatgatccaaatattgtgactttgatttaatagatgttcttgtatcgttcgaaaataaatgtggaaaaatgcaatgaaggttgtgattctatgggtatggacatatgtatatttctatgttatgagtaacaattctgtgacaaaaatgtgaataaatttatttgaaatctgatgatattgatttcttgttattttacattttcctatttgtttcgttcag

SEQ ID NO: 70948 - DNA, 528 bp, Prunus persica
  Intron number 1 from transcript ppa002015m (locus ppa00201 5m.g) derived from phytozome v7.0 (chr-ID scaffold_5; pos 12511474 to 12512001 reverse strand)
tttggatctcgatcgctgcggcagcaatttcgtcagtttcttattgctctgcttgtttcaaaatctcaattttattgttgttaacgaactttgggggatcattttaagctgtttggttactgagtgaagctagatttgatatgagcttaagatctttgctttggtttgagattggacttcgatttgtgaaattgaatgcttgatttgtgaatgcggaattagttaggaatcgggggactttcattttttaattggtgtagggtttaatttggttttaatttatgcttcagatcctcaacggtctgtattgatgagcacaaatcacaacttttgcaaatgctattatcttagtcgctggagtactctctttgaaatgaatattgctgaagaaaacccatgttctactgtttccagttttgtagctgattcataacccgttatttttttgggtgaaaatgcataacccattatttgatatattatgcttgtattctttcataggaagatatacggagggaggcgcaaacg

SEQ ID NO: 70949 - DNA, 552 bp, Prunus persica
  Intron number 1 from transcript ppa011263m (locus ppa01126 3m.g) derived from phytozome v7.0 (chr-ID scaffold_6; pos 25583832 to 25584383 reverse strand)
gcttcaagacatttgtgtcgccgacctcgctgccggtactcttcttcttcttcaaccatcatctttgtttcaaatatttcagtattatagtgctaaaagtgaacaccaaaaaccatggaaaaaggactgagcatcccactttttttttctttttctcctctattattagaagttgaccctgttcatcctttttcttttccctttagtaactgtttgtggagcttcaagttaaatgatttgtggaaagattgtttgatgtttctttagattataactgctgcaacttgcagctatgtcaatattctagctggctatgcttaccctttgtttaattaaattttgttgttttagcttacttttctcttttcactttaatgtttttaagcttagtaatcatgagcttatttgaccccaggaattaagcacatttagctaatacctgaaactgattaagaaaacccaattcatgttttctagaaattaagtaaaaatttagtagaagttttgcttgatcctaagtgaattgtgatggataaacaggggtgaaagtca

SEQ ID NO: 70950 - DNA, 492 bp, Prunus persica
  Intron number 1 from transcript ppa018053m (locus ppa01805 3m.g) derived from phytozome v7.0 (chr-ID scaffold_6; pos 1661040 to 1661531)
gcaattatgttagtacttgattaactttatttcatatcttcctttacttttttttttcttttttttttaatactttgtttcgtatatttcatttggtgccaattttgaagaaataggatgtcattaatatacatagcatgcatttttactgccatgtttattcctcatttcaaaagaaaaacactattcgcactcatgttgtattctcaagcttcttttatgagaaagtacgaataactttcatatactctgaataggagcacatgacgctcgagatgcgaaaaaacacttttaaatagtgtactttatagtactgttccaatccaaacatgaaaattttacatttttatttattaatttttgtccatgatgacattatcaaattggatttagtagtaaaactgcatgcaaattgtaaattgagtgtcatgtgcatatatgaggaggctcctcttaggtatagaatgttgtgtctaattatcctttacttag

SEQ ID NO: 70951 - DNA, 425 bp, Prunus persica
  Intron number 2 from transcript ppa006211m (locus ppa00621 1m.g) derived from phytozome v7.0 (chr-ID scaffold_4; pos 4181120 to 4181544)
accaaattcaccatcaaagcagctccatagttgaggtgaggtgttgggttttaatatttttacttttcttttggttgctacatacccattttgttcgttgaatgccaagtgtgaaagctttgagttcccaagtgttcaaaagacacatttttttccttgattcctggttgattatgcaaaagtttcagtagttagggtatgtgatcagcctctggatggaatgtatgaatgatgtattgtcgtttgtggtacaattacaaagaagattaattttaacttttcgatgctaaattggcttatgcccctttctcttagagttttgtttttttgtttttttgtttgtaaaagatacttgttttgtattttattaagatgcttagatactgccttacaggaaccacttgacccattctcccttgtttccg

SEQ ID NO: 70952 - DNA, 869 bp, Prunus persica
  Intron number 2 from transcript ppb015714m (locus ppb01571 4m.g) derived from phytozome v7.0 (chr-ID scaffold_6; pos 1213528 to 1214396)
tggagtttggtgctctgttggcatctgggggacaggtaatgcagtgtctattttattaccgttgacataattgctcttacgtgaagaaggtgattgtatattttttgggctacccctttggtttttgatatttaagtttgactttgtgatcttgatttttctttctgtgaatatttgttgatatccatggaaggagaatattgggaacatcaatctagtaggatctgttaataaacaagtctagtaattgttaactatttatttatgtatttctgctacattaagaaaaataatgaaactattaagatagtagttttttaaatacagaggtgattagaagagaaggggccaagaaatattaaaaaaaattactatggatttaacaagagaaatagtgctctccagtttttgtttttacattcgtttaatcttttgtattgattattcacatttaaatttctgaaaggatctatgctgctgttgccttttttgtttgcttttgttttgtttttaggtggcctttcactttgtgaaatgaaaaagataatggtcagcccacgtaattaactgatactaataaggctgaacattttaataattgtgaatcccatcactttcttttatttataaataatatttgtgtttcttataaaaaaaataaaaaagaatgtggataccccatttggaatggcagatgttaagtttttatttgacctatagttgtttgtgccaaaggattgcctaatttggttaattgcttttgtggcgcagtaaattattcttgttttgtctgataaaataaaatattcatgttttgagtgttaattttcttctttgtaatcgatgcattcatttttggattcaggagt

SEQ ID NO: 70953 - DNA, 419 bp, Prunus persica
  Intron number 1 from transcript ppa000416m (locus ppa00041 6m.g) derived from phytozome v7.0 (chr-ID scaffold_4; pos 25741387 to 25741805 reverse strand)
aggtttttttttttttttttactgttatcacattcagcattacttgttatttggtgacaactgcacaacaatttttttacttggtgattgtggtatttggttggggtataataataaattaaaaaaactaatgcgtttcagttaattacaggatttgttgtttatttcagctaattttgagttagtccccactcttctgctttcctcgattttactaattcatgactctggattcccctcgtttttggtattccttgagcttgtggatttttctcttagaaatattgattacttgcaatacacatggatgcttatataattaatgtactattatctcaaggcatttaacttgatacatctccagagttcagttggactttgattttctaagagtggttctattcatgctttttagctca

SEQ ID NO: 70954 - DNA, 573 bp, Prunus persica
  Intron number 1 from transcript ppb018745m (locus ppb01874 5m.g) derived from phytozome v7.0 (chr-ID scaffold_6; pos 13610391 to 13610963 reverse strand)
tctgacagtgctttgacaaggaaaaaagtcaaaaagttttctctgggagattgaaatttttaatcgggtttggaaacagtgcatgtgtaagtcaggtagacgaaaagttgcttacatataaaaccatttcaaaaaataatacggcggttacatataactatgacgtataaattacaaaatacgacggtacatttaacttcggacgtggtaaataaatacgacagtagtgttgtaggtaccgtcgtagtaaactcaaaaattaaagtacataagtaataactcgcgtcatggtagattatttaacacgtcgtttttattaatgtaccgacgtggatttctgtaatatacgtcggtcataccgacgttgattttacaatttaaacggcggtttttttgtaaggaccgccgttggttttaaaaatttattctataaatttgtcgctttcattcattttcagtttacatttagggttccaagttcttcctttctcagagacactgtctctcacatctcaaagacaataatttggatgtctttctcaaagagaaattgagcttactcgcatcaaatct

SEQ ID NO: 70955 - DNA, 553 bp, Prunus persica
  Intron number 1 from transcript ppa002900m (locus ppa00267 9m.g) derived from phytozome v7.0 (chr-ID scaffold_1; pos 24317577 to 24318129 reverse strand)
aaggttattttacgctatctcactttgtcactgttcctctgtttcagtcataatttaaagctttagtctttctctctctctctgttttctgaattatttcttatgtttggttggtttctctgattgtatttggtgattttcagagatgggttttttgagttatggtttaatttggacaacaagggtaacgggagcttggttaaatgttcatctagggactcaactccagtatatggaattcaagattcatgctttatgtgtaggtattaaggcaatattctttgcataacagagaaaatggggtagaacttagaagttggtctaattgtctaaggctggctgatgatgcttttgtgaattactccatatgggtttcttgaaaccgatgattattattatctttttctagaagcaaaaacttagttggcagtttccttttaattaaattgattatcagaaatgatcacggtttagttgagaagagtatttgattgtctttgccttcatcaacctgctgctttggcccttctacaggctgctttgcaggaggata

SEQ ID NO: 70956 - DNA, 671 bp, Prunus persica
  Intron number 1 from transcript ppa019654m (locus ppa01965 4m.g) derived from phytozome v7.0 (chr-ID scaffold_6; pos 10821064 to 10821734 reverse strand)
gccgatttgctgacactcctcaacaagcagagcaggtacaggacaacaaagctctttcattctttcttcactgtaatttaatgaatcaagctgcttaagattagtaaaaattccaaatttgtaattgatatgcataagtgttgggatggttttctttttggtcaaacatagcaattctgaattctaaatatggattcaaatttatgtccaatatgtggtcctagcaaatgggtttcctcaaagcttccagtaagtggctcttgcaggagggtttcattaactgagtttgataacttcatactggtgcttttagtttctttagttacaaaaggaaaagtttttatatgtgaatgcctgagggaaagttaatgtagtccagaggtgcacacattttaatcgttgaggcttaaaccttgtgagcatgggttttagatcattgaatcagttggaaaacaggatgaacataatgaaggtgggggggggccttactttttgcattttttttttcttgataactaatggatttgcttcatctgctcaagcaagcattactatatccaagtgctaaatcacattgtatttgtttgtttcaaatttaaaatgcaagtaatcaaatgtgttcactttctttttctgatttttaatggatgtacttttttaggttgcagaaa

SEQ ID NO: 70957 - DNA, 1006 bp, Prunus persica
  Intron number 1 from transcript ppa008431m (locus ppa00843 1m.g) derived from phytozome v7.0 (chr-ID scaffold_4; pos 2141826 to 2142831)
agctctttggtcctgacccctgggctttcctcaaggtacttccacaaacaagttcttttcatgcatatctgagtttgtttttgtgtatgtgattggcattttgttgggtttttcgtgtattgcctctgttcggttgttttccattggttttagatctgagacaatgtaggtgagttcaaaaatatgattgggatgatttttgctccttttctgcatttgggtattggaagttttctgctttcggaattgtattacgcaatttcaatgcacgcgtctctttctagttaatttttattattatttataaatctttgtattgaaaattgagtatgagtgccggatccatttcgaacagttagtgattttacaaattctacatcgcgtgcagcattgcttgtgcggaatgacgtgtcattgtttcttacttgattgtcaagtgtctctttcaagatatagaaataaactagttgtcatatgttgagttgggtagccaaagaattgagctttcttcctaactgtcctcttttacagcgactatgctgttctaagatgttatgaataaattggcatgctgttggggttttgtaatgctatgaattatgcttcctcatacttttcggtgtgaatggactctcaaaatgcacaaacaaccgtatattggagacatgctgactcgatttttagaacatagttcaacctactaatttgcagagttctgtttaagtccatgaaaattgggttgttaattagtggtgagttatgctgctaatgtactggttttggtgtggttttttctgattcggtttccagaacctaaatcaacttgtaaactgacagacttttgtcagtctggaaacatatgagtattagttagtgttctggtttgagataaaatgaaacttacacttctccattagctgtcttatatatttttttattaatgatctttgaatgaaatcatggtgctgcagattacagtggttgtcttgcttcagctctggactgc

SEQ ID NO: 70958 - DNA, 511 bp, Prunus persica
  Intron number 1 from transcript ppa019665m (locus ppa01966 5m.g) derived from phytozome v7.0 (chr-ID scaffold_1; pos 24795619 to 24796129)
tcgcgggttttggtcgaacccaacattgatttcacgtaagccaataactttgtcattcatttcttgcccatcattactttgtttgaatgcagtgcattttagttgatagcatagttgttgacttagctatctgctaaaatggaatgtttctgtaagttgtgtcacagttcttaaaggcctttttcagaaaagcagatttttttgtcttttctgctgtgttttctttgttttggttgtatgttaatagtaaatttctggtgattggttgaattgaggagaaaaaaaaggttttcaaaatgaacctagaaggtggcttatataattcagaagagtctagatgaggagtacaaagtatgttgctttatttccagagatggtttttgaggattagttcgggcttaaggaaatcctcaaggagtaatggagtggagctagaactatcgtatatttattgccatctgatacatgtttgtatgggtctaggttcctcggtaccccattttttcattcg

SEQ ID NO: 70959 - DNA, 356 bp, Prunus persica
  Intron number 1 from transcript ppa004818m (locus ppa00481 8m.g) derived from phytozome v7.0 (chr-ID scaffold_10; pos 227176 to 227531)
cagcccaagagctgctgattgctttaatctcacaagtaagccccaccatcgaacaactcggggattgaggaggaagagtggttttttttcttttctttttaccaaatgattttattatcattaatttgtttttgggtggaagaatctttatttttttcttccctttaattttttaattaaaaaaaaaaatcatgtacatggtcattcagtttgatagcatacaatgtatttgatagatgttccaaattcatctcaatgcacttcatagttgtgtttgtcattggattgaagtagttatgtgctgatttgattcttaatttgttttgaatttgatggggcaggttcttctctaagac

SEQ ID NO: 70960 - DNA, 227 bp, Prunus persica
  Intron number 2 from transcript ppa024119m (locus ppa02411 9m.g) derived from phytozome v7.0 (chr-ID scaffold_6; pos 9002438 to 9002664 reverse strand)
caatagaggtataaattttcacattcttcaacctttgtctgcattatatgcgtcaaaatggaattccctttaatgatcagatagtttacagtttgaaattgcagatagtagtttcatgttcttgcttatttcttttgtttttagttgcatagagggttctttctttttctcataaagttgcaatttatatagggggttcttggacttgttggactctctccttcaaa

SEQ ID NO: 70961 - DNA, 784 bp, Prunus persica
  Intron number 1 from transcript ppa019568m (locus ppa01956 8m.g) derived from phytozome v7.0 (chr-ID scaffold_8; pos 9711849 to 9712632)
gaggctagaaccaaacaattggtagaggctgagagggagcatttcctgagtcagctttcccaattaattctcaattttgatccaagcatgcttaaaccaagaattagccaaagtcccaaaaatccaatgtctgacaaagcaagctgctctggaggtgatgtgagatccctacattttgaggatgatactgccaaaaatgggaaacatcaggaagaaaaggtaacatatctgaactttgaattctctgtttttttaaaaactattagacgtcgttattattaataaaaccgtcgtttgaaatacataccacgacgattttaaaaataaaccatcgtttgtatttcaataccacatcgtatttagtttacttgttttacacgccattaaacgtcgttatttttaaaactttgtggtttttagacgacggtgttagtcattcccgacgtaatagatgaagagaagaaagaagaaaaacaagatgaaaaggagaaagaagatgaagaaaagcatgacgaccaggtatgttcacataactttgccttttttatttgtttttcaaaatttcagacgtcgatatttttctttaaaccgtcgtttgtttacaacttagacggcggaatttttttctaagacgtaataaattattcaccacgacggttttttcaccgtcgtttaaattcttttcagacgacgttttattccttaaaccgtcgtttttattgaattaccacgtcattttttttatttctttaaacaggttattaaagttgttgattattcaaat

SEQ ID NO: 70962 - DNA, 957 bp, Prunus persica
  Intron number 1 from transcript ppa007853m (locus ppa00785 3m.g) derived from phytozome v7.0 (chr-ID scaffold_7; pos 16703884 to 16704840)
ctcgacgatttcacgaacgacgcaatccgattggtacgatcgctcactcactcacagttctactcttttctctcaccttgatttccttttaatcttcgttttgatcattagttgaggtttttaatcatgtttagctctctgcaaatttttacatgagttttgtatgcttccagtttgttcacattttgtgatgaattgtttttgggtttttatagtctgattttctctggctgcctcttgattgtgttagagttgccttggaagttttcgtttctgttatggatctgtttggttgcttagaaaatttaggctgaagaaatgaaaggggctttttgagttggtctgtgctctcagttcttttttgggtagaaaatagaaacagcgcaagcctaagaagttatgttaaaaatgtggtttgtttatttattcttgttaagattccatattctctgtgcaagttgattttggagagttcataagattgtggaatatcgtctttgaatattatctgagatcctgaactgtgttttcatcgtgtaattttaataagacgaatatgcagaagccaatagtgattggtgattgttggtcataagaagaaattggttgctttccttgggtctagcatttagaattgattatgagttaaactatccttttacctaaaatgtaaaatttgtatttgcatctggcgcggtgctctgtcaaatatggaaaacgtgtgacatacaatagtcttcaaatactagacaaattcaaagatctgatcagtgtgtcacaaaacaaatctacaatgaaacattcggaaaaaccagcagtgatgtctctgtctcagatgtgttggcttgtgtcaaatgtctcttttactatattgtacttcagatgtcttacctttttttcttaagttttgaatatttgattgcttttgaaggagtagaacatttaattgagggcata

SEQ ID NO: 70963 - DNA, 650 bp, Prunus persica
  Intron number 1 from transcript ppa005956m (locus ppa00595 6m.g) derived from phytozome v7.0 (chr-ID scaffold_7; pos 14306981 to 14307630 reverse strand)
atcctggttctgattctccacaacaggtactctgaattatatatgttctgttcttttcttcgtaaaatcgtttcttcatttttgttaaagtgtttttattgttgggggcacttgaaagccaaattatatggccttcattagatagtggtaattagagagatgagttgatgattaagtggttgattgagattagtttagtccaagatggattaccagacgaaattgttttcttctttacttactcaccaaccacaataaattaaccgaaatctcttgaatttctagtttttctctttagtcaaatgaatggggacaaatgggaactgaaagggaaaatgaatggggacaaacatcgtctgtgacacaagaggccaaatatgagatatttatacatagaagatgccctcatattgtttttttattttatttttattattattacttggtatagtgagatttgagtctgaaatacactcccaccaaatacaaagtagtattactagaccaaataatcattttcgggagattgaaatgaccctaattttgtttttcgatttgaaatgaccccaaaataaatctttaaatttacaaataccaagtaaatttatgtgctagcgcaggtgcatatatctacagtaggtgcagacaaa

SEQ ID NO: 70964 - DNA, 530 bp, Prunus persica
  Intron number 2 from transcript ppa012193m (locus ppa01219 3m.g) derived from phytozome v7.0 (chr-ID scaffold_1; pos 38274648 to 38275177)
aaggcccctcgtatcacttctaagaatctcattaggtaattatttctatgaaatttaacacaatttcttcattacatgtttgtttaacctctgcttttcgattcacaaatttataaagtaaaatgtaaatcccagaaattgagataattatgatgatctgaagtgatatcccagtaattggatttgatagtggatgtctagtcttaattgagaaatggttctaattgtttttggcaatcacttatataactagcttggttaattgattggtggatggagaattgtgctatctattcaaaacaccccctcaatactgtttcttcataccaatgtgggaagttttgttatcttctttcacttcaagctcactgccattgttgtgagaagttttcttttagtgaatgatgtaccttgaatttttgacttaaacatagcgctgattatatattcttaagtctgacgttaaggactaacttcgatgggattcatctgttgtatcagtgtaatcttttgtgaagctgttgctatat

SEQ ID NO: 70965 - DNA, 1007 bp, Prunus persica
  Intron number 1 from transcript ppa016262m (locus ppa01626 2m.g) derived from phytozome v7.0 (chr-ID scaffold_3; pos 14776506 to 14777512)
gtcaggacaggtctcatttctgatacaggttagtttttgctgatatattaatattagtgtgcatgatatcatcttgagtgatcgtttgcctttttactttctcatttttggtgtttttctttttctttcgatacaaactatagtttaaataattctaatttacaaaaaagggattcggatttgggtgtaatgggactggcacactgctctgactaactctcataacccacatctacatccccctttgatgtctttgatcaatgtcttcaagtttcgcatttttctaagaaaaataatatttttatttgtgccacataaacatacacatgccatataaatatatatatatatatatattatttataatatattgaagtaagcaagtttggacaagtgatgttgaggaccaaaatgatacctagtcttcccataatgttgtaattaaagctgtaaattattgacaaaatttttgttaatagacttaatattttatatattgtgagtttagtatataaaatttccactagatcatattttttatagcagaaaatgtctcatgagttctagtattgtagtttggttgactgcggtgaacaaaaaaaatgtcaatttgtcaatggaagttcacatgagatggggatgggacttgaatgcattactgatccaggcatgaaaacttcattacttagttgggcatgacattattgtagttttaagtaaccaggcacgtgccatacattaaagtaagctaattaactttgttattgttaattaaacttgattagtataaaggctaacaaaatcatgactttaattaacagaatcacatatgtgaattgttaattagtatgattagattagaagtcagattcacttatgccattattaatcacatccataatttatctatatgagtcggaccataaaataatgtgttcagtaaatatgataacagacttatgtgatattactatatttgcaggatttccaaagcaactcggtggtgt

SEQ ID NO: 70966 - DNA, 778 bp, Prunus persica
  Intron number 1 from transcript ppa013397m (locus ppa01339 7m.g) derived from phytozome v7.0 (chr-ID scaffold_1; pos 46702987 to 46703764)
gttcgaatcccttgtgttgttcatctacgacgaaggtattgccattgacatcttttctctttttatttcttttcaaataatatggctttttttcttgatcagatttgatttaccagtttcagaattcgaaattcatccgtgattgattatcaaaatgattatatatgttggaattcgttagaatccttttgtttggtttgcatcaagagattggggggacatgcaattgaaacagagccctaattcttttggctaataaattggaataagggtttcggatggagatcatatgttttcagtcatcaaaattgggttttttgtctgccaaattgggtttagcaggcagggaagcaatttaaattggtattctctttagggcctaaatcctaatgatggcatgtagaatgggtctgatcagcaacctcaagccggagtctgccgacccgggccttgtgatgtactgatgtacaatgtgaattttgtgttgaaggagtgtgctctagtagaatattatcttccccattgagtggttcttgaatttattttattgtttcttcaaactcgggcactagttttgtggttgaagctgcattgtgcatgatatcctcagataaattctttgtgaatattttatatttctggcttattctacatctcttaagtacatgtaaaatttacttatgttttgtggtagtccatctccttcaaattatggtttataacaaaagttcacgcatggtcagatatttgagattcaaaaactaacggtgggcaatca

SEQ ID NO: 70967 - DNA, 922 bp, Prunus persica
  Intron number 3 from transcript ppa013397m (locus ppa01339 7m.g) derived from phytozome v7.0 (chr-ID scaffold_1; pos 46704067 to 46704988)
ctggtctccgatcccaagtgagaagattgagaaatgtatgcactccatttatcttttatcttcttttttattttttctttgtgtgttttatttaggtaactgaatttatgtttgtacaaattggaaatagtattttatttctttgtatgtatgtatattggtcccataattgttatatattggcagttctgttacattgttctcagtgcatgcgtattgcttgatggtttagagacaggtccaaattaaatgaattatacttgaccttttcaaagattggacgcttcactttaacttttttgtttctattagctataggatgtaatgctttaagtgagccatatgtttctcatttgaattctcagtcttaattactcacttgcattgcacctgttgtcgtggtcttgaatatattgatgcttgctaaatgtgataatgttactagctagtaaatccatggttaattactacatttctacttgttacatatttcctttactcttcattgccatgcattactcttctgaatatggattctgtcctaatgttttagttatatatgttatatttgtgccttctctcaaaatttctctagaagtttatttattctgtgtacagttctattttgtcttatcggtttgcttgtaaatgttggttttgctggatatgtgcttgcattgtatttctttgcttggaacttatggatatataatggagatagtggctgacgcctgtctgcagactcaggcttttactatcttgtctattaggactatatcagttttcttggaatttcatcttttgccttgtaaaattgtttatttcagcaatttgattacaaccaagttatagatagcatttaatcttgttctcgtattctggggcaggtagcgcaagatatagaggcggaagcaaaattcca

SEQ ID NO: 70968 - DNA, 846 bp, Prunus persica
  Intron number 2 from transcript ppa012086m (locus ppa01208 6m.g) derived from phytozome v7.0 (chr-ID scaffold_8; pos 12642687 to 12643532 reverse strand)
aagcttccaatcgaggagagcctttagactcagcggtatggtcttatttgttgttgttttgaattgtattgttttagaaaaagaatgtatttttagtctcaagaagtaatatttgtagaaacctctgaccccttgatgagtattggtgtatatttttttgttgttacataaaaaaggttaggacttgggctcggttataatgggtttttggttccatatatattgcttcagatcactggctgttctggcttatgcacatgcgtgtattctctgtttgttggttactttaatagtaggatctggtttattaccctaggattgctgaactcaagcaacgatcttttggttgttgtgaagttcatgtccgtgagtgtgcttattgatgcgagcatatctatgaatgtaaataggttgaaaagaagctgaatatcacatagcattccatactaaagtcaagaaagcgacaagtttagcttggtcaatggcagagctataatacttcgcatgttatttcaatcacgatgtatataaaatatagaagagtcttcaacacatatcattatgtatttcaattatacacctaccatgcttgaaatccttggataaaaatccaacctgtaaagtcacagaggcttagagcatgtaaataaatagtacattttattaatcgttggactttaatctgacaatttgaaccatggtattatcttagtaaaatatttaacattatatgtctgaaacaccctgaaatatattcctatatattaattaagacgccaaatctcaaatctggaacttctctgtgaggtgcatgtatatttatcttgatgttgtattgtaggaaac

SEQ ID NO: 70969 - DNA, 596 bp, Prunus persica
  Intron number 2 from transcript ppa025357m (locus ppa02535 7m.g) derived from phytozome v7.0 (chr-ID scaffold_1; pos 17884717 to 17885312 reverse strand)
ctgatccaaaggttgcagagaaggcaaaattaatcgtaagtctcactgactcttttctaaacctgtaaaatagaggtttaatttttcattcagacattgatctttttattaaccttcgttataaatgaaaccccacgacgatttttacttacagccttttaaaaaagatataacgtcagtatttttataaaactgacgtttgtattaaatctcaatgacggtttcgtgtttctatgttaggttttttaaattaaattttgaacttttttcatattcacacacacacacacactctctctccctctctatttctttgcaattggtttgtacactatttttggatcaatgaatattttagttgggtttttatctctcatgtcaaataaatgacaattatttcattgaccgacgttttaatatacacaaaatgacggtagttttggaccgacgtattaaataattttctacgtctgtttgttaaataaaccgccgtcgtaacctatttatcacgtcggttaatatttttattaattaattaatttaatcagttttacaatctgttcactcactaaccttctctctctttcacttttagg

SEQ ID NO: 70970 - DNA, 286 bp, Prunus persica
  Intron number 1 from transcript ppa021805m (locus ppa02180 5m.g) derived from phytozome v7.0 (chr-ID scaffold_3; pos 19089825 to 19090110)
acaagtcaactcgagatttaactcttcaaggtacgtaagtcaaactaattaattaatctctcgaattttaatttcatgcatgttttgtctaatttgatttcaattatttatttaatcttcttaattaagaagcacataattaatgtaaagccagtttattacttaattaatgttgtgtcatgtttttcaatttaagatggggcttattgatcatatatattgcaacattttaatttgcaattttgatgcttgatttgtatgcatggagctgtgtgtgatattgcag

SEQ ID NO: 70971 - DNA, 994 bp, Prunus persica
  Intron number 1 from transcript ppa018371m (locus ppa01837 1m.g) derived from phytozome v7.0 (chr-ID scaffold_2; pos 1726566 to 1727559 reverse strand)
tctgcgtctctctgcgctccaatccctccaagaaggtatgttttatgtttgctttccaagaaaaaaacagaggggaaaggaaaacaaaatgcaaaacagaaaatgttttcctaggaaaaatgacaccttctcttcgaagttccaaccttttttgttcgcagacaaaaaaaagtcctactttttggatgtatttttcctccgtatctgcgtctctctctctctctctctctctctctctctctctctctcggctccagtccctccaagaaagtacctttctgagttttgtgcttggttggttgccgagtaaaacagaggacaggaggaggaaaataatgccagacagaaaatgttttcctggaaaaaatgacaccttttttactcaaagttcctgccttttttgttcacaaaggtaaaagttcacacttttgatgttattgtctattttctgaagttttaagaggatatagtcttagtctgatacaggaaatatatatattttgtgcataaaaaaaaaaacggaaactgttataatcaacaagtaagtttaccatattatataaaacctatttaagcaattgtgtatattgcttagtatttaaactctgtcgtggtgggaaagtgtctaataaaatgctctgtaaaaatgttgactttaggagcagagatgaagtgaatgaggaaaatttctgaaacaaaagaacaaaagcttcatgcagtgaaaagttttgatttttgattgactttttccttttgttttgtttttttgtttttataaataatgttggaaattagaaactggcaaggtccaaaagaaaatgttcttcaaaaccagaagtgatatggttgaaatgaaatgtaattaattgatgtttttctctgttcctatgtaaacctccatgctttttttttttggttccagcattagtgatgcaactgaatgttgagtttctttgcagattgttgtcatcttttgtggaactgaggaaataag

SEQ ID NO: 70972 - DNA, 730 bp, Prunus persica
  Intron number 1 from transcript ppa023262m (locus ppa02326 2m.g) derived from phytozome v7.0 (chr-ID scaffold_1; pos 35824124 to 35824853 reverse strand)
caactgttgaaaaataatgttcatttgtgttctacacaattatagaagaatcatgaatacaataatgattctagagttgtggagaacatactatgttggctagacaacgagattgaagttggaagaactctctagagcaagaacactcatgttgctagactatggcggtggagcatgatggctaaacaaaagccacaaaaataatattgtaaaatatagaagtttctaggcaaagccacatacatgtagctggagcaagagaccaagtcggtggacttggtaatgtcggcaaagcatgcctataaataggcatgcaatgcaataaagccaagtggagtcaaccaatagaactcccaatctatatggagtagaaccaatcaactcccaaactattagggagccaagagctacctaaagttaactatgttgagagccaataagctcaccaatcaaaatgtaagggccaaatagcccaaattaatctaagtgaagggccaactagcccaaaactattctaaatcaagtgtagtggccaataagtcaatatgctaagtgtagaaggacaattagcctaaattgagccatgtattattctccttcaaatataataaaatcactttgtttttccctttcaattctaacagtggtatcagagcatcacatacgctcatcatacacctactatattccaacagcaacaaacagagcccgaattctacaccgacgaaat

SEQ ID NO: 70973 - DNA, 961 bp, Prunus persica
  Intron number 1 from transcript ppa002686m (locus ppa00268 6m.g) derived from phytozome v7.0 (chr-ID scaffold_2; pos 25714009 to 25714969 reverse strand)
ctctgttattgggtttaacttgattcctcccagtatgtttgtttgtttgtattttcaggcttgtttttcaatttggctctggctctgttatctgggcagacacttgtttgaattcttttgttcatactgttaaattaaatgcctttctccttcgttttctttgtttttccatctataaattcttcggcttttccctgtttttaaattggtttctcacatattcttcaatgaattttaaggcccttttgttgaagctgaactaactgtcaaatctgatctttgcatgccacttatagatgagaaagtaaggcggaggaagtgtaccaagacaattccccccttcccctctttctttctgatttaatgtgatcacattgtatggcgtactgctggagacacaacctaaccttggcatgatgatagatatttgatgcactggttggtacatatggagtgaatgctcttaaaattctaagtgttgtttagcccccagttcccaaaattcattgttttttattttataagagatgtatgatgtgtcaatgaagtatctatatttagtatactggggccttttctgaattagtggtggattttcatggaatctttacttgtctgtgaggcgcccttggttttcgatgtccacatcaatttgcatgtgaagacacaggtccttgcattccatgtggtctccaccttggattgtattttaccacgtcgtaacagtatgctgcatttcattgttagaattcagtgaccctgcaaattttgatgaatagttccaaatcctgcatgttgacatcttccttttcttttttccggctatttaaacaaaacgaattcataaacacgccagcacatcagtttgcaagaaaaaaattgaatatgaatttttgtggacctatctgatatttttttttctgcaggtgaactcaaagtccctgactctcctcctgaagat

SEQ ID NO: 70974 - DNA, 712 bp, Prunus persica
  Intron number 1 from transcript ppa014663m (locus ppa01466 3m.g) derived from phytozome v7.0 (chr-ID scaffold_6; pos 7538319 to 7539030 reverse strand)
tgacaacgacttgcttggcagtgttcttgacttttacccattgaaatctcaaaagtggttcaataatgaagaaatctcaggcaatattgagtccaataagataaaacttgatagtggtgttctctctcttactttaagtgcaaacatatgcacacacacacacacacacacacacataccaagttgagagaaaaatcgtacaatagaagtcaagtaattacttatatcatgtgtttttcttatgattgaatgacaagtaattcctttttttaaaaactatactatatcttttatgtatttttatttgtaaaaatttgagtccgaaaagcttatgcctcaccttgcggggcataggacgccttactttaggcttttgcgctttaaaacactggtgttggtaaatcagctcatttgttagccagccaactctgaaagattgtactcccaagtcccaacaatgcatgccatgtgattgatataaactcaagtctgaatgattacatggcctcctggggtaacattatagtagtgcagtactgcatgaagagagaggaagatttcttgcgatcttatttctcttgtgattggaatgatttatccaacgcttaactttgtcactatagtgctttctgatttttatctcttctttttctaagtctgatggttgtgatagtgttgtagcttcttgatagaatgttccagggaacggaca

SEQ ID NO: 70975 - DNA, 702 bp, Prunus persica
  Intron number 1 from transcript ppa008098m (locus ppa00809 8m.g) derived from phytozome v7.0 (chr-ID scaffold_5; pos 1632230 to 1632931 reverse strand)
gctattctgtgcttcaacccacttcacaatcacaggtactttctctttgtgttggacttttggtcttgaacttcattgttctagcgaaagttcgtttcttgggtagtaggaatgaatagttggaactttttgattctgttgaagaaattagatactgagtattgattattggtttgactggtgaaaatgattcaggttgaggactttttaagttgtttgagaggaaaaaagaaaacctgatctagctgaattttttattcgtttattcttttgtagcatagttgagaagagctgtgcttgtaaaggcaaatgccatgacttgctttcatcttctaattctcactttaggaaatattgtggttaaatatggttgattaatgatttgatatcactacattgtttcctatgtcttgtgcagattaacttggttcctgggtgattcatattttccttgaaatgaggttttgatgttatttgcaaatgtgggatgtcagaattcccacttttaaaaaacatgaaaaattatttatttcaatcccttgtttgttctattataacaatgcaaattattgttcagttgcagtgcatggctgcacgtcttgcttaattttttttgttttcttcttgagttcgagagtatgtatatcattcttcaatttcttctcacattaacaagattgatgtctttttagggccgagtca

SEQ ID NO: 70976 - DNA, 357 bp, Prunus persica
  Intron number 1 from transcript ppa003217m (locus ppa00321 7m.g) derived from phytozome v7.0 (chr-ID scaffold_2; pos 21670592 to 21670948 reverse strand)
gcgacctcaattgaacaaggtgctctgctctccctctctttctgtacacatacatattttttaatttccaattaatttgataggaagaaagaaaaaaagattctctgtagctagagctctcaaaataaatgaataaactaagaaattaaatactcaaatggattaacaatcaacaacttgtcaggtgcctgtcactttgcccacatgcataatttcatttccaaaatcagctacttttttttataaattttcctggaaagttcttcctttcctctgaaccaaacaggttttgtaactttcaattttgtgattattgaacttataggaggaggtgatagggacttagagaaaggtctg

SEQ ID NO: 70977 - DNA, 495 bp, Prunus persica
  Intron number 1 from transcript ppa011183m (locus ppa01118 3m.g) derived from phytozome v7.0 (chr-ID scaffold_6; pos 22370822 to 22371316)
actgaagaagagaagcgcaactctcgggctgagaggtattgggatttgattttcttttgggggtgaatttttagggttagggtttcttgggctttctgtttttgtttcaatttccgtttggttactgggaaaacatggtgtgaaagagtagaaaaatagattatagcaaagggaacgcagctgagttcattgagtgtgtatgcactataagcagtgttaatattatttgataagaaataaaataggttgtgatgattttattaatcgaaagattatggcacttgaattaccaagcaatagggggctaaaatctcatatgctaagtggagtggcagggtgaaagtttagttgtggtcaaatttcatgtttgaaatattgtttacggaggatgtgacttaatttttaatctttatttctcttgttttctggtaattgtgtttctgaaagtgttggcttacctaccttatggcaggtttggcactgtttccacatctc

SEQ ID NO: 70978 - DNA, 862 bp, Prunus persica
  Intron number 1 from transcript ppa008563m (locus ppa00856 3m.g) derived from phytozome v7.0 (chr-ID scaffold_1; pos 9683274 to 9684135 reverse strand)
catcgctcagaagcccaaaatacctctctctaaaggtatctacaggcattttccttcctggtcttatctaaaaaggctctgcttgcttttttttttttttaaaaaaaaatcttgaaattagtctgctggttgctgagttgttggttttcgttttctatgcttctgcatgatgtttttattttattttatctgggagctctttggatttagattttcacaagattttctctagtgaggttttttttttttttctcttttaaaaataaaacttgggctctttgtttttgttttatttattttttttctcttcttccgttgaacttgaagctggcagttgcactagtaataattaggaaaggtaagttattgattttgaccgaagtcagattttgcaattaattacttacatacaagtaaggtgtttgataaagaattaaagagcatcaattactaaattgtaggaagaattacaacaacaaaattctagctagttagttgtctttattaaacataaaataaaacctgtgctggtttcttcttccgtatgcggttgagagagtaggctagttaggtagtctaacgtcaaaacgcccgtttgatgtagtgatactcgcctaatctttacgacttagcctgatttttgatacttgtatctttcataattatcaataaaatcccatcgcctttgtgtaaatatatatatatatatatgtgccaagaataagatcataaaagttatattatattccatatatgatatgatatatcatgttctatacaagaataattttgtgatcatggaaaccgtgattgctgtgatgcaataggagcagggacaagcgagaagcccaagaagacgagc

SEQ ID NO: 70979 - DNA, 831 bp, Prunus persica
  Intron number 2 from transcript ppa004702m (locus ppa00470 2m.g) derived from phytozome v7.0 (chr-ID scaffold_3; pos 1156709 to 1157539 reverse strand)
gggcatagtttctgataaacacggacgtaggtgggccattttttgttttcgtatttttcttctctttggttaattcaaacagtctgaacctttatgggatcctgtctaatatgttggggccaaaaaggtggctactaatatcatgtgtttatcattttatttgatttaattcaggctcttctcttaatgtcaagatgccttagatgattctatagacatgtttcaattgactacataaagtcattatgcaacatggttcgaaactgtaatttcaatagctgcgtggttgctcattatcagacaacttttgattataagagagagaaattttggattcatcacatagtgatgattgaatatttttctttttaattttcaatttttgtgtcgattttggtctctgaatttggtatgatcttttgattatggttattttccctaaatcctcaatctactgaaaaagaaaatgctaatttttaggcatgtgatatccagttgagctatattactcgaaccataactttaaatgacagggttttgttctgctagtactgatcactcctgcttggatttgttatttgtagcatctgcttgccatttctgatgttctagtttttctgtccatgcacctgcacattgtagtaactgtagttttccttttctattcttaattggatacgtatttgattttttattccttttatagggttcactgtgatcttgaatgcacccatttttctgacttaatgattctactggttcttttttttttgtcggtacacttctattctttcaggaaaggtttcctcattacagccacaattacttctg

SEQ ID NO: 70980 - DNA, 683 bp, Prunus persica
  Intron number 1 from transcript ppa019579m (locus ppa01957 9m.g) derived from phytozome v7.0 (chr-ID scaffold_2; pos 14146777 to 14147459 reverse strand)
ccgtcaccaagccctcttgggtcgtccgcacagaggcaagttatcaagttcaacactttaatacttcatatctttctttttctttcttttggctcctctgaaaatggtggaaagtaagagagtgcaagtaaaagtagagaatttaaagagttgatgttcagatgttgggcttccagaacggccagatgggtggtctgtgttgggtttgtttaaaatggagtttttagtaggtcaattgtatgttttggttttagttgggttttctgtatttttgttgattattatgattatgattttgaatatattcatcatgtattggttcactcatatagtgactctttcagaatgggatttcattatcagatttggaactgtgaaataagatggaaatttatgcactgaaatcattgtgttctggtagaactatgcactgacatcaacactgaaccatatttgtgaatatatgcttctaatacctttttcttttcttttttaataactattacatatattcaagtgcctatattgacattagtttgtttgtaactttgtaagagtttatcaaaattatctccactaacattgaattgggaacttactaaattcaaagggatggaaatgtgacatattatttcgtgttttctatgtttaacctttcgaccacctctgtttgttgcagtcaa

SEQ ID NO: 70981 - DNA, 339 bp, Prunus persica
  Intron number 3 from transcript ppa022889m (locus ppa02288 9m.g) derived from phytozome v7.0 (chr-ID scaffold_7; pos 9162429 to 9162767)
tacctggtgttactcaagacattgctggattcaaggttaagtcatttttgttattgattttctttttcctagtcattgtatgctgaactgaaaatacagactagccagtgaataatatacttaaaaaagaaaacgctttttgacccttctcatcttgaaaacgaaaaaataatctatctagttcttagtgtttgtttcttttgtcttctaatactgcttttataattctctattcctctgtttccttcatctcgccgatttgatgatggaaactcgtcttcctttttccctaacttttttgaattgtttatgtgcagattggtcatcagcctagcatat

SEQ ID NO: 70982 - DNA, 572 bp, Prunus persica
  Intron number 1 from transcript ppa007397m (locus ppa00739 7m.g) derived from phytozome v7.0 (chr-ID scaffold_1; pos 8042626 to 8043197 reverse strand)
gcttgtctgagaaacctgccgttttgaaggtactttttgtttttgttgttgtgaattatgcgttttcttatttgttttctttaatgatgtggctttgaatttaattcctttgtcgaacagaataaaatttgatttattgtcttattattttatttgattataccaaaaaggtttatgaaaagtttaggctacatgtgcttttaaaggttcaatcttttgctttcaaaagcaagaatgcattggaattgtttgccaaatgattcttcagagtaactgcgtgcgaattgcttgtggctgagattgttctttctgcaaactactatctgagttcttgttctcaagccttttatattttagacagtgaactatgaggaaactatctgttaaatgcacttgtttaagaataatttggtttgttgggcacgctggtggtttggagttacagggtgatcaactagatagcacatccagcatgaagttacaaggatttgaggcatatacactttggtgtaatttttttctttattttatattcaggtacgagactggtatttggattccttccgcgacct

SEQ ID NO: 70983 - DNA, 648 bp, Prunus persica
  Intron number 3 from transcript ppb015684m (locus ppb01568 4m.g) derived from phytozome v7.0 (chr-ID scaffold_3; pos 17993726 to 17994373 reverse strand)
aggtatgcaaatgattggctattcctgggtttctattctcatttttggtaatcatactttttctcttactactttggcttgatctcaaattcacacatttgtttttgtattgtgtatgagttaatctgggttaattgcatagttaaaatggcatggggatggctgtaatgtcatatgtgctggtattgtatatatttttctgggagggttagtgtgttaaagatatcagcttgcaaaataaagcaaggaaaccaagcttttggctgccttagttgttcgactccttttatgtcatgatgatgtacttatagtacttttcatgttgaattcaacctatttagtttttgaaaatattcagtatggtagtatatcatccattctaagatttagatactgagtcggcattgtctgtggcagattgcacagcacttcaaagacggttacttgcataaagatgaatttaagatagtttatgttgcaccaatgaaggtatccaccctatataactctcttcctttttttctttttcttttttttgagttggtgggtcactggggtgggaaagtagccattgaaatagtggcttgttacttattatcatgtattttttcaggcattagctgcagaagttacatcaacttttagcca

SEQ ID NO: 70984 - DNA, 557 bp, Prunus persica
  Intron number 1 from transcript ppa023080m (locus ppa02308 0m.g) derived from phytozome v7.0 (chr-ID scaffold_82; pos 555 to 1111 reverse strand)
tgtaagtaccaatatcttctccttttttcttcttcttatctttcgttgaacatgatccgtaggcaattccttgtttaattccaggaaaaaaaggatatcatgaatatctgcaaggtgtttgataaattttcacttttatttatttatttattattctggatatatgcatggcttagcctttgtccatgatatctgtctgtgatgtgaaaatgacaaaatgggaatttcagaaaaaacattacaagaatttgaatacaaacaaaacaaatgtcacaattattattttccaattaatagttgtgatagtgagttgttttaatttcatatcgtactctgcagtctgcagcagtcagtgtacctttctaatgcaattcaagcactttctggcatgacacgataacatagtaattgggaaaagtacaccaattaaaaccgccttcgcagcagcagtgggccattttaaaaccacaaacaaattaattataaatcatagtcatgcacaatcctcaagacaagcgtaacttttctgttttatgcttttttcaggcgacaaatcc

SEQ ID NO: 70985 - DNA, 798 bp, Prunus persica
  Intron number 2 from transcript ppa026408m (locus ppa02640 8m.g) derived from phytozome v7.0 (chr-ID scaffold_3; pos 10885667 to 10886464 reverse strand)
tcaacgcatccactgctccggactctttgtttgaggtatttgaaacaaattttcctttgggtcgagctatatgccccctttattctcagcttaaaatgggttttctttctatttcttgagtaaaatctttcgactttttattttttgttatgttataagtaaccgcatatcatctaactctcatgtttggtctttaagggactaagatttgttgtccttgtaaactgattttaactgaggtttctaataaattgcagcttggttggcatgaaaaaattggcttgggatgcacttatggtggcttcatcttaggatgccactagtatttctcattttgatgattttagtgtttgtcttatcggtttgtatacaatttagaagatgtgacttgcccttttagtacattatgcggaaggagccgtcatattggatgtttaaaaatcgtaaatggagtaagttttaatcatttggctgtgttgcagttatcccgtttcattgtgttgctaggtcataaggcatagctacgggatcgattggttcagttttatgtcaaaacttgttaaaattttggcatattgtgtataggtttactaatattgcaatccttgaaggaatgatctttgatacacacaaataaaaaataaaaaataaaaaatctcagtagggactcatcttgcccagtaaaaaagatgatactatttagattgtgcagaaacactgggtaattgcttgcagtatgaatgatgaatttgttgtgatgtaggttgcagcaattgttactcagccgccatccagaaa

SEQ ID NO: 70986 - DNA, 685 bp, Prunus persica
  Intron number 3 from transcript ppa010017m (locus ppa01001 7m.g) derived from phytozome v7.0 (chr-ID scaffold_4; pos 8887851 to 8888535 reverse strand)
ggaacagcaagtaacatagtaacttatattgcacggtacatgaattatccaaaatagtatcatacagtattacctttttcttgtctgtgtccaaaatctacttttatcctgtgtaatttgctgaaagttccactttggtgctttaagtttcaatcggtattatgtcaatcccataatttccaatttgtgtcaattacacccctctagtttcaatgtaacaatgtcaacctgcacttttcaatttgtgtccaccctgcacttttgtttatctgatcgaacaagagagaccactgcttgtctccaacatgatcccaattttacatgacagtattttttttgcccaaataatctactccagaaccattagtctcgatcgtgtgagcaatatggtcactacactccctctatgttgccattaacatagtttgctgatttggatgggtatgattatctttataaatatttcaacattgaaattcctacattcagcatgctccttgttaaccatcttgaatgcttatgctacaatagttcatggggtgggtcagtccccacctactgttcagctgagactaaaatgaccaaactacaacttctaaaaactagggagatcaaagtgtactttaccttttgtttttcctctctggccagaggatctgatgatcgtattgttttgccagtggaa

SEQ ID NO: 70987 - DNA, 303 bp, Prunus persica
  Intron number 1 from transcript ppa002819m (locus ppa00281 9m.g) derived from phytozome v7.0 (chr-ID scaffold_8; pos 4536492 to 4536794)
aggctaacaacttaactacggtatgatttcttttctgtttttggcaaatttaaagtaagctttaagatcatgaagtttgcttgattgtgggctgctttgtgattttgtttcattgtatgtttatacagggaaggaacagcacatccgagcctagtggaacttatagtgggtattgtggtcaaaataatttgcagctgcaacagaaactaaatggggcttgtgcagatggttcaagggacccccagcagaactcaaatcagtataatccgagttacaatggggtttttaagagaagcacaagca

SEQ ID NO: 70988 - DNA, 395 bp, Prunus persica
  Intron number 1 from transcript ppa005781m (locus ppa00578 1m.g) derived from phytozome v7.0 (chr-ID scaffold_2; pos 26264663 to 26265057 reverse strand)
acgtacgtatgctattcattcttgttcatttcgcaacaatcgtaaaggtttcatttttgagtttcattgtaaagcttcgatatttgatgctgtgttctatcatttgttaatgggttattgttgattttgcctaaaccattgttcattattcgtatatgtaagtatatataatgaaaagcttctcctttttgattttatagtccataatttctgatgggtaatcttaatttggcctcaagccagattcttcatttattttatgccatgataaaaagtctcctcttgcttctgttttacaatcaatttttataatgggtaatctcattttcaattctttttgttcatttgttataaattcaggaccccaattgtcgagaaagtgattacagagcgta

SEQ ID NO: 70989 - DNA, 505 bp, Prunus persica
  Intron number 1 from transcript ppa012212m (locus ppa01221 2m.g) derived from phytozome v7.0 (chr-ID scaffold_7; pos 757483 to 757987 reverse strand)
acgcgagcgtttcttctgaatctctccgttgcagggtattgttgtgtattttaatttttatgagtgaattgatggttgcaattgagaaatgtatgaatatacatggttggtttttgttcattttgatttctttgactggtaaacttgttgcaaagatatctcatttgttcagttgttatggaatttagattgtaatttgtgtcaatttgtgatcatgggttttagatgttgactcactgctatttggcctggtattttcttttctagctttttttttccaagatattttttttttagttagtttcaattttgtgctaattgcaatgatgaatgctataagaaaaacatacctattagctaatgatgcaaacatgtcagcacttttaacgatacccaaatcttcttatatgtaagatttttggtacgttttctctctggaaatttttcattggtagatgaattttatgcagggctttcttaggaggcgtggtcgttgttaataggg

SEQ ID NO: 70990 - DNA, 427 bp, Prunus persica
  Intron number 1 from transcript ppa008969m (locus ppa00896 9m.g) derived from phytozome v7.0 (chr-ID scaffold_4; pos 1825182 to 1825608)
ccggattgcacaggtaaacccaaattccatcactctggggagtgggaagtaggtcctgttctgtttgagcaacatcatgattgtggaactattgaaatgaattgcccaaaattccatctagtttaaaatcatgtccattagaaaaatgtaaatgcaatcactccaagtagtttacacgtctcaacatttttttactcttcaattttttaatttttaatttttgggtttgatttgatcatccaatccaagtcagatgggtttttgaatgaattgaaaccttaatgaaaattcaactttggacctacaccgtcctttgcatgtcctagatttttgagtttcgataggatctcaatccttataaagatcattgactaattattgttaaactgcaggcacttctagagcctgaagcagcagaagccgttag

SEQ ID NO: 70991 - DNA, 833 bp, Prunus persica
  Intron number 1 from transcript ppa010284m (locus ppa01028 4m.g) derived from phytozome v7.0 (chr-ID scaffold_1; pos 43476734 to 43477566)
tggtttgccaagaaaagattgaagggaagttactggtatgttttgccaagaaaagaagaggatgagcacattaggtttgttggctttgcgtaattattgaggaggaaggagatgcaaaagggtagtttttaacttcacatggccaatgaactaatcaggttggggatctcgcaaaccaggtagacatgcctttctctatgcagccacttacccttacggtgagtttgatttatgtttgataagggtaggcataagaaaaggtttcttggttcatgggaaatcaaggctatttccctattagcaaggagccgtcatcataaaccatggcgcatgaatcccacgtaagcaagtgtgaccctatggccacgttgatgcttagggttggattagattatattgctttggattagattcctcacaagattcaaggtatgttaccttcaatttaaacaaaatttaaacgttttcctctatttcttcatttagcataccttgaatctagtgagttgtctaatctaatccaattttaggcaccaaacgtgacctagattgctcaaaagcattgctaaagtcgttttggcccgaggcgagcgcattatgcttcatgaaatcttgggctttagttactttaatccaaggcccatcaatgccttttgggccataccatcaatgtagccctgtgggacatttatgttgtttcctttccttttattttatacatttatgcgcatttatattgtttcttgctttgattactttcttatgttaatctcctccgttttgaaacccaagaaacagagaaaaactgagggagggagtgagaacagagagag

SEQ ID NO: 70992 - DNA, 850 bp, Prunus persica
  Intron number 1 from transcript ppa013105m (locus ppa01310 5m.g) derived from phytozome v7.0 (chr-ID scaffold_2; pos 21898593 to 21899442 reverse strand)
atttctctctacctcgacattttctcgggaaagtgagtacttcctctacttcagtcttctctctatagggttttgcatgctagtgttattattttaaatttttgtttgcttaacgattctctttagtataatctctgcgattttggtgttcgatcttagtaattttgactgcttgattgggaaaaattcgtgaaattcgtctgtggtggagtataagtttcgtcagatagcgtgttagttttcaattcagtcgtgatattcaatcgtatgattcgaattacttgatcatgattgattcatgaattttctacaatttttgagcctctcgttattgtcttcatgcttaattgcagtgccagtgtgcattttgattttgattgattcacatatggtatgattactgcaatggctaaaaatactcagcctaagattttatttcctggctatattcaggattttccttcatatggatttcttttttgctttttcttttgcttggtagtagtggtgcttaattttttaaagggtaagtatatcagtatgcctgtgcttcatcattcattttacttttgttaatagttttgaattatgatatgcttgacgacactcatgagcatttgtagtttgaactatgaagtgagagtttataagccgaggggaagaaaagcagtgtgtgttctgttttaggatgtttgggattttgattggtgtcaaactttcgggtgcatatgtaacagttatgcttggagaagcttttgggtgtaattataggaatttctagtgatgctttgttggtgtttgatgcaattcggtatcgattaaatttctccaggcaaacgcagcgtctggg

SEQ ID NO: 70993 - DNA, 907 bp, Prunus persica
  Intron number 1 from transcript ppa014159m (locus ppa01415 9m.g) derived from phytozome v7.0 (chr-ID scaffold_2; pos 15800372 to 15801278 reverse strand)
catctcaactcgttctcttcaccgagtcgactcaggtcagttcttccccttcatcttctctccttcgatttgttcgtgtaaccttgcagatctactgcatgcaatcttcagtttcgtgtttctttttgggtaattctgattgcagatcttttactgcttttttcgtgattgtgttattggatctgatttgttttgaaaaatcgaaacttttcgttgctcaattgagtattaggttctcttaatttctgtataatcatctgaattttctctttgttttctgtattttttggttgtttgaagttgaactcgacggattagatgaactgcggtagtgaattttcgtttggattaatattttgtttctgctaatattcctatttttctttcaaattgccctattctgtggatctctgcatgcatgttatcattttgatacacagatgggtgcttttagtctaaactgtaaatatgtagaaatggagttgatggattttgattacaaaagtttttcagctatgaaacggttctgctagtctctgaaccccaattactgttaatgctattctatacgttcttgtttgttattgtttggcctttaagttggttatgctaatcattctggtcaaatctgtttggaatcaaattcattgaattggagaacaaaaagctttgattttgcatatgttggatctatttataaaactttttctttatgagttctattctatatgttcacggaattgtcaaagctccatctaggtctgttcttaaataatgccaaactcctctcctagaagcttttttgtcctctctttttttctccctatgtgtgtggatttggtcgtttatttttgtaccataaaggttggattgaggttctaaatgtctgttttggtggtaacagaaa

SEQ ID NO: 70994 - DNA, 669 bp, Prunus persica
  Intron number 1 from transcript ppa026419m (locus ppa02641 9m.g) derived from phytozome v7.0 (chr-ID scaffold_7; pos 14508371 to 14509039)
cgccggcggcgtctcctagtcgccacaaacaagaggtttgtcctttcctccggcttatatacgaaattgtctttttttattgttaatagtaatttaattatactaaagtgagtgagttggtaactcggtctacttaaagacggtccgagttcactcgttgaggaacttatggaattgtcggcaacaagatcacttttcagagatttgggtagggaaattgagtcacattgaaggtcatatgtgtcaatttgaagctcagcatagcatgtaaactttttgtatatatgtgcttatcatgatactatattactatgtcatttgtcacttgtatagtctctgcattgtaaatcttttttgtttgaagaactgtgtagaaataaattttcagaacaaaagacaaatttggtcttgtttttttgtgttcgatcccattcatgaagtcccgacatcccctaaattatatgctttttattgtagtttaaaaactagaggaaaagtcaagcagcctcgcaattatggatctgagattaatctaagttgattaaaatagttaaaggcttagttggaaattattattctatagccctatgtatatatgattagtgttttgattaaggttttaaacttttaataggaggagggactgaagaaattccaagtagaagaaga

SEQ ID NO: 70995 - DNA, 607 bp, Prunus persica
  Intron number 3 from transcript ppa001617m (locus ppa00161 7m.g) derived from phytozome v7.0 (chr-ID scaffold_3; pos 17611301 to 17611907 reverse strand)
tttgcttcaatacaggcaatgtaagttgtactctctctctggtggaactttatgtgtgtgtgtgtgtgtgtgtgtaatgttgttttataatatcttttgctccaagttatatcttgattcagtgtcattaaaaatcctttagtcttcattttaagagataacaggcaaattaggaagatatgcatgaaggggtggttgtgagtggatttaggtttggttagtatgtatgtaggggctttttgcgcatgcaaaatgggttttactttaatctttgtgcttgtaagttttgtttttgttttattcttaagttgttatctttggatgatagtttgggggccatggacattatacactagcttttatccagaatgctcattaggatgatagttttgcatttgccaaggtgacttgtttagtctgtgtgtgctcgagggtagaatgcaaaatgttggggaaagatctaggactagctttcctcatattatgatatcttgcatttcttcataaacaagttttttctttttgaaattttgatacgtttgtggattattgacattggtgtttatgtgcagagatctaagcaacaaccatattgggggaagcattc

SEQ ID NO: 70996 - DNA, 429 bp, Prunus persica
  Intron number 1 from transcript ppa001617m (locus ppa00161 7m.g) derived from phytozome v7.0 (chr-ID scaffold_3; pos 17612161 to 17612589 reverse strand)
tcaagtttctcttggagccactagtcctactggtaagcctcttcccattttcatttaatggccattcttcggcattaaaattcttatgtgggaaaatgagtggggtgctccagttctaaatcttggtattattgttatgactggatttctcagataataaaaactcattattccgttgtttctgtgtataactttgtgtgtgtctttttttttccttacttatttcaaagaaaagaaaatcttttgataatgtgcttcggcggcggcgtcgtcgtcgttttcagcaattgcatgctttattctagtgtaattgtgtgtggaaacatgtttccttgactagttctaaatttttatagttaattggagctacaaacacttattatctgcgcttacttctggtttggtcagttgctgcaattaacaacttac

SEQ ID NO: 70997 - DNA, 921 bp, Prunus persica
  Intron number 1 from transcript ppa014865m (locus ppa01486 5m.g) derived from phytozome v7.0 (chr-ID scaffold_1; pos 13353986 to 13354906)
ctttgtagtcagaaaacactcaaaacttaagagaggtaaagctaaatagtgtataattataggagattaaatgataaaacttatgataatagttataaattataagataaagatgaacttacgaataaaattcaagaaagtaaatattttagtaaatttgattgtaaatcaggattttgccaaattagactagcagaagaatcaattcaatggacgtcattcagttctccagaatgacattttgaatggcttgtcatgccattttggataaagaatgcatcatcgatctttcaaagaaagatggatcaaatttttaagaagtatgacaatttttgtagtatatgtgtagatgatatacttgttcatagtaaaaataaaaatgaacatagaaagtacttagaaattattttgaaataatttattgataatggtatagtaataagtaggaataaagtagagcttgaaaaacaagacatagaatttttaggtatgtatattaagtcaggaactatacaattacaataacacatagctaaaaaggtgttaaaatttccaaacaaattagaagataaaaaacaattacaagtatttttaagattattaaattatgctagaagttttatccccaagttatgaagaaaaattgcagcattgcatagtaaaaccagtaaaacaagtcaaaaatattttaactgtgaagatattaaattagttcaaaatatcaaacaagatataactcaacttaaatctttagcattaccattagataataattacaaaatagttgagacaaacatgtcatcaataggatgggcatgaattttagataagaagaaacataaagaagaaccaaaatctgaagaaaaagtttgtaagtatgcattaggtaaatttagtgatatacaatctagacttccagcc

SEQ ID NO: 70998 - DNA, 638 bp, Prunus persica
  Intron number 1 from transcript ppa008488m (locus ppa00848 8m.g) derived from phytozome v7.0 (chr-ID scaffold_2; pos 22784867 to 22785504)
cacactgctgctctggagcggttctctgattcacggttcgtactgttgtttagatatttccacagctccacatatccttcccgcattagtcgctaattataggtttaagtatcggattagtcagctatccacttgcacatcaattattctttttttggaaaataattaagctcggggtttatatttgatgtttgctgaataaacttatttttcttttcgactttttttaggagagattcaataaaatcccaaacttctctataacttgttggattttgagtatatagagatgaaattgagttgttatatggtcaaatggagataaatgaattgatgaatctaattttcgattgttgagaatatttccatattagatcattcctaggagcaggtatgactccgatggaaactgaacattagctatggaaagattgggaagattgtgttggctctatattgccctcatatgtgtctctaaattttacactcctagactgtttttaatgtattaacagagattatcatttgctggatgctattgattggcgtattgttgcttacatcgagataccagttgttgtgtattcatgccgaaatgaaatgtgcaacctctatgcaggaaaggatactctattgta

SEQ ID NO: 70999 - DNA, 808 bp, Prunus persica
  Intron number 1 from transcript ppa004132m (locus ppa00413 2m.g) derived from phytozome v7.0 (chr-ID scaffold_1; pos 11908093 to 11908900 reverse strand)
tttggctacgacgtcggcgtttcaggtaaaaattaacttcacctgacgaatcatttgggcttggtgtgcttagatcttgctggttcagctactctggtagatggactttgagggcattgtttggttagggttcaatgcgttaatattgtgcttgattaattaattcatgttttttcttctcttttagtaaacaaaaccacttttagtcaattccggtgaaagcagcaaaagaaagtttctatttttataatggaaaagggagaattttttttgttcaaattattattttaatgaagcaaaaagtttctatttttatgttctctgctgttcaattccaaaaaataaaatcgcttttcacaaataacaagtggttaattttgaatttttcgcacgaaatacactatgtgagtttttgtataatatcatgttaatatggacttatttataaaaacttaaaacaaaaaattgcatatgatgtatgttttctgaaattttccaaattcacgagaaacttgtgagtgctttctggttgagttttgggctaaattaaagttaccaaatctgatccatttttgggccaatgagatttaaggagttttttctttcccaccttcttcttttttggccttttgtcgctcccgccaaattggaaatccgagcagacatgactaaatcatgagtcgagtcgatgccttattatgcatcagccatcatcacacccattgactaccatcaccatgtgctgctttgatttccaagttttgtaaaatgacctttatacccttttgttgcaggtggagttacatcc

SEQ ID NO: 71000 - DNA, 750 bp, Prunus persica
  Intron number 1 from transcript ppa009909m (locus ppa00990 9m.g) derived from phytozome v7.0 (chr-ID scaffold_3; pos 21800827 to 21801576 reverse strand)
ctatttcactactgacttctatcttccttccagaggttagggtttccctcattcctcttccctatttcttggcaaatgcttatttagggtttcccccataatatctatctaggaattcatcaaaattttatcacttccttttgggcgtttcgatagtctggcttccgagaatgtgcaattgtgttttgtgcttgatattgtgcttgggtttgtgtttgtatcatatgtgcattctttctgagctgaacaataaatatgttagtttatgtttagctcccatggattctgaatataatttgctacctataatggattgattcattagagtttagattgccttattttgatgttggttgtttgtcaaacttgtgtttaataagagagtgaactttgaaattatgtagagtatcttctagctttctttctgtaagaggtgcatgccttcacaaataataatgtatattggtcttttgatcttgaagttgcaagttacgtattggaaaagagaataaaaaagaaaagaacaggaagaccaagaaaaaaggtcatgaagcgtcaagttccagtctgaatgttagtggctatttgaaatttttaatagctgttctaaaatttacttctttaagtaatgatttaagtctatattaaaccatacatataatgcatggctttctatgtcatattgcttttgttctgaatgaattggttgcttcaggttttgcttctgattcactgaccccatcgaaggac

SEQ ID NO: 71001 - DNA, 612 bp, Prunus persica
  Intron number 1 from transcript ppa016162m (locus ppa01616 2m.g) derived from phytozome v7.0 (chr-ID scaffold_5; pos 8876083 to 8876694 reverse strand)
tcgtgtcgaaaggtggaagcagctctactcaagcagcaaatctctctggatggcatttcacggaagggtattaattcttttcatttctattagatgtgtatatatatacatatatatgtttcttctaaaactgatcatgatcttgaacataagttttgcctttaatttgttcttaatttattaacaaaaacactcaagtatagagaaaaggattcaaacccacaggtaatgatctctcaaagtccgcacgttctttgtttgtttgttttgtttttaaaatatttgtacaattttataagaaaacaattcgaaatttagagcaggcgcaatgacatagacatctttaggaggcagaaataaaagtcaatgggcactaaatgtaataataaaaaggattttttcttaatggctattcgaataaattaacccaatttgcccactacttgttttaattaaatgttgttacaatattctccaaagtttgtttatgacataaatttataaattgggtttgactttaatagttaatctccatgttcgaagatgactttaatagaagacatattgtactttttgtatcacaacttgtagagtgctgctatattttcgtaa

SEQ ID NO: 71002 - DNA, 618 bp, Prunus persica
  Intron number 1 from transcript ppa003146m (locus ppa00314 6m.g) derived from phytozome v7.0 (chr-ID scaffold_7; pos 8338351 to 8338968 reverse strand)
atctcaacttagcaccagttcttcgtcatctcctggtttgttctctctctctctctctctctctctctctctctgagtttgtttttcagaccaataaaggttttatgcatgcattttagaaactttttttattttggggaaaaaagagttagcttgaaccaaattttccgaagaattcttagtacatttgttcaagaatccagttttttgtttcttatttccaataaactgaagtatataatgttacaccatgtttaatttggagctcaaagttaatgacccttgtttactagttcactgttcagcaaagctgtaagaaattgtaagttttgattgggacttttcttattatttattttaataaaaatgcatatttgtggtgaaaattttgatagtgactgacttcattctcaatgatacgtcttttcaaattaggaatctcattgtatttctgaagctctagtaacatttgaaatctaatttcaaaggtgacatctagttgtaatcttgtttactaaagctgtttgtttctgtatggtctgagctggtggaacttaacttcttgtgagtaattgtgctgcaggtacttcgacatttacaaataaagttgctcttact

SEQ ID NO: 71003 - DNA, 749 bp, Prunus persica
  Intron number 1 from transcript ppb012332m (locus ppb01233 2m.g) derived from phytozome v7.0 (chr-ID scaffold_5; pos 12304791 to 12305539)
tcaagctctttctgaccgtcctcaattcagttcctgtgagtttttcatattgggttgtgttcttttgtttttttcttttctgggtcgatcagttttctctgtcttaccattgaatttggtttttctgaatcagaaatcttttagaagtttgtatgttcactgagataatcatagaactcagcggaacaaatgctttcctgggcagtgttcgaaaaatcggcctaggcggctaggcggtcgtgtcctttttttttaatttttttaatataaatagattttttttcctgactttaaacatttatttggtattgagcaatgttagaattaaacaacaaaatagttaagggtcgaaaaatgtttactcgtttctcaattctctgcaactaaagagactataccctgttataccgaaaaggttgcatttttacattcctgctgggccaggaattgaattcggagaccttggttcctccgaaatgagtcctccttgttcatttatctttgtttaattctatctggtctgaatattcttagaatttgaagtcaaccatccaaaaaataaaaggtttatgggaacttttgtctttttggcctgaaattcctaggaattgaaaacacatttcgttggcttaacatactgtttcagttagcattttgcagttgttgaggttcagtcatttgagttttctctcttaaaatatcacaaaaatgcaggtattcctgatccggaaagggaaataccaagagag

SEQ ID NO: 71004 - DNA, 624 bp, Prunus persica
  Intron number 2 from transcript ppa002655m (locus ppa00265 5m.g) derived from phytozome v7.0 (chr-ID scaffold_5; pos 14152441 to 14153064 reverse strand)
gttgccgatctattatccagtaaacaagccgtctggtaagttgtttcggtggtgcatttttttagaactgcgtaatttgcattcagaaatttgattgagcagttcatgctttgtagtttgttatgtttcttctgtgaattggttggcttctagttctagatgagctactgattgttcagagcagaagtgggaagttaagttcaggagcttttactcaataaaatttgtgcatagtatgtttactgaagtaaccttgatgtaaatctagaaatttagaatcacggagttattagaattactacacttataagtgtatacattactgaggtttttgctacaaaaatttaaagtatctggcattaataattttatttgtttaattgacctctttaaagaataaagctttgttgagtgtcagttaacgaaactagagccagatggttcatgttcacctttcagttttgcccttagaccttctcattcatttctaatttcatacttgcaatttgacaaactttagccactattcactccatgtggttcatcggaattgatttgaatgttcatttctcgtgtattgttgttttagatttggaaaagatatttcggcgtgcaactgaagca

SEQ ID NO: 71005 - DNA, 503 bp, Prunus persica
  Intron number 3 from transcript ppa012621m (locus ppa01262 1m.g) derived from phytozome v7.0 (chr-ID scaffold_6; pos 9298582 to 9299084 reverse strand)
ggatattgaggaatctatttttgtgtaagttctgtgctattatttctgtaaagggattttgaggaatctttttctttttttttaaaattctaggagaaagtatttcaaatgcatagtgtatactgtataggccatccctgtgttaataactggaattggggatgtttgtagttcttgtcataactccaaaattcagtacatatgaatcaactgcttctttccagtctatgtcaaaggagatatacacatgaacatgctaaacgttgattcaaacttgtggtgtatcccccttttatgccctaagaactacaaggaaacataagctgaatcagtttttgactgttagaaaaattgtcagagatttctttgataataaagtactttctagttagaacaattctgccataacttgtagatcttatcttgtgtgcttgaaccataaatttttgttggcaggcagtgttttgtagtgatttttctatgtactgcaggtctgcaaatca

SEQ ID NO: 71006 - DNA, 651 bp, Prunus persica
  Intron number 2 from transcript ppa012621m (locus ppa01262 1m.g) derived from phytozome v7.0 (chr-ID scaffold_6; pos 9299194 to 9299844 reverse strand)
ggtatgtgtaaaaaactgcttccttgcttttgcgttaatgtgcgttccttctgaaatttttacttatgtgttttgttgatgaaacttaaaccttagtatactgcggtaacggtctgatttcccccgcgttgtctcagtttttttttgcaatcaagatggtttcaatcttattacctgtatgagtagcaatatgttgagacttcaagtttacatggcttatgtgatgcttacagaatttggtttttgcggcctggaaataagtgttgaagagcccaaaaaaaaatttaaaaacaaaaaggaaaggaactcttaggaatatatctacaagggctcgttacaatattaagttatgaactgatgaagagtttttgaattcatatgcccagaatcagctaattgataacgtctttaccactatctgattagtgattattttcagttagtaacaagctcttaatttgagatttacagcttaatctattgaggtccaaattcttcatgtcctcacttttcactttatgttttttcttctgttttctgttgatgagaatggcaaacattattcaacccaaagatatattgtctgaatttgcaactgagttataatgctttgttattactttttggtctccagttgattcacagccaact

SEQ ID NO: 71007 - DNA, 257 bp, Prunus persica
  Intron number 1 from transcript ppa000160m (locus ppa00016 0m.g) derived from phytozome v7.0 (chr-ID scaffold_3; pos 19076088 to 19076344)
tgcaacaattaggtatggcttcactttctatggtcttcttgattgctttataatttatctgttttgattttcatgactgcatgggagtttgcattctgtttctcaaatagtggacaagtcttggacactagattctgcatatcctgaagacagttgcttcatgatcatgtgaaatacccatttcgtgtttttgatttaatgtatctgttgtggtatttgcagattctgtgagagggcgtggcaatcaatccttgact

SEQ ID NO: 71008 - DNA, 457 bp, Prunus persica
  Intron number 2 from transcript ppa004360m (locus ppa00436 0m.g) derived from phytozome v7.0 (chr-ID scaffold_4; pos 18541539 to 18541995)
ttctctagttgacacagcattcattggtcaaataggtactttgcttcttattcttttcattttgaactgtgcatatgttcttccatctgaaacaagtactttttgtttttgctttgggtaacaaaaacaaatttgattgaaaaaatcaagtttctttctttaaatgacaaggatggggataaaatgaaatatagtgtctacatgagaggccaatgtgtaaacatatccacattcacagtccactaatagcctaatggttaacagagatgtatctcttaaccctatccttcaaaagttgaccaattaccaaatgctaaatattagtcttcaatctgaaatgaaattttgtggctgaaccttgtatctttgttaaaatttacagttgtggaaatttaatatccaagttgtcttaatgtttaaaggtccagtggagcttgctgctgtaggagtttctatc

SEQ ID NO: 71009 - DNA, 854 bp, Prunus persica
  Intron number 1 from transcript ppa008017m (locus ppa00801 7m.g) derived from phytozome v7.0 (chr-ID scaffold_4; pos 3577443 to 3578296 reverse strand)
gtaagctccgagagcaggtcgcaaaacagcaacaggtgatttgcgaatacccattcatttgctttagtataattctcttgctcttcgttccttagcgcctacgcggccgcctaggccgatttttcgaacacttttttttttctttcttaagttggatagttcactgcttggttacagggaaaatgcggcatgggctttatgcttgtgtgatttgctaaataaatgaatagcttactaacgttgaagtgatttccagtggtacccagttcgttattggatcgaaatgtaactgactgttgctgatttctgaatgctctgtttgtttcctaagaagagagaagaatgattggcagttaattgaattaatcaaatttggctcattttcctgtaatctttatagaaccaaatcaatggagcaaatgggttttctctgctgcaggctatatatcaaatgtaattggaatttatgctttatttgtgaaggttgaattcgtttttttaaatcgacccgaatttggtaattatctgtacttttttttatggcagaaattggtagtggtggattattttgggaacatactttatgtaatttatagcatgcttgatggtagttgagatacaagtgtagaagatactaccttcggattgcttacttcaaatatttaagttcattttggtgcaaattcagctaatactgtagaactccattatgtttttccatgcctccgttcttgctgttttatgtttctgaacttgtaaaaaatattcttccatcgatttgttactatcaattgtgaagttatattgtctttttgaatttcaggctgtaataaagcagttcagtgggactggtt

SEQ ID NO: 71010 - DNA, 884 bp, Prunus persica
  Intron number 2 from transcript ppa021563m (locus ppa02156 3m.g) derived from phytozome v7.0 (chr-ID scaffold_5; pos 5714387 to 5715270)
caacaccttctacaacaagaaggaaacctttctctgtgagctcattagtaatgcctctgatgtacgtattttcacctttttattcttatcctgatttatcatttcagtattttctagtatttattgtatgaatctttgtgttttctttttgtgtttggcgtgtgaacgttttaaattcaacgatttagttggtatgcttaggttagaaatctaaacatgttaactttttatgctgtggtttatgattgtttcaatattgaaggaaactaatttatttgttctttagtcatcgttacttttttagttaaaagtttgagaatattgggggtttttgacttagttgttctcttatggcttagaaacactagatgaggtttgctggatacattttatggagtttagagaagaatctagataaggttttttaatcgtttccttttgttttaatttttgaaggatagtagcctctggtcatgcttagggctacgaaattacagttaagttgaattaattatacgatggttccattttgtgcctatgatccaccaattgtgggaaacaatttatactggtgcaagtcctttaggcaatgatttagatgatgttcttgtgtttactggaaatatgacagttgtaagacgaacatcactattctttcttaacatgtgctttccatagagaggaaacagaaattttgaatatagcatgggtccctttttcgcttatttatatttttgtttagtcgtgttttttaggttaaaatttgagttccctgatgttgagcaattcaagagctacttggccaataatgcttctgtggcaaatcagaatttataatatgactgctagtgatacacaaacttgcaaagtgcaacataagacca

SEQ ID NO: 71011 - DNA, 685 bp, Prunus persica
  Intron number 1 from transcript ppa003724m (locus ppa00372 4m.g) derived from phytozome v7.0 (chr-ID scaffold_1; pos 34161373 to 34162057 reverse strand)
cggactccttatagcccggctcaatttctttacaggtctgacattgctctgccagtgtgctctttggttacagcatatcttgccaagttaataatgcttggttttgtgatttgatgaatgatttatattgttcttgatactatgggggccgaagcccgaacaaagaaacaactacaacaaatgattgatttatattggataaacatttgtttcaggagtttcattgccagtttttgtctctgcaatttgtgggttttgaagttccttggataagtataggaagtgttatattgctctcttagcaagtggagatgaagtaataactttttaagttgtatacatgcaaattacataatgtgtatgtccaagccgggctttaagaaagatactcaacagaattgtatttttctttgtatactgaaaccttcaaattagggtttgtgtggttggagttagttggattcttcacattaatctatttagaagtgatagaatttctggaaatgatggccccatttttctgattttggatcaaattcttatttgatatgtgatgctaaatctcttgttagttcatgtatgcttgtattttcttaattgatacatgcagtagacttacttttcaactgatccacactatcttttacttgaagttggtggcagcattcagaaaatctggcaagtt

SEQ ID NO: 71012 - DNA, 819 bp, Prunus persica
  Intron number 2 from transcript ppa001740m (locus ppa00174 0m.g) derived from phytozome v7.0 (chr-ID scaffold_6; pos 13585999 to 13586817 reverse strand)
gttttcctcttgaattcagataaagaaaaatcaaggttagtagtgacttagaactaattgagttgatctttgggattggttttatgatgtgagaagtttttacatgggaatttcaaacctccatatcttttattggaccaattcacttgctttgcttggcttttgttaagtgttttctaatattcagagattccgtcccttttggatactctggttaacgagggaaagagaaattgttttagaacttctgccgtctcctcatccattgtctcgattaacttgaccttgaaccaatatttacttctcttgctgttgttatagctggtgttggtgatgttgcccatttctttagcttatctcttacatgtgtttctattcattgaggttggaatgtggaattttcttgtatacttcatatacttacaatctataatgttaccagagtttttttttttcggataagggttgtaattttgactatgtgatcgtttcctgagttggatatgtagaagctgatttctctgatgttgtactctgtccctcagttttcttttgttagtttttcctggtggctaggaattcagtaataaatttgcatttctttcacaaaaagaaggcgggggtgggcatacttttgtttatctatctttaaatttcttttattctctttgatttaaggggtgctactaaaatgaacataatttacatcttgtgctagtacgtgtttcaaatgattttgttttcttgaagaattctcagcattgcatgtatttcccattttttgatacctctattaaattgagtttcaggaggaatctt

SEQ ID NO: 71013 - DNA, 466 bp, Prunus persica
  Intron number 1 from transcript ppa016602m (locus ppa01660 2m.g) derived from phytozome v7.0 (chr-ID scaffold_8; pos 3929404 to 3929869 reverse strand)
acaagctggacaaggttttattttcatactcactttcagatttttatgttttgatttggtgtgcatttggttagaattataattgtcatgtggcagttgtcaaaaagaaaagaaaatggtaattggcatgttctatactaattggaattaatattgttctgatgatttgctagatgatatcttgattggtttttggatggaataacaagctaagtatgctggactattgaagattttgagtgttctcttgttcaatttgtgggttgcccatatttccaagtcactgaaagtttaagatataaaatcttgatttttctgctttttccgagtaatcttgttaatcaaggaaagcataaatttattagttggctagatcattgttgagaggaggctggaatttgaacttggtttttcttttttctttctaaatgtttgcacttgtaggtgggcgaaggaacatacagca

SEQ ID NO: 71014 - DNA, 465 bp, Prunus persica
  Intron number 1 from transcript ppa009291m (locus ppa00929 1m.g) derived from phytozome v7.0 (chr-ID scaffold_5; pos 11925463 to 11925927)
tttgagagttcccggaagtatgtgctacattttgtattcatggtagctttatggatttttcttgtttatgttatctatcctaggtgttttcttatttgtttgatctttgaaacccatgttttttttacgtatatatgcagaattttctgtaatgtctaataggcttataattgtattagtctgcactggatatataataacaattgactagaagaaatggtacaacacatcctggactaacagaatcaaaccgaattattgaccttgttaataattctgtatgaaataaatatacagatatctgagtttgttccttttatgctttcagatcattattcatttggcatgctgaaatatgttttatattttttgaagtctgttatgttttgcattaataatacttgatttactgtgtgtttgcatttttcagattcgcctcatctttcacttttaattcagaacaaa

SEQ ID NO: 71015 - DNA, 804 bp, Prunus persica
  Intron number 1 from transcript ppa002694m (locus ppa00269 4m.g) derived from phytozome v7.0 (chr-ID scaffold_8; pos 1803065 to 1803868 reverse strand)
gttgaacccagacaccgcctatctggttcagccaagtcagtttctctctttaaatttttagtttttgttatttttctttctggtttagtgtaatttgacttcattttgcttggatatcagaataataagcatgtaagaaaagtcttcctatgcatctctgcttctgttggttcaaaatttaagtgttcatttaccagtttgattagatgggttccttctaaattatatatatgtatatgtacaggtcaagactagaccttttaaattgttgcgaaatttactatgttggcattaaattgggtccataagcatggatgaatagtgggtctcgaaaagtttgtattgtaaatttgaacgtgttttgattaagtgaagagtcttgccaataattagactacaatttgcactgtgtgaaatattttggagaggatctgccattccatgtatttagctactgtgtgatggtcatggtgcatgagatttcaatatcgaattcttgggatactgctaaactagtttgcaaatgatatttataacttttctttgtaatctgcctaatgggatgtaggacacttcaaatttgtgctgtttccgcatagacatatcaatgtgcaatgcatttacaacgaccgagttgattgcgtaacatttgtttgtctttctgtgattgtttccaatggcattcacttatttactactttatttagtttttcccgttccaatttgttgctctttgtactttctttctcttgccattcagacatgtgttgatgttgttatgaatccctttttgtttcagtgaag

SEQ ID NO: 71016 - DNA, 491 bp, Prunus persica
  Intron number 1 from transcript ppa007201m (locus ppa00720 1m.g) derived from phytozome v7.0 (chr-ID scaffold_7; pos 2132594 to 2133084 reverse strand)
tcgacactgtcaatatcgctgaggacgtaacccaggttctgctctatgccgctggtttgttcttttgttatagcgtacttttcaacgcacatttgttgaatttctatctgaataatattccttaatgctaagatttcaacaaggcatatcttcaatttttggcactgcactggttggttggacagaaaaaaattagacgaaaattctctatgttgaatctcttgtaatatgtacacacatatatatatatatgtgtgtgtgtgtgtattgatgtgtttttgggtttaatattgtgagaaagtaatgataagtaggtgggttttgaatttgtatcaacgtagctgttggatgtggtcactttacacatttcattacaatatataatcttgttttaatcactgcaatttatgtgcatagtggtttctattgtcaaaagtttttgttgactggaatttgctgataaactgatatagttgattggaagtacacca

SEQ ID NO: 71017 - DNA, 457 bp, Prunus persica
  Intron number 3 from transcript ppa018519m (locus ppa01851 9m.g) derived from phytozome v7.0 (chr-ID scaffold_7; pos 9887184 to 9887640)
ttgtaaacaatgtaaatttgtgaacacaaacattctattttctttgtttgttctacattttcttggtgaattaatttgagttggtgaagtctaacatgagagaattttcgctcacttctaggggtacaaggtgaaatgctaccaacgtcccaaggtgagctctacgtagttttgcatgcatgaacattttcgcacgtattttttagggaatgtttccttgtcagattatgaatctaaatcattaatatagttgatccttacctaaacgtgtgattcggattcacagtttgacaacatatgcatataagtatgccaaaatctgtttcaacttttatctaatgacagaaaacttaataccaattcgtgtgcatgtctctataaactttctttgccaaaataatattggtaacaaatcatcagaatgtggaaaattgttgcaggctatacacttctacaa

SEQ ID NO: 71018 - DNA, 554 bp, Prunus persica
  Intron number 3 from transcript ppa009744m (locus ppa00974 4m.g) derived from phytozome v7.0 (chr-ID scaffold_1; pos 36248025 to 36248578 reverse strand)
cactcgaggttcgtttctctaatgtttctacttcaagaatgtcctttggctgtgtcgcatgctataagccatgtcagtgccccatctgttcacgtagtatagcatttacaatattttggtgactgtctgttggcatctttttcaatttgtattttcttcttatgtgaaactattgacctttttatttaattcttatggtcttatcatcccaaatagccatgtgtgctatacactatacaggaaatccttttgcgttagaaatagtatttagaagaaaatttaggaattgatgtcattgaggcccgcatataaacactttttagtgctgatgttcaagtgcatagtgggaatgaggagctttgataaaatggatatgtcagatgcaacatgttaaactgtgttgtgatagaaaatcgactgcttgtcctgtaaaaatggactctatctgctaaaacaattcaaactgcatatttatttcctgacttaattatttcatttctgaaacaagctattttctgttttgtagctcaaatctgctgacaggagtgcgtttg

SEQ ID NO: 71019 - DNA, 1016 bp, Prunus persica
  Intron number 1 from transcript ppa000219m (locus ppa00021 9m.g) derived from phytozome v7.0 (chr-ID scaffold_1; pos 36618612 to 36619627)
tctggcggcagcatccacattaaggctcgtaaaatgtaatattcatcattaattctccttttttttttccttagaatatttttgaaaaagctcttatattggtttttgtgttgaatgagctttaggttttgattatatgttgatgagaaatgtcggaaaaaagtagatatatgattactgcagttaagatggtgagtttggctttatttgtttagtgagaatgttacagaaatgaaaaggaaatttaaaattttccatttctctatgtaggaagtagcaatatgatagacttctctacctaacattaattatgccttcgtttggtttaatttttagcttgttgaggcaaagcaaaaagagtggaatataaaatgacaaaaaataaaatttcattggttgccatgaatcttacaatgttacactttgttcactatgtagatttttcttaaaagaaaaatgaaaaatgcaaaaggcaaaagttggcaataatgccagttacaatgtactaatgaggctatgcgctctatttcagttacgcattggttgtacgtttgcttctcgacatgtgttctgataatctacttccttgtctcttggaatggacttttggtggatggaaaaagatgtttgagaatgatgttcaattttaactttattcaatcctcgaatgtttgttttttgattcttgctttctattctgatgacaaaatgctagaaaggtaacaacgggatacatggtatctttgcaggcgtgcatcaaaacatggttattttgcttatatatatatattatcaggtgttattcttatctgcgtaggtgtttgtaaatgtgtcactatgttttatctaattgttctgatgccccaagtctatgtagactgttggtatgactgtgctttccatctgcatcaagttgcatcactacatatattgttataccttatatgtgcatattatgcaaggtggcctttatgctttctaatagaactctgttgttttgaagtgcaggactggta

SEQ ID NO: 71020 - DNA, 495 bp, Prunus persica
  Intron number 1 from transcript ppa009852m (locus ppa00985 2m.g) derived from phytozome v7.0 (chr-ID scaffold_1; pos 2952938 to 2953432 reverse strand)
gccctgaaagattttcatcttaagcaaaaggtatggctatcttttcccatttcttatttttattttatttttcttgaaaaactgcattttttctgagcatttatatttgagttcttggacaatctgaacaatctagtttctgggtctctgattttgggttgataatttttatgggttgtgccagattgtttaagaagtcaatagtgtttacaaaatgggaaatgacaaaagaaggaaaaggaaagagatagaatattattataaccatggaattaccatttacaaagtttgattttgtttttttccatctttccaagttttcattcttcatttgtataatgtatatcatgaccactaatttctacaaaagtttgtgtatatgtatatatatatgtgtgtgtgtgtgtacgctcaagcaccataacataagctgaaacgtttttcttaattaaattagaaatggtttttcaggcgttgcagctgaaacgttttctc

SEQ ID NO: 71021 - DNA, 615 bp, Prunus persica
  Intron number 1 from transcript ppa005775m (locus ppa00577 5m.g) derived from phytozome v7.0 (chr-ID scaffold_8; pos 3353613 to 3354227)
cccttcactccttcttcgatccctctctctctcaggcaagtcctttcttctctcttacctttcattgccgatagcgttaatcatatttttttggatgaaggtacgctgccttcggttgcagagaaattgcgagggagaacttttaatctattaaccaaaatgggatctgtcactggacgtgtttgattcttcagctatttctctcctccggcttctcggcaaccaaactggtctttagggttttcagttgtaaacgctctctttcgttttgtaagataagctttgtttaacaaaaccatttaatttttggttctttctttctttcttttgttttttcccctccgaagaaagcctgagtcttttgttcttgttactttgaaaaaaaaattctttggtattttgaagggaattgttgatatttgaagtcatttatctggtgcatttggtgttgttattgaacttaagaatgtgttttgctatgagtgggaagtcaagaaaacaatttattttgcgtgcattttgaatataggactgacacttgagtttgagttttggtgttcctgtaaatgctaatatgtcgttggctatgttgggtttgttacagggttttccacg

SEQ ID NO: 71022 - DNA, 798 bp, Prunus persica
  Intron number 2 from transcript ppa003429m (locus ppa00342 9m.g) derived from phytozome v7.0 (chr-ID scaffold_8; pos 16758545 to 16759342 reverse strand)
ctcataaaccagcgattgaagtccggcttgtacaggttagatcattgatgactactcatctgacttggtaaccgttgtttccaatgttgaagattttcttgatccttgagtgctagcctgttatttcttgtcattttctgtggctggtgcagcgttattgtcatcacagatttagtgtatcttttcttgattaagttaagaaattggatttggatcaggcctaacgtattaaatcaaaatgtttattatgtcacattcaaagttgtcagtattgtgttaaggagtcctagccgcggtataatgtgttccatgaccttaataatgtttgcccttgagtaagattcgtttccaaaaaaaaaatcctcgagtcgagactggaggatggtattagttgttaccttcagtgcaatctgcatcacactccttttagtctgttcatgttccaagagtcaagactggtcagataagccatgctattagctcccatttgaacacaggttatttatatatgaactacatcctttctttacatgtcgtttggaaaatttgccactcctaaaagtctagatttgtaagattacaaattatcaatgagtcattgaaaaatcaccactgaaacaaagtcttaaatcacatgttctgctggaattttccttcataatttcttccttttccctttagttctttaggtaaattaattgtatagaaatttatttcccatttaccgttcttcaactttgatacatgtcctcatgcattctgggaatcacaattttgtgtaggttcatcccatcccag

SEQ ID NO: 71023 - DNA, 593 bp, Prunus persica
  Intron number 1 from transcript ppa003429m (locus ppa00342 9m.g) derived from phytozome v7.0 (chr-ID scaffold_8; pos 16759412 to 16760004 reverse strand)
gaactttgggctcacttcaatcgcctccccactcggtacttttcgctcttataatcctcatattttcatattattccattttaatttttttggggtaatattatgtgcatgtatatctatatgtatatgtgtgtgtgtgtgtgtgtttgttactattgctagtattttaattattattttttcataaggtttttgttgattttgaatctgttaattgaagattagcttctgaatctaggatatgtaaattcttttttccttcaatttctgtttgttcttgtttgtcttggtttggtagtgatcttgtgcgtcacgttatgacctaagtttctgtcgagccaaacagaatagaatgaagcaaatttagcaattctcaaacacattattctacttttatttgaaatattagaggtttaatagaactggatcagtttttgtggctctatttcattatttctcacaagcagacaaacagacaagcaggctttaaaatgttaatcgtttcagtactcgcttatttttgtagaattggaaacgagttttgatgagttgaggcactggcttgtacttgcgcaatttcaggtacgcattgg

SEQ ID NO: 71024 - DNA, 486 bp, Prunus persica
  Intron number 3 from transcript ppa011471m (locus ppa01147 1m.g) derived from phytozome v7.0 (chr-ID scaffold_2; pos 14423141 to 14423626 reverse strand)
agctgatctgaaccctacagttgtttttgtattgggtaagaaaaaaatataacttgaactagtagtatcctaatcatccttgtttctctgagatttatagctgtttgccacctgagagaagatgtactaatattgttcatgattttaattgctgtttttgcttttttcttaatagttcagggaaaacgtgtgcatgatttaaagtcctatctcaaagcaatgatctttaagtatgatcgataggcattttagtttttatttcaatttaccctggtatgggaagactaattactgaaatgatcattaggtttgtttactagcggtgttttatttatacattctctttctgtttttttactagctatactaaagcctccagccatttctttggtaccactcctctcttcttttgaagtatctatggtgtcttttaccagttgtttcttttgattgcctaggtggccctggcagcggaaagggtaccca

SEQ ID NO: 71025 - DNA, 684 bp, Prunus persica
  Intron number 2 from transcript ppa006373m (locus ppa00637 3m.g) derived from phytozome v7.0 (chr-ID scaffold_2; pos 25589275 to 25589958)
gcatattttgggccaagcgtatgaatgcgatacttctctgtcctttttttctgttgtagaggattggattctataacatttgttgaggctgcttagttgttacatatcatgcaagtctacacgggattgctctaaacggaaatgagaatgtgtgatacatacaccgcctagggtggttgatagaccatactactgagtcatgtgataagttgtgttgattattgcattgatgtctagacatgagtcgttaaaattggttggtttctgtaagtagctcacagttagaactttgagtgggattaggagcatggggagttatatggatgcattatctgcatgagaggctgagacatggggagttacattgtctctgcttggatttttcttcttctttctgttggtttcagggaaatattatgtttcaacttttttttcactaatactttatggtgtagacaagtggctgtgtttttgggtaccttcacatgttactagctaatgaattatatgctatatatgtttgataaatgtatcccttcacaatcaggaaggttctttactgaccgttttggctctttgatatttggcttaatgttgatctctgccagtatttgggccattaattttgttttattttatgtgtgctcagttgtttgcagatctaaggtgttcaccatcgtgcac

SEQ ID NO: 71026 - DNA, 455 bp, Prunus persica
  Intron number 3 from transcript ppa007275m (locus ppa00727 5m.g) derived from phytozome v7.0 (chr-ID scaffold_8; pos 14356994 to 14357448 reverse strand)
gttctgatcaaatttttgatctcgtggctttgccggtcagttgttttgaaccaatttttgttaaatttcatgaatttctagtattactaagtaactagcagaagacacgtaatatttgtcgttgagattcttttaaaacaaccgaagttcgtcaaattagaacgatagctatagaaagttttcttctttttggcctagagctggagaaagtttaacaagaagagtcaaagtgggtatctatagctggaagcaaaaaatactgtaggcacaaggtagtctacatgctggaggtgttatttttggaattattgtgatgcaattactgcccttggtttttgtcttttgattaaccaatggatattaatattaggaagtttggtgataagttgtatgttgaattgacaaacttataacatccgctgattactgttatgtatatgacccttaagggagga

SEQ ID NO: 71027 - DNA, 743 bp, Prunus persica
  Intron number 4 from transcript ppa013790m (locus ppa01379 0m.g) derived from phytozome v7.0 (chr-ID scaffold_7; pos 22325357 to 22326099 reverse strand)
ccgttgtggcactgaccttgagaaaaggttgaatctcttatccttttggttttttggtccctctagttttatgcatcttacttgtattattctcactgctggctcatctaagttagtatttgaaaacaaggattagaaggttggattatctaatataaaagaaaagtataactttgcctagtttcatgggcagaaggcatcttaccatgagttgagttatgtgacatcaaagattgaggagttgcctattttgatgggaaaaagtttagggggggtgctctttcttaagagttgggttatggtctgaagtatttcagacactgtttgaggaccattttcatttagtcatgtttttgtaatgttctgatgaagttggcttttcctaattaattaagctttcatgcaatcattatcgtatgagaacggcaattgatgatgtgtgaaaatgacaaggagtaggcagtcttttctcttttttctttgctatagtttgattaatttgtatacgattttttgtacagttctatcattgcttgagcttggatttattcataagacacagttacaacgtctttagacggcttgttactgatttttattatccgccctactagtttttatgcttgaaagtttgatgggagcgactgctctacttttatattaggtagaccagattgtgtcttgtcttttatcttatgtttgcttgggagcagcctaataaaacttttctccattgcctccag

SEQ ID NO: 71028 - DNA, 619 bp, Prunus persica
  Intron number 2 from transcript ppa013790m (locus ppa01379 0m.g) derived from phytozome v7.0 (chr-ID scaffold_7; pos 22326472 to 22327090 reverse strand)
cctcctgcccctattcagttcagagttgaagagtgtgtacatgattctctttatccctttcgtttcgttacattgttggaacataagataattgataaattaatcctgaagtgagttaaggggatagggactttgtttatttatttaattgctaataaatcattatatagtaaggaaattgtgcttagagaaaacttgggggatcgttttgatcgtctgattgaaattttggcgatcaaagttacatgatatataatagagtaggaatgtattgaaatacaaggttaaaaccattacaatgtgtgaacaaccttcaaatatggctttcatgtctgactttatagcagatccacgtcttcccctattggaggaagcaaatgctgccaacttgtggaacatgatacaatgtgtctttgtttaagtaatttcacatgtaaagcaatgttagtcttgcttttggactaaaattgctgttgattttggtcattacttcggtttgattttagagaaagttgtatggaatataagactaaaggaaaagcttagtggttttcattgattattagtggaaaaaaactgtatgctgatttgttttgtctctttttttcttttccaggcc

SEQ ID NO: 71029 - DNA, 383 bp, Prunus persica
  Intron number 2 from transcript ppa026953m (locus ppa02695 3m.g) derived from phytozome v7.0 (chr-ID scaffold_3; pos 4019194 to 4019576 reverse strand)
ctattacaaaccttgccggtatgcatactctttgtctattttgtgtaaatgtggtatgaatagttttattataaatgttatgacagcaagatatatctggaaagattgtacattagtttaaggtaaatgtaggaaacatatcaattatgaaatgccgctatttcagatttcatattagttttagactcagatggtggcattgacatattaatgttggtttttgattttgaatgtccaactattttgacttttttcttacaaattatatagtttgtactattgaaaaggctgatttgttagatttccagttcgcataaccctcatgttactcttccaactgcattgcagcttctgtttttggagaacaaactcgcctagaaccc

SEQ ID NO: 71030 - DNA, 701 bp, Prunus persica
  Intron number 1 from transcript ppa019225m (locus ppa01922 5m.g) derived from phytozome v7.0 (chr-ID scaffold_2; pos 217699 to 218399)
ctattgcaaacaatctgtgggaaagtgctcttaaggtttgtgggtcttttttcttttcttctgtgtgttttgggtatgagttttgtcttatcagtatgttggatttttggttgtttggtttctggagttatgttcagcctctgtttattttttattttttacttttgtattgttttgttagaaatagtggggaattaatgatgagattataagtttgaaaatattaagatattaagttggacaacctctctgaaatgaaaagttgacagctttagtgggaataggattagtcgtggctagaggctttctgggttggggagaagtgaactctttaggtttgcggaaatttattgtttatgaaccaaggcttctgggtctgttacatgttaaatttcacaattggtgatcatatgtaagaagaatttgcttaattgaaattgctgttctatcaaagaagcgacaatttcattttgattaattgtgcaaatggttagattctaaaatccttggtcatttcaaaataattctgtacaaaaaatttaagtgctatttgtagcatcctggtttggaatgccatccatatgccactggatttctttgagtcttcatttctcccttttgttccgtcttcaaattttttctgatataaaacaactcttcctttctttagatttttggactactacgtaagcaacactggt

SEQ ID NO: 71031 - DNA, 768 bp, Prunus persica
  Intron number 1 from transcript ppa012144m (locus ppa01214 4m.g) derived from phytozome v7.0 (chr-ID scaffold_4; pos 1118517 to 1119284 reverse strand)
tcgtgcagaggtcaacttggcttggagatagaattgtatgtctttcatattcgatgatctttcttattggaactattaaaaggaagagaaacaataactctattagaaaaacaaacaaacagctagcaaaactaaataaacaagcttcagatgcattgtggagaggagaaaggagccatagtctatttagcatttctatagacagatcaccactgtgcatgctgcgagacctcatgtctaccattccgcactactctctccacttcactgtcaatttagatttttcgttactcctaacactgcactgactaaagctgcttctttgtgaaattaggaacaaataatgattttcaagataattacaataaaacatttatatgagttatattcatgcagatgcatatcttattgcatcttattggatattgaatcttgtcagttgtgcacattttgtgtagactcttactcttttcttttattgatccatcttactttcagaaatggtaattctgatgtatagggcacgtgtccacattttcatatgtgccatgaacatgcatcttaggtccacacacatacattttcaaatgtatagaatgtttgagtttctcccgctttttaataaatataattatcaaacagctcttttacaaattttgcgcaacattgatcaaacacatgttcattgcaccagacaataagctttctttctgattgtaattgagcttggggtgtacaactttagattatttcttttattttaacaga

SEQ ID NO: 71032 - DNA, 1018 bp, Prunus persica
  Intron number 1 from transcript ppa016430m (locus ppa01643 0m.g) derived from phytozome v7.0 (chr-ID scaffold_1; pos 37310137 to 37311154)
ggggttcacgtgtgggagtttgagaccactagcaagtaataattatttcctgtttctggcaatgtacccgtgtttattaataccatcttcaacaacaccatgttgaccaactaaaacactcaatatttctgttatttgtattttccataatatatatgtcatttgattctttatatactattttaaacaacgcaagtacgaatatgaaatcatatggcaaatggaaaagcacgcaaagctctctttcaacatatctgtattcttccctccaattgaaacacctagaaggctagggaggcaatgagagaactctcacgagaaaaggcaagtcctttctttttctttaccaacttttggtttttttaatttttatttttatttaacaagtaaaatataggggtttcgcgctaaaatagccatttttcacaattttttttctttctataatagctcttgccccagtgtctcgttgttatccctacagttccctctaagttgtacctatgatgcctatttaatgcaccattttgggtttaattggcacctcatgtatcttagaagcaaatgtgagcaaatgtgtttgcaaatgagtggtccaagtggcattgaagtgagcttccaatacccccgaaaaaaaaaaaaggtttaatcctccaaaagaagaaattagcatgaaaaatacatattgctctttgaaatgagttcccatttttatgaaacttccataaggaaatcccataaaatctacatcaaagcatagcatattactcttgtccaaagccaatcaatttctgtctcattcttccaccattgttgcttccataccaacctgcagaaaaaaaaaatatcaaaaactccactaattcctttgtatctgatttgccttaaccccaacactccacaaaaccaatccatgaacccctccactacttcacccaacaccaacatccatgtcgacttccctaacagccacccaaatgaagaccaaaatcaaccaaacactcccttacttcaccaa

SEQ ID NO: 71033 - DNA, 702 bp, Prunus persica
  Intron number 1 from transcript ppa004224m (locus ppa00422 4m.g) derived from phytozome v7.0 (chr-ID scaffold_1; pos 1033038 to 1033739)
cccggtgcgttgctaattctaacttattcttttttatttcttgtgctattagccatgtctagttttccatgtaattcgttggccattgtttggttttgtttagagcttatggaaaatgtgtgttcccatatgtacctatttgagctgtatatgtaatggataaattggcatgcttctatgtggttactggttagtaaattttgagcaaggcttatgggtttgatcaggtcaggttatttctatgtggaaatttctgctctttccaatgataaatttgtataatcgtttcataagtgttgcatattatcaccattattcttcagctattcccagtttatttgtttatttcttacttctcatatgactgtatgatggatctaacctctatccctaacgattttcagcgcaaacctcttacctgtctttgaatcatagcttgtaaaacctaatcaatgatttatgtccacatgctttgtaatcactcaagagctcaagtctcccccaaactttaatatatatatttttttttctcaaagattttgacattatgaagatgtctcattgaccttgtaatagttttgcaaagatattaagttttctgtctgactttcttgtgaatgtttggatatggttcattatgtgtacagtaagagggccccttctctagattgtaatgtatagaggctgttgctatgtgcagat

SEQ ID NO: 71034 - DNA, 685 bp, Prunus persica
  Intron number 3 from transcript ppa000571m (locus ppa00057 1m.g) derived from phytozome v7.0 (chr-ID scaffold_3; pos 15097431 to 15098115)
gaggttgagagtcaaggtcaagaagcttgtcaagggttgacagagagcaatggagcagaaaattggacttgcccatcaaggggatcaatgggttttgatgggagtgtagacgctttagcagatttggatactagttctttcaaagcttctgaacttggtgacaggtattgcaaaaagagctgtttgctccttgttttagtattttttttgtgaactgtgactttcacttgatttcttttgtttctttcttgtgtttttgataattcgcataatttaacattgtcttctgcagagccaacaaaagcatagatggagagacagaaacaagaatcccttctttgcaagccagccaattagaccattcagcttattataataccaggtgcatccaatgttgaatttcatataaagtcagatacttgtttactgctactttggttttagtggagttttattgctttatcagtaagaacttaactgtgtttgcacttctacattgaacaaggaaagagttgcctttccaaaaatttaattatgatttcaaatgttttatatatattcgtactgagtaaaacccagttagatccaaaagatactgcacatatattagttttttctgaaatttgaaaaaccatattttttcattctttttatggcatctcaattcatcattgcagtggccaat

SEQ ID NO: 71035 - DNA, 410 bp, Prunus persica
  Intron number 3 from transcript ppa007830m (locus ppa00783 0m.g) derived from phytozome v7.0 (chr-ID scaffold_7; pos 19344969 to 19345378)
gactggccagttttttgcactaaaggtattacacaaggccctttcttttcctagtcaaattactccttgtgtaccataagataagaagatgtatagttgttcccctaactatgccataagtagcattcttgtgtttgagatgaataaagtgggaagatctttgagttcatattgctttgttatacccattgtgttttgaaatttacattagtaagaattgtaacgtttctgggtggctcaactgctttggatggttgattctgcgtggacttgcttatcttcatgctttgtagactgtagagctatccaataatatgcctatgggatgttgtgcatgtcttattgtttacttcatgttctccttgctctagtagttttttgatgcattttcccacattcaggtaattcaa

SEQ ID NO: 71036 - DNA, 484 bp, Prunus persica
  Intron number 1 from transcript ppa022455m (locus ppa02245 5m.g) derived from phytozome v7.0 (chr-ID scaffold_2; pos 1652517 to 1653000)
cccgttggagggaccttcgatccatacatagttgggtacagttttctgccaattcagaaattaatcaaccaaatttttttttctttgtatgattaaacttttttccttgcaaatgtcacataacgtgttttgcgtgtgttagtccacgtcttggttttgaataagtcatgattaaacaatataattcatttgatgtccacgtcttaacaattttagttgaagagttgtagtaattaaacaaacatattatatcatcattgactcaaaaccaatcattgaataggtctttttttttttaatacctttttgggttttcttctcttttactcatatttttgtttaagttatcaaactggtagatgatttggttttagagtaatcttaaagggacataatcatatcactactcagagatcattttttttttttttttttttttttggatttaggctttatttcacaagtgtgaagttgggtacacctg

SEQ ID NO: 71037 - DNA, 574 bp, Prunus persica
  Intron number 1 from transcript ppa022771m (locus ppa02277 1m.g) derived from phytozome v7.0 (chr-ID scaffold_7; pos 6153643 to 6154216 reverse strand)
gagatactctgacagtgctctgacaaggaaaaaaagtctaaaagttttctctgggagattgaaatttttaatcgggtttggaaacagcgcatgtgtatgtcaggtagacgaaaagttgcttacatataaaaccatttcaaaaaaataatacggcggttacatataactacgacgtataaattacaaaatacgacggtacatttaacttcggacgtggtaaataaatacgacagtagtgttgtaggtaccgtcgtagtaaactcaaaaattaaagtacataagtaataactcgcatcatggtagattatttaacacgtcgtttttattaatttatcgacgtggatttctgtaatatacgtcgatcataccgacgttgattttacaatttaaacggcggtttttttgtaaggaccgccgttggttttaaaaatttattctataaatttgtcgctttcattcattttcggtttacatttagggttccaagttcttcctctctcagtctctcacgtctcaaagacaataatttggatgtctttctcaaagagaaattgagcttactcgcatcaaatat

SEQ ID NO: 71038 - DNA, 841 bp, Prunus persica
  Intron number 1 from transcript ppa010348m (locus ppa00903 7m.g) derived from phytozome v7.0 (chr-ID scaffold_6; pos 24910072 to 24910912)
tttttcctgcatcgaaaatcgttagatatttacaagtataactccaaatcctggctcaaacttgttccttgttttctttcgcacgttttctcagcagaaagcaccaagctgatttttaagattttatttgatatctctctatctagcttttttgttttgcttttcctttcaatgttttcgacttgtctggtatttggttatgtatgattgcttatttcgttgttctgtttctatgtcgttgacaaagtttcttgcttttggtctcgaagtaaggttgtgtttgtttggttgttgatgttattgctgttatgttttaactagtaatatcatttcaattgggtaatcaccataaacatgactagcaaatccaaagagtggtgaattcagattccagtagactttaactagcttttccttgcccaatttggtttggtgaattcagcttgattaaaacttagacaggtgtgttacaaacagtattgaagtgagtgatgaatagagggctatggcgcttaccctagttcattgagcccttgttgtgtttatatctagtgccataaggcaataatttcccagttttaaaaggcacaaagtgttcttagaatgtaattagaatgaagtcacaaaattctgattgggtcttctatctattcttgaaccttgtttgcaccttaagctctcttgttactacattaagattatctcaccgccactttcttaggtttctttatgttgtgaacttgcatgtatgatcaattatgggctgtcatcgtttcaagtactaaatttttgttcatagagggccttcttatgttgttggatgattgcagcttcaggcacc

SEQ ID NO: 71039 - DNA, 895 bp, Prunus persica
  Intron number 2 from transcript ppa012559m (locus ppa01255 9m.g) derived from phytozome v7.0 (chr-ID scaffold_2; pos 26650815 to 26651709)
gttaggtaactactataattttgccattgccttctttcaaaacttagtgcttattttctgatcagcattggaacaaaagcccatactcttgactcgatggacaaactcttctgcataacttgtctcaatcttaagctatcatgggcaaatattttgaagttatattgccaattggctttgcttatactatgtgttcatatgaagtgacttggaagttgaggctagacaaaagtttcagaagattatttcacaagttctgagctaattgttgtatggaaccaaaatgctttggttttaacaattgtttttcaaccacagcaatttgttttgtttaaaagattaaaaaaaattgcagaggtgttgaagatctgaaaatttcttcccctttttcccaaatttagctcaagcatataatttttccagatctgaaatttggagacaacgcacacaacttaaaaagaaaatggaaattatggttctattcttttaggatggggtcagcaggcaaggttattttccttatttaatttaataattctaaaagtgggtcttcaagtctacatattaatcagtaacaacataattagtaatgaaatgcttctttttacagcaaagcattttgtgaatttttcttttccttttgaaaaatttagaacgaacaacttcccatgcatccttgaagtattgagtctatgacttctctgttcgcagtgataaggttttggcaaacacacgactccttttgtgtaagatcaccttcacgcaaatgaaatggagtttcttaatacctattatcttgtatgattttacagcttatatggttattgaaaagcatcctgggttaatatcttttcctttttatattttatttttatttctccatgacaggtatttc

SEQ ID NO: 71040 - DNA, 370 bp, Prunus persica
  Intron number 2 from transcript ppa009297m (locus ppa00929 7m.g) derived from phytozome v7.0 (chr-ID scaffold_2; pos 17680784 to 17681153)
tcatcaaaacccagtttgggaaactcgatatcttggtatgtatgatcatagctacagggttaatgtaaaattgagtgatctatatcatgcttattgtgtccacttccagttgtggaagattttactttgaagtctaaatctaactctaactatatgaaagatcagtgactggaattaagtggtgtgacaaagtagcatacttattggccttctttgaagagcactggttggttatagcagatagtttatccaagtaatcaaagcatctaccaactttcttttaattccatcttgtagatgtttttttctttgcttttgtttgcaaaagtaaaacaagtagtgaaacagttggactctgcacaggtgaaca

SEQ ID NO: 71041 - DNA, 410 bp, Prunus persica
  Intron number 1 from transcript ppa007315m (locus ppa00731 5m.g) derived from phytozome v7.0 (chr-ID scaffold_5; pos 6791119 to 6791528)
tgccaaattctctccccagttctgttcttgcagaggtaattgttttcagaccacaaaaacaaggagacagaaaaataggatttttttaatttttaattctcaagtttttcatttttttagtgtttttagcagaaagttgagcttcaaagtcctgcctttttttgatgagtttgcagctaaattttccattcaagaacttaatgagactgcagtatgtaaacgaaggacctatgctagtatatgatcactaatgagagaatgcatgcccttttcttttccctttaagaaagttagaaatttatcttaatgcttgatttagactttgagttcataagaaagttttcccttttgttttcttattagtttcttttgcagggattcttctgaaggcttcttattcttctcatcct

SEQ ID NO: 71042 - DNA, 667 bp, Prunus persica
  Intron number 1 from transcript ppa010755m (locus ppa01075 5m.g) derived from phytozome v7.0 (chr-ID scaffold_7; pos 18553434 to 18554100)
ctgctcttgttggaggtaatcaaattattttgcttctcttttctagcttgtaaaaatttcatcttgtattatattgaagcgaaggctgttccagtccagctatatattgttgccttaaagctacaatagttagaaatttcctatggagttacaaatttgttgttcttgttattgtggctaatttatgagccttaaggccttcagttgtgcttgtaaagtatagaactttggggtttatcccaaatagtataacagggtggtttccaattttattggtgatctctgatttggctgtacagttctggattggtcccgtctatttgatggttctcgtaggaagactttgtgtttccaagttcaaagcttttttcttttatgtatagattaaatataaagatgacttagtctagaaaattatcttatagttgggaagtttttgaaggttttcctcaagcaaagtctgcaaatgacctgcttagttacgcacttccaactagcttcttgtgtcccgagacccagggattgcatcgataaaatcctgtaatcaaataattatctaatagatagcaatcatccatatgaacataccagtttattatgtccagttcttgatggtatcaattgtactgggatctcacagttgatttttatgtcagtgggtggcctc

SEQ ID NO: 71043 - DNA, 649 bp, Prunus persica
  Intron number 1 from transcript ppa009545m (locus ppa00954 5m.g) derived from phytozome v7.0 (chr-ID scaffold_1; pos 3458635 to 3459283)
gtttctcaagacggtggctctcccactgctgtaaggtgaggctattcatggaaagcaagctctttttatatatatatttattcataaaaaagtataaatttttactcttatattcttgtgtttgactgctgagaaaactgagaaattgcacgttctcttcttgtttttgtgtccagtccaggaaaatagaaaacttaagaaaaaccaagtagctgtgttcgcttggcttattttatgccctcttaagaaaaatttaaaagaattttttttaataacaattttctgtttcatatatttattttcttttttcttgattaatattggtcagtctgtaatctttttcatattgcatctagtacttaatctgtttttgactattgaattatagaaaaaagaactataatctttcactctctttatctagtcctaaatattttatttaaatttattgtgttttatatgtcattaaattgtagtattatactctgttgaatgcccgctatgtattttatcaaaaagttctggaaaaaaaacagagaatgtgttgtttattctgacaattaaggttatgaatgctctgtatctctggttttgtattttggatcattgatggttgtattttgtgttatgaaagcagtcaagttgtggg

SEQ ID NO: 71044 - DNA, 724 bp, Prunus persica
  Intron number 3 from transcript ppa023567m (locus ppa02356 7m.g) derived from phytozome v7.0 (chr-ID scaffold_8; pos 14206381 to 14207104)
gggataggtaaaccaataccttctttgttcaagaaagactagtagttttacccttttgttaaacttcctaaatctcacactgaattgatgaccctgaacttgaagtttcccccagtttttttatatgcaaaatctaatatatgttctggtgtttgagaaactaatgttttttttcccaatttttttaaatacaatttgagcaaggtcatttggtgtggttataactatacttggtgaacaatttaacctgactggtgtcatttggtgtggtcttagcctggttaatttattggctgtggttgaaaaggcatgatcgaagaaactgcaatcttgccaaggccaccatggctgtgaaacattggttccagagacgattagttattgttcagagtgctgatagttggggcacataatattttttttcagcaatgaaaatgatatcttcctccaggacaatatatatatatatatatatatatatttttaactagaacattagttatgtaactcagctgctacttgcaaccagatatataaagataagatcaaattccagcagaatatgccatcataaacagtacttatattatacaaacatgttgcgtggttgcattcagttttatattttatcattgacttaactctgttaattctccaatttattaatcgtctgatgcattttgtttgcgattgtttgcttggaattgaaggttgggaagccaat

SEQ ID NO: 71045 - DNA, 1032 bp, Prunus persica
  Intron number 3 from transcript ppa002039m (locus ppa00203 9m.g) derived from phytozome v7.0 (chr-ID scaffold_1; pos 30573084 to 30574115 reverse strand)
ttggtttgaccagtgaagcggctcaacatcttgaggtaaggcgttatttatttagaaatcaagtttttgtataaatctttaacgtattgtggccaggttggtttgaattttggtagttacgtgtgcagttaaccttcatgaggtagtatatagcaagggctacaaataggatgcttagttttgctagttaaaactagcacaatgtgctaagctttcactctagatgactaaaacactgaccttttacccagaataatgttgctgtagtgtgttccaataggtggaagtgaagactgatctgataagatgttaaagttttttattttcctggcgatggaattccaacatatacataatgttttatgggcccactgtgtacggtgtctcattatctgacaaacaggatttgaagttagtttccttctacgactttttgctttgcagattgtacttatgccttggcttgtaaaccaatatcaatcttggttttttcttaaataagtttaaatggcttatgaaatcatcctctctgattttatttggagatctagggctaaatttgtgggaaggtgatatttaattttaaatttacataggttttactaagaaagcagtcatgtagttacaaatgaggcattacattgagggagcaattccgttcataattatgaagtgagtcatttagaaatatttgtaacttacgaattaaatcatattggacatgtaagagatgccaacactttatgcaatgttgtaaacttgtaatccttttgaaagttccctttgtgcatcccttaactgagttgattgccagcttatgagaatatagaatggtcccatgtcagctatattaagctgtccatctcaaagtttagctcctttccttctggaaattactagttttaaagctatttatatacatttctgactcaattaaatgccaaattcttctttattggtattgagtatttattttgcttctgatttatcttgccagcaaattgtgcctcctgtgcttgattccttttctga

SEQ ID NO: 71046 - DNA, 416 bp, Prunus persica
  Intron number 1 from transcript ppa003355m (locus ppa00335 5m.g) derived from phytozome v7.0 (chr-ID scaffold_5; pos 13168885 to 13169300 reverse strand)
atcgcggctacaacggcctcttctctcagatcgaggttacttctctctcttgaatttttgtgagccatttctttctgtaactgtcttctttagcaactagcaatttggattggactttcagttgagcttaaatccgacgccgttcggtgggatcctttgttcgaaattgcatttttctgtagaacttgaactcgctaaagctaaattttgattgtgcgcttggattcataaataattaaaataatttgaaatgtgatattcatttcaagaaacctattgcagctgaagctactacaattctaggatttttttagtagttaaagcccccatttgagctcaataatttcttattttgtctcttttccaacaattcacatgcagttatcgtttgctgcaatagacttgcgcgatcggga

SEQ ID NO: 71047 - DNA, 936 bp, Prunus persica
  Intron number 2 from transcript ppa011575m (locus ppa01157 5m.g) derived from phytozome v7.0 (chr-ID scaffold_1; pos 30338590 to 30339525)
aaccaataaaactgaaagaggcttccgtttgtccggtaatcattttcttttcagcttgtttttcttaaaaagggatatctatcaccaatgaaggatgtttaagctaattatatgaaagattttctacttgatgatgaagatgacactgcttctacacgcacttgttgaaatttcagtatcaaacagtctaatcattcaagttttggcaaagccacacttaagttgatccttttcagaaagtcaacaatggtggaacccttgttggtgttcttctccttttaattactaagctcacaaaaccacaaaaccataatgttgaaagtgagttaccctttaaattagagagacaatcttagaatcattgaatcaatggacgtaggtattgaacagtaccaatgaatgaatgaatgatgctgaatctgggattgtcagctactaactggagttatctctttggtattttgtttttgcaggcaagaaaattctgaagtttgtgtttctgtggttgctaccaatttggagtttctcactcctagtggcctctgggaccatcaagctaaactccccatttattaatgacctcattatgtgaataaattttacttcaaattttcaacagtcaatacaaatgctctgtgtgtagattggtaggaggagagctctcagctgttttacagcatcttttcttatcaatgaatgaattataattcaccaagctcataacctctgacttgcaccacaagattaaaaggctttgattgcatatagaccaaccaaccagatagttcaagagactggaacaattgttcttcgttgacctagctcaaggattgattgattaaatcaatttgttggtgagcgcaccacctacgaattttctttggtcaaatattttcttttgagtgttggaaaatttatgttcaacagttgttctag

SEQ ID NO: 71048 - DNA, 428 bp, Prunus persica
  Intron number 1 from transcript ppa018075m (locus ppa01807 5m.g) derived from phytozome v7.0 (chr-ID scaffold_10; pos 163050 to 163477)
aacaagactgcaacaataatcctccggcagttaacgtaagattatacttcctttttattgttcttttcttttatatatcatcttatatatctatatctaaacaaaacccacctaattaccatcatcactactcacaaattattgtatattatccatggccagacaggattgaatctcctcactctaaattccggaatttcatcaacatctgccagtgatattcatcaaaattccaataacaaggtactgattagtcttaccacatatttatttacatgtggctgtgtttttttattataaatttccggggcgcgattcatttcagaatttgatgtttctctctcatatatgtttcctaattaatttccaattatcttaattaattgttgatactattaaatcgtaacttggtaacttttcatcagctg

SEQ ID NO: 71049 - DNA, 729 bp, Prunus persica
  Intron number 2 from transcript ppa009930m (locus ppa00993 0m.g) derived from phytozome v7.0 (chr-ID scaffold_6; pos 2217384 to 2218112 reverse strand)
aggtgaaggacgaggtggtaccagatgtaagtttcaggttttgtaattgcaccccatccgatagataagtttcaggtcttatatgattgaaattttgattccctacctgtcgtgcattaagttcattttggaatttaagatagataaggtattgttctggttttcattggagaattgctggattttttatttgagaattctaataattacttcagccttgagacctaatttggctattggagcttgaatacgattatagcattattgaaattggactagatattccccctttttttttccaaagaaaggctcacctgtgaattttgtcaaaagtttcctttgcttgtaactatttgtagtctggaaactatattatctattacaataaaagaagtaggagaaatatatggctgataaaacgtttctgctgggacagtgcatctttatctatttgggagtgtcagtcttccatgaagtttccctttagatgtataagaaaccaatgagaaaaattgtgctttcgaggggaaagtttatccagattcttctgcattctccaaaaatttttgtgatctcctagctagaatttggtggttcagaatggtagtgttgttagctatatcaaggtgaaggtgcgatacctcgagtctcttgacaagaactaattattgtggttcttcatcctttttggcagattgccccttttgatcctactaaaaagaagaaaaa

SEQ ID NO: 71050 - DNA, 651 bp, Prunus persica
  Intron number 1 from transcript ppa007117m (locus ppa00711 7m.g) derived from phytozome v7.0 (chr-ID scaffold_4; pos 12750948 to 12751598 reverse strand)
caaagttctctctaactctctctctctctctcaaggttcgtatttcctatgtagctgatctgtttcttcaatattttcttcagtttgattttgtaatcgtatcgttgttaatgatcaagatgccaatttgttgtttttaatttcgtcaatattttatttggttcgattgtttaatcctgtcgttgttaataatcaagatgccttttttttaatcaatttgtgtacgaaaattggttagaatcatctagatttgtatgaaatcctaaatcttcgcctgatttaatcaattactttcgaggaacaagttatgtttaattgtatgaattccaaggaacaatagaaatcaatcagatacaagttgcaattttgattttagggtttgctttgtattataatatgcaactctccgcgaaaatttttgcatcaatttttttgtttggttatttgattgtacaggaaattgttaattggttgctgttaacaatcaagatatggcagagaactgttccgaatcattccatatatttgtgaaataagttttgttgataaaattgtgtattgttgtctgattttaacaaatcacattacaagatgcaattttgtttatgtcaagaaacaaatctgattcatgattgttttctatatatacag

SEQ ID NO: 71051 - DNA, 641 bp, Prunus persica
  Intron number 1 from transcript ppa003669m (locus ppa00366 9m.g) derived from phytozome v7.0 (chr-ID scaffold_4; pos 4210225 to 4210865)
gtaaatttttgtgattgattgagtctgacccacttgctttccacagtaactatgcagagaaaattgaaattctacttttcatcattgccactgttcaaaaccctctatgcctttaatcatttccatacttacctttgtcctcttggtaaaaaacactcaaagaagaaaaagaaatataaattattttagagagagaaaaaaaaaaaaaaaaaacattgactctgtaaaaagtcggcaattactcgtttggtccggtggaaaagcccgccaaccaccgtttaaagaggtcgcgaagaatggaagttacccgccgcagattttgccacgtcatatgaggcccaccatatgtgggtcccagtgatgacgtgccaagatcagaaataagtacagcacggcttgtgttgcagaggagctcaactaaacaaaagatcatccagggaactgtgtaacacgcctgtctttgtctgcctacgaaaacagtcaaaatacacacacagcgagagagagagggagaagactgagactcggattttttcacccattttaaaggtctcgctttccttcttgttcctcctctcaatatgataatattgtagagaaaaatagaaacttcttagagagagagagagagagagagaaac

SEQ ID NO: 71052 - DNA, 791 bp, Prunus persica
  Intron number 2 from transcript ppa003669m (locus ppa00366 9m.g) derived from phytozome v7.0 (chr-ID scaffold_4; pos 4210894 to 4211684)
gagtacgagaggatacacaaagttcaggttagtcgctaacttttgtgcatgaaataaaaacaaagacccatgtccccttttttttctcaatttcttttgcagatgaatggagctatttttcatgttcagttttctctttggttatgggtttttttttttttttttttttggggtgtggtggttgtttctaaaaatggggtggtggggaaatgagaaaatgcacccaaaaaccatgaattttgatgaaactggtttcatcctccactggctttacagtatttatatccttacttaaatttggttttcccctttgcgtcttcattgtaatatttaattagtaggtaattctgtttctacatttattaattagatatttctgtttttgtttttcctgagtttactgtgttcagagaggtttaacttgacagaatgaatctagcgggaacagaaaagaacttgactttaagacttggggtgatatgaagaagagattgtgatatgtttgtcagacttgattatggcctttatactgttttcagagattgttgattttagaaagaaaaagaaaaactcaaaatcatgctaccattttgatgtttggttcgaaattgagatgattcggaatgaatgaagtgatatgattacttgagtttgctttatcagttgattctttcacaaagattataacttttaccatctatttttagtagtgggctgaagggtaataatgttttctgtctcctttttcttttcttttccagactggtattatttcccctagtaagctgagg

SEQ ID NO: 71053 - DNA, 534 bp, Prunus persica
  Intron number 1 from transcript ppa003378m (locus ppa00337 8m.g) derived from phytozome v7.0 (chr-ID scaffold_6; pos 21944326 to 21944859 reverse strand)
gcaaaaccgtcactcaggtactcaatttctgctattaatttccttcattacccatttcgggacttcactgtgtcgtagccatttttgggtatttttgtgaagatgttttttgttatttatagccttctgtttttgttagggtttttctcaatggttataacccgtatgatagaagaattgaaaattggatttttattgtctgggttttgttctgagtgtttgattttctaactgaagtgttgaaagaaatgttaatgctggaattatgaggtgtttcaagacccagtatttgaaaccatttacccctttttctactttttcttgaaatgtaatttcttagtgcagttttggatgattataagtgaacttatggaatattcaggtccatctactggggtacctgtatgatagtacgttttttgtatggttaatttactcaacaagccctttttttaatatgatatctgaattaagagccttgtgggtcgttggttatcaggtgacattagcacatcttaaagacaagcctgctcc

SEQ ID NO: 71054 - DNA, 502 bp, Prunus persica
  Intron number 1 from transcript ppa012235m (locus ppa01223 5m.g) derived from phytozome v7.0 (chr-ID scaffold_6; pos 26928650 to 26929151)
ttcagtcgcacaagcccattagccttttcttcaaggtctgtagccttttcaataatctgtcaaatttttgttttttattaacttaatcaggttcttgtgattaattgagtcagtaattggtcagtttgatgggaactgttatttttgcgtcggaattcactgccgagtaagtttgtaaacgttgggtttgtgagttttatcaatcttgtgtatgattaagacgtgcatttatatttcttatgttgatggcgttgttgaatggcttaaagttggtatttttcattaaaatttattagatttggtttaacaaattgctattttgttcttgttgtgcgtattctttgtcattagagcttttcaaatgtatttgattatcatatagtcgccaattttgttttttgttttgtttttggagaagaaccctattttcataattcctacttccttaattgttttcattgtgataggtgtttcttgttgcttgtggttgctatagggttaa

SEQ ID NO: 71055 - DNA, 829 bp, Prunus persica
  Intron number 1 from transcript ppa022204m (locus ppa02220 4m.g) derived from phytozome v7.0 (chr-ID scaffold_7; pos 20665486 to 20666314)
caagcccttccctcgttgtaaaagattcggtgagcatactcaaactctgcgttgcctgccattaacccaattttacttttttcttttccatctcataaataatctcaattcttttcattattaatatcgcggtgggtaatacagcttcagtgatagagcatttacctagtgatgacaagacttcaaattctcgtcctctccctttatatggtttcaatctcaatacttttctagttagtgtgagttaaggttctctataatttctttaaaaggtaatatttgattccaattcagagtgcctctagctagatatgataatagccaaacctagtatgactacttttcaaattttgttttagaaaaaaacctaattaatttaaacttggtctcataaaaaaatgattttggtatactttaaaagtttcttcttttaacacacatgcacaattagttttggatgattagtggtagatgttgtggacaatatgctaagctagcttgtcttctaacaaaagaagaagtcattcttctctctcactttcttggaattcgtttgcatgcgcaatcaacacgggtcagaaaaacacaaaatctcatgccatatataatctatgatgtggtagctctcgctagctttcccacgtacaaaatgttcttttgcagagaatcagcagccagtggtggtactctagctcattatacacactctatcatatttttatttgttttgtttttttcaatgcttttagaaaattctttctgaattttgttcgtaaaatatcaattgtttgtaggtgcacatcttgccgcaagagatactgggaatatc

SEQ ID NO: 71056 - DNA, 541 bp, Prunus persica
  Intron number 1 from transcript ppa015394m (locus ppa01539 4m.g) derived from phytozome v7.0 (chr-ID scaffold_5; pos 15980135 to 15980675)
ctcttaccagggtaatatattatttaccataactttttctcattaattactggttatctttgcaatggaaattgttaaagcttatcatttgtttggctgctaagaaaatggaaggaaaatcaggttggtctttagatgccacctgttgaaacaatcttgcttaaagctgtaaattgttaaagcttgattttctgttagctcatttcccttctccatgtcttttattatttattatgtatttttattatctagaaactcttttttgaaaggtataaagaattctgaacatgacaacaaggctatgaatgccctgggagtttctttgaaatcctgcagtaacattgccttacatgttgttaggtagcttagattgtagtaatttctgtattgaaatccatatcgtatctgattttagagagccatctaaagtggaacctgattatctcattccaaaattcaaattgtgtcaaactctaatcatggatcttaatttctttgctgcacagtcatttcagtgaggtctccaagacaggtgattgat

SEQ ID NO: 71057 - DNA, 445 bp, Prunus persica
  Intron number 1 from transcript ppa009646m (locus ppa00964 6m.g) derived from phytozome v7.0 (chr-ID scaffold_4; pos 6282699 to 6283143)
ctggttctctcgagcaagccaagaagctgtaccgcattctttctttcttctttttctttttttcagtcaaattccttgtttatttcttgaaagtcaagcaattttctttcaagacttgaaattgtttatgggttttggtcattgtaattagatgcgtagtctcttgaagattggtttcgtgatgttattgagttcatgatgatcttgctttccttcttcgtgtatccatgtatgtctgtcttggaattggaatttgagttcaaaaagtttattctttgttcttgtttctgcttttagtagtaaacttgatatgtgaacccttgcttatgcttattttggtttctagggtaatatatacttaatgcagcttgatttagtatttaagtattccatttatgtctcaattataggttcccaaacacgtacctgcttgttggctgctgca

SEQ ID NO: 71058 - DNA, 388 bp, Prunus persica
  Intron number 1 from transcript ppa002410m (locus ppa00241 0m.g) derived from phytozome v7.0 (chr-ID scaffold_6; pos 24646183 to 24646570 reverse strand)
aagatattcgaagtttggatctctcttacttgccggtaagtgctttgatttaattcatgtttttagtgttagctttataccctgaaaggtaaattcttgttttcattgatttaattcgtgtttatactgatctagttcgtgtttttgttgttaattttataccctgaatggtaattgttgtttttgttcgatttaatcttgttttgctttgaaaagcactctgcttttgtgttatgttattccaaagactggatctttgtcttggtcaactttaattttcttttccaatcttcaattctcattgtgtgtcaagatgatcggtaggtatgctttgatcttgagtggcttcataatgatttgtttttcttgatttgcagatcacagacaa

SEQ ID NO: 71059 - DNA, 905 bp, Prunus persica
  Intron number 1 from transcript ppa019406m (locus ppa01940 6m.g) derived from phytozome v7.0 (chr-ID scaffold_1; pos 28883343 to 28884247)
ccaagttgcgcagcttattgcccagcaccaccaaagtaagtttatactaaaaatgattatcatatttatatatcactgaaaagaaaaaacaaaaaactcatatacatgtgtgatattcatgcgtgtacaacatgttgtattttatatagggtgtgacattatcccttttttatttatttgttttatcatgatcggctatacatagtttttccaatctaagatctttgtggatcttcctaagattctaattcgtccctctaggaatatgcatgccttcgatcaagagtctcaagacctagctaccattcattaggaatgagctacattccctttatgaattagctttttccatctttttgttgtttctcttggtttcttcattctgagtcgtgtggtagttccgaggtgagaggtagaaaatgaaaaatgaaaaaagaaaaaaactgaagaaaaggggagggaggggagggggaataagggtaatgtcgctgggttgatatgataaagaggaaccatggagcagttaaaaagcttcccatggaaatttcttgccggatatatcacatatatcacccatcagtcaaaccatgttcgagaaacttaaagccagacaaactagcacccttgtcagtcaaaatatgcacccatcccatgccgttccttcaaaaaccacgccattcattaaaatacattaattaagtagccaactttcttaatcttttttttttttttgttggtttctgttagcgagatattgtttgacagtttcaagtgttggtttcaagtgcatgtaaatgcagtatcaatcagacatcaaatgtcgaacaaatatcaacccaatacttttgttttgtttatgctgatatatagacggacaaagcttccttactagcagaagtaataca

SEQ ID NO: 71060 - DNA, 377 bp, Prunus persica
  Intron number 4 from transcript ppa006792m (locus ppa00679 2m.g) derived from phytozome v7.0 (chr-ID scaffold_1; pos 33387135 to 33387511 reverse strand)
caaagtgtgtccaaattgctcgcctatatcttgaggtattggcttattgttcttcattgatacaaatgatgtgatttgaaatggtggttgttgtgatcctcaattgataagataccagactggaccatgagtgtctgcatatagaaacttttgacaagttgatgactgtaacattcccatggtctgattgttaagagttgttttatctagatggttgccttctcattggagaaatatgcctcagtatccactatgactatttttttatgcacattttctgctattgatgttggaatcaaaagatttgtttataggatactaataatataggtgatagtgtaattgtaattgaagtttttgtatgtttgttttgcagg

SEQ ID NO: 71061 - DNA, 750 bp, Prunus persica
  Intron number 1 from transcript ppa007110m (locus ppa00711 0m.g) derived from phytozome v7.0 (chr-ID scaffold_8; pos 18190229 to 18190978)
ctgccactgttgagaccattgccaatctcttgcaggtgaatttgagttcgaattttgggttttgattcaatgtggctttcttggtttgcgtttgtggtctgggttgatttgaatttcttggggaaactgaaatgtgtgaagtttagcatctgggtttgtgtcaacgttgcttaatttgatttgtctggggcaaattttgggtcttttttttgttttgtactgggtactgtgtttgctacttccctcgcatgcatttatgaaatgaattgcattatttaatgctccaattgtatttcgttaaattttagctctctctacagtcatattactcagatgtgatggtttgataagtccctgcaatcaattcctctggcaataaactgagacatttctcttttctttctgaaattgtataaattgtacaatgttagctgtggtcatgtaaaattttgattgctgtaagttacagaattacttgtcataacttatttatttaagtatttaaccactgcaagtttgtgatgtaattaagttatttttattttaattgttagatatcttagttgcctgaaacacaattgaggacactgggattggtttccttagatgattcttgttatagtattttctggattaactaattcagttgttgaattgaggagaaaccctgattaactaccttatacaattggtattcttctaatggttttcatatattcccctttgaacattgttgatgcaggaggttgg

SEQ ID NO: 71062 - DNA, 980 bp, Prunus persica
  Intron number 4 from transcript ppa012945m (locus ppa01294 5m.g) derived from phytozome v7.0 (chr-ID scaffold_6; pos 5834918 to 5835897)
ccagggccatcagaaggcgtctgaccaagcatcaggtactattaatctttcattcccagttaaacccatttcggttttcgttgatattaagctgcatagttatttggatgcccatggttttagaattgttgaaatttggatagatggcaaggctgcatttgttatgctctttctttgctttaacatgaaatgtcaatgagccatgtaataataatttcttttgttgtggatgagttcattttaattatgttgaattcgcttacccaatccagtttttgtgagaaatgttataataaaaaatggtatctaagagaccgaatttgcttgctgaattgtattcaaggacgaatctaagcaaatatgcattagtatatacttaggatctaggtgcaattgtttaatctaggtttcataatgtggtaattctaaggttcaatatctttgattcgcaccaatgtgattttctcaatactattagattcctggtttgactgatagagggaaaaaatgcagcaacttttatttccaagagtatggctatgtgacttgatggtttttctgtataacctatctctaaacttcctaagctaattaacttgccataatatagattcattgcaaaattttgtttcgtctagttaagatgcttgcaactagatttagcggtttcggtcaactgttatttaagcacttgcccctgctctagcactttttttaaaaaaaatttccttctatttctgtcttgacttataattgatagacgcaaggtccattttttttgggaatagcggaactgctgttattgttttttcattcattccccacctctcactcgctgttctctattttgtggcgtgaactttagcagtcagaatcattgtcagtctatgtcgaattttatggctaaatctatttatcctaattcagttgaattgttttttataggcatctttgaagacagaacgggagaagaagaagga

SEQ ID NO: 71063 - DNA, 588 bp, Prunus persica
  Intron number 1 from transcript ppa024586m (locus ppa02458 6m.g) derived from phytozome v7.0 (chr-ID scaffold_3; pos 16376514 to 16377101)
acctgcggcacaagaaaccctttcttgaagaacaagtaagtgatgacagggcagtaaaagcttaaaactcttggatcctatattttctattggacacggattttgatgataatcaacatcaattttgataagtgctaatggcgcttttgtaggtatcaacaaggaaagttgaattagattacatgtagttgttgacaatattcatttggattctgatgtgtttgtttagtcaatttaattgccgtgattagtatattttaatatcttcaacgattaggtttcttgtcctaatatgcattatattggcttatacggcatgactttaaggcatgggagtctcaaaaaaccacaagtcacaatcttatatgtcgttatctatttgcttttgggttctacaatttgctagatactttgaaattttgtgcttgttaatttaatggctattgccaaccctgcacagtgtttgatgtgaaactaattgttttctttcaaaggaacaaaacttcaaaattttggatttgttatcatcaacggttgtgttgaaattttacagattcgagaattcacccgagcgatttcgcattatcc

SEQ ID NO: 71064 - DNA, 895 bp, Prunus persica
  Intron number 1 from transcript ppa005506m (locus ppa00550 6m.g) derived from phytozome v7.0 (chr-ID scaffold_1; pos 34502510 to 34503404 reverse strand)
gatcccttcgatttgatacgaaaaggtacacccttgttacttcattcaatcggatctttcacttcctctgttaaattttgcagctttattctttgctttgttgtcttcatttctgggttgttttgaattttttaaactttgtgattattgacgttgaatttattgagatctattgaattcgattgcttagctaattgggattttggttttggggtgtacttcgagttggtttttctttattgtttgttttttaatcctcgattttatcaagattttgttgtggaaatgggtggttggtgttcaaatcaggtcttaatttaatgagctttgaatataattgaagtgggagattttgttttgtgttatcttgtttacttttgtttgaaaatgaatctttttctttttgttattttaatcagtatgtgaaattgaattttggggtttaagctttttcgtttgaagctttatcctactgacagaattgagtctttgtttgtcaacagctttgtcgtttgtctatttcttatgcataatttgcacctacaaatgcaataagcttatcatcttttatttcacgcaccatttttgacttatacagaatccgctaaattattacgttttagctaatttcaatagtgaacgaattattttagtttgtgtctataaaagtgatgaatatatatacgattttaatacttttttttaattataaaaaatgtatattttgttttccctttttgctattattttctgttggtttatagctagaaatttttttgcactgattggatggacacactgaattgtgagtgggttagtcgtgaatggaggtttttggtcaatggactaatcatagcactccatgaactgtttcgcagggtttggttgaagctta

SEQ ID NO: 71065 - DNA, 544 bp, Prunus persica
  Intron number 2 from transcript ppa023828m (locus ppa02382 8m.g) derived from phytozome v7.0 (chr-ID scaffold_4; pos 22481591 to 22482134)
ggtaatctctttcctaccacttcttttatttacagtctttgtctttcttttgcaaactcactcctaaaactaaatataattccttccaacgggttattaatggagatttaatatgatttttctctatcagggtgtgataattacaatatttctgaaatttccaataaatgttttttggatagcaggtacaaattgattataaaaaaatgtgtacactcgtggattttagttacaaagcaccacaaaaaatgcatgaagcatcaagatcaaatccatagaaagttttgatgcctaatcaatgaaaatcaaaatggaacacaaatttacagttccataagaatgtttttcagaaaccccaagctcattttaagcaaatcaaacaaatctgaaagttgggttttccaaatgagaagatgtgcaaaaattgatggaaaaataaacttagttgacgtattgtgctattgcaaggatgtttgaattcttttttcatttggattgcaacttttcagatacgagtcaaagtttatcaacaagattgttcaag

SEQ ID NO: 71066 - DNA, 1003 bp, Prunus persica
  Intron number 1 from transcript ppa000361m (locus ppa00036 1m.g) derived from phytozome v7.0 (chr-ID scaffold_3; pos 15661761 to 15662763)
ttgctttagcttccttattctccgaatcagatcaggtgctgtattcatagctcttaaacttgcatctttaagcattttcttctttttttccttttgtttgtttgatttgcagcttgtaccttgtagtagagggtgcttaaagcaagtgcttgtcttttaaaaactccttgttttgttttatcaatttggctgaacagactagtgttaaagtacaacatggtgttcctttccagaacaagtttcacacttaaaatgatctttcagttgtatacggtttgacttcagagtgaagagtaaaataatttcacattaagataggaattgcaatacttggaagacacgagactgaattcaggaaattgttttctcttctggtttttggatatcctgtagttggattaaagtcaatttgttaatcttaattctctacgagatagaaattggtgtgtgtatcttcttatgtttgttatagcttgatggattaatccctttaatcaacggattttctagctgtttctctgtacacttctttttttttggtctaagtatctctgtacacttcagtattcttctttttaccccttaagatttacaatgaattactgggttttcccaaactttaagctgctataaaacgatgaatctaatgtacttcaatactccacatatgtagactataacagcccaccaaaatctgtaggttatgctggaaaagtaaagcaacacaaaacatttgtgtatcaactatgagttatagaattatgttacgatgctatagttctacttttgtagcaaggatattaactgtgatcagttgatttcgctatttattttcccgttcagatgataacatgtcactttaagcaatcatatgtaaggtgcctgagccgtctctatgcatcaagaggagaaaactacatagttacaagaaaaagcttttacacgtccccatttttcaacttcttctcattagtccccatgtattgcagatagcatcccttga

SEQ ID NO: 71067 - DNA, 651 bp, Prunus persica
  Intron number 3 from transcript ppa010750m (locus ppa01075 0m.g) derived from phytozome v7.0 (chr-ID scaffold_8; pos 17832369 to 17833019 reverse strand)
tcaggagcaagcggtcccatagcgagccattcaaggtacgaatttgatacaatcagttttggacctgatagatagatgatatagctctgaagatagttaaataaatacatgggctctctgtgcacctacacctgaataattacacgttaggaataataagtaggcagccccacatttcacatagttttccattatcagcagagttctatacattcatataacctgcaatcctgaacctaatatattgtttgtattatcttcaaaagtttcttctttgtgttgttgtgaatgtgattgtttctctctgtccgcatgcggtaaatgaagccattccaagcaaactttgtaaccaaagtaaataggattttgtcatcgaatagccagttcaattcatttgatcagtcacctagttgcctgttaacacttgtacttcatcatgtcatggttctctagattccttgtcatgctcttgattattgatgtgacaccatgatttgtttttggtgtaagataccctgtagtcatggtactacttactatacaagagggttgcttgtgatatctcttgctttagatctatttgagtactttggtcctttggatatttatgtgtgactcttcactcaactgacttgattttgttgcaggaca

SEQ ID NO: 71068 - DNA, 878 bp, Prunus persica
  Intron number 2 from transcript ppa001274m (locus ppa00127 4m.g) derived from phytozome v7.0 (chr-ID scaffold_1; pos 13521887 to 13522764)
ctctttctatagcctctgttctctcccgtggtcaagtaagctctctctctctctcttctctctcctctctctctggcagacactcacacgtacacatattaaaaccctacctcctaagctccaaataagggactgtttgaatgctaataaaatgttgaaagcagcaaagaagctggaacttaaaatgtttttagtattttcaatttattatttggatatggagtgaacttcaatagaagtgagagctgggcaatccccattttttctgtttcttccgttttttgttttttgttttttggttgaagaacttggtgattgagtttcgttgttcttgggaagatatgaactggaagttggaattaataggatgatttggttcccatgggggtgcttagttctttcataaagtagataatttgtattctgaggacgattatgagatgcttagcctggattttggttatggggatatggttacagaaatcagaggttaagccagcagttctattctatttattttggatgaccatttgtcttgagagataaatagaagtgcttcctacagaagcattcccaaatggttccatccatatacacccataccaagagtttactagcatcaagagagaacaaagacttaatagtaatactaatatggaggatgcaaataaggttctcgattgaaattaggacaggaaataataattctttggtttggaaatttgcttttctcttgaacctcttgtagcatgtatcacttaggctcattttttctttttctgcacttctctattataagttctggttgttggattcataaatccatgttttgcataattgaattatattgacattcagcttttatttgcatagtacag

SEQ ID NO: 71069 - DNA, 352 bp, Prunus persica
  Intron number 3 from transcript ppa009780m (locus ppa00978 0m.g) derived from phytozome v7.0 (chr-ID scaffold_1; pos 32571733 to 32572084)
tccgtactctccctctgtttacactttttttttttccctttagcttttgataactcagttcttgttcaccgtttagtttcctatttctaatatgttcaattgttataccagaattttgtttaatttctcaatcaatcaaacagattatttaattacttaaacttttgatctcgtggtgccatccctaatgatatatccaatgatttcgtagaagggaagacgataggttttcatttttccatcatgtttgtttttagttttatgagtatcaactaacaacatgtttgcttagtgattggttagtcaatttatgttgttatattcttatgtggaaattaataatgggataggg

SEQ ID NO: 71070 - DNA, 669 bp, Prunus persica
  Intron number 2 from transcript ppa010941m (locus ppa01094 1m.g) derived from phytozome v7.0 (chr-ID scaffold_1; pos 1473424 to 1474092)
gttgccaccgaaaaggtacacactccgaatcttatagctccagcccagctcaaatcatttctttcgttttcttttttctcgggaaaaaaagagtcgcctttttcctgagaaaattttcgtattgcaaacagagcagaaaatttatgtgtttcccctttcttctgttgaagcttttctgaatactattctgtttgtctcaacaacatgttttcttagaatttatgatttgtcgattgtgtttgaagttttcaaccttgatgcatcatcagaacgtgctttgcttgttaattgttttgtatgaattttatggtttgattgctcaattttggtggttaaggagattccagtagtagtttgcatttaattttgtgttactgctaattagttttacatgataagttgtgcgaattaaatattgcttcaagataatttgggtgaactaaagtaacgatgataaggcagctagatactggaatttggctatggctgtgcttgcagcgatggatttttgggattttcgttggtagatttttggaaactctgtttggttcattgttgttttgtttgtgggaataaaaaattacagggaaattatagacagcaattttgtgatcagggtatctcatagtgttaacatatgcaggatccaagagaggaagtcatccaagc

SEQ ID NO: 71071 - DNA, 696 bp, Prunus persica
  Intron number 1 from transcript ppa012285m (locus ppa01228 5m.g) derived from phytozome v7.0 (chr-ID scaffold_5; pos 18276460 to 18277155)
ttgaaggcacttgcaggttccccctcctcctcctcctcctcctcctcctcctcttcttcttcttcttcttcttcttattaaatacaatataacgcgtgcgattttcttttgcttttttttttggttgccttgtagccctgcgaaatttaaatccgaggaaaacttaaacctttcgattctctttcttcttttcactttatttgctacatgcttatttaggaaccgaaacccttatctgttcgattatgttctaaacttgggtaaacaaaaacaaaccaaaaactgaatcttgttgtcagtccctttgtagacgcagtaatgttaaatacattgaagtttgacccgatattaatttatagataaatcccagatcacgttgagtttgttgaggggggacactcagcactggtacttgttcagttttgtctttgtgaaagcccagaccttggccaatataagctccaatacggcatgtttttgtattaacatagctccttctgtataattaatatgagttcaactccatttttagtcactttataattgaatttcactaagttctcctgctcaagtttaactttcaattgctatatctttgaaaaaccaagtatttggtaaatgttcttcactgttttggctacgcggtgggatggatcaaggagttggtatattttcatcttttgtgcagtggtcaac

SEQ ID NO: 71072 - DNA, 699 bp, Prunus persica
  Intron number 1 from transcript ppa003793m (locus ppa00379 3m.g) derived from phytozome v7.0 (chr-ID scaffold_1; pos 7702931 to 7703629)
acaagcgtcccaaaccctcccctgcttttcaagaggttcggtttgcggtccttttctttctgtttcgtttggttgctgagaaaatagttaggaaagaaaaattacctaatacttaattggatacagcttatttccgtattaaatctttcttgcttttgtcatttccttatggaatctggaccagcttgaaattttttctgttttttgattttgcatgtatttattcgatgagaaattgcggttcggagaaatgaagatttaatctttttgttttttcatgtgattgtcaatagcttagtagatctttggattttgtgtcctaactcaagattgaaaatgtttctgaagacatacaaatttttggtttgtttggtttgaggaggggtataaatttgtgatcttgtatgtacttatttattaagttaattaagatctcgcttccatcacatgggatattattaacatacaaatttgagctcccttagattaggtgtgttctcttaacttttggtgttgcctgttctggcactgggttggaataattaggaattcggcttgttttgaactacaattattttggaatttcatttgttgaaatgttggattgttttacttgggcataactttgaatttgattattttttgaaatgttctcttactttgttttgttgattgagctgcagaggagtgttggggata

SEQ ID NO: 71073 - DNA, 268 bp, Prunus persica
  Intron number 1 from transcript ppa021932m (locus ppa02193 2m.g) derived from phytozome v7.0 (chr-ID scaffold_7; pos 18028384 to 18028651 reverse strand)
tggtgagttggtttttttctcttcatgtttttttttggcttctttaattcactgctttctgtgctgcttaattgtttcatgtttcttcagtttttcccatttcagaataatcatgttttcttgacagatacctcaaaatcgtacataaaattttgatttaattttcgtatttattatgttaaattattagtcaaagaagttgcggatgaagcctgttttcatgtttgagcatttgcattgttgaaccaggttgcaaccttggctccta

SEQ ID NO: 71074 - DNA, 795 bp, Prunus persica
  Intron number 1 from transcript ppa009664m (locus ppa00966 4m.g) derived from phytozome v7.0 (chr-ID scaffold_4; pos 21533198 to 21533992)
tcctctgcaacaaggaagttctcttccaaatccaggtttgtgttcgcaatttttcttctgctttgtcaatttctggtgcaatttttttttgttgggattaaactagtgtctgtaacttagaggtttacgctagggcttttgaattttttttttttctgttccaaaattataccatttgttgtcatgggtttaaattgctgttaatgtttctaatttaggcatctccgttatctgtatcaagattgttcttgaaaaaaaaaaaaaaaaattacaaattttatataaaaaaaatactactatcaattttgtgcaattggggtgagtgattatcatgtaaggtcagcaatgtcaaaactttgatatctatcaattaatacaacattgagcatcaatgaaaaaaaaattgattttcttctgccacttaaaggggaggattatggatggattgcagcattgttctgtaatcttcttgatggctataagtctgaatatttctttggggaaattaataacattgaactcttctatatattctgtcaatttagattcatttccatgagaaagagattttaagtgaaataatttgaagaaattaacaattctaggtaaaatttattttattgtaaatgaatatttgatatattatatttatacagaaaaaacattaacttgtttcttgcaagactagtaactcatttataatgtttatgcttttaaccttttatattatcgtatcatcacttcatcaaaaccctcatttgccttgtaggcagatattggtgataccaaatcaaa

SEQ ID NO: 71075 - DNA, 275 bp, Prunus persica
  Intron number 1 from transcript ppa007215m (locus ppa00721 5m.g) derived from phytozome v7.0 (chr-ID scaffold_7; pos 17522907 to 17523181 reverse strand)
tcaaaacagcaacaccaacaacattcccctttcaagtgagttctctcactttcttttcttttctttgcttttgaataaccagtcagtttttgaatataaaaaatgggtcttgatcagtttcttggtttaatggttttcgttttcattttcccccttttttcaatatgaacaatcatagagttttgatcggaaaatgggtttattgatacttgggtttaccatagatttggtttctctatactgactgatacatggtttctttttttcagggaaga

SEQ ID NO: 71076 - DNA, 613 bp, Prunus persica
  Intron number 1 from transcript ppa019480m (locus ppa01948 0m.g) derived from phytozome v7.0 (chr-ID scaffold_5; pos 10401692 to 10402304)
tttggtaagtctaggtatgagaaatcgttgcctggctcatgggaaagtaggggggaagtgaagccatccttccaacttgagttttgttttccctcatcatgggagagtttgggaaaatgagctaacattaaatacatattttttatgaccattttatccccattaacaatttagaattacaatatatcattaaatgcattcttttttatttgatttaatatgggtataattgaaaatttatacaaactttgttttccattcatactcaaaacaaacatgggaaaggaaataaagtgatatttccggattactttcccagcattaccaaacgtgggaaaagaatcatccattcccattccctggggaatgacattggaaatggtttcccctcaaattcattccataaaccaaacagattacagttattaaaaaaaacaccacctccaaaatgagtatcctcagaaacctcctagtcttctgcatcctatgtgtcactttcttctttgcatcaaccaatgcagctcatttcgatatctgaaataactgccatttcaccgtctgggcaactgccacgccaggcggaggacgccaacttaatagaggcgaaagttgg

SEQ ID NO: 71077 - DNA, 843 bp, Prunus persica
  Intron number 3 from transcript ppa009145m (locus ppa00914 5m.g) derived from phytozome v7.0 (chr-ID scaffold_4; pos 8896803 to 8897645 reverse strand)
aagagcgcgagctgcagctgctgttggaaatccaggtatacattatgtttttagtttatgttgttaattactttgatttaagattttaccttttaaatgtttaaagaaatagaaataaaataaagaactgaatctcattgaaaacaccatatcagtaaataggaggaaacattaacaaaatataagtaacattcttaaaaacttggaaaaaatatatcacgtctgggaagctcaatgacaaacttttgacgtgtactgtgtactgaaagctcaaccttccttgagcggtgtatcaaaatgtacaagcagaagctcaataaaaatctaatggtcatttgattcttgactatccttttatcatcatccaagtttcataaatttttcattcacttaaaatttcttcttgtattgtaaagttttagtctcaacgcatgttctagtctagaaatggaatgatttctaattggatttattgaggcttagccatgtctcaaaacatgatgcaaaacataaaaaggagggcatggacaacttgctgagtctactgacttaaaacgttaatattgtttagttcgaatactgactaatgtctgttaaaaagcccacatcatcggagggttcaattttctccagtttcacatcttgcaagattgattgatggtttaggcctgtttgattatcctgtactttctgaacttcattgtcacaattacattgaagccaaaatcacaaatagatgatgatgatcatttttcaaattttattttccttgcagcttggcatgaaatttctgttgattttgtttttaaattttctctacaggtgtaggttataattcaaatt

SEQ ID NO: 71078 - DNA, 588 bp, Prunus persica
  Intron number 1 from transcript ppa009145m (locus ppa00914 5m.g) derived from phytozome v7.0 (chr-ID scaffold_4; pos 8898500 to 8899087 reverse strand)
cctaaagagtcttatagcgctcaaacttccgaaaggtccataatttcgataactcatgcccttttctacggtttcaattacagtaatggagtatcacttactttagagtaaaaaattaattgtttttttagtttgcctgacgagaaagagaaaagatgatcaatttgtttggaatgtggttatccgaggttggttcagtcctgttgggttctataaattgggaactctggttttatttcaatttattgcgttttcttggcaacaaaacatagggttaggtagatggccttagattacattgaagggttataattcttgctgcgtggccttgatgaaggttgctgttatttattaatttttataaagttaaatgggttagaagtgagagcctcagagatacattgtggtgtattgtatgagaattatgccttcgaatgtttaagaattgagactctagcttaagggtttgattgttcagctaacgttttatgtttgatgatggttattagatataccttgggagataattgagattagttttgatgtcattcaggtttgattactgaaacgtgcttggttgatactttg

SEQ ID NO: 71079 - DNA, 849 bp, Prunus persica
  Intron number 1 from transcript ppa007548m (locus ppa00754 8m.g) derived from phytozome v7.0 (chr-ID scaffold_3; pos 5691100 to 5691948)
ttttgttgtggaaggggctttggtcggtacgttaatcattctttgtttccgagctgaatttgaaaattttggttttgattatttactgctggttggttttttctttttttaattcaattttgttatgtaagtagtagtggaatctgatttggagaaatctttcgctgtggttttttggatgatgaaatgagagttgaagtgggcttaggttctgggtttagctcagattcgaaggatgagctcattggtgttgggaagaattaagtgcaaattgaagtgttaccattttttgattaccagagaaacaaaaagaagaggatttgcattcttgggttttcctcagattaaacagagaaggaaaatgggtgttagcaagaggaatttattgatccacatgtcggtttcaaagtataacgaaggaaaaagagaataaagagttaatatcggactggaatcttaatgactcagtaaaacagattacaaacaggcatcaatgaacagatgatggttggtcttttggtctatcccgtttctaatgacttgtccacttacaaacattcaacagtcaatctatcgttttaatttgtttttcttaagcaaacaagaaaaaaaaaactggaatttacccccttttttatttttattttttaaaattagatggcctctttggtatccgtttcgggttgttcttggtttttggttctgtagtttctgctgttgtgtgtctgcttttagcagttgggtgttttctgaagaaaattactatttcattaagaaacctaatttggtattatattgatttgatggaaacctgatgtgcagaaaagaaggaggaaagaagcagccaac

SEQ ID NO: 71080 - DNA, 960 bp, Prunus persica
  Intron number 1 from transcript ppa024601m (locus ppa02460 1m.g) derived from phytozome v7.0 (chr-ID scaffold_1; pos 44465570 to 44466529)
tcgcttctcctcttctgcacacctcttctggatcagtacgttatttctttttccatcttttcggttttatatatacctttattcttttcttttctttttcttttatttgttaagtttaaggttctgggttcaattctgaaatgcttattatgttgaagaaaggaaatggtgtagttatttatttatgttcaagcagaactagactgacaaagaatctaaataggcttagcacagtatgcataggtagataatgcttcagatttcattgatttatttgagcttcattataaggtgctggctctcttgcgaaacccattttggcatccacggaacttgcaactgacattgtttgtgtaaatttcttcgttttactgagaaaagttcaaacacgtgtggaacatgatccatatatatgcagtttttgtatttgcattttcacttctgcattgcgtttattaaagtgtttcctcttccttgccttctttttattattctattaacagataacaaagccttttattattttaatgattcttagataaagaagctcaatgtttaatttgaaatgttttaccaactcttttatcattttttacttgttaacttttactttgagcactgtcaacacccttttaattccctcttcattttcgtgccaatcctgtgctgtacgtagagaaatcacactacattagaagatgatagctctgttttagcatcattcatatcttgtacatatatttaaatatttaatcattgaatttatcaaattgataacttgtgatgaacgttgaactgttcttattcattaactttgaacattttatttgctgtgttctataaagaagtactaccttgactgtaaagctcagtttgtgttcagaaagcatgcaattcaagttgtcagaggtggtcttctacagagaatataggcagaaaaattacttgtagcctactaaa

SEQ ID NO: 71081 - DNA, 557 bp, Prunus persica
  Intron number 2 from transcript ppa000189m (locus ppa00018 9m.g) derived from phytozome v7.0 (chr-ID scaffold_1; pos 3790268 to 3790824)
aagagattgaaataaactgtacatcagggaagacggtcagtgctgcttttgtttttaaaattcttattaagccttgcatccacttttattagctatttaagagctaacatatatattaatcttgaacttcagtatgaattttttagtacctgaaaggtaagtgcatacctatcacacagagggcttaatagacctatcatgtttgtaggaaaaatgatggcgaagaattttaaaacacttactagattaggagaatgttttaataacatagtatacccacaaaaaattaatcaggttctttatttaccaagcaatgactcaatgttcatttgagtgcatgtatttcatgttccttgttttacttttcctttgatattgacagacccgtcatgtttatttgattttgaacagagccatcatgttttattgcatatatatgaaatctactgactgaccatccttgcatattattgaatatcatgatcaactaatgggctcttttttcttccccttctgttgtaggttgtggctaaagtatccagtgtgtacccaaagga

SEQ ID NO: 71082 - DNA, 825 bp, Prunus persica
  Intron number 1 from transcript ppa019879m (locus ppa01987 9m.g) derived from phytozome v7.0 (chr-ID scaffold_2; pos 14141681 to 14142505)
tcatccaccacattcggtcctttgttaactttcttgtatgtttgcacttgattcaagctctttatcctcagtttaggatatacatttattactttgactgttttatctaatgttcttatgttagatgaaatgaagttctccactcaaaagtttgtggtaacctacatggtcctttctttatttcttcgttggttactgtgtgtctttatttcataggacttggtctaaatgttgtttcgtacaaagaaacaacaaaaaatatccttatattcgttcggaatatgtaaatactacagcgtatacataagaaatggaaacaaaaatgaacgtaaataagaggcaagtgaagtaaacaattcagcatttgctcaagagaaaactttattcacaaatcaattgcaaaaactcgaaccttgttgctcctctcgttttcatacgtccaaagaacttctatttatctgtttatctacagccgccaacaatatatgccttccaaatcatatacgtgatgttgctagtaagctgtatacagttcctataagctgatatgctttgccggcttgtggcttctgaataagaacagaagaagaaaacagagaaatgacatagaaaaattcatcccaccgactaactgtagaagcgatagaaacatatcagctcctagaaatgcatattaataccatatacaaaactagcagcattatataccattccaattatctacaatggctgctatgacattcattcaattagtgatgatatttgcatttgctctgccaaccttcaaaagggcagtagcaagtgatcctgatatcatttctgact

SEQ ID NO: 71083 - DNA, 519 bp, Prunus persica
  Intron number 1 from transcript ppa017189m (locus ppa01718 9m.g) derived from phytozome v7.0 (chr-ID scaffold_8; pos 7262932 to 7263450)
gctcgacagtctcacccgtctttcgatcctatcaggtaaaccctaaactcctttttgcactacctgacatatgagtaccaagcaactcctaaagtagtatgattttgaattcattacctgcaccattcattagctacgttgtcctttttgaattcattgtgataaagatcaagcttgtttatttcaaaataaactgacgcatcttatgatgtggatctaatggttttgaagattatagctcttcaccacatgcttcaagtgggacttggcagatcaaacaaggccccagtcatctggttttgatggaattcgtaagtaacgtctgtataggcgttgcgttgttgaggaacttttgggtttccaagccccactaagaaaaagtcctatcgttacatttgccaaacgagatagtttagttatgtggaagtacatgcgatggtaaattccttctcttaagtaactaactgctgttggggtttttcaggattacattgccggacgggaaggtgaaggagggca

SEQ ID NO: 71084 - DNA, 469 bp, Prunus persica
  Intron number 1 from transcript ppa002088m (locus ppa00208 8m.g) derived from phytozome v7.0 (chr-ID scaffold_4; pos 738036 to 738504 reverse strand)
cttctggtatgctttttattttgtaaaaaagttttaagcttcaattccgggaagcatctgatttatggatttggtggtgttgattggcaatgtggatttttggatagaaaatggactttgactttggggttttttgattttgtgatctatttatgcattttttttcttcaaagatgaagatacacaggccttttatcttttttccctgtttaatgttgatttgcttcgtggaaaaatgagaaatttaccataacttggctaaagctcagctcaggcctgattgcacagaggaatctaagcttgatactcttccccatttttcaaaattttgatttcttttaccagatgggaaagaaatgcaggggggtatgtgtagcaaagcttttgtaagaaatttgcgtgcttttaaaaaagtgttgttctttgctttgtagttcaagcacttcaggttttgtacacatcggtaaac

SEQ ID NO: 71085 - DNA, 694 bp, Prunus persica
  Intron number 1 from transcript ppa019639m (locus ppa01963 9m.g) derived from phytozome v7.0 (chr-ID scaffold_6; pos 1669633 to 1670326)
tgacaggtgcgtccacatctacgccacttactttactgtttagtggcttcaaattttcaccagaaaaagagttgcttaaaatctttgattatttttaatttctaaagtgaaaaagaatttgcaatcacttagcttgtgacaagacaacaatggaactttgcaagttgaactttgccacttgctacatgccaagggataaaacagtgcgtgacttctagttgccactttggcgaaacactttgcataatatgggaatagcattgttttacatgtaacgtagatgattgactgtatttatttaattttttatagccatttaataaatgtgatttttctagcacttttttcaaaccaaaaaagaagaagttaaattgtgcatgtcaaatgtagaatatgacccaaagtttattatgtatttgaccatgactttacttgtatcaatttgatacgccatgatcttctgtctctataaaatctagtataagcccttttcttcaatgttgagaaccccataatttgaaacttaacacattttacacacctacttttagaaacttggtttttgtatgaaactgttgaatgaaaatctcaaagccttttacatgtaacaaaaataatgttatctcaatgcaaaaatttattgatgttcttctctatttctctgtgctaattgtataatgcgtagagcgtggag

SEQ ID NO: 71086 - DNA, 898 bp, Prunus persica
  Intron number 1 from transcript ppa008555m (locus ppa00855 5m.g) derived from phytozome v7.0 (chr-ID scaffold_1; pos 8020362 to 8021259)
agacccccgagaaagagggcttccctgctctacaggtaaccttttttctcttcattttgctctgtttgtgacgaattcattttgattgattactgttttgttaaactatttttgtattcgtgggttgatttataatatccctgtagctttataggttatgaaatttccgaagtttagatttttcagagtttggagagacgatatgcgttcagtcctttggagcggatacaacttaacatttgggcacacaccgactttatgattttgttattcaactaaagcaatatttgctccattttagcggttttaaatctgcaaaaagccagtctggagaccagactacttggcaatttatcattagtcagatcatctggagtttattatttggtggcttcagttgtgctttacaatttgaagctatacgcatcccttgctgggcatatatgaaaggtcttgttagttttgttacagtaaaaggggtttctatgaatggggtgctcataaatttcaaaattcgttgtcaccgagggcgcataatttgtgatttgttttccttctgttttgttaattatatgacaggccaatttggcagtgatagtgtaggaaccacttttgcttagaagtgctttagttgaaagtgtttttgatagaatcacaacaaatttaaaattgaaattccaagtgcttttgttggaagtgttttcctttggttcttgcatctgttttttctttttcttttgttttgccaacattgatcatattgatttttcttggtaattaaacagagggcaaatttatattttcaaaaaaattcaagggcacgggttaattataggatggtattctgttgtggtgctagttagattggttgcggacagaagaaagcaaaacatttgac

SEQ ID NO: 71087 - DNA, 803 bp, Prunus persica
  Intron number 1 from transcript ppa009745m (locus ppa00974 5m.g) derived from phytozome v7.0 (chr-ID scaffold_1; pos 39249342 to 39250144)
acgaggtattttatgattctgatgacatcgagaatccaaagtccaggcattgtaatggtgaagtttctatcgaacacaatgagagcacactgcctagcttgttgggagagtggtttccatactccaggctgtcagctgtaggaaccacatccaaaagaagtttagcgtgtgccccaagcattgccactgggttgctggttgggtttaggaagatgtttgggctttgttttgaaaaacgcgataaacgctatagtcgaagggatacttggagaatagattagtgctgaggaaataacatgcatttgttcctgctgcccagaatttggttagaatatcataaaattatacttggcctacgtacacgagacaagtcatttgccactttaaagtctgatgttctactccccacattcacagcacctcaaaaaagataaagaaaaaaaacttgtacctctaaagattttggaattcagcaagtacatgcaactgattcttcttcatgagagagggttttgtctttttgaagccttcattgtaattatttgatgagagttctctgttttaatccagcctctatttgggccaggacaattccaagaatttaattttgggccaaatgtgtttcatgggtcaaattctttttgacccatgaattggatccaacaataatagaggctcctgtgggtcaagtcacaatccaactcttccatccatcagaacctcatatcaaaatgtgtggcaaagaatgagatagccctctctgcaaagatttacactctcggcccctcaaatcccacacactc

SEQ ID NO: 71088 - DNA, 385 bp, Prunus persica
  Intron number 1 from transcript ppa018120m (locus ppa01812 0m.g) derived from phytozome v7.0 (chr-ID scaffold_1; pos 34983857 to 34984241)
ttgctcatcatcaatcacaactatatcatcacaaggtaattaagaaaccaacgtacataaatcaaattatatatcttcctcgtttatttttttattgaaattttatttgttatggctcttgatcctcccttaagtgattcttctctctttgacacatgtccatatataatgaaacttgtataatttcctgatactttgtgacctgatgttctcataattaattgatttgatgggttttcttactaattcagactccataaatagctgcgttttataactaagatttgatgtttattgaaaacccttgattttcacttgattatatctaatttcaaattttctgatctcaggataagaacatttgggattgtggaacaagttacga

SEQ ID NO: 71089 - DNA, 754 bp, Prunus persica
  Intron number 1 from transcript ppa013151m (locus ppa01315 1m.g) derived from phytozome v7.0 (chr-ID scaffold_7; pos 10441726 to 10442479 reverse strand)
tcgaccttgccctcttcgcctcaagcctttaccaggtattttatcattaatctctaaaaccttaataatgtcgccacttttaaaccctagcaccgttgcttctcctttttcttaatttttcttttcttgggccttttggctttgttttgttaacgctggaacgaagagctttactgagatctgtaaggtacttgcgctgaattttcatgggcaaatggacatttttgagggttttgaaactttctgtcttagtttcctactggtttctctgcttccaaacagcggttcatagttgctatgcatttggattgcatacttttgctaatcaatggctctgtttttctttttagttttagagctagagtttagacaacttgaccatattgcataaggagactgcctcacattactagttattaatatgaataaatacagacaaaatcagtggaaaatttgtgatacagatagaagaaattcttttttgtatttgtgggttggagcgctggggttgtttgaatttaatttatgctgcctattgtaaaaaaatgttgatgattgtgttgaactagttctctttttctacaatgagctcttaaggatatgttgttcttatgttgctagtttcgttctcatagcctgaattttccgtagcatagttgcttgtaattggcagcattaatgtaattcatatttatgttgacgtgaaacaccactaactttaatttttcttctcatatgtattttgtagtacgtg

SEQ ID NO: 71090 - DNA, 662 bp, Prunus persica
  Intron number 1 from transcript ppa006326m (locus ppa00632 6m.g) derived from phytozome v7.0 (chr-ID scaffold_1; pos 185398 to 186059)
ctgcgctgttcgatctctcttcactcggacttgaggtacgctttgtcttagataatcggtggaattatgaaataagtgggttttccatctgtggtttgtgctattcggaatttagcttcagctttgtgtttccggggatcagattcaaattccaattttttcaacttgtattctccttgatttcctactacgagaattagctctcgattctgtccaatttctttccttctttcgtttcctataattggttttgggctatcctctttttcggaaaattgttatgattgcttctatatattaattaataatttgaaaatttccataaatatttgcttaattgcccttcttgattgtgattatttggcaagaatcaacctaaatttgccgttttcggctcacttaaacatcggaattcagccttaatgctactactcctaaacagtcttgtcttctacagtttccatatgtggtaacgattcggttcttaatattcttgtaaccataaatctgtatttttatttctaaaaggaaaaaaaaaaaaaaccactgctggtctttgctcgttgcatgatccaatcttagaaaaccagatactgaagaaaacttgtggttccattttgatttcaggggcttgaaaaaaaaaggggggagtcgactacttt

SEQ ID NO: 71091 - DNA, 730 bp, Prunus persica
  Intron number 1 from transcript ppa003428m (locus ppa00342 8m.g) derived from phytozome v7.0 (chr-ID scaffold_3; pos 16692879 to 16693608 reverse strand)
gctgcatcttactcagtgccttcagtaagccacgaacaacctttctctcttttaattttctgttagttgtgtccttgcttgtagttctctcctaggatttgctaattttgagctatttctgtactacattataataatattcaagcactttttcagtgtttcatataattggttttccctagtttcaatcagtctcttcatattttatactgaggattcaatcagtctcatcacccaaacaaacttctatacatctggcgcattgcaatcggctctcacagtagtcggcgataggtgtgagacctacattttttgtaggtcccataccttttctactacgctgggcgtatagaaggagctagactctctaatccggcccaatgttatgattaaaaaggaaagaaaattcgaccttaaatacttaagttctcacaaatggcctattagcatgcatggcatcaattgttgccattgagttatggatatgtgggttaatttggtccaggaggagcttaccattcctaaaaagttgataaatttgttaaaaagtgagaagtatttcattgaaagatcatgtacctatatttgcatgtatctatatgatatgtatgcacttgatgttgttatgaagaaccgtagatggaacataaattaaaatgagttcaaaattaagcaatgcaaattgcttttctacatgtttgtaactatgccggaattttgtatacagata

SEQ ID NO: 71092 - DNA, 1026 bp, Prunus persica
  Intron number 2 from transcript ppa014415m (locus ppa01441 5m.g) derived from phytozome v7.0 (chr-ID scaffold_4; pos 14154474 to 14155499 reverse strand)
agaatttgctgcaaccgaggaccttctactaatttgtacgtttccccattatccaatttcactgttttctttctcatttcttcttttattgtttttggttgtagctcttaaatatgttgggtctttttctttatgtacaatatgtgtttagctgctgaatttgttaattttaagatcacactagtcttacaatttaagaaatatttggtattggggggcttaggatttgattcatgtcaatatgcttagatgttgttcaatcatacatatgattagggatttcgctattgaattagttgcagtattaggggacgcgtttatgctttgttacaagttaattggttgaataactgctcatttatgcttatttatgactttggtgaattatgcacttcttgtaatgtaaagagcttttttatactggggaacttgtgtggaaactgggtgaatttggttagttggttcgtttgctctatgttacaattaaatggtttatctgtgtgtactaagactctcgattgtagattccaacccattcatgtgtagatgtaactcgaaaccttcattccacctggggccatctataagccactggcgagggggctttcaaggcccttggcctcgaattgttcaattcttagttctttgttaagacattttgttttgttgaatatgattgaatttataaaaatacgtagtcttattttgttttgtgaaaataacaaattcagcttaatatatttgctttcacagtttctagttgatcttgtatgttatgtctgcttacgaatgtgataattcagaatatcagttcgtgaaagtttattgttcagcgtctaagagtggtttgagaaaatatgtggtttgatttggttattttgtcttgaacgtattgatacttttctccttgttaatacttctttttgcttccttatttatctaaactcatgcttttcttgtgcaaaatactgacctttatatttttatgcaggttccatctaacattggttattacagcaacaatct

SEQ ID NO: 71093 - DNA, 542 bp, Prunus persica
  Intron number 1 from transcript ppb019238m (locus ppb01923 8m.g) derived from phytozome v7.0 (chr-ID scaffold_4; pos 13026306 to 13026847)
tgaagaaattaccaggttagacaatgctctcagagagctttgagaagcccagcttcttcagtcgattcgttatattgccagcccatgctctatctgagttcccacattttaagtccacaacttcaacaatgttaggtccttttttactagttttctgcctaccaggagttctatccaggccaacattatcagagctcaatatcgggatctgactagtctttttagcatgagtttttgttttctgtgaaatttcagggcgtctctgattaatgtagttgctggttccactgctgctagcttcatcacatgatttttttggttgtagctttttcggagtagtagcaccacagggaacagaaacagaagctgtttgatgtttacttctggaagatgcaggcgtcggaggtgcaactttgatggactctaattctcttgtcattagggaactgaccgtcccagtggtcccaaccctgatggatcctccaccaccctttatagcttccagtgtctgaaccatgtttgttctagtctccatcaaaggt

SEQ ID NO: 71094 - DNA, 373 bp, Prunus persica
  Intron number 2 from transcript ppa008945m (locus ppa00894 5m.g) derived from phytozome v7.0 (chr-ID scaffold_6; pos 21051909 to 21052281)
tgcctattgcagctgcaagctttaatccatcaagggtaagatattgaatgttttaaagtcaaaataaaaaatatgtggatatggccagatactttatatagagtagtagtgtacagaaaaaaataataaaaattaatgtctcgggaccaacatatctttcagaaactagaagagaaatgtatctcgtgcttccaaatgtctaagactatactcaaacggtcagcaaaatcacacacagatccgctggcatattactaaaaaagttaaacaagaagcacatatcagcaccagcaagaggtatttcatttgtctttactccagttgttccaaccttgcaggatcctctaaaatttgcgctagctgctggaactgg

SEQ ID NO: 71095 - DNA, 408 bp, Prunus persica
  Intron number 1 from transcript ppa005143m (locus ppa00514 3m.g) derived from phytozome v7.0 (chr-ID scaffold_4; pos 9078048 to 9078455 reverse strand)
atctaaggtccgctggtcttctgggtagaccactggtaagtatttcatcttagcattttcattttgttattattgttgttatcatatgtatgattatgatcatcatcttcgttgttatcacttactcctcaaacaattagctgcattttctggaattttttatgcttgtctcgttattctctcgtcaaatttcaagcagagataaaaaggagtgcctgaaatttgtttatgtttgtcaattttgttattgctgcaataacaggctgcatttttgttttttgggttgggtgatgcttgtcaaacttttatcataggcaaggtctaaagagcacctgaaacttctacatgtgcattttttaatttttcattcttatggagtgcaggggagcataaatacctcaacaactt

SEQ ID NO: 71096 - DNA, 913 bp, Prunus persica
  Intron number 1 from transcript ppa007488m (locus ppa00748 8m.g) derived from phytozome v7.0 (chr-ID scaffold_1; pos 44942810 to 44943722 reverse strand)
ccttacaaattgggaaaattcaatctttctcataggtacttgcttaatcttttctacattatgcattgattgggaaaattcactttctcatagaattttggtttcgtttgtttcatttttctaaatttgtatgttgggtcattttgttagtgcactacttagccatagctaacaacaaatatgtctgtttaatttaatttagattagtgggtagtttagtcagttgggttgctcgatgtgtagctttagcggatagttgggtatcaaactgctgtatttgggctagttacatatcatactgctgcatttgggcttgttaatttgttatatatcaaactgctgcattctttctgggtttggattggatagtgaataggtaatattttgcaaattctggggcagtttctgttgatgtctacagttgataaagtactcttcccctggagaaggacttgcatatcacggggatagcgcctttttttccggagaaggacttgaattttggtttcacttgtttcctttttctaaatttgtatgttgggtcattttgttagttagtgcattagttagccatagctaacaagaaaattgaagttgctgcttatgtttaatctaatttggtttactgggtattttggtcattggggtggcttgatagttatatagcaaactgctgcattctttgtgagtttgggtaatgaataggaattctggggctgtttctgctgatggctagaattgataaactagttgtcttgctttcacaattgtgtaattgtcaaattcccagctgcttgctcatgcccttttctcctaacgacaacgttcctcagcctcgcgcttgtatttataatttaaaatgtctgtgtgtttttcagagttgttttagcgccattgactagacagagatcat

SEQ ID NO: 71097 - DNA, 288 bp, Prunus persica
  Intron number 1 from transcript ppa003874m (locus ppa00387 4m.g) derived from phytozome v7.0 (chr-ID scaffold_1; pos 27298669 to 27298956 reverse strand)
actcactcctaacgacacctcttcatccaactccggtaatcatattcaaattctcaatatccttcaattgtttgacttttcttttctgcgtttggcggctgagaaaaaaatgtaagagaagaaataacaaaatctcatacgttgaatttttcgttttctgttttctacatgcaatatttataatttggttctgctgtggaaagtgggttacgatcaaaattccatctttttagccatttcactctcgttttgtttgttttctggttttacaattacaatgtgcagaag

SEQ ID NO: 71098 - DNA, 798 bp, Prunus persica
  Intron number 1 from transcript ppa006354m (locus ppa00635 4m.g) derived from phytozome v7.0 (chr-ID scaffold_7; pos 3879662 to 3880459 reverse strand)
aactgtagaaagggtgttcccttcgtagcaggaaagtaagaattttaattccttggtttttgacttaagttgtctatgtctgtttaataaactagtttggttaaggtaattaattgtacataattagacttaaactttcatggtatctgtattgcaatttcattctatgaaaaatgtaaaaagagattatttctcgaaaccagaaggactctggagccttagtaccatccatttcaacgtgctgtttgtggacttatatgagtggaccatgttccactaactgtgtaaatcaaaagtaaaagtcaagcactaaactagcaaacaaaaattataaatccagtacggcatcctggttcctataggaattccttcccttccctttcgtttttctttatctttctttttatccttatcattggaggggggtggtgttggttattgaataaagtaagagatgaagagtgcatttaagctccttcagagaaatatcagttggtactctaggaactgcaaagttaatttactgtggttgcaaaggctactgttctccccatattgttgcactctgatttgtgcataaagggactgttaatattagtaattagaattatcaatcaccatagagaaaagggcgtatttacgattccagttctcgttacacattatctaaaaatcattaataattttttgattccaaacaataagtttgttattaattttacaagctattttgtttataatattctgttatttctgttggaagtaaaaaggttgcagcttgtgcaaagcattttgtgg

SEQ ID NO: 71099 - DNA, 877 bp, Prunus persica
  Intron number 1 from transcript ppa006754m (locus ppa00675 4m.g) derived from phytozome v7.0 (chr-ID scaffold_7; pos 14115899 to 14116775 reverse strand)
gccgggagaaagaggaagctgaaatcgtaagatttgatttctgttgcttactaaaaacattttgtaatttgcatatttcaatttgttgttttttcaatatggcttcaatgaaatgactcttaaggattttaggaatgggatcagtttagggttcataattggatacccaatgttttcaagtcaggaatatgctttaatttttgagaattgaagtcaattttgagattttagatgggtttttggggaagggtttttatatgtggcgaaaaagtgaatttagggtcttagagaagttggtttatctgagttttatggtagaatgtcaatgtgattttttgctaagaattagttggagttttataatttgtggaaattatgggttaaacccattgctagatcatggattttttttggtatgaacaacatgttgagttgaatgaattttgtagcaacttcattggttttggtttttagtttcatgttaggctcattttaacttttcataacttttcgggtcccaaggtcaagggatttctagtgcttatagtataattatattctccttttcgtataagtgtattatgtcttaggttcgtaaattgcttatttacatgtcttgcttaaacaaaagtaccagtacaatcttatgcatcaacaaaaaaaaagtagatagttgataattgacttgtaatgggattgtgctcttgttgataaatgcatgaaaggtgagttgaaacaattgcctttcatgcattttacaactcattatggcattctctgctcatctgtgtgtttcgtttgatgttctacacttagaatttatagtattttatgatgtataggttagctgaaaccatcacaaacagtaaaagaagag

SEQ ID NO: 71100 - DNA, 729 bp, Prunus persica
  Intron number 1 from transcript ppa001707m (locus ppa00170 7m.g) derived from phytozome v7.0 (chr-ID scaffold_1; pos 23273981 to 23274709)
ttgatttccgggaaggtcattttcgattttgctatgccttttttatttggggtcttgtctgaaagttggagtttttgcgaaatgggtgaaatgtcccaatcaatctgtgtgttttgctaatcgacattcttctctcagattttgtatctttggccattgaatgaaatgtctaaatcaatttttttttctttttgattttgtttttggaaaatatttttcattcttctgaagatactatattgtctgaatcaatctttttgggtttttccattttgtttttttaaggccttatcctcgttttttcttgtcaaatttccaatcctctgtctggtttctgagaaagtgagtgttccaaatatgggatttacttaataaatattccaatcccaaggaatgaatgagtggggatattacaattaattgcctcagtggaggcttcttctctattgccactttttgatttttcactcaatcattgaaaacctggaaaaatgaagtacaagttagatgcttatgcttatttgtgttttcgtttaatcctcagtttccaaagaaatccaacagtgcactgtgttattttcactgccatgccttttttgtcgatgcagccaaaatttaaacttagttgtagaattttggcttatttatgtttaatgctctagacatttaatgagaagcttcctttatgcctttgctaattctgttttactgtctctttcggcaatgcag

SEQ ID NO: 71101 - DNA, 561 bp, Prunus persica
  Intron number 2 from transcript ppa001707m (locus ppa00170 7m.g) derived from phytozome v7.0 (chr-ID scaffold_1; pos 23274798 to 23275358)
ccaaggtatgaatgagatatgggtggcaatacatttaatgactggtattgtgtttattttttttttcaaaatatttcaaactcaacataactttgattttttcaacatttatatttgctaacttcctatgtgtttcctgaaattacgtgtgtgaactgttaatccccccagttcctggactatataggtaatgctaattaggaattgttagttaacttaagacagttattttagttaatgggtttttcttacatatacttcgggtctatgccattcctcgggagggtgtagttgcatctatcaaacttattaattcggttataagattggtaaaaatttggaatcagagaagtttgaagtcatcgtgggaggtgagaatttggtcgtgtgtttatatacatataggtagttgtgtatattcttttcgaagctggcttgcatattctttttggaaaatttaccagcatggatcccccattataaccttttgtaagtctgcattctgtcatagggttgtatcagtgtatataattgatcacctttgtttccttctgcagttgc

SEQ ID NO: 71102 - DNA, 916 bp, Prunus persica
  Intron number 2 from transcript ppa004839m (locus ppa00483 9m.g) derived from phytozome v7.0 (chr-ID scaffold_3; pos 796813 to 797728)
ctgctttgtctttgccctccatttgtaattctactgtaagttctatgtcaatctgttttgtttcattttttgtttctttctctaagaaatgaattttatgtttccttatgtgaaaatacgttttcttggggaataatgattatagaaaataatgggttatcgttatttctttggtttggttgagaagtagggtcattgaatccaaatctcatcttgtttttagttttcttgtttgtttctatagaaaatattaattttctgggaaaattgtttctaaagaatgcaaagcaagatgaattagatctcgaactggtggagggacatgttcactttttttcatcttttttcctagctttgaatacttgcagttttaaaatcatatacgattcttgcattttatattatacaaggccctgagattatatttgatgtttatctcaaatagattcatttgtaatttaatatctttttgttccttcgtttttatattgctctgtttcgttgatgaaaagaggcaggcagagaatcccaattgaaacttttaagtatttgattttgattagttgggacgcaatatataactcaacattagtacagctaacccgagtttaagaaaatccaaatcagattttatggatgttaaaaagcttgagtcgttagtgtgttttttgtggcttttgaagagatgatttggtaggagaagaagtaacaagtaatcataaagagaatcaaagtagccaaggcatattttggagttataagaaactgcatttattaaattgaaattctgaaaattcctttttcttttgtttatttattttttgttttctgttttttgtttaaaagagaaaagggatactcaattgataaaaccaaattgattgtgattgagatcagaatctgatacttattgcag

SEQ ID NO: 71103 - DNA, 1035 bp, Prunus persica
  Intron number 1 from transcript ppa005259m (locus ppa00525 9m.g) derived from phytozome v7.0 (chr-ID scaffold_5; pos 17045352 to 17046386)
tcacctcctactcttggtggtctgtttattgaactctctctcttctattttatattttgagctctgatttttctgatatatgtgcatgcatagtcttgcaattgcatcttaatttgaatgtaatatctttcttttagagtggggttgaggttatttttggggctgagactgaggtttcggttatgaattcatttttctaattttttgggagatgtaagttgggaaagtttgggaatctattgaattggtgatgcagatgacaggttttgtttggcttcatcgaaaattgggttgtatgtgaacagtgtctagttgtccggaatttttttcttttgggttacaaaatgaaattagaaactatgtaatagggtggcaaaatggcagctggtgtaagataagagagagattacgtatgattgcatttacgatggaaaaagaaaaagcgttgctttgcttatagattgggaaatgagtccactgatgtcaaatgcagtacaaatttaggaacagggagggtcctttactaccaaggtgattcgaaattattcttgttagatatgattagctattgtcgtgtgattcttttcattatgcatttaaatagtataccaaccgtttggtaagaactctttgatgccaatggccatatcacccatgacccattttgtgtgctgcgtacatttgaaaacgttcttccaacagatagtggtgtaggtatctctttgaagatattgccttcaagagtgagagggttaaagagttttgttgtgaatttttattttttattttttattttttatagagaataggtgactttcaattatatgcatataccagttagaaccacaaatcaagggcatttatctttaaacttcattagtttgtcagtaggtcttttgattagatcaaactctcatgttggcaaggattgtagtttttgaaatgcgagctctgtggtgagtccatcaaataaattgatgtgatggaaaatagcttttgtttgcaggataattttctttccactttggatatttc

SEQ ID NO: 71104 - DNA, 632 bp, Prunus persica
  Intron number 1 from transcript ppa005522m (locus ppa00552 2m.g) derived from phytozome v7.0 (chr-ID scaffold_3; pos 18671236 to 18671867 reverse strand)
ctttggacttgcttgtaccagcttcactgctacaggtatcatcagtcttcttctttctcattcaatctttcttaagttagtattttttttcttggaatttgattatattcatgggtttattcctttttaagtctatagtggcctaatgtgtctgagtgtctcatattagttgaattctgttccttgaaggtgtagttgactgtttgattggagaaatgtttgtgaggttttggcaacttttgggttttgggttttgggttttgggttttgagttttgagtttgacaaatgaggaaatcaatttttgtttaatatcagaacgtttaattctctgatgtttatgcaaatgagttttgatgaaaaatatggaccttagctcttgtttttccatttttgagttctgttttggaattcgaactctttttttctttcacaaagaattcgaacttgttagttttaacagatgagatactgaagaaagaaaatttaatcagttaaactaattcagcgatcaaatactttctattacaaggaaaatgagaacaagactccaaagttactatttttacataatctctattgattcagctcatcacagtgttcattgttttgcttatttcttaccagaagcat

SEQ ID NO: 71105 - DNA, 516 bp, Prunus persica
  Intron number 2 from transcript ppa024360m (locus ppa02436 0m.g) derived from phytozome v7.0 (chr-ID scaffold_3; pos 2726636 to 2727151)
aaaccaaaaatgttagctctctctctctctctctctctctctctcttcttcccaggtctaggggagagaattttatctatgaagtttgagatcatatctaagtttaagatgactttttgagaagagttccaatagacagaagaccaaaaccaaagatgccctctctcttagatctatctctggcttcttcccttctatttaaaactgttttacaataaagtaagcgctccattaagcacttggttaaagataaacgagtctctctcttgtgatcaaaggaatgattgatgtttgaatttaatctctggctcctacttaggttagaagaatataacttgctagaaagaaaacaaaccagttgtgaatggggttcataataattctgcttcaatcatattgtctgcagaattagattcataattattatgttttacagtcctttttaaaaaaagttactaagacatgtcctttttgtctccagattgcattccaagtacttgtcaaggcattgattag

SEQ ID NO: 71106 - DNA, 691 bp, Prunus persica
  Intron number 3 from transcript ppa007526m (locus ppa00752 6m.g) derived from phytozome v7.0 (chr-ID scaffold_4; pos 26658995 to 26659685 reverse strand)
tggaattcctgactacagaaggttctgtctctttttttaatatggttgttcaagcttatgagttccatactgccttgtttttgcattctttaatagtgaagaacttttaaaattgaacttttgaaaataggttgcttctaacttcgtcttttgcacctatctttgtgagacctattattgcctgttgaattgactctaatcagtaatatgttgatgaagttgagtagtggtttccaaccgttatgttctctattgcactattaacttgttcagtcaacatttgttgatggcttttcaagcctgcccttttcattcgtattgatttgttatatacacgtattttgagagagaatattccttggcgtaatggtatggtttgttccaagtggccttgtatcatggatttgagtcacagaaacctctttggaattatgggtaaagcctgtgcacatcctgccttctccagaccctgcattttccactaggttgcactttttatccatgtgctttgagagctgtaaaagctatttttgactattttattgtcaacaatatttgatatgctgcatgttcgtactttggagcaaatcagcgaaaggaataagtcaactcaggtgtcttagtttttttttttgtgaattggagatacataatatactaataagtgatattttcttctgttgcagcccaa

SEQ ID NO: 71107 - DNA, 442 bp, Prunus persica
  Intron number 1 from transcript ppa003794m (locus ppa00379 4m.g) derived from phytozome v7.0 (chr-ID scaffold_6; pos 15545876 to 15546317)
ctccacactgtaagtaaaacccaaatttttagtggcttcactttgttgttgtttttctccttgttttcatttttgtttttggtataatttttgaacaaattgcttgaatcacaacttaatctcagtttttctctctatttaagcaaacatgacataattgtagagttacaagatttgcaggcatagaagtttgaaaatatttgggaggagatattattataaaaatggtgctagtaaaatgcttttggatattttgtgtaattatggtttgccattgagtctaactggatgaactccaattttcttattagtcagtttatcttgtgctttttcaagtttagaattgcaatattttcttgtgctacctctctggctatctgaaagcacggttcttttgtactttccttgatacactcttctataaacaggcaaaaagactgaa

SEQ ID NO: 71108 - DNA, 684 bp, Prunus persica
  Intron number 2 from transcript ppa011479m (locus ppa01147 9m.g) derived from phytozome v7.0 (chr-ID scaffold_1; pos 29360018 to 29360701 reverse strand)
caagttactgccagcgtaagactgctgcttttattcttgtctgaattatacaaagttaaacatttgtacaatctgaaaggccttcaattttaactcagtttatgatgcaagcttacttgtaggctttgattgtaccaaattctaaggtcctcaaatgtattggctcatccaaaatttcatttcatgacaagatttaaatgtcgcacacccaacccaacctaacctatatgcgactgtggctttaagttcatgctaacacttccatctggtgttgcctgcatcagggtgttgtaataaggatgcccaatttttttacaaatttgatggaatgcttaatcactcactttgattacattatttcaatagttatattaatactgcatttagattggaattttttgttcagtaatccttcataaatgatgtttgaacattttctttccttttcatacatcagctattcataaatgatgttacttgggcttcttccaatcaattcctgcttccaaagatcatgttactgcagaggtgataggattttctcgtgggaaatgaatccatggtgttattatacatgaaacctgcaatgagttaaagagttaaaaagatcgcatctttttcaatctttacaactccatcaaactaactgagatgttgttgcttcaatattttgatcaggtcgtc

SEQ ID NO: 71109 - DNA, 612 bp, Prunus persica
  Intron number 1 from transcript ppa008495m (locus ppa00849 5m.g) derived from phytozome v7.0 (chr-ID scaffold_5; pos 15414477 to 15415088 reverse strand)
gtcttctaattcttcctctgcttctccttttctgggtactttttcactctcctttctactttgtctctgtttttcatatctgtcactcttttagtgtctctgttatgggttttttttttcccccttaaatgtttaatcttttgggatatttactttgaggcacatatgccatctgtttgcatgacaattacaactaacatcttcttgacactttgattgtgtttcttctggatgtgaatatggtatggaatttattatgattgatagatggatttgtatattgctgcttaacttgtgtatggattaaatagggttcgaatttacgtactctaggcccctgttcttcgttctggttaagtactcagaacggtagaataatcagcagcaaaagaaaggaaaacactttgtgattagagttgaacatggaagtgtgggagctaatgttcatcactttcagaccatgtataggattgttgagaaaaactgtgtggctagagtacctttattaattcaggaattggctgttcatttgtgtgataaactagtttttggtgatcatctggaagatggtcttctaattcagagattatattatattcaggttcaagatct

SEQ ID NO: 71110 - DNA, 553 bp, Prunus persica
  Intron number 1 from transcript ppa007290m (locus ppa00729 0m.g) derived from phytozome v7.0 (chr-ID scaffold_2; pos 20023322 to 20023874)
cttctgccttttcgtgagtacttttgttccctgtccgttgttaaacttgagagatgatgagagaaaaataaagcatgtgtttgtggttttttcttttggctccctgtttatttgtctgaaatgcagttatcaatttggtgaatgaagatatatatatatatatatatatatatatatgatagtgattttgatgtgagaaatcatttatcagtaatagtgactattacagtggtaatgctgttgggtagcagtaaagctaatggtagagatttcggagatttcggagagttgcaataatgacgtaaattaattgacctctcatttacaatgaaaggatgatcaattcaatagtaataaaacaagtagccaactgtatttgttgcttacaataatatagaatcctatgaccctccctaagaaagagaacaaaatttgaataacttgtaacttgttcaaattttaaatgcaaactagtggttatatcactgatttttctgatcaaattaatgtgcatgcaggtataataatagcaagacagtgcaatcccttttcc

SEQ ID NO: 71111 - DNA, 406 bp, Prunus persica
  Intron number 2 from transcript ppa010262m (locus ppa01026 2m.g) derived from phytozome v7.0 (chr-ID scaffold_1; pos 19999646 to 20000051 reverse strand)
attcactccgcttttctccaattaaatccccaaaggtattgtataaatctctgtttgtctttgacgagttcgtgttcgaaacggtttgagctggtactgttcttgttgctttaatttaatgtgacaatttgatggaagacaacccttttgagtacgaaatttagggtttctgcgagtttgatgcatgacaagttaggttggattttgtgatgtgtgtgtatatgcacatgtgtatgcttgaatgtatgctaattggttcttgggcaaggttttgaattttcacagtgcatgctgattcatagtcttacatagtgcgtggttataagattttgtatttatttttaactggattcctttccatatttttttagggctactgtaacatatcctgtagttttaattcggc

SEQ ID NO: 71112 - DNA, 862 bp, Prunus persica
  Intron number 1 from transcript ppa003597m (locus ppa00359 7m.g) derived from phytozome v7.0 (chr-ID scaffold_7; pos 18834596 to 18835457 reverse strand)
gagccgcccattctggtaatcgtgtttttgtgatcttttactggttttgacctgttatcagttaattattaatcctgtgattgaattttcaagtacgtttttattttttaatttcagaatcttggaagctatcaattcaatgtattttgtgtgtgcgtgcgtgtttgttttttttgggtaggggggttgtttacgcactgcaattgctttgggtataacttcttgtttcgcttacttccttgaacgtttgtatctgaagttggatttaattgattgaatttttttttaaatatgtagtttggaattttaaaaagctagtttgtgttgtgtgtgtgtgaaagttcaaattttttttttcattacaaagctaataggcttagtttatccttatactgcagtttggtttatttgaagttggttatgttgttggaaaaaggagaaaaagttttcatgttatgcttgtcttcttttcttttgtaataaaagtgggtttacactggccataagataaacattgggttaatagtaaaatggttctaatggaactaattgactcaaagcatctgcaatgcccaactgttgattgatgaatgattatactagccaggaaatgtcatttaaatgtagaaaagagtaaaaatgtcttgttagtcaagaagttgctatatcttgaacaaggaaagagaagagggactaatcctctgctacctaataaacctttgaggactctaactaaagctttcctaagattcaaatggtataaaatgatagatagtaatttagtgactacatatcctctgatatgccgatcatctctgttcatttctatattactgttattgttggaaatataggggaaaca

SEQ ID NO: 71113 - DNA, 753 bp, Prunus persica
  Intron number 1 from transcript ppa001124m (locus ppa00112 4m.g) derived from phytozome v7.0 (chr-ID scaffold_5; pos 11074482 to 11075234 reverse strand)
ctgagctcaaggaagagctcaattctcaatacaaggttcctctctctctctctctctctctctctctctctctctatatatatatatatatatatacatctatctacacaaacacatatttgtatatgcatattgatctatgatctaagtcaattaggttttttactcttaggattgttgggagcagatctgttagtttacgctttgaattgttgcttaaattgctgtttgatttcttcgaattctgtttaaatgccgtcgtagggtttcagaattgtttggatccagtgcgagttggtaatgagctttctgttctgtttggggcgggagaaactgatggaaatgaaaagaaaatctgctcttttgtttttagattcttctcttagattgggtagaatttaaatgcggtttccttttcttatttcctagtaacaaatcggagcattgttgattgcttacagtaaagtgaattgtagttttacatgatctgtagacatttctaatatctttatagtgtgtgagtatttctccttcttgatttgtcttcatgactttaaacgcttatttttaccattaaattatgtttttcttttctttgggtgcgtgttagggccgtatgttttccaccaaaaaattgaccagtgcttgcctcattgttttcgtttcagaattatccttcttgtgtacttttactttatcagaagctttgtgatcataatcttcttttatgtgttgtataggataagagaaagg

SEQ ID NO: 71114 - DNA, 659 bp, Prunus persica
  Intron number 2 from transcript ppa010719m (locus ppa01071 9m.g) derived from phytozome v7.0 (chr-ID scaffold_6; pos 25111526 to 25112184)
gagctccttggcgagttataggtacttatagttatatcttcttcttcctcctcatttgttttttgtattcgttttagtttaagccgaaaaatgttgactttttggttattgggtatattacatattgagtttttctggtatattgtccacattaaatagaaatcttcatttctgggacccctgtctctgtatcttattatatctaattgctgaagttataatttttattgtttttataactactatttttagtattactcacatgacatttgtgtttctttgctggtaatcttacgatagatgtactctagggagcctgtatctttaggttggtttatgaggctcccatgggagatttggaatttcatggtatcatgatgtgtgtgtgtaattagaaaaaatcaaaagccttttgaacactatgatactaatttgagacttttggtatgtcaaagagtttctagggatgtttaagttggttataggtgtaccccattgtaatctgcctctatatctgaattgtcttgttttcatatgttctaatattcccaggaggaatcttttcatttggtcaggcaaacaactatttatttgtataagtcataagtcaatggaagcttattagttttctatctgttggccttctgtagaatttcttc

SEQ ID NO: 71115 - DNA, 929 bp, Prunus persica
  Intron number 1 from transcript ppa002329m (locus ppa00232 9m.g) derived from phytozome v7.0 (chr-ID scaffold_4; pos 13248226 to 13249154)
gtgtaccagggcggagtggtcagctagggtttcaggtgagtttggtctcggaagttatcttctttggtcatcaaagatctgaaagtttttggtaaaatgggtcttctttgaaaccttgatgaaatctcatttcattggagtttgaccttttttttttgtcaaaaagttgatttatttatgtgttttacttttgaaaaaaaaattatggttaatgcatttggtgttgtttaatttgcaattttaagttggataaagactattggtgctgatatttgtggtactgttttttttttttttcttcatgatatatatttcttggtttttattttttaatttggggttcaagaaaccaagcattgttactcaagatttgattgatcttacaaagaaagaaaaagccttctctgcgttgattgatcttacagagattgtgttttctttaaagctttagaatgaaatggttctctttgatctttttaacatgatgatgattgtgttcttaagtgtttaggatgaaatctgtgttgaggtggttatgcttgtaagtttccatcaatgtcctgctgagtatctcttagtttggtagttaattggttttgagatattttcagacctgctttcttaaataagattcgtgacgttgcttcaagttaatctgaatgtattaacatggaactgtgagatatgatgatacagtggttggacatttatgcatttctttgatgcattatgaaaattccgggtcgttacacttttctttgatatgttctgagatagtccttgcgtgctgttttagcacatctatgtcataatatgccttaatctcaacttgctggtatttatgctgttgtatactgtaaattttgagtttcaatgttgtcgtcttctatgcagcctgacgtcggccatatcagcgtaccatttctccg

SEQ ID NO: 71116 - DNA, 589 bp, Prunus persica
  Intron number 1 from transcript ppa004383m (locus ppa00438 3m.g) derived from phytozome v7.0 (chr-ID scaffold_6; pos 24654142 to 24654730 reverse strand)
gggtaccaggttcactgcttttctcatctctcactacttactttagtggtttattagtgctgtttaaggtttttccccaactagaatttgggctgtcttcattgtgtcagaggatgtgtacatatacattgaaattaatattttttttcttcatactttgctgctgaaagttgtttcaaacttaagcaactactaggaaaatcagtaaattaaattacagaaaccaagttgaagattttgaacatgctaattagtgctatcacaagaaatgttttcaaggaagaaataagcaaattaaattacagaaacaaagtcaaattatcacattcttcttcttatatttctacattgtaggcagaaattgtgctcatgggagtaacaagttccctatagatcaacctatcatctgtttaagacacttataatttgacttctatttgtgattgtgcctcctccatgtgacatttaatttgattactctaattgttatgatcaatttcgcctgtaactttgtacaaggaagacaagaaaaaggctccttgttttgttttgagtattaatttccattgaattttccctgttttgcaga

SEQ ID NO: 71117 - DNA, 411 bp, Prunus persica
  Intron number 3 from transcript ppa022896m (locus ppa02289 6m.g) derived from phytozome v7.0 (chr-ID scaffold_8; pos 15922457 to 15922867)
taatatttgctactccagttggtaattatcacaaagtaagttatcatcaattggttttaaatttaacttttcatatataactcttccacatattacatagggttatttaagcaaaactgtaacaatagtctgtaagttatatccgagttgcattttcgtccataatcttcaaaaatagttacagcagtcctctaattaggcgccgatgagttgcaccaatagtaatttccttcatgtatgttagtttttccgctaatttgtttcatatcaattttgtttttctcatactttgaggcgcccaccatatttttaaatttgcattcgtattgcttagaatttttttattgaaatgctgtcttctaattaaaacgacaattgattttgtccatgtaacaatagcgtggctccacc

SEQ ID NO: 71118 - DNA, 679 bp, Prunus persica
  Intron number 1 from transcript ppa021067m (locus ppa02106 7m.g) derived from phytozome v7.0 (chr-ID scaffold_1; pos 27284636 to 27285314)
ctctctccggtgggctttccggcgtcgttgctcaggtaacttgctttcttattgtgtctaacttattgggttgggtcccttttcgaaaaaaataattgggatttgtaatttgataagtttttggacttgggagattggaagtttagtttagttttttttttttttgggtcaagaagggaaattggaagtaatagtgttaccgattcattttagagaaaattgataagtttaaaaatgaaagcttgttcgaattgacaatgagaaaatgaatgcttgatctttgaatttgtgtgctctgtaagaaagttcggggcgttcaactatagaatctatcgaactcttctgaagattagtaatgcagttttgtcacattctattcacattgaatttgcttcaatctcatactttgacatgcatatgaattcatatatacaaaacttcactgcattttacacactcttgatatttaaatgcagctttttcacatgataatccatgttaggttggcctacttggttgtgctgtgcatttctttgccaatcaaatggtccaataattgattaggctgactgctttgtattttatttaactctgtgtttgctttgaaagtaataatgttcttctgtttactgctagtagtacagttggtggcaagccccgcagatcttgttaaggtgag

SEQ ID NO: 71119 - DNA, 615 bp, Prunus persica
  Intron number 2 from transcript ppa003301m (locus ppa00330 1m.g) derived from phytozome v7.0 (chr-ID scaffold_3; pos 15648674 to 15649288)
agaaaaaattggggttttctattgtgtgcaaattggtaaaggtctgcctttttgttatatgtttctgacatgttgctgttgctagaacgttgtttcatttcgtaatttggagattagaggcttttctgaaaatagcatgcttaatattgatagtcttacggcaagaaaaagcttagattggtagtattattttattcaatttcagtacttctgttgtgatgattaattctccggaatcagtacgactggcagcttttaatagatgtagtagaacctagatgatatgcttctcgtagcagtttgggtaatcacaggtatccaagccagtttgatgtaactgaaaatttgtcaaatcgtctcaccatgtgctgtgttgcttttgggatttcatcttaactgatagttgtatatgtttgtctgtgcatgcacatgtcttcttttgggtgctgaatgcgtgttgttaattctcaacgatgagaaatcttctatattttttaacattcactttcagatctaatatgcaaaatgtcacgatagctttcagaagagtaaaaatgttagggtacttggctgatacttctatttctgtagttgcagaagtagcggatctggtgg

SEQ ID NO: 71120 - DNA, 948 bp, Prunus persica
  Intron number 1 from transcript ppa017556m (locus ppa01755 6m.g) derived from phytozome v7.0 (chr-ID scaffold_8; pos 16621247 to 16622194)
agtgcaattgcagtctggtttggaggaaataaaaggtaggtctttgttttcttttcacaacttgaaatttaaccgcatttttttattgccatttttatgggatgaattccctttctgtatgaactatgcatgagttctgttgtctgttacagcacaattttaagctgatctgcggagtgtttggtgataaatttgggtggcataattaatttgttgttttggatcttgacccttctgtgtatttcttttgtcttctcgtattactttgcatgtgccctgttttgtaggctggaattttgatttcagaagataaagatatttgttcttattctggtccacatgagtcttggtttcatttgtttgtgcaaattttttcttcaaattcttagtttttcctttcgggcattcttttcttttacaatttgatagaagcgtaggggctttcttttcttcatgaagtttacatttttctccaaatttttgtctgaatgatcttcattatgcattcactttgtagatctgtttgtagctgcatagatttctttcaactttattgaactaatagagagaatgcctaaacaattcccaatggtggggctcatttagtttttatgtttgtttaacagagattgtattgttctgtttaaactttttccatgacttggtttttacatatatacccaagtcctatttccaaattgttccagactaaacaaggatatggtttggtggacctcagtttcattttcttttctcaaaaagttggaatattcttgcaaatgtggatcatcttctttttcaaatgagaggtctaacacttttaatgctctctatctgttttgatgttattggtctcttactatatttccatctccatataacatttatagttcttcactgaccctattttaattcagagaactcaacaaagctaattcaagctatagc

SEQ ID NO: 71121 - DNA, 787 bp, Prunus persica
  Intron number 1 from transcript ppa018568m (locus ppa01856 8m.g) derived from phytozome v7.0 (chr-ID scaffold_7; pos 9947771 to 9948557 reverse strand)
tttacaaataccatcctgaagagcttactggttagtgttatgatcctcttctatatccattaattatttcttcttttttactggttaccttaactagtttttcgtgatattgatatgcttcttctaagctacacatgcatcgtttagaactttaggagtagcatatttagttagaaaacttttcaagaacagcagaaaagaaattagggttcttacaagtcgtcaagtttcgtgcatcctactttaagttattattcaaaaggtttatagaaaaggatttactcttgaaagaaggggtatgtaatcttttgctaattttcttgaaagctctttaattgtttgcaccactttagtagaagtttttgcatgacgtatgatatcgaagtttggagaagttcgtattgaaagagattataagttcgtatctccagttctccctttcataaaaagaaaaaaagttgttagtactcttagtagttattttgtttttaactcacaaattcaagactgaatggattaagaatttggagcactgcgtgcaattaatataaaccacacttcatgtaccaacactaaaaagtaagaacgactcttcgtaagtctggaagagagcaactagggttttatttctagggcagagacaaatcacgtttgagtactgatatcgatttgccctaatggattctgaatttttggtttagagaaggagattaatatttcaatatactaaacggtttatactaattgttaagtaacttttgctctttcttcctgttttgctttaggg

SEQ ID NO: 71122 - DNA, 823 bp, Prunus persica
  Intron number 3 from transcript ppa006303m (locus ppa00630 3m.g) derived from phytozome v7.0 (chr-ID scaffold_3; pos 15264626 to 15265448)
tgggtgctgctgaggtaatttcatctcatttttattgctttatgttacttggactttcttgaactgcttttgttcattgcttaggcccttgtcctgaactttgttactgtataactggaaattgctctcttatgtagctagaaaactaactatgccatattactttgaaataatcaactacagaactacattatatcaaacaaaaaatagtgattattggtagagtccattgatgtttctaattctcacagcagcctcattacgtatgctatttttttatctgcagaactttggactggcttaagtataaagtatgtgtggctgttccattagtaaagtaggctttttaccattttttaaatgtgtatgtgagtatactggagaagaagtgtaattctttagtctgaacaaagccatactgtcagttgctcttccaactgatgccggaaaatgcatttggaaaactattgtatcaataatggtttgatgaaatgaggaaaaataatgttgtgatggcagttggaatttactattagaaatcatttcatcaaactattgtttattgtacttgtcaaaagagaaaaagtgtatttttaaactagtcatgtgtataaaatgagtgctttggctaccaaagttttatctttgaaggcaagtggccatactaaactttgttgttttttccttctttcctttttttatttataaatacttcctactgttgaactgttgttattaaagcatgtctaaaatggagtttatgaaatgtacttgtggttaactattagtgcttttttccaggggtcttcagttggactggtaa

SEQ ID NO: 71123 - DNA, 385 bp, Prunus persica
  Intron number 1 from transcript ppa017362m (locus ppa01736 2m.g) derived from phytozome v7.0 (chr-ID scaffold_8; pos 13493152 to 13493536)
aattgtcaaagcatttggcatcagcaaccttgatagtaagagaccaaaatgcttgtttattgaagaactaacctctttaagtctttagagatccaattttaaattgaagtcaacattcaatgaaaggaaaaaaaaatggtcaaacaagcaaagccagaaagcctatcagtacttttgaatccaataaataatatgaagacatataccaacaatgaatatatatttcccaatcaaattggggtgaccaaaccagaaacataaacacatggatcaaagaaagaaaattttgatcaaatcaatctctactttgctgatcattcttctctgtgcagcaaatataacataatcagagcctacaaaccctagcaagaagcactttgtactg

SEQ ID NO: 71124 - DNA, 403 bp, Prunus persica
  Intron number 3 from transcript ppa017362m (locus ppa01736 2m.g) derived from phytozome v7.0 (chr-ID scaffold_8; pos 13493844 to 13494246)
gacccttaacatctccgctcttaatcaagaggaacgtattactttcattaacttacgtcgtcgaaaaatgctttgagataactaaaagtgttttttcttttaataacttgcataaatgaacaaaagtactttataagaaatcacataatcactttaaacgcttcgtagagaaacactcataagacgcatgtgtaattcacataatgtgcttccagtatttttcttttatatgcacataattttaaaaaataaaaataaaaataatatctttgaattattatgggaagttccttgtccttatatgctgattatatctttttttctttgatttatttatctcttctaattggaattataaagtcgttcagaagacaatgatctctattagacagcaaatacacaa

SEQ ID NO: 71125 - DNA, 1033 bp, Prunus persica
  Intron number 3 from transcript ppb017894m (locus ppb01789 4m.g) derived from phytozome v7.0 (chr-ID scaffold_62; pos 4954 to 5986 reverse strand)
ttattccaggtacaatgatagatttgtctggtaaacgctcttatttagtggagactttttatgataatatatgaaaggtaccagagagaccaatggctgtacaacatggccattgctcttgtgttgttttaattcatggtttaatttgtaatctgaacatggcaatgactacaacggtgtccttttgtattttgaaaatttgactcttctatgaatccaagcaattttttttcagtacttaatactcttacgtcaatgacagtggtgtagatttttgtttatatatcccaagtattcaatttgatatatgataatgttgtcatatgttcaattggttgttgccctggactctgcattcaccattttttgaattaattctctgtttttcttcttagagaaattaatagtcaaagagtcatgacaaggagtttattaaagttaacttcttattaggatttgaaaagaaaatggatgagtttcttcatattctggtttggatgagaaaaccttattagattttcagtttgttctaagtttagatgagaaaaattgagaaaatgttagaattgattttgaggtagctacaggcagattacaacgtagcccaactcccttcataattacaaactcttaactaccacaaatacatgatagaagtggtgaaaagaaaattaacatattaagcctgtgaagtgaaaaattataaacagtgaagaacaaaatagcagggaattgaaagataaaactagaactttatttcataatggtgtttcctcctcaacctcagtcaaggagtttaggtagacaattaaaaataaaaacaaaacaaaacaaagaaattaaaatacataagaaataaatgagaactatgagaggcgaggaacaactacaagagggcccaaatagctcttggttcactcctctctatccttgctctctttgccgtaaggctctgtatctgcacacccacttcacttgccattgttctctatttatagaggttggagaccttcaaattcagctgcaaaattca

SEQ ID NO: 71126 - DNA, 424 bp, Prunus persica
  Intron number 3 from transcript ppa009967m (locus ppa00996 7m.g) derived from phytozome v7.0 (chr-ID scaffold_8; pos 19358384 to 19358807)
tagaggatagaacccaagtggatagggatctagaggtatgtgaaacttgaaagaacataacagaaatttgtttgagtgcattttttatcggctttatacgagagtaataatggtgttgtgaatcacttttgcttaagatttgaatcaatcatctcagttactgatcataagatacagaacttattctgggacttgtgcaaattttgtatactcaagaaattacatgattcccaagttcaaattagagacctttgtttctttggagccactgtgggatttgattccaggtgcttgggacaatgtcgctttaccagctaagctagatggcacctcttgtcttcaggaatctcatgtgattgacctaggctactttttttttctctgtgcagaatctaagaagggagaaagtcctgcgcattttcaa

SEQ ID NO: 71127 - DNA, 362 bp, Prunus persica
  Intron number 1 from transcript ppa024209m (locus ppa02420 9m.g) derived from phytozome v7.0 (chr-ID scaffold_1; pos 19472603 to 19472964 reverse strand)
cacagattagggagaaacttgagtacaatcatcgattgtctcgaaacggatatgctggtttggaggatcaattggaggaaaccatgcctggggtagaaattgatcgatctaccttatggaagagagctagacaggacaaacatggtaacatcccggatccaaaggtggcagagaaagcaaaattaattgtaagcctactcactctgttttaaatttttattaaactgtgaataattcttattacgtcttatgttatattttgcgtcatgtgaatgatattaccacgtctaaattttttaaaaaacgtcgttaaaggtctaaatcaggaatcactactctgttttctataattatagcataag

SEQ ID NO: 71128 - DNA, 335 bp, Prunus persica
  Intron number 1 from transcript ppa006454m (locus ppa00645 4m.g) derived from phytozome v7.0 (chr-ID scaffold_5; pos 6529617 to 6529951)
ttctccgacgaatttcgggccaaaacttctaaaaggcgagcctcctgtctcttctcttctctccatagaacgtattttttattttttacttttttttatactatactatgctttctcttattattatttagctctcaccgaacaaatatgctatttctgttgaaccggtgtttattttttcttgataattttgtagtttaatttcaacgaaccaaaattgaaaaagtattgtagctcaaattacaatatgtatcagatctctgtgaaaactagaaagcggaattttgatttctgttgtttgtttttgattattttgtttgcagtagggatataag

SEQ ID NO: 71129 - DNA, 937 bp, Prunus persica
  Intron number 3 from transcript ppa025862m (locus ppa02586 2m.g) derived from phytozome v7.0 (chr-ID scaffold_5; pos 10280912 to 10281848 reverse strand)
caaaagttgtgaagatatgtgagaggcaaacaatcttttagccttttgttgtttccttcactggtttttaatttttattgagcttttgattggtacaagttaaagggttcttatagtttattgtctcatgccaatatagggattttacctttgggattatacattttaagagttacttggaagctgcagttaggatcgtagattgtgtccatttgtcgggtgaaaatatgggaccaaaaacttgggtgcaaaagaagacagaatataaaggcgatgactgcttaaccatgtttactttggttgccatgtgaaatgagtttgcttcacttcttttactcctcaaaagtctgagtttgcttacacaccttcttgctagtcctagtcgttattgatgccgatttacattaaatgttgttttagaaattatcattctgaggtagattcttatgtttatgttaccaagtaaaggacattatatttgttttacggggcttagatgtcaaaaagatcactagaaatgtacttactctgtatagagagacttattaaaaaaatatctgtttggtcacttcagagttttgaatgcttagttggacacttagtacatgaggactcagtgtgaaggaaggttcaagaccttcatcatatttggtagatttgtgatgttcaatatacgcaagaaaaaacctcttcaattttgatattatggcacttaaatttaaccctaatcttattgtggtgagtgatagtggtgtttctagaagcagctacagtagccttaatttatttatctatttaaatttggtttcgttaactaacatgctgaggaaaaaaaaattcatttagaagggggggaagggtggtgggtggttgccttcatagacaaacatcatattctttaccatgtttatatatatgaccagtggacttccgttgc

SEQ ID NO: 71130 - DNA, 717 bp, Prunus persica
  Intron number 2 from transcript ppa021267m (locus ppa02126 7m.g) derived from phytozome v7.0 (chr-ID scaffold_6; pos 25657443 to 25658159 reverse strand)
attgcccactaagtaagtagctaacattatttgcttgatgccttgcataatatttcatctttcaccaaattctgttgcctctcctattattaaagatctaagtctgcaatagagtttcagattgacctatgaacttatgatgtttgagtagtgaagcacatgttgtctctttacgcatttggttataccttttttcacatttttctattctgatttgtgcggttcttgctactcattcatatataatgacatcaattcatatcaatgctttgtttcacagtagtatggaatatacagatcattgttaatttacaagcattggcatttggattttctctctttttcttcaatgaactacccaaatatgattcaaatatctaacagaagatcttccgccgacatcttagaacatcattttacacatggtttgcaatgcacggctgccatggtatctaccaaactaacagtcaaaccctatattcttcttctattatcaagaaggccaaccaaattgcttacaatgcatgcatttaaggtgggaaatcctttcttactttgtgcattgactgactagattcagacatttcatcgtttgcattagcagtctgatttgtgtttctttgtttataattttcatttgatattaattattgggttcatcttttgcacagcttgataattttctaaattattcttttatcttgcagtttggggtgc

SEQ ID NO: 71131 - DNA, 970 bp, Prunus persica
  Intron number 1 from transcript ppa014106m (locus ppa01410 6m.g) derived from phytozome v7.0 (chr-ID scaffold_5; pos 7730770 to 7731739)
tgaaaggtaaattccatttctcttttcctttgcctgtacttttctcaattattttctccccttataattctttatttaattaatggacgaaattaaagtagaagcaagagggatattattgttcatcttgtaaaaccagaaaccacccacataaattcatatataatcatgaaatatctatcattttgttcaataatttgtgactgaaattttagtcaatgactagaaatgatattaaaatgacattataaattctattaatttgatctggtcataacaaacaaagaaaagtgttgcactagtctacggagaataatctaatctaaaagaagattccaaactggacaacttttattatattgacagaaaaaacatgctccatttcccacttgttacgtattcctttggcttttatgtgtttactttgtctttgattcataaaaaaacactacttgggaactttaatttgtattcaatatttgaagcctctgtcaagttgattaaatatatatgacccaagacttgtgccggctagtcaaccaaagaacataaggaagcttcccttcttgttaaattttatagagacgggccaacggctcgttactagtaataccgatattgtttctaacttaacaatttataaagcctagtatgtgtggagttttatcacaaaaagcctaggcaatattagtagtgtatctattcattatatcttgtattttatttagtcaaatttccgatgtaggacttatattcttcaacacttctagtaacttttgaccaaatcaatgtcatatattaccgtcttctcccacttaaatttatgtctacaaaatgatgatgaaattgttaaccatcaaggtgtaagaaaaagccctgctttttttggttttaaaaaaaaaaaaaagccctggtattttacaaagaaatgatttctaatacgtacttctggtttgatgtgtgcagtggt

SEQ ID NO: 71132 - DNA, 764 bp, Prunus persica
  Intron number 1 from transcript ppa002302m (locus ppa00230 2m.g) derived from phytozome v7.0 (chr-ID scaffold_6; pos 12838507 to 12839270)
acgatgtaagccctttctctcattttatagcacaatgtgtataattcagtgcattggttgaatgctttccactttatgtttgatgttgatggtaattgccaagtaatctttgttttccatatgattttagcttattgatttgatcaaatggggataagcttttgtacatctcttttgtcgaccaaatactaatttaatcaactaaattgtgggtgttgtgcccggtataagtgttacttttttaaaaaacatattgcataaagtttgatgcctaacctgttgatgtctctaatcagaaagaaagtcgctgttcatgaaattttattttcttcaaaccatttatttaaccatttacatttatgaaagttccattctctattatggttgctttaccaggttggggaatgtgtgcctgtatgaccagttttgatacttttgatctcacaatttttttgtttaaaagaaacaaaactttatttaataatacaatgtttctaataaaaaataaaaataaagtcgagaaatgtaactaacaaaacaagtattatctatcaatgaacaagaagtccacttacaaaatgagaaaataacaaaataagctatcccatccttttgaaatcactcagttacatctcattctattttgatcttggaatttagataactttttattggctttaattacttaaatctcataaagtttaccattaggtgttggatctttctcatataatttatttcctgattcatattcttatgacaga

SEQ ID NO: 71133 - DNA, 924 bp, Prunus persica
  Intron number 1 from transcript ppa000372m (locus ppa00037 2m.g) derived from phytozome v7.0 (chr-ID scaffold_6; pos 9989567 to 9990490)
cgtctagaaaggccaggtaaagtccattcaccctacagcaactacttctcactatgacagttttctcaacaaagttcttcatctttgaagatgttgttcatgtttcaaaagtaattgaggatcttggtggttcattaaatttgaatcaaaaggagcatttgatcatgcaaatcgcggtaccggttttttaacggtacaattttagtaaatcatctccattgatactttgaacacctgactttaaagttaagttagagataacaacacacgagagagagagagagacagagagacagagagagagagatgttcgaatcccccctcccccctcccccctcccccaatctcactttatccacaaaaaaaaaaatatatatattcacaatcaaacttaattatattgaagctaatctcatgggttttgctagattgatgaacttctagggatttagggttggaatatggctgctggtgtcggtggttttgttccagacgtgaggagtttggggtgcagttgattatgtagataattacagcagagaatacgaagtctcctaacaactctcaaagtctaaagaagttagagcgtaagtaaaacacctagacaatacaaagtctcctatctaaagaagttagagcataagtaaaacacctaaataatacaaagtctcctaacaactcccaaagtctatcataatataaaaaataaacctgcagcacaaaagaggtttaagcctcgttcaaatatagtacattttgtggcaaagcgtccgccttacgcttttcgtgtaaacttctaaacaaatgcgccttgttgcaatggtaagattgtagtcgatgtaatcttgtcttaatggagcactccctagaatttgcgtgacatatattaacaacatgcttttttctaccagggacagagcaaaa

SEQ ID NO: 71134 - DNA, 793 bp, Prunus persica
  Intron number 1 from transcript ppa003772m (locus ppa00377 2m.g) derived from phytozome v7.0 (chr-ID scaffold_6; pos 25058000 to 25058792)
aggtatgcttattagcttatgttagccttttgttattgtactttctttgagggtttagtggatgtctgcatgttgtaggtgcattaaggtttggggttaggagtttgtgaattaagtttagattgcaaacagcttactatgctgagattgtggtgaaagtggataagtgttgaactaatgagattgatgttcattgagaaatatgtcatgaaattgaataatcagcaatgaagagttgcagcaaactaattgaaacttcttaggtttttttttataaaaattatcggacccatttaatttgaaggagtggaaattattcagctccgaatgcctccacctctgtgttttgtgttcttccttgtttcatatgtgatggacatgtttttataaccttgcgcccataatagataaaacattgtctacttccttttgaaaatgtattgaactagaaaatgttcaagcaccgcttgttaggtacttgtttgagctagtttaccagccaaactcaggatcaaattctaagtttaattaggaaaataaagcttgcacaagagtagcatctttgattgtttgagtggtattgaggcattcgtgattatgatcaagaacatttgtggtccgttgcattttttaagaggctgtgactgcctataaatccgtgtgtgtataaagagagagggagaacccctcttaaaagaattgattagcttaaagcataatgtagagaacgaacagcataatactttcaatgcatgaagttatttaatatattcctcatggcgaatgattgcag

SEQ ID NO: 71135 - DNA, 438 bp, Prunus persica
  Intron number 1 from transcript ppa021128m (locus ppa02112 8m.g) derived from phytozome v7.0 (chr-ID scaffold_4; pos 2692352 to 2692789)
cacggtatgtagcttacacagccttagacactgcctccaactctgatctgagaattggttcctcaaatcacaaaattgtaaggtttaaaacctgaggaaaatgaaacttacattcttatgtttctcttaatcttttagaacaagtcacattgattaatctcccatttcactagtcttctttcattgcagacctagtcaaggatgataatacggcgttttcttttgccacacaatcacaatcacaaattttacctagcatgtcatatataaacaagctatgtgggaaaggttctgccatctactttacacaatcaaagtttcaaaacccgatgtcttttcctttcaccacagctaatacagtccatagactttggatcttgtttcctgtgctcattattctctcctatggttatggacttggagcgctaaatagcagcg

SEQ ID NO: 71136 - DNA, 548 bp, Prunus persica
  Intron number 1 from transcript ppa013670m (locus ppa01367 0m.g) derived from phytozome v7.0 (chr-ID scaffold_3; pos 16060776 to 16061323 reverse strand)
agcaatttggaaccacccagccggcccaaaaactagtttgtttacttctctagttaattaattctgtttctcttactctacatgttttgaaatgtttgtgttgatcatttagccatattcttgttcttcatttctcaatgatgaattgctgatatcaaagtttgaaagcttaatcattatccgagtttagttcattttttagtaaataccatactaatcagctagatggtgcttaattaccatgcatgatgcatcaaagttattgagattcaagaacatgattgagattattggtttctaagtcagaaactagtttataagagaaagaaaaccctcatcagtttttaaacccaggcctcagatttgatttaggtacaagcttaggcctcagatttttgtggctaaaaccagaactttcccaatagatcataggatatatgaacacttgttgtgataagaaattgtaaaagaacatcagagccactcatatattaaaggtttattatgtgttttgattttgcagttcatttttgggccccaacttttaa

SEQ ID NO: 71137 - DNA, 982 bp, Prunus persica
  Intron number 1 from transcript ppa026193m (locus ppa02619 3m.g) derived from phytozome v7.0 (chr-ID scaffold_3; pos 978001 to 978982 reverse strand)
tatcagcagagacacttccgggactcgttgaaaaggtaagggcctcgcaattcataaaataataataatggaagtgaatgtaatttgtttatgttataataaacaagtaattggtacttaggattgctttttcaacttttttgagttcagttcttgtttcacgaacgagtcattgaatttattggtttctttgatgtgaacaaggttgggaatcttgtgattatggtgaaccagttattggtatttgggacaatttgtgagaaacagtctagtggaagttatttattgggttattttatgtcaaacatttgattgggagaagggtgaagtaaatttctcatctgtggagcgtagtggaaaaataacatatttttgatatagtacgacaaaggaaggcaagacttgttggagttacttattgtcggaagtgatgacatatttttcagttttaatagcttatctatggcaatgccctcttatccacactcaatattacaaatcctgtactataaaaattatgtattatttttccctggaaatctttttgatatgacccaaaattctttgaagtttgtatgaggttctgcattattaacatcattgtgcattcttcatcatgttctgacatggagaaagctcactggaaagtatgagtaaaatgacttccactagactgtttctcacaaattgtcccaaataccaggctgcatacatagatgatattacagaatgggaaagtatgcagcctgattattttatagtacataaacctttgaaatgacttcgtgagtttataatttcgtaatcaaggactcaagatgaattaggaccctataactgtaaaagtggaaatcttatgacatggacaagacccaagaatttggtattgattctctaatgtcatatgaatgcagaaatgaaattattcttcagatctgttgcagaattgtttcttattttgcatttggcttataggttaagt

SEQ ID NO: 71138 - DNA, 893 bp, Prunus persica
  Intron number 1 from transcript ppa003673m (locus ppa00367 3m.g) derived from phytozome v7.0 (chr-ID scaffold_2; pos 18919288 to 18920180)
gaagcgtagaagagaggacatcaagaaggaaaacagtacgttttcttcttttcgtgctttttaattgtgtgggttgtttggttatcgatgatattcgagaaagtatgaacattttggggttttagggtttcgtgttgggcgttactttacagctgttttgtgctgagaaatggaagaattgaaatttggtacttgttgagggcgaccataggattcatttttggagatattgattatggccgaataattgtgtgcttaaactaatgggagagctttataggacgtttttcactttcttcaaatcaatttcagatgcagccaaatggaaaacttttgattgagcttattatttgaggagtagtgcacatctatgtccgtttctttactctctttgtttgtttgggtgctgagaaaattgtggaaatggaagctacgggcaatttaatttcatataaattttgattctacttcctaagttgtctgcctcatatgactgcccaaagacttactgggtttgaccttgaacctattggaaaccaaagtaactagaaagtatgggattttaattctcacttttttaattcatttgttcaactcttttttggcctgcatttattcaacttggtgtttccctgtattattgggtaaaagacacggaagcttctaatacactgaattatggacaagacaaaggcataattgccgtttctcagttggtttattttccctttggttaattcagtttgggatttctgttatctgggtactgttcattcacatgcttgccttttctttccttcaatttcgtgcattttgattatgctatgatgatttttttttgggtaatgctggttaatattttagaattttttttcagttccggatccctctga

SEQ ID NO: 71139 - DNA, 593 bp, Prunus persica
  Intron number 1 from transcript ppa002923m (locus ppa00292 3m.g) derived from phytozome v7.0 (chr-ID scaffold_7; pos 19970671 to 19971263)
tttttggctcctccttgcatttgtagccatcatctgtcagttcttgtttctctctcactttcttataccacaagctgtatttatgatctctctgttctggcttttcacgaagtttttttttttgggggtctgcttttcacaatctatttgcttccaattttctttcagcagctatataaaatgcttaaagaacccacttatttttcttgcttggttaaaatgtgtgtgctggctgctatgcttttagagacagtacctagctgctaggggcgatctcagttccatggacttacccgaattaccaatctcacaactgaacttgaagagcaaaaattttcataatctaaatcaaattttcatacttttccactatcagtttacatattatttgcccctgaagtttttctttgaatatagtgcctgctttctatatctggaatgccaaaccaggacattgacaataaaagtcaaatgctttttaattattgacaatacttttgaaagttaaatgctttggattggatgctcactgacactttttgtatttttcattcattttctagttgtaggctttatatttggggggcacacaa

SEQ ID NO: 71140 - DNA, 697 bp, Prunus persica
  Intron number 1 from transcript ppa008403m (locus ppa00840 3m.g) derived from phytozome v7.0 (chr-ID scaffold_6; pos 1707551 to 1708247)
tggtcaaaactcaattacagtgtcaggtaaatctttttgttagttcaatttggcacttgactgtttaagcgttgcaaaattttggaccaaattgaagagccaaagaagataattaatagatactagtgcaattgataaccgttagtttccaagtacttgactgtttaaggtaatgagagcagaaaagaagttatcttttattcaaatggaaatattttgaaaagcgttttctactaaaagcaaaaacattatctcccatgtcctactcaattttcctgagtatgttttggacatcatattaagaataggacttcacattttctgtttaacatgcactttcagttttgtgtgtgtatttcaagtggaagccgagaaagttgttctcctcgctatccggtgctccgtttatgtgtgccatttggacgtcggagaactaaatcaccttcatttttttgaatacaattttcctatcaaaataatttgttaagatttgaaacaaatgatggatcaattataggcattgccgcatgctgcctactttacctaaagttttagtggaattactaagccctggatgatttaagtaaagatttgtgacagctatatgactgcaacctgtgtctgaaatacttctggttttttttcattgattggttgtacagggtatttgcggttgtgacagatttaaaagtggttc

SEQ ID NO: 71141 - DNA, 786 bp, Prunus persica
  Intron number 2 from transcript ppa004447m (locus ppa00444 7m.g) derived from phytozome v7.0 (chr-ID scaffold_5; pos 18053560 to 18054345 reverse strand)
ggccattcttgcgactgcggccgtgttttctcaaggtttttattcatttcttcgatcgtctttcaattaatatataattgtacacatatcaaggttttttattttttatttatacatatatatatatatatatatatgagatgagatatatcatgattaatttcatatggcaaattcaaaaacgcatcatcatatctattcaaattgaattgatcaccttgccttccaaagctctttttgttaattgggtttgactttgaaaaagtaaagaaacacaaaaaaggtttttggtcctctttgactgaaggaacttgacggaaccttgatcaagttgttaactactgctttcgtttcaacacatttcccgaagatgaacatcatctattctatgctatgtggagagatgttttgcttcttcttttttgtttttttcttgttttttttttgcatcccaagacgtaaaacggctactactgctgacccccaagtattattatatgtaaatgccattgtcaaatatttccgtgggtgcatgataatatcgagtagcttttaaggtgtgattaattaacatgttttcattcttaaattttaatgaacatataaatatcctcatatctcttccttagctctctatcatccccatataactgtatatatatgttaaaagctgctaattaaatattaactacaatatctttattagaattacaaatttaattaatgaatacttcgtttaaatttatttttactttcatagggttgagagtttcatagaacaccaag

SEQ ID NO: 71142 - DNA, 544 bp, Prunus persica
  Intron number 2 from transcript ppa003153m (locus ppa00315 3m.g) derived from phytozome v7.0 (chr-ID scaffold_3; pos 12715388 to 12715931 reverse strand)
cgttcaaggaatccactgtggcaaagttggttgatgtgagttttgcctgtgtttggtttatagattcgattttgaatttttgtctgaaaaaaagaaaaagaataaatggctttaataaagcatcaaactttggagatattgaagaaaagaagggtctttttatcgtatcctggtgtttatctgcttattctgtgtattgaattttacatgcatgtgggttttggatacaatgtgagggtagcttcacatgatctggttcatactctgttctgatttctaaacccccctttttttctcatatggatattatggaagctatgtttgagattagatgcacgtcatgtctcatgatggatatggttacaccattgggtctgtaggcatatgacttcacctttaatggctgataatcagtgatttatatcttcctttttgttttgtttatttctggttggtggaatttataaatatgtttaacagggtcctaatttctaatgactatattatttgcctaagcagatccctctttctcatatatctgaaa

SEQ ID NO: 71143 - DNA, 707 bp, Prunus persica
  Intron number 1 from transcript ppa005990m (locus ppa00599 0m.g) derived from phytozome v7.0 (chr-ID scaffold_5; pos 14289276 to 14289982)
ttcctcaggccccaaaggtattatctttgtcccgaaaattttatgcctgattcaattttgttgtggtttttgtttggcactgttcagggatcgctcgatttttgtggttgatgctattacagtcggtgattaaacattatctttattttatgcatccagatttgaaattaaagtttctgaatttattggaagatttttagaatctcagcctttcagatcgcagcatggataagtttattgaatatacatgaaaaaaaactttgaatgattgatcagaacgtgttattgccaagaaaactatcaagttaccagtagcccttttgttctatctcgtttgaatgattaatttacatacaactagctcgatttattcattattttaatgctctaatatttgaactttttatttgaaagcttcccgagaaggatgtttatagttgtaatattgttgtttgtaatgtttggtgatacctttgttgttgatgtttaggtttacctctcttatgtgtgctttaatgcatatctgtgtgtagaatttgctctttcttgtttctggtaatttattaggttttggttatgatttatgagattctgacgtaacccaaggggtatggcttggctgggggtacggtattggggatggcagaatttgacttaatttgttgggtggtgcttgaatggatggctgtgtgtaggctcaggtagga

SEQ ID NO: 71144 - DNA, 272 bp, Prunus persica
  Intron number 3 from transcript ppa026153m (locus ppa02615 3m.g) derived from phytozome v7.0 (chr-ID scaffold_8; pos 16119464 to 16119735)
taatctagtttggcctggaaaagattcatctttaggtgagtttttgagtcttctgagttgggagttttcttatcagtacagtatattttgaaataattgattatttgtttcggctattgcaaaatcactccttcaaaagcataatatgttatggttgtttttttcccttttggtctattttaatcagacataaaaaatgtagttgcttcgtttcaatgtcatcaatttttctttcaggggttgattgtgtaggcacggttcctgcatctctt

SEQ ID NO: 71145 - DNA, 326 bp, Prunus persica
  Intron number 4 from transcript ppa026153m (locus ppa02615 3m.g) derived from phytozome v7.0 (chr-ID scaffold_8; pos 16119785 to 16120110)
caggcactgctggtggctttaaggtattttgtttttctaccaactttgctcttcttcttataataaaatttcatttctgtccctttgtgagatgttaataggagaatctgcattactgaaaaattaggatcctcttcttagaatggatattgaaaagattgaagattcaaatagtgaattgtatataaatgaaacaaatgcacaaggggacttgcacacaaaacatttatgtataaagtatgttgagatgtaaagatattgtgtgaagcatctggcattaattattatgtatgactgattaatggatgttttcaggccaaaggagc

SEQ ID NO: 71146 - DNA, 1027 bp, Prunus persica
  Intron number 1 from transcript ppa007055m (locus ppa00705 5m.g) derived from phytozome v7.0 (chr-ID scaffold_3; pos 634551 to 635577)
gtttagtttctgaagagattctctctttgtctcaggtatgtgtttttcaactgtctacatgtgcttgtttgtatattaatctgcaattttgtgtgcctttttatttttttattttttatagttttaataaatcctgtttggttgctatgcagttgtggaaactgaaaatgtgtggaaattgaatgttagttgttgatattggttttagttttttatgtgtaaaacttttaaacatttgtgatcaaaggaaaagtaaggaatttgacatgtattggaaccgttttattggttttgctgaaaaatcagcaatctttatgaagaaagaaacctgtcaagtacacttaaattttgagataaatccttgatattccgagaaatagacccagcaatttatatcagcaagaaggtgtaactgaaaagaaaaaaacatctgcaaggactagttaaagtgctgcaagtgcaacaatatctgaacactctcaggttcctcccaaccataggtgatacagcagattggcccaaaacagcaagacagcctagtggagtgataacatttcacaaagtgcatttagccaattcacaatctatgattgagactgagaattcaacttaaacccttcaattgcattcctccaaaacctactatcaaaactacattcagaaagtaggtgagctcgggagaccatagaacatttccttcatccctaaattgccatcctttgtcttgtagttaaatgatgtttgatatctaactgagcttcaaacgatggttgtgaatagaatcttgatcagaaggtagtctttaacaggtctattatttatagctttggtgtggaattataaatatatggaaactttaagaatggagaattaggtcactccaaattcgttttgcagtattaacatgtctttttggtacatagttgtttgtttgctctcatttttctaattgcatctgatcatattctgtcttatgtttacttgttttgaagggtaatttaaatcagtctgatagtagtgagaagaa

SEQ ID NO: 71147 - DNA, 725 bp, Prunus persica
  Intron number 2 from transcript ppa017075m (locus ppa01707 5m.g) derived from phytozome v7.0 (chr-ID scaffold_1; pos 42507757 to 42508481)
ctctcttttctatctggagcagacctcttcaaagggctagcatgatctactttaaaactcgttgtttatgttttttttctatcattcagtcatggaattgagcaatctgtgaagcatgtttgatttgattttcccttccttttctggctaagatattaatcatggtcggttgtggagagcattcattcttttggtatgcttgaaatcatgtttgtttgtttttttgtaagaagactatcaaccttgcagtgatgcttctatgctgtctgcaggtaaagttctgttgtgaaagtcaatatgattcatatatgttgatccccttaaaatttttacggttgaagataaaagtacatatttactgtgaatctgaaattgatctcaccaagattttatagttagatgtaaggagaagttcaaacatccctcccaaaaccaacacccaatcttatgtttgtgaacattatgcaaagtggcaaactatcataaaaagttcgatatgagtttctaaggtgaattgttctatagttttttctgtcagttaattatattatattatattggtccatactggcattttattttaataccatattgcttttattctccttgtaaatcatttatttggcttcttttgaatttataccagattatgttgtgatagtattacacttcttgaacttgtggtttcagagaggcaaaacacagaagtagaaagatattctgac

SEQ ID NO: 71148 - DNA, 297 bp, Prunus persica
  Intron number 3 from transcript ppa005467m (locus ppa00546 7m.g) derived from phytozome v7.0 (chr-ID scaffold_6; pos 2695510 to 2695806 reverse strand)
aggtaactaccccttagtgatgaatgctgtgtttttcattttgtttcatccctttgatataagaacatcaatggttttgtatgttgtgggaatttgaagttatgcttttccttttttgtattttttaattttttattagtgaataagattgacttttactaagattcttttcatattttgatgcttactcctcttctttccaactgatttcaatttggctaagaatctgtattaacttttgctttctattttctcaatttagagctattcagaggtcaaactgctatcacaaagaag

SEQ ID NO: 71149 - DNA, 636 bp, Prunus persica
  Intron number 1 from transcript ppa010756m (locus ppa01075 6m.g) derived from phytozome v7.0 (chr-ID scaffold_1; pos 35947741 to 35948376 reverse strand)
tcgtcgccgcttccaccactgtcaagctccctcaggcacgtttctttcttcttcttttgctttctttgtgtcagtgtttatttgttaaagcaatcatctttctgttttcattttgtaatctttgttgaaattaattgtttctataagaacagaaggtgactcatgacagatctctaacatgggtgccgtcgattttgtttagttattgtttgaattctcgaggctgctggcttgcatgatggaaattttagtacagggtttgaaattgttacattcagaactaaacccagaattcatttggccaggaaagaatccagatacttatggtcaatgaattgtgcgtgtccaaagcttgcagttttaggactccctttttgaagggccccagtttaaacttgaaaactgatagtttaaaacctgcatatgatatgtccttcaaattttatagatagcaagttgtgggcatcaatctcgttggaaggaagagaatcttcctctttgactttgaagtgattaacgaattgtaatacttagctaacgccatgaaacaagttgcaccatgtaattgtataatcgtttttattttagtttgacattgtacatgatatgatgcttttgttcttttgtttgcagata

SEQ ID NO: 71150 - DNA, 477 bp, Prunus persica
  Intron number 1 from transcript ppa019499m (locus ppa01949 9m.g) derived from phytozome v7.0 (chr-ID scaffold_2; pos 20084862 to 20085338 reverse strand)
gaaagctggttagtttaagccctcttgcccctgctactaattaattatcgatcctctttacttttctatattttcttcatttatttttaatcttttgactaataattattattattatttaagtttgattaatatattggcacatgcattactcataattatattaaaattagtataatggaaaaaccaaaaaactactcgggaatgatcaaacttctgtgtaagaggacagactcactccttagtccttaaaatgacataatattaaactcagtctcgaaatttttgctagggaagtaactattaaaattatacatgttccacccaataatagaggaaaggccctatataattcaacttttattaagttccccaaatcaaagaaacaaaccacatagtttgtgctaattataatacaattagggtatctaactccaactttctacacataataaattcacaggtctcaactgaaag

SEQ ID NO: 71151 - DNA, 283 bp, Prunus persica
  Intron number 1 from transcript ppa010608m (locus ppa00966 5m.g) derived from phytozome v7.0 (chr-ID scaffold_8; pos 9638059 to 9638341)
tcattttctgggaaagctaggagattggtggatcggtaaggagaattttgagttttccaatttcataattctgtataacttatgtggtttttggattgtcatggggtcctttggttgttttggatgatgggtctgttttaaattgatcagtaattatggttttcatcttgtattttgtggaatttccagaaaagttgaaatttttatcagctgagatttctttttgaaggattaagtttcttttcctttttctgttttctgttttggcttgcagaagaggtag

SEQ ID NO: 71152 - DNA, 1012 bp, Prunus persica
  Intron number 1 from transcript ppa022942m (locus ppa02294 2m.g) derived from phytozome v7.0 (chr-ID scaffold_2; pos 24694490 to 24695501)
agtttggcagcactgagtatacatatatacatatttctctgttttttttatataattattaattcccttgttcttgatttatttaacaagttatgtttcatttgattcttaaaacatcgtaaataagtttgtatgtatataagaattcttagtttatatatgattatttggtgaacctaaatgtttgttttcgtttacaataaattttgtttcctccgatggggggagactttgtattgagagcctacgctactccgatgggtcttgactggaggtactgaaggtcgtcatcctagctagctagggtttctttctcctctcagtttattctttgggattttatatatctagggtttctttctttttatctacctcagtacctgctttgattatgtctgggctgagagagagagagagagagagaattcaagagtcgagatttattggtttttgccaaggaggtagaatgcatgacctgtcggttgtggctcgacctatcacatcatttttttctgatatggaaaatttaggtagagttctgttacttattactagcttagctttcattttgcggactgcagcacgcacttaggtagtttaaatattcttcattgtttgcttttcttttggtcttaagtagctttgtggatcctctttatttaataataataataaagagtatctttataagctcctcttcatgtttccttgttcaattaagtttgctggagtaatcaagagctcttcctattcagctcatatatataatacatatagattgattactgtatctcaagtatatccagcctcatgattgttctcaatgtcaaataaattcttcaacaaaaaaagccaagaaagttagcatatcccagttagcatatccagtcatgtttttacaaatgcttttcatgattactgatatatatatgtatatatgcaactctctcagtcataactcagttcattattctttgattagcgtgaacaaaattcttgagcggtaccgtca

SEQ ID NO: 71153 - DNA, 840 bp, Prunus persica
  Intron number 1 from transcript ppa008703m (locus ppa00870 3m.g) derived from phytozome v7.0 (chr-ID scaffold_8; pos 19414477 to 19415316 reverse strand)
ttacaaggcgtccatataatcggtaagtttcttataaaacgaaagggtatggaaaattgtgtgcctcagtgttcgaatattcgtagttttcggttcccaattttgaattttctcactccttctatataaaattgcctcgcgtttccgtgaaaattcgaggctcttttcatttctcctctgttttctgagatatgggtcattggaattgagattgatttcgtccgtattttgtgtagaaattgaagtattcaagttttttttttttttttttttcaaatttaagagttccccaccatgtgtttgctgaaatgattttatacaaatagaacctgcatataacgcgagagagagagagagagagagagtagctggcttgacttttaaatttaattctggtacttagtttgatctttgtattttgcttcctgggagctgcgtttgttgcttgtctgttgccttgccacattttttgtgatttgtatgctgttcagttttactgattacttctagctgaatttgagtgctaaggaagaacttagttgtaaggtttgggtttccatttcctttgttaggtttcatttaatttaactttgcaactatggttctctaaatagtaaatctttatatcagtttttttgaacgaggagcataagatcagtatggtgcgtgggggatgtttgtctatgtgttataagattggtttcctgtgaaaatgtttcgaagtacgactctgttaatgggggttgcgcatattgctcagagctttcattttcatgattatgctttttgcattgtaatttttggataatgatggttttcttcatggttatggaccatcag

SEQ ID NO: 71154 - DNA, 976 bp, Prunus persica
  Intron number 1 from transcript ppb020043m (locus ppb02004 3m.g) derived from phytozome v7.0 (chr-ID scaffold_2; pos 25456183 to 25457158 reverse strand)
agtcaaaccaaactgaaaactacgtgaatagaaacgtacatcaattggtaatctagtcaaatatatttatatttaaagggacatcgccatgtacgaagtagtgatgacctttaattacggataatcaaccaatttaacaaataaaatttcacataaaactcatctgttcatgtaaaaaaatattgataaattgataacccatcggacttggccatcttattacaccgtcaatcttcaactgccctgggataatattgaaggcaagttgtctgttagtcaactatctgttaatgcagaagcgagattccccacagacaaccctaaaccctaacattaatttagaatttagtcaaatttggtgactgataaataaataatatattgggatattctcaagtgggggagaagagaatacagctaaaatgaattaaggcatgattattatactccaaaatcctgaagttcgagagttgaagctatctgtataatatgttgataaactgtcccagcagcatctataaaaaccttaatgatagcgtaatggaaaatcctcatctcattgtagtagccagtttctgcaagaacatatcatcttttgatacaacaatagaatacatattcaaaatatattataaataagcaataaataacagcattaagaagaaacaagcaaacctgaaaccccgcggctacacttttttaaaaataaaaaataaaaaatagtatagccgaccggctataccttttttaaaaagatagccgttcggctgtgctttatttacaagtatagccgcgcggctagaattattttgacacgtggacgccttatcgctaggcgggtcctctttttgcaaatagtatagccgcgcggctatactccgtttattagatttttttttcaaatactatagtcgtgcggatatactcgggttttattttttttaaacagtatagccgcgcggctatacgcgggtgt

SEQ ID NO: 71155 - DNA, 635 bp, Prunus persica
  Intron number 1 from transcript ppa012157m (locus ppa01216 2m.g) derived from phytozome v7.0 (chr-ID scaffold_4; pos 16485446 to 16486080)
gccttgctctcaattcttcgttcgtatgggctttttctttcttggtttatgtatttagaaaatattttttcattcaattttgtttgatggaattgtgggtaatcataaggaattgaaaggggttttgttttgtgtgtgtgtgtgggtatgatagaattgttggtttttataaattgaaatggagtttttagttttgtggcaattaaagggagcttttgtttctgggtaccctcaattttatcttcaatggtaaacataattgggacatgatggaatgctaaatgctttttatatccgtcgagccagagtttgcatccgaaacattcagtcttctacagaagaatgaaagaaacttggtttcattctgctcaatttatgaattgtcttaattgattatggagaattgactccgggaagggcatgaaacgacatctgaatatgtacttttgaatacgtaagatgaatgctgcttgcttattttatcatgcgtcttgcagattttaaatgtaatgtatctttcaatctacaaaagcagattgctatttaatagaccttttagctcttaatgagtcaatcttttggttacatgtttcttggctgcagggagtggatctacagaaacaagggaggtggat

SEQ ID NO: 71156 - DNA, 739 bp, Prunus persica
  Intron number 3 from transcript ppa004980m (locus ppa00498 0m.g) derived from phytozome v7.0 (chr-ID scaffold_1; pos 45435282 to 45436020 reverse strand)
gtgtaagtagcggctccaatctgcaacataatgacttcccctttttgacttattgtgtgggagactttggaaaagcccaaaggagagagaaaatttttaaaagaagcaaaaatggacaaaattacccttatttattttttgatttcctaagaaattctttacatttgcatgtctttggtttgaaagttgagaggttattttgtcttttttaaaaaagctttggctttttccaaaagtgaaagtttttttatgggtaaaacctaaatttactttgtgttttcatgatagggaaattctgtttctatattaaaaattttcgtgtaaaaactagattccctgtatttgtttattgtatttgttcactaaacgatgtgtcaataacatgtttttacatcaaattacgccttaatacacgtatttatttcataatttactcttcaaatgatgcattactatacatatctggatcttatttattaataataaatacatataacagtaatatatttgttcactaaatgacgtatcagtacatatatatgttttgtaagttaactcgttaaatgatgtgtcaatataagaaatatgataaatattcttttgtatttgaataatacaaccactttcagtgtgtgtttctttattattattatttgtttttgttgggtgaatttatagctttaacgtttttgtaaactttcatgcagggcggtgaagaggtcgaattgttttcataaac

SEQ ID NO: 71157 - DNA, 338 bp, Prunus persica
  Intron number 3 from transcript ppa012460m (locus ppa01205 0m.g) derived from phytozome v7.0 (chr-ID scaffold_2; pos 24946310 to 24946647 reverse strand)
agggtatgctggtttctatcatattttcctttctatggaggcctgtcaattgtatatgcatgaacgttaatgtgtttgtcttcttttccttaaaaacaaagtgtcactggtgttatgtataaagtggtcttgagtttcaatgattgtttcttttcatatgctaatgtttgatttgttggttttcaatcctttgtgctggttttaatactcgttttctgaaaatatatatatgtatcttaaatgtggaaacttatcattttgtgtggcaactttaatcttggcaggatctctgtctcctatacggggtagcttcaatgattgtgttggtgatgcagttc

SEQ ID NO: 71158 - DNA, 975 bp, Prunus persica
  Intron number 1 from transcript ppa004868m (locus ppa00486 8m.g) derived from phytozome v7.0 (chr-ID scaffold_6; pos 15867490 to 15868464)
ctgggaggtaggtttttgttttgactctttctctctctctctctgtaattttgtgaatttatgtatggaatgcctacttggttggttggtttcttattaaaagaaaaactagaaatttgagttatcttataaaagaaaactatgagttactatcttctggccttgtatgtaaattgtatggtgatgccatcatttctgcaatttagtaaatttataatgtattatagtgatgggttataacctttaaattactgcaatttatatatacagatgcacactatatatatattactgtttgtgtgctatgttgacacttcagaaatcgtgccctactaattagtgcaagttttcttacatttaagtgttttgcaaggttgcgttttatataactgaatattttaatatgacctaataattgattctcatggaatctatgttacatgctgtcacctgttcataggtttataaaggctggtattcttttaagcataaccataattttaaatttttactttcgaaatatgttatgtatctgaccagcaaggacatcagagttcagttggccttctttcttgttttctggtcaaataatgagaatgtggaaagtgttccgatgctaaagagcaatctgggggaggataggcaccattttcaactcctccattcacttaggccatatagttttctttacttttgtaaaatttgtacctgttccacatataaactcgtcattaatatattccttttcatatggatatcttactattaatttcattatatattttttttattgtgacttgctatttgaacctatttgtccatatcatgaattgtaaactcctttcggtccttttaattatcgatttctatttaatccatttcattttcttgtgtttttaataataaatgtcttttgttttcttggcctaaaccctaccagatccgatagggaatttttgtatcagattttgggtg

SEQ ID NO: 71159 - DNA, 986 bp, Prunus persica
  Intron number 1 from transcript ppa011847m (locus ppa01184 7m.g) derived from phytozome v7.0 (chr-ID scaffold_7; pos 15586081 to 15587066)
tggatactcttgagtatacaagtggggaaacaaacgtaagcataaattgtgaattaattatgatggcgtgctttgtctgtcaaccaaactatacaagtcagctcctcctcctcctcctcctcctcctcctcctcctgtattatcataatcataattaaatatcatcttataaattgaccgagttcatcttcgatcaagtagaaggtttcggagaaaaatatgtatagcactcttaaaacaaaaagaaaaaggatgatgattttaaatttgcgtgagcaaccttgctacccactcctatcatgaaagtgaaataaaactaatgcaatatatgaacattaaaatgaaactaaactaaactgattcatatgttaatatcataaactaatgcaccaatttaagcatcccctttccatcgtgtgtaccaagtcatccaaattgtgcctccaaccccaccctcaagctaaaggcacccagcttgcaatcacacaatatattgtgagaaagtcaaagtacacatatatcctctcagttttagtcgtgaggctattagagtgataattaccagcacaacgagttaacacaaaagaccatttgtgttagggattggggattacgttcatatcctctaagcataaccatttaacttcttgtcttggctccatcacaaaacataaattggtttttgcaatgtcttccctttactcacgtcagaacattttcccgcgaagcaaacagaaaaatcaccgaaactctatttttttaattaattaaataaataaataaataagaagaaaacgagtgaaaaaggaaaggaacaggtcatgatgacgcggaccaaccaaagcaaagtctctactactactgggtcccacctcacctcaccttcccttcattccttccttcccatataaaccctcctcctcatcaaataaaccaaaaacgccaaacaagcgcataagcgctccccaaaagccccagcgcgcgag

SEQ ID NO: 71160 - DNA, 597 bp, Prunus persica
  Intron number 5 from transcript ppa008250m (locus ppa00825 0m.g) derived from phytozome v7.0 (chr-ID scaffold_5; pos 13924950 to 13925546 reverse strand)
tcaccgataaggaaaaggctgctgcccatttgaaggtttgcaacttatatttggtttcaactttgcttgcttaattatgttatgtgatatcttcataagctgtcatatcatagttttcgttgttgggattgccttattttgtttgagtttttaattcttggttttcagtctagcttcgatctatgcttctgggctttttgaaggattggaagtaatatgttgttaattttgcaactttgtggaatttgaaatgtggtatttttaacctacagaatgtgattggtaggttatatcagtgtcaagattttgtttgttaccgggtggttatggtggggatagcacgtagttcctcaagtttacgatgagcctaccgtgtttcctctcgagtattgaagttaggagttggtgcatgctagaaattggtttgtttactgatttatgattgctctcccaaacatgatttcggggattctcttatgtttatctgccgttttcttgggaaaatgtattgagatcatgtgtggttagttgccttagtgtattttctttgttctactatcagggtggagcgaagaaggttatcatctcagcccccag

SEQ ID NO: 71161 - DNA, 353 bp, Prunus persica
  Intron number 1 from transcript ppb012576m (locus ppb01257 6m.g) derived from phytozome v7.0 (chr-ID scaffold_2; pos 1555329 to 1555681)
ggctgacaagttggtgcgagaaaataacaaaaaaggattatcattgccggtattttgaattcattatcttctttttttcattgttgcaagtatttaattttaaagaaataaatatactgggaacatgtccttggtatccttggctacaaacaaggctaccaaatgagaaagaaaagttagtaatattaatgggcatatcattcaattaaaatttttttattgaattcgtttgttcttttgtttaaggaacaaatttgttgaaaagatttccaataaaatggttggggagtatttataatgtatttcatttttcttgaatatataggtttctcctattgaggcatactcatttc

SEQ ID NO: 71162 - DNA, 180 bp, Prunus persica
  Intron number 1 from transcript ppa012915m (locus ppa01291 5m.g) derived from phytozome v7.0 (chr-ID scaffold_2; pos 23359367 to 23359546)
atcatcatcaccttcgacgctccagtttctttagggtttctctctctctctctctctctctcctcgctttctcttctaaataatgttgcgagtttttgtttttttgtccgttcgtattttgattgttgagctacgtcgttttcagattcatcacagcagcagcagcagcagccaaacagc

SEQ ID NO: 71163 - DNA, 602 bp, Prunus persica
  Intron number 1 from transcript ppa005881m (locus ppa00588 1m.g) derived from phytozome v7.0 (chr-ID scaffold_6; pos 13949415 to 13950016)
agaggttgggtttgcataggtgaaggaattttggggtttgtaataagatcgctgttttttttttgttggtagatactagttgtcaaattttagctacgattcttctttgattgcattaattattttggtcttcttatttatccggatctcaatttgcattgcaatttttttttccttatttatttatccggattgtactacttggggttttatgaagtgggtgtaaattctggttgtgtgatctcattctggttgtattgtatctgggattgtggatttagagcaccaactatatttgactactcttattgtatgtatctagttggctgcttgatttgagtaatgaggtttctcctaacacttgctatttgtttcagttacccaacacttgtatcactaaatttatataatttttaacacaagacaattattgcataatttgttgggtttataatggtacaagtagtttctgggttttgcttgagttaaaataatgttcatgttggtctagattatccttggcaatcaaatgcgtatgagacacaagttttctgatgtgcatttcaggacccttctttgagagcccccacaactgcaagtgt

SEQ ID NO: 71164 - DNA, 474 bp, Prunus persica
  Intron number 2 from transcript ppa005881m (locus ppa00588 1m.g) derived from phytozome v7.0 (chr-ID scaffold_6; pos 13950204 to 13950677)
gctgaacaggtccctttcacattattcttagttgcagttcattctctctcttctccctatttttctttaatttttgtttttatatataattagacattacatgtgtgatctagttacggaagattcttttctattctgctttggctatgagttgttatttctcagttgctgtttcattaaaatatgaaaagattttgagatgttgtcttgcaaatagtttgcaggcctaattcctcttgttgattgcattcctaagatgatgtacttttaattggttgaaaattttgtacctgggaaagtttagaagggttcttgttttttctgttttctttttggtttctttttgtatgcatatcctgaacataatttaaaattttagcagaaaggagctaagaagttgacttagtaataaacgtctaatcgtatatgttttgctttttcatacttttacagattaaacgggaaatagcaaca

SEQ ID NO: 71165 - DNA, 601 bp, Prunus persica
  Intron number 2 from transcript ppa003353m (locus ppa00335 3m.g) derived from phytozome v7.0 (chr-ID scaffold_5; pos 16396433 to 16397033)
aagcagcttatcttgctgcgggctctgccatagaggtaattcgtgtgaggagtacacctccataaggtttctaataagtgcattgataacaatttatgcttgtttagctagaccacattttttgtctgttctttcttaaaaattaaaaaatgagcatctaagaaacatggtttgcatattttattttcattgccttgactaattaaaacatgcaaaaaatattacaggacttttgtgtcgtttaacttttgggcctgaattttgaatttgtttgaagggacaagtagaatttccttatactatgaaaacaaatacatgaaaatgttgatttctgcatttatatttgattctgtcttcttctgaacttctgggtaaaggattttttttcccctcatttggtttatgtattgtgtaaatatgaattcaacccatgatttgcaatttcagaatctgttacaaatgaagctacttccgcatgtttcatctaagtgtatgtttcctacaaatacacttatgtgttatacttcatattaatgtatcctaactatgggtgttcacttaaacaggtaactgaaagagttgccaaaggagaactggattc

SEQ ID NO: 71166 - DNA, 364 bp, Prunus persica
  Intron number 3 from transcript ppa011271m (locus ppa01128 7m.g) derived from phytozome v7.0 (chr-ID scaffold_7; pos 4318666 to 4319029)
gagaactctcatcttcaatccaatcgccttaccatgtgagaaaattttaaataattcttctgggccacgcctccgccctgtttggttgctgagaaagtaaaggggaaaaaaaaacgaagagacaatttgaagccaattttcttttatttgtgctcattttttactcgggttttattctatttttggttctattggataccaagtactagtaaataattccataccctttccccacccatcaaagacgggtttgataacaggaaagttcagttttaaaaggataaattttgtttttttttttttttggggtgaaaaggctaaaaaaattgtgggtctgtttggttacaggaattctgaggggacc

SEQ ID NO: 71167 - DNA, 473 bp, Prunus persica
  Intron number 1 from transcript ppa000226m (locus ppa00022 6m.g) derived from phytozome v7.0 (chr-ID scaffold_3; pos 4769962 to 4770434 reverse strand)
aggttcttgttgaagctcaagaatcgtatcgataggtaataagaaagctatgaaaacaaacaggtttactgtgttcttctcataaaaattcagtttagctatgaaaagaattattctttgtaggtttaggaacatagataagcccacatgctttatacctttatgtctttttgttttgcatttattgtttgagttcattttggtgtaagtgccttgccgacccaaaaaagaaaagataaaccaacatgagggaaagatgttccaattccagttacaacctcctaaaaaaatccaaatttacgatgaaattccggtgttggattctttagtggtggaaaaaagctgtgtgatcggcatttgcttttggaatttaaagtttgttttatgctttttaattgaactttctttaatgggttgctatttcttgaatattttcagagttggaattgatcttccaacaattgaagttcgat

SEQ ID NO: 71168 - DNA, 536 bp, Prunus persica
  Intron number 2 from transcript ppa003293m (locus ppa00329 3m.g) derived from phytozome v7.0 (chr-ID scaffold_2; pos 24239962 to 24240497)
catttgttttactcgttctatttctcaaggtgattttctacctcgttttgaaacttctgttgttacacaattgttagtttgatggatgcatgaactgaggtgaatacttaaccagggaatgagcattgaatattttgtgcagtgggtttattagtttactggtcctagtgcaaagctctttgtatgtgaggtactgtttttggtacaagttctagtgtttgcccatgttattgcatttactttcttttcgtgtgtcactttgatgaaggtaatgataagaaacaagttttctacatggtgtcttctagtggtggtcagtttgatttaagacaccagatgcaattagggttgaaatgcaatatccatggttactattcaaacaagcaaaaagaatgttggagctactaaactactccatttcctctgtttgccttggatgaaattgaaatttatatccgcaaggttggttagcttattctgatttctgtttctgatttgcagactatattctttgtggagttgtatccttctgaaac

SEQ ID NO: 71169 - DNA, 465 bp, Prunus persica
  Intron number 2 from transcript ppa022855m (locus ppa02285 5m.g) derived from phytozome v7.0 (chr-ID scaffold_1; pos 29278712 to 29279176)
gtaaacaagttgtcgaggacagcttctctggtacttttcaaatttctactgctactaccgccaaacccaaacggatcaacaatatcaaaacccccatatatcttttgaaaagggctcacatttcttcttttcctttcttttttctttaatttcttcttttcaatctttttcttttctttaaaaacggatgaaaagctgttctttgcttttaaagttcaattgacaaaatatatatttcaaatcaaaaaggttaacttaaatggggtatgaagaagattatggatttaaattactctactttttccgtcttaaaatgtgttcatgatgatttgggtaattaattaatttagatagggctgaggtagctggtaggggttagtttagtttagtttagtcttatcgaagttgcttttattgtctgggtttttagttgcaggctacagaaaaaagaaaagcggcgcaaaa

SEQ ID NO: 71170 - DNA, 1003 bp, Prunus persica
  Intron number 1 from transcript ppa019885m (locus ppa01988 5m.g) derived from phytozome v7.0 (chr-ID scaffold_8; pos 2069377 to 2070379 reverse strand)
aggaggtgggtgaaatttcagcttgaaactcgttttctctaccaagttgattcacagaggctgaagttcaagttttagccttactggttttgagttaaatatatgtgcagttgataatttatatgcgtgccagtttcatgtctgatatgcattatattgagcacctgatcaagtggtttacttcatcaaattattgatttgcaatttgagttcattatgtgaagcagttagcctgatggcatgttgagtggattgttgtcttttgtttttttaccatgtttattttatcttattcttgtaattttttttttaagatgagaaataccttaatttttagagttaactgctcttcccaggggggacagtttttttaatattaatttgtataacatgcaatctttatgtggcgaactgcgaacttaagtacaataatcatttattgtatgctgcatttggtgcattagctagtctaaagttcctcgttaaaccagatgattccctagcttaaagagcccataacagaaaggttgtctccaatagacttagtgtaattgtttttccagtagagagcctactctggtggagagtgtgatgggttcttctgctcttctgtattcgatattatctaatggtgtgttcttcttctctttagataggattgttaaacaattgagtaggcaaaaaataagaaagtaattcaagtagttaaaactgagaattgttggagtttacctcaaataagccatctagtgctctctgctgcggagaaaatgctatttctgatgtacacagcattgtcggggaatggtcatttggacttagactgcccttgaagtcattttatgaccagttttcagtcataagttttgcacattcctgcaattgtttgtaattagcacatgtttgttgtgtgatcttcatcttgtttgtacgtgattttgtttattaatttctgttcccaacttcagaaaggagaagactgttcacaagacaactaccacag

SEQ ID NO: 71171 - DNA, 427 bp, Prunus persica
  Intron number 1 from transcript ppa022158m (locus ppa02215 8m.g) derived from phytozome v7.0 (chr-ID scaffold_7; pos 12541306 to 12541732)
tcaggcaattcaagtactataagcacgctcttgaggtaggtactaatttctgtttggttgctcagaaagtgtggaaatggaattcatttagggtctttatttggttttgtatctttaatttatcaaatattatgttcaactcggtaaaattgaattgtgaatggattgaaattcaaattatgctatagagtagcttaattctgttagcttaactgctaaatgggagtgctttcattgtaatttggaggatttagactgctaatggtgagagcaatgctatatagacttcaaaataagtcagcccaagtagcaaagttttcatctttttcatcttcttcatatttggatttctgaagagagattgtatggtatgttggcaaccccagattctgaaaattgtttttggtttattgattcgcaggtatct

SEQ ID NO: 71172 - DNA, 1003 bp, Prunus persica
  Intron number 1 from transcript ppa011021m (locus ppa01102 1m.g) derived from phytozome v7.0 (chr-ID scaffold_5; pos 15799242 to 15800244)
ttcattattggccgactgatctcagtgttaataaggtacccaaagaaagctatttatttgctcttgatcctctctgcactgtttgcttgtgctgaaagttgtatggaattcagatagaataaaaatcggaactttttctcaatacataacggtataattagcgttataatatggtgtcccgtggttgtggtgaatgtggttatgagaattttggtttggcttgtgtcttctcccgtttggtcgatcatgaactgttggaaagaaaacaaaaggcaaagagttttcttttctcaaagtctgagacttttgcggttttggtaaatattaattggttgacaattgtttttttgttttaatttaatcagtgaagttggagttatttgtttgatccttgtgtttggcatatattgatcaaaggagtcctggtgtttctacattgggttttctagagatggtattgttaattcatatatttaaagatcttatttatgtgtgaattctctaagaatatggtaggaaactcgatggtggatagttcatgttcaattcattaccttaaaaggagcaaaatttcattcctatgttaattgtctgtctactctcttatatttttactagcctttggaggaattggaaggggagagtataggtatgttgcatgagaatatacccaaaaaaaaaaagtttgaaagtttcccaatatctgaagatagttgcattaaaaggaagatctaagttcaccagaaaattcagcatccctaatttttacaaaatatctagcaaccctgctcaatatcccctgttcataaattcaattatattaaggcaatgagattggttttaggaatttttaactagaaaagagattgattttagaagacttgtgtaagttggctgtgattgtttcattcagtgctttcattttgagattgctgctgccctgcaatgtttatctcttgttatttgatgacatatttggctgaatctcatgttatgttgcagt

SEQ ID NO: 71173 - DNA, 977 bp, Prunus persica
  Intron number 1 from transcript ppa009277m (locus ppa00927 7m.g) derived from phytozome v7.0 (chr-ID scaffold_1; pos 4356595 to 4357571 reverse strand)
gtgacagcccctacgtcagagccaagcacgttcaggtctttttcttgcacctcatatcatatacttgcgtttgggttgaaatgagacgttagattagattatgggtatttatttaattgctctgtaattgttcattatgtttataaattttggattttgggtttggtcaattgatgaactttcagtttcatctcaatttagtgatgccttagacagagatgggaaattagggaagcttttaattttcattaatgggccctttgaagttaagcttttgaggattcagtcaaaaaacaaaaaagggttaagtttgagaaagttttgtaatgaaaagtattaaacttgcactttcctatttggaatttaactttccctattaagttattctaatcctgttttctgtgagaataactcatgtgggttgggttgttatggactcatgaatcatgaccatagtgcactattagagtgagtgatatgtgccctttgatttcataacaagtgtttgcaatatctaactatattgttttttctctgtttttattatgttttaatagtttcaaattcattttcctccaaatggcaaatgctaagaagaaagtttggaaatgcttgctcttctggcctgtttgtagaaatggcattagaactgaaattccaatcagcaggggaatatgttgaaagttatttttcttattggttattattattggagatttttcatcaattctaaatggcgttgaagcatgcggtgctattgtcttgttgtgttatcttgcagtctctcagagtaaatattggtgccgtttttatgtttgattgtggattggttatgatttttttttaaaatcctttggtaaatctgagattggtaagcaactgtcaaatggtctactatttagctaatattgttctgttcatatgttctttgtgcaaatgcagttagttcagaaggatccagaagcagctatagtttt

SEQ ID NO: 71174 - DNA, 496 bp, Prunus persica
  Intron number 1 from transcript ppa008712m (locus ppa00871 2m.g) derived from phytozome v7.0 (chr-ID scaffold_3; pos 20443945 to 20444440)
ttgggtatttcaaggagatcgactctcctccacctgtgagagcatctttctctttcattctcttttaatgcatttgcttgtatttggaattgagggtttgaaaataatgttaatccttaggattctataggtttttctttttcttttttgtttgtttgttcgtttgaaaagatggcctggtgttgttggatccattttgctgtataatgcctctctttttttctttttgatacaagtgattatgtttttggtcaattttgtgtaaatcaaaatacttgagaaaaaggaagctgctttgaagaatcaaattcaatttcatctagttgatctggaaggaacttctgttaccttgatatgtttcctttgcatgttccagtgtcttttcaattagcatgcttagtgttactagtaatccagctgggcaggcaagtgacaaagaacgtagctagaattctttttttattaaatcaatttgttttgcagacggttcctgggt

SEQ ID NO: 71175 - DNA, 456 bp, Prunus persica
  Intron number 1 from transcript ppa006438m (locus ppa00643 8m.g) derived from phytozome v7.0 (chr-ID scaffold_1; pos 8429761 to 8430216)
acttcaattctgagattggaactaaggtctgtcttgtaaattttgtttctttttcttttcctctgagtttaaagtgaaaatgggttaatgggtatgagctcaaatgaagaaattacatgtctgtatgtcaactttgacactgggtctgtgactctctgttattgggctcacattaagcatacccaaaagaactctttttttatttctcttctatcttttaaagttgtataaagttgtagaaatgggcactagtttgttggtggttatgtaagtttatttattatatggatttgagattttttttcacttaccccataccttggcaatgtgagcttgagtgagtaatcgttactgcatagtctttgtgattccatggaagattaatttgttaactttgtgcatctgaatttctttttctttatcaggtaaagggtacagttttcaatatagataact

SEQ ID NO: 71176 - DNA, 863 bp, Prunus persica
  Intron number 3 from transcript ppa006540m (locus ppa00654 0m.g) derived from phytozome v7.0 (chr-ID scaffold_1; pos 2830209 to 2831071)
ggcacagattacattgatttaatacaaattaattggtaatttatgcgttggtacactcataactagaaaaagagtgaatcacacaactcatatttaactggactcacactctaattgcaaaattgttctttttttccaactcataaaatgaacttaggactgggtcaactttatagtctgttttttattagacatttcaagcgtcttttaactctacattttgcttgtatctatgaagtatgaactgaagatcttggctatgaagcaaactcgagtcctttggtaaggactggttttcatgctgttccatttttgttttgccctctcctaatcgagcaatcaaaccaaccattctgttcgaaaacttttaagactctaaatggaaattggtcatgtgacattcatatgaacacttaacacatcattggacaagtttgtcaatttttatgtactaaatttacaagtaacttccatttccattgaagaaagtaagctgaaataattatttcactttggaaaatcattaattaacgtaggttgggagtgcaagaaataatgataataataagtgagtaacagaaaatgtatatttctccattcatttggtctggaacccttccatattgattcacatttccattcttagaatcacttaaaagcaggggtaaaggtaaactaagcaataaaccagcacagttacttctttttgaatttgaaggcttccaatttgtctcatgatatgttggaatgactagtgaagatgtttgctctttacttttcagaaaaagaatctggatgttaactagtttaaggtggtgatatccggaaactaaagtattttgtttaatccaggccagatcgct

SEQ ID NO: 71177 - DNA, 1018 bp, Prunus persica
  Intron number 1 from transcript ppa018773m (locus ppa01877 3m.g) derived from phytozome v7.0 (chr-ID scaffold_1; pos 39668838 to 39669855)
aagcttttctctccagacattcttcattttcctgtgtgcgcacggtttattccccgtttacgtttccttgatatgaaaccgagccccaattttcaacaacttcggccttcactgtgctgtaggttttacttgttcatgaataatcaatttcattttactctagagcatttccagactccggcaacgacagccaaaagccaaatttgacttaaaatgcctaatgagtttctgtaattactaggcacttgtaaatgctcctccaacaatgcttgtcttttttctttttcttttttttttttggttaatcttcaatatttaattatcctttaaattttttttaaaaagattgggacatacaaaaattgtgttattggctaaaaatatgctcgaggagtttttttttgggagaattttagctaaaaatgacttgggagtagttggagcattaggcaatactttctcccatctctctttggttcaagtgttttctcccttagctaggcatattattttctttaaatatgtcaagatctagtggtgcttctagttgtatatggaacatatctcctttttagctttgggctttttgtttctactttctggaggcttggggttatcttctggaggagaagccaatgttgtgacctggtggagaaatgatgatggtgttgtgatgcttgtatgagtgtctgggggaagatagtggatatgctctcttactggtactgtcctttttttcgaatactggcaaaagtagagttgtttgccgattgctgggtttgatttggtactaatttacatgagaattatgctatgtttgtttatgtggttggcttctagtgagttgggtttaattttttttttttttttttaatgttggctcattgctttaagcctttgtgcttgtaatgtaacatttgagctatgattattttatattggaagatcaacatcgtccttttatcttttcatttcacacaaaggcgagagtggagatagaaatcaaagtggcgggccc

SEQ ID NO: 71178 - DNA, 864 bp, Prunus persica
  Intron number 1 from transcript ppa013045m (locus ppa01304 5m.g) derived from phytozome v7.0 (chr-ID scaffold_7; pos 22269079 to 22269942)
aagagctgcagaaggtatgtatcttctgtgggttttcataatatgccgaatttcttttgtgggtttcattagatctggtgtgttgtattcaattttttatattttttgggttttggttatgatttctggtttacctagctttggattatttatggttatttggctgctgagcgatttgagaatgaaaggagaaatcaaatattttggatcttattcatgtgtattatttcttttgggtctcaaaccagtaagaattgcttagctaaatttcagtttttttcttaattgtctcagtaggtttctgatctccctttgtttcatttcctgctgtctatgtgacttgccagagaaaaattggaaaacggaacaggaaatggaactttgtaattatgtttatgttaacctttgtttgtagaataatgaacaaccctccaaaactaagctaattagcactattaggcacatctcaaagagttcttttcactctttacctggagggggtgaggtagtttttttaactcggttgttttcctgccttttgtttttggtttaagatcatttggtgtttttctctaattataattttagtcctcctgtttaagagtaagtaggctctctcctgtatgtagtagttaacttgtctgaatttctatcgcttggtgagtctttaactatcttgttgtctaaggttctacaattatttggtacccttttcttcttaattttgtgaaacttttcatagcagatactactttgcttcatcttcgccttttctctctcttgctgattgtgatgcttttggcttatgacattgaggtagtcagagctggatttatgtaatttaagcatcattccttctgcagg

SEQ ID NO: 71179 - DNA, 725 bp, Prunus persica
  Intron number 2 from transcript ppa005820m (locus ppa00582 0m.g) derived from phytozome v7.0 (chr-ID scaffold_4; pos 9737092 to 9737816)
gtagcaaaagcgtcttcgatctaatcactctacccgtacatactctcttctatctctctctctctctctctctctctgtgtgtgtgtgtgtgtgtgtgtgtgtgtgtgtgtgtgtgtgtgtgtgtgtgtgtgtgtgtgtgtgtgtgtgtgtgtgtgtgtgtgtctgcatatgtgttagtgtttgtgtattagaacttcgaaattttgcagcttgttttgttgctgacaaaaatataaagaaaaaggaaaatttgtgctaatattacttctccacaaaactatattggaaaacaacttggatttttgagtgagtctttgcttctgtttaccttgtgatggacctggagagactgagagttacgcttaactaaagcagctgtatttagtttttagagtgtaggctttttggttgctcatgcccaaatgaccataggtatatgcataagattacatatattaccaaatggcactattttatttccaagcaatgtcccaatgcacccccaactgccttttaaagggatgttttcatgtaactttgatgtcatccataacatatcagggttggaggaactctttttatcttcgtttgcttgtattattccctctcttcagcttctttgattgtgatttattgctttattattgcaatgtgcggactcctttttagtttaattccaattgaatttgaatgatctgttttttttttggtgctacagggaggc

SEQ ID NO: 71180 - DNA, 582 bp, Prunus persica
  Intron number 2 from transcript ppa002073m (locus ppa00207 3m.g) derived from phytozome v7.0 (chr-ID scaffold_7; pos 17730429 to 17731010 reverse strand)
agtatttggaatataggatgtgagtaaaaaacttcttaaacttaacttattgctcttatatttccttctgctgatgaaaaaaaaaaacccataattttccatatatatcattgaaatagtataatgatgttctgataaggtgacccttcgatgatctcaaacctttgagtttcccagcttatctaatctctggttcaggattcactattaatgaagttctgaagaactaatttgtgtgtgtgtgtgtgtgtgtgtgtgtgtgtgttcttttctttaatttaatttagacctatcttgatttgactaatataaatcaggtgtaaggacaacgttggcatttttttctgctccaattacaccattgtatttgtgatggttataactgaaagcttaaaccttgttttggatataaaaaaattggatcacaattattaatattgtggttcgactaacaaataagccatatgagcaatgggtgtttagatagaccccccttctttttccttaacttaggcgctacagttattaagttgatcattctttctccttgaaggtattggtgttcttttggtcctgaaaatt

SEQ ID NO: 71181 - DNA, 844 bp, Prunus persica
  Intron number 1 from transcript ppa000754m (locus ppa00075 4m.g) derived from phytozome v7.0 (chr-ID scaffold_6; pos 13549577 to 13550420)
gtccgaactggatcttagtcttaacaaacttgaaggtatgttgattctaacagttttctacacttagctttggcacacaactctttcttcttctttttttttttggtggaggatatgtaaaagtactttctttccttttatatttcaaattgcgtatggaaattgatagtcctgtttgggaatttcttttttcagacttagaaattgaaaataaacgaagtggaaataactgacttacgatcgcatcaaagaatgcccttttatttagttatttttctctctgtaatagaaatgctattgctttacgcaattaatctctaatgacattatcaaataaaaatatgttggatgacaatgttgacatgcttacattagcatcttcatgtaaaaccatgatccgaagttcttcatgaaccatcagaaacagtgcgtgcagatttaagtttctatggccagtagtggggactaaattttcatcttggtcggacagggatttaagttgggggaaggtgtgagcatgaacaagcttaacaaatgctatgtctttttgatgtacatgtaatcatgagtggacaatcataatcattttaagaatcagttttagtataaatgctacagtgagggcagtggcccgtccatcttttcagtatgcggaatttctcttttgcatgatatttcgtgtgttattgcttgaggtctgcagtttttaaaagtcatcatatcatcttcaaatttacaatttcattcatttactcctgttttcctcctctctttcctctatacagttatactgtttaccttcatgacaggtccagtacgaagcatcacctctgcaactctgaag

SEQ ID NO: 71182 - DNA, 200 bp, Prunus persica
  Intron number 1 from transcript ppa008133m (locus ppa00813 3m.g) derived from phytozome v7.0 (chr-ID scaffold_4; pos 27780963 to 27781162)
gtcctcgtgcaagtaagtttcctcgctcgtttcccttttatttgatcaatttttttatatatctatatatcaattcttttctttctttttctaattatgatttgattatttgattaattactgatttttaatttgtgaattttcttcattttgttttcgtttcggtttcatggtaaatgcataaaaaggtgtcggaggat

SEQ ID NO: 71183 - DNA, 920 bp, Prunus persica
  Intron number 1 from transcript ppa007268m (locus ppa00726 8m.g) derived from phytozome v7.0 (chr-ID scaffold_2; pos 17832774 to 17833693)
gcagctggcgctctctccccaagcttgcaggtttctttgggtgtttcttactttccttctttctgtatgctacttggtttctgtcttggtttggtccatattgccttttgacacccaaaagttgctgctttggtttgttgttttctgatgtaaaagaaaagctctttcatgtgatgtaaaggacatcttaaagtgctaacttaacagtgtcaagtttttcttcatgtctactgagtcagatggttgtgcttgaactttgagggactaggagtgatgggttttagtctttggtcccagaggccccattaacttcttggcttacttgaaattatgttctttttgataagttggtttgcaaaatcaaatctgtttaccactttcccctttttcttttcctctttttctttggtgaatgagttaaattatagttaccttccccttctgtatgtgtttttatttacagtctgcaagcaaatctgtttattactttccccttattcttttcctctttctttttcattttggcgtgtgtggatgaatgcgctgaaccaaagttactttgagaaactttcaccattagtctagattaatcgttttctcaacgtttattttgtgttgaagaaaaccagatagacattgcttttaaaaggttgttttgctgcctcccttgttaacattttgtatggttctgtacaagtataattgcttttgactcttttcatgtctggctccccttttctctgagtttgcttggatattatgtttaaaacattataggaagttggggttaaatccaaataattaatattgtgcttgatttgttcatttttagtttcagattcttggtcttgttcatatattgagtgtggttttctctttcaataggtcttctacgctgtgggaagagttgtcggctcaga

SEQ ID NO: 71184 - DNA, 890 bp, Prunus persica
  Intron number 1 from transcript ppb023030m (locus ppb02303 0m.g) derived from phytozome v7.0 (chr-ID scaffold_6; pos 4400501 to 4401390 reverse strand)
gccaacgactctcaatttgtcagaggttatcacaggttaggaactaggctcttatatcatgtcaaacaaagttgcgtaaaatattcaattatgctcatattcacttatattattattcttctctaatatataggtatttatacaagtataaagatatgttaaccctaaataaaatacaaaaatatatttaatttacaatagaaagtaaatctctactacaataggactaaataataattggtaagtaaccaaaattctaatgaaataagaaaccaaaatcctaactaagtaaggactcgccaacagaaagcaccgactttggctataactctagactatataaggggcctcctgacatttaaatggtggttcgaaaacagagtatgagcttgaacagagcaagttaccgaatgctgggatttgattgaaagttgtttcaaattctgggattttgatatttaaagtgtaattgcctggacttgcatctgttatgacactctctccttctctttctcttgccaaacccggatgggtttggtttggtttctccgctggtttgaggccaacactgaaccaaaccaaaccgtatttcttgaacggtgcaatctgcagttcagggatgaaatccatccattctgtgtcgtgctcaccacaactttttcgtattcgttcggagtccttgataaagcctttcgctaaccataacagagattattctgattctgcctccgcccttgcctccgcctcctcctctgtctctatctctgtctctgtctctacctctccctctccctccgaccctgcctcaccctccaaccctgactctaactctgactctgacttcgacttcgacagagactctgactctgactcgaaagaggccaagtgta

SEQ ID NO: 71185 - DNA, 510 bp, Prunus persica
  Intron number 2 from transcript ppa006461m (locus ppa00646 1m.g) derived from phytozome v7.0 (chr-ID scaffold_3; pos 18837014 to 18837523 reverse strand)
tcatattatcaaaggtctctgagaaaggtaaaatccttattgtgcatctttatgtactctttttttagaagttaaatggataaagaggcttagaattgcatgactctgtattgtcacgcatttaccatttactagttgatgtgaagaacatgttgtcgatggtgcagagttttttcctgcaatccttattgtccgactattatatcaatgtttactgcaagttctttagcaaattacttcaaaatagtgcgcatgtttttggtcagtgagtgggatgcatattattgtaggcattgctaatgttcattaaaatgtttcataatcattgtcggacaatacggaccttagtaatcacttcattcaacgcacaatgataattaattgctagcttaacggtatcatgttgtttgttttcttaatgtctatgttcgtcaaacttttgttcacatacacaataattcctgttgttttcctcttcagatcttgagtgcatattcactgttatctgca

SEQ ID NO: 71186 - DNA, 826 bp, Prunus persica
  Intron number 1 from transcript ppa005783m (locus ppa00578 3m.g) derived from phytozome v7.0 (chr-ID scaffold_9; pos 1625769 to 1626594 reverse strand)
agcaagtgttcaaggtattaataattcatgtattttcatccttctgtcttatagtaaacataagtttctgacctctgtgttttgtttttcgttgagttcgaaactttctctttgtacttgtttgggtgcttcaatttgtgggtttgcttgagtggtgatcatgttttgccataatttatcagtgaaggtttgcaactaaagtaataaaactacggttccatctgagaaggtaaatcagcaggtctagtacaaactaaatgcctcagttccttgttgatagagattatattgcattatgaaagtgggaataacccaaaacaaaacgagggttgaaacaaagagtttgtatgtttgcatattgactaaatgtgtttaagaatccagcgcctttgaaagacgatcagtcatgtttgggtgtttcttattgcgaaatgttttggactataatgtagtaaaagtgttcctagtattgcaatgcttctgccacattctttaacctctttaagattaatgatttgttgttgtttaatataaagtaaagcgcacgcatgaccattgcccagtaggaacagttttttagataaccatatttttgctaagataaagagaattctctgtaacttcttgaagttttttcttgctgttcaaagtgcacttttaagggaagacaatcaaaggttcccatgctacatggtatatagctaatggtatacctacaataaaatggtttactattctttttgttatcttgccattattttcatatttgttttgccctttttaactatttcttacaacaccgtgatctcgtgacaggctttggatc

SEQ ID NO: 71187 - DNA, 689 bp, Prunus persica
  Intron number 1 from transcript ppa001992m (locus ppa00199 2m.g) derived from phytozome v7.0 (chr-ID scaffold_6; pos 18170487 to 18171175)
ccatcatcgtcattgtgcccgctgacatctggacggtacttttcatttgcaagttcaacaatttttgccatttctttcagtttatggttgtgtgaatttgattcgattagggttttttttttgttttgaattaaaaaagtttttaaagaatgtaatctgtttcagtttctctcatgggtgcattgttagaaacttttgcaactggttgtttacttgtaccgggacattttctctgctgctcagttgtgctcaccaaattttttttgggatttttttctctgataatgcaaaaccactattattggcgatttgggtagctgattttatttcagttaaaaattgtatcattgggtttgaacaagaaagtaagccgaaaatggatttaaattttatgttaatggcatgcatctaatctcttaacattgaaataatgtaatgctctgtttatatggcataaaagaacaactggtttctttgattggatacaatatgacaattgtttgttttgacgtaccaattccatgtttatcagctgtaagactatcttttgtgtttatttactagctccagttgttatgttcataatcatttgtccatgcaacaattactggtttcacgattgtttccgattcttttcttttattacatttgcagacggtaaatcatattgagagtggaggaatctcatt

SEQ ID NO: 71188 - DNA, 539 bp, Prunus persica
  Intron number 1 from transcript ppa004478m (locus ppa00447 8m.g) derived from phytozome v7.0 (chr-ID scaffold_4; pos 14086041 to 14086579 reverse strand)
gggacgcctccattcaggtggaaaggctattctttgttctttataaacttttttgttcccttttattttgctttgatcttgctttaatggcatttgaattagtgaagctgtttttcctcctttttatttttttatttctctgggtgtcatgttgtcataaagtggtataggaggtctcttgttggtttctttgatgaattctaatcgatacgtccataatttcatatcataagtcaaattaacagatttgttaagtagaatagaaaatgaaattatgatgcagttaaacaaaagtgcaattatagtgaactttctgtggtcaaatgctgtaatgagctgcagtatgttatgtgcgttccaaaatcattgagtcatgagaaatttctttgagcttgaattgttgaaaggaaagaggtagaggattggaatcaattaaactaagatacaatgttcttagcaaacttaatcttctttccccccacaatttgtttgattttaccttgttaaaaagtggtgttgcttttgaaaaggttgaaggt

SEQ ID NO: 71189 - DNA, 667 bp, Prunus persica
  Intron number 1 from transcript ppb021710m (locus ppb02171 0m.g) derived from phytozome v7.0 (chr-ID scaffold_7; pos 15881101 to 15881767 reverse strand)
cggagacggtgcgggagcaaagtcaagggaatggtgagcaacaaggtgaatttcttggaactagatttatgtactgtccaattgctattgttttttctttcttacattgtcaactttttattttccattttctggagtacatgtatacagaggttttattgtagcaagaagcattattgaatacttctgaaatttagattagaaaaatggtaattatgcaccaatatctgatgtagaaatttaacttttttcctttttgaaaaagaaaacaaagatgaacaccaatggctagcaagagcttaatacatcagtagacgtagcttgtttatattgtcttttctgattcaaggatagcatgttgttctttctgtttgtatgatcaccaaacaaagcaagataaaattgagttttgtgttgctcggctttgagttgcttgattcttgtcttcttgggttccaaatgaccttaggttgcatttaaatgtatggagttcaaatgagggatttgattcgactacttggattaaattgctggtatcaaatgtttaaaggaatatacagaaagagttttgatattttctttaaatgaattgagtgtttactgattctttcttttcagttctgttcctctctatcagttactagaggcgaagagaacggactggtaa

SEQ ID NO: 71190 - DNA, 435 bp, Prunus persica
  Intron number 1 from transcript ppa012319m (locus ppa01231 9m.g) derived from phytozome v7.0 (chr-ID scaffold_8; pos 12028609 to 12029043)
ctgtttccagttaattcattcattcacttacatgttttttgatcttgctctgtgttttctgttttcttttttagtatccttatgaattttaatcttagaattttgtgatatgagtggtttagtttttgtgggtttttttttttgggtatcatctttgtgacatatgctattgtcattcataggagaagttctttcggtggggcaagtcccatgggacctcgtggagtgcgacccgtttttcggggtcacactcaaccatgaggtgaggtccccgtaagacgtgccccagtttatggtttgtttttttagacgtagatgcatgtgagtctcacagtggggctcatgtttgatttcctcatgtaacgggtaagcgattagcctaagcaaatctcttcttattttcgtacttaggtgtgaccaacgagattgtttacg

SEQ ID NO: 71191 - DNA, 674 bp, Prunus persica
  Intron number 1 from transcript ppa004803m (locus ppa00480 3m.g) derived from phytozome v7.0 (chr-ID scaffold_1; pos 9159073 to 9159746)
gtgctgctctccacgccgtcgagaaggtacggaaacacccttctttataatttactgagaaattgcggctctgagctttggatttagctcaattgtcactttattggttgctcatctagcttaacttctgttctagtagcttcgatcgtctttgctttttgcttaaatagactgtactagctagctagaaatggctgatttctttctgtcttctgctgcggtaagttgttcactcgatcaaaggtactgaaaatgtgcatggcgtaagtgtatctgtgcatatctgatatcatggcaagaaatgcattagctacaagcttacaatccattttagtttgatacttcaaaattaatacataagacttagatatctatgtgcatgtgtgttggtatgtaagtaaatactgaatttatataacaaacctagcaactatcatggttgccctcacacagtaacagacaatactggagttagaatataaattgaaaaataactaccaacataagacgtggtgagttgtttttgttaaaatatatgtatatatatatatatatagtacatattctcctgtgtggggtttttggaaaagaaaggctcttgagttggtatttattgatttttcttttcttaacacaacaattgcagggtctgaaaactgccatcgtagaaggag

SEQ ID NO: 71192 - DNA, 635 bp, Prunus persica
  Intron number 1 from transcript ppa000261m (locus ppa00026 1m.g) derived from phytozome v7.0 (chr-ID scaffold_8; pos 20545103 to 20545737 reverse strand)
ctaaggtcaaaggcttccctgcttggcctgctacggtaagtcttctgtgaaaaaaaatatcttatctatttatttatgccatgccggtcaagacgactgcgcagttgaggaatatgctttagttagggttttggtgcttttgtgcaagcttagtgaatttgatacagtgtgggctattgcttggaaggatagatttctggatctgagtttcaatttacttattctttaattgccttgagttagcttttttggttttgtaattttattgttgggtttttgtaattttttaattttctagtcttggtagttggaagtgttatgtgatagaggtgattcatgagttcttcaattttatttatctaacttttgtcatttttattatgatatttctttatcgatgtatttggaaatggggttttgatgactagcgttaagtttctacatttaaatttgaaatttttaattttctttgatctttatattcatcgattctcatggacagtcactatggaagtgcactactgtagggattactagacttactttcagtgattattaggactgcttaacttggcttatcgagttggtttgtgcttgcaggtaagtgagcctgagaagtggggttactctgctga

SEQ ID NO: 71193 - DNA, 615 bp, Prunus persica
  Intron number 1 from transcript ppa005795m (locus ppa00579 5m.g) derived from phytozome v7.0 (chr-ID scaffold_2; pos 20985533 to 20986147 reverse strand)
gtttttgatccgccctcgtactctcaggaagctccgtaagtctctctctctgattgttcaaatcatttgcttttgcttctaatacaaatcactgtacaagttccctatgtctgcttatgttcaattgcttaaaattgtttagctacatcattgaaggctgtatatgctgtgtgttaagtggtcaagtctactatttgcttcctctgtccaatgtatgagaagtttgttatgtgcaatgtagctcttgaattaattgtctacttaaggttataaatccctatactttccagtgaatttcttttatgcaataagcatggttcattcttttaaaagattattaagtcattgggattgcggcgactttaagtagcttctgcaagcactacccaatttgtaaaaactttgtttttggtcaaaagttgtaaaaactaagtacccctgttatcactcagtccaattgataacgggattagaagaaaaaattagtacttttcgaatgcaagtgttaaaattaatgggagtttatataatgtaagggattgtagtaagctaggacttccaattctgaatttttttgctgttaaatttcagaggtgcaggcagctggcaatactt

SEQ ID NO: 71194 - DNA, 380 bp, Prunus persica
  Intron number 1 from transcript ppa007900m (locus ppa00790 0m.g) derived from phytozome v7.0 (chr-ID scaffold_4; pos 11280655 to 11281034)
tggtcatagaaaatccgccagagctagccctgaaggtacccctctctctgcgtacgacatgttgtatgattattccttctaatcgttctattaagtccaaaactttttgaatttttgggataggaacaaggaactgagaagaccgactggtcggagcactacctgtattttttattttttaaattttcgttattatcgtttaaattcaaatttgcttgatagtacgaaaagtcgagattggcctcggcttattggggggcaggagagcaattttaaaagacgaggtcaaaatggtaaattaataagtgaagttttttgttttgttttgttttgtgggaattgcaggagggaaatcgttgggagtggcgaagccgaagcgg

SEQ ID NO: 71195 - DNA, 831 bp, Prunus persica
  Intron number 1 from transcript ppa000606m (locus ppa00060 6m.g) derived from phytozome v7.0 (chr-ID scaffold_8; pos 539587 to 540417)
acattcctccctcctcaccgctctcgtatttgcaggtactcatttttatacccagctaaattttctttcttgattccattttctgtttgtttctcgacaaaatggaagagctttctgtataaaaagtggaactcttttttcatactgatatttctttttaccatttcaccggacaggagctttggcttaagtagtaaatgtttaacttaacctggaatgatggaaatattcaacttgtcctcaagtttcgtatcgtgcttaaagataatttgtgtttatttttttagaaaatggtatactaagaagtgaagcacagcggaaaatggggctttttaagtgttggaattgttaccaaattccaagagctattggtgcaattttcttctttgttctaattattgtattggtattggtttttctacttaatttaattattatgcatgcaagagctctggtatgagatagcattatgtttattcaatcattttgaatttgctccttgcttgatgttactatcattttcagtaaacattttttctttaaacattcttgctttctgttttgactagttaggaattatatcacggatcataacctaacacgatccaagtaggtactttcaaccttagcatgtttctcttaagctcttagtgtaagtttttgctcttagagctgatgttttattaggtattatagtttttgcattgctggaacaaatttacttcttattggacaattaaaaagtaattttttatataaatattttgaatccaccttttttacctccgaagattagtgttgtaggttttatttgactagcggaatacttaa

SEQ ID NO: 71196 - DNA, 958 bp, Prunus persica
  Intron number 1 from transcript ppa012717m (locus ppa01155 0m.g) derived from phytozome v7.0 (chr-ID scaffold_1; pos 36670665 to 36671622)
gagggtaatgggttgatggtcgcttgggcttggatttggtagaggtggcgcatggtaagctgggcggcgcatcttagtaggaggtgagtgagcttggggtggttgtgcgggtaaagaagagccaggatgggttcggctgagtcgctgactcggttactctgcgcaatgttttacagagaagacgacctcggagagacgagtacaaatgtcacagagctaaaccagcgcaggggagcccctgggccaaaagcccaagtctcgtattttttatgatatatttatttatcaaggcccagaaggaatgggaaaaaaagagtcgttatatagtaaggttcattatatatgattcttagatgaggtgatatatcttaattgttgaatatagctgatcaatttaatttaataattaactaatttgatcaaacggttaagatatagaatctcacctaataactatatataacatcctcactatagaattcttggggaaagaaaacagaagtgccttacaatattgagtgtccaactcggaaggaatgagtcattttttttttattggacttttattattaaaagggtcaataactcacacatattaaatgaatgttaaggcttgtacttaaatcttaaagagcaataaccactacattagaagaaatgagacttttaagtgaggggaggacataagttttctttttaacgctactttgaactgttcaaccagccgagaggcaaatctggacaaagcgacagaaacgttaatgtataaaaattgaccccaaaaaaaaagttaatgtacgaaaatttatattttttactgaacaaaaagaagaacatgagaaaaacgtggcagaatcacaggttttttttttttaaaaaaaatattttaatatatatatatatatatatttttccaaaggtagaatcacaggttcacttcactcaaaattactcgaaa

SEQ ID NO: 71197 - DNA, 1058 bp, Prunus persica
  Intron number 1 from transcript ppa006073m (locus ppa00607 3m.g) derived from phytozome v7.0 (chr-ID scaffold_1; pos 40867237 to 40868294)
tcttcctctctccgtttatcaaccaaccctaaaaggtacaacctcttctgagaatcgctgcgccttttcttttcttttcgaaatcgtaatcttatttgttgatgataattgtttttgattgctgagtgtttgttcgatccgagctcaagtcttatgcttctggatcggatttcgaaatatttacagatctgtggatcttagggtttatttttgtattatgttgtcaagtctgaatgctatttgagacagatttattcagcgttgctttgatttgaacttttttttttctcacgttgtgattttatttaataattgttattgacctttgcccttgaaattctcggagtttttttcagcaatcattatgagaccatagctgtattatatgtatacttatatatggctggaaatttatgtagaaaacctgtcttgttgggttttttatctgtttgatcttcttgaaagagactgtcgcattatatatatatatatatatatttatggtgcgaaatctctgtccagggatattgaactccttccgttttcggttcctggaggtgcttgattactacagatattaggtttaggttagtattgtaaattgtgtgcggcttcgttgtccgatttgttgttctatgtggatcagtaattataaaaaaattcagcctttttggaatgtgattttgttttgttagcgctggtaggacatttgtcacatcttgttttgtcaacttatcataaattaatcccagcgcttcttcttttggccgggtgatttatcatagtgcttcagagaaaaaaggagtataatgttttgtttgcttgtggaattaatgctttgttttgttgtccatctagaactaccaacgatatatcagccttgttattttgagatagtttaggacagttcttttcgattataaactgttggacacatgatcttgttttcaccatttatattgatttcatgagtgttattttactcttaacctgttgctaaatagctatttcatttgattgaaggaaattggcagttcagtctgctacatctgcagttt

SEQ ID NO: 71198 - DNA, 962 bp, Prunus persica
  Intron number 4 from transcript ppa008959m (locus ppa00895 9m.g) derived from phytozome v7.0 (chr-ID scaffold_3; pos 4909775 to 4910736)
cacaggtgagcaatctcttcctcccaagtttagtcattgttttttcagctccattttttttttctgttatattgggcattttcttatttggtaaaggcattagataggaacttgtgtcctgtttagactcctaatagaagggtgatgaagcatgcggaggggagttcatgctttgtgataatagataagcttcaaatggcgaagataaatactcaaaatcatggtttatggacaaggattttaattaatatttgaaacaagacaggtataaaacatttctttgttacatgtgtggggaagaaaataaagatatgaacatttccgttacttagtgcaagtaaatcctaggatattctcttaggtggtcattgctctgaaaaagagcaaagcagtcatgctgtaatgctgacatggttatgccattttatgccaggtttctaagaatatgatttggacaccatggttcgctttttttgtttttatttttgttttgtgtgtgtgtgtcctatgctctaagatggagattagatgaatgtcatagattttgtgtctcaaaatgttgtaagatatgcatgcctgtcccgtaggaaggtcctaactctaaaatcttcaattaagttattctgaattatgtgttatgttcatgtttgacagaaattgtttaacaagagggtagttcgacgggatttatattgggacatgaaatactgtactgttatggatgcaagtacaaactacaaatgaaaaaaataactagatcttttgattcaacatttttattttccctttgtcaatgaagagtagtcttgtttacattaactgggttccatgagttccttgtgagtttgatgaatttgatttatgacttaaattttgaatccatccttatataatactgagtgatatagttttcctgtattctcttaggcttcaagtattcctgttgttttggttgagaacag

SEQ ID NO: 71199 - DNA, 685 bp, Prunus persica
  Intron number 3 from transcript ppa007466m (locus ppa00746 6m.g) derived from phytozome v7.0 (chr-ID scaffold_11; pos 677929 to 678613 reverse strand)
atttgaaacaggtaaacttatcatcctttttgcatgtgcaatttcttaacaaaatttatgttcaaaatagttggagtagaattcatgtatgaaactcttaagatttgattaagtgtgaatagtaaccagagaactcccaatattttccagccatgatactaattgtcagttattgaagtttgatttttcttgttgacttgctatttgattaagtttgaatattaactagagaacttctaatattttccagccatgaatttagactgatcggtagttatcttcagttctttgattttcatgtcaactggttttttttttggttccatgtcaaaaatactttatgtttttcagatggtcttttggcatattttattcaaatctgtcagtaatatattgtataaaataattcttctgattgcccgtaaaagtgtgaattgacaatgttttgctacccataaacagtgatatggtgcgcaggcagtcgacacagaaacactatttttgtttagttgtttctcagtaatctcttcaatctgtggttttgtgtttctactttatatttgtttttgcaataagactggaaccttacatgtgagaactaatatggttttacttttcacctattggatatagtgatgaaatgttattgatagttgtcatcatttgtttgatatagcttttagaa

SEQ ID NO: 71200 - DNA, 715 bp, Prunus persica
  Intron number 1 from transcript ppa012381m (locus ppa01238 1m.g) derived from phytozome v7.0 (chr-ID scaffold_1; pos 27878032 to 27878746 reverse strand)
caagggtggtgaacagggttgggccgctcagcccagtacgtcctttttccttttactcctcctcctcctctctttacattattattgttattataataaaaaattcttatttattttgtgtatgtgtttgtagatttgattgttgcttgatttgtttagatgggtttggttgattgattaattgggtgtttgatttcttagtcttggtgtgaattttggttagggtttgtgattgatgctctgttgggtttggttgttcttgttattaagtgtgtatgggtttgtttgttcttgtttactacttttggggtttagggttttaggattcagtttgggtatgatgcagtcaaataggcttaggtgtttcttcttagagtcgttgataagctctgggaatttcctactattattggttatggttggtaaaggaaatttgtacgttaatgtgctagaagtaactttcgttgaagttatgaaaattaggcaacaacagaagaatgcaactcttaagtgtatatagttgaggttgatagaaaaagatggataagattgaattagaaacagttaaatagcatctttgagcaaaagttcacttgatcttgcactgaactagaattacttaaaatccttctttctttgaaggtaagctgcatttgcaatcaagcttgaaatttaattaataacttatgttcctgttctattacagtctgggcag

SEQ ID NO: 71201 - DNA, 949 bp, Prunus persica
  Intron number 2 from transcript ppa009683m (locus ppa00968 3m.g) derived from phytozome v7.0 (chr-ID scaffold_1; pos 41581459 to 41582407)
ctgttttagcggttcctactctcaggtgatcatgttttttcacttcttatgccccttatatgcagtccttttattttattttgtttgtttcttgtttgatgtatattttctcaatcataagtcttataaagcatggtttttgattattttctgggactatatgtgtaattcaattgaggaattttgttcgtgtacttgatttttctagtaggatatccatcagctttcgggtggatttgaaaattatgttttattaattgttatggtcagctggattaatatgctcttttgggattaaagggtatcatgatcgttcattcttctttgttcatttatttcatcttttcctgttctctaccgatgttgtgtgttttggttttctgatatgatcttaggaactgctttgcaatatttggtaaattgaagtgattttgggtattctacttgactgaggatgctaaagccgagtatttactttcttctgctgcatttctgaagctgggtacaagggatattcagttgccttcaatactagaatacttaggccacaatttccatagctgtgctgaacttctgaattgagccaacacgtgcggaccaaaaatgaaccaccatgtttctaactggctgctctcttggtttggtgcattaaaaataagtgtattgtttttactcaacagccatataatagagttctgtttcattgtacttaaaagaagcttaagaaggaaagcaattctaaaaaagaaatagattcaagctcgattttcttctatgcttgccttaatgcatgaaactcaaatttcattctttacctggtaaatggactagaaactgaatttttatgtttcgaagcaaaaagttgaaaacaattgtttccttctgaatgctgcctgtctatgaactatacaagattgaggttgtattatttataatttttctatgcagt

SEQ ID NO: 71202 - DNA, 857 bp, Prunus persica
  Intron number 2 from transcript ppa002767m (locus ppa00276 7m.g) derived from phytozome v7.0 (chr-ID scaffold_7; pos 1555886 to 1556742)
ggctgagcttgtaagcaacagaggtacttcccttattctctcaattccagctaatacaaaaagtgaaaataacatataggaaaatattctcttgccagattgtttggcaacataagatgcttattatgttgctagatgctagaccatttcagaataatttgtgcttgaatgtgtggtccagattcgcattctgacaagaaagctcaaaattcatgtgtgtgagaaccattgaagtaactgtttgaatgccttactgttgtcattacattttcagagtttcttttcaaatctgatatatgtagtacgagtcaagctggcagacacgattttttctgttcttatattttggaagtggagggttatggtgtcttcctgaaacattttactgttggattaactcttcattgagatgtttaggattatccaatgaatgtttttatttatgcgaagttgttgtatttgagttaatgtgccacctgcttgtgcaagtgtggttgagtacaaaatagagaaatattctacttttttgtgacacactgatttccatcgttatctaccagatcccactttttttaatatggactaccagatccctctttttttattttttcctttgatttcttttctgtcttgtcagttttaagttcaacaacaggttgaatgacttcagattatcagtacttggttaaaaagttctcttcggaatcatgtgaaatgtggaattcactgtattgctaaatataaaatgttatagttagcttttggctcgtaattttgactgaatgtttagagctgaggcttcttaataacgttttcccacaggttttgaagctgggggcccaaacgttccttccaac

SEQ ID NO: 71203 - DNA, 687 bp, Prunus persica
  Intron number 1 from transcript ppa005507m (locus ppa00550 7m.g) derived from phytozome v7.0 (chr-ID scaffold_4; pos 12709145 to 12709831)
agctcttctaagttctttctcacctcacttccaaggttagtatttctgtatctggcaattcctttttttcttttgattatttgattattgatgtaattgttaatttattgttaatattagatctgtttgaaaatattttatgaaattgtgtagatctatcagtttttaattgattaccttgtcaagatccaactttgatgtatgaattccagaaaacaccaattgtaatttggattaatttgtgtctagtcgtttgataccaagattttgttttgtgttagatcctgaaatttatgggatactattttgatttaggtttgtgtattccatttttgaattccaagatccaactttgatgaatgaattccagaaatcatcatctccaatttggattaacctgtttctagtcgtttaatactgagattttattttgttttaaaaattctgaaatttatcggatacaattttgatttaggcttgtttttgtttgattgtttaattactgatgaaattgttagcttattgttgttaataatcaaagatctgaatgaaatgatttacgatcttcgaggtctataaaataatttttaattctgtctgacataatcaatcattttccaagatcttgttttgtttttatgaattcccaagaaacaaaattgatttagggttgttttgcgtgaacag

SEQ ID NO: 71204 - DNA, 444 bp, Prunus persica
  Intron number 2 from transcript ppa011157m (locus ppa01115 7m.g) derived from phytozome v7.0 (chr-ID scaffold_6; pos 17992707 to 17993150 reverse strand)
ggcgctgttcaaggttctctctctctctctctctctctctctctctctctctctctctccccccttttaatagtaaattaaaatttggtttttgaaccccttatatatcatgaaatctagaaaatagagcacaagggtctcattatgcactctgttaattgtttctttttatagcgtgatgttgtctgcatttcggtaattacagagcttttattgtcctgaggaccttaaaatattatttcatttgcggtatgagctacacagagctttctcatatgtggaaggaattttgtttcgacttcttttgagtaacatgctcttcgaaactatttcctttctttgttttacactttttcttctaatgttatacctcacttacctatgtgtctgatttttttgtttcacacagatcctgcagctgtggctgcttctcaagcaaacaaa

SEQ ID NO: 71205 - DNA, 872 bp, Prunus persica
  Intron number 1 from transcript ppa009629m (locus ppa00962 9m.g) derived from phytozome v7.0 (chr-ID scaffold_1; pos 3013891 to 3014762 reverse strand)
ctgagctcgtagcgtctttgaagctcaagttattggtacgttgttcaaattgcaagatgcccatttttggtgaatttagcttattttgctcgtgttttgatatgcgtttttaaaggtgcttgattttgcttttgggcttactgggtacctctctgttgattgctttattgtatgctttatccttgtgtgtgtagctatgttgatataaactatgtcaatttggttgaaatactttggcaggccttttgtgattctgattcaaaaaccctgagttcattccctgtgggtgttaatataagatcattttggactggattgattttatgattggaggacaccaattaaactgttttgcgagttaaatatgctggaacgaggctgctactagtgttataagattcaataagagctcttgaaaaagactattttatgcttcaaaagatgccatgctttcacccacagacttgataaccctttatcatacgctttaggacacaaaaatagaagttttccgtttctttctgatgcatgtttcagttatttgcactcttataactcattacaaaagaaggttcttcaatcttgatatgcaggttcatcaatattttctatccgtggagcttaatcaaaccacgcccctcaatttacagctccctttttttaattttatcaaaactccatttttaaacttgtggacagagctttgattgttgccccttataatgtgaatgtgtgggcttacggtagttatgggcattttttatatgtatttaactatttatcctgctttgtagtcataatggttttttttttaatgtgtggattattccggtgcagagtgctgtttctgggctaaatagaggtcttgcagc

SEQ ID NO: 71206 - DNA, 911 bp, Prunus persica
  Intron number 1 from transcript ppa005947m (locus ppa00594 7m.g) derived from phytozome v7.0 (chr-ID scaffold_1; pos 21408892 to 21409802 reverse strand)
ctctcgactctcacggctgcgtgctttcccatcaggtgctcctttcccctttttatcatcttcaattttctcttcttttttggtttttcgttttcaggcttatgcgatttcttctctcgattgttttggatctgctgattgttttctgtcgaatttacttgattctgcgaatttgcgtttatgtatttcgtgtgagaattcatggcttgattgacaatttcctttaaatttttgcagtcaataggcgtttatttgtttataagatagttcttgcggattcacacatatgattattgagatagtcttgcggatccacacatatgattgcgttttttgactattattttgtctcctgttgaatttgtatttggattgtttgttagctttgccatataattgttctttctcttcgtttgatttcacgtacttatcctttttagctagatgtccttaattagtgtggagggatgtgtggttttggacatgtgtatgcatctcatacacataatagccgtagatgaaatcatttgatttgtccctttctaaacttttgtttttgacataaatgctatggcttgttttggataaattgtatgaagtttataggtgtggaggccttctgatatgttataaaattaagagttagattgtatgactctcagaattactggtaacatgtttatgtagtctgctttcttgctccttttaatgtgaattgcatggttctctatcttcttctccaaatctatgtgaattgcgtgtcccttttttctttttttcttttcttttcctatcttatttctgttggctttatttcctctggtttcattgttttcaaaacctttgcgctaaatgtatagtatcttgcaggccattaattgttgtttcagctgttgctgtgattcctcaga

SEQ ID NO: 71207 - DNA, 856 bp, Prunus persica
  Intron number 1 from transcript ppa001350m (locus ppa00135 0m.g) derived from phytozome v7.0 (chr-ID scaffold_2; pos 26112377 to 26113232)
aggtactagtttgctaaaaaccactggcattggagttttttggttgcttgaataatttaaatagataaaagaaaaagaaatttggaacaatgagtttttaagttgggttgtgaatgtcaaaagtccttcactaatttgaggattagggtttgcaggttgtgtttatcctttttattgttttggtactaagaatgcaaaaaacccttttttcattatgcctgatgtgtaaactagggagggtgagtgtcataagttatttatttctgatttcagctcacttatttttccgtgcctgttgttttcctcttcttttggttaaaggtttgaatttgtgcttgtgggtaggtgggtaatgttatattcgcatgacttgacatatctacaaggttgtaatttctaaatacttgaaggagaccattttggtgaatgtgcatacaatttgaatgaagcaaccttgactttcttctggcaaaaaaaaaagaaatcacaattttctgtggaatgagattatcatgaaaaagaacaacgactttctgtctcatgattaagaagtaaaaatgaaggaaaatttcacaattcattagttctttgaatgctgagtaattggatgaggagaaatgtacagttgggtgctttgcaatctaatttggtattcatttatatataaaaataacaatgtaccttagaaattctttaggattagttaagtgaagtttttgcctttttgtgactgaattcatgggaaaaatgtgttacttgtacagcatttgtatttgttgcttttccattgttttgttcttgaattgggcatcttcccatgtgcaggagttggaacgatcaaaactaggccaatcag

SEQ ID NO: 71208 - DNA, 566 bp, Prunus persica
  Intron number 2 from transcript ppa009290m (locus ppa00929 0m.g) derived from phytozome v7.0 (chr-ID scaffold_2; pos 17693679 to 17694244)
tcatcaaaacccagtttgggaaactcgatatcttggtatgtatatgatcatagctacaggtttcttgaaaaagtttctgtcttttgaatctaactcttaatccgaatgtgatttagttggaggagatgaaatatggaattggaaaatgaaaatagcaaaccaagtaataactagcttagtaatatcttcaacaagttaatctttgaaataattagaagtcttaggctttttgaagaacaaaacaagtttcacataactaccagtctgccactctgtttttgtttcttggaatcttttcatatatgatatgatccctttctgtacaatttataagtaccctagaaagatcagtggctggagttacggggtttggcaaagtggcataattattgggcttctttaaagggcattggcctttatggttagtttggttttaacaacaaagagattgtaagagtaatcagtggatctatcaactttcttttcctttcattttcgattttctgttcttttctttgctaaaagaaaacagatagtgaaacagttggactctgcacaggtgaaca

SEQ ID NO: 71209 - DNA, 413 bp, Prunus persica
  Intron number 2 from transcript ppa018743m (locus ppa01874 3m.g) derived from phytozome v7.0 (chr-ID scaffold_6; pos 17166011 to 17166423 reverse strand)
gttgttgacctcaccaatttctaccagcagtacaagtaagatgagcatttctaattctatttagggttcagacctaattattaaagtttccagcccaatgttttgcagtatatttttctaaaatattttgttttcatcttgctagctctttctggtcggttagtggtatttctcttcttaatattagaactaatctcaaatttgaattcacaaaagagcgctttcatttgtttttgggcaagttatgcatccatttaaatgcacaagatgagctttatgattcttaaagggtattaattctttagaatttagttaacgagagttaaactaatcactttttattatgaactagtacagcgtatcctcatgagagtttcatttcttgatattaccttggctaggttgattgagcc

SEQ ID NO: 71210 - DNA, 343 bp, Prunus persica
  Intron number 2 from transcript ppa017836m (locus ppa01783 6m.g) derived from phytozome v7.0 (chr-ID scaffold_7; pos 16177670 to 16178012)
ggaagctcgtaagttgataactttgcttcattttctcagtttagctttagtctgtcagtttaaagttgaaaccttgtgttgatatttctcatcttttattttcaagttgcttcatataatgatttcttcatgcacctcttcttatatccatcttgttctccatttgaaattaactcaaaccagctgctgaataacgtccattgatattttcatggttttatttgttcatgtcatatgtcttgtgtttctatatgctaccctataaacttgcatgcacagcttaaatttgagggcactattaattacaggaaattccaattattgctgtgcatacgtatagaga

SEQ ID NO: 71211 - DNA, 721 bp, Prunus persica
  Intron number 3 from transcript ppa005340m (locus ppa00534 0m.g) derived from phytozome v7.0 (chr-ID scaffold_3; pos 18225595 to 18226315 reverse strand)
tcttttaaacgaggtagcttccgtaaaaatctatcttctacaactaatttcatcgtgcatgttttctgtagaattccttcgttgaagcatttctgtatgtctcatttcggcaggcttgtttggttcagaatgatctgataatacttattcatgtgaatttactgtaggatttgtttcctgaatttaaagaaaacaacagttctcttaagtcaaagcagaaacatgttagaaggaattcaaagcaagaactgcgatcatgtagcagaccctgttttcaagatcctcctttaactagatcacttagaatggaggtaataaattcaactaattttatgcgctctcctatttatgcatctttttttttttcttttttttttttccgttcttcttttgcctctggtggtctcctcttgtatattgtttgtggacttgggttgcgacccttataagcttttttgcatttctttttaatggataagtgtttatgtaattgtcaagcaaaagaagtttatggaattaagcttcatatttctacgaaatgttctataaggcctgatagctctatgatcaagtaacaatgaatgtatggccttcaattttcaatatcagataattaagattaatcactaccattatgcaatcttaacaccctttttcctttttcttttctttttcttggtgcgaagcttcaagagtcttccacatatttggcaagagctaa

SEQ ID NO: 71212 - DNA, 963 bp, Prunus persica
  Intron number 1 from transcript ppa014550m (locus ppa01455 0m.g) derived from phytozome v7.0 (chr-ID scaffold_6; pos 22790691 to 22791653)
tcttcgccattgactgagcaatctcttccagaattgtaagaatctcaaaccttttttcaattcttgtaattatgtgatcttgatccgtaatatctcgttgtttatgatggcaattctaattcaatgttttcaattctgctaagcaattatggtgttgttcatccctttcgtagatctatattcttcacagagtaatttgtagttttgttttgctttctaatgttacgccaaaaggttggtttggttgaaagaatcaaacttttgtcggtaggtgaaatgggctgtggcctgcgagctaaacatgaatgcaaaatttaagcaatagttgatggtgtgagtctaattgtggaaaatgaagggtaattcaagggaacgataatatttgctgggttttcaatgatttacaaaatgttgtcaatgggtttgaatttctctattttatggtagggagaatggcagtgtgatttcttcatcttaaaggcttagttgggtttgaggtttttttctttcagaacccaaaagcgtttttgtttaatctgcaaaagagggtggtgtggctagaactagaagttgcaagttataactacaacccaatttcttctgtttgctggctttctaacttgcttcaattagggaatagcgtagatggatcaattatgcaattcatatttgttgattttcttaagttctaggatgttgcttatcttctggttgatggctgtctaatatccctttcttttgatgcttagttatatttcatgggaaaaaaagttcttgttgcttattgcaaatatggttttgagtttgaactccgttttgatgtgatatttttgttaggtcagttagtttcaatatttccaacttgtgtacatgtagggtacctacttaacaagttttagaaatgatattgaggtacactgagtgcgtctgcttattttccaattgttgcatttgatgttacag

SEQ ID NO: 71213 - DNA, 583 bp, Prunus persica
  Intron number 1 from transcript ppb014430m (locus ppb01443 0m.g) derived from phytozome v7.0 (chr-ID scaffold_4; pos 27083253 to 27083835)
ggttgtagcggatccgaccccggttggagccataggtatattttcactcttaaattatataactactgtaaattctttctgaattattgaattatttccgaccaaaaacaaaacaaaaaaaaaaaaaaaaagaataattgaatttctttttattggagccatagctggagttacagagttcatgtacgagcaaatgagtttttttttcttctaattaatcatttattttagttaggtataatatgatattgatgtatgcacagcacagaaaaaatgtgaggtatgtgagggtcagggcttgttttgaccaaagaagactacatcaaatgtcctggatgtggtatgtgttcagatcctttgctttcaaggggctgaaaaaatctatttctcattattatttataatttttcgtgattgaccccctctatttttttatttttatttttgtcaagttaattcacattcttcgtaaatttttttccaggtggatttctcctttggcaatcatggaaaagattcttttctggctaagaaatttttttttttccaaaccttaatacattttccataaggttcgacattg

SEQ ID NO: 71214 - DNA, 765 bp, Prunus persica
  Intron number 1 from transcript ppa000348m (locus ppa00034 8m.g) derived from phytozome v7.0 (chr-ID scaffold_4; pos 11150988 to 11151752)
gatcaagaattcccttgatcatctcgtgattgcaggtcaatttcacaattttgcaatctcattcaattttctgggttgttttttttcttcttctttttgtaatttcaaatttgagcttaaatttattgttgagcttttttttttgttaagcattttccgcatttgcagctactgatctttgtgatcgttagtgacctccctcacttttaggtttgaattgagatttggtgctctatgagtgataaaaggtgttaattctatctgagagtagaagtaaaaatgcgtatttgtctgagtatggggacagcaattaaagtggtgcagcaaatgcacatttggttgagtgttgttagagtgatgcctgtaatgggtcagatttggagagttttcaggaacaatttttctgtaattttgtttccgaaagcagtgaaaaaggcatccattcctaccccaaatgggaacataaaaagtgttttaaatttttgtatttgtttgaagagctgcattagtcatttgtttagtgacaagctatatagttatggttataatgttcggaatgcatgacatggaaacctatagacaacctaagggatgttgatcccttaacaatttcttctaatattgtgatcatgcccttagttcgtattgaatttgcaagaagtgaaacagatagctactcgcgtttatgcagtaatggtatgtgttattagccttgcttcattttctcacctaacagtttgacaatgagcactttttcagttgaag

SEQ ID NO: 71215 - DNA, 491 bp, Prunus persica
  Intron number 2 from transcript ppa007679m (locus ppa00767 9m.g) derived from phytozome v7.0 (chr-ID scaffold_1; pos 31057824 to 31058314)
ggctacaattttgttttcacggtaatctcttctgctactattacaaacccattggcacttaaacttgattttctcaatttgaaaattatttatatgatacaatacaacctgacgagaaacttttagacatgaattaccaactttgaaaattatttatgtcacaaccttctttttggtcataatttgtgacataacctgatgataagatcttagacttgaattactttactcgaaggtatgtttgccagatcttctgtggctgtgttgattcattatttatttatcttattacacaacctcttgattaaggtattcaagtatttattgcaaaatacatctgtaagactcagaaatgcatacccctctgtatttcatactgatttgggacattttgttgtactttgatatgtttcgtattgattgaaatctcatcaaccttggttttttttatttatttcaattcctttgtcgttggtctttcctcctccagg

SEQ ID NO: 71216 - DNA, 806 bp, Prunus persica
  Intron number 2 from transcript ppa003957m (locus ppa00395 7m.g) derived from phytozome v7.0 (chr-ID scaffold_6; pos 10765047 to 10765852)
ttgtaagtttctgatctcatatatacaaacatctaggcaagtctgtttgtctcatggattttattgcgtgtattcctggtggtttatactgaattgaaaagtgtggcataagatattcatctcttttagcgatttttgttacaatatttaaaattttgctttcgtttttgggcacgcaagcctaatcgcatctcaaaattgaacctccttacattatatcacaaaacaatactttgggtttctcaaattagagctctacttatatccaattgtatcctcacatcttccttgacaaaactatgatgcttattttttcagttcttttatatgaactaagataactgtattaaaagaaatgagaagtacaatcaaagtggagcagcagcccacagaagatactacccttcaaaaacaagaagccacagctaaaatacaagaaaaatcactcgaccataaagaatccagaaacactgaccacttgcattttattaaaaaccttagaaatagtaacttcctatgtccaccaaactacactccaaactacaaaatcgattagaactacagtaaggggaatgcctttgaaatgtttcaacaaagaatctcaaacagaagctaatcctctaagaggatgtatctttgaaatgtttattatttttcaggtgaaactttggaggttgcattttgcactctcaatttgatgttatcatttgttggctccattcttcacttcaaattcagaaatctcaatttgacattttcaatgtatgtcaggaaagagaacgacagtttgaaattgatattagacg

SEQ ID NO: 71217 - DNA, 470 bp, Prunus persica
  Intron number 2 from transcript ppa001993m (locus ppa00199 3m.g) derived from phytozome v7.0 (chr-ID scaffold_7; pos 22227289 to 22227758 reverse strand)
cagtacttgggagggcagagagagaagtttgtcaggtatgagatgtaacttttgtttggttgcaaattttttaggggcatcattacccaatatgaagatctggatcaactagtcaactagtcgtaccaacatttgtacatgttggaatgactagttgagatatcatgcctgcttaaaagtttaggattctggtgtttccatatccaataaaaagatagcaaattacctaactagcaaatgtgttgtgatttatggttggaaaattgtttatgcaactgttttaccttctagattgttttctttataattatttcaaaatattaatatttgattcatgttgcatcgtgtattgattaattgagatattatagttcctggttattggacccgtttatttagatttgggtcatttgctaaaatggcatcgaatgtcgtgcttattggcgctttttatttattttccaggctcg

SEQ ID NO: 71218 - DNA, 835 bp, Prunus persica
  Intron number 2 from transcript ppa025250m (locus ppa02525 0m.g) derived from phytozome v7.0 (chr-ID scaffold_7; pos 9659014 to 9659848)
aagctcaaggtgatcgagcttctctctctctctctctctctctctctctctctgtatttctcatctatttttaaattttgcttgctgtttggttgattttcacaactctgaattcgaactgtgaattttgagttcacttcgtcccttaatcgttttccaaacggaagatcgagcgatgatttttcttgctttaatctgttcgcttattagtgaaatatttgcttttcttcagtttttctcttcgtcatgtgatgaagatgaagctcaatcggagcttctccctctgtttttcttcctttttctctttgtattttaagctctgtttggctgaaatttctgcataatccgattgaatcttttacaagctcagaagcaatttgcttgattaatctgatctggttcttaacttttctgtttggctgaatttttatcttatatatctgaatccgaactgtgtttttaatttccttttgttactttaatcgtttcccgaaacgaagttcaagctgatatctaattaagctgaatctgagcttctctctctctctgtttctcttccatttttggcattctcattttgccgtttggctgagtttgtacgattttcatggaagcttcggttcatttttgttgctttaatgtgcttttcaatataaatctaaactaaagcttataagatccttctttctaagatttttgatttccaaatcagtggttgagcgattcgatttcatcgatccgattcaattatgagcattttcttcttcttcaagtaataatttgaattttctctgaattagggtgtgcggagaagtcgctccaagacgcaaacaag

SEQ ID NO: 71219 - DNA, 559 bp, Prunus persica
  Intron number 1 from transcript ppa010928m (locus ppa01092 8m.g) derived from phytozome v7.0 (chr-ID scaffold_1; pos 21705815 to 21706373)
taccaagaggcctgtccattgggtcttttacacaggtgtgatgacacacactaataaactaataatttctctttgcaatttctaacttgtttcattctgtttcaataattaattagttcatatgccactattagtctaatctaatttacggagaagtgaagagaattcgaacttgaatgcaagggtgggctcactgcctaacccacttctgcaattatattatatataagggcttttgactgaagttgtcctccaaactcaactattgctattgctcgagtatcattttgtttcatgaactaaccttttcattttggatcaaaaagcacctcatggaagctgcaaacaggatttctcttcgattttgctgtgaaggaatggacacagttggaggactattgaaatgaaaaatttagttcatgaatcaaaatgatactcgagcaatagatggggaacattttcggtcaaaaaccctatatataagaacatgtttgcaaattgaaattttcttgttcctctatcataatgtgaaatcaatattgtgcagggagggaggcgc

SEQ ID NO: 71220 - DNA, 730 bp, Prunus persica
  Intron number 1 from transcript ppa012341m (locus ppa01234 1m.g) derived from phytozome v7.0 (chr-ID scaffold_6; pos 174205 to 174934)
gcgcttgaagcagatattcagcacgccaatactgtgtaagtctccgtatttttttttttattcagctatcaactcctctgtgtaaatttaggattttttaaaaaaaatttcccaacttttttgtttatgctctctaaaactttataatttttgttttctggaaccgtctagtgtttttgggaccaacccaagaagagagagaaaaaaaaatattgaaagaagccaaactataattggggaacctctacagtagcttcagttgaatgcccctgtttgagtaattgaatgaatttggaaagatcaacaaataaaaattgtgcttcagctggtgctacgaaaatcacagttattggcattaaaagaaaaaagaagagccattgtaattttgcagaggccccatttcataattaaactctagtaacatacacttttgttttggttattatattttctttgacagtgtctgctggccacccaatattttgggcaattgggtcttccctaatccattagattggttcgtttggaaaaaaaaaaaatccattagattggtactaaatactcaaaatgtgcaataacttgatttgtaccctgtataaatgctgtagattttatttattgtgtgcaattatgtcactttggtgatataataattgttgaattcttgttaatcaaatgctttgctgggccattgttttgtttagggctttagattatccaagggagaaag

SEQ ID NO: 71221 - DNA, 595 bp, Prunus persica
  Intron number 1 from transcript ppa012738m (locus ppa01273 8m.g) derived from phytozome v7.0 (chr-ID scaffold_4; pos 8723538 to 8724132)
tcagtactacactcagggatatcaaactgttcaaggtatggcatcaatttgttttgtttagcacaaaggacttagtttgttgatatttttgggtttctttttcttgtttagtggagcaagtgcatagtatgaatgagattaaaaatggggttttggtgtatgttgtgatgggattggatgctacaagaatggatcaaattctaatttgtctttctgggttggaattggtttgatttatttagtcatttgtatggatagaattaaagaccatacttttgagcttcgaccaacctcaatttttggctatggcaagtatccccttttcatttgcagagcttgtcactgtttgatttgctgctagtgactagatcagctctatggtggttgtaaagggttctttcattttttttttttgtgtttggaattttgtgagtgaatgacttgggtatgtgtgtttgttgcttgcattccattttgtgttttggggtttaactggatcttcattctttaccactcttcttgatgaatgataaatagttgttgtcatagatgcattattctgtatgataaaatggctttgttgttgttctaggct

SEQ ID NO: 71222 - DNA, 959 bp, Prunus persica
  Intron number 2 from transcript ppa015497m (locus ppa01549 7m.g) derived from phytozome v7.0 (chr-ID scaffold_1; pos 25801273 to 25802231)
cttcttcttgggtttaacagggtcggtttgtacttctcatttcatctcatctcataggcttttacgttacataaactttaaacacctatgtctcctccctctccctttcccaatggaaaaggataccattcaccctgaatccatccatggattctcgagttgaccccaacaacaagcctcagaatattctgctacagtatggtggtgggcctagtttttctgttagttgaagggcaacattgtaaattgtcaatacattcattaatttttgggttatataatattaaacaaatatttcattttaagtattttatttttttataaattgatattctaaactactctaatataataagaggggaatcaagttttggtataaaatgaaatacacacgccttaactaagtggcctaaacaccccaatatcatcattaataccaattttagcctagtttcaaaataaataaataaattctcaaatttttgtctactcttcttttgttcttcttcttcttcttttttttttttttttttttttactcaatccccatttactcatttttttaaataaaaataaatttcctcccctgaatctcctggcctagaaaacaaagaggtcaattaaattcgaagtttcaaacccacagtaaattgcctatcatacccatcattttgtttctctaactctatccaagcccaaagtaccaagtctttgttgggcttcttctttgattagtcccaggcattaagctttttggatgctccttctaatttaggaaaatagtcctaatgcaaagatgttcatccatattctcaacctcttcaagtaatgttgcaataaaaatataaatattaaaatattaaaaaaatgttcttgtagcaatacttactttaattctctctttgtaggataacaatatctcagaaccttggattcctaggcctaagttacagttctcc

SEQ ID NO: 71223 - DNA, 741 bp, Prunus persica
  Intron number 1 from transcript ppa003855m (locus ppa00385 5m.g) derived from phytozome v7.0 (chr-ID scaffold_7; pos 21527187 to 21527927 reverse strand)
tcccccccctttctctctcgtcaattgggtttcaggtcagtcaagttctccgatctctctctgcttctgtgatttctgtgttctctgccattttcatttttcatttttcgtgtatttttgagctgcaaccactaagcgcgctgtttcaattgtatcagaagttatatttcttttggcctagatctttacctctctatgtttctgtagctgtcttttcttgttggttcttccaatatacaaattcaacctttttctcttacgcaactatttggtgttattccatttttgcgatgaaagctgattcctgctattggttcattcgactttgagttgtaatttctgtttggtgttttagatttcgaatcttaattataattcagtcggtttttgagtattggataggacttcaagaatttttttagtatatcatgtggtcagctattcctttcttaactaattggatctaaattatgaagttggaacatcgaagtttagggttttttttatatagttggttggagttttctataagcttgtatttgatatcatgaaaagtttgatttttgagagatgggtgagtactatagtttgatttggatcatttcttattttatttggtggtgaacgttgcgcttttcttttggtcaactggtggtgaaagtagctttttgtagcggaacccagattgagtttgttcggttttgttgtagaattttgatatatagaggagagagagagaga

SEQ ID NO: 71224 - DNA, 434 bp, Prunus persica
  Intron number 4 from transcript ppa009070m (locus ppa00907 0m.g) derived from phytozome v7.0 (chr-ID scaffold_6; pos 23494692 to 23495125)
gaccttctggctcccaacctaatccttcagggtacatctctctctatatatgttttcattaaacttgtattaagtcattttcattaaacttgtattaagtcatttgtgtgtgtgtgagtgattctagggccctgtatatgagattcgtttcagtatttttaattaagacaagattgattggaagcttagattgtaaggcctgagtaggagggacttggcttaggtttgtcaagatcgtaccagtagttaagcatttcattatctaatctaggcgattattcttagatttccacctatttcattatctaatacaggcgatcatgctcaaaattttgatttgcagccttaaaatgttttttgccccttttaacattggttacttatgtgtttaagtttttaaattctgctgtttactctatggctttctttgcaga

SEQ ID NO: 71225 - DNA, 694 bp, Prunus persica
  Intron number 1 from transcript ppa004963m (locus ppa00496 3m.g) derived from phytozome v7.0 (chr-ID scaffold_1; pos 32677460 to 32678153)
gagatttaattggtatattaagcaggtcagaccctggtcaagcacgataattttctttaatccttgtttagtgtttgatgatttgattccgtcttcttctttctctttttttccgtctgtacagtgatagtgatagttaagaaatctagttcatcttctaaatagccgtagattgtttgcacatggaaatttatgccgtctgggttttttttttaatattttaattgtatatattattcagtgataatcacctaaattcgtgcagaagaaatgtcatattatgtatttctttatgtatggtgacagacagcgtaagcaagcatcaagttcccagtgaaagatggggacttgtttctgattttaaaaagtcaatttgcatatttctttattgtaattacacatctgatacggcatccactattttaccctttagaaattcactgaactgtacacacatgcaacacaattaaacaggtgcatttcttactaattcattgagagactctcacaaatcctgtgtaattgacataaaatcttgttaaatttcataaactacaaatataaatgcatgccttaccgagtttatctataaatgcatgccttaccgagtttatctagtcttatcccttagctttcgtttatatttgtatttgttgtagcattgagatttacaagcataacaaagaagaaagga

SEQ ID NO: 71226 - DNA, 534 bp, Prunus persica
  Intron number 4 from transcript ppa023509m (locus ppa02350 9m.g) derived from phytozome v7.0 (chr-ID scaffold_2; pos 21049517 to 21050050 reverse strand)
ttcagaatccagttataaattttaagggatttttggtaagaatgtaggattatcttgaattgcaactaagggcaaactttagtttctgcctctttcctaaagggttgcttggtatgacgtaaaagattttatttattgttcgaagaattaccaatatcaaatgatattttactttttccacgattgaaatattgtttgatttttttagtactttcgaggtaattgtctaccaacctgttgaactgagcaacttatgttgttttgaaataagctgaagttaaactatagatagactgttttattccattttttcaggatgccataaaatgaaataaattattttaattgctaacaaggagatccttaaaattaagtacattcaatcatgattttgagaactaatttaaatgaaacacacagttgtagttttccatatattttatgagaacttatgacatgtgaaatgtctggcaactaacctatttacatgggtgtatttatcttgttgatttatttctttctcccaggtgggaa

SEQ ID NO: 71227 - DNA, 213 bp, Prunus persica
  Intron number 2 from transcript ppa023509m (locus ppa02350 9m.g) derived from phytozome v7.0 (chr-ID scaffold_2; pos 21050315 to 21050527 reverse strand)
cacagatttgtacacaaccggagaccagagaacaggttgttgttcactttagttttgtagctttattgaatttatagttttctcagtttgtaggggctagcatttagaagattcatgggttgtgtgaatactgtttctctgtttacaaattagtttattttgacattgctgaatatttttgatatctggggtgtcttgtgtatgtagctgaag

SEQ ID NO: 71228 - DNA, 505 bp, Prunus persica
  Intron number 1 from transcript ppa009348m (locus ppa00934 8m.g) derived from phytozome v7.0 (chr-ID scaffold_1; pos 8553319 to 8553823)
ctggccctttccctgaagctgtgctgcttaaagaggttgccttttgaattttgacacaactccatggttttactctttttttcccttctttatttggtattatgagtttttaaatttcctttcctctgtgcgaatttcggtttctgaaatataaagactttttagtgcgaccctttacttttcagccaccgctgtagaatgttcatattggttatctgagattcaagctatgtaaattgtggcttaagtacattcatattgtgggcatctgagttggcctttcctttgttctgtttctttggactataatgtttcaccattaaagtatgaaccttgtgtacaaagggatcttctttttcttgaaaaactaaatgaagttggataagataaggttttgggttgcttaagtttaggtgcatgtagtattacagtgatgagatgactctaattgtaattgattttgagatgaatttttatgatgaattgcagaagaaagttcaggaag

SEQ ID NO: 71229 - DNA, 476 bp, Prunus persica
  Intron number 1 from transcript ppa013279m (locus ppa01327 9m.g) derived from phytozome v7.0 (chr-ID scaffold_5; pos 8111085 to 8111560 reverse strand)
tcttgggtaagatttattttcttaatataatctattcttcaaagaaaatttgaattcaactcatcatgttcaactaacttgatccttcaatcaaaatttgaggtgatattccagttttggttataagttatttcatcatgtagccaaatcttaaggtgcattccaactttgagtaatacttctgttagttctgttttcagagagtccaacttagctgctcatacattagcgcgtttcgccttatatatctttaaatgatgcatcttcatggtattgggatcctcgtgatatcattcaagatgtactagtaactgatttcttgtaaagtttctttggtttagaactgttatgaaaaaagtttaacctgaaaagtacatggtgcagaataattcatatgtttggaactatttgcataacatttgtttttggtttaatgtacagttttcaaatatagcaacccattatttagcgtggcg

SEQ ID NO: 71230 - DNA, 868 bp, Prunus persica
  Intron number 4 from transcript ppa001732m (locus ppa00173 2m.g) derived from phytozome v7.0 (chr-ID scaffold_3; pos 10352637 to 10353504 reverse strand)
tggtgaagatacaatcataggaaaccttgatagtggtcagtttttcttcctcttattttatttatttatattattaatttttgtcaatttttgtcaattttgcttcactttcaagtcatgttcatgcactataagtttagaatgcgtcaataagctcaatgccatgatctggatcgttgacttatcatcactcatttcaacaacagtaactttcaacaaaataatgtttataaaattgattttcatttcaatggtgctgcagatattgaccaattccaacggtgctcactaaatatacgtccatgtatgtatgacaaaacattgagagctcttccctctagaggattaattgatagtaatatactaataattaattaggccaggttgtattttaaagcttccgtcaagggtatgactcattgaaggtatttttgtagttctgggccaccattaaaagaaaaaacaattacatctgttgcaaataacaactagtaaagattcttgactttctttttatcactttcttttatgattaacataaggagccaacgcagtgtaaaaaggtcttgacttacagaccagagatctaaggttcgaatccccacagcatcatagttgtgtgtctatgtgtgagaaatctcacttccctccagcatcatagttgtatgtctgtgtatgagaaatctctcttttctctagtttagactatcatttatactcaaaaaagcaaaaggagggtgcaattatgtgtggtggcttgcccaactgatgaaaatatgaaataattgcaattctaaaaagaatgtgcgttgctttgctattgagcattctttttagccttactgttgttgaatgggattgtaggcgc

SEQ ID NO: 71231 - DNA, 1004 bp, Prunus persica
  Intron number 1 from transcript ppa015508m (locus ppa01550 8m.g) derived from phytozome v7.0 (chr-ID scaffold_6; pos 7679624 to 7680627)
aaggtccatatattttttggtttggtgaagatgtatcggttctcaaagatgggatggttgtatctcattattttgaaaagaaggaagcgtcgccaactagtgaagattaaaacaatgctcttacctttgtgaattttttgaaggtattttatgacagaatattgaaaataaatgccactttgcatctcgcttcccataccactttcatgatttgattgcaatgaaaggaaaattggataaaagagtcttgagtaagtgatgacgtaatattggagcatgatattgataggtacatcaccaaccctattgaaattgtggtggctgattttgattatttgaagtggtggaaattgaatggggttaagtatccgagtttggcacttattacaaaggatgtgatttccatttcggtatcaatggtggcttctaaatcatgctttagcaagagtggtcgggtagttaattcatttcatgcttcttcgactccaaggattgtggaggccttaatttgttcacaaaattggttaaggtcggatgacatatcctctttacaatataagtcaacaattcaagagatggagttttatgaatccgattgaataaggtattactttgtcattttatgtgtcttattgatgtattatatagtttgtatgtttaaataatgttttaatgagtttatgtttatgttttatagatattatgtgttcatatgtacctcccaactcgatcccaaatattttgcagtgttaggagtgactttctcatataagtgactttctcatatcgcactctcttgtgttgagaattttgacatcattcaatataaattttcttacaatcattcaaagaacataggaattggagtgcttcctcttttgatgaaccaaagcccttgaggccaagaaaatcgacgacaacaattgcttctaaatgtcagggcatagtcattgtgtgtgttgcttatagcctgtcgattgacccgtttcgaaagaatacgtgaa

SEQ ID NO: 71232 - DNA, 591 bp, Prunus persica
  Intron number 1 from transcript ppa005477m (locus ppa00547 7m.g) derived from phytozome v7.0 (chr-ID scaffold_8; pos 21350087 to 21350677 reverse strand)
tctcaggtttgactttcagtttctgagttgttgtattaactcatctttgatcctatagttttcatcgaaagtgttttggacggattgttctgtggatataattgagaattgatgatgtcgaggttgcaagataaatagaaatgaacaatcttttacatcaggataatggaaaaggtgaacaagtttatagaatcaataaggccttgcttggcattttagtatataaagacttgagtatgtattatttctatcaaatgtttacacgagagagggactgagaaatgagttatttttgaatattctggttttaagtatgaaaatatttagtatcaaacaaactttttgctcaaatttgtataacttgaatggtcgttaatggttcagctgcaactttagtaatgctagcatttggatctttttccattgcttatgagcctaaaatggattcgaagaataagagtatcatcatttattgacatggaaactgtttttgacacatggtactgttagtttccaccttttatagttctgtgataatattttttgacctgttccctggaaagtgacaatattttcatctcgtcttatagg

SEQ ID NO: 71233 - DNA, 511 bp, Prunus persica
  Intron number 1 from transcript ppa017218m (locus ppa01721 8m.g) derived from phytozome v7.0 (chr-ID scaffold_1; pos 3980383 to 3980893 reverse strand)
tagctcggttctgggttaaattcgctgacgatgtacatttgacaactctaccactacatatgtaatgttaacccagtaatttatattgacttatcttttgacttttcaatttaataaaaaatgattaacttcatttctttgaaagaggacattggatcaagaaagttaaatcaaaagatgtttctttttggctttgagctctacatatgaaaataactatattctaaaaacagtcttaaaacttaatatgttgctatgcactgagttatatttgtcacgagttcttctcgagacgatgtatcataggcccaaattggagctcggagcccaagttttgttgtttgtggacttacttcaactagctgctctcagtccattcagccgtccttctacgtcaagaatacaaattgacaatctgtggaaaacattatatgaccgtcttgaaaaaaaagattcttttaatcatacacatttcaatgtctctaattctgaacagggtccttcaatttgg

SEQ ID NO: 71234 - DNA, 795 bp, Prunus persica
  Intron number 1 from transcript ppa000742m (locus ppa00074 2m.g) derived from phytozome v7.0 (chr-ID scaffold_4; pos 3374506 to 3375300)
tgaagcacaatctctgcgtcttgcttctgcagaaggtaaatactgtctcttcttcttcttctgaatgttttttcaagttggtattgctgatactcaaaatctatgcactaaagcctcaatttttgttttgaaaaaaaggaagcctgagttttttttttagttgtgttgaacagcagagaacagagtgctcaatgcagaagttggtctttttgattgagaattggtagaacattttagcctttctagtgttactgtgttagagcactcccagttcaatttttgtcagtataaacaaaaattagaacccatataattttacatgttggttagattagatataaacttacagaaaagatttaaaaaaagaaagaacttgttttcatcctaaatttatattgattcaaaagcgtaaaggttacaactttataatcgtaaatgaaatgaaagaagctaaagagttggacctgaatttattttctttcatcattacaactggaaatggatatgaaattcaatgattgagagagatacagagcataatctgcatcttctagagaagtttactaggttataatggtgggtggcagaaggcccaagcccaatcactattagtattttggcatcaacattaatttgggccaatatcaggctcaatcactctacttttctttaaaaaaatgaaaaataaactcggctgatgcataaaaaacacagaaaatggaaaaaataaaaagattcatgatttgatttgtgtgcgcagtggaagcactaaaagaaatagcaacacaagtggga

SEQ ID NO: 71235 - DNA, 995 bp, Prunus persica
  Intron number 1 from transcript ppa017864m (locus ppa01786 4m.g) derived from phytozome v7.0 (chr-ID scaffold_1; pos 26941100 to 26942094 reverse strand)
cacaaaagtgattgtgcagttaaaatcaaataacagaatttttgaggtcccttgaaaggaaagagatggtgggagcaaaaggaaagagaaaataaccttggagaaattacagagagcccttgaaggtaaaaaccaaggcaaaggtgcaaacagcaatgattaaatgaatgcgatgggagccactcgatcatcttctttattttgttgaaccaatgaacctctgagctaggttttttgacttggaagactgggcccccacctccggccaccactgtctttatggattgaatgataaagagcaccgcacgtggagtctgaatcaaggaactgtccaaccacaataaaaaatgacacaaagtggaaaaaaaataatgttaaaaacaaaacaaaaatgagaaacttacaaatttacaaacaaaccctcgtcctcctcttcatgaatgaaaggcaataatttcattcagaaaatcaaacaaaagaaaaaagaaaaaagaaaaatagctttttaatgttgatcatatcatataccatggctatgccatccatataattctcactcattatttttgttgcttaaagcttgcctgccctttctctccagtctcttgacccttatccttttctttctttctctctctcacaaaagagagaaaaaacaactcatcagctgctgagctgccaccttcccccatctgcaaagaatttcatgctccacagtccacaagaaaaaaatagagaaagaagagagagagagagagagagagagagagagagagagagagagagagagagagagagagagagacccactactaggccaggccaccactaagtgatagaaattgagctcagctgggtcagctacagttgtacgaaccaggagagagcaaaaaagaaaaaatatttttttttaaaaagtagtgagagagagagagagagagagagagagagagagaagaagggccgtcccctccatatgatcatggaagctgaaa

SEQ ID NO: 71236 - DNA, 719 bp, Prunus persica
  Intron number 2 from transcript ppa011539m (locus ppa01153 9m.g) derived from phytozome v7.0 (chr-ID scaffold_6; pos 17711733 to 17712451)
taccttgaagatcggacagttcgtttgcagctttggtaaggatgcatccaggttccttgtgatttatggttgcttaagtaaatggttttgtagtgaattaggatgaaggttttaatgacaatatacatatatgtgtgtgtgtgggcgggtgggtgtcaatttgtttgaggttgatccaattgtttgttgtttacaagtgagtcggcggttgcatcgcatccatatggatcacaaaaatgatttgtttctttctattctgaaattatcttgaggagcaatttggataaatttattagagttggggggaaggtggcaagttttctaagtttttcttacactaagcttgcatggggctgaaatcttgattatgacaatggttaagatcttcattgtggtgcatctatggtcaaaaagtgaatggcaactctgcttgaaagaatagagctccccattagtaaaccaattagtgcattttttatttatacaaagttcaacagaaaaaggtgtgtgttctgcttcatggttcttttgatgaccatttggtagatcaaactttagggcttgttactgctacacacttgttgatttgtgagttcatgtttgtgtacatgatgtatatatttcttttgtttgctatttatcttttttttttccctcctgaaacatggctttttaactttacagggatactgcagggcaagaaagatttaggagtctca

SEQ ID NO: 71237 - DNA, 426 bp, Prunus persica
  Intron number 2 from transcript ppa007672m (locus ppa00767 2m.g) derived from phytozome v7.0 (chr-ID scaffold_8; pos 48385 to 48810 reverse strand)
gggactacgcttactctaaggggtatgtttttttgtggaaggaatgaatattttcgtatctttgtggttgactctgaactaatttcttgtttgtttgatttggtttcaatgttcagcattagtggcaagaattgcggttcactccaaattttcattgtcatttaagatgttcttcgactctctttttagtacaatgaatgttattttttttgttggaggacatggaatttatgtgtttgccatatctttaaagattttgttagtcattgtctggtcttttttctactttgatgtgttggttgattatgtgcttgaagtgcatgctttgttggattccattaccactgaatttcatgcctttttttcttaacaaaaaagagtttgttgatttgtttttttcctctcctggcttagtgacaacaataa

SEQ ID NO: 71238 - DNA, 896 bp, Prunus persica
  Intron number 1 from transcript ppa009914m (locus ppa00991 4m.g) derived from phytozome v7.0 (chr-ID scaffold_2; pos 22639772 to 22640667 reverse strand)
gctcgacccctgcgtcaagcgcaaacccttctctggtaattttataaccgccaccgccaccattatcgctctaagctttactctttatgcatatgtttatttgtgtttggcatattggtttgggttttgttgttcgttatttgtcgattttgtttgtatttgaatatctttgatggagagacagttacagagttttgaattgggataatgaatcaaaatcaagtggatatttacctggtgtttcgtcctgcttgctttgcaatcaactaccagtaaatgcatattgtatacaaatttgcaacttgcaatttcggaatggtttcgaactgtttataaactagcttatcggtttttattacttgcatttgtggaaatgcttagtgttttaatcaaagtacaagtataaagtttttagaaacttagagatggtttttaagtagcacaggaaggaagcgagtttagtgcattcctgtgtgcttgtttttatctttactgcagcattaacatggagacgtaagataaatgtatgtgggttaacttcaatttttgttgtttgagagagagagccattgagatttcgcatcttgttggttcttgatgattgaggttctgttttatttcttccatccataatgcccttgtccctcttctctttttctaaaatattgacatggagtcagtcagattagtgaatgaaatagctgaaagtaaacttcatggtcttgtttttgcttggtttggttttgttgccatggcacaaagagaaagaggctaaatgaacatgatagtagcatactcttccatccactgttgcacacttattttctttttctgaagcctttcctgtgtaactctgtttattgcagaagaagaagatcatattatagtttcagccc

SEQ ID NO: 71239 - DNA, 539 bp, Prunus persica
  Intron number 1 from transcript ppa020553m (locus ppa02055 3m.g) derived from phytozome v7.0 (chr-ID scaffold_1; pos 39406065 to 39406603 reverse strand)
ttgtttaagatttctcatatatttcgcgagggtaatcatggagctgcagcgttggcagatcacggtgctctggactctggttgcacatgttgggacactgcaccttcatttattttgtccttttatcatcgagactagctcggcatgcccagttaccattttacttagtctcattttgtttactctttcagagttttggttccttgttgggcctacatgttgttataccttcatgtcactgtctttcttttttgcagggttttggtttggtcccccctactgttcttgttttcttcatatatgtttcttttctatgaataaaattatgatcaagggggccggcggaatgtgttggtcccttctttgaggaatgtgcatctgatgaccgatattgaggatctaatctcgcctaatcccttattctatctaaaaaatagaatactaccacctcttactactatacccatacatctttgtttgaaattgttgttctggttggcaaagagattggaagatcaccatcttgcattttttttaca

SEQ ID NO: 71240 - DNA, 899 bp, Prunus persica
  Intron number 1 from transcript ppa024482m (locus ppa02448 2m.g) derived from phytozome v7.0 (chr-ID scaffold_1; pos 40242438 to 40243336)
gcaggctcataatcgattttcttggtatgcatttgtggtttttggttattttttaaaaatttatttgggaaaaggtaataatagtatatgctttggtctgtttggatgaggaaaaataattcggaatttaactaaaagtcggaaatttaagaggagaaattgacaattcctttgtttggcaacttaagcacggaatttattaaatgacatgcggaaaagtcgtggaaattggtgcatcaaattcccgagtctaattttcatttaaataagcgtcatttcacaatttccacagtattatttacaaaattcgacatacataaatccaaacactgaaattttcagttgtcagaaattgaaatgatagaaatctaaattccgtcattttagaattccatgtaaatttcaattccttcatccaaacggtaaattaattctcatcttattcttatggctgacaattcaaacatgtataaatggtggaaaaattgcttttgttttccaaattgttttcaaacgctgtacacaaggactaaagtgcacggtaggcctaagaagctttttggacactcatttatcttgataattttccgcagtaagttttatatatatcaaataatattggatgaagagaacatatagcttgtggaaagagtcgtgatttgcaggctggtggttctaggttcgaaatacttgacacggtgtgtataaaaaataaaaaataaaaaataaaaaccttcccataatatggacatgagttggcataatacctctatttgcatcagtactttgtactaaatgataagtttttttccttttccacatgcatttttccaaaattcttgtctaatagaacttgtggttcagcaaagagtcttggtcacccctttctaagcgcatat

SEQ ID NO: 71241 - DNA, 670 bp, Prunus persica
  Intron number 1 from transcript ppa004842m (locus ppa00484 2m.g) derived from phytozome v7.0 (chr-ID scaffold_1; pos 25129460 to 25130129)
ttcgcgaacgcaagctctactaccccgctctcaaggtccgcaattccaagttctaaattttttactggttatgatttgccaccttttttgttcttcataaaagttcctcaaattatgaatttagatagcattgtttctagttacttgatttgtagaacttaggtaattcacatattctggaaagtagaggtagatttatgcagagcttatgtgattgattattctttaatgtgtatggttttcacaatttaataaaatggttggaagtttcatttgtaaattggatagtatttttcaagaaatgtgagatctttctctctgtattgaggttagaatgtaagaatatttgtctaatcaccaatgtcagctttcccacgtgtgtatttgtcaattctttatataacattttattttgttgtaaattattctcgattgttgcctctttgaatttattcagacaagtacctcttgttggcttttttaccatatttttcttttcagaaggctgtatggtatatggggggaagtaggttgatattactataagttgaagcttaatcctgtaacagttttgtatgttaaatgttatgtttccttgttttccctgtttctaatctgaactggaagagatagatgctaagtgtgtttcacattacagctctcggaggct

SEQ ID NO: 71242 - DNA, 1028 bp, Prunus persica
  Intron number 1 from transcript ppa005492m (locus ppa00549 2m.g) derived from phytozome v7.0 (chr-ID scaffold_4; pos 4166751 to 4167778)
atcggccaggttaaattttttttaatttatcatttttactaatttccctttgtgtttcctgttaatttaatgatgttctggagattgtaatgttggataatccgctgtttggttggtgaaaaaatggaggaagaatcaagggaaaattaattttttatttttagttttatttgctaagttaataacaaggagaggaagtgagggggggaaaaaaagtcaacttcggaaagattgacacgcacgactgattgagtttgtcgttttctgacccgaatcattttactgtttgattataactgttttattgactctttgactttggagaaatttgtgtatttataagaaatttattgactttcttgacactgaagaattttgtatagttttaaaaaagttctctatttttaatttccaagttaacttatgagaaacgaagagagatttaaagattcacaatcaaagttgaattagggagattatgacttttcttaaacatatttaagttccacaatttacgtaatatatcctctgctgctgttgttttatattagatatttcgtaaagcatatacttgtggaaaaataaaggaagaagaaatggaatgtgagcatttcattgcaactatcatgtgagttgcctttggaggttctttgtttgtgggatgttggaaaacccagctaaacttgactaacatctgaaattgaattgtcgtcagtttgctatcagcataccctgttagtagatgtaccaactccaatgatttttggaataaaggtttagttgagattaattccaaccaataagaaacaagccaatcacatggtctgacttgacagatatgcttttgttaccctcaccttgcctttttgatatctttaacatctatacttataaagctaatttaagaaacaaaagtaataattttgttttcgtggtcatttttgttctcatattgatttataaaattgaatgagtattaattgttgttatgtcctctccttttgcagatcaagcgagaaatatcaacg

SEQ ID NO: 71243 - DNA, 625 bp, Prunus persica
  Intron number 1 from transcript ppa010519m (locus ppa01051 9m.g) derived from phytozome v7.0 (chr-ID scaffold_8; pos 15959645 to 15960269 reverse strand)
gtcgctgttaacggcggaaggaacgccgtcaccgggtaagccaccgccaccaagtaattttttcaattataattttcgatgttttggatgttttttctgttgaggttaaattattggaaagaatacgaatgagattctagggttttcgtgaacacatatttgagtttgggattccgattgagtttgatttctcatgatcaccactgggaccaaaattttctcgtgtatgtctttcaaaagcacctatttttaacttgcttttctgtttaatttggtgaaatcttgtgattcagattggtctctttatgttccatctttttgtttttaaaattttcaatttctgatattagattctctgtaattttgtttggtttgttatgaagttttgtaattttgatggtttgtgtatgattcaatttgaattctgttgacggtttggtttgttttctgcggaaatatgtttggatgatcatttatgtcatgcatttgtccctgggaatttgtttgcatcgttctgcatatgtttttagctcaaatcaacataagtattataatgttccctgcattaaatggaagacgttttgtttcaggttgaggacttgcaaaaggaagtttgagaagccaa

SEQ ID NO: 71244 - DNA, 697 bp, Prunus persica
  Intron number 1 from transcript ppa013663m (locus ppa01366 3m.g) derived from phytozome v7.0 (chr-ID scaffold_1; pos 35371734 to 35372430 reverse strand)
caccagccggaggagaacaggcaaagggaagaaaggtattgctggaggaccatgctaaccgattgagcaccaaagttgtgttaaattatgtgtaacaagtcaatcaaatctcttctcttcacttttttggtaagtggcatcaaatatgggggctggcttctcttgcaattgtgaacgtttgttggttatggtttttggaagggttggaatataattatgaacatcaaagaggacttatgttaattaaattactgcctttgaatatgtgatatgaacatgaaattaatatatttgaatctgcatatatttttatttgcaactctgttcttcttttgtttagcaaccttgaaagtattattttaatttactgtaataatgttgataatttccctattattatttaaatttcatagcagaaagaaatggagcaaaaaaaaaaaaaagcaaatccagcagcgaaaggcactttaaacatattcaaatcttttttttttctccatgattttgaatcatgctgtcatttcatttcatttatcatcatcatgttgcttcattgcccaaagtttcttttacttttttgttttctcttttccccttaatcacgtacaatcaaaacccaaagaatccaaagcaaacaagacctttatttatctgtctgcctttaacaagtgtaatgcaagcaaacaaagagaattaa

SEQ ID NO: 71245 - DNA, 404 bp, Prunus persica
  Intron number 2 from transcript ppa025515m (locus ppa02551 5m.g) derived from phytozome v7.0 (chr-ID scaffold_7; pos 17765536 to 17765939)
ccctagtcagtgattcaattggtgtctcctttcctgtgagttccaattctaattttgaagcagcaattgagtttttttttttttttttttgggtttcacttcagtaccattatgctgaaaattttggtaaatccagttttctctgaagtaacaatcacagtgctgcataaattctgtctatttggtttctgttcagttcatgcaacatgggaataatttacaataaaagaccctattgtctctgtgagaattgataatgcccttttactttgctagaggttatcttcagagttgagcatgaatgattatgatcgtcaaacatttcatattttctatatgtttttgcctttatagctgctgtcctgtatgattctttcttgtactgatcatttgatagataaagg

SEQ ID NO: 71246 - DNA, 852 bp, Prunus persica
  Intron number 1 from transcript ppa006922m (locus ppa00692 2m.g) derived from phytozome v7.0 (chr-ID scaffold_8; pos 21133759 to 21134610)
gaactttgcttcaagaggtatgtttttttatattcaaattatgatgaaaatttctgaattttgttattgcatcattttagattggtatggcatgtcaaatgttgatattggtcatcattcgatgcaatgtgttctatagttgagcttcaagttcttgaattttggggcatcttataatagagaggtttgggtttgctgaaattgaaagccttgtagtatcgataagcacttgtaagttgcaggttattgttcatgcgcatggtgattaatatttcagtttatatgggaatgggatgggtacattgcgaggaagtttcccctaccattaacagggtctgtgctaatattcacttgattcattatttatgatacattttttaagcactttataaaacttagttggttcagggatctagatcagacatgcattattacgaagtcatgtcgcaggcatgaccttgtaagcatgaacatacatgtatgcataaacctcgaaagcaattagaagtaagtttgccatcaattggtcctggtaagaaaagaacaaccccatttgttccaccaccgctaagtccaaaacaaatctttaacgtgtttgtaagggatccttatgtttgaatgacatggtgtgagctgtaagttgtaagttgaatgacatcggaaggctttttttttcctcagttatgttcttgttttttctaaactttgaagagggtgcatccctactcccttggaaatctgaaatggtgttgatgtatgattacagattcaaatttttatttatttatgaattcgagttaattggatgcaaatgcaggtaaggaggggtgcggacagagcagaaatctatag

SEQ ID NO: 71247 - DNA, 548 bp, Prunus persica
  Intron number 1 from transcript ppa020731m (locus ppa02073 1m.g) derived from phytozome v7.0 (chr-ID scaffold_2; pos 13519285 to 13519832)
cctggggtagaaattgatcgatctaccttatggaagagagctagacaggacaaacatggtaacatccctgatccaaaggtggcagagaaagcaaaattaattgtaagcctactatcactctgttttaaatttttattaaactgtgaattattcttattacgtcgtatgttatatttttcgtcgtgtgaatgatattaccacgtcgttaaaggtctaaataggaatcactactaattttctgtaattatagcataagacgtcggtggttcattttcgcgtcgtttgaatgatattaccacgtcaaaacttttttaaaaacgtcgttaacggtctaaataggaatcactactttgttttctttaattacttttttaaaaacgtcgttaacggtctaaataggaatcactactttgttttctttaattatagcataagacgtcagttataataacgtcggcttatacgttattgcgtcgtgtgaaattatataatacgtcgtttgtacataaataaccgtcgtgtgtttttttgtttatctttgttttagg

SEQ ID NO: 71248 - DNA, 710 bp, Prunus persica
  Intron number 1 from transcript ppa005231m (locus ppa00523 1m.g) derived from phytozome v7.0 (chr-ID scaffold_2; pos 23731602 to 23732311)
cttactcgttgtgttcattcgtcagcatttgcaaggtactcgcactcacttacttcaaattttaagtgcagattgtctctatgatcgttcgtgtaagtttgaatcaactaatatgaagcccaaaacctagtctttgctttgtaagtttgaagctgctggggcatgagtgtttcctattttgtttgtgttattttagagggactattttatttggagagagtattttagacatgtactgatcgtggttttacaatttagatggagctagggttttcttggcccattttgagttgagtcacatccatattctttggtaacattaacagttgatgttacccattctaataattgcgacataaaatacaaactcgaattatgcagaaatcagtatcttatgcatattatcaactatcatagagatgccaatgtgataggctgtaacatcataagctagtacttaaaatcttgaggacaagttttcttccaccaggcacatgtttatcagttttcagtcttaatcttaagcttatccagttctaaaaaaatatcatttctcataaatgtcaaatggcaatatctatgtaaatgaatggagaagattttgtgaactaaatggttttaatatgtttgtcttgcattttttgatcactgcagtgctgtttattcatttactttttggggtgataacttgcaggtttctttgtcactat

SEQ ID NO: 71249 - DNA, 768 bp, Prunus persica
  Intron number 1 from transcript ppa010655m (locus ppa01065 5m.g) derived from phytozome v7.0 (chr-ID scaffold_6; pos 24146357 to 24147124 reverse strand)
gcacttgaagctgatattcagtttgccaatactctgtatgactctgtttcttcttctgtatcctcatccacttctgatattatatctctttgtttatgtgtgtcaattatctgatttggttcatagatatggattttcgtttcctggtaaatataagagattctgctccaacccagaatttcacaattactttgatttataacttcagagtatatgtatagaatttgggtttccaaagctcggtttatcataatcaaactgttcttttttggtggtttctcattggcccaatgggtgctgaaaggtttctattgtagagtagagtatttgaacccttacccttgcaggaatttgagcttcttctttgagttttctctcgaatttgtgtgtggtaattgtcggctgcaaatatttagtgtttgccactggctaagcttttccccctttgtgtttgtcaagctgggtaatttgttttggttgaacttcagaatctgcagttaattttgatgtaggataatatcctgattaattatcatcccagccaatctgggaacttttgttggcccattgcatattttaatatgttagattcctaaatttcgttttcatggatcatttgctttggacttttctgaaagggagaggagagttgcatcttgaaggttttatccattgcaatttaatatttctcctgtgtgtagttataacagggtttttgacttatgaggtatatcttgtgatacagggcttctaattatcgaggggaat

SEQ ID NO: 71250 - DNA, 1012 bp, Prunus persica
  Intron number 2 from transcript ppa022830m (locus ppa02283 0m.g) derived from phytozome v7.0 (chr-ID scaffold_3; pos 4225506 to 4226517 reverse strand)
ataaggaaaccagaggatctgagtttctagttcaggtgagcgttctgatgatgcaaatgcttttttctcataggccatggctggaaagcaatataaactattgatttgtgttaatgcatgcttttattcaaaggaccattgagaagaaactgataggggatggctcataatgcatataaaatatgtttaacatgttttccagaaacaacttaagctgacatgcttcttgttgctttagactcgttttgttatatttacaggttggtctgcatgatgcttaattatttccttgttgcattgtttagtctattttagaacttattaccctgaattggatactaaaggatttacccggggactgaaaatgatgcagaaaactgtcttgtgaactactgtcatgataatagttaaaagtgtttactcctcgggaagattagagacttgttgcatgagtcacacgcagtaattacttgttcatttcctggggcagtttggtggggtcaccgcaataggctgagggaggatggttgaaaagtacatactgaagccatgaagtagatttaaagggtactgaagtttaacctatgtggttctgtcccaaagaaagaaaattacaatttgtggaatacttactaagaacagagagaaaaagaaaggctaatggccaaaaaaaaaaaaagagaaataagaatttcacacttttgaaacatcttcctcgagtttgagaaacataaatacatcaatagtctaccatttgttcactatgacatttccagaaataaccctctcttcttctaatggcctacctgaatccctcgtgtaaatttgttaattcagtagctaggcatttgaactttatagaacttttctgtcaggattgtgttaggtagtgttccttctctggaattacacagttttcctgttaaatagttaatgaacaacttggggttgttggatgttttccttatgcgttacaggttgaagaaaaacttagcactttggaatataaaga

SEQ ID NO: 71251 - DNA, 546 bp, Prunus persica
  Intron number 1 from transcript ppa000349m (locus ppa00034 9m.g) derived from phytozome v7.0 (chr-ID scaffold_1; pos 16781763 to 16782308 reverse strand)
aacccagtactcctcctgactccaataaccataatgtaagacgaactttcttcagttcttaataatatggttcttgtttgcttgaaattgattggatatgatgttattatatttgttttgttctgttgtttgctaggtttaatgattcatgtggttataattttagggttttgatttttagtagggtttttgagggaattgtgatgtgaatctgcacgtttgtttgtttagtttgtttgctttgattttgcatgtgacttaaataatggtcagggaagggttttaagtgattttacataaaagtactgggatttctcaaattaggagaaattttagggaagggttggagtgggttttaagtgatttccctcaaatttaaatttggggaagggtttaggttagggcaggagtgaagatgacctaatcctcacttcccatttctcatgtgaagtctctgatatatgcacatatataattttttttttttttttttttctgcatttgttttcaggcagaagcatccaatctccgacgctctacaaggaa

SEQ ID NO: 71252 - DNA, 998 bp, Prunus persica
  Intron number 2 from transcript ppa007497m (locus ppa00749 7m.g) derived from phytozome v7.0 (chr-ID scaffold_5; pos 1736099 to 1737096)
ggtttagtcttgtgtcgtataacattttggctcaggtatggctatggcattcactcgtctcacttaatttcccattttgtgcccaattcattttgttattgtttgttccttttggtacttgtcatatgaattggtattcgacaatccattgtgtcacacaaagaactggataatgagaataattaactttatttaaataaatggaagttacgtataacaaaacaactgaattcagctcttctttttagctttctatgccgccctgttcctacttggtttaccctataaacaaataacatttgcttcacagtactagagaggtaggaaaactgaaattttaaaatttctcgttctcaagtcagctcttttttttatttttattctataactttctatgttctaattttatcagtaatggaatgaatgcgaacaaatggtattgattgtatgcaatgttgtgtgtgtatgggacataatttatattctctttgttgatgattggggcagaaggcccgaatggaaagaaaatatatagccagaaaacttaactaacttaactaattatgcttctggattcagtaatttcaaaataatcttccaccaagaacggagcatagataggcggggccccaataaactcataatagcccaaattatctttaccgtgatataaattgtagtgttggctttattatgtatgtcatagtgcgtttgtttgacaaactttgatgaatatgttatgttctcattattccttgtcaaaatgatatgtttatgttttattgtaaatttcatttcattttctcgtccttggttctagaattctcttatcctgtattacggcataatttgtttttgatgcggaaacaccctacagattccatgtcgggaatttaaaacccctgtgaatgttaaccgtcatatgttgatttctgttttcatattttgatcacttaagtttaacaatttgtttacttattttttgtatgtgtaggtat

SEQ ID NO: 71253 - DNA, 608 bp, Prunus persica
  Intron number 1 from transcript ppa002787m (locus ppa00278 7m.g) derived from phytozome v7.0 (chr-ID scaffold_7; pos 16772732 to 16773339)
gatctcacttctccaggctcttctccactgaatccgtacgcgcactctctcaatctttgggttttttttcttctcaatcttcttcgtcttattcttgatcattgatttcatttcatctgcgtagcttcattggaaatgatacgcaactgtgtatccaggaattgattattggttttatggatgattttgttgagttttgatcggattctatcttatttttgtcattattttaattatatatggtacaatagttgagcttttgatttctgttcagtttggttgccgataattagcaggaaagtaagggaatctaaagcttataagtttctgattctccattttattgattttgaaacggcatcaatccactcaaacgagctcattgctgctaattggctaagctatttttgggggggttaaagttgaattcagttattcattttgttgacatttaagttttcaaacactctattaatgcagttcattattctttaatctacgtgcaaagtttagttctttagcttgtgatcgattgtatttggtaatagtacatgtcttttttgcttttggcaggctacagggcgctcttcgtacactgtggtggacca

SEQ ID NO: 71254 - DNA, 574 bp, Prunus persica
  Intron number 1 from transcript ppb020072m (locus ppb02007 2m.g) derived from phytozome v7.0 (chr-ID scaffold_6; pos 15516173 to 15516746 reverse strand)
tctgacagtgctctgacaaggaaaaaagacaaaaagttttctctgggagattgaaagttttaatcgggtttggaaacagtgcatgtgtaagtcaggtagacgaaaagttgcttacatataaaaccatttcaaaaaaataatatggcggttacatataactacgacgtataaattacaaaatacgacggtacatttaacttcggacgtggtaaataaatacgacagtagtgttgtagttaccgtcgtagtaaactcaaaaattaaagtacataagtaataactcgcgtcatggtagattatttaacacatcgtttttattaatgtaccgacgtggatttctgtaatatacgtcggtcataccgacgttgattttacaatttaaacggcggtttttttgtaaggaccgccgttggttttaaaaatttattctataaatttgtcgctttcattcattttcggtttacatttagggttccaagttcttcctctctcagagacactgtctctcacgtctcaaagacaataatttggatgtctttctcaaagagaaattgagcttactcgcatcaaatat

SEQ ID NO: 71255 - DNA, 597 bp, Prunus persica
  Intron number 1 from transcript ppa006121m (locus ppa00612 1m.g) derived from phytozome v7.0 (chr-ID scaffold_8; pos 2666113 to 2666709)
ctttaagaagtactgaagcatcagctgtctgaaatgtttgtctaaattcctgggttttttttttctttttctttttgttaaatttgcagccccacctgggatcatttctctgattgttgagttttaggttcgttttctgggttataactttgctgtcccaaaaacgtcttagaaagtctgattcttgtaacatttgtgggttttcttcagttggtgggggtgtaaatcccttatggataatatctgaattttaattttaatttttttttaatttaaggggtttgaagcaccacattttggtgtatgttctgcattaatttgtttcatttcatgagttttggctaattttaatttttactgtggatgcttttgggcttctaagcaaaatggagatcaaaatactgactttgattcatctactttttaacataagtagttggaaaaccgaaaaaagaaaagaacaattttttgggtggtttttgctttccattttctggttttgtaggctaaatttattaacctttttcttcatttctaagattgcagtattttatatttgcaggaattgcagcagtaggctttgattcttggaagttg

SEQ ID NO: 71256 - DNA, 697 bp, Prunus persica
  Intron number 2 from transcript ppa006121m (locus ppa00612 1m.g) derived from phytozome v7.0 (chr-ID scaffold_8; pos 2666773 to 2667469)
aactgtcttttggcatttaatttggtgtttttcgggtttgcgcgcgctctctctctcccccccccccccctctccctctcttcctctctctgtgagttattaaggagttgagcatttaaactgctaggtcaacttgattttacaatttagttttttttattcaggttgcatatctcatttcggtgcataattcatgctgtctatatttatgacactgttttaccttctttttttttttttaaaacaaaaagtatttgggttttagttacaatcttgtctctgaagggttttgcattctagaataacaaattatagacactgtagttttaaaaattccatgtggaagaggtttcagtctgggggttgttttctaaagattttttatttttatatttggattagactgcacaagtaggaatttaagtttgaattaattgtagtttaggttgtggaagatcagctttaaagcccgccaaaagatgtatctgattaaagtctggtactttaggctgctttaagtccatgtgtgagaatgagactttcttttattgagaatctccttttcttgctttgtgcttttgtcaatcagtcttcttccttttttctttcttaggttttaagcattgtaacagaaatttgaatctagtttggttcatttgcagttgaacctgcagttatagttttgtggttcatccca

SEQ ID NO: 71257 - DNA, 806 bp, Prunus persica
  Intron number 2 from transcript ppa011445m (locus ppa01144 5m.g) derived from phytozome v7.0 (chr-ID scaffold_5; pos 5010809 to 5011614 reverse strand)
tgggtcgttgttttatagagttcagttctcgtcaggtacccttaatttcgttttgtgttaatttatgtatttttcttgggtttgttcatttttaattaatgttttgtttaatgtatcatcaacaatgagtgaacatagtttggtaccactcacaaattcacaatcatggctattagattgtgagttaataattttgaaatgagggtagaactaaaattgaacattggatacttgatagaaactccattttaccactagaaaaagaatgggaaagatttattgtgctgttcaatgttattgctttgctcctccaagcatggatggaacgaaacaagaggactttttttgaaaatgttaacgggaggaagtggaaggcctgtgggatagagttcgtttttaggcttatttgtggtcttcaatttcctcagactgtcaaattctagttttactcgttcatctttggtcttgaattctctattgtttggacattgcatgctgtttgggttagatatcttgtatgcattccagacttcctgtaagcagcttgtccactatgcattgtgcttttgattcacatcaacagacagtttgatctcctttcttccagtgttataggtttaaaatgaaaatgtgtttaatagatggaaacatgcacactcaatatgcctaatagtgtctttttattacaaggtgtggactaattgttgtgtaattgtaacatcatgcacgcatccatgcatttctttgccctctcatattctcatgcttgcctttgtaggaagctgaacttgctagggtcaagagag

SEQ ID NO: 71258 - DNA, 362 bp, Prunus persica
  Intron number 1 from transcript ppa010714m (locus ppa01071 4m.g) derived from phytozome v7.0 (chr-ID scaffold_1; pos 46341894 to 46342255 reverse strand)
ccaaaacttcagaccgggctgaaaccccgacaaaggtaaacattaaaaacagagaggaaaacccagagattaattaaattaattaggcttcttcttcttcttcttcttcctcttcttctttttgttgtgaacttgtgacctattttggttggtttcttcttcttcttctttttgttgtgaacttgtgacctattttggttggtgggttttttctgggttttgttcatttagatctggggaccattaaaaggttaaattttgagaaggaacccagaaaatattgtgtagtttttgagtgtatgaagataataatatatgtgaaaagtggttggtttgaatttttttgaagggaaacggtgaaa

SEQ ID NO: 71259 - DNA, 931 bp, Prunus persica
  Intron number 2 from transcript ppa001985m (locus ppa00198 5m.g) derived from phytozome v7.0 (chr-ID scaffold_1; pos 3190783 to 3191713)
aggttggttgcaaataagttttgcatagctcttacgttcttgttggcttttgttttactcccttgtatgtaaaccattattgaataagttgaacaacttttaagtgttgaaagaatctgaatatcttcatcacatgctcggtgcgggtagcaattcatattgtgggactgtttctttgagtttatccttctaatggttaatttacggttatgagctgttttactatatactgtataactcaaatgagttccttatttagaatcatcttcagcgaaattagatatccggaaatacagtaaataattcaagtacataattccaattttgacaaaatcctgagttccattgcttgacatttagatgaaattggaagtttgctttaaaaaattccaaagacggtatgatagatttgttatagtccatgaatttgcactgcaagctccacctgtgatgaaatgtttttgaagggattacacagatgacatcaattgtgaaggcatggttgatgtttgtgataaatcaatggctttagtgatgcagtggtttactagttattttgtaattttcttttttcttttctgagaaccaggaccttgaatggtaggactttttgaagcagtgacttattgactttcactgatttcaaaaaatcactagttttggatgattattatcatggggtactccccagtgacactgatcaaggttaaagaattaggccaatttttctcttgataggagtctctaacacttttctataataggagattcttaggatttcccaaaattacttcatatcagatcatctgcattgttacagtatatgctactgtggtttgcttgaatcttccattgtcagataattattaaagctgagagatttgcatattttataggaagcaagagctctattaggaaggcttgagtatca

SEQ ID NO: 71260 - DNA, 369 bp, Prunus persica
  Intron number 1 from transcript ppa021301m (locus ppa02130 1m.g) derived from phytozome v7.0 (chr-ID scaffold_7; pos 2559620 to 2559988)
ggtagtagtggtcgtcctccaaagtacagtaagtcttcttttttctctttttgaatcattgtggtccaatgacgtcagtagaatagtgtttcttatctcccttctgtaaagtagtttagctgagattcttcatttttgttttggatggtattcctttctgaaaatgaaatatatttgtggtcccaagggtagtgcatgtgatttgtctatgcttgatctataatttttggttttgtctgatgtgagcaagtttttgttttgtcaaaagtaaatgtgttgttatggctataattgtaagttgttggggacattaagtgttgttatgcctttgtagctgatccagataactttactatagaggttcaccat

SEQ ID NO: 71261 - DNA, 1008 bp, Prunus persica
  Intron number 1 from transcript ppa007856m (locus ppa00785 6m.g) derived from phytozome v7.0 (chr-ID scaffold_6; pos 24243321 to 24244328 reverse strand)
caggtaaatttttatttatttatttataatttattattataataattttaaaagggaggcatgtttttcattgaaaacgtgcttttatgaacttttcgttgtgtatattcaacctttcatgtggtggctacatatgatttcttcattgtgaaagaaatgttgtgtagatacacatgcaaatgattcagtatgaatctcattaattacaatcgagcttacttgaattaataacttacgaagctgtgatttattggcttacaaattgtgtttagctcttcttgcatatatgatacatacattgctttttgtctagacaatggtctatttgtcttttgtttgtctttttgttagggggcgcaggaggacaatgatgaaactttgagcttgaaaattgcactttaacatcttagtacaaaaagatatgcaaatttaaattgatgaagtttagatactttttttctttcttaaaatagtaaatctcataagtattgttttcagtttttagaatatcctcaatatattctaataaaaagctttttatttgtgagtatcaaagttaaatagaatttagggattttatgtaaagtattcttgtgttccaaacttgagataacgaatgccacaaaaaagaaatctcttgttttttccaaaccccttgacatggatactttgtagcttagtgctctgagtcttttataatggatctaccaagttaagttaattgcatgcctaaaagcacgaagtgggcaatttcctaaaaagcagatctaggcctcccttggccctttcattttgtccttcaccgtcaagtatatcgatgcccaacacaaggatttagagctacagtaagcacatgcaaatagcacttcgaaagtgcttccaaaattagaagagtcccctcaaagtataatatcaacttttaatttgctgtctgttgatgttttaataatattttttgaattaatttttgtaggaaactgattgaagaatacagtgaggcaactgtaa

SEQ ID NO: 71262 - DNA, 403 bp, Prunus persica
  Intron number 3 from transcript ppa000405m (locus ppa00040 5m.g) derived from phytozome v7.0 (chr-ID scaffold_1; pos 44975181 to 44975583 reverse strand)
gttttgaagtgagacttgagatgattgatcttgttaccttttcttctactctccacttggatggtttaaacttcaatggaaatcctgatgccaacaaaaattgtaccccattcgtcttagaatgtttatgaattgaactcctgtcatacatatcaaacaaacacgcaagtttgcgcgcatcatagaagtcattattatgtatcccgagatactctgcgtaaatatttattcagtggatgttctgggttttttgatacatcatttgttacatatttcaattcctttatcggactgatcacattatccatcaatatgatatctgagacattaatattataatattgtattggctttatttccttatacaggagacatttgaattcctgaacatattgcaagttca

SEQ ID NO: 71263 - DNA, 1056 bp, Prunus persica
  Intron number 2 from transcript ppa000252m (locus ppa00025 2m.g) derived from phytozome v7.0 (chr-ID scaffold_2; pos 21967670 to 21968725 reverse strand)
aagctagtaaatccagtgcgagatattctgatgtaatagagggagaaccgaaagagccagacaagaaacgtatgaaagttggtggctctttttccacccagctaagtgcacttggcccacaagatacacctgttgcaaaatctactttatcatctaaactcccagcagtggaaaacaataatccaccagaaatagttaagatcgatcatggccagaaaggaattccaataggtccaacagagtcgagcattgaaaaatcgaaaagtcaaaatgataaacatgttgctggtatattggaaaaaattcctagtggagtgaaatatggtgaatatcttacttcctttatctgaaacttaccctagttagtactgttagatgcctcaccaatcagggtggttttgttctgcaggtgctggcatcgatactaaatgcatccagtccagtgggaggagtaagatggttgatctttatgatacactaaaccaggggacatcacaagaaattatgacttgcaataatttgccaaagaacttagtaagtgaatattttagtaacgacaatactacagctgattagcttaatacgatattgtagattgaactataccatttcctctccacctgccctaatattattttcataattgaagatttccttttattgatcaaacttgtgcggccatctttggctgtttgcgcttaatatctcataaagaggttcgtgaaattttaaaatagtatgaaactggtgtgtaaggtgtttccataacagttatttctggcttgcagaaaacactgaactttacatgaagagatgatacctcatgtaattgggatctgcactttcacgcagtttatattgcttaaccttaatccatccttacttcgtttgaaaaacaacatcaatttgcttgagggttggatatgacacttgattaccgatgtacactttattgagaagttttttcggtgcttatgttttcattttcaaaagtttcccattgtgtttattagtacattttaactttacagaacactgtggagttgaatcaaacaa

SEQ ID NO: 71264 - DNA, 538 bp, Prunus persica
  Intron number 1 from transcript ppa024822m (locus ppa02482 2m.g) derived from phytozome v7.0 (chr-ID scaffold_6; pos 10089343 to 10089880 reverse strand)
aggtggaggctgaatctggaagcagcactagtaaggtacagattgtggggatttttaaaaaaaatgttatttaaagtttttattgactatataccactatatacatatacttttttatttatttatttatttgcatgagcttttatttcttttattttcaattatttgcatttgaatatacttttttttaatccattaagtagttgtgttttgaaatttttttcttaaataagggccttttgttttatatataaagatttctgtatactagggaatgaatatgttcctaggacatttatgtgtatctgtattccaaaatgaaaagaaattaacttcaattaaatatttaattagctttaaaattattaatttgttgttggtgaactaaagcggcttttgtcctcgttaattttgcttttagcatgttagtttgttgccattttgggattgatattttagatgtcatgttgatgtctttgattgtactgctgaagtttatctaatgaagtttctatttgataaaattaaaaaaaaacag

SEQ ID NO: 71265 - DNA, 974 bp, Prunus persica
  Intron number 3 from transcript ppa012247m (locus ppa01224 7m.g) derived from phytozome v7.0 (chr-ID scaffold_5; pos 13092624 to 13093597)
gaattaaatctcttgtggacgtccttgacctggtaaatttctttccattgctttgatcatctcatacctaccctgcaaagtttgctgcttttttttgggtgtgctttcctttcaaatgattttttgttattctgtaacaaatacagagaatcatgtgccgcattcaacatttgttctttggaatttaaatagcaagtttgttaatatattttaaacaagcttagctgctaatatttacttgtcctaacatctactggattctagtaatgcctggtgtgaggttatgttccatatagaagataagcttagatgtgcgtgttcatggtgattcccagcatatgttagcacagcatttaaggtccttcgtttttaatttaggacttatatttttattaatctgagcatttaactcacaacagcctaagggatccagcgcttttgagagtaggcgtggttctagcttcttcagttatggaattatactttcttgtcactgtttctcagtctgtttattacacttttgaataagagaattagaaaattgacttggtttttttgggttgaattgtatgtataccatcaggagttttcaagcacttgaaatcaaatagtttagtaagaaacatacaatgttttaaatcattggattttcatcatccaacagcttctcaaacagcacaaattcatcctagttgaaataacaaaatttatagtgtgttaagtaaatagtatgcttctaataacctttgaaatcttatctagcactgagggcatgatatattccctatacatgtgcttgatgtaagccaagttggaggtaagatgcaaggtgtttctggtattgatactatgcaaggtgttgccttagttgaatggggagagagagacgtttgctcaacttttcatgttcttttctgatatcatgtttcccttctgcaggaaaacccatatctgtggaagtggttaattggcca

SEQ ID NO: 71266 - DNA, 749 bp, Prunus persica
  Intron number 1 from transcript ppa003435m (locus ppa00343 5m.g) derived from phytozome v7.0 (chr-ID scaffold_7; pos 18375300 to 18376048)
tggttttggagaaggtccttcacaaagttggaacggtaaatttctctgtaactgccattgaacaatttacctttttcagctttggttcgtttcttaatgtccattggtgactttcttcttctcatgtggctgccttattaatttgctgaaaatcttagatcgcagctcaagtttcctaagctttaccacagtttgactgtcagctatcccagtggttttgtttttggttttttctggctttctttgtagcaggaaaatttgccaccattgactgaattttatgtttatgggctgtctttttcttttggactccttggtttatattaacgccctatttttctttttggttgaagatttttcattattaatgacttcttaagtttttagaggaaaagaaagtttaaagtgcttggatttaaacgaaaggattgagggtccgcattaatttttcttaaatttaatgaaatttacccatttatctccttcccagtatcttgttcgttatcatggctgctcttattacgagattgataatctaacatttatgatactgtttattttcatgttcttttcattttgggtttagttctcatacaattaatttcttgaaactagaagttgatgtgttgttctgcttggtggaagaacaatttattaatttgacaatgtcgtctcttttgactttattctgacctcaacaaactttcaattcagttcctcacggataggcacaagagagctctgtttga

SEQ ID NO: 71267 - DNA, 793 bp, Prunus persica
  Intron number 1 from transcript ppa016906m (locus ppa01690 6m.g) derived from phytozome v7.0 (chr-ID scaffold_1; pos 4089753 to 4090545 reverse strand)
tcccactgtttctagaaagcccatctcaccctcgtgtaagttctcatccaattatttctctctgaaacacttctatttttcaagttggaatctttactgtctaactggaattcaaagagggacttcttgcatattggttagtttttggattcacatttgttttatgacttcctatacaatgtgagtgctagaagatttttagtggaagttgagctatattgtttttggtaatttagactcagttacccaataagacaccaattacaagattcattggctatctgggttgaccttgtagattgattcttgtgaaaattgtgccatctgggttgggagaatcatagtaaatctaacaattttatgtatagttaagtgtgtgagaattcggtttaggaggctggttgcttcagttattggtggtagtggacataaattgtttcagttcagatggcaggtacatatgattgtttacaagttgccgttttttcatgaattgcttcagttagttgatccagatgcatacggcatacccaataacaatgcattgtatatttacttcttgtgattagttacaaatgtttgaagtaatacattattgacttttcttgaacaaatcactctgtctagtttcaaaggtgctaattcttgtaatacttgtgaaggccatactgtttgcctttcttctttgatctataaggtcatatattttgtgcgtttatagcatgttctgagtaatacactgcctaacttatttatagtaagatatagagagatatcaaggcccacgggcagc

SEQ ID NO: 71268 - DNA, 941 bp, Prunus persica
  Intron number 1 from transcript ppa014538m (locus ppa01453 8m.g) derived from phytozome v7.0 (chr-ID scaffold_2; pos 19424974 to 19425914 reverse strand)
tgtggtcgcagcttcttgcctcatcgctggctttggtactctctctctctctctctctcgcaaaaaccctatttgatttggtatcaaatggatgggatttgaatgccaaaattgaggcactaattcaaatttttatcaactgggtttttgtttcatgtgcaaagcttacagaattcggggcttttgttctcagattagatatttgccaatctcttttctttttgtgaaggtgtaattttgtgcatgtatatatgtacatctctttgatgcaatgtgagtcttgtgtttttgccctatgaagttgtttcagttgttaaataaggaattaaatacacggtttaaggcaaagttagaatattttggctgaattttcgaagatttagttatctaattcctcacttatgaatcacatttttggattacacttattgaattccatgttttagagctgtttgtatcagtatttatttatctgcgaagagaaatataggacttggcttgggttcgttttattcaataacttcatcctaggtgagtaaaaatatgcttccatggctggaaaaacattgcctgaaaccagatatttgagctctgtactcattttgatatccaagttgatctttgatatattttatttttttccgttctcagcccaagaaaccttctttaatggattagaattgcattttccaattacgaaattatctctataaacgaggaagtgatcacttgtgaaactattttctatttgctctttgacacagaggtcaattttggctcctgatatcttcagtttaatagatcgaacattttaaaaagtatcagtatctattaaggattgaagggcatccctgttggggttatggctatctgcgactgatttggtcattgtggataaaatttcaggtctcttccttccagctgtggtaaggccaattcta

SEQ ID NO: 71269 - DNA, 572 bp, Prunus persica
  Intron number 1 from transcript ppa010572m (locus ppa01057 2m.g) derived from phytozome v7.0 (chr-ID scaffold_3; pos 21678534 to 21679105)
cacacagtacactgccagtgccaccgaggtactacagcacagtttttttctttacttgtcacattatcattagtttaacttacttactaacctattagcgtttgagcgcttatacacctagagcttactgacatgaaatacacaaacccgagttcgtgtcaaacatggacaacttgaattttacacaacatgtattggttacatatgaagcaaatgtttggtttttctacttcaagataccttaaattcaaatttccacggtatcatagttgtgcgcgtgagagagaaatgctcctcatttatagtttagactatcgcttatactgataaaaaatcagctttcacaatttcctcacttgaattaagaagaagaaaaattgtgaatataaactattatggtatctattatcaataaggaataaaatcgtcagcatcaaaatagacccgatccgatccaagagagactaccatatagagtcaaattaagtccaattacgaaacagaccctagacttggagtattacattgctatgcaagtgtgcattcaacatttcccgattcaacaaaacggt

SEQ ID NO: 71270 - DNA, 872 bp, Prunus persica
  Intron number 4 from transcript ppa021715m (locus ppa02171 5m.g) derived from phytozome v7.0 (chr-ID scaffold_7; pos 16355851 to 16356722)
gattcaactggagccaagtaggtttgttttttcttttccctttcttttccgactttttcgcatttttagagctgctgggatgggatgctaaggacttcaaacaaatttcttcaaccttcctaagtagaatgcatatgcatgtttactcgtattttgattttatatgtttatgtgcatctatcatttcatattggtattatttgtcttctgtgtatgctccctactagccaagattttgttgttgctggcactgcatcagagtccctttatggtgcttgtgaggcaatgttcaagtctgagatggtttgttgctttgttctttccactgggcagtcaagatttgttatttgatctgcttacattttttcgtatttgagattttcatttgaatacactttagatgttatggaaaatcatataattaacattcgagaacttgaatccatgctgtcactggccatgactttttaagtctttgttattatcacactactgatagtagcagagaaagggtctacagaatagaagtcaagaaaaaacaagctgagggatctcctaagttttaccttcttggtcctatattgtcagcagccaagtgcttcttgaactagacatatatggggataaacaattggcttccttgccagatgtgcttgaataataattcgtaggattttttggcgcttaactcgtggtagaatttattacgcgctaattagttagacgtaattgggttggtgattgctgcttttacttctaattctaaatttggtactcctgtttattttcttactatttgcaggaactgtaataacagtatattttctaattatttagggaaccagaggaattctttgagattgtttctcaag

SEQ ID NO: 71271 - DNA, 709 bp, Prunus persica
  Intron number 1 from transcript ppa011912m (locus ppa01191 2m.g) derived from phytozome v7.0 (chr-ID scaffold_8; pos 7852646 to 7853354 reverse strand)
ttcgatcttgattacactctctggcctttctattggtacgtccttttctcttttttcccactacaacctgtttggttcccgagaaaactaaaaaaaattatgtttttccccaaggaagcagcgaaatgctccattctgttctctttttgtattagtttatgtataacccagatgaccaatgaatacgtttagttgaattttcccctataatttgcttttcctgtcatctttgaaattttcttaagactcttgtgtgtgtatctttgaaagtttttttttgtacctaatcttcatatttgtaatatatattttaatttttctggaggtaaaattagttttgagttttaactacagctgcttgattataacattggaagtgaacacccgtagcattgagcccgtgcatgttctctatgggtcaatgagtttcccagtttaatgttttgtgttattttgtgagaaaatgcattaacacccaagtgtaggaattggtctaggcaacagcagtggggtgagattttggagggtctaggctacccccatttgtagcctatagctagctatccatggacacaaagaaaagaaaagagaatctttgaattgagaaatatgcctaacatattagtactgtttaacatgttcccttgcaacacattgtttacaaatttatgttcagcctcgacttacatctgtgttctttttgcagtga

SEQ ID NO: 71272 - DNA, 553 bp, Prunus persica
  Intron number 2 from transcript ppa009206m (locus ppa00920 6m.g) derived from phytozome v7.0 (chr-ID scaffold_7; pos 20623891 to 20624443)
aacaggcaataagaacatacaagccaagctggtgggtatgtcttcctttatattttctttcattcactttacttgtgtgcatgaaatgggatactcttaattactagtttctttttatgtatatgtcatatgttatatatatatatatatatatatatgtgtgtttggtttgtaattcagggaaataaattgagtttttttcttggaggatcacagatcacttgaaatatgcctagcctagatttgaggagtagaagttgatgtcttaaacttcttgtttctatttgaatgcttagctgattgtaattcacttgatgagcagcatctatgatgctatgattatatgtttttttcaaatttatctatctgaattcagaatttgtatatcccccatataagtaattaccttctgaaaaagtcttggttcttagattgtttggattgttacattttttccatcaaaatattttagcattgagaactagcaagaggagttcatcttggtcaattaattggctttatcattgctttttcccaggtacttcttggggac

SEQ ID NO: 71273 - DNA, 776 bp, Prunus persica
  Intron number 1 from transcript ppa007425m (locus ppa00742 5m.g) derived from phytozome v7.0 (chr-ID scaffold_7; pos 22656130 to 22656905 reverse strand)
aacaaggttgttttttctgcaattgaatcccccaatatttgatatatccttagtaattgaatgaatgatatgtcaaatttgtctaaatgtgtctctgattttgtttcaaatgcttatttacgtaattgggtcactaaatcactaagctgtatataatgtatatttgatgcaattgcagatttctataagtcaactgtcggttcgtcgtaggatgcccatcgagaaaaaattattgctgacatactacctttttattttagctttaatataattcaaatgaaaggacttgagaaacatgtttggagaaactgataatgtggcattgttttgagagattcgctttcttctcacaagtttgtttaacgttctatgcgatgttgcgtaggataagcttctatccttcctcttacaatgttttggtctatggcttctggctgcgaattacttatgtttcccattttaaattattgggaacaacacatttattctggcttcttcttgttgatttatttatttagtgttggggtaaggcttccagtgctcaccagattttctgattttctttgtttaattttattcttctctctctgttttttcattttccctggatgcctttgcttgctcatgatgttttcaatgagttttttttccttccaaggaatggttgctatattgttcttatttccttatatttgctttctatgcttatgaaattttatgacttgagttcttgcttatcagaattctgagcgaagtcacattgggaacgtattcaa

SEQ ID NO: 71274 - DNA, 439 bp, Prunus persica
  Intron number 1 from transcript ppa009401m (locus ppa00940 1m.g) derived from phytozome v7.0 (chr-ID scaffold_8; pos 7691457 to 7691895 reverse strand)
aggtttacgtcttcgacgaagtttctcctgataaggtaaagttctttcgcttctgggtggtgctcaatttgagtgtaactgtttttagacttttgcttcattctgtactggtgatttctgctttgttttctttgctatagtggtgtttagtctgatgggttcttgttttgttcttggctagaccttaaattacttgcttttctttgagaaaatgcgttttgattagtttgtgggaatcatgcagttaaagtaagttctttgagtggttcaatgtttgctgaacatcataattggtttttttatttattgtttatgcatatgggcaacctgtgttatgaattaaagtctttaggtgttaatgagaggggttgcctgagagacttgagcatctgtggttgtttttcacaggtgcaggccgtactactacttttgggcggat

SEQ ID NO: 71275 - DNA, 785 bp, Prunus persica
  Intron number 3 from transcript ppa018774m (locus ppa01877 4m.g) derived from phytozome v7.0 (chr-ID scaffold_1; pos 4976635 to 4977419)
aaaaacaggagcttggacctcatagtatgtattacttcttgaatactttgcattctatccatttatatattagtggtatccacttgccacttaacaaagttttttcccatcacacaaaaatttaaaaagtaagcagacagatgtaagaaactaaaataattcttttgctcttagcataagatgattcatatgtacgtaaatgtaattcctttgatcttcataaatggagaagggaatttgtaggtaatgattagccatcatcagggattcagggtcctcaaaaactgcatgaaaatgtacaatctgccgccaaacctgaatttccaactatgatgtgaaaatgttagcttttgttctggatgtaccactccaatagtttcgagactcagttttctgttttgttatctgttatgatgttggaagagttgtttactcctgaaatttttttgaggatatattttctgggaattcataatgccctatcagatggctgagtcacatgtacgctattttcttcttcgaaagcaatctctatttctgaacaatccatctaaatgtgaaggttacttatttttactaatgaattgtcaatcattttgttctgcaaacatgtttcaagggctgattttctgatctcatgtccaagatctacttccttcgatcagcagattaactgaaacttgacacttagacatagtgcaataaatcattgaactttgatgattacatactcttcttaatggaaaacaggaaaaagtgatcggttcctgaactggagcaccagg

SEQ ID NO: 71276 - DNA, 674 bp, Prunus persica
  Intron number 1 from transcript ppa018711m (locus ppa01871 1m.g) derived from phytozome v7.0 (chr-ID scaffold_4; pos 596924 to 597597 reverse strand)
tgctttcacgtctctttcatcccaacatagtgcaggtaaggtctatgttccaactcccaaaaacaaaaattcatctactattattggtaacattaattaaaggttttcttgctttcaaatgtttaaaaaagttcatggaaaatagtgtattggaggatgctagttagttaacaaagtcccttggctctgctctgtactactagtattatctatagattactattataaatcagaacatgttagtaaaagtatagctctatctgtttttccacttcagattagcggaaatcggcattgatcctcctctgtcaaacttggtttggtttggttgtctagatgatcaaatataagaaagacatcctaagaaattttgagcaaattaaattatctagactttggggttggctactgtctcactgttaggctcttaatatgtaaatcccacatcttctttggccttgcctttaatctccgagattatatgttggttttatcatgttggcatataatatatattagcattttaaccggtggtctacttttagactgggtgtaatccaataatactctgcatcaacacttgcacatgtgattattgaatatcttgttgctaaattggtaaactctttttgttcacagtttattgcagcttgtaaaaagccccctgtgtactg

SEQ ID NO: 71277 - DNA, 433 bp, Prunus persica
  Intron number 3 from transcript ppa019544m (locus ppa01954 4m.g) derived from phytozome v7.0 (chr-ID scaffold_7; pos 22156523 to 22156955)
tcattgatacccttccgaaaaaggtattgtttttcattctcagagccataccgtcaatgctacttattcttattgtttgaattcgtatctgatgcttctgttttttattgttgacaattcagctggggatctgagtttgagttaatagtttgttcaattgagtaaatttagtaggttgaatttcatctgagaagcatcatattgcattgtggcaaatctttctatttttcctggctggtatcattggaagcttcattcttttacctctcttaaacataaaaataaaaattcctttttgaatagtacctggggaagataaaatataagcgcaatgtaactaataattctggcttacaatacagttgagaaatgtaaacaatctcgaatgtaactactttctttttgtttttctattataaggtttttgagattg

SEQ ID NO: 71278 - DNA, 373 bp, Prunus persica
  Intron number 1 from transcript ppa026125m (locus ppa02612 5m.g) derived from phytozome v7.0 (chr-ID scaffold_2; pos 23643777 to 23644149 reverse strand)
ggttccaaggatcggagaggttgctacaagagaaggtactgatttgaatgatctctcatatctgaataattgtttgccagtttctgttttcttcttcttcttcttgtggttttgttttttgggttatattgtcattttactaaaagatttgcaaatctcttgccttttgggttaaggaagatatgtgatatgacaaggagttggatatttatgcctagttttccagcatatttgttgagcctttatctttgggactttcttttatagcaaatctcaattttcttaacacagttaattaggtgtttcactgttttagcttctgtggtttgacatggctgtttcatcttcttggttgcagaaagacttcccaatc

SEQ ID NO: 71279 - DNA, 749 bp, Prunus persica
  Intron number 1 from transcript ppa024737m (locus ppa02473 7m.g) derived from phytozome v7.0 (chr-ID scaffold_3; pos 4061107 to 4061855 reverse strand)
tttggcctgtaagtctaattttcatttcccttatcatatattttgaattgtaagtcctatatttttctttacaggaaaaggtggttgtgggttgtgataaatttatgagtctatgaagcttttttttattttatttaaaggcactttttgcagtgctttatttatcaaaacatcatttatccagcatataataaagtctatgtaaaggaattattacagatgaacatgattgtgtatgctgtagctagtctgtgttttacactcacaaaatctaatacaaacacataaagagattcttcttcttttttttttttctttttttttttggggtggtcttaagacctactcatatcctcaaagggataagcaggggaattcaaccctctttgatagcaaatttcagcccatgacaaataaccaaaccccaaaaagattctttcaagcagccacaaacttacaagaagatacttttcgtggactatggtggtttctgataggggtgtctggattttaatctgaatctgatttgatatagcatactttcaatttaaaactaaactaccatccgaatttgattctaaagcttgaaaaaccatgataatggttgtggaatagcagcagaagcctagatatatagtgcttgcaaatagttcaaaatttgcttcttcttttttttttttttttttgagggtgcagaagtgttcaaaacttgacttatttatgatgtggtgaaattggatatgcaggaa

SEQ ID NO: 71280 - DNA, 679 bp, Prunus persica
  Intron number 1 from transcript ppa013925m (locus ppa01392 6m.g) derived from phytozome v7.0 (chr-ID scaffold_1; pos 28441144 to 28441822 reverse strand)
tgtatcgattgctcatctccgttctctgcaatcgggtaatttttcgtcgtgcttttcgtccttattactgttgatccctactttatagcttatgtatttgtaattcgatttgatttatatgaaattgtgtgtttgagaatgatgtagctcatctgatcggtgtcggtgtgggtctgatttatctgtcgtttgtttactgaaaattttcttctttttgttccatgtggccattgaaattgcaactccagaagagtgaagcgtatgttaatctgagatggatagcacatccatatacgtaatcttaatttaattgaatctgggctttgtcaatttgtgcttttttcttaggaaatatgaaagcaaagctcttgcaatgcaatgcactctcttgaaaaaatgcagttccaaagatacgctttatgcttgtttgtgtatcagcaatacttgatatgcaaattatatgaaatcatattcaggttatgcatcgaagttgttaatttttttatttttttatttatagaagtagttcttatttcacatatttaggttatgtctaatggtcccaacatatctctagttccctgcttcaaacaatgtctgcttgcgctttcatctttactctcgttttaatacgcagcctggtggttatttgatttcttaatcctcaagcaggactgaa

SEQ ID NO: 71281 - DNA, 768 bp, Prunus persica
  Intron number 1 from transcript ppa006513m (locus ppa00651 3m.g) derived from phytozome v7.0 (chr-ID scaffold_3; pos 15397235 to 15398002 reverse strand)
gtgttctgctcttccaccaacccccaaaccagaaggtaaatttgctctgtgactttgggtttctcttgatcttgaagcttgaagcttgaagcccacttgatttatccatgtgatcattgttcagaatgttggttcttttagcatttgctcatatttggcttctgcgtcgttggattgattaagatctgtcagttgtcgataatttcaaaaatccacagatttattatgatatttggtgcatgcttgcttgttttctcatgatagatcgacctctaatttttttttctccttctgtttggttttttgagtgaaatgaacttgacattgtttatgaaattgaaaagaaagagttgttcattttctctgattttcccttggccgccatgggagcgaccccatggagaaattatagttatgctgtaaagggttatcctatatgaaatgattagatttatagttttgaaattattctttgatagttagatgaggcatgatctgttacttcttggatattattttcttgtccgtattagataattctatttgggttagttctcgggaaaaaaattgaaaaagtgagagctttttctctcgtttcattttcccctccaaattatgaattgttaatggtttatttcaagccatcattttgctttattttaagtcaacatggtattctgtcatgcattctattgtgctactcttttttgtttcactaactaaatagtataccatgtgattgttgcagctttccatttacttgtatca

SEQ ID NO: 71282 - DNA, 641 bp, Prunus persica
  Intron number 1 from transcript ppa000248m (locus ppa00024 8m.g) derived from phytozome v7.0 (chr-ID scaffold_6; pos 158778 to 159418 reverse strand)
cttttgctctccgccattaaagagcgccttgataagtacgtacgcccattttctctctctcgctctcgatctctctgcgcatttgatgtttgttctttgatctctttattagctcaattaatttttagaaaacaaaataattattattttttactaattttagattgcagaaaagatatttatgcaagtgatgaattttgttgatgatgttgcatgcatgtgatttttatcaacatatatatatatatatatacacacatacaatgcaaatttttatttgcaattctgtcatgaccgggccttgcatgcatgtaaagtgtttggaatttattggatcctaattaagtgattgggatttctaggactgtaattaataagtagttgttagtggggcccatattacgtgcacttcttaaaatgacccactcgatatgaaattattgataacatttcttactcatatgcatattatatcatacataaatgtttttttcttcatatatcatatatgcatcttacatatttatttttttgcggaatctttcttgatatggttactaattttgtttactttttttctttcttctttgttatcttaaattaaagagtcggattggaagtcccaaaggttgaagtgcagt

SEQ ID NO: 71283 - DNA, 319 bp, Prunus persica
  Intron number 1 from transcript ppa015753m (locus ppa01575 3m.g) derived from phytozome v7.0 (chr-ID scaffold_1; pos 36845548 to 36845866)
ccgaaggcccattctctagtgacctctgcgtcccggtatatacaataagttgcattttgctgcttctcaattgtcatttttcttttcttgggaaaattcatttgtgaatttgtttttcaatcccaaaacaaaacgacaaaatccatgattgaatgaaattctcggcgttatgtatttggcacttggctaaagttatgggaaattcgaaatttgaattaaaaaaatttgaatgcaattgggtatttttgattggttttgatcaattatttatttattttttggaatttttttggcagtacgacgatttagctgagctcga

SEQ ID NO: 71284 - DNA, 786 bp, Prunus persica
  Intron number 1 from transcript ppa019437m (locus ppa01943 7m.g) derived from phytozome v7.0 (chr-ID scaffold_2; pos 20059773 to 20060558 reverse strand)
gaaagctggttagcttaagccctcttgcccctgccactaattaattagggagattcactattatacccaatatgggggcccaaattataaaaatatcctacataaaatggactttagaaacacacccaaagcccattacaacataacaaaaaagcttttaacttcttataaattacaaaactgccatcaatttcttaaaacaagcccaaccccaaaatctcataaaaatacccaaagcactcaatagggcatcaaagtaatttaataatcaatattaaattcaataaggccagctatcattttttgggttttttttgggtttgtttataggaattcaattgtgtaggatttatttataatattagtgctagaaatgggtatatcactaaatatctcaattaattatcctctttccttttctatattttcttcatttatttttaatcttttgactaataattattattattatttaagtttgattaatatattggcacatgcattactcataattatattggcacttcagtgtaaggggacggactcactccatagtctttaaaatggcataatattaaagtcagtctggaatcttggcaaaggaagtaactatttaaattatacatggtccacccaataatagaagaaaggccctatataattcaacttttattaagttccccaaatcaaagaaacaaatcacatagtttgtgctaattataatacaattagggtatctaactccaactttctacacataataaattcacaggtctcaactgaaag

SEQ ID NO: 71285 - DNA, 1024 bp, Prunus persica
  Intron number 1 from transcript ppa017877m (locus ppa01787 7m.g) derived from phytozome v7.0 (chr-ID scaffold_1; pos 31432233 to 31433256)
ttgaagctgataacaggtcatgaattatttctttcatttgtttgcttaattttgtgttcatagattttcagaatattcttggtttgttttctgcattatataatgcatttgtttttgttgctctgaaaaaagggaacatggttttcaaatatttacaacgcatgagtctaaaatgtaattgtttttcataaaaaattgaaagtgtattttgaagctcatgaatgtgactttctctccaatcttttggataatgaaacttctggaatacaaaaagaattttttttgaaaacgtgctcaagtaatgtgttgtacctagttaaaattgaaaattgtacctccattctgacaaaggaggctagtgtaacttctcaaattggggaagagggggccatttatgtgtgactaaaccttaagatagggtggtgtagcttattgatgatatttttggtgtagcagatattatatacgacttgattaggcaccaggttcatgaaacaacttagcaccctatttttagatgaggcgcttcccaggcttctggcagtgcataataccttttaggcatggatattttgtgcataattgagattgattcattagcttagaaggataaaactggggtccagtcgtaagctttaaaaggattcttgttcgtataagtctttgatgctactttgtcaacttttgaaaaaaactatatgttttcagttctgtttctctggggcttttaatgagcttgcatatttttgagttaggttcccagcagtttgtaaataatgcaatacggggtcctattgggatttttagccagaatctgtagataagacagtgttgaaccactgacttcttaggtcttgtatattgaacacttacacgcatgctgcccggaatatgatatctatggtctgtctttcagagccctttaggatgatctcatccccacatgaactctgacttcgccctcaccttacattgacatatataatgcaatacagggtcctattggggaagatatcgacatctg

SEQ ID NO: 71286 - DNA, 366 bp, Prunus persica
  Intron number 3 from transcript ppa004229m (locus ppa00422 9m.g) derived from phytozome v7.0 (chr-ID scaffold_8; pos 881312 to 881677 reverse strand)
gtaaaaatccgaaaatacaacttctggctctttttgttagtactattccttttcttttgatactttcttgatattttttgtgttatttcttgtcataagttttatatttctttttgcacgtttaaataaaaatatttataaatttatgatctaaagtttctggcaggcttcccatgccaaaattatgcataggcatgtagaaatgtcaataaatttgtgatttatggtggaccagttgtggttccataaatttcttgctgtcatcaccaaaaaatcagcttttccaggcaatgatttcttttttcttttccgaatggataatttgatccaggcattggagactgtgagcaagaattgtggtgagaa

SEQ ID NO: 71287 - DNA, 764 bp, Prunus persica
  Intron number 1 from transcript ppa004229m (locus ppa00422 9m.g) derived from phytozome v7.0 (chr-ID scaffold_8; pos 882621 to 883384 reverse strand)
ggctttgattctctttcgatactgggttttgacaggtacgcctttttcctgagatcctgaccccaagtcttcgagatttacttatcttcttcgttttgatccttttgtcaactggggttttaaggtttctttgtgggtctctcgtgtttatggcataggaccattatttgtggcaaattcaaattttgattttgatttgtaggtactgatattattttgggctttgcttatttgtttcaaaattttgtgagtttcttgtatgtagttgatgttaagggttggtgttaatgatactttgttgacgatccgattgctaattcttctaattttggttgtgtattctgatggggcttttgttgatgagcagatattggaatttgattagaccccttttgcttgcagtttgtattttggatacttctggataaactttctagtggaaattccagttacgcgcaattatgattattgttcattcccttatatttgttttctgaattctcatagaatgagtgctatatgtttggattgggattctcataagttttatcttgatgggttaatgaaaataatttatatagttattggaattaaataaaattactgatattcagctaattagtgattggtgccttatgattttctgtttcttgcgtttaattagctctcgtacaatcacaaatgtcaggactgtacataattgaacttttgtttggcttatgatcttaggaaattttgaggataaaggacttgagtgaaggggg

SEQ ID NO: 71288 - DNA, 364 bp, Prunus persica
  Intron number 4 from transcript ppa008971m (locus ppa00897 1m.g) derived from phytozome v7.0 (chr-ID scaffold_4; pos 14724007 to 14724370 reverse strand)
gattgtttgatttgccccaagatttccattggtgagatttgtgtttttcagcttatggttgccacgtgtgacaatttttttttttctttcataaaataagtcaaagtaaggataggttgggccaaattcttgttgctgatcttgacagtcacaagtttaaaattcgaattggaatggattgtttttactgtttatgatcacattattctgctttcagtagctggagagatttgtcttgtgtggtggatgataagatctgaagaattttgtttcactttttttagttatattttgccttctactttgaaagatttaccctgatgcttgccgatgtttggattacagctttgataaatttaagcca

SEQ ID NO: 71289 - DNA, 576 bp, Prunus persica
  Intron number 1 from transcript ppa016623m (locus ppa01662 3m.g) derived from phytozome v7.0 (chr-ID scaffold_8; pos 404122 to 404697)
gtagccaacctctccggatttgtgataagaaatcggtgtgtatttgccctttttctagttgtattggtgaatttttttgtccttagaactagtagtgcctcatcacatccagtagaaaataaaagcaaattctggttgctaaaaaaatttggtatcaacattctaggatatatatgcaagtttctagatacacatgaattttgtttccagtttctgtgatagccttctcctctgccatctgaaatttgggatgctagctcattgagtttaatgtctgtttcaaaatttaatgaagggtagaaccatgatttctcttgtgtattaaaagacataatgaactccatttagagttccttgttacagttgttgtagtgacctatctaaagcagcgggcttaactagaaaaattctgaaccctgcttcaaccatatatatgtatgaatgtatttttttggtaggaccatatttcatgtacaatgaacaaaacctatcaaaagcaaaattttctttcttcttcttgattgcgatctgtgcaaagttgcgagatgagtatcatttattttcttctttgtaggt

SEQ ID NO: 71290 - DNA, 832 bp, Prunus persica
  Intron number 1 from transcript ppa020181m (locus ppa02018 1m.g) derived from phytozome v7.0 (chr-ID scaffold_3; pos 5724507 to 5725338)
cattgttaggaacccaagtatttttctttttcccatggaatttctacaggaactactctaatgaagatgactacgaactgcaagaagaaaatgaaggattgttaaggagagacataggagaaggtgattacgcaattgacgacagagcagagaagtttcagtgcatgagccttcacaagcgagacaccacaaaacgaggtgattaagataattatctctgattttcgttggaaattaagacaattaaaatttattttatcaaagtagccaaaacccataaattataaaatgaggatgatgtaaaaatttgaatgctagatatttcctcttgcttgctttcaatctttatctgggaagaacaagaacattgtatgttcttttattcaggaccaagaaaacaaaaacaagattttcctggcatgaaatggttatacttgagtagaataagtagtcctaattgcggtaacacattcagtctgaaaaaactgatgaatgtgagtctatggatcagaaacatcaagtgaaattttgttgtaaattatatattttatggaaatggtaaaactatttcgttgaatttctggcgcaagtattcagttagttcgtaaaaggctattcgtagttatagtattaaaagggagagtttagagcctctttctgtaaagacttaaagccacatactagaagaccgtgaccacatacactttccactaaatgcattcaaatggttttcctgtatatacctagtttctgtggatccagcaagccagcttgcataacgagcgaaaatatatttatgtatattcaggtgaagagctatcttttcagaaga

SEQ ID NO: 71291 - DNA, 488 bp, Prunus persica
  Intron number 2 from transcript ppa012842m (locus ppa01284 2m.g) derived from phytozome v7.0 (chr-ID scaffold_5; pos 12179386 to 12179873)
ctttggaaggggaggaagaggagactagcactaaggtaagcgttgatttccctcttaaacacggtttagatttgcttctgtttttttttttcttttctgtttttctctcttcaaccaaaacagtaagaaaagatgagaagaacaaataaaagtttactacaatgtttcacaactctcactacaacctaaataagaaaaaccaaaatcaaacggtacgaaaagatgagagccagaggttgctactatgagtgaattaccaaatgtatctgaggttcttccatcatggcatcactagaatgtagttggattaaaacagttcattcatttcttatgtaatcaatggttattgcttatcaaattttatttcttctgccatacatgaactctgatcttatacttggttaaattcttgtgccagatttattgactctctcaaattcttggttagtgcagcaaagaataagcgaggtccaaggatactgaagaga

SEQ ID NO: 71292 - DNA, 756 bp, Prunus persica
  Intron number 3 from transcript ppa006053m (locus ppa00605 3m.g) derived from phytozome v7.0 (chr-ID scaffold_6; pos 9097632 to 9098387)
aactggcaagatgtatgactcttggatatttatatattgttattttttgcttgtatgtgtgcatagattgttcttgttatgagcttcaacacaaaaaagttaagtgagggtatttcgccagagctgtaatagaaaatttgatcatgagataggattgttcactgcacttacagcatactaaaaagaagaaatcatgattgaccctcttatgcagagatggggaattttagaacttcctgagggcacggtggagcagaagtggtggagtcaaaatcaattggatgacctctgaccgtgtttctggtttctgatttctggcatggtcaactttaatgtttaacaagttattaaaccacaatatttaatgcttactgattactcttatgcgagttaatgttatcactcaattacatgtgaaccaacaaaaaaaggttgatctggtgttaatcaacagtccatgttaattagtttaatttcaatgaataggttttgcagaaaggaaatgtcattgactgcacagttaggttctgggaatcaccaattcaaaatgtttgttatacctttctgagtttttgctgtaatagaggatgctcaaaaaaacctctgattggctctacaacataaattttcagttattcttttctttggctgcagtcactggaatctctatctaatgtgctttttttaatttaccgattctttctgtttttcactatgccagataatcttggagaagattgccctgtatttgataac

SEQ ID NO: 71293 - DNA, 689 bp, Prunus persica
  Intron number 1 from transcript ppa022714m (locus ppa02271 4m.g) derived from phytozome v7.0 (chr-ID scaffold_3; pos 10402495 to 10403183 reverse strand)
ctcttctgtatcaggtattttgtcgatttgggtttgtttcgtttaaatgtttttttatgaattttttgtcggatttctatgtttttatttttcgggtttaagaatatcaaatattggaagttggttagttgtgattgtttgattgcttgattgctgagaaatttggggaaaatgaaaacaaaacgagggatttgggtgagattataaccaacttattatattaataagaagggttgagctgagtggaggggttttgttttctgtgggatctgtaaaggaagtagtagacttgaacttcagcatctgtttggttgttgagaatgtgcctgaaagtgaagcgggtgaagaactttgagtaagtagggcttaatatgttgggcgcacattcaattgtttgaattcttgaattgatcacattaaataaaaggccaggttaatccctacattgactactttcaagtttctagtccgttgcaaagttttagcaaacacccattgagatatcaactggttctacctttcggtagccttaatattaggtgaataaattatttgacatctcttattctgtagagagatttatcgagaaatcatatagttttggatgtatgagtgctacttttgagaaccaaaattgagtctttacctgctgtctctgttgcagaaaaaacatttagagctcgctgagg

SEQ ID NO: 71294 - DNA, 313 bp, Prunus persica
  Intron number 2 from transcript ppa006918m (locus ppa00691 8m.g) derived from phytozome v7.0 (chr-ID scaffold_1; pos 23191449 to 23191761)
cttttaaggtttgtttttcttgtctttctttattcggtttgttagattttcgaatgcagtggtttcccgcccctgatctacatgcttgtctgtttcatttgtgggaaaactgataaaataatgaaagtaaggttgtgaaattatgcttgttttagaaggaactgaatggtgaagttcatgtttgagtaaaaccccagcttcttatcttcccattggttttaagcaacctagtttcggagattcatgtgaggaatgattgactgtcttgatttttgcagcatttgctgtttagcgtaactgatccgcagttcag

SEQ ID NO: 71295 - DNA, 944 bp, Prunus persica
  Intron number 1 from transcript ppa027191m (locus ppa02719 1m.g) derived from phytozome v7.0 (chr-ID scaffold_8; pos 5137859 to 5138802)
caaaatgtaaactgttaaattggattgggacaatgaagttgttggaattggggaatttgcaccaactgatcccaattcattagtccatcatgtgcctcttggtcatgagtgctggaaagtttgggtgaacgatgtaatggatgataatatggccttgtatcgaccaacacgtgagttctttcttcttcatgaagcattaggaactacaattgcatggccgatcaagtacatcaaattgtgttagcgttttgaggtaaattcttcattcttcttttacatgtagatggtatagttctcattgtataataatcaagtcatgactgtgcataatcaatgttaaaagagcataatatatatcattgtatatatatcatgttatatatacgttttctacttactgggatccacctttgttgtgattttaaaaaagaaatgactttttctatttatatatttgatatcctgcaagtttttctcaaagggtcaaagaatgctcatgaatattgtctactactaaaggacattattttagcatacactactacaaaaaagcaaaaagacgacggtaaatcaccgtcgtgtattcggtttttcaatggtcgtggaatccaccgtcatcttttccctcataaaccacgacgctaaatcaccgtcgttgttaaaatatacaacgtcatcaacaaatacaaaacgacgtctttgtactgcaaaaagatctaaaaaagcagtcgaggatgagaatagacgaccaactctctaaaaaaaccgtcgttaaaaagaaaaaatatgacacatattaagagaataaggccgcaagatagacatacaacgacgaaaataaaaatacgacgccgttaaatatcattttcacgacaataaaaaatttgacgtctttaaatacattagaagacgacgttattgatacctactacgtcgcatatata

SEQ ID NO: 71296 - DNA, 826 bp, Prunus persica
  Intron number 1 from transcript ppa008883m (locus ppa00888 3m.g) derived from phytozome v7.0 (chr-ID scaffold_6; pos 17873649 to 17874474)
attttattgaggtaagcaaaactttctgaaccctcctttttttttctctgagaatgaaattgcatgtgtctctatgtgtgttttggggtgtttaatttgttgggtttaattcaaaagagcaaattggcatcttaaaaaaaaacgaagtttctttctttcttgcctaatgcaagttaatatagttgatgcattgtacaaacatacatttcagtaccatatgtatctggtttgaatattcacagagtatctgggatcatacatgaatcatagccaaatcaattgtcaattggctgattcgtactcataagaaacaagataaaatgatgcttcaaaactgtgaaactagcatctaatcagtcacgggaagtgatatttgtgtttggtggaacacaacaaaacccgttttggtcctgtttgtaggatgaagatggtaaattcagattgactcatgcacataatcactttcatctcttttgccaataatttcttttttgcgctatcagattgcatctcttttgtctattttggactatgttttgcctcacataaagacagagctttcctctgttattcagggatatgtgtcaatcccaagtgtcaatgggaaaatctttaggctgccagagactacagttcatggtcataaagggctcaaaatattgtttgtttaccgttgattctgtaatgcagcggcaatcgtggtgcaagtcctgtttgttcatattaaatgaagatgttgttcaatatttctcatttcccaatattacgggcgatacagtaatttcacctgaaacttgtcttatgagtttcggttgactggcaggtg

SEQ ID NO: 71297 - DNA, 519 bp, Prunus persica
  Intron number 1 from transcript ppa021095m (locus ppa02109 5m.g) derived from phytozome v7.0 (chr-ID scaffold_4; pos 7221621 to 7222139 reverse strand)
attccaaggtaatttaatgcatgtttaaagttatttcgagtaatattcgtttgttaggtaacttgacgtgttaatgttgtcgacctttaaatttagggagactttggaaaagcccaaaggagagagaaaaattttaaaagaagccgaaatggacaaaattgcccttatttattttttgatttcctaaagaatcttttacatttgcatgtctttggtttgaaagttgagaggtttttctgtcttttttgaaaaagctttggctttttccaaaagtaaaagtttttttatggataaaacctaaatttactttaaatttaaaccacatattcacacaagatacatgttcgtgttattaatagttttggatggataattcgacaacattaacatgccatcatgatatccaatgaaagaagagaacgtttttatctttcttgatttgttttccattatcttaaagttaaaaggagcaatcactaatgggttcttcaatttgcaaatacaggcttttctaaaagc

SEQ ID NO: 71298 - DNA, 813 bp, Prunus persica
  Intron number 1 from transcript ppa007968m (locus ppa00796 8m.g) derived from phytozome v7.0 (chr-ID scaffold_2; pos 2460543 to 2461355)
gtgttgatcatagggtggccaaggtcagtctacatgaccccccacctctgttttgttttttcacacctatttccttttgttttttgaattttcaattgaaattaaccagataaacacttcttgttacctggagattgttgtcttttagccctcacaattttttctggagataattgggtattaaattgtttccctaccctagtcatagtatgttcttggaacccaatatgtcctacatgaatgccttggtggtctcacagataaacatttttcaagcttaacattgttatttctgatcatattgtgacattgaattcatcatagttcaatatgaatgaagatttcagatgctttgtccaaatgcagtgaaattactgaatcatgtgcagaagcccttcataaaatcaaaattgaacagacagaggaatttactatctctgttttggaatataagttaagaagggttagttggcattaatttagacattaatttcacttcacctaacataaggatgcatcatgtttggcatctgaatttcaatgaaggtacaagctttgcagtaattgtacagaaaaaattgtaatacaaacacttgaggttaaagttccaattattgtagtgcaattgtacacacatttgaggtaaacaattgaagttacaatgcactctagaaggtccaagtaaaccaattgtactccccaagattttcttagacaactctagtctagagaaaaaaaatattaatgtgtatgtgattgtttgtaaatcttactaagttaatttaacctgcagtcatgttaacatgcaggaag

SEQ ID NO: 71299 - DNA, 617 bp, Prunus persica
  Intron number 1 from transcript ppa023048m (locus ppa02304 8m.g) derived from phytozome v7.0 (chr-ID scaffold_7; pos 17259096 to 17259712 reverse strand)
atcaacaacgacagcagcagcagcagcagctgcaagtgattcggggagagaattccaagaggctgagagaaaatccaaactccaattcttcccttcgcattctcggcaacacgtcaggtactattatatatatatatatataatatatatgtgtatatatgtatgtacagttttttgtttttgttttttatagtttgagaaaacagcttactcagagtttcttgaaaatttgaccctcgtctgggagtgaatattagccagaagttctgaagaaaaagagagaaaagaaagaaaagaaacaaagggttttggagggtagcgagtaaaaatataaacacaagtagaagagcatatcgattgcgtgtggagtggaaatcgacctccgtagtaaaaatcttcttctcctcctccatagtagaagagcatatcagacgtcgtcagctttttcctttctttctttctttcttttgatcattatctccccttttccttttccaataatactgttatccagtcgtcctgacgagtttcaacattgacagggaagaaagacacactatttttctttcttgcctttgcctatagctatagctagctttagcttaccctcttttgtt

SEQ ID NO: 71300 - DNA, 704 bp, Prunus persica
  Intron number 2 from transcript ppa010390m (locus ppa01039 0m.g) derived from phytozome v7.0 (chr-ID scaffold_3; pos 7449163 to 7449866 reverse strand)
ccattcagtttgcttcaatgtaagctccccaagtttggttgttgattttgatgcaataactttgtgtattcttgatgttttgttcttccaattaggagttttttggatgtttattgccgaagtcccaaaactctcttctgaaaagatcttgtttatggaattgttgaaatgaggtgctgattcaagcaaattattagttacttggcaaccaattttaacaagttcttagctttatggcttggcttggatattcaaggtggacatacgtgttagtaaaacttctacctaatagcacctctggttgaatggaatctaataaaatatgcatttaagctgatgtttggtgtcttatatggacacctgagggagaagtttacttctagaccagttaaatagtagtaaatgctatggacataatgaaaaatacagcagggtactagtatatcggaggtggtgatgggggaccaaatgtcctattccttatcatattgtatgctatttgcatcactttataggaaacttttatagttgaccaattataaatttatctccggttttgagtcttgaactctcctagatggacttttatggtcacgaggaggtggacctttgttacatccaggggccttttttatgcattttggagaggcttttaaagtgtatgagcttaataaatttttatctttggtctcttaggtgttacc

SEQ ID NO: 71301 - DNA, 484 bp, Prunus persica
  Intron number 1 from transcript ppa010390m (locus ppa01039 0m.g) derived from phytozome v7.0 (chr-ID scaffold_3; pos 7450054 to 7450537 reverse strand)
tcgtcctaataaacgcaagctcttacacctgccacgtaatcattgtcttttctgtttggtgtcccagaaaatgaaggaaaactggagaaaattaaattataattcttttggtgttttgcgttgtataaattaatcatttggggttcgaaacttccagctacttgaaactacaatactaaaagattttgtaagcaaattccttttttctaaagcaaactttgaactctttcgtcggacttccacaatataaattaattttcttttttaattttttctttacttcataagcagctaaatttgcaatttctttatcttgtttgtcatctgaatctgaagttcatatgaaacggaaatttgtaggttcccttttcttttactctcttactaaaagtttcttggcacccaaacacagctgaaataatcccttttatggttccttgttttctcaggtcaaattcagaagagaaggaaatttcttgaagaa

SEQ ID NO: 71302 - DNA, 990 bp, Prunus persica
  Intron number 1 from transcript ppa017009m (locus ppa01700 9m.g) derived from phytozome v7.0 (chr-ID scaffold_1; pos 24944014 to 24945003)
gactgtcgtggcccagcgtctaaggcaggctaaatactaaatactaccactgctactgctgctgctgctatgtacaaccaaagctcagtaatttctaaagaaaaataagtgcgaatgttgcttatatatatatacatatatgtatttattatggctctttgctgaagtttggagttttcacattctccttgtattctgctctttgtaaccattgtttttgtattgagagaattaaagcatggcgttttatcaagtgtcttataatttataaaaaattattgatttcgactagccttttgcttactggttctgtgatttctgcaacaactacgctagcatcagtaatactatggctgaaacagagccaactcagtctagttcaagcagcatcttcaaggcgccatagccctacaaaaccataatttgaatgaagacatctgaaatttttattaccttgttcagttggaattaaaccaataaatggttcatgttgcccacaaatggtatgtgtctcatttaaatacttgcagctgtgtgtgttaaaacattttgtctatgcaatttataattgctataatgtattatcaattttttttcatcaagatggacatcccagaggagaacttttaacaggagttggatatgggcacatggaataaccagaatatctgaatgatggttacaataaaattttaacagaataacaagaagcagttgcttccaaacaattctggagactgggtgggggaaacaatgatgaccatgaagaccacaatgatgtcaaggggacagagcaaacatcatcaccacaattatgcagcaccagatccaatgctacacataaaccatgaaaaaatatatttgagtctacttatgtagtctctactaatttccccaaacagttggatgtctgtttcaacatgcaaaatttgatctcaatgatacatgtgtatgcctgcctaggcaagcaggcagtatttccaacaatag

SEQ ID NO: 71303 - DNA, 934 bp, Prunus persica
  Intron number 2 from transcript ppa008173m (locus ppa00817 3m.g) derived from phytozome v7.0 (chr-ID scaffold_7; pos 22272670 to 22273603 reverse strand)
cttctctcatcaacaaccacaacttactcccactggtcagtgtcagtcgccgcatttctacttgttctttttttggtttattttaattttaatctctatttatttacactgcatttctttctggtggtggaatattaagacacagtacaaggtttatatcggtttgctaggtctggtagttcttttgcttgtggatcggcactttaaaagtcagttccaatggagcatcttagtcattcattacttagattgtgttttcctccataagtttactatgactttttgttatagttgacaaacatcaatcaaattgatcaaggtacacaacaatctcaattaatggctctgctgatccttgcaaattgatttttcatttgtcggttcgcttggagaagcctaccttccttaattatgtatttgcagcaatcccttcccttgttctagtgtggcctaagccttgtgtgaggtaccatgtctcttgtttttttcatttttttggttttgtcagaacttgggaaacctatattcctttgcaattaactcaacaccttgaagattacttttggccaaaaacaaaagtgagtatttgtgcttgcacaacaaatttgggaactcctgttatcatatgttggctgagttgtgcaacaacaacaatgtatgtatttcaaaattgccagttgacatcttgcggatttcgtaaactgcattttattgcgaatttgattttttctatttaagattacacaagaagttgttttcttttgttcattccatatttgtgaaagcagcagagagggtggtgcagttcacattggaaatactgttgaggtttttaccataaatcagatatttaatatcaagactcttttcatatactgtgtataagtactctgttgcaggctaaacctggcccaattctttctggagtcaagcg

SEQ ID NO: 71304 - DNA, 613 bp, Prunus persica
  Intron number 1 from transcript ppa008341m (locus ppa00834 1m.g) derived from phytozome v7.0 (chr-ID scaffold_5; pos 18286704 to 18287316)
gcaccaaagtatcactaacaaacatgcctctttctctcttcttctcgtctattttatttgctttattgagtttttggggttcttcttctttcttctatttttgtttttcctaacccaagctccgaaatcaattacggaattaagaaaattatgcttttattctagtgccgcctgagattattttgctgtattacagttttgggattttcactgatactggtactgcattatttgtgcttagattcattttctcatttgcttaaacatctatgtctctttactatcaaaaggggagtttgaattggtgaaaattattggaaaatgagttattgttgacatgtgaaactgagaatatgggtttcttatgctaatgcattaaaattaaatggactcctagattagaatggtcacgacttttcacaattaattgactaagtttgaaggtttgaatttcccatactaagttttcctctgaaatgctacataacgttataaattataatcaccttctttgttccaaactgttatgtaattttcccttctttctttcatttctttatactattgtgctgaaacaggtgggtggtgtaacaccaaagaagggtgggaccga

SEQ ID NO: 71305 - DNA, 817 bp, Prunus persica
  Intron number 1 from transcript ppa000278m (locus ppa00027 8m.g) derived from phytozome v7.0 (chr-ID scaffold_5; pos 10015490 to 10016306 reverse strand)
tttcaactcaggaagatatagtaagcatttttccctatcttgagtgcttcctcagatgtattttcttttgttggtctgaaaagataaaatatattggaagaaaattgacacgcgcacacacacatctattcttccacaagcaggattactacattaaaacgaaagttgaaggcattaaataagagtatgaatacaacttaaattgatgacaaacatgatttggacaccaaataagagtatgaatacaacttgacttgatgacaaacccttttccaaaaaaattgtattttgttttaagattataagcttgtttttttgttctttctacacttgatcggaagttgtttgatcatctaaaatgtgcaagcaaaagcagttcgttagataaaactgaaacgaaaaagtggataatcaaatggctaaaacctgaacggttctgatcgtaggattacagcccataaatagtatgtctttactttaattacaataaggacattggagaaagcctctgaactatgttatcatctcattaagctgcattgacagtgaaactcttactatatgatgccttccacttccatttttatgttgtccagcattattcatattcataggcattcttaatgtacggattctactgcgggaatgttgtttttgaacattttagcgtgtgattaatatgcgtcaatcagtttaagtgtgaaggggttattagtttcatagttcaaatacagcctgatgcatttgctatatcagatttttttatttattaatattgtaattctgtaacaggagaatatatctgttaaacaaattg

SEQ ID NO: 71306 - DNA, 863 bp, Prunus persica
  Intron number 1 from transcript ppa003848m (locus ppa00384 8m.g) derived from phytozome v7.0 (chr-ID scaffold_1; pos 45611582 to 45612444)
ggctcttgagcagctcaagacctctgctgctgatagtacgtttctattttcccattaataccttctactttattcgtttttcttttaaatttatgaactttttggtggattctttgatgggtttgtgctggaattggattttctgcttgcaattgttggtttggttaatgcatattgcatattgcaattgttggtttggattttctgattgattttgtatattgcattttgattgtttaagttactgtcactttttgaatgagtgaataaatataaaccacaatatatctgtttgaattttcgtagagtttctgggttttagaattgctggataagaaagtgcagtttgggatttttctgtttggcccaagtatcttcatggtatgaaatttagagtataacagaaaacacagccgatactatctttcccatccacagttggtcttgtatcacatatgtattgatgagtttattacctgtagggaaaaaactggaagggaaacttgatgatatggttcaagtgtcatgacttccactgtttcataagttagagatatattgtcatttaccccatccctggtctgttcagaagctttttatgacacttgtttgattgcatttagaggataatcttcactttttaaaccccgtggcaaatttgctgccagcattcactagaacataaaattaggtttaattacagttgtgcaacccaccagtttgtgaattcataattcaaggttgtttaacaatgcatatgttcttttggatattgaaattatttgtataatattgtctgactgaaatttctaaaactaatcttctcaggatatacaaaggaaagaagcagcattgtggtcatt

SEQ ID NO: 71307 - DNA, 840 bp, Prunus persica
  Intron number 1 from transcript ppa000218m (locus ppa00021 8m.g) derived from phytozome v7.0 (chr-ID scaffold_6; pos 2520255 to 2521094)
ctatcaaagccaccccttcccaagttctccataaggtaatctctctctctctctctctctctctctctctctctctcattggaggagggaatgaatagttgttgattatgatcataactcagcttggttttgtttttcctatcatgggtctaactgcttctctttttctctttgcgatctcaaagtttatcccatcttagagcgtgttgagtcagatccagagatgcatgttgttgcttgtggctcagtccaacatggggcctaagtcatgaccacacccccatcttgtctctatttttagtgtttggggattttgcctgctttggctaataatgaactctttcacggctctgaatcccacaaagccacacgtttcttcatgtgttttatttccttaattcatgctcttaatctacccaactagatttccaggatttttacttgcttttcttcccccaatgttgttgcttgtgatttcatgtcacctttatttgccatgagttttaattaatctcagagcttgttcagaccatatctgcagacatcttctgagttcctagatcatcgaatctccaactcacttgggcatatcttggatttttctctactgttgtgtgtgtgtatgtgtgtaattttttttttctttctttcctttttagttccatggtccatatatattccctttctttgttaaaaattaacatacaataaaagggtgtctaacagtaacgtagtttgtgttctctttggactcggtctaaaggtggcttagatgagtcatgcattgcaattgaccaattaagttaataatgagatatgatgttttgttccgcagagatt

SEQ ID NO: 71308 - DNA, 1037 bp, Prunus persica
  Intron number 1 from transcript ppa001319m (locus ppa00131 9m.g) derived from phytozome v7.0 (chr-ID scaffold_6; pos 13646436 to 13647472 reverse strand)
cgccagccgcagagccgtctcctttgccgcctcaggtaaattgtcaatcgctgaacatttgatttcttggaatcttttttagggtccgtctgtttccataagtggttttccatgggacagcttccatgaagataagagagagctattgtttagctgcagaactacaaaataacccatacctgtttgctacatgttggaaaagtttaaaactatggaatatgcacggctaattcagtaatgttttatctctgcattgaaaccttagaaaatggtcatttttatttgcataatttatttattttttcttaggagaatagatttgtgtaattaattaaattatcatttttgtttggcaaaaattatttaaagaaaattaaattcgcatattcatgtctttatagatgtcctaaatattgtattttttgaagaaaacacctcagagtataatataacttaaaataaaagattagtaactagagagcttaataaaatcgaaaccaaaattacaatcaaagcaaatgtttttcacttttttttcaaaaaaatatttggcaacccttcaaaagttaatattgtactaggataacccagaatttaactgttacatactcagtccatgtatctgaatatttgggcacttactggaatttacttgaaaaaggttcttctaaatggcctgctaaatacagattttgcattgtcttgaaggactagaacagaaattttttagagattcattaccaaagtggctcgctagtcttcgatttcttgttctcccccgtcctgccattcctggttacttgatgtgtctggcactagtgctttgagagatacgcttaacattggattggttacttagaatttcaagtgttagggcctgccacctgttcatgaacattgttattttattaatttatttcattcctattaaaaatgagcaatagttcaaaaacaaaaagatacatgctactttagttcatctggtcattaactgtatttgcttttaaatgttttgattggtcatccagggatttgtc

SEQ ID NO: 71309 - DNA, 512 bp, Prunus persica
  Intron number 2 from transcript ppa000962m (locus ppa00096 2m.g) derived from phytozome v7.0 (chr-ID scaffold_5; pos 12163370 to 12163881)
ctacggtgatcaatctttgaactcttttgagcttagttaattataacttgtgaatcaaatagaaattggttttaataaaggcaaaagtttttgtgaattgtcttgtggcactagttttcatggtgtgaaattagagtgtttctattgtactcccattcagttggaggttctggtttgagcgcttagaaagtgagcatggctgtattgaccttcctttataaattctattatcaatgatagaaaacctttagctgtatggacatactctggttcaagaattagcttctattttctcaaacttaaattttttgcagctctctcttcttgtatatgttccagacatgaggtttggatcatagaaaacaatgtattgtatggatgcatgtaattggaaccaaatgtttaaagagtcaagattttccttttattccgacagaaaattgatattttccttactgtttgattcctctgttgcagtctttggttggaaaattaccacgttaccctcatcc

SEQ ID NO: 71310 - DNA, 772 bp, Prunus persica
  Intron number 1 from transcript ppa023389m (locus ppa02338 9m.g) derived from phytozome v7.0 (chr-ID scaffold_4; pos 29185002 to 29185773)
cccaaagacaattcctctcccaagtaagagatgaggccagcggcaccaatagtgttaaaagtcaggctcagcttcaagagctccccagcttcaacaaccaattcttgagtatactcatctttggaggcactcttgatcaaattcgcttacacacttctgaggcgaacgaggtagtttaaagttgaaaacaaaggcgattttcaaatttccacttccagattcactattaagtttgaagaaaatagcatgaaccccaaggcactccatgctgcctcttacttccacctttgaggcgctagtgttttttttttttttttccttccagttatgaacaaagttgagcagtgtttaattcaaacatggtctcatgtcgaaatatattagggtaataaagcttattttataaccaaaacagatcatcaattaacaaaatatcatgaacaaaccgaattgccaatgcagagcctcaaataatgtaacaaggtccgccaaaaaaatcttaaatctccagcaatctctctctcactatcaaataaaggactggcacattgacttgactgtaaaagtgccagacgagaagcactgagaccacaattatataattctcctaaaagccgtaggattaagaagaaggaacacaaacaaattaagatggtaagatcagcttcctctcatatcctcctcctacccatttgtttcattttcctttcgttctcgtcaccatgctgtgccaacagcggtgaccttgacgcccttctgaagctgaagaacg

SEQ ID NO: 71311 - DNA, 1059 bp, Prunus persica
  Intron number 2 from transcript ppa001519m (locus ppa00151 9m.g) derived from phytozome v7.0 (chr-ID scaffold_3; pos 5395207 to 5396265)
agctgcatagtagtagtggaaatctcctccgtaaggtatatgctatatgattttaatttttttatttgttgtttatcgtttagatccgagctgatactggtgatttgagatcttttgtgaatctgtgatcgtataattttatgaccatataattgtgtatgcgcgcgtgttcgcgtgtatgttctggtcattggaatgtatagtgagcatgcaagttgcaggaatggttcactaaatttatttcagtatataaaaagagtttgttttttgtctatggtgttcctgaaaaaaaatgagaaaaccgagtccatttggatttagatataaaatagaagtccaggacatttgtgatattgtttaagtaggcatttctgttgactgtatggtagcattgttcatgtaatcacacagatggagataaaatttataaataaataaaaataaggaaaaataattgaagttttgaggtcaatgaagaggtttttatttttattattagataaaacaccaaagaacctgagtgtaaacaataattgcctgagaagcttggttctggatgtaacttgaatgatacatttcagcaaagtgtgaattagaattctattgggatgggcagctggctggggcaaaggctagatgtttttgctcacccccttccacattctttgcggcacatatgatagttgttgacaattttttctgtttcgttccatggattttacacgtgttgcttaacaaatctggtcagtttggatatcattttttttcatgggagttgcagatactcctatataagtaactcaaaactattatcagtctttctgcttttttttgcttttgtttttggtaaactttctaaccacttgatgcttttgaagttacttgaaggatgtccattttccagtagaagtttttgaagttacttgtaggatgttctttgtcacaagatcatgataaattagaaacatagcttatcttttgttctaaccttcatacatctctttcatgaaattttaccgtgcagattactggaaaaattgaggagactgttggtattgg

SEQ ID NO: 71312 - DNA, 841 bp, Prunus persica
  Intron number 1 from transcript ppa015494m (locus ppa01549 4m.g) derived from phytozome v7.0 (chr-ID scaffold_2; pos 165014 to 165854)
acgtcgttgagagagagaggaggtgagatctgattttgactaactttaaataaaaaagggtaaaattgtattttaactctataatttagacaggcccaataaattttggcctcctctttaacacacatctgaagaaacagaaataaaatacccaatgtcttaaatattaattagtaaaattagttatgtctaatacctaatttttttttttgttctctttttctttaatattttctgaataaaataaatttatttttaatgatttaactgaaaaattgatgaaagtttgatgatttagatgataggaggaaattgagaaaaaaaagaatatgaggtaaattaaaagttaggtacaagtcgaagtagcaaattacaagttaagcccaaattataatgatagttggtaaattctgaagaaaaagtatggccacttgcttaagcttttcggagaagctttcaagaataaactcgacgttgacgaagacgtagtcttttcttcattttgtagacttggtggaagtttcgtcgccgtggggccatttgattggaggagggatagcaattcatttccatgtatataagaaagatatcaaccatcctggttttcattctcctctactgtgtatgttaacagatcggaaaaagccataagaagaagatgagcaatcagtaagtaaagttcaatgttcttctgtctttctttctcaatgtttttttttttttttttcattattttatattaaaaatttaacaaagttagttgctaaattaacaccatcttactctgtttttttggtttgatttttttatgacagatttagcagcggcctagaattggcaa

SEQ ID NO: 71313 - DNA, 724 bp, Prunus persica
  Intron number 1 from transcript ppa007583m (locus ppa00758 3m.g) derived from phytozome v7.0 (chr-ID scaffold_8; pos 13622169 to 13622892)
ttggaccaaacactggtgctcctctccattacaaggtcctctctttttcactgtttctttctttgtttatgtttgtatgtttgttaatgcatcttgggttctttttactacttgtttttatgatgtaaaagactgagaaagtcttgattgatatgcagaacttctgggttttccattttgattggttttatgtgtcattaatctttgtttaaggatacgttcatttgcaaaactgcaactttttgttgttgctttctttggtgattgtggttttgtacaaccagcttcttatatgctcagagtcatttgccatcggagtacctgtgaagacaatcgtatcaaagattttttgttgtgtcttaaagaggctcatttagttactgttcatccgtaatttttgggatattttaataaagaattgtgattgttgataaagaaaagttaattgtttaccagggtcgattatatgtgttgaaaggaaaatgaaatttcatacagactgttgaaactcatagaaactttgaaggctggacaatcaatgggcgaaaaaatgatatcctattgtaactccttgttttttgtttttactgtaatgtgctttttcagtttgtatagcggttcattagctgccttgggatatgttaaatgtattgctgtgaaaatcttctgttattcccatgtcatatcagggagttcgttttcatcgtgttatcaaaggttttat

SEQ ID NO: 71314 - DNA, 786 bp, Prunus persica
  Intron number 2 from transcript ppa009239m (locus ppa00923 9m.g) derived from phytozome v7.0 (chr-ID scaffold_8; pos 17801536 to 17802321 reverse strand)
ataaggtgctatttcaactttacatatcacactagctttaatgtgagctaccctgccccaacttagattgatctgacaagattaagcaatgaacacacgctaaccgttatttttatcaagttttagtcaaccacatcctatcatttctgtacttttttcggcatgcacattgatgtgatctttggtctcttgcacaatactaatgttccaacatttgatattgtatgtgtaccttcatttgacgatacatgtttttctggtttcctttttattgacaccactaattaggttctgtaatataatgctaagaatgatgaatgatgaattttctttttgtggggaagagggcaggagagaggaggtaacataagtttaggttttgtggtatgtatgggtcgtggtggctgaagactgtatctaaaagctggttttcgtgcccattgttgccacattatgctggaaactgaacctcttcataattcattgcagcagcagctatgatactattcatggctgcaagcttcaatttcagtacacgagcttttgtggcaacttacatgcactttttagccctgctgcagtttgaatttggcaatagttttgtttttttggtaaaatctagccgacataaagctggctgctttttggtcgaacattcaaatacaccatgttgtcgtatgatttaatctcttgtgaccaaacatagctatggattatttacttaatgactgttttgatcgtcaatgttcagcgcaagtcattattggaggtgatcaaggagacagt

SEQ ID NO: 71315 - DNA, 486 bp, Prunus persica
  Intron number 1 from transcript ppa013189m (locus ppa01318 9m.g) derived from phytozome v7.0 (chr-ID scaffold_2; pos 25039758 to 25040243 reverse strand)
tacacagtccctgtctctttttggacaacaaagtatctatctctctctctctctctctctctctctctctctctctctctctctctctctctctcatgtaattctcatctccaatgtttctgtgacgctgagcagaaaatttgatacacttacaaactaataaatgagaatggttaagatgcaagcatgtaacaattttgattaaacatattgatttaaacttctgtttttctcttcctttcttttcttgggggatgatctgaatggtttttcgatcagtaccctaccttgaatgggatatcgtttgaaaattgcacggaaaaataaaaggataaatttttcttgttctatacttgtataatttcgtggaaattcagcttttctttggctaggtaagaatgttgttgctgctttgttatatatattattgtaagttgttgcttaaaaactaaaatgaatgttgggttggggcaggcggcgtctggc

SEQ ID NO: 71316 - DNA, 653 bp, Prunus persica
  Intron number 2 from transcript ppa019905m (locus ppa01990 5m.g) derived from phytozome v7.0 (chr-ID scaffold_5; pos 3706989 to 3707641 reverse strand)
ttatttttatctatctttgcttggttgttaaaaatatacaagttacatgcaaacgcgggtttgccctgttggccaaggtagtgagccggtaccgtgcacccaagttcgagtctagactcttacttttataaaaaaaaacagagaagaaaatagaagaagtattgtcgagccagtctagactctgttaagatgtcggtagatcttgttgacgacaatgatatcgatacattatcgaagattactactaagttttggcgaagagagacaaattagatggcaaaatggccaaccataaatgagattcgaacttccaaatgataataaaaatgaaatacaatcacatcaatcgttagttagatccaaacttttgaggtttaatttgatgtttgtaacattactcgtttttgcatagccgagtttgattgaacaaagtgcaagaaattttgttcgatttcgaaactttttctttttgttgaacgtagttttcttgtcaaccaaacatatatcactacttaatcccatgatcagactggaaactcaaaattaaaattacaagtcaatactcttcttaatatatataactatattatgaatgtgtacatgcagcatggtgttgggggccttcgctagcttcatgtgggaagcagaggaag

SEQ ID NO: 71317 - DNA, 228 bp, Prunus persica
  Intron number 1 from transcript ppa013624m (locus ppa01362 4m.g) derived from phytozome v7.0 (chr-ID scaffold_8; pos 8149561 to 8149788)
cggtcagaaggtcaccgttcattgcactggttacggttagctcttcattctatttctgtttaaaatctgcgtttttcttagccacatatcgagctatgaaatataaaaacaaaattttactttatttatttattttcattgcttgaactttgaatgtttttcaacccaatataattattgtagttgaatttcattatatggtctgttgtgtccttaacccaggaaaaa

SEQ ID NO: 71318 - DNA, 708 bp, Prunus persica
  Intron number 4 from transcript ppa013624m (locus ppa01362 4m.g) derived from phytozome v7.0 (chr-ID scaffold_8; pos 8150143 to 8150850)
caagtgggagaagttgctcgtctacgggtaatgttcatcttctgtgctccggaagatttatgctctatgatttaacaaatagttttgctgtactctgaagcttattataaaattttcgtggtgcaattagaaggccattaggaggccgtttgaacatgatcctaatgactcatttggaaaacttttaagtatctcgtttgtatttgtttgtcattgtgaaattgatctctttgcatttattagcaataaactcccatatttaggtcatgttttcatgaatcttcgcacattttttcactcctctaagagtactgtattgttttctatagaaacagagttaatttacctcttttcttctttatgggacaacatgttttgccccatcctgaaatttaccaacaacttctaggcttggttctcattgtgttatttgcgaccttgcaaaatgtttgatatttctttgactgatgcccaaattatgaattcctcttcaaactgaatggtcccagactccagtgtcttaaatctattatttcgactagcaatctgccgtttctaaaatagtgatttaagatgtaagaagctaggaatgtctcatgttcttattttcatttggtgtgcattttgaaagtctggaactggaatgcactttatctcacattaacatctcatattccttcttgatgaatttgcagtgctctccagatt

SEQ ID NO: 71319 - DNA, 892 bp, Prunus persica
  Intron number 1 from transcript ppa022945m (locus ppa02294 5m.g) derived from phytozome v7.0 (chr-ID scaffold_1; pos 34728614 to 34729505)
ttgccaagtttttagggaaatagtacacttcaatagtaagttttgtgttctttcttgcattagtagaattagttttgtgggttttattcaatttaagcgttgattactgtactaatttcgcgtttcatattggatggaaggcgacaacgttatgaaacttgaaattcacggaagactcggtgtgatctctcacgcaattcttcagagtcgacccaatgccaatgtgaattcttctggcaatcatcaatatcaaatgcttgagtaagtttttgcacccccttttcattgtagattaaagggttggcaccaaggatttgatttgtgttattgttttttttttctttcttgaattagtttttgcaagacaccaggggaggaggtgaagcaatttctgatgcagtactgcttagaaagaaagctagaggggtacattatgcagcaagatccattgacattcttttatgaggcactctgcgttggaatggattgggatgccattctgaacccccccgatgacttcgattttccaccatctccacctgattcaggttcgtgcattcgatctgccttgtgaacttgtacaatctaggaaattttatgttcaaacaaagggttgagttatattttctattttatttatttattttaggaacagcaggtgatatggaacaacctgctgcagttcaaccagaggctgccgagcatgagattgagacgaatcctaggatttcccttgcagaacaggttgttgctaacctttttcaatacaaaaagctcttacattttacctacaataattagataaacattagcacacatgtatattttcttttgttaacttggtcatttgtttcatgctgggggagtagtgcagagggagagaacagcaaac

SEQ ID NO: 71320 - DNA, 953 bp, Prunus persica
  Intron number 1 from transcript ppa004394m (locus ppa00439 4m.g) derived from phytozome v7.0 (chr-ID scaffold_1; pos 10601649 to 10602601)
ttacaagagttagctcaggtgaattttttttctccaatttttttcacaactgtttctgggttttctttagttttggttagtctgattactgggtttcttatggttgtgctgaattttgtaaatttatggtgtttttggaattcttctgatggtgggtttctggtggaattttttattatgttgatctgatgcgtctatgggggtggtcctttctttctttttttggttggttttctaattggggttttcatgctttctctgttagagtgattccttgtttgtggattttcttgtttggactttaacttgatggagttgcgaatggatcattcctagagatctgcaattaatttctgaagtatcaagcattttgctttcttttgatgacgtttctgttcattcttgaactgccaaatgtgtgagaaagagtttctaataagtgaggtgaaagctttaatggaacaaccaaaatttaaaacagaaaacttttttcttttcagatgctgtgaacctctgtatacaatttagaatctatattaggtgaaatgtttaagctttaaattaacatggtctttggaatcactaccatagcaatttctgtgtaaaatacagactacagtactggtttggattacttgtccagcacaggacatccaacaaatgtgttatgcgatattatagtggacatattggagtaatcatcattttcaatgatttgattgtactatgtttgcttgtatattttgctttagaaaacataaaggccattgccatctcacttcttgttttttttttcccatttttataaacgtccattaggctactgaatattttcaagaaattcagggaagattttatgttggatctgtgtattttagtttcattgttaaccaaaacacctttttaacatctttgttccttttgcataatttttgcagacaaaaaatctcgaa

SEQ ID NO: 71321 - DNA, 659 bp, Prunus persica
  Intron number 2 from transcript ppa009762m (locus ppa00976 2m.g) derived from phytozome v7.0 (chr-ID scaffold_5; pos 3559212 to 3559870 reverse strand)
ttagcgggagtgggaagactcttcttttctatcaagtaagctctggcattattggattttgttcttcttaggccaattaagaagttagatttttgtgcaagctttctgctaattggttttgcatatgggtagaaattctatgcgttttattaaaaaatttataagacagtctcaagttgttaaaaaaattctcttggttcttttgcttatgctgtttcttttttcttttctgatataattgaaattctattcctgtttgtgataagattttgtttaatgcttggaaaatagtatttgggtagaaattctaaattccttttattaaggaagtcctttgggtagaaattcaccgatttgagtttcttctatgatcacattgtaagacagtctcaagttatttaaaatactatgttggttcttttgttatgttgtatcttttttttcttttttctgatatattgtgaaactctatgcctgtctgtttgtgataagattttgtttaatgcttggaaaatagtatttgggtagaaattctaaatgccttttattaagtctttccttttttcccctcgttttgagtatctttgatgatctagttatcccatagcaatgttgatctaacttttgcgacatgatttgatgtatgtgccagcttcggg

SEQ ID NO: 71322 - DNA, 783 bp, Prunus persica
  Intron number 3 from transcript ppa012001m (locus ppa01200 1m.g) derived from phytozome v7.0 (chr-ID scaffold_8; pos 21405419 to 21406201)
agctggctctcagggcccctcttggccagaacacggtatgtctgttgccaatttacttgttttttcatatttatttgtatatttagttatctgaatgacctgcaaacttgtggtttttgggttttgttggatttgatagttcaattatgatattttgccttcatgcgtacacttcacttgactaagagtaaaaatctcatagaaaagtaacatgatcttctagtcttttcacaatatgtaatttaaaatcatgatcgtgccagtatcaaaccaaaccaagggtattgtttcaaacttgtagttaatatgtgacactaggttcacagatatgggtgctattgggtggtgtaggttatcgggatatgatattatgacagaaaataagcatttgggttggagataaaagtgccatagcaaattgtctactgtaatttagcttagtggtcgttatgaagtggactatttcattgtgagaggagaatcttgaactatttgcgacaccatgtagaggatagcatatgttggtgaagattaatggaagctgtcgtgaaaattggaggtgtagtgtctttttaggtgcaaaaagagtggtgaggagaattttgaaccatctggtataggtagttacggttttgaaatctgataatctgttttggtgcattctaagattagtatcttcttctattcatccctctgtgttcacaagaatttttttgaataaaaggattatgctgataaataaacaacaattctttctgcaggttcttctcagaggaccaaaga

SEQ ID NO: 71323 - DNA, 412 bp, Prunus persica
  Intron number 2 from transcript ppa014145m (locus ppa01414 5m.g) derived from phytozome v7.0 (chr-ID scaffold_8; pos 13185374 to 13185785)
ccttccggatagcccaactcacacaggagaaagtcagctctttcttctctgtttgcccctgaatttcctgtgatgatatataactgtcaaggccgttggttaaacctggtcacctcacctgtgattcaagtactcctgaatatagcctagaaagctattttagctattttagctaattttgaatgttttatcattgctccaacaagctaccaaagtacagttctgtttcatttttggtacactattgtagggcaagctcaatataatttttcctaataactattttgcataagttaatttatccatccatttataaaagtttattcacattatgtacttgatcacttcttatggactcatttgaggataattctaatctcgttcatgaaagataatgatgtttttaatgcag

SEQ ID NO: 71324 - DNA, 604 bp, Prunus persica
  Intron number 1 from transcript ppa008107m (locus ppa00810 7m.g) derived from phytozome v7.0 (chr-ID scaffold_8; pos 13901490 to 13902093)
atctctgttctttcaaggtttgctgtttcgtgcttttccttttagctgttcactcaccatttttttttcccatttaagactgttttctgtcttttcctctttctagttttggtatttctaaaattatatttgggtatcagattctgaccctttttttaatttgtggattatttttatgggttgcatgtgaaatgcccgatctgggtgttgaaatattttacattttgattccctgaattctcggatgctttttgtctatgtattcaagctgaagcaaacccagatttccttttcattaggttttgatagagaggggtcttaatcgtacagttgtcatattacttaataactagatgtgttaatagcttaatcaaatgaatatatgaaccctggtcgtttgtttggataattgcaatgaaacccacgtcatttattcttcaattcgacttgaaagtttatgaacttttggatagctgatcagtttgtcttataaagtttggacctttgttaggactaattaccactcttattcacccttcattttgcattgcctaattcatggtttacaggatatatttcttataaaggcgcccaagaaatctcc

SEQ ID NO: 71325 - DNA, 508 bp, Prunus persica
  Intron number 2 from transcript ppa004428m (locus ppa00442 8m.g) derived from phytozome v7.0 (chr-ID scaffold_1; pos 41109600 to 41110107)
atactttggtacctttaccttctctaattttttgggtcccattataactgtatctattttttgtccactaattacgttctaatttcctacttggcattttcaattttgacatctttattaaattccaccaattaactgtatcgttcttcttgattattatttggtctatgaaatagctggtttcttcttctctgtttaagtctggtaagaaacaatggaatagctaaaatctagacttctagtatcgttttgactgcttagctaccccgagttcatagattttgatttgaacctgtattattaaattgttatggaaatcccatatcacagaaagacagaaatgatagaaatgggattataggaaacaatgtaatagctaaaatattgtggcatgaaattgtagacattacatctaggaatggtaacgggtttagcagttaattccaatgattgattggcaggtgctcccccattttcggagcatctatggtgcaggatagggacctaa

SEQ ID NO: 71326 - DNA, 791 bp, Prunus persica
  Intron number 2 from transcript ppa005166m (locus ppa00516 6m.g) derived from phytozome v7.0 (chr-ID scaffold_1; pos 1105986 to 1106776)
gaggatcccagcacaaaagtcctcattggcaagtcagccgtaatcaatgttaattttctttcctcaagttttgtgccttttttgtctttagttttattcatttttaatttaagcattttatataaataaaacagtcctctccttgtctgtcaatgatctattgtttgatacctgtgtttgcgttctattttttgctggtgatttttgaactagagccttttatccaatgttcttgaagaagatgggtagctaagctattatttcgtgaacttatgtcttgaaggcccatgtatttacttgtagtgaatggctggagtaatggtgtcaattttggaaaaactaatgggctatttaaaggctgtcaggttctaatcaacattcctataggttaaagttttcatttcatatcaattatccaaactggtgtgtatttttatccactctcctccccatatttataagatccttgtgtttttacacatgatgaacatttttatatgcacaagaatattcaatatttcataacaaattgatgtccttgatattggttttaaagtttgctgaaaaaagaaaattcatgttcaagaagacatcccgtttggttttcatgtctcagcttattggataatcaataacattactttcatgttgcaacagcatgtttgaaatgatatcatatctagctgctgacatgcataggttttgcctttggcaatggttttatcacatctagttctgtgcttttttttttttttttggtggggtttatacaggtactgcaaggctgaagc

SEQ ID NO: 71327 - DNA, 380 bp, Prunus persica
  Intron number 1 from transcript ppa018470m (locus ppa01847 0m.g) derived from phytozome v7.0 (chr-ID scaffold_5; pos 14065745 to 14066124 reverse strand)
gtgcactgagtgaaaaaggccaccctttgagactagtaagttcactcttctttgaattgtgtgtttttttttaagtgcgtacataattatggaataggatcaaacaagttgctgttgcacaatttttttaagtaatggaataattgggaagttcaaaattttgcaaatttttagcttcctttggataaattagcaatgtgcaccacgaaaatgttcattaccgtcctttgtattccacataaagattcttgactaactgtgagagcctatctttgatcacatattacgctttattagtgcatgtcattgatcacaattttttttaataccaaatttgtttcaaatccagggctagaacatttgcacacaatacagtacct

SEQ ID NO: 71328 - DNA, 333 bp, Prunus persica
  Intron number 1 from transcript ppa002243m (locus ppa00224 3m.g) derived from phytozome v7.0 (chr-ID scaffold_4; pos 1550424 to 1550756 reverse strand)
tacgttgaatattcgtcttgcgcattctgatttaggtaaattaattcttcctttggctttattcgagttttttttttgtctctgttaatctttgctataaccaaaaggccagtactagctctctttgtcattgttgaggtttctgattttggtttgtttttctataaaagagaaatcaaagagaattggagttacttttctgttggtgtaaaattggagtcacttcattgtgctacacacatgacttcaactggaaaaccactctaataccgtttcttttgtctccttttatatataggtggcaagaaaaaattatccacccttgtgataata

SEQ ID NO: 71329 - DNA, 594 bp, Prunus persica
  Intron number 1 from transcript ppa004946m (locus ppa00494 6m.g) derived from phytozome v7.0 (chr-ID scaffold_4; pos 2627041 to 2627634)
gtggattggaaattggcatcaaacactttgaggaggtaagcatctctttttgggtcgaatatttcactttccctttcttttttagctttctcgcttcacccctctgcttgctgccaaaccctttcaagcctttgcgatcccatttctctttggacagtcggaagaaaataagctccgattaactgctttactctttctcatatcaatttgggtttgcttgcttctgattatagaggttcactctcgttcatataattagtttcctttaagttaaattaatttaacgaatttggtctcaacttttggtgatttttcgtgattgttattcggaattcaggtttttttttttgggtttgttttatgtactttccaacgaagtctacctgaagatttattgattttaatatggttgtgtgtgttttgttgaattattaagggcttctgggaatctgaggtgggactgtaaagtcagtgcttggtgtttctgtttaaagctcaaaaattgttgatgggtttttgatattctgacatgggtttgtgtttgatttgtgaattgtagggtttaagaagtgaaagcgggggcgggtttgtgat

SEQ ID NO: 71330 - DNA, 409 bp, Prunus persica
  Intron number 4 from transcript ppa018571m (locus ppa01857 1m.g) derived from phytozome v7.0 (chr-ID scaffold_3; pos 14903189 to 14903597)
tctgaaattgtttcttcagctcagactgtaagcaagccttttttctttgatttgtaaactttctaaatcttaatgcaaaagtcttgaaccttgggttgttcacttgtttcttcctctccttgctttacggacgttgtatttcagctagccttgttttatgtacatgttttgtgccttgttatgttgcaaaacctgttaacttttaatgtggcttatattatgtacgtcctttgtttagatttaagacagactaaatgaatcaacacgtaggcaattgatatgtattacattttcttctttattgccccaggtgttttataattttggttgaattgttgcatagttgcaaaatacctatgtaggatgtaagacaatacatcaattttcgtttctgtgttgcagattggca

SEQ ID NO: 71331 - DNA, 814 bp, Prunus persica
  Intron number 1 from transcript ppa023153m (locus ppa02315 3m.g) derived from phytozome v7.0 (chr-ID scaffold_5; pos 12004310 to 12005123 reverse strand)
tatcaacggcaccgataactgcatccctaaacgcagtggcggatccaggatccgtaacccaagaggtcatagtgtaaatgttccaaaaaaatattttagagagtttttcatttttcttatctattatttcaagagctcttgttgctttgtttttctaaaaaaattaaaataaaaatcacaagtaaatgcaatacaatacaatacaaaacaaattaacactatttgaatttaaaattttatcatgcaaagattagattagaagttttaaattcctcaattattgttgcattatcgaattaaaacattacttaaatatttataaatttctatatatttatattgattgttaaaatagtttttttgtttgttagataatcttctattatattatattggcccataggataaagtttataaataattcacccattaccatgaagccaaatctcataaaaccgataaaaccaaaactagtccattaaacccatcgacaatgacgaggcagcctaatgttgaacactaaacccaccgtttcactaaaggaggctaatcacaaaacggtgtgtttcgtttataagggcaccgagacaacccagacatcatcttccttgccaggcacacacagtgcctcctctgcaactccgaaaaccttattaaaggaggctccgctaccctatcaataacaaagctctggtgcattcggtctctgcttcgtgaaacagagccatcacagacttagagacaagctgggactttcatcgagcacctggtgtgcacacaaagggtcgctccgcagctgttcaaggggtcgtcc

SEQ ID NO: 71332 - DNA, 1049 bp, Prunus persica
  Intron number 1 from transcript ppa003410m (locus ppa00341 0m.g) derived from phytozome v7.0 (chr-ID scaffold_8; pos 4840274 to 4841322)
cgacgtctataagtgggaccctgaggaacttcctggtatgggtttatgtttttttcttctatgggaagtctttgttgattatgtgatttggggttttgatcgttgggttatttggatatgtgggtttgtttgtgttttggttttggaatcggttttgtgcgaatcttatttttgtttggatgattggttgcggtaacaagtgagagtcctgatcccacggtcaaccgtttggatcaaagtccaatgtttggcgttaattcttaaaccctaatcttaacttttttgataaaaatccaacttttggtgatcatgtcatctaagtttcagtagtttttttatattgctttgcttttgacgtgttttgtttgggctgattggttttggagtatcttttgtttggttgactggatttggctctgtcggatttgtttggttgcctacaattggtgagatactttggttacgtttaatgggtttggttaacagggtttttgtttagtttcagttttgttgtttggacacatacttctccgaatttgcagtgtcctattatgatatttgtatgatctgatcaaatgaactagtttagtatcagcagtttgtgctatacacatatatgtaagagtaaagtattttaatatatgttctagcccttggtttttaaatatctaggttttaacatgcaagtaaatggtatgtttgttattgattgtaggcttatctacctaaacactcatttatttgtgtgtgtgtgtggacggcatgtgtttaagttactagaatgtctttttttgctttgtttcagcaattaagtggatttatttaagatagttttataattgcttctccgttttaaaatgttagcttggtttcagcataagcaattttatcaatatgctaatctatgctgtatgtattcaataactggttttgctctcttaattttttatgtttgagttcacagtttttgttgattgcatttttggttactaacatttgaaagtgatatgatatgcaggtttatccctattgaaaactggtgacaggca

SEQ ID NO: 71333 - DNA, 696 bp, Prunus persica
  Intron number 1 from transcript ppa003034m (locus ppa00303 4m.g) derived from phytozome v7.0 (chr-ID scaffold_6; pos 22123607 to 22124302)
cagacaccaaaagcaaagtaagattaacgtttattggcttcttttataactagattaacatttatttgcttaacttgtagtgttctcataatcaccattagtcttcgaattatgcgtaaatatgcagataagttgtaataatagaaaagcaataaagttttgagcagtaatttactttgagctagtaaagtgttcataaaactcatgtgagttttaactgaatacaaagtatcatcaaaattaaaatgctgatttgcaagttataatgctatagaagtccatattttctcggcctagattgtatatctctctgcatctgaaaagtaagttagacaaatcaaagaaggtgccttggagaatgttggttatgcatcatatccctgtgggtttcgaagcagccagctcaatgcttgtgtaacttgtgattataaggtcggtacaaatattgttgaacacacttgaaacaaaattgtattagcaagagtttcctaatttagcgcttgtggtgtaatttctgaaagcataattaaggaaaaatatcttttttcaatctttcatgttcttgatgggtttttggcatcaacttttgcaactcatcatttactcttaatgtttgatgcatgtcttttaatgtgtatatccctttcctatttgacagcagaattggatctttggaagttcctcaaaggaaatctc

SEQ ID NO: 71334 - DNA, 846 bp, Prunus persica
  Intron number 2 from transcript ppa000332m (locus ppa00033 2m.g) derived from phytozome v7.0 (chr-ID scaffold_2; pos 23285719 to 23286564 reverse strand)
atacagaaaactcagaagagaaaattcgagctcctgtgagtggcattctataattaggcattgtcacttggtatttatgactttctataactcttacatggcatattttcaagtgttgatgcacatgtttgataattttaatatttttattgcagctctttgtgataatccatttcagaaagcatgatgcatgtctctatagataaagtcacatgttttgtaaaacacaatacatttcttttcctgagagagatctagagatacaccaactgtctggtcttaacagtcctctgttatctgtttgcttttggcaatcttgagacaaattttgcatttcttggttacattccaggtttcttgcacttatagaacagatattccttggtctgctaacagcttccagcactatatcattacaaagtgctcttttatgtatatgtatactctcgattgaggttgagatatgaagaattacccaataactaaaaataaaaataaaatttgaggcagcattcctcataagtctgtttaccatcagaataatgcagccacctaattcgtctatgtgaaaactagagatatctcctctgcattttatgatttaaaatcgatttttctattcgttggctaatcactttagttatcgaaaattttctttcgattcacatctcttgcgttagatagcttcactttagtttttttttttttcttttttcaaatttgtttagcttcacatcttgggttgtttatgtataaatgcccaaaactgaaaacattagtttatgttggaagttgtgattgccttattgttagtttgaccaacagattctctttctaatataggtg

SEQ ID NO: 71335 - DNA, 737 bp, Prunus persica
  Intron number 2 from transcript ppa003749m (locus ppa00374 9m.g) derived from phytozome v7.0 (chr-ID scaffold_6; pos 19076709 to 19077445 reverse strand)
gtgttggcaaggtaatttttgtttcttgcttaagtgtgtatgaacatgtcatatgcgtgccttatagttatggttttttaatattaaaattctttggtaacttgtgcatgactatggtttgtgcattacgatagcttctgtggctttactctatagtttcctttcaatctttcattccacttattttattcttttgattttgtcttgaaaacgttatttgataacttctgcttgagtttaaacataagcaaccctattaccatttaccaatatatgagcatggcatcattttattttggaaatcaatttgcatacttttttcccctgatcataggtatttgtatgacctggataagtttctagaatggtgttttgatgtatcatgccattaatatgttttgactctacctacttataagcaacaaacagactgctcaaaatagtatttcaatctctagtagtgatggtcgattgcaataaaactacttagatatgaatactaaagtctgataggtagagggatatcgagttcagatatcttggtgtttttgcttgcttaatagtttctcgtgttctctgttgttcagctggtgcattttaaatgcaggctttcatgtctctatcagttgtgcatgatgtcaaatgctgtaatctttagtgctctacatttgtgatttgtggaatcttctttgctaaattttataaacagtcattcgttttattatgcagatcatata

SEQ ID NO: 71336 - DNA, 470 bp, Prunus persica
  Intron number 1 from transcript ppa025848m (locus ppa02584 8m.g) derived from phytozome v7.0 (chr-ID scaffold_1; pos 12542533 to 12543002 reverse strand)
caactagcagttttgtcagggctcactttggacgagtaaatttctaacccccttatataatgcttttccttttgttttgtttgtaataagtatagacactatatatatttgtactctggttgttagtgtagaagaaagttcttcattttgatcccaaataaaaagtaattacaattttttttgttaaaagaaatgaatgaaaataattttttgaagtcaataattaattaatagtgtgaaaattatttttaagaaaattattattaattaattaattaattttctacgtttcaaaaattatactactaagtttatatagaaaaactcaaaattctcttctttttgtgtgtataatgttccttgcccttttttgtttttcgattttatatagaaatgccatgtcactaaatgcttcatatccttttcaattggcaggcatcaatctgaatctaagtttatccaaaacatca

SEQ ID NO: 71337 - DNA, 912 bp, Prunus persica
  Intron number 1 from transcript ppa005473m (locus ppa00547 3m.g) derived from phytozome v7.0 (chr-ID scaffold_1; pos 28888933 to 28889844)
ccgtgcggtaccattggtggttcgtaattttcttttccctctgctttttccttttttttgtgtgtgttgtttttgtttggttgccgagaaactgaaagaaaaaaaatgaattttcataagcatttaattccgcgagggagagtgttacatactgtagtttctcttcttgtactgcattgttctgggaaactaaaggtgcctattttgcgagtttatgaagtttttacctttgtgggttcaaatttctgtatttctaggtgtcttatggagttaattgctaagaatcgcactcaattttcgagtaaaatttttgtgtgtgtgttctgtttggcaatttaatatttattgtattggatatgcattttcagtgatcatggagggttgctgcttcattgagcataaagtggagatctttgatttttatgtttttagttaggatttcttatgcttactgtttcaaattcttaaatgcactatatgattttggtttggagatttcataactcaatgaagccatttttgcaagataattcaaactgaccaatgcactaccaaacctttaaaaacagagttgaaaacatacctgttcaccacgaacttaccaaggtctaagccattcatttattcatggttgtagctgagcagtgaagattgtagaaagaaccatttaaggttatctcatgcaagaaagctgcctgatagtttaggttttgtagctgtaatcgtattgagggttccaaacctctttggtgaagcataactttccttaaaaagaaaaaagaaacccaatgcttccgaatgattcctctgatttgtctactacatcaactgatgttttcgatattggtttaatgtataatgttttgttgtcttaaaaccgcaggatcatattttcccctctgtggcttttcc

SEQ ID NO: 71338 - DNA, 512 bp, Prunus persica
  Intron number 1 from transcript ppa005576m (locus ppa00557 6m.g) derived from phytozome v7.0 (chr-ID scaffold_1; pos 37055987 to 37056498)
gaagattcctttatcacgtttggtaatgctaggaaactaaccgggaaatatcactttatttcatttctcatgtttgttttgcgtaggaatggaaaacaaagtttgtataaattttcaattatacccatattaaatcaaataaaaaaatgtatttaatgatatattataattctaaattgttaatggggacaaaatgttcatgaaaaatatttatttaatattgactcattttcccaaacttttcaataaggagggaaaataaaacccaagttaaaaggatggtcttactttccccttacttttctatgagctagacaacaatttctcatacctgaacctaccaaatataagaaaataattaatttctcatccctaaatctcacgtctcatcaaccagacggccttatgagaagacgacaccgtcccctgtgtcggtgaactactaaaaactttcatcgttggaaaaaccaacgaaagcttgtccaaacgaacgtcgaagccttcgagcttca

SEQ ID NO: 71339 - DNA, 547 bp, Prunus persica
  Intron number 2 from transcript ppa004947m (locus ppa00494 7m.g) derived from phytozome v7.0 (chr-ID scaffold_2; pos 16852154 to 16852700)
caagtgagtaatctgaaacctacatctctctgtctctctttatttctatttttttccctaaaaaatttcacaacttgtcttctggttttgttcagatcacatagtggttattggttcagtctgcaggctatgaaaaaacttgttcagtgttgcttcattagattggtttcataaaagctcaactctgagctatgtttataaaattggggcggtatcctaaagtcaactttaatttgggctggttcttggaactattatgagaggaaaactttacctgtgaaattggaaaattgcaagctgaactcattctgatcaaacaaaattgctcataatcaaaatcatttctaaataccagaccatatatttcagattgtaaactccaaagttttagtacttcccatctattctaaatatctttgaaagtaagatcaattagaaaacgtaggcacattgtttctgaacattatcttatttttaactaacagctttatggtgtaagttattatttacattttcttacatatgattatttttgtaggacttgctt

SEQ ID NO: 71340 - DNA, 913 bp, Prunus persica
  Intron number 2 from transcript ppa007800m (locus ppa00780 0m.g) derived from phytozome v7.0 (chr-ID scaffold_5; pos 8262183 to 8263095)
attcagttggttttgatcgcctttggagggtatggaagttttaaatatgtttgtttctaatttaatttacatttctattgaattttccaggaaaccttgttaatactttgaccttttttttttttttttttttgggttgagaaattgaaaatcccatgagtacttggtttaaatagaaattgtttgcataaattagggaaactttgcatgtcgtgttgctcggtttgatttgtctattggagtttccttgcccagattttgttctattctggatgccctcactttttttttaatgaattctgcttgccctttttcctagtttgttttaataaaatattggtggtgtaattcaaatcttgaaccctaaatctaagatattttgtattgtatacgactatggatggatttggcatgtcatgtggtgtatatgatccacacaatgataactttttttgttcttctttgaaggtttaaaatgccccagtttaaattccacaactaatctcgtagcttattgacgtaatatctttatctttgagaaaatcactttatgcttctaaacagcgcgtgtcggttatacttatattatttgggtggttacaagtaaatctagttttcaaatcaatgtccaaactttttccaaattacaattcgatgtgttattgttataggggtacattcatgtttgatgcaatacaaaagactttcttgtgaagaagctaatcttaacaaatatttctacaaaatcaaaataggttcttaattttctgaccaataaaggagtactagattgaacttttaatttggttgaagtacattataaatcgttaaagagaaattgatagtaaatgtgcttttcttgtttttctgttttgcagggtaactgtattccagaccttattcctaaagggca

SEQ ID NO: 71341 - DNA, 454 bp, Prunus persica
  Intron number 1 from transcript ppa008041m (locus ppa00804 2m.g) derived from phytozome v7.0 (chr-ID scaffold_2; pos 25672954 to 25673407 reverse strand)
aagatttccagcgacaattttgctatcaaattcaagtatttttcgttaatttcatcgcaaaatttgatctgatttagctcttgatctggttttctttgcctgtgtggatgcgtatgtgttttgctgcctgtaaacttatcaatttttcctgtttgattttgtgagacgctgaggaaagtaataaaaacaggaaatgtgtatgtatgtttcatcattttgttgattgcttcttagataaactttagctcaatgatgcttaggtggttatatatttgtagcagactcaatttactggaattttatttgtaagaagttatttttgtgtgtggacaatttgcaaagaaaagggatcattttgagttacattggtatcttttagtgattttcatgtttttttgctgggcaattatttacagaagatttggcaccgaaagccagacgggtctatttagat

SEQ ID NO: 71342 - DNA, 864 bp, Prunus persica
  Intron number 1 from transcript ppa022314m (locus ppa02231 4m.g) derived from phytozome v7.0 (chr-ID scaffold_8; pos 20901950 to 20902813 reverse strand)
ggaaggcgacacattaacgccattaggtggacgcggtacctgattaattcttaacgcctatttgtcctgattctccctccctccctccctccctccctccctccctccctccctgagctttcctcttccacttattttcacccttttctaattttctcgctttcttttcttcttcttttttcttcatcttccgcaatatcttctttattctattttggttcagaggcggagagaattgataaataaatagacatggcgccgaggacgactgccggtgtagaaggcttggggcccaccaccgtcaatattgccgagagagaaagcagcggatgtagcgatggttcagccttccctgttgatgctgctgctgctgctgctgctgctaacaagaataaacgaggtggacgacctgaaccagtgacctcttgtttttcttattcattttattgttcatgtttgtgttgaactctgctcggagagaaaatttgtaactaagctctgttttagtcttggattttatttttttccacagtaaaatgagatgtgttgaccattattaatttttaatgatggatttaaaaactattctatttttgggttactgattcagaaacgaattctacaattggcattttgatttttcagaggtagctcaaggcatgttgcatcaaatttttatgatgaacatttaggatcttcaactctctgtatattgtggcctgtaacaagtctcatttctgaaatgggttctcaaattcttatggactttcactttagcgggtcctcatggtttgattttcaccccccgcccaattttgcctcggtttgttcttatgttttcaattttggtgttaggtgagaaag

SEQ ID NO: 71343 - DNA, 535 bp, Prunus persica
  Intron number 1 from transcript ppa008295m (locus ppa00829 5m.g) derived from phytozome v7.0 (chr-ID scaffold_4; pos 1383427 to 1383961)
ccgtcaaaaccactgtcagagaccctggttaggcttcctcttcttccccttttcttttcagtgtcaacttttactacagtttgtctgttgcttgcaagttctgttattattattaataattttttttttgggatcaagttcaagttatgccctgaaaccatatgtaaaaacatcaaaatgggaaacatatataatgctgtgggtccagtttcatttcttctgctaatgatgtttctatataaccgtttgtgatgacattagctgaaacatgaaaatggggtatctttgatgagactaaaatgattgatgccaaggtgttatagttcacaccattatgtagaggtgttagtgatcaaccaaagaagctgaaagtgtacaaaatgatttagttagtcatatgaacatactgttggaatacattaaggagactgatttagttgccagattaagattttaatatgctggcgtgaatttcattcattttgtgcatttgggtgcagacaatcagaagaagatctctcacctcacagcacta

SEQ ID NO: 71344 - DNA, 418 bp, Prunus persica
  Intron number 2 from transcript ppa015455m (locus ppa01545 5m.g) derived from phytozome v7.0 (chr-ID scaffold_6; pos 25736039 to 25736456 reverse strand)
aggaaaaccagttggacccgttccctttctacaaggttcatttcaaagcgcccaccttttctctatctctttctctgttggacccgttctctttcttccgagattgctgttgaacttgaacttgtgtctatcagcgctgtcttgtgagctttgggtttgtgtttattatgattccatttgttttccgcttatcggttttgtggtatgagcttgattactatgtggttagcggtgaggggctctttgggtagcacccatttactgaatttcttttttgattctatagatcgagcttgttatagttagtcactgttgtaacttttgcttaaataatgtagctactatctcattccagcttttgattgattttttgtgcttgatagagggaggacaagtgttgctgttggtgtttgctttg

SEQ ID NO: 71345 - DNA, 991 bp, Prunus persica
  Intron number 3 from transcript ppb019649m (locus ppb01964 9m.g) derived from phytozome v7.0 (chr-ID scaffold_6; pos 873881 to 874871)
ttgtccgtctcaaagcttcagttgctgtaattgcaggctgatctgtctctaatggctcatgcttagtgttatctggagaaattggggtggttattctttctgtgctgttggtacatattgctggtttctttgtggggtaagttgcctttaaactgttggtgactttaattgttaagtgtgttgttgtggaaaaagctcaaggtaatgtacacattttttttcagtatgtaaagattcactctaatttaagctcaaaaattctaaaaaaattaggttgtagccttgtattagtgtattattactgtttgatttagcttcagtcaagtttgatatataaattatagagtgaagttaactatactttgaaaaaacaaaatattcataatttgtaagcaacagttgagaaactatagtttgctgtcattatgacttcatagccataaaagctattgcagtaagaaagtatatattcaatcttctttgtctatgtggattttaatttgacatatgaagatagaagctagttttgtatacgagcattgttggcagagtttgcactcatacaaatattctctaaggttgtggtgctgtacctgtttgtttagtttgttttggagtttttgcggtgcaaatgtgcaacttgaggagtctttttcgatcaaggagagtcttaatttgcaggtatatatcagcagctgtttcgggtttagagaagcacaacgacgagcaatatcaattgagttattaatcaaatagaatgtaaaccttaagacatgatctggctttctgtgaatccttatgttcttgttttgtttcggctttggtcaaattggtaataaagatataaaaattctcttcttaaactttattgtaagtccatagaagatcttcattgttttatgctcagattgaaatgtcgaaactttcataaattttggtgggcatgcaacactaatcatttcattcacatgttcgacactcgcaggtaggt

SEQ ID NO: 71346 - DNA, 768 bp, Prunus persica
  Intron number 1 from transcript ppa005747m (locus ppa00574 7m.g) derived from phytozome v7.0 (chr-ID scaffold_1; pos 40838618 to 40839385)
caacgactacgagtactacgtccactacactgagtgtaagatccaattcctcatttcttgctcaattttgcaatttagggttagggttagagtttttagtttgttctatgtttttttagggttccagtttttctggttagctgtgtatgtggacagatgtgttcaatttgccaatttggtgatttttcagctgggccaatagtcttattggggacccaggtttcgtagagttgaagtgttggtgaaattagtaaattgcctcctgttgcgggggtaatctcttaaaatctcattggggtagtagtctagcagagaatttaacgaaccgttacattacaatgtagagtgagttacaatgacagcatataagatgtttcgtaaggtttttgaggagtaatatgaatacagattttatatgatggggaaaagaaaaggtatttcctggagcctagaggtgttcggcccgttttgggattgaatgaatgattattttatttgtggaatggattttatgagatatgatgaatcatgaataaaaccgtgctctccctggtatgcacataaacatcatttcatttgattatctgtggtgttcatttgtttgattatcgtaaaaagtgttatcttttgatatcatataattaatagaataggctaagatcttatactggtgggatgtaattaaattaatctgttacagttccaatgaattcttacttattctgatctatttatgtttgttcaatttgtcagtcaatagaaggcttg

SEQ ID NO: 71347 - DNA, 574 bp, Prunus persica
  Intron number 1 from transcript ppa024585m (locus ppa02458 5m.g) derived from phytozome v7.0 (chr-ID scaffold_6; pos 11822047 to 11822620)
gaggaagggagccaatgcagatctcatgaactgttgcaaacagtggcaaaaactctagccacccacggtggcttagaatttcgtaaacctcttttgctattgacacacctttaggaaaaaataactattaaataatgtgagttatataaacaaatagcttcaggctgcatctgcataagatcaagctatagatatgtttttgtggactcataatacaaatcctcttaagtttcttcaagattactagtaacaagttagaaattaacaaatatatgtttgaaaaccatcacaacttcttgtgcatatgtaatcaatgtacaaatctgagtaataacacagtttagttatctatttatacagtttagttatctatttataatgtttaatataaacttgtaatctgagttatcacaagtttgatattattttcctcttgctttctttactagtctctctgttattttcttcgttttcaatgtctatgggaaaaagtgaaaatttgtgtatgtatttatcttgtgtttatgaatctttttattgtgtaaatctgtctataggcttgaaaatagaaagt

SEQ ID NO: 71348 - DNA, 642 bp, Prunus persica
  Intron number 1 from transcript ppa012115m (locus ppa01211 5m.g) derived from phytozome v7.0 (chr-ID scaffold_1; pos 4860433 to 4861074)
ccccgtgggctctccaaccaattctcagaaaactggtaattctcttcatctcctttctcctcgtcttattttccctccattctgctcgcgctttcctttccctttccatgttttctcaccaaccaaacagaacccagacagggatttcttgatttctttgttttcatattattttatttggggctaatatgttgtgatttctatattcgattaaataacttagaatactgtcagtgtgattgtttgttgttcaaattttgtaagctttttgaatgctaaggtatattattgtattaaaacccttatattaattgtactcagagcaaaagtaaagtttttttgtaaacgtcataagtatcagtcttgggactgtttaataggttgtattctccttgtattcaatttattggaatgaatttcatattggcaatgaatggtatccattttacttggtatattcgacatgtacaatcaaatgagaaaggatgtcttgtgttaagttgcaattgaaaatcatttcttttgtccggcattgcttgtagatatttgaagctccagctaagtactgttatatagcaatggagtaattctttgaagttttgaatgtaacccatgttgatatgttgtgtatttcagtttctg

SEQ ID NO: 71349 - DNA, 906 bp, Prunus persica; identical to SEQ ID NO: 70274
  Intron number 1 from transcript ppa010915m (locus ppa01091 1m.g) derived from phytozome v7.0 (chr-ID scaffold_7; pos 17236566 to 17237471 reverse strand)

SEQ ID NO: 71350 - DNA, 798 bp, Prunus persica
  Intron number 1 from transcript ppa019375m (locus ppa01937 5m.g) derived from phytozome v7.0 (chr-ID scaffold_1; pos 32959652 to 32960449 reverse strand)
agcagctccataggggaaacgagaacaaaagactggtatttcaattttcaaatctccaatcacacttttatatctttttgcactttttttttcttcgcttacaaaaaattcaattttagtctccataagtttatgggcatttccatcaattcactataactacaaataatgataaataaaaaacggaaatactgattataaaaatataaatatttaaaatttaaaataaaaaaaagttaaccttactcaagtgtcttgcccatcaagaaacaagcaaactgcaaactggattgcattaggataggttgttttaatccatataagactacgaaacctcaaagctctagtattctaatcaaattgcacttagactatagctgcagatatgtttggacagtacttcttgatcaatacaaactcctcgactcctcatgtgattagaagacctcatttcgtggctaagacaagatattgtcttacaatattccctttgtattctgtgatcatggggaattttttattttcttgttcaccgtattgaaaattgtttgtgcgtagaaatttagttccaaattttgaaatcaagagcaagaattgggtgtattccagcgcttacatttcaaatagaaataattttgtccagactctagatagaggttttgtaatttgcaaatggcttaaaaacctaggtgtacggaccatcttggttgtggaattggttttatactttgattaactaatacattaatttgatgtctttaatttaatagctggtggtggatttcacggcttggtctt

SEQ ID NO: 71351 - DNA, 405 bp, Prunus persica
  Intron number 3 from transcript ppa020646m (locus ppa02064 6m.g) derived from phytozome v7.0 (chr-ID scaffold_6; pos 2089891 to 2090295 reverse strand)
ccgaggttcttcccacctcgatgccttaattttgttttgggaaacatgttcaattctatgtaggactatagttggagtcttgcatgtaggtattatgtggcaaattttatttcatttttttggtttgcatcaccatacaatgctactattatttgtttctgttcttgttattcgtgatttcttgtttcctagaatgtcagattcctttttcgcggtaatgtgtatttggcagaattttgagattgatgttttttgttctgaccaattttttgcagacttactgtgaccttacctgtagtgcagaataaaatagatattgtaagccggttcgcaaatgtagttgtgttgctaaatgttttcaattatttaaagtttggggttttgattgcaggtcaagcttgtgaa

SEQ ID NO: 71352 - DNA, 452 bp, Prunus persica
  Intron number 2 from transcript ppa016474m (locus ppa01647 4m.g) derived from phytozome v7.0 (chr-ID scaffold_6; pos 1919540 to 1919991 reverse strand)
tctgattcagctgcaaagggtaaaaaatgttgctcttatttctctagcattgtcttttatgcatatgtgtgtgtacaaacacagcattttttgttttttctctttaataataataataattttagttgtgctgaacaaagaatgatgagtagttggataatttgatattataagtagactatattgctaatggattatgattcggtctgcgtaatctgattagctggtgatgtcaaaggttccatttattagcaatctacattgttgcttttttttcttcttcttgtttttccacttatggttgtttccattcaactagtgaaggaatttttagttttggagattacgtaagtagatggaaagttttagaaccccaggaatattcagtgctgatttcttatatttttaatgcagcagaggaattgaagaccaagaaggttttcgtgcagcat

SEQ ID NO: 71353 - DNA, 481 bp, Prunus persica
  Intron number 2 from transcript ppa019940m (locus ppa01994 0m.g) derived from phytozome v7.0 (chr-ID scaffold_1; pos 39859870 to 39860350)
ggtatgtatggtttgagcaaataaatgatgggttaattaggtttttcttcttatgttagtctaatgcaaattgctctggtaaatggtagttagtcatttatagaattgatttaattaaatttccaattaatcattgcatttgagtttcctgactaactgtccatgtaaaatgcatcacttgagtctcatagctgtgtcagcttactgcatttacagttgtgaaattgtttttattactacttttggaataacaatggaaatgttacttgttcaaatgtataagttacctcagtttgctgtcacagacatgattatgtcgactttcttgatcggagcatcttttatgacactttttgtttatggatgcgataatgtagttactaatatctttatttgcaagtaacctgagtgacacggatgttctcattttaatatcttttgttcagaacatacgcacaggagaatcattgtcagcaatcga

SEQ ID NO: 71354 - DNA, 626 bp, Prunus persica; identical to SEQ ID NO: 69241
  Intron number 1 from transcript ppa018562m (locus ppa01856 2m.g) derived from phytozome v7.0 (chr-ID scaffold_4; pos 9270256 to 9270881 reverse strand)

SEQ ID NO: 71355 - DNA, 568 bp, Prunus persica
  Intron number 1 from transcript ppb023915m (locus ppb02391 5m.g) derived from phytozome v7.0 (chr-ID scaffold_5; pos 6235567 to 6236134 reverse strand)
tctcgttcgcgactgcttcttcgaatcttgaccaggtaagttttctggtctctcttattccttcttcccttttgggtcaagttgggacctttgggtcaagttcgaatcttgacccagttagtgaaagtttgggtatagccatttgtgtggtcaaagctctggttattgtcaaagtctcttattccttcttccccttttggtcaagttcgaatcttgacccaggtagtgaaagtttgggtataactgtttgtgtggttttgctttggttattgtcagagtctgggtatagctctggttattgttaacataaactctctctcttcacaaatcttgcgatcataacagaattaatggtttgaaactgttctgtatgatctggaatggtatgtttcttttaagccctctcgtgtcaaacatatggatttttgtgattcatcttgttttctcatggtaaagcacaaagttgcatttagtttcctacaattttcatatcagcactagctaaattgttttttaattgtaaattgttccaggtggaggacaatttctatagacccgatttgaagaa

SEQ ID NO: 71356 - DNA, 911 bp, Prunus persica
  Intron number 1 from transcript ppa016258m (locus ppa01625 8m.g) derived from phytozome v7.0 (chr-ID scaffold_2; pos 3748485 to 3749395 reverse strand)
ggataaccgagttaatatcagaattcagacaacaggtaaatgccttgccgtaagcaatgtatacgaactagtataattttcttctttctgtcaactatgtgtcccatgattgcagccttgagcttatttttggttggttatttatttgttttatggtagagatctgatactgatgatttttgcttacattgtcgatatgacaacaatattttctattcagttggtcatacctccaaaatattccagttgtgtatttgatactttgcttaaactttatctcttaattggagcaaagttttggagtctgaaacaagtaattgacaggagcagttttagatgcccagagaaacagctgcttaattggtacactacagaattgtgggctctctgttacttctaatggagtttttacttgaacatgtatgcgaagagacctatttgaatctcaagaataatttatttgtacccattaaaagttctactttggtaattaatgcatcaaggtgtcctgctttggttatctaaccttggggctagccctggttgtgaatggtgatgaaatggggggagtggggaagaaggtttatgactaggatacgttaggggttcgatcccttccaatttaccaaaatgtagccttcgtctctaatgacaagtagttatataaatcaaaattatactaacttccttggtttttgtcaagtagttataacagtctcgatctcttggaccacaggagtccaagagattgtggtcacccaccgttggatattaatccaatggttcaaaaaagtttcttaaaaggagtgcaagagtgagtgaaccgttgaatttacatccaacggtgagtgactacaaatctcttggacctctgtagtccaagagatcaagactggtagttataacaggtg

SEQ ID NO: 71357 - DNA, 542 bp, Prunus persica
  Intron number 4 from transcript ppa011168m (locus ppa01116 8m.g) derived from phytozome v7.0 (chr-ID scaffold_1; pos 38344386 to 38344927)
gttattagtatgtccacttatcacaaacgcctattttaattgaaccccactcatgttttactgtaatctatatttattgtgcccttgtgacattgtggccatttgtagtgttgtttgttttgttggtacctgtgattattatatttggaatgtcatgatgggaatggtttgattatgcctaagtcatcatatttttttattcttattttattttgggtttgttcttcttatttctaacttgttttaattaaaacagcatgttctgggttagccagttactaagaagcttgaatacaaagccaggtcttattatctaggaacgttttgtttggtttttttgtacaaactgtaaaattaagggttttgtgtcctttgtttgtgtatcattcccttgtgtcattgcatctccgttttcgccctgtttgaacaggctcaggtctattcttcgtgctgatactgtttgatggactgtatcattgcatctcggttctttccctgtttgacacttcatgatctgtttcttttcttgattttcagtattc

SEQ ID NO: 71358 - DNA, 634 bp, Prunus persica
  Intron number 1 from transcript ppa000096m (locus ppa00009 6m.g) derived from phytozome v7.0 (chr-ID scaffold_2; pos 19258863 to 19259496)
aaagcagtgttgttttaaaggtttggatggtttctaaattcagctcaaggcccttgtggctgcaattaatttataacaagttctactattagctttgtcaaccttggctaactaagtctctctgtcttgtgacttgtactcttttgtaaggcaggaacgttttgtttttgttgcttccaattcacatgggcactttttattttttatttttaagtacaagcaattgtatagtgtcaaagttggttcattggccggtttcgaatatgtgcaatagtctccaaactataggcatcacccacctacttccataatagaagctagctagaaagcctctcttgcaagcacacaaaatgtaatgtgctttttcttttcttgtccttgtccttattgtcattgttcataccaagttataatgagccaattcactgtcaatttctgatgctttaaggacagaagtacattttgttttttagtttatgctacatgtatggtatatatgaaggttgaattacttatgctaagtgaggtccgtatgtataaatatgtgtcatattatggatattagcattattgagcatgtagcgaaattaacattgatattcttagcagggaatttcaacagataggattatcg

SEQ ID NO: 71359 - DNA, 363 bp, Prunus persica
  Intron number 2 from transcript ppa000096m (locus ppa00009 6m.g) derived from phytozome v7.0 (chr-ID scaffold_2; pos 19259563 to 19259925)
aggtaattttcattactcacaatacttggtcgtgatcatcttattcttgtttgtggctaatcttatttcacaacatctgattggaggagaaaatggcatgtagttgaagacttttcatttcattgcctttgacaaattagggcatttaatacaagaccaaatcaaaagaaaccctaaaatcaatttcatgtggctgaacgcctagcagaaaaagttagaccataatcgcgttcgcggtgatgactgtataattacccatgatttattgcaaagaggccacacaaaaaagagagtcaaacgaccataatatcgttgtcgttcattgcaggtaagagggcagcgattaaaggatacggtggacgt

SEQ ID NO: 71360 - DNA, 526 bp, Prunus persica
  Intron number 5 from transcript ppa010533m (locus ppa01053 3m.g) derived from phytozome v7.0 (chr-ID scaffold_3; pos 20956880 to 20957405)
gtgccttgagttgcatagaagaaagattgaaaaaggtatattttcaaatattctttgaagagtgattatttgtatttaaaaaaaagagtgatcatttgatgaaataagtaggagaggaatatttttcaatgcagccatcccatcaccattttttcttgtttcaattactccaagtttttcccttcctctttctggctagactatatgaattagctattactgtatgacttcacgtttttatgtcatatttctcaaatgtaaaataacgttagtttgcattagtagatggagttatctgcttcttcactcttcacttacccattgaagtctgcaaatatgatcaatcactgtgtattgctcaaataattcatcttctaggactctttttaatcaaaatgtttagcaaaataaacaactttgaactgtgggcatcagttccctttacacatagctaggtaattccatatgatttgtttcatcttctttaacagaagcaaaaggtcgaagaagatccaggactaaagca

SEQ ID NO: 71361 - DNA, 748 bp, Prunus persica
  Intron number 1 from transcript ppa008715m (locus ppa00871 5m.g) derived from phytozome v7.0 (chr-ID scaffold_5; pos 10299838 to 10300585 reverse strand)
cgggagaaccctctatttggcccatcttcttccacgtgagttctctgacttacccatctctcaatttagagatttttctcggtttttggatttgggtttgagaaatttgattgctttgtaattgtaaagtttatgattttggggcaaatacggtttgcttatttggttgtgtgcaatttgagaatttactgtttttccaatgctgtatgattatacttcaatatctcgttttgatattttttccttttcagtttttgattgggcatgctctcttgagtttaggctgatagaattgtttgaagtgcatgattttcttctgattcttcctgtgttgtttattctttttgggtttttaaacttccaatcctaattcataatgctaggttggtctgagattctaactcattgatatcctaagtgtgagtttttttctaattgcatttgtgggactagtttttttttttttcttacccttttcaatttgtgttattctgcttggaagttttgttattctgtcgaatcctggaaattaaaaagccatagttcaaagactggattgttttttcgcttctttattttttaagtttcctttatttttgcttattatacttggatgaaagtggtttccaggtgtgtctggatgggaaaataatatctctttccttttcgctttttggtttttattatctgagaaatatttcctgcttttgcagattggaaaaattgggagctctgaagtggtccaagg

SEQ ID NO: 71362 - DNA, 505 bp, Prunus persica
  Intron number 1 from transcript ppa011215m (locus ppa01121 5m.g) derived from phytozome v7.0 (chr-ID scaffold_6; pos 25248890 to 25249394)
ctcaaggctggattttgggaatccattaaatctgggtaattggagatactcattttcactgatcatacacttacaaaatgacagacatgcacacaaatcacacactgaatgtggaagaatttctgtcgggtatgttaaattagaacgttgcatttgttatgttgctgcaaagaaggatgccttgctgaagcgagaaacacaatttgagttttaaagaacttatagttacgtagtgctttaatgtttaattgatcaaatatgaaggcattgattggtttgagcacttcatcagtgaacttgcttagaaagaatgttactttatggattaatgacacttttaaatggcaatgtgcttgtaccactatgtcgtctttaaattaatactaattgaagtctagaagagcaagaaattagattttatcacagatacagacaaaaaagtatggtccttaactcacttcttattgcagtattttaaacaacaacacaacacaagtagtagaac

SEQ ID NO: 71363 - DNA, 713 bp, Prunus persica
  Intron number 1 from transcript ppa006036m (locus ppa00603 6m.g) derived from phytozome v7.0 (chr-ID scaffold_2; pos 19215418 to 19216130 reverse strand)
tcgcgtcgagaagagaactaagaaaattcagaaaggtaattacttccaatggttctctttctgtttggttaatttatgtttggctcttaagaaaatacagtgcaacgacgtaaacttttataatttgttgatggtaactcatcgtgtaaagcccatctgggttcttcaaagttaagcaccaaccaaatgtttgatagtttaattcataactttgagccctctgttttgggttcttttcattgggtgcttagctaattatatgtgtgtgtgtgtgtgtgtgtgtgtgtgtctatggaactttaacttagccaatcctgaaaggccttgatcccaacttatcaaacatttctgtggaatccatgaaaatgcgttgtgagaggttctttgagttgattgagaaaaaaaagtgagaaattggaaaatagtatgacttttggatcctactagatttcagcagtgaagaccaagaaatattactgaagaaagtacaactcagtacaagttcaaacaacttgaaatttggggttgcaatatttctttcttttctcctttgtgttacatttcttgtaagccaagtgggtatgaatataacacctcaaagtagaaagtgttaggatcgtgttgtcttgcttttttcttgttctatattgcatatgtaatctctttataatgtttagatatctgcttcttttagcagaagttagctagcagaa

SEQ ID NO: 71364 - DNA, 827 bp, Prunus persica
  Intron number 2 from transcript ppa012221m (locus ppa01222 1m.g) derived from phytozome v7.0 (chr-ID scaffold_7; pos 14106799 to 14107625)
cgactcagttcaccggcgatctgtccgattatcaagtaagatctcgaatcccttgttttcttctttcttaaatttcaaacgcatcgtttcgctgctacggagaaactgctgaaagagaaatataatttcattttcaattttggtttctcagtcaaaattgaatgtgccttttcgataagttgtcctttatattttcggttcggatttctcttagaagttaagtctgatacagattgtagttcacgtacttatttcctgtgattttttgatgaattttgtttgagaagtttgttgatgttcttgatctgagttttacttttagaataattgcatatttattaccaaaattcagtgaaacttttccatggagaggattttagatgctttccacttctctagattagagtttaccccggattatttaatgtgaaaaacctaataatttacataaccattttgatgagagagacaaggtaagaagaatttcaaaaagcctattaaagtcgaggaattttttggaattgtgcaagaaatgcagtaacagcattgtttactgttgattagtttgctggatgtttgcagcatggtttcaactactttctagtacctatgtaattggttttctccactacaccatgtaattagggacggatacgtttttttttatttggggatgattttacattatgtatgcaacatggtttcttattattatttattttgggtagtagttaagtagtttgagcttgatagctttgctttattatcaatcaaaagtttatgaagagcttctaagcaagttaacttttttatttgttttgcaggat

SEQ ID NO: 71365 - DNA, 934 bp, Prunus persica
  Intron number 1 from transcript ppa005960m (locus ppa00596 0m.g) derived from phytozome v7.0 (chr-ID scaffold_7; pos 10402385 to 10403318 reverse strand)
tccaaactcagcttgcgtcagccggcatactggtggtgcgcattctaattttcccaatataatataatatatattttcattttcatcctaaatttggtttgaaaaaatgacaatactcgacatataggtatggatatggataaattatcatgattttatggttcaattattgtcactgactttttaaagcttatctgcaacgtctaatttcactgaaaaaagaatttacaaatggattaggtttatgaaccataaaaagatccgcttatattctaacacgtgggcatactccaatacttcaccaatactcttgactaacagctttgccaaattgttgctttcatttgattaatgaagataggtcaacattgtctgcgagaaaattctgttaaatactctagatattgtttttatttttattttttaaatacaattatattgtgcatttcttttctttttttttctttttctttttacaaattatattgcatttggttcctgctttaaatgaccccaactgttgctagttttgaaacagagtaatgctaggaagaccacatttatagattaccttgtatagcacctctctaatagaagtggagaggtggtacacaaggtagtttataaatgtggtcttcctagcattttcctttgaaatatgcttctaccacatcacttgaattcctctttctcctcttccaaacattataattgtaaccgatctcaaagaaacaaattaaaaaattatattgcccacaattggtttggttacaagtacaagtataactcagtatagtatagctaaatttaactggtattattttttttcttatttaatttatatcatttgactattgtatttctttaacttaactgatggaaacattgcataattgcagcttgcacattgtgcagtgtgagaacgtactgattc

SEQ ID NO: 71366 - DNA, 541 bp, Prunus persica
  Intron number 1 from transcript ppa004294m (locus ppa00429 4m.g) derived from phytozome v7.0 (chr-ID scaffold_7; pos 16480089 to 16480629 reverse strand)
gaatacctcattggttcaggtgagcccaactcaactttgcatacccagtgccatccgtttgtttgttgtaatgtctgaatgggccattgttaaattgtttgatgttgggcatgttttatatgttagttgaagcaaatatacactgcaagttaccacttttgttcattgggttgcactaatttctcttcccactggctgttctttatcaacagaacctaagactttttgtttttggttgtgtcctcccaatgatttttgctataatttgacagtcggtaatctttgtggttgctttccttttccctcccagtgttgcagatgatgtgtaagcaataatcgtattaaggaaagatatcatgtttcattaacttgcatattaatattaatggttccgaaatggactcgtcttgtataatttctatgcataatgcacttttggtgggatcttgggcaaactggttcatttttactatgttcctctcctgcctctccaaagcttaagataatcaaattactctatttgtgttgggttttcaggcaa

SEQ ID NO: 71367 - DNA, 973 bp, Prunus persica
  Intron number 2 from transcript ppa002899m (locus ppa00289 9m.g) derived from phytozome v7.0 (chr-ID scaffold_1; pos 30604333 to 30605305 reverse strand)
tctctgaaagagccagagaaaaggctgttgaagaggttattttcgtcatttgctattacgctgatttttcgagctgctcttttttttttttttttttttttgtgcgtgtccatgtgtgtatactaatattggtttctggattttctaggttggcatctttgccaagcagcttatgtgtttgtcttgaatttgaatctcaaatcttatttaaattgaaatttgtatagtttccttatctccgggcaatatcagtcacgtctgaagaattattcttattcgtgtttcttccttaataataaaagttacatttagcccatattttaggatcctgggaattgcaggagtagacgatggctattttaacaattattatgatcaatagggaatctgttttctagtaactcaggggcaaggcaagggttaatttattttttggtttccatttctggaggactaactagcataagttgattattaagaatttgacttgttcttcctgaaaaagaatttaactagttcttattccttttttagttctggggtaacatattttaattggcccaaaattttggtatgtatagtaatgtattacttgtataggaatattgttggcatgtgagcttaaatgctcaacagtcctgttcaccaaaaaaagaacaaaaagaaaaaaagagagagaaggaaaatgcttaacagccttaattggtacattttctcatgtttgcaatatagctcatggtttcctcctttattgtgacacttgcatttgtttccattagccactttgagagatatcaaagaattttgttttctgataatctggaacgctggacatcataaatcttaaattttgatatatgtaatattaggggaatttttttcctttgttttctctctcatttaactagtatgtcattaaaatggttgctgacttttctatttttctgtgttttgattacattgcagctcactg

SEQ ID NO: 71368 - DNA, 690 bp, Prunus persica
  Intron number 1 from transcript ppa011167m (locus ppa01116 7m.g) derived from phytozome v7.0 (chr-ID scaffold_4; pos 5813084 to 5813773)
gctacagtaatgcccttttttcttcttctttttgcctcccgagaaaattttctcgtaggaaaatgacggagaaactactttatgttgtgttgattatttgctttgttcattttactttgttgtgctcgcaagccgaagtgaagttgagggttcgtttgatgtacttaattgttcgtagatctgtacttgatgctgatgtttgggctcattttatgaattttgagttacggccctggttttcgatttctgtgctttagaggttttagatcttggatcttattcttacattagaagatatctttttgttgctttgcaactatgcatgagtgaatgctgtttccgtgtgattggttttcaattatattcaaatatcaagtgtcattctagagtaggtattagtagattgcatctcatttctttttgaatgttgaactgagaatatttccaatgccttgatttcctggtttttcacatatctaatcattttggatgttgaatttgctaggaaatgtgacactcttaaaacattcgaactactgctgtgttgcataggcttcctttcatttcgttgagctatcttagaaccgaatatttttaaattcttgttagcgtcagttcataatttactattatcttattcaataggttactgactgatgtttcttgttgcagcgtattgtgtggttgcag

SEQ ID NO: 71369 - DNA, 841 bp, Prunus persica
  Intron number 2 from transcript ppa008588m (locus ppa00858 8m.g) derived from phytozome v7.0 (chr-ID scaffold_8; pos 15345895 to 15346735 reverse strand)
taccccggtcgcaatcttattttcaggtggggtatagatttttgtatctcgtcaacttgttttgcttttattgtataatgacgagctaatctctagcacgcatatcatcttcagaatcctgtgtttctaggattctgattctatgtctagatcatcttgtaaaatacttattgctgaagatattttagcttagtgataataattgtaccgtcgtacaacattgtaagttactgaattgcaacttgtgtttatttatgtttttttggctgtgtctaacttcagagtctatgacaggggaaactgtcttctgtattaaatgtgtccttagtctgtatgctgtaggaactggcataggagctcatccactaccttccaaatttgtgtgcatatttttcctcagtttagagcaatttaggaggcttaaagttgttcacttacatttctgtgggtttatcctgaggcattagcaggttgtagtaagtgattgttattatgtggtttaagggattaacttttacatcaaaagtaagatatttcttactagatgagtaggcagaactggacaagaaactactgtaattttattacgtttcctttcaattgaattgacatgaaacacttttggaagacatgcttaaaccttatttccaccatgacttggaaattgctcgtctaataacctgaaattctgttgagtttttactcatatggttgctatccagtgtatgaaaaccttttttctgggctggtgtagcgggattcttgatcggccctattccttcaagttcatccttgtatataacaatattagacttgcctgtgcatgtcttatagcagcacg

SEQ ID NO: 71370 - DNA, 586 bp, Prunus persica
  Intron number 1 from transcript ppa008588m (locus ppa00858 8m.g) derived from phytozome v7.0 (chr-ID scaffold_8; pos 15346961 to 15347546 reverse strand)
agacgacatcgttccagatttgacagagaacccaggtatcatttgtctctgcataacatgcgtgtgtgaatcaaatttgggacttaaatgggtttaaaggtttaatgcattaaaactgagttactgctctaaaagctgtagtgttttagtgaaatttgaattatgatggtattaacaaaactatttattctgcgttattttctctttcagttttggctttatcaattttatgaaataaatgaagaacattggagattttcaataataaaaaattgaaaatatatgaatttaagcttgtatttttatgtgttttgttagattttagaaggaaaaaagatgtggccttaaataagacaaatctttcatttttatgcgtatttgattaaaagattctagctttatgtggtaaggctctgcttaagtcttcatttaagtttgggtttgaaagaggttatttaaaagttgatttgtctctggaaaatgtctgtaacatggttataatgagataagaatagtttgtttttaagtagaatgtcattcttaatgattttcatgggttttcttagtcctaagaggtccaggaggg

SEQ ID NO: 71371 - DNA, 822 bp, Prunus persica
  Intron number 1 from transcript ppa017310m (locus ppa01731 0m.g) derived from phytozome v7.0 (chr-ID scaffold_4; pos 4923727 to 4924548)
gaagaggtcggtctactgttggagattatctggaggcttcgatttttatgggagtggcgtgcgtcggtcttctttttcatatcgaactccagcttcctctctgtttcagtctctttctctcactgatctgtaagtaaattttgcttcatctttcctttcgatttttgttgctcttctttttcatttttgttgtaactaatatcttggatcttatttgattaaactataagacctgttttaatttgctgccctaaaagtccaaatctctaatagatgttatagattttctgtttgcatgtggttataaattttctgtctggccgatttttttattttttatttttttctgtttgtacttatcttccgttccttttttggagtctctctttgaccttgaagatgcataaggttcttgattactgtcaattactgagaatcctgttatgtcattttcacatacagctcaaacagactagcttcctatagcatatacagcccttgattataaaagggtggaaccacattctcttgatatagtattgcaattgtatagcaagctgtaaaatttgttgtattacttgcattgtcctgctgttcataggtaaatgcatagctttaattacctcctctgtttttttttctctgttttcttctttttctcagccttttgtagatctgagttatcaatctttacttcttttttccctttatttttcaggaaggtttatgcttctttggcaagaagagaaatgcgctgcaaggaacccaaaaataccaggactcttcatgcctaataggaaacccaatagatgactgttagga

SEQ ID NO: 71372 - DNA, 270 bp, Prunus persica
  Intron number 3 from transcript ppa024287m (locus ppa02428 7m.g) derived from phytozome v7.0 (chr-ID scaffold_8; pos 15462193 to 15462462)
cggcggcgtcgttgttccacgaaagagtaaacaaagtatataaatccaccgcggggtcttcttagcaaagctttgacttttcccggggctgttttgtaaataattaatttgtgttgtttttattgaggaattcgaagagtttagaaggcatagaaagctgtgttgagaaaaaagattgacaaatccgtgcggtaataaaaatttatttatttttgttttgttttgttttttcattggggacaggagggggcgagaagctgtcaccaactc

SEQ ID NO: 71373 - DNA, 896 bp, Prunus persica
  Intron number 1 from transcript ppa011642m (locus ppa01164 2m.g) derived from phytozome v7.0 (chr-ID scaffold_2; pos 15090054 to 15090949 reverse strand)
acatgtaagtgtggtgaagttgaattttattagcttatgatgagcatttgtttggaaaatctctttggatttgaacttttggtggttttgagtacttagaaattttttgtcaaagttatttatacaagtttatgtggtcattttcattgtgttcatacaagttttggaatattctgtttcctgcatgaatgtggatggagattgcatatgaattcactgggtttttcttttctgagtcttaccttattaagcttgctgtgtctctgagttatagaattctcactgttttcttatctgggtttgcttcatttcttgctttggtatcttcatcaattcataatttcatacaactctgtaattacttggaaaaagttggaggtataaaaccttctgatttggaatgattctgaatatataaaacctcagaaagttttaatgggtgttagttggattggcctaggcctttgacttcaagctcctgcagtactcgtgtctgtgagttttaccctctctcccccttcctaacttcgatcacaaaaataaaaactttcgcaaagaacttctaactaaagtggttaagagcatttacccttgcacccgatgtcctagtctcttcctacctggctaattatgttttaactaaaaatccaactaatctcagccatgtgctaccatggctttcctatatacatggagtggagagtccaccaagatgcacatggtgacataatttaatatgtttgatcaaataacatcatgatgaaatatggctcatagaaaagtttctgtaatgtgaaagctatttttgtaatgggatctatttgctgtggatttattgccagaattgactaatttccattttcataaatgtgctgtaacattcaggtactacaaca

SEQ ID NO: 71374 - DNA, 764 bp, Prunus persica
  Intron number 1 from transcript ppa007172m (locus ppa00717 2m.g) derived from phytozome v7.0 (chr-ID scaffold_2; pos 23652405 to 23653168)
ttcccgtcacttatcaactcctcatctcaacccaagtatgttttttttttctttttctttttctttttaattaattgattaatttcttcctctgttatccttgttttggcgtttatgggtttgcagcatgtttcaatttctaactaatcgtgctctctttggttcatcaaaaggcttttaattatcggaatcaaatttggatctgagagttttttatttttatttatataatataattttttaaaattttttatagaagaaacttggtggactgaaacaatttgaactgtatcgttcagaattttatctcccataagaaaccaagctgcaatttcctgatttaaaacatcacatttgcttctaattccttggttcaacttctttcgtgacgataatgtgcaaatttaactcttagagactagatattagcagcataaattgaagttctctatcaagatgtcacggctattgcctgccccagacaattttctgtttggtttttaggtctttgatccaattagggcccaaaatctatgggtattcgtatacacacatgggggcataggggttctatgtttagtggttgatactgttgcaatgcctaatgcttttgagttgttgcatggtttaaaaattcatgttgaattcactgtactgcaattcgtatgatttgcttacctgctaaatgagatttgaggtttggtctgaactttgattgcaattttccaggttggaaagcgtcttcgacatctcacaaaacatcc

SEQ ID NO: 71375 - DNA, 619 bp, Prunus persica
  Intron number 1 from transcript ppa021927m (locus ppa02192 7m.g) derived from phytozome v7.0 (chr-ID scaffold_4; pos 18741405 to 18742023)
ggactcttaaatcagctgttcacactcttgtttctgttagtcttcttcttcttcttctctctctctctctctctctttctctctctctctcggattatttgttttctttggttttttgagtggtctgtttgtttcattgaagtttaaaaactcatttggaaactccagtaacctcaaattcaaatagttgtgcctggcacaagtttctggattgatagatgcattaggtttcaaaagcaggactattttatcctttcttatgtttgatcaagtaaaaaaggagtggaaaacaaacagtttatccggtttgaatattacagcttcttcgtttcaacagtatcagtatgcttttggttgttcttctttccaatttcttggattacttggtgattttgtatccatttcttaacaagaaattacagggaaagaaaagcaatgaacacattgaagtcatcttgctttggtattttaagttttttctgttactatgtgcttaacataattttgcattctgtttttgaattcttttcacaaatgtattacattatatggttcgtctgtgacatgtttaatgctgtgattggttttcaggggagaaagaagatttgcgaaggaaaga

SEQ ID NO: 71376 - DNA, 629 bp, Prunus persica
  Intron number 1 from transcript ppa023097m (locus ppa02309 7m.g) derived from phytozome v7.0 (chr-ID scaffold_3; pos 9362961 to 9363589)
tggaagagagaagtgcggttgttctaacgggaccggtcttgcttgaattggtggtcagagttaagaggaatcacctcttgaagtcggctggtcgagacccccaaaatgcagaaattttgggtttaaaaaaaaatgaacttcgaattatttacggttataccactgaacttcttttgatatccatttcttcattacaactccgattcgagtccactacgtgtctacggactcattttgacgtgctctacgcaacagttgaaccaaaatttccaaattccttcatgaacttaaaatgatctttttgccccttttttatattaaataatatctttaattttcaaagaccttaactaattcaaatcattttattttgttgtttatttcgatttattattatttttttcatttaaatttattttctcttattttaatcatttaatctcccccgaataaaagtcaactcttaaatcatttcaatattcccggggtaaaattgtctttttccttgaataatttaatgtataactaataatttaggatcgggttgttacatgttcgatatcatctttgggattttgctagtcaaggtcgtgatccctaaaatgcagccgagttgtttattcttagat

SEQ ID NO: 71377 - DNA, 836 bp, Prunus persica
  Intron number 1 from transcript ppa004020m (locus ppa00402 0m.g) derived from phytozome v7.0 (chr-ID scaffold_5; pos 5866053 to 5866888)
cccgtcatcaaggtccctttttcttcttcctctggaattatcatttgggcttttggtgaatttgttgggtttttgttttgattatctgggttttcattcttgtcctttttaggattattttatgtttgcatggattggctctgcacttttgagtctttgtgtttattaattacatacacattctgcttaattatcagtttagtgattttgtttttttttggggttgggggattagtgcccactatattgacaaaagtatgccccactcactgtattgacaaaggtattcaatgattttgtgcatttaaaagaaaggaaaagaagttgtagttttgatatgattggggtttcatgatattagctattgagatgctgactgcaaccatctcctcaatgcctatcatggctgctgaaaatatactggaaagaagtgaaatgtttgaatcttatattggattggggtggattaatgttctgcagtactggctgctgcatacactaaacaacaatgacaattgagttcatggtttcactacaacatacctaatgggtttttaggcttgttatcctaaacatttaaatagatcttccatagagagtgtagtgtaaagggtgatatggtggaaattcgtttaatctttcgcaacaacataatgctgttgatgattttgattgcagctgtccttgtcataagaaattggtactgtaattgccaagaagtcactcccacttattaactaagtacctgtcagtaaacaaggcctactgattcagcatatgcagcttcactacaaacagtctaatctgatatttactttatatgacaggttggaaga

SEQ ID NO: 71378 - DNA, 635 bp, Prunus persica
  Intron number 1 from transcript ppa024725m (locus ppa02472 5m.g) derived from phytozome v7.0 (chr-ID scaffold_4; pos 3149804 to 3150438 reverse strand)
agcttgcttgcggtgcagcactccctgtatctcttttacttggatttctctgatctatgtctatattttcagatgctttattatatgtgttttacttggttttttccatattgatgctttcactttttgaggctcacaatttagtttaccaccattagtgcatattggcaacaccctgcgacaatcatatgtataattggaaattatatacctgtaagttatagaaatagtttggttgatgacatcataacaactttttaggatagtgattaagttcacatgcacttgatggggaatcaaaatcaaaccttttctttctcttatgctgatttgggaaagttaatcttgtgcaaggtatgcgaggtttggttcccctatgtgctatttggattttggaaatgatgcaaggagagtataaaaccaaactatgcataaagttgaagaagttctgaaattatgtctttttaacttttacgcagttaaaatagtttttggaaggagatccaaaaatgggttcatttggtcttgattgatatgtatattttttacagcttgttacatactaaaattggtagctttcatgatttctaagctatataatggtttttaaaattcttcagagaactcactggcag

SEQ ID NO: 71379 - DNA, 564 bp, Prunus persica
  Intron number 2 from transcript ppa001810m (locus ppa00181 0m.g) derived from phytozome v7.0 (chr-ID scaffold_3; pos 1124857 to 1125420 reverse strand)
caggtatttatccatttaatatttcattactactcggtaatattctcttgttagacttatgtcgtcaaactgtaaatttgagtttagcaagagaacgtgagtgtgtgtgtgggtataaaatatgataggtttgtcttggtttttattattatataaatccaaggggtttcaaacttgatatcatatcctaccataaataaataaataaataaataaaaaataaagaaaattcaactagacagatagttagcttcgaacctgtcaacttttgaattccttttcttctttttagcactcataagtttgttctacaatcagcataatgaattaacttgctttttctctaataccaatcataaatttgtggtattagagttctatcagaggtcctaggttcgattccccccttcttaagtatcactgatatatttgtggactaataccaaattagaattttataatcagcatcatgaatttatttacttttttctctaattccactcttaatactctgttcactaaactgcagttcctaaaagagaataacttcaagcagacaattcc

SEQ ID NO: 71380 - DNA, 678 bp, Prunus persica
  Intron number 1 from transcript ppa006234m (locus ppa00623 0m.g) derived from phytozome v7.0 (chr-ID scaffold_4; pos 10707991 to 10708668)
aatttctctgttgagctcaagattcagctgtcttggtatgtgatatctgattcttggctggttctgtttttattttgggttgtgcaaagctgtgaatttctgatttgggttttctctgttttgcatgactgaatcaatatggtttgtttttagtgtggttgccttgttagacttctgcaatttgatattctgtaccttgtgtgaacatgcaattaaggattgtattaggaaatgaacgattaggaattttctttgattagacacagtttttcctattaattgtgtcattatcaatgtatatatctgatattttatttttattaactcattggaaacagggttacaatacgttctttaattatatattttagtttttttgtttgaatcctctgctggttccttgtcgattttcttgatgcatcatttgtgtctcttatgctatatttttaagttcgtcttctctgtccctatcatttatctccttgcttgcttataaaaaattatattgttttggaggttcatagaaccaatacttgagctaaatctttaccgcaagctccaatattctttgttttaccagaattatatacaacaatttatgaatcaatatgttcattttaatatttggtgttttattcaacagctgtttcaaaagtctgaattccggaatatttttga

SEQ ID NO: 71381 - DNA, 432 bp, Prunus persica
  Intron number 2 from transcript ppa009635m (locus ppa00963 5m.g) derived from phytozome v7.0 (chr-ID scaffold_6; pos 2211083 to 2211514)
gattttctacccatcaagatttcaaagatgtaagattcatttcttcctttgttttttttggttaataatcttaagccttcagttctttactcatgttatttttgtctaataagagttcacaaaaagggttttttgagtagcactgggaaaagttatgtaccatggtgttcaagcatgctactgcattgacatttttgttttcataaatgtattatgtttgtatattcttgttatcttatttgtttaatttcatttgtttaatttttttttttatacaatcgataatactctaaattactctaatctacgagggagggagatgacactcgagtacaaggaattgccttgactaactggcctaacccatgtatgctaattttctgtatttatggagtagggaaagcctgacttatctgcatttggaaacgtcgt

SEQ ID NO: 71382 - DNA, 738 bp, Prunus persica
  Intron number 4 from transcript ppa015717m (locus ppa01571 7m.g) derived from phytozome v7.0 (chr-ID scaffold_4; pos 13563637 to 13564374 reverse strand)
gcacaggtataactctgatgattttgttaaaagaattggagttttgtaaacttggctgaatatagtgggttgaatgaattatctttcatgagtatagaatgaaggtttcaaagatctttaattaactatggtattctatgtacctgttattcttaggttatgtttgatgaacctccttaaatttacactctgatgcttaggctttgcagataggttcagataagaaacaattgtttcgtaagtaggttgttccaatttcttcacacgtttgcccttgcaaaattcaaaattgaaaacttaatacgtgctcaactgttggatgggaaaccttctttgccattctgtttatgtcttcccatcaaattgtagatcatcatctccgttctctcatgtatccgacatatatcatcatcttttttctccctgttagggaaagtttttgataaagctacaatcataagtcttattggtggtgtcatgcaaagtattgtatgtgatcaatttgatagattgcctctcattattctttgatctgattctctctctctctctctctctctctctctctctctctctctctctctctctcttattgttgttgttattattgttattattattataaggcagtattttcattcttattagttattaccattgtcactattcgtcatcatcaccattattgttatttctgtttctgaaatttacagactgatataccttcgagtcacagga

SEQ ID NO: 71383 - DNA, 601 bp, Prunus persica
  Intron number 1 from transcript ppa003657m (locus ppa00365 7m.g) derived from phytozome v7.0 (chr-ID scaffold_1; pos 45469131 to 45469731)
gattcttattttcttggatttgacagctctactcagtaagttaccaatccctcactctctctccggtttgatttcgttctttgatgctgctcagtgctcacaatatcagaattgcccacatcacaaattgacaacttggtatgattatggttgtgggttctcattgttctattgcattacatgggaatctctgtttcttcacatctttttagttcagtttcctcaagtttatcattatccatgagaagttaaattgcatatgagtatcgattgtctgtaatcggaattgggtaaaacttgatttttctttattaaagtatttctggttcttcttcaaggtcacactttggcttgtttatggttgtgggttctcattgtattgttgaattccacaaacagtgacgttaattaggattctttctttcttcatatctttttagttcagttttctcaagttcatcattgttcaggagaagttaaattgcgtatgggaatcaattttctgtaatctgaattgggtaaaacttgatttttatatattaatttattttggattctacttcaaggtctctgaaggcaactgttctagactccaatctca

SEQ ID NO: 71384 - DNA, 773 bp, Prunus persica
  Intron number 1 from transcript ppa006815m (locus ppa00681 5m.g) derived from phytozome v7.0 (chr-ID scaffold_1; pos 37816875 to 37817647)
atttccagagctgaaaggagagagctagaacccaggtgggtttttcttcttttatgtcattgttatctgtgtgactcattcttttacaatccaatgttgggttcttcaaggatcatccttttgttatatttttctcttcttcttttttttttttttctgggttttgcgcgattgagctaaaagattcaagcttttagtgttcttgggcattgatcgtcttcttatgcatgtttaatcggcttttaagggttttctctgtactttcttgggatttttttttatctgggttttatctgttgtatattattaagttgatttatttatttattatttgctaatgctttaatgatattcagggattgaacccctctttgcctctacattttagttttaccaaggaggctattttcctcgaccttacatttgattagacatttctctgtcatttcagacttcctttaatgctctaatcgacccaaaataggaaaaaaaaatcttataatatgtttttttggatgatccaaaaccactaggcaaaaaattattcatctcaatcttttaaagcatcaggttctctgtgtatctgagaggtttaatcatatttcatatattttcttttgcccaatgcagctcatggattacgccgatgatactcttttcttgatgactatcaactgtattaacttctgaatatggtaaaatagttattgatttaaaccttgttgatttttggtacagaaaaggggggcttttggttcccaaaattgggatag

SEQ ID NO: 71385 - DNA, 424 bp, Prunus persica
  Intron number 1 from transcript ppa007030m (locus ppa00703 0m.g) derived from phytozome v7.0 (chr-ID scaffold_4; pos 16558873 to 16559296)
gtattccctatattttaatagaaaaaaaaaaaaagacttacttcccaagcaactttgtgctagttgttgcaaacgtagggacatagtgcaactttatttatttattattaattttgcagtcaaacatgatacaaaacaggaagaaaaaaataatttccgataagattgaattatccttttgtattttttaacttgaattatccttgcccaagatttgagattctgtcttttttgaaatggaaatttgtcatttggcaaggaatctcaaatctgaggccaaaaatggtcccttttaattttgtttatttaaattttgtttatttgttataaattttatagtgttccttttgaagttttgaagttggatttgtgagaataataccaaatattggggaatgattcggtgcggtgcaggtcacgacgg

SEQ ID NO: 71386 - DNA, 735 bp, Prunus persica
  Intron number 2 from transcript ppa026970m (locus ppa02697 0m.g) derived from phytozome v7.0 (chr-ID scaffold_3; pos 4171302 to 4172036 reverse strand)
agcaacccaagtccgagaagaaagagtacgacgaggtattgctgatgattgtttaaattgattgtcgaattttaaagttggaagctttggtggtcggttatgtactcaggatcttactaattactgagaaaaggaaataattgtaggaatagatgggtttaattgtctgggtttgatgttgatctggtgtatagggaggtcttaatattaagatgttcttagcggttgaaaaagaaattgaattctaaaacatccaatataataggtagaaacaggctgcttgatttaatacttttaaaaaaagttcaataatttgtgtgatgacccaagtagttgtttactttaggcgtataaaagatgaaattatctttttagtattagttacccaggaaatctctttgactagcagatgttcaatgttcagctaatagcatgggttacatttgcccccaagcaatcttttatggttaattttatggcattatgccacgccacatgctatgctatctcatgacttcttgcacttttatcttgaatcctgcttgctttgaatctagaactgaaggagctcttcaaactgcgatttttcctaatcgcattccagctaaattcttcttttatgtttattcaaatacttatgcaagcctcttgaatttacttgttatatgcccccttgcactaagaattttatttgctgcgtgcagtctgatttggccaacattcagaagaaaaaag

SEQ ID NO: 71387 - DNA, 367 bp, Prunus persica
  Intron number 1 from transcript ppa003038m (locus ppa00303 8m.g) derived from phytozome v7.0 (chr-ID scaffold_5; pos 16448550 to 16448916)
gtcctcgatctcggtcccaggggcattacttacaagtgagctttatcttcacccatcaatccaatataaatttgtctctgtttgggttttttccttgaaattattagaagctttgtgtttatttggttttctttttcctttttatttctttgtggattttcagaaacccctttctagatctagatctggctgcatttcaggctttgagaattgaagtgtttaagttttatagaattgttcatgataaatttgtttgacttttgaatgaacttgggtatagtctgattggttttgctttgtaaggaaaaaaaacagatctaatttagcttattgtaattgtaatttggttccaggtttactgctagtg

SEQ ID NO: 71388 - DNA, 867 bp, Prunus persica
  Intron number 1 from transcript ppb016329m (locus ppb01632 9m.g) derived from phytozome v7.0 (chr-ID scaffold_2; pos 12264251 to 12265117)
ttatcacaagcggaccgagaggtcttaataagggcagtggcctaagcgattccgacatatgcaatgaatgtcttcaaattccctactgcaacatgcaaggaaattgactttttttagctcgtttctggtggggccatagtgagaaggatgccaagactcattgggtcagctagaagtttttgggtttgtctaaattagagggtggaatgggtttagaagtatccaggattttaatgttgcccttttagcaaaacaaagctggagaatcctacacaaacctgatgctttgtgggtccaagttttgagaggaagatacttccctgatggtaatttcttggaggccaggaaaagggggagatcctcatgggcatgggctagcatcttggaggggcgtgatgcaatcaagcagggactccaatggcaaataacaagtggctcgcaaactaaactctggaacgaccgttgggttcctagtcttctaggactctggagagagacaatagtaggggccacttggatgacgccttagagcatctttaaccgatgtgtcaaaagtgctacatagacattcaacggcaagaaataatatctcacatcactctaactgatgtgtcaaaactgatgtgtaatgaaggctggaggttgagatgttatttttgacatctcaaaagaaagatgtcaaatgaatattttattattttttcttttcttttctttttaattaaaaataaatcaacactaaaatgtaataaaataataatttaatttgacatattgggtggagtgtaaagctgtgtaagatgtcaaattgccacattagcaatcaaatttaaacttgatatttggtatttaacatctcccttgaag

SEQ ID NO: 71389 - DNA, 884 bp, Prunus persica
  Intron number 1 from transcript ppa009179m (locus ppa00917 9m.g) derived from phytozome v7.0 (chr-ID scaffold_5; pos 15475396 to 15476279)
gatcacattgtatgtatgcatacctttctcatctcctctctccttatttgcgtttgggttctttctaaattcctgtttatatttatgggtttttgttttcatttaatttttctttttgatgaatgacaagttttgttttcccttgacttgctgatgttcgtgttttcttctatgtacttgtgatggtggaagattttagtttgctatctaaaaataattgctttcacagtcattggagaacttgaatggtacaatttgacatgaattcggcttctttgctgacttgggtattctttttcagtttggtagaagtgcatatattgtatttagtaaatatttagtaaatgagagattggtttttctaaggctgctaaaggatacatactgcgtgattgttcatggtttttttggactattttctacacatacaaattgtcatgataatttgaggagttaaattcaaagcttaactatcttagatactaggaaaaaataatgaaatcttctagtgattggatgcacatctaaatttttaaggaactagcatgtatatgaagatatgtgagcggaaagcctaaggtttctgatggatatggggctcggtgttactaaatggttgaagaagggatatcttggttttgtgttgaggggtgtggaatcaaatggattcaaggctaatagtatttctctcaatgtaaataatcccagaatccatggtgaagttaaactatagtcagaaccccccacatcgtcattatctcatcatttgatttccctaagcatcgtgtgtgggtggatccttttcattgaccaatatatgaccatggccaatgtttctgcactcctacttatgattcacatctatacgacagggaggacttccc

SEQ ID NO: 71390 - DNA, 635 bp, Prunus persica
  Intron number 1 from transcript ppb015806m (locus ppb01580 6m.g) derived from phytozome v7.0 (chr-ID scaffold_2; pos 2239345 to 2239979 reverse strand)
aactccctttgggaagtgcaatttttgcaatttgcttcgtcctctatcttgcattaatttcattcactctaatcttgcattcttttttcaatctaatggccaggatcgtctcagactaaatcattaccccagaaattggaaaccccttttgatgctgatgatttgggaggtgctcgatgctgattttagcaactctggtcagataacttctttcccctttcttcatctttgcatgcattggaggtttggatatgtttgtaatcattttgagagcttcatactggctatttataagaaaattaaaaccagatatctccaccgcgtactctcaccttctaaatttcctcttaatacctgttgcccttgctcactttcctctcatccaaccatgagtgctcaacttaatgctagctcttcacgggcgaaatcccgtagtttgagtccgacgtcttctcccagattggggagtaggtcttctgtggaaccctctgtgttacacaagggcatatttacctttaggattgaaagaaatgaaaccaaagtctccacctctgctcttgcgtctagtgtccaaactcaatgagactttctgcttggtagggaaagtctttggagttcctgtgaatagcagagtt

SEQ ID NO: 71391 - DNA, 811 bp, Prunus persica
  Intron number 1 from transcript ppa016716m (locus ppa01671 6m.g) derived from phytozome v7.0 (chr-ID scaffold_1; pos 42558560 to 42559370)
attattggcttcaatttctctacaattcatcccaggttgggcttctgaaatctctcttcaattttaaaattattaaactttacattccattccatttttttgtgcatcaatatttctgtatcatgctttaatttatatatgtattctatatagcaagcgtaattatttttctttattcaattgttctgttagtttttttataattctattgaaattctctttgaagttgctttctgggtccgtttcagatcacttatttcaaatgtttggtttctgataaaactagaaagaaagaaagttccgaatttgtttttgttctttgtcttgtttgttattattaaatagctaaaaacccacctgatgcaaacccaacgtagtcattatttgaagtgtaatgtgtacgtggattatctagttttgtggaatccaagtactatagctggattttggaatggtagtatttgcaatcgtaatagaaatctatggttgagtgtagtggcttaaaaacttttggaaaatgaaaaaataaactaaatatgttgcaacatccaaatgtttaagtgcttgctttggtgtctgcaaattaattatgttttaagattcttggcgttgaagcatcctgtaagcattataccatcagattgatgtgctattacttcaagtcttaaaaaccaaacttaccgtagactaggcgatattatcaaggaatgatatatgatgccttttttgatgatatgatatgattaattgtttctcatgttaacaagacgagatcttttatctctgggaccttttatttcaggattttctg

SEQ ID NO: 71392 - DNA, 631 bp, Prunus persica
  Intron number 2 from transcript ppa000980m (locus ppa00098 0m.g) derived from phytozome v7.0 (chr-ID scaffold_4; pos 4559496 to 4560126)
ctgagcaatctgctgctgaattggccttagagaaggttggtttgttttcttttgtagaatctagtatttggatgactatccagatgtagtcgcagttattgccactcccatgaatggtgattttccataaaggcatggaaattctgttcaatgttcaacagttataattagaattaagatttcgacattgatctgtctaatcttcttatggttgttgcttctacatcacccatcttaatctggacatttgatttgtctatattcaatatgattgtttgtcaattgcatgtatatgttttcatgtataatgaggcatgagcagttgtcctgctttggcagctaattaattaggctcttgtgctgagatttgtctttggccagatatggaaaataaaagttttagatatatttgagttttgttaccataattaggaggcaactgcttttcatgttctacatcttcaaaatgttaatatatgtagggtttaacatgtttcaatgaattgatacattatcaaagtattgcttccaagactaagtgtttttcttttcttactttatcaatatggttagtaatgttaatttgtttgctgcagctaggcattaatcccgcaacaaaaagcccttctct

SEQ ID NO: 71393 - DNA, 477 bp, Prunus persica
  Intron number 3 from transcript ppa000980m (locus ppa00098 0m.g) derived from phytozome v7.0 (chr-ID scaffold_4; pos 4560180 to 4560656)
aggttggtaaacagttaaaattatgctctgccacataactaaaagtttacatttaatttgattaaaaagtatatgatgaccatatttcttgtatcctggttgtggtccaatatgtatgcaatagcatttttctatgttaaaactttgtccctaaatcactcggttgtaacacatgcttaattttttgtgtttactctgtcaaattcttctttaccgctctctctctctctctctctctctctctctctctctctctctctctacttgtaattttgcttttgttgtcaatgtctcagtttgctgtggttatgtgaaaaagagggtgaattagctgatatactttttcttaaccttgattgctttataagtttttgagattattgatgcgttgaaattttttagttatcactttgaccttgtctcgtatgtttcacttttgtagttcctttcaactcttcatccgctgagtggtcactt

SEQ ID NO: 71394 - DNA, 607 bp, Prunus persica
  Intron number 2 from transcript ppa007660m (locus ppa00766 0m.g) derived from phytozome v7.0 (chr-ID scaffold_1; pos 42641333 to 42641939)
atttggtttgagtacaaaggtttgcccttgaagtatgtaatatgctcttatgatcatcagatttggtttgactacaagggtaggcactggtttcttcatgttcaatgcctctctatattatcaaacactgttctcattccatcacagcacacttgattagatcattcactgaatggcttgtcaaactcaaaaaacccaacttcaaataataatggaaatttcttttgtaccttaatcaactgcattagcacctatttcttctattgttttgttcatcatgggtgctttttcatgccctcttttagcatttttgtgtataaacgaagtgtgatgatatgccacttgatttggatgttatttgccagtgtgtacagtatattttcagttttgtttctaagtattccactttttgttcaatatatgatcttgcaggccctaaacgtttgtatctagaattcacagtgatgtaactgatggagtaaaatagtgaataaataggattggtactttcctattttaataggtccttgttagttttatttgtttcataatatggcaagagcttcttgcaggtatataccaacaggagttctatttgatcttctat

SEQ ID NO: 71395 - DNA, 887 bp, Prunus persica
  Intron number 2 from transcript ppa020990m (locus ppa02099 0m.g) derived from phytozome v7.0 (chr-ID scaffold_5; pos 8973116 to 8974002)
ctgctgttgtgtttgcttccaaaaatactgctttggtttctcggcctccaagatctggctcttctgctgttccgcctcatcacctaacttctgcagaaaagacaaactgaagtgtgatcactatggtgaaaagagacatactatcgacactaactgggcattgcatgagcagaagcggatccagaaatttttcaggagaggggcaataatgattttgatactacccaataaaaaacatattatgaaaaccagacccttagttaatttaaagattgattagcacgataaaataaatacataattaataataaaaatatattatcacagtgaaaagattagatcaacaaacaagtagtatcaatcaaatcccaattaaacaaaaactctaatatcaaagtgtgatttgagattattgtgcaaggactcttcttcgttgttgttttttattatttaatttttttgacagatgggcttcttcaaattgggagcattgaggtaagctttttggtattacattattattattataatgaaatatttattataataaccaagtaattgaagccaaacaatgaatcttgaaacggtttgcacaaaaaacgaagagtttgaattttttaaaaacacttcatttaaaccattaaacataaatcaaggacgatgccgtttgtgacaaataaaaatagggtcgtcttcttcattcgtgaaccagagcctccatcagcgacacctctgcaactcctcctttacaacacagtgtgtgcctcaatcgtgtagcttgccatttgcgatttcaggaggcctcagatcgtcgcactcaacgagatgcgccttgataacaccttttaaaacgctagagagcaaaggggcaaaaatccagcacatcc

SEQ ID NO: 71396 - DNA, 934 bp, Prunus persica
  Intron number 2 from transcript ppb015516m (locus ppb01551 6m.g) derived from phytozome v7.0 (chr-ID scaffold_7; pos 6987407 to 6988340)
ctcaatagcactatagggaacattcacgaaaaaaggtatgctcctgaatgcttactggtgtttagtcaataatagaacaattaaagtgtttctttttcaaacctgattgcatctcaatgatacacattcttttttcttgaatacagggaaacgaggtaggtgaccgaattctaatgagatagtagagatatgatgttaacacagagaagtacagaggtgagtatatatatgttgccatctccaacttctatattaagtaaatcttattgctaaaaacaatatgccatattatgtcatattaaggaaagaattaaattgagttagcatgatcaaattagattctaatgatatgaacaaaaaaaaattacgtgtgaagattgtttaagctttgatttgacaagaatttacaatctatcattgcgatatagtagacgaaaacaaaacaaataacctaattttgatgtggtatctctttagagaatctccaaacggctcctccctaaatgagattctaagttaaaatttagagtgaatgtcaggaacccaactccaaaaatgctcctgtcttgatcctaaaacaaggagacccatgggtgctctaaaatatgagggagaaatatacacttatatttgtacatcgttttcttcaccccctctcttttgttgaacaaaatacttcctcttgcaagccaaatcacacaaaggaaatcattaagaagggatttctagaaggctaggatttactttaactgggtttctgacaggtttctttaatgtattttgcatctccatctaatgatatataggaattgaaggaacttttctgtttttagtgatatgatcatgtttttgttttgttaaattatactgataggaatactggtcagcatggtcacattctttactgataggattctcacatttactgcattgg

SEQ ID NO: 71397 - DNA, 344 bp, Prunus persica
  Intron number 1 from transcript ppa013322m (locus ppa01332 2m.g) derived from phytozome v7.0 (chr-ID scaffold_3; pos 5228470 to 5228813)
ttaatcttgccaaggtaaacctttctcccaaccctgttcttaattctctgtctttatacggatatttacatacgcatacatgtgtagatatgcttgtatgcctaaattggttctgggtattctcttctttcttttttataatgcctggcgtctgctgaaatttgagtttgttggttaacttgcaaaattaatctttacctggaaatagaatgtttttggttgacataaacgaagcagtttttgtttcttctttaagtgttttgggattaataatttgttcttatcagttcttttattatttgtattcatcatgtttctgtcaattgattgttttgcagaggtat

SEQ ID NO: 71398 - DNA, 575 bp, Prunus persica
  Intron number 1 from transcript ppa025488m (locus ppa02548 8m.g) derived from phytozome v7.0 (chr-ID scaffold_4; pos 922501 to 923075)
tgcaagcagaagagaataattcagatcctgcaccagtaagaatttcactgaatcagctagatatgttcacttccttctaggcaggcattaagtggaaattttatgttctaatttgagtctttatgcagatggttgtgaagaatgctgccgctgctgcttccctaagtgtcattcctgacattaataagatgaagaagaagaagaagaggtttgctaccaattcctttaattcttttgattcgtattgccacaatagtggaacaagaataatgtttgccttttcatttatttattttttatgttcaggaaaccgacagtagtaatatctccggttagagctttacttttagacacttggaatatgaggcacgtgtggaagaatgcggtgagaatttcattgacttaatttgttttactgcctatggctatgtcattcagtggaaatatatactctgttctaacttgagcctcatgcatctgattgtgcaggatggtacaagtagtaatgaaaaacatatagacccttggcttttgagggagacgcacccagatttggtaccagtaagaatttcata

SEQ ID NO: 71399 - DNA, 739 bp, Prunus persica
  Intron number 1 from transcript ppa026971m (locus ppa02697 1m.g) derived from phytozome v7.0 (chr-ID scaffold_1; pos 41187000 to 41187738 reverse strand)
tggcagtgagtttttgatctctctcactacttagttttgcacatgttatataataacatgtttgaatgttttccctcttatttgttttgcagttcccttgcctcctggtgtttctggtacgttttaattgttttctgtacttttctttttctcttaagtttagcatgtgttttcattttttgccccacgtttctctcttatacttgattgaagaaattgttgagaaattagaaatgatagtcgtgaacaagaaaacagaatgactattaaataattttgttttgattttaggtattctcatcatcttctttctctttttttttgggtttgttatcaaaatataatgctcttcccctttcaggtaaaacaaaaaacaaaagatagaactgttttcatccggacaaataaaaaaacaaaacaaaaatgatcatctcactactagttcattgatacttctcttttcaataccctaatatttctttttcaaaaataaaaaataacgaatgttatgttactttcttttaaaagttgcgattgtatttttaaagaactatgatcatcttattaaaagatgaaagaactacgatgatgtattttcttttattgaaccattgaacagcataatatatacaaaaatctaacatgatcattcctcttgtaaaatctcgatcacaacttgtttgtttgttttttttaaattgcagtgaaaccaactccaaattcatcaccaaagagtcca

SEQ ID NO: 71400 - DNA, 792 bp, Prunus persica
  Intron number 1 from transcript ppb016046m (locus ppb01604 6m.g) derived from phytozome v7.0 (chr-ID scaffold_12; pos 502599 to 503390 reverse strand)
cttgttgaaaaggaaaacccaaccttttattcaaggtaggttttctctctcaagagagaaacccacgtgaccacacttcctatgcaccaatgactctcaaacttattcaactaagactccaaaacttgatgcaatatgaactcacagtaaacctattcatctatgactccaaaacctgatgcaatatgaactcatagtaaggatgtcaaacatgagacaaaatactatctgatgatgactatgaattgtggttcaatatggacttttaagtgatgacataccaacaaccacttttatgaagaaccattcatctcttaaaaaaagttaattaggagatgagcacggtcacatcactataggaaatgctaacattttaacttaaatcataatggcttgacaaaaacttcaactataaatcctattgtgaatgtatggttatgtcatgattttacctgaagtcaagtttctcatatcgatcaactcatgcctcggaagtatgggattgaatgagttgtgccaaatcgtccagtaacaattcttcacacactaattttcaatctatgctagtgtctaggaaatgacaatacaattttcataataacaagagttaatgtgtgttttgtgttgaaaaatgattgaattttgttttctttagcatgctaaatgtatgggtgggttgtacagcacaagaacctctatttagattgttttgataggtggaataggttttgtgctagagttttccaaattcttttggactccattggaaaaagtttctgatattggtagacc

SEQ ID NO: 71401 - DNA, 1006 bp, Prunus persica
  Intron number 4 from transcript ppa007602m (locus ppa00760 2m.g) derived from phytozome v7.0 (chr-ID scaffold_1; pos 4876009 to 4877014 reverse strand)
ctgaagagttctactttgaggtatgcatgaatatttctcttttgtaatgccttctcctgttaactagttagttgaccgatatcaaactatttacataaatacgtttgtaaagcacttctctaagtttcaatttttgaaagatgcgaggatattatctgctaatgaaatcttgcttgtatggtctgtactctggattagcttagctcagatggttcattgacatttaaactacgtatctccaacctttacgcatatttacttgaagaaaaagtaaaaaagcaaagtgataactattagcttgagatgcactgctgctcctttcttaacaactcaaacttttaaggtctcgtggttgtctaacatggtatccgagctttgattgcaggtggtcgtgaatcgaaacactccaatccctcatttctacttctttaatagtttgcagggtggggctgcacttttatgtttctctctctctctctctacacgagagggaggagggtgttatctcgatatgcattgttagctaatttcctaatagctttagctttagcttgatattctgtttaatcagaatagaagtagaggtgtctgaaagattcttggaaacgtttcttttccacatggagacaaggacccaagcaacttggaaactattgcaactgaatattgatgacacaatatcaaaacaactatccaaaaagacaaaatattatttggaaattttgcatatattaaatgtggtagatttgaggtttagataacttgcacctgttagatatccaattgtagcaaatcaaaattgaagacagataattttagaatctgtttaaacaaaatacaggcatagttttagttgcaatcagctttgtgcttaagagccttttctcctatgactggtggtatgaatgatgggttatagaatgttgtgatagatagaacaattttatctcctcaatccttcatgctggctttgaagaaaaacttatgttgttattttgaatcagaa

SEQ ID NO: 71402 - DNA, 591 bp, Prunus persica
  Intron number 1 from transcript ppa019233m (locus ppa01923 3m.g) derived from phytozome v7.0 (chr-ID scaffold_5; pos 6326862 to 6327452 reverse strand)
ggccaagcggagattaattgtggattttggaagtaatgtttgcttcaaaaataaaaaaaagttaatggttctgtttttattggggggatttaatttgtgtggttggtgattgtggtgatgaattgcagtgaatgaagaaattggagcgccgaaatcggttggatatagtgctcccaaggtatgattgaattaaagttgtatggagtttgtagttctataaatttggttgctttttctgatgttttattcttcaatattagtgttcaaaccagaaatgtgggacttaaatgttaggttttaaagctaatttgatctctgttaattttgggggtccgctttatctgatttatttagtttgtaaaataaattgatcatggaatttgacatcctaagatacctatttgttttctgagacttagaaatgtacacttggcatttttcatatattcccttttctttgaatactaccccctcgaggtttctctatttcatttcaaaagcatttttgtgttgtataagtgaagtgcaaccaaacaaatcacttttctggacagcttttaaatcaaatcagttttgcagatacattgccgc

SEQ ID NO: 71403 - DNA, 527 bp, Prunus persica
  Intron number 1 from transcript ppa008734m (locus ppa00873 4m.g) derived from phytozome v7.0 (chr-ID scaffold_8; pos 18746839 to 18747365 reverse strand)
gcaactgataagcaaacttcttctactgaaatcaggtcttcacctttgtcgttttcgcttccatgtatttcaacattcagtttatctcttttccagtattttgagaatgattaattgttccatatgatagaattgagctccaccatatcttaatattttcttggataattggatttggatatggcaaaatgaccacaaaaaaaggctttgattggtgattgtgccatagtattgcaatttaaatgtaacaacttttttctctagtgattattggtatcaatttttacttctcatttctgggctaattctacctatttctgtcattcatggaactggttctaaaatgaagtagatagactagggaatggggttgtttcgaattttcagcatctttgctgacttgggttttttgccttccaatgcgttatgctgtatgagcttatgttttacacatcaggcttccttgtaatcatagttttgtttgcttcacagttccacagccaggattaggagtgaagttctcactc

SEQ ID NO: 71404 - DNA, 1013 bp, Prunus persica
  Intron number 1 from transcript ppa024820m (locus ppa02482 0m.g) derived from phytozome v7.0 (chr-ID scaffold_5; pos 1809557 to 1810569 reverse strand)
gcttgtaaggattttttttttaaattttaatcttattattttctgtcatgacgggtttattttcgatgctaactagtttctaattaaatactaaataatgggattattattattgttactattattataaaaatgagttttgacgaacttttgtaattagattatattttgattttactaactttcgaccaaaaaaaaaaaaaacaacaaccaaacacgtgctagtatgcggtagagacacacttaagtcaggaatggctttgactctctcctcatctttttgacctctctcctcaactacactaacggcccctctaaatgaagttattatatttttaattttttatagaaacgatagtctaattcttctaacttaatttaaattatagagagggaaactcaaacttgggtgcaaggggatccttgctcttatagtaaatgaaagctatctcgaaaagagcatgagcgcaagcaaagttcttcctttcttcctgtctctagcatttaacaacctaaagggaatatcacttctctctcgaaaagagcatgagcggaaggaaaattcttcctttctatctgtctctagcatttaacaacctaaagggaaggtcacttctctgaccaactgacctaactcacattaatttgctaaatcaagttaaacattaataagagtttagaaatattttactctaatatctaacgtttgcctagttatattttgttgtattagtatttgctatttcatcccctagctcgtgtccagtgacatttgccaaaaactcaaaaagaagttttcaaagttaagttgggttggtttttttgacaccattgcgcaaaggtgaccggtcaatttgacaatttctgtacaccagtttcggaaatattacaatttttttttaacccatctaaaagtaaaacacgcacaagaatgttggaagattgaccaatttattcataattgcttgcttcttgcaggcagaggtgatatttcttggacagctgaggcaccc

SEQ ID NO: 71405 - DNA, 910 bp, Prunus persica
  Intron number 1 from transcript ppa005105m (locus ppa00510 5m.g) derived from phytozome v7.0 (chr-ID scaffold_3; pos 4055999 to 4056908 reverse strand)
ctcggaagcaaggagaagtcggtcactaaattaaatgcatttcacatcatgttcttccgtctccttcaccttttacaaataataacttctagccagataaaaataaataaataaacgccaaaacacaagcaattaaacaaagaacaattaagtttcccgtccaccaaaactacaagaatatataaattaaaataaaagttccaaccaaaaccatagccagtgaagactaccaaaaacagtgtacacaaagaaacaagaaaaaaatggtggatgcatcacagatattggtcagttggtgtctgcataatgctgggctaagtgggtttctacaacaaagaaattcaaggtttaaataatttgattcttcatttcataattttttttacagtcttttttgttgctacttttttttttttcttttcctgatttcatcagaaaaatagttatcatggcatgggaagcagacgggcaactggtagttgaaagtggacggggtgtgtgtgtgaattagtagacctcaagcttgttttcatgcatggaattcctgcatgcaatctgaacatgaaatgtcttcttggctgggagtttgagagagactagtccacggctgggctaccactatacttttgacaaagagagaaagtaccacttttgtgtacagttacaaggaaaaattctgaacacaagaatagattccaaaattgactgcttatgtctagagattagtattcctcttaacagtactttaaaattctgcagaacttggtacaagaacatggttttggtttcaaccatgagtatttgttagaataaatgttctgtttcgattgttgggtttgaggaggaagttctgaggtatccgatggctgctcggagcggatcaaattggtggagtctgaggttgcttgga

SEQ ID NO: 71406 - DNA, 557 bp, Prunus persica
  Intron number 1 from transcript ppa007159m (locus ppa00715 9m.g) derived from phytozome v7.0 (chr-ID scaffold_1; pos 33144104 to 33144660)
gaaaaggtcaatgctcgtctctggttcttaatctgactgtttactagcttaagtaaaagataatcgctgtgctttcgcttgatacacttaaattaaggttttagacactgtgttgaaacaattttgtaaaaatgtgatacaaatagcaatagtacagtgattgaattattacttgggatttattcatactcgaagataatgaaatggtggtgttcttggataatgtaggcatttaagtgtacctggtgagtgaatatcaaattggttggaaattagggtttttggttgaaaattagacatgaggcaactggaactgcggggctgataagaaattttccaatattatgtgagagattgtgtagccacatttgtattaatcaaagagccacatttgagatgaatggatgactgcggtgacttggtgccagaatgatacttcaaaacaaattatagcatgatcatatggctcagtaatatcagttgtcttctgactccccctttccctgtttatttattttacagcaaaagcagaactgaaggattttctgcacataagt

SEQ ID NO: 71407 - DNA, 911 bp, Prunus persica
  Intron number 1 from transcript ppb010612m (locus ppb01061 2m.g) derived from phytozome v7.0 (chr-ID scaffold_4; pos 30095622 to 30096532)
tagatccgtctattgtgatcactgtcgagttgttggtgagttcactcactgactcagctctccaactttttttaaaatttaaaattttctttttcgttttaaaatattgtagtaatctcaatttcgcaagtttgaacgagatcaaactcatatctgtcagtttgtctgtttaaatgcttacgtggtacatgtgttctaatttttatttgtgttttttgatcttttgaaatcgttcacaaatgaaaatcaaactaaaaggcaacaaattctaaaaccaagttaaaacctgaaaacacaacttaaacgtgcagttggtggagagagaatggtgagaggggagggatgagagtggttgtttgggtgcggtggtcagttgtgaggaggggagaaaggtgggagggtgggtgcgctgtggggggatgaggatggggtgggggttgggagtaatgaatttgttatgaattttgattgactttaattatttaaaagataatgaattatttatttgtttgttctatgtaatatggttatcaactgtagtgaattatgagttgtattcttcacaatttgaaatgatcgtgaaatgtaattgggtgtccttttagatggggcttgaattattgtttatgaagatgttgggtgaattttgggtttttagtgcaatcaaaagagctgaataatcaagaagtaacaactaattaaattttcaactattcatcctcttacattgtacgagtaaagcaaggaattgatatcatgaacttttagtttatggttagggatcatagaccttgagattgcaatcatcgcataattttgtaagactaaaatacatttaatgaactttaccaaccaacaatagtcaaccaggtgagttctgaccttttacattcctttttaaaacgtttagg

SEQ ID NO: 71408 - DNA, 333 bp, Prunus persica
  Intron number 2 from transcript ppa022236m (locus ppa02223 6m.g) derived from phytozome v7.0 (chr-ID scaffold_7; pos 16371171 to 16371503 reverse strand)
ttgaatgtgagccaactttacctgcttcatttttctctttattattaggaatttccatcaaattgttcattctacttaaaagtgttgtgctttgctaatgagattctagtccagtgaaaaagtgcatcaacttacaaatatgtggtattaggattgaatctcatgacaccttgatagtgtatgcctaaaaaacttcatcttctcgtagtttaaactattacttatattaaaaaagaaataaaaagagttgtctttgactttgagttttaaatgtgactattaattgtttttaatgatgagataatgacaggtgaaaattggaatttaacagga

SEQ ID NO: 71409 - DNA, 624 bp, Prunus persica
  Intron number 1 from transcript ppa003494m (locus ppa00349 4m.g) derived from phytozome v7.0 (chr-ID scaffold_3; pos 16382108 to 16382731)
ccgcccaagcccagcttaaggttcgtttctaaaaccccattattcttccgatcactttgattgttgaaattggtatttgcatgattttaagcttgttttatatgtttgattgtttcaatgattggaaagagtatctgagattgctcagttctttgaaagttgatgactttattcatagaaaactgcgtagctctttgaaagtttatgactttattcatagaaagccctttttttttttttttttttcattaatccctggaaactttcaaacatataatgccttggcaatcaatgtcattggaattgaatagctatgcttacaatgtgcctgggaaaatcacaatgattattgatttattcctaggtatggcctaaacttacccaaatatatatcgcataataaatttctattttagtctccatatcgatattgacacgctccccttaatctatactttcatgaaaaataaaaaataaaccttttatcttggtaatttgggcttgccaacctttgggacttaatgtgatatgcaatcaatttaaggggaagttcaagttctttcagttgattagttgcaagaaatgcctatttcctaacgcctatttcctcaggttgatcaacaa

SEQ ID NO: 71410 - DNA, 239 bp, Prunus persica
  Intron number 2 from transcript ppa015288m (locus ppa01528 8m.g) derived from phytozome v7.0 (chr-ID scaffold_4; pos 26162434 to 26162672 reverse strand)
acagccaaattcaaggtagcttactttctcttctgtgttcaaatgaattcttagcatgctttgtgctttttcctcttgcttataaccactcaatgaatgcatgctcctgccctgactttttggttaagttgtaaaatgattaattccttacacgtatgtatttcataatgcaatagaaacattttatacttggttatattttttctttgatttttttaataggtttgacatcactaata

SEQ ID NO: 71411 - DNA, 582 bp, Prunus persica
  Intron number 1 from transcript ppa012843m (locus ppa01284 3m.g) derived from phytozome v7.0 (chr-ID scaffold_1; pos 7697532 to 7698113)
aagacccacaaggtatttcgtcatgggttttggttattgagaaaattttggaaaagaaagaatgggaaagagtatgtggtaatgttccaaattggtcatacaaggaatagttttgaattttaatttgtttgagatgtaattgaaatatgatagtttgatattttcattgagttggacagacatatttgcacttaggaaagacaaatataaatcataatcaagtaacaaaattagagtgcaatggagactgatgaaggttggtagagttgattaaggcttgatggagttgaccaagatgatggagtgatggcaattaacatcatgtactttaagttgacaaaataaaatcctaattgaaagcttgaactttgtgaaaaaaaaaaaacaagcttgaagtttgaattcccaatcaaatccaattatagaccattgaacacacttgacagttttaatctttttcatttatttactgttctttaatttttagccttcgaatgagctcctattggttttatcatctaactatatgctgaataactggtgataggcttcggcgaagcggttcagggtgacaggtagagg

SEQ ID NO: 71412 - DNA, 1024 bp, Prunus persica
  Intron number 2 from transcript ppa012843m (locus ppa01284 3m.g) derived from phytozome v7.0 (chr-ID scaffold_1; pos 7698170 to 7699193)
ccaagaggagaactcgactatccaaagtgtgtttctaaaccttatctacaagttgtagtaactatgaacttttcctgcccaaaaaaggcattctaattatagacttggaagcaatattagagaatcaaagatgtccattcagtatttccttctgttttcaatctactatagttaagttataggatgattctgtttaaaacatgcagacttcgagttactgtttaggaatgtatggttggatacaattgttttaggggcagatctacaagcaggttggatgcacttgttttttaagttggattttataatgggaagaggttggaatctaatgatattgatattgccatgagtgcattgtgaagaatatttgtccttctttacgtgctgttttgaataataagaaggcttttaagggctcatactgagcccaaacacttgcttcttacttttaaaacctgagcttcaagtgaaacttgagcaaaaattggcttcttctcacttctcagcaccttgttcttgaagttgtgtctgtagtctcttgatacagtatagattaattgaatttgtgctatgtcttttttctcaaatatatcattttgcttggacactataaactagataaattcctcaaatatagcttgtaaaaagtggtggatctagagaaacaattgattgcgtcgtcatccaccgtccatttgagtttgcaatctcgtttgtcgtttgcttcagctacacatagcgattatcattattcattgtgctttgttttttatttggcctgttataattctcaatcccagaaggcaataaattaccctttttgtcaataagtttactatttggaaagagggaactgtttaaaatctgtgaagaagaacccatacagcacatctgttacccagctctcagctcacatctcaagccaagacgtcccctgttactttatgcatagtattatttatctctcagatttagtattactccttggtttcttatgttactttgggcttttgttatgtgcagc

SEQ ID NO: 71413 - DNA, 1006 bp, Prunus persica
  Intron number 1 from transcript ppa015619m (locus ppa01561 9m.g) derived from phytozome v7.0 (chr-ID scaffold_1; pos 27629362 to 27630367 reverse strand)
gttttgtctttggtaccgcatcttctgctttccaggtttcgtctttctctttcatgactattttatcctttttttataattcaaaatcaaaactacaacttaattcacatcccagttatcagaaatttgatttcagctgttggatttcttggcttgcattgttgagtttgaggttgatgttttcttgtcgtgttgctgtttcttcgtagacttaactcaaactgtaaagtaactgctggttcacgtgaagatagattgtcatgttgatgtaatcgtgttcttcgaaacccaaaagaccaatgaattctaatttcagaatggaaatgcttagattatttttttcttcttatcattttgttattctgcatccgagttgaatggatacttgcaagccgaattcagtggacagttttctttactagttattcctgtataccaaactcaaatacataaaataaaaaatatattgtcaaaagaaaataaaaatgcttgttagcatgttaataaggtttgaactataaattacttaaatatattgtaaatttcgtagttaattaaaatgaaagtgattaatgatgaagatatattttcttcaaatatgttcttccttaatttcttactagtcctttacgcatgtgtcaattgattttattttttttatttttagaattaagaaaaataggacctattatctgattttgtttttaattttaattttttatatgaaaaaaaatgtgaatttaccatattatcctcatttagtgagtagtttcgaatgcatgatacacatgtaccaaaacaaacacatgatgcatggcatggttgccatattcatcacaacaatccttaaaaaggtagaagggttcatcaaccacaacaagttatgtaccaaatattatttatttatttttaatatgatacaaaaattacttgaggattagtatgaaaacaaaaatgattaataagaataaaaatgatttacgttttcgtgtgattttttgtcagt

SEQ ID NO: 71414 - DNA, 354 bp, Prunus persica
  Intron number 1 from transcript ppa010846m (locus ppa01084 6m.g) derived from phytozome v7.0 (chr-ID scaffold_1; pos 29910524 to 29910877)
cgagggttgttggcgtacccttcctcaggctgcaggtacataaatacttattgatttatacatatgcatggattaataagccaaaacttatactctcatgaatgacaatatatttatcacaatggatagaatggagtaaaagaaagatacaaaactgttgttggtcttgttcctataatttacctgaaccaacaaacattgctaatttggtcctcttcttcttctgaaatcaaacaaatataagaggctatatatagaatagaaccacaattgattcaggggtattgtctccctttttctcttttcgattttggatcaggcctacttcgttgcggtaaaagctgtaggctgaga

SEQ ID NO: 71415 - DNA, 974 bp, Prunus persica
  Intron number 1 from transcript ppa022779m (locus ppa02277 9m.g) derived from phytozome v7.0 (chr-ID scaffold_2; pos 11032605 to 11033578 reverse strand)
aaatttggctgaaagctcctggttttttgcaagttgagtagttatggatgagtctttttatgggtgtccaatgttcgttctttcatctaaattacgggctcttaaaactaagcttaaggagtggaattggcgggaatttggggacattaatgttataagaaataatagttttcctctttccgtaaagtcaaatacaaaacatttatattataaataacatataaacaaattggaaagttttgaaggtataataaaattgaagaaaacaaaataataggtaagtaaaaggaaaataaataataagtaagaaggtgagtttggtatggtgaagcatgtcaaagacgctgtcctaaagcgtttgtagcctccctacgtgcaggtactgacggtctacaagactccaagatacgaccccttatacacaaactcaagatccgctatgagcacgttcacagacagatataggtatccaagtcacataaccattgcccaaaataataataatataaagtagagaatatatgtaaaagtagacaaggagagaattagaatgtgtatgtgatattctgataatgtattgtgtgttattgtgtgttcttcaaatgtgaaggaggagtggccttttataggcatccaaaaagatataaccttcaccaaccataaaagttcaccaaccaaaaaattaaggcattcaccaaccagaaataaaacctgaatattaaatatttataacccccataataaatataataaaacaaccaaaataattaaataaataaaacgattaaatttttaaaaccttttaaaattccaataattaatgctgaagttaatgattccatgagagctttggagtccattcaaactgaaattgcaaattttgggccttcagatgatcgattcctgcgtgaagatcaggtgcaaacgcagcttcatgattctctttgtgtgcaggagatcttgttgagggacaa

SEQ ID NO: 71416 - DNA, 1002 bp, Prunus persica
  Intron number 1 from transcript ppa009672m (locus ppa00967 2m.g) derived from phytozome v7.0 (chr-ID scaffold_4; pos 10494585 to 10495586)
aaggtatgttgtgtgctacatgggtacttacactacttcatgtttgatgtatgggttttaatccttttctcaattggcttactgatttgttcattatttggcttgttctggcttgttcttgacatctgcttgatctgcaatttgatttgcatccacacccatgtagacaaattattgcggatctttgtggtttatatattattgacaattacccagttctctaaattgtcttgtgttgcaattttagatctgaaactttgatgtttctctggctcttgctaccgtgggtttatggatgttgcaagaggaaaaacccttttcatgatctccaaaaccccactcttacttttgctcttgctactttgggtttatgggtgttgcaaacatcatgttttatttacttcacttaggaggattaaaatgcagtatggaatcttagtgaaattaatcaagactaaataaaagagaggagaataggtacttggagccaaagacagaacatttaaaaagatatataagtaaaattcatctacttttttttttattgcattgctttgattatttttaattctggaagaggccagcagggttgtgtgtagccttttcagaaatttgtagttcacattgaaatgattaaaactactttagaagctgtaggtttctatctttaattttttttccccttttggattagttaacctaatataaacaattgtagtatgccttatgggtacctagcaattagagtagaaaataaaattgatcaatttttaactagcttctcaaattatgtaggctttttgctctctctctctctctctctctctctctctctcttgtgctttgtcttgttaaatgtgattgctgttcaacgttgtcttgctcgttgcctataaaaaaaacataccctcatattttggtttaagttttctgattgagaatctaaatgtgagtttgtttaatgtaggaaaaagttttaggtccatcagaccctgactctgg

SEQ ID NO: 71417 - DNA, 706 bp, Prunus persica
  Intron number 1 from transcript ppa004660m (locus ppa00466 0m.g) derived from phytozome v7.0 (chr-ID scaffold_2; pos 24884165 to 24884870)
ccgtaaagatacagtctgctttccggagatacctggttagcggtttgttttgaattttttaccgtttctgcccctggatttcagctgaaattacgtttcgtgatgctttgttaattggttcggaagtacaaaaaagtttcgaactttaacgaatgattatgtttggtttcactttttattttaaaattttgaatttctttccctataaaattctgtttgctcgcaaattacaaggaaggggaaatttaaattaatttgggatttcaaattctaccttcctcttcttctctttctctatcgaaaaagtttctcgggaaacaaacacgggcttaaaagaaaggctgtatttgaagcttcataaaaaagtactgttcataaacatagtttttcacaaaataaaacaaggaattaaaaataaaaattagaagaccgccgacactggtaccagttgatgtgtcaactcgctgagtcagtgtcagcgtctgggagaagtgattctctgtgttatcaacagcatgtttactgtactttgacaaccagtggtttcgtacgtgtaatccgtactcgacgacttctggaggcttcttccttcgtacatagaggttattttcgtattttcgtacccatagactcgaatttgtatgatgacgtgggtgcaactcatttggtagaaacttgacttctgtgtctctgactacaagcaagc

SEQ ID NO: 71418 - DNA, 769 bp, Prunus persica
  Intron number 1 from transcript ppa018580m (locus ppa01858 0m.g) derived from phytozome v7.0 (chr-ID scaffold_8; pos 16901079 to 16901847 reverse strand)
cttttactgcctgttgctcttgccactcttgggtaagtcatgttaactctctcagcttgaatactcatacataatttctagttcacattagctttattgaaaaatattctcttatcaaactgtctgacagtataagatacgtcaatatgaactatttatttattatgttagtttttgtcagaatacgtggtttatatttattgcgacgaaaatatttgtccgaagatataagtatggcgagaaatagtactatgtatatgtttttcatggtataaataaagccagttgctggtcttgatgatcttgctggagtttttgaggaggagagcctaggatgcccaagtcagctttctcttgtaaattgcaagttctttatgagatttggaatctatacattaaaaaaagataaagctttctttcaaagagatgaacaccttcatacacttaatttctacttgaattagattttgcttcctgtgaactctgtctctaacattgggccaaagtcttagtcaggctattcattcataataaatgctctaaatatccacctagattattacagaagacagacaaaaatttcaatatcagatcccacaaggtcaaagataggacaaaaatttcagttgcagtacttttcaacaattctgtaccaagcaaaagaaaatttgacagcagaagtgtccaaacttacaagattccatatgcatgcatgcaaataacttcggttggtttaatttccatgaacaattttcaatggttgcagggc

SEQ ID NO: 71419 - DNA, 959 bp, Prunus persica
  Intron number 1 from transcript ppa011554m (locus ppa01155 4m.g) derived from phytozome v7.0 (chr-ID scaffold_4; pos 10569988 to 10570946)
caaacaggtaaaagtcagaagaacagcaaaacaagaccaaagtcttgaagtatctcaacttatggcagcagaagagtggaaataaggtaaatagcagccggtatgttgtctcttcacttaaataaataaccagtaaaaattgttctgatgaactctttggcagacctagttggtactcttgacaaagattcaaatggctgggcctaggaagcgttcaccaaagaaaccatcatttttcaagatcctaattggtgacttctatcagcgtctggtaacatccatcgatcctcccttcattttcacttttcaagatcaattctaacagtcatggttgaatgcatgattgccttttgtcttatttatttatttatttcctttttgggttaatttttgtaagatcttgagtttctttttgggggaaagttagaacaaatagacatttgctacatgacagtggttaaatttctgttttgataacattctgttaatgaatgacttaagtttttgtgctctactgtttgcccataaatttgtaaacaagaaaaaggaaatgttgatctgtaaggtttacaatgatttgttcccaagttatacaatttgaaatctgtttaccataaatttttgacctctcatacatagcgtaactatgacattacttgcttggtttttaaccttaatatatatatatatatatatatatatatatggtcttttgagaagctgttaaattttgtagcgtataccacctaagtttattgagaacttcaatgggcaatcacttcgcaaatgtgctcttagaggccctagtagacaatggtgggatgtgaaattggaagagagagagaatagcttgttcttccgtgatggttggcagggttttgtgaaagatcatgttttagaagttggggatcttttggtttttagttacaatggcaaatcaaagtttaaggtcaaaatct

SEQ ID NO: 71420 - DNA, 1000 bp, Prunus persica
  Intron number 2 from transcript ppa011827m (locus ppa01182 7m.g) derived from phytozome v7.0 (chr-ID scaffold_8; pos 13019172 to 13020171)
acctcattcaatcccatatcactcccaattcttctgtaaaatatttttactctctagtctctctctctctctctctctctcagttgttagtaataattcttacagaacatcatgtagtttcaggttatatatatttattctgggtttcatcaatcacacgcatattgtgttgtgtgtatgtgatgtacaggaaatgtatgttttctagctttctaaccagaaattatatctgggtttggggtatattagtcagtgctaggaagatgcataaagagaatggtattttattaatgggtttgattgattgattgattgattatgcaaactggttgagtaaaaatcatgatataaatgaaattcaacactttatgtggaattgcaaagactcctatgtctagcaaattatcgctctttttgttgccttgatcgtcctgagagccttgcaaatttttttactaatgggtttgattgattgattgattgattgattaattatgcaaactggttgagtaaaaatcatgatataaatgaaattcaacactttatgtagaattgcaaagactcctatgtctagcaaattatcgctctttttgttgccttgatcgtcctgagctcctgctttgcaaaaaattttactaatgggtttgattgattgattgattatgcaaactggttgagtaaaaatcatgatataaatgaaattcaacactttatgtagaattgcgaagactcctatgtctagcgaattctcactctttttgttgccttgatcatcctgagctcctgctttgcaaaatttcaactctgttatctgcaacaacatgctgagatgttggttcattcacatcgaatttttttattatttgcttttataagaattagtgttgagtttattgattttgcattaacgaaataattagaagggttggataacgcagtagtgatgagtaatgattatgatacaggtcttggagctggggtgtggaaattcacagctgtg

SEQ ID NO: 71421 - DNA, 707 bp, Prunus persica
  Intron number 1 from transcript ppa007468m (locus ppa00746 8m.g) derived from phytozome v7.0 (chr-ID scaffold_6; pos 6986676 to 6987382)
ctgctgcgcccggacggtaaattgcttgaattgcaaggttctgtattattatttgaggttttgtgatatgttttgatcattggagtagtgatgcttgactatagatttttaaagaatgcagttgtttgataggatgggattgcattgaatttgtctgatgtgattattctgtttgttggtgatacgtagtggtcatattaggcagtagtcttatatgcttcttgattgtgagtagccttgatcaagtcaactctttaaaacatcatgtagtcttgtagaccaaagaagtagctcacgtccgtcaagtttattgcatggatacaatcgtctggtagtagaagttatatggctgatgaactgctaaatatgaggcttttaccgtggtgcaaagtgacgtacgagtgtgcagaagttattgatgacatggaagtgaaaagagagtctaatatttcttgaggagaattaatcaaattgtatgaaaagaataataatttggcaaaaccttgtttgtcccaaagagttaacatttcttattgagttgttaaacacgttcatatgatgtttcttaaatcacaaaatgtgtttgtgctgctggattgcatatttgtaaacttttctttgtgtggttgttatatgatgtttcttaggtaagcgttccctttttacttctttacttcttccctgacttgtgccacagcattacagtt

SEQ ID NO: 71422 - DNA, 710 bp, Prunus persica
  Intron number 2 from transcript ppa026358m (locus ppa02635 8m.g) derived from phytozome v7.0 (chr-ID scaffold_6; pos 10663948 to 10664657 reverse strand)
cagctgctgtaaaattgtacagagaaaaatatcaggtactttaggacttgtttggtatcctacttggatccaattttataaactcaagaacatattttaagttcaaagccacaaaaatccgtttggtaagaccatttttaaaaactcaaacctgagaaaaactcaaaaacacccccattattaaaaacaaaaaaaataaggttttatatttttctctctctctctctctgtctccgccctctcccgtctctttttctcttcttcctctctcgtccctatctctcctcactctcccgtctctttccctctctcaacttttctttgttaatttcaatttggcaatctagggttcttaattttctgattttaatttcaatttttttagatctaaaaaatagtttggagttcaataccaaacaagattttagatcttaaaatcactatttgaaaactcatatttttaaaaagaatcatagtgtttgaatttagttttttttagtaggatatgaaacagggctaatttttttcttttggtttgaatattggtgtcctacgaataactagtattgagtaacaacataagtgggaatactttatatattcagataaacaatggttgtaatattttttttttcctctaaatctatttttaaaaaaatgatctttcttgagcaggcatctcaagaaggagtgataggaataacagttgt

SEQ ID NO: 71423 - DNA, 964 bp, Prunus persica
  Intron number 2 from transcript ppa012406m (locus ppa01240 6m.g) derived from phytozome v7.0 (chr-ID scaffold_5; pos 4958927 to 4959890 reverse strand)
aagccacgcctgtcaatcttggcaaaaccattcaggttcctctgctcttcaccgtcgcattcctatcctccttgtcttcttaattataatccatctcccaggcttctagtcctctccagtcttcatgatgaggacatctttgtcaaccattcgggtttacaaacgaaagagatggaagagggaattattaattagtttcctaatttatttgttagttcgtaggttctctaagttttctagattcatgatttttagtttttttagatttgagtaggatttctaagtttgctattttatttggattaggatttctttcctaaaataagtttactatgataaataccccttctgtaattcattatgggagttgagatttgaatattgagtaaagtttattttccagtgaagactacttggtgtggagccaaattcttggagagattccagacctatcccttttgttctattttctgtttttcactgtttttgcttccgctaaactacctaaattctcaattcacccatatcctacatcacttcatcatcaagtatcacttccaattaacagtaattacaactgctaatacaacaatagttgtagtgtaggtgtccaagaaacaaatgacatttagaaattgtatacggttttaccttctctacaacattatccatatagggtcaaaattttccatctcattctttccatcactccatttacagacaatttcctactggaaatataataatcatgttggcagcatccagactatcccgccaccatttcatactggggaaatgtgaatgccaatgccctccacattggttttttatattttaatctttcatctatttatcatttcatttacttaatatattcaataaacagattatatcattcaaagttgttttgatttgccaattttgggcaggtttgggaggtgagactgtggaagattaatccttc

SEQ ID NO: 71424 - DNA, 496 bp, Prunus persica
  Intron number 1 from transcript ppa020640m (locus ppa02064 0m.g) derived from phytozome v7.0 (chr-ID scaffold_4; pos 1143914 to 1144409)
ggtaccttcaaattttccaactttaatgcctgagattttggcttaattttttgtttttatattcttttgctgaaagtgagcattttactaaactggtcaaaatttggtgcactttgattggaaatgaagatgctggaatccaaagtttttaatatttactgcttatatgttgttgggtatctgcaatttcggcatatggattggttaaaacttgaaagtagatgctttaactaaaactgagtgaaacgttccatgaaattttaagttaattattttcctcattgtttatggcttgagaatgtcaaagcgtcctttttattccccaacttttgttttaaaaaagggtatgcaatggtacatttagcacttatttctgccctttttcgtcctaaccaatgagaaactatacattctttatgtagttacctttcttttggtttactgacttggatagcatatcttctttcagctaccctgaatatactcgcttgcttcc

SEQ ID NO: 71425 - DNA, 892 bp, Prunus persica
  Intron number 1 from transcript ppa026096m (locus ppa02609 6m.g) derived from phytozome v7.0 (chr-ID scaffold_3; pos 15111730 to 15112621 reverse strand)
agagcgattttgtaaaagctcaataaatatcatatcatcttattttgattttaagattcattttcgagcatttagacagggaaggttgaatatagtgtacttattaaaattatttgtttcaaaattcaatatatcctttttagtcattttatgttatgataaattagtaattcaataaatactttggtagtatggtgtacttaattaattttagggttcgtttagcagcactcttcctgaattggacccaaagtctgttgtcttactcgaaaatatttggcaaattgctacttggtccttttgcagttgaggacattctaccttatccttttccctttctaatctcctgctatacagacgcacaaaaacaaaatagaagaaaaaaaaaaggaaagaaaaaaggggttaagatggtttgctcaatcccaattctcaaaccctagaagctgtaaacttgaagaggctgagaagacagtggcagtgaaagagtgactgagagaccctcgttctctctaatcttcactattcaaagtagagagaagaagagaaggctttggatttacacttcacatagttgttccaaaaacgttgttttttttgttgaaagagaaaaaacgtcgtttgaaatcactgcgcatttatcactgaaaacactatggtaagtgttgccaatcaatccaatctcagaaaccgaacgaaattttattgatttcagtttaattcattgtacaagttcacagttcactgtgcttgtgtttgatttggacctctcaattttgttcggttttcgataatcagacgggtcggggcggaggaggaaaggaccgatttcggatggagcatccggaaaatcgcgggggcagcggcggcccccggcgtttcgactccaaga

SEQ ID NO: 71426 - DNA, 662 bp, Prunus persica
  Intron number 5 from transcript ppa007922m (locus ppa00792 2m.g) derived from phytozome v7.0 (chr-ID scaffold_3; pos 15060338 to 15060999)
gaaagtaagagactttttttttttttttccttttacttaaatagatgtatagaataataacatatcaaacaataagaactagatttgtgtactgtggtagcaatgtgttttatctgttaaaatctgtgaataatgtactacattaaagggtttggtgtcgaagactagtcttcatgtttatgtcatgttgcatgatgcatattttgtgctaggtcccaatttatctgttgagtcaagtataagactttgattcaagtgaacataattcgtttttatctgtaccacttcatatggggttctttgaatctccctctacttaggtatttttcaagctttttctggtggctcttttctgggccatcatgggttttaggctttctgagaagttggtagtaatgactaattttgtttttcttttgattcttgttttgatccactgccagttatccagttagatgtgcttaagtagcacatctaataaaattttgttgtaatctcccggttgttagactacctgctttcccatgcatgtattcagtgaaatttaatagttaaaaatggaaacttttgatctgtctccttcctctctctctctctctctctctctctcatagttattctcctaaccagtttagagtggctgcagcttcgcctgaacagtt

SEQ ID NO: 71427 - DNA, 559 bp, Prunus persica
  Intron number 1 from transcript ppa006790m (locus ppa00679 0m.g) derived from phytozome v7.0 (chr-ID scaffold_1; pos 33956838 to 33957396)
tgtgagttaacacgttcttcggattttgagccttctctgatctaattttgtttttatgtcattttctcgttttaatttctctctgtgattgttcttcttgcatgcatttttgttttatcagcttcttagctttgattaattgggcaattggttttggttttaattcgtgtttttgttttctatcattttcatgccgtgatgttttattcttccgtcattttcaaggccgagtagtttttccactgtttttcacttggaaaataaattatttatatttattccaactgttcttatcttcaggctcacagtgttgcatgtttgtgaaatgatgaactctgtcacggacatctcatagtgttaattgcattctccagtttattttctatttttttgttattttgcgttctgttaatttactttattcccattttaattgcatttgaatcacttttattgacccattgttgcatttgtttctgaattaaaaaaatttatcaatgctttttggaccaccccttttgcagaaacaaggctgcaattctccaagcaggggctgttc

SEQ ID NO: 71428 - DNA, 797 bp, Prunus persica
  Intron number 1 from transcript ppa011013m (locus ppa01101 3m.g) derived from phytozome v7.0 (chr-ID scaffold_6; pos 3083506 to 3084302)
ctgctcgaatcaaatcgaagaacaaattcaagaaggtaaaaaccctaaactcaggatcaattcttttcgtatgtgttcaaatgatgttggtgccagtttttgtgctttagtatttctctttgcaaataaatagatgccaaaagttttagggttacgtttggtgctgaagaaaacctgagaaaaatctaaaattttcttcgaagaattgggaaaagattgttttcagcctccggtggttaatcatctgtttcctttctctaattgataatcatctgtttcctttctctaatttttcgtagatttcgttgcttgtttgctgagaaaataatggaaacgaagagaagctgaaatttcaagttgcattaactcgaaatagaaattgagtttgatttctcttggatattttgttagaatttttgttctgcttgcatcaacccctctttcttttttggtcaaggcccctcatcatcggcttcttctaatctttaaatccataactttcgtcccaccaccaggaaaaagaacgccattgtcaaattagtgtctgttttgtataaaaataaagaagaaaaaattcttaagggtagctcaatgattgaaaataaccttgaatttcagtactctctccctcccacacttttgtgtgtatgtatatgttttatttttatgtgctatttgcactcagatgtattttatgagcattgtacgtatgtgattattggtgtaggcttgtggatggtttgtgaattttaagtttattgtttggttgacaggttttgtgaatataatttgaagac

SEQ ID NO: 71429 - DNA, 573 bp, Prunus persica
  Intron number 5 from transcript ppa011013m (locus ppa01101 3m.g) derived from phytozome v7.0 (chr-ID scaffold_6; pos 3085092 to 3085664)
aaaggttggtattcattgcatacatatttgaatgaaaatgcataaataatccccagtgaattgctagcctagttttgtgttgaattatttgagttctatcaaatcttttgttgcaaggtatgtgagaatagatagaactcacctgatggttttctaaacttaagaaagaggcattgtttataagtcatgtatgtagtgaactagatacatgtttctgtcttccagcttctttcatggttactatgggctttgtttgctcaacttcgaaactgaagaaccaatttgcagaatttgttttatcacaatcactcataacttgtctgcttactgttgaggatgtttttattatgagggagtgtttatggaacttcttggttcccgacttccatttgaattgataaaaatatctgcagctcaaaaatagctacttaaagactttcaacaatcttttcatttgttggtagttatgtttcatttgcttgtatagttcagtccatgttttgtggtggaatgatattaccacatgatttgctgatatatttggaacaattactttttatcatagttctgaag

SEQ ID NO: 71430 - DNA, 932 bp, Prunus persica
  Intron number 2 from transcript ppa007005m (locus ppa00700 5m.g) derived from phytozome v7.0 (chr-ID scaffold_1; pos 33093153 to 33094084)
accttggtttcagaggtatctacaatatttagcatatatagcaacttaccttacttgcaacccttcactttttgttcctataaataatacccaatttttataagtaaaacccatgactaggatccaactcatcaagttaccttattaagctcaatatctgatttattataatttttttgattgccaaaatacccctatttatatttcaaagtataatggggtggtgttttaatttttggttccccaatttattgtggtgattccttctaaaaattttgtctgcaattaattatctgctttattattaaaaaaatttaggggccatatgttaaagggaatggcaatcaaacaaaatggggtgattaattgatatgctattaatgaggagtattaattacaattatggcagttaatgaaatgcttgaaataaattaaaaataaaatatgaagtctggtggcaacgatgtaaaaacataggaatactatgacctcttatatcctactggtcatttaaatttgaaattgaatagatttatagagtgatgggtatatatctaggaaatagaaaattttgagacctatattggataagcctgaataaatattacaaggaaaagatccttgagggatttgtaaaccaaacatattacaatgaaaaatatcaaaccagaaacaagtatgtaatgaagaatggcaatttaagcttttcatgttgccagaagagtagaaaaaaaacatctcccttaagatggtcattaaatttgttgaccacctctctcatagaggtgcgctgtatgtgagaagcacgtatttagcaacacccattcttcttcttttttccattgcattatcccattaatgcattagcttagatactaacttgttctatgggtgcagggtcttattgcagaggaaaaggttgattccttcga

SEQ ID NO: 71431 - DNA, 638 bp, Prunus persica
  Intron number 2 from transcript ppa012450m (locus ppa01245 0m.g) derived from phytozome v7.0 (chr-ID scaffold_1; pos 12129640 to 12130277)
tgccttcaggtattatcaattttagtaatttttgttctctttctgcaatctgtacaagcgccttaaaaaattgttcattttcaatatagctttgaatcttaagtatattgacaacaaaaaaaggggtatgtttttcatgttgagcacatcatatatttatgaatagaaaaacttggatatattacacttgtatcaactttcacatgggacagacagtgtacacaaacatattaagtgggtaacttccttgcttcacagtttagccttagttgaagattgttatgatgtcttgttgcccgtacagagttggtttaaactatttcttgtgattgtaccgagagaaagaaagaaaatgtcttgtgaggcctgaccagttatttatttttcactttggttggtgggcactgtcaattctagaaaattttgttttctggttcttgaaagcacgcacatgaaatcctaatgcttagagcccagtactacagtttcattgttttcatgtaattatatttcaaatgcttattctatcaaagaaaagagaaaaagtccatttgcttataatgcctgattgattctatgtcttgcaccatatgctgcttgcagaattttccttgtcaagaagttgaaaggcataacaa

SEQ ID NO: 71432 - DNA, 717 bp, Prunus persica; identical to SEQ ID NO: 70699
  Intron number 1 from transcript ppa014544m (locus ppa01454 0m.g) derived from phytozome v7.0 (chr-ID scaffold_2; pos 23568437 to 23569153 reverse strand)

SEQ ID NO: 71433 - DNA, 566 bp, Prunus persica
  Intron number 3 from transcript ppa012104m (locus ppa01210 4m.g) derived from phytozome v7.0 (chr-ID scaffold_3; pos 21462326 to 21462891)
gggattggtaagttttatcttgaaatgctaattatattaataaataggtatctttcttcttacagacaccagttcaattttaggatattatactgtttgttagatgggaatccttgatctcttcctcagtgaacagttgctgcattcacatatttttcctactacaaaattcaaactgaaaggggttaaagaaactggataatattacacagcccattgttaaataaggtgctcaataatgaaaaaggttccatagttgattgtgttaatctatatctaactggaaatcccaaaacatgatgtatatcatactgcagttttacatttatcgactcaattcgttctttatgttgagataaaatgtatgtgcctgatacttgcagttgagaagttcgctctagttaggaaaaaaagatttagcagtgttgatcttttatacatcagataaacctagtattctatggccactgtaaggtttataccacaatcacggtacaacctcagtaaaagcaaatggtttctttactacagatccaaggtttggcatatcatccctgggaaaggtg

SEQ ID NO: 71434 - DNA, 612 bp, Prunus persica
  Intron number 1 from transcript ppb013294m (locus ppb01329 4m.g) derived from phytozome v7.0 (chr-ID scaffold_4; pos 1996608 to 1997219 reverse strand)
aattgtgagagaaagaaagaacggcgtttcttgcttacatgttatataggcggtttggcttgattgaataaccaaccatattatgaccatattaatcaatattattttttccattcagtcttgattaaataataaattatcattaaaaactattagaccccaatgcacgcatctttaataagcagggcattaatttctagttttgcttttccgatttcgtttgggattttgtttttctgaattagagcaggaatattttggtgattttgattttgagtcccaaataaatgaagttaattaatgtggtttttcctttgttttcgtttccttttattttcaagtttgtgctaatacttccgaaatttgtgagtcttgtttgtgagtcttgcatatatacttccaatccaatccaatccctctgtcctccttcctcttttcctttctttccatctcctccttggacgactcctgctctgttgcatgcgtaagtatttcttattgggcttatttatttgggtggttttgtttcatttctctattgctttaactggcctcaatgttcttcttcttctaacagacctcgtaagctctgtgaactttgagatcagctca

SEQ ID NO: 71435 - DNA, 946 bp, Prunus persica
  Intron number 1 from transcript ppb015974m (locus ppb01597 4m.g) derived from phytozome v7.0 (chr-ID scaffold_1; pos 16024911 to 16025856)
gaggtaaggagcaagtacctcctcaagagaagtcttcgaagataatgaagtcttcaaagaagatgaagtttgcttcatcatctgctgatacagaaccaaccagcgcgacaacaatctctgatgattcaaaggctggtcgaggtatgagcacaatgcctcgtgttgtgaagagaaaacttcagaaactgaggccaattgttgagtacaataaaagggggaaaggaattggccaagcacacagtgagatgcagtcctatattggtgtgttggcacgctccagagtcccacttgtggacttgaaatgggctcaaatccccaaggatataaaggagcagatttgggaagcagttgacattgcttttgtagtaggtcaagggggcaagaactctgtcttagcttctgctgccaagaaatggaaggatttcaagtctacactaacgaggcattatatccttccatacaccaatgacagggagagattaagccaaccccctgaaacatataaattcatagagaaagcacaatgggatgcctttgtagcttcaaggctatccaaagattttgagtctgtgcattctcaacatgcacagattaaggagaaactcgagtacaatcatcgattgtctcgaaaaggatatgctggtttggaggatcaattagaggaaaccatgcctggggtagaaattgatcgatctaccttatggaagagagctagacaggacaaacatggtaacatccctgatccaaaggtggcagagaaagcaaaattaattgtaagcctactcactctgttttaaatttttattaaactgtgaataattcttattacgtcttatgttatattttgcgtcgtgtgaatgatattaccacgtcgacattttttaaaacacgtcgttaaaggtctaaataggaatcacaactctgttttctgtaattatagcataag

SEQ ID NO: 71436 - DNA, 864 bp, Prunus persica
  Intron number 1 from transcript ppa011950m (locus ppa01195 0m.g) derived from phytozome v7.0 (chr-ID scaffold_2; pos 20786601 to 20787464 reverse strand)
cagcaatcagcagcagcacgccaaactcttcaaaggttagcccccactctctattgcccactcaaaaacccaagaaatcatgtttgcgaaattggggtttcttagttgattttggtggggttttgttttcatcaacgaaaaatatgaaatttgattaccattacacatccaaaaattgatcaggctagaaaaagcctccaccttgctatattttggtctgtatgaagaaaatttatcatctttgtgagatcaccatctatttacaattgggctaactggcataagagattaacttgaagagcattaatttaggaactatgcagttttcatggtcatccattggtggttctttccctaatttcctcataggatgagtgttatttttggatgccgggttaggattaggaggaaaatttcctgaggtgaatgtactccaacaatatctgtaacatggaacacttgaaaatttggcagaatagtttgagaaatagagttcacaaattgcattgaagtattagatggtttatttattgtatgttaatctattcatggttttaggatattggtgttatttgcttgttgaccttcaaaaaacagagacatgggcacccatagtatgcgaaactcatcaatttagatacagaagactatgagtatgttgtgagttttgtgactgaacatttgaaaaaaaagaagaaaaacttgaagttccttttgttgatctatttccatgacagtcctcctttgcctctccctttgggctgaagaacttgttgggtatacaattttgattaacttttgtttttctttatgcaaattgttgttgcagagcaatttgttccttctgtgagttctgtactcggg

SEQ ID NO: 71437 - DNA, 278 bp, Prunus persica
  Intron number 1 from transcript ppa019780m (locus ppa01978 0m.g) derived from phytozome v7.0 (chr-ID scaffold_2; pos 20294962 to 20295239 reverse strand)
tgctttctgcaagcacgagccttgggatttacctggtaataatcccttaatctatctcactcttagcttcttaactacccatttctcattaatgatgcatggttatgtatatacaatcaatcttgttctgtttcaataattgaagaactgggttggtttcaattgaaaaaagtaatcttgttctgtttttagttcttgggttggtttcaaattttgatattttgctttgtgttgcatttgcagggctcttgttcacagagccagactctccatatcat

SEQ ID NO: 71438 - DNA, 337 bp, Prunus persica
  Intron number 2 from transcript ppa019385m (locus ppa01938 5m.g) derived from phytozome v7.0 (chr-ID scaffold_9; pos 2014820 to 2015156)
gtcttaggagatcggtactttttcattcccaaaatggtggttttcactcttatcttttggatgctttttaaagtagattatagtgaagcttttgctttaatctcatggagttgttagatggcagcacttctgttttgaaagtttatttccttaatatcattcatttcaacctatgatatatatatatatatatcaattctcttctataaaataaaaataaaaataataaagaaataagtttctttttgttgaaaagaaataacttattgtgccttgtgtattttgatatccataatttataggtccgagtcgcagtttatccaagaaatagttgaag

SEQ ID NO: 71439 - DNA, 630 bp, Prunus persica
  Intron number 2 from transcript ppb016036m (locus ppb01603 6m.g) derived from phytozome v7.0 (chr-ID scaffold_6; pos 14329373 to 14330002 reverse strand)
ctgatccaaaggttgcagagaaggcaaaattaatcgtaagtctcattgactctgttctaaacctgtaaaacagaggtttaatttttcattcatacgtggatctttttattcaccgtcgttataaatgaaaccccacgacgatttttatttaccgccttttaaaaaaaaattacgtcagtatttttataaaaccgacgtctgtattaaattacaacgacggttttgtgtttctgtgttaggttttttaaattaaattttgaactttcttcatattcacacgcgcacacactctctctccctctctatttctctacaattggtttgtgcactatttttggatcaatgaatattttggttgggtttttatctctgatgtcaaataaacgacggttatttcattgaccgacgttttaatatacacaaaacgacggtagttttgcaccaacgtattaaataattttctgcgtctgtttgttaaataaaccatcgtcgtaacccatttaccatttaccatgtcggttaatatttttacaatctgttcagtcactaaccttctctctctctctctgtctctctctctctctctctctctctctctctctctctctctctctctctctcactttgagg

SEQ ID NO: 71440 - DNA, 708 bp, Prunus persica
  Intron number 1 from transcript ppa010642m (locus ppa01064 2m.g) derived from phytozome v7.0 (chr-ID scaffold_6; pos 6702784 to 6703491 reverse strand)
gaaagttccaaaattttccggaatttttcggaatcgtaagtaacgatgtttgataattgatgaaatgggttctcaaatttacattcagtctttccaaatttttatgaaagataatctgatgaggacatctctgtcaaacccattagggtttacaaacaaaagagatggaagagggaattattaattagtttcctaatttatttgttcgttcctaggttctctaagttttccagatttcattagaatttttagtttttccagattttagtaggatttctaagtgaaccctattttatttggattaggatttctttcccagaataagtttaatttttcttttcactctagggttagattattataaatacccagtctatgtaattcattatagagttgagatttgagatattaagaaaaagtttactttccagagattggagactgtgtgaagccaaaactcttttaccacctatattctgtttttccgttgttttcgcttctgctaaattacccaaatactcaattcacccacacccacatcataatttgttcgtttgatttgtattattgtttggtggtcgagtacaatattgtatctgctacatgaagatctgatctggttggtgcttgacatttgtttatggtgttttttctcaactgtttatgttattaggcttctggtttgtggattttatcagttccgtgtga

SEQ ID NO: 71441 - DNA, 576 bp, Prunus persica
  Intron number 1 from transcript ppa002765m (locus ppa00276 5m.g) derived from phytozome v7.0 (chr-ID scaffold_3; pos 2159090 to 2159665 reverse strand)
ttggcctcggtatgagtttaattttcgtcatgaaatttgctgtttttcttttgatatggacaggtgaatgcggtgagtgtgcgtttccagagtacttgttgaaggaagtggaaatgcattagttgtagtgttttttgtaacaacagaagtttgttgatgtgtttttctgtgaatgttatgttgggatagccggttgcttcaataagggcaaaaccatgctacatagttatgctacacttcctgacttaagttattcatatcctaaatggtgtagtaaagtacatcattaccataaaaaatcaaatgcaaacaaattttaaattgtagaaaacaataatatttttatggtatatcaaagcccttttcaattccgaattgaatattaatgcatcagtgttgttggagtgatagacgtgttgctttggtttctttgctgttgcataatatatatagccagtcaagtaagcaaaccagtgaacttaatgctttcctaaaattggaaatgttcttgtttaacaataccagtaaattctttatgcagccgagacaaaaaggtgggctcgtccaaggttccca

SEQ ID NO: 71442 - DNA, 585 bp, Prunus persica
  Intron number 2 from transcript ppa023237m (locus ppa02323 7m.g) derived from phytozome v7.0 (chr-ID scaffold_5; pos 5179297 to 5179881)
aagttttgtaagtgaaacatatactcaattgtgattcttgcactcatagtgtttgtgattttagattgcaaatttttaaattctcaaacttcttgtaagatatggatagatttaacagcaaagaattcgaattaataaattttgattcacttcatttcactatcttaccatccacacatctaagctttttcccctcaattagccttaagttttgaatcttctatttgtagctgaaggttttgcttttcaaagaatacatggcctattagttgttttatatgttgttcattacttcattatcaataatttaaatataaaaatgtttggtacttgcaagaacaaatttgtgtggagctccacaaaaactctattatgaagtcaattttaatgtgagctaaaattggtgtgcactataaacaaaacttgaattgtaaaataattgatgctttgcataaaagcaaagtctgatagtatttatcatcatgaaatttccctttttcttatcaagtggagatgaaattgttcattaacattaacaattgtattgaaggtttttagttgaaaaagggcatttgcgtctcttgg

SEQ ID NO: 71443 - DNA, 726 bp, Prunus persica
  Intron number 1 from transcript ppa021624m (locus ppa02162 4m.g) derived from phytozome v7.0 (chr-ID scaffold_1; pos 27781478 to 27782203)
agtggagctagcacacgctcttttgccttcccaatgtacgtctatataaattttctaaggtgaactatgcatggatagtccctatcttttcatatggatgcactgtgtactaaaggatgggcatgcatacagttttgaatgtataatacagagcttgtgttcatagaataatttctagtattatacatgctcatgcacacacaaaattcagacatacgcatgtctacagtagtttgtgtgcataggaagcatcatctgtgtgcatgctcatgtatgtatatatgcacggaagttcccaaacctaaaacttttcttttattggctaagatcccgaaccttgaactcggtcgatgaagaatatagctttgtttattagagaacaaagaagcgtgcatggccattgtgctactgttctaattgtagttgggcgttctgccatggtacatggccaacctgctactgtttgaattgtagctgggcgttctgctacccttggaactgtagcagaaagaatccattgtgattttacaaccatgtatgcatgtttctttaaccatagaggccatttgtccgtctttaagtagaaacagaaatccttaataataatattttcttttactaaattatcatctatatatttgatatcttttcatgtctctgtgtctcttgcaaatgcaatctatggtttgtgactgttatgcacattttgatatggcagattgacag

SEQ ID NO: 71444 - DNA, 871 bp, Prunus persica
  Intron number 1 from transcript ppa012239m (locus ppa01223 9m.g) derived from phytozome v7.0 (chr-ID scaffold_7; pos 16434126 to 16434996 reverse strand)
gggtggaaccatctttgccttgttagtcacttcactattcaatttcacctgtttttttttccttctttcttattttatttttggtttaggttggtttacttggattggatgcatatggtggtggaaagaatggctacatctgcattaaaaaaaatatatatattgattttgtattctgtattggtttaacattaaaatatgagagaacccccattttaaactcaattaatttatcttggcaagccgtgaaattcttaatgatgactaaagcaaagtcatttcctttcttcctattatatttcaattaaatttattattaatctcttgtgaatgatccctgaaccacgactgctttggttttcgtctaatgtccatggttgtcactgttgttttgtcatcaatgattatgagtatgatatgattggtctgtggaggatgttttagcacttgtggaacagcaatccgtgttttgtgttctttttttttttgtctattaatctgttctgtgtttcactatacaaatttcaaaagtccagatctctggggtaagactgctaggatataattatgttgtatgtgaatgctactggggcattgcatatatttttggctttgtttatgagtatgttaggttgtttgatattctctcaatgaagatgaagattacctcttctcggtgacatatgtagctaactgcagaaccacatacttcttttgtcttcaggagcctttagatatattacattcgaattggttctcactattcacgtgttggtgctctgttttcaacctgtctcttactgtggtttttttgccgtatcctacattgtgtacagaattttgttaatcttgaaccgagtagggcggagat

SEQ ID NO: 71445 - DNA, 581 bp, Prunus persica
  Intron number 1 from transcript ppa010018m (locus ppa01001 8m.g) derived from phytozome v7.0 (chr-ID scaffold_1; pos 39753790 to 39754370)
tatttttattattttctttttctgtcatcttctgggtaagctctcaatcactatttcctatcgtcaagttcttgtcaattgaatttctttcttgtttttgttgcaaaacttttttttgggggggggggggggggggggggggttaaaccagctattaatttgactgtgttttttcaaaaaagttgaatgggggcttaatttgcagttagttttggtctgcaaattatttgttttccactgggagttttggaagcttcaagcttgaattttgggaagcttgagctttcaaatctgtaacttttgagttgtcatggacatggtcagattggtatgctaaactctgatatgttttctgttgagttgatcaaagtagtgctctgtgatttgctttggtggtgtggattttcagttcttaatgggttttgggaagcaaagttttgcaatagaaattgaagcttggtttgtttttaattacatcatgtattgggcttttatgcttgaagctactgtggaagatgttaattgacattttcttaccatttgcagaaactcagcattcagagacagaacaaaagagccca

SEQ ID NO: 71446 - DNA, 268 bp, Prunus persica
  Intron number 2 from transcript ppa008209m (locus ppa00820 9m.g) derived from phytozome v7.0 (chr-ID scaffold_5; pos 11693454 to 11693721)
atttgattcaggagcttgataaaagaagtggtcaggtatttttatgctttggttttgtttattttgttttcttctggatttaccattctcgttttatttagttgaaaatttttgtgttttaatatattaaaatttaaaagtttattagcgtagaatttcaacctctgctgctttcgtaagtattcaaagaaattatttactggggcagataatcgtccattatcatttttcagggagaatctgccatatctgtcgacgacacgcttaa

SEQ ID NO: 71447 - DNA, 689 bp, Prunus persica
  Intron number 4 from transcript ppa009336m (locus ppa00933 6m.g) derived from phytozome v7.0 (chr-ID scaffold_1; pos 10976947 to 10977635 reverse strand)
gacatttcttccaaaaggtaaaccctttagagaagaatactatttgagttatccttttgtatcaccttgaacaattcagttaatctcactgtcatcctttttcatatctctctcaattgaaaaatccaggatttctcttttatgtctttttattgaggtcctcatgccttgctttgatttatcctgaagttttagtttcaattggaattctgttattcaccatgtataagtctccccaactaggcatccatgactgaatggttgaagtgtccaactcacaattgcttcacattcatatactcctttttccgtgtcagtgcctaatatacgttgggaaatatatctagattttagagtaagatgtgtttctattccttctttacatatgttctcttgaatgagattgaaatcaaaattgaatataagcagtgaagatagttgggaaaccatgagtaggacttttgatatagatggcaacatggctattactacctaatgaagtgaaacatgggacaaatatatgctaacttgaacgcttgggagccatgttggttgtctattctgacatcatgaactgagcatcggcaatattggattgacaaagaatgatatgatgaaaagttacaaatgatttcttcattttgctggaataagcttacaggtgttatgagtttcttgattttcagaaa

SEQ ID NO: 71448 - DNA, 599 bp, Prunus persica
  Intron number 3 from transcript ppb007512m (locus ppb00751 2m.g) derived from phytozome v7.0 (chr-ID scaffold_8; pos 1537355 to 1537953 reverse strand)
aaggtgacatcttcaagagctttgaaggcctcgtaatattctccacctagtgatcgtgtgctaaaactgtatgatgtaacctcaccatattttatctgcatggatgacaaaccaaccatgtttttgctatattattgaattcaactccattggaactctggaaacaagcatgaagaagtactttttctgtgtcatcacccatctcatgcaccagatatgaacttaactagactaatcatcaaaatttcaaaagcaaaactaatgttaggaagcatgttcctgagtcctgattagacagcacaccaaagctggtggtattgtactgcatataattcttattggatgaaagacactttgtgtaggcttgtccagttgacatcattaatgtactcgtaagaaacaaaccaggggccatcaaacgtgaaaaggagctttacagttgtactgtgaagaaaaacataaatggtggctgtttgtctcctatctctgtttgactatatacatatatatatatatatatataattgtatacatatgatattttgtttaatcaatgcatttgacttacagtttatacatgtatatgcatgtgcacacag

SEQ ID NO: 71449 - DNA, 970 bp, Prunus persica
  Intron number 2 from transcript ppb007512m (locus ppb00751 2m.g) derived from phytozome v7.0 (chr-ID scaffold_8; pos 1537991 to 1538960 reverse strand)
gcgcgaaagttccagtaatttgatataaccccttgtgttcatagttcattgggtattcagcaactttggaccatctgtctactaatctatgtgaagatgcaagctgtgtgattcagagaattgaatttgagttggctaattccagctagatgctattctcacttgtgtgaaagggtggataatttgggtggagtagcagaagaggattttgacaattatagtagggtggaggtggagctgctatgggatagagttagattttgagcttcactttgtgcttcagtttcatccgaattttgggttttactttcttttacaattgtagattggaaagcagcagttatgtaatagtctattatcagataaggtttttttgtgggaagtctgatggtttttgttgttttggatgtatatctttgatggattaattgcccactgcgtttgtacactatccttattgtttaataaaactattcttgcttctcataaattaataaataaacaatatgtgtgctactcattgtgcacacacttaattatgttgatatgagttttgaccataacttgttgattttcatatttgaaatgcagacaaacaaattgaaatggatgtcagttttcactattaattttttttcctcttgcatttatctgagtgatgaagatatgtgtgatggataaactactttgtatgttttatcagtgacttaaaaaatttgccaactgctatacatttacttttctttttctctacagatctgtttctgtgaactcataaatctaacttgtcctttttacaccttcatcaccttccccaaacattttaaagtttagaggttgtaacacttttcttctcatcttaacataaatttttattaatagtttggttaagcagtttttgttacaaattagtgccttttttttttccccagcaggcaacctcaaaagttcattactatagaaatagttc

SEQ ID NO: 71450 - DNA, 747 bp, Prunus persica
  Intron number 1 from transcript ppa004222m (locus ppa00422 2m.g) derived from phytozome v7.0 (chr-ID scaffold_4; pos 13124512 to 13125258)
gcagcgaatttggtggcggaactcttcatatcaaggtctagacgaactgatatttcttgttctgttggcctgttttctttcattttcgaactgggtttgtgcaaattttgagttttgagtatgtgggttaatgggtattaaattatgttaaacttgtttcagtgaccttatatttcttctgctcggttttcagctgggtttgtgtaacttttttaagttttggtcattaggatactcagattaattttctcttcaaaaattgtcgataaatttgaaggttttattggctagtttgattatgatggtctatacgagggttggttttcagtttgtttctaggtgatttagcggaaattggaggtttgtggtattggagttgtggaatttacttgctgtttgactgctggatattaagttgttaattacatttccggtttgagcctctctggggtttcttttgattgttctgtggattttatgatccaaaacatatcattttggcttaattttctagaatatatgtttcattaatgttgtacttatgaatttgaacctcttgtgtttggttgatccctgtaaaaaataaaatacctaattatggctatttgtgatcttacatttacattagatactgagttcctatgcttagaaaatctgggccattcatcagagttttcgtactcttattacaatattttaaaattgtatctatgtttgtatccaggttaataaggctcaaagttggac

SEQ ID NO: 71451 - DNA, 908 bp, Prunus persica
  Intron number 1 from transcript ppa009342m (locus ppa00934 2m.g) derived from phytozome v7.0 (chr-ID scaffold_4; pos 5146588 to 5147495 reverse strand)
tgcagggtgcatccagaggaattggccttgaattcgtgagcttctgtttcttttattcatttgctttgttgcatacatatatattgctgttttggcaaacgggttgttctgtttcatgttgagagtttgattgagatatagaatttcacttgacaagtgccaaaatatgtaaatctagatagaatcaaaatttcccatttcattgtatattaagaaaaagtttgttattgatgaatatgttatcacagtgattacaacaattgaagagtactattgacattgctttgaaatagccaggttggggtttgcaggctggaaattcagcaaaactagaaactgtggtctttgtattgtttactggaaaatgtatttttgggattttttatcttcagtttcatttcaatttccctgtacaaaaatagcattttgaaaagaggaaggtgggcaacttttggttcaatgacaatgccaatccgaatactttctgtaattgttctcttatggctatcagaatgatagagttgcatttgtcatttgaagaggactatgaagttgaattatattctagcgatgcattcacagttttattttcaattttttggggtactttgcatggttatataagacctctggctgacttgttggttggtttcacctttggaggaacctgtggtactctgcaggatttccatgtaattaatcacccaacacttgatatctgagctcttattgttcgtgcaagatgcatctccaaattgaaatagtcatattatgtcaatatcaattcagacataactggttgtagcctgtaggttctcactttccgtttgtgacacttttctgcttaaaattgtgacagttttcattttatgtataggttaaacagttattggagaaggaaaaaggtc

SEQ ID NO: 71452 - DNA, 1009 bp, Prunus persica
  Intron number 1 from transcript ppa002315m (locus ppa00231 5m.g) derived from phytozome v7.0 (chr-ID scaffold_6; pos 28646744 to 28647752)
aaacatcgagagcctcgtcaaatccgtctaccaaggtaactcttaatttttttttattttttttattcatttacttgtacattctgtttggtttccgggaaaatgttgaacaataaagaaactgtaaatttgagcccggcgttatgttcttctctggttgacccagtaaaatttgtccgagttaatttggcgggtcaacccagtaacaataaatgcagctgtttttttggtcgaatatgaatgcagctctatatcattgttcttcattaaagtttcattgttaacttgttattcgtgtcggattgggtagatgtggtttgggtttttagacccgcactctttgaggctgggtttggaccagacaatgccagcttaaccttaccaaccgtttgggcataggaatgcacaaaagaaagagcaaaacacaagtttggaactttggacctctgtcctttttgtttttcttataaacatttttttttctagtattagtttgtttagcgtcagtgtctttggtatttcttatgcatttattacattttctcatacgacatcctccctacactaagcttgaaaagaaaatgcttgttacttgttaattagggaatgtttaaaatttgaatattgaaataaataaaccaattttatgtgcttatggttgagtccggtgatgttccagtttttaaaaggttttttttttaattttttttaatttttataatttataaaaaaagggaaattactaattgcagtatcactttgtcctgttacaatccagaattaatattttataaaacttttaaagcaagtacacggagctgaaatacatacattttctgtttatcagctgtatatattgattttatagttttgttgactgtccttcaaggatagtaatatatgcctctcctttaaaaaaaataataattaaatctatcccgaatccctggaattaatgtttattttttgtaaatccagaggttgccgaaacagagttaaatttagaaga

SEQ ID NO: 71453 - DNA, 614 bp, Prunus persica
  Intron number 3 from transcript ppa011882m (locus ppa01188 2m.g) derived from phytozome v7.0 (chr-ID scaffold_1; pos 31484011 to 31484624)
gcttgaagaaacctccttataaatttgtaagtatacaagatgaaacctgtaattgaactacgtactatgtgatatttgttcttaaccgcttaagtaacagagaacaccccattcataaggcccagtgctaaaccaattttagtgacttgaaatcaggttggataagtcagattcaagtatcacattaggtgcatgatgcatgcttgatacattctaaagaagtttgttggttttctatttgcctttgtcaaagtcttatacctcattggccttgcaagatattttggtaatgcagtcatttggtttctgaaattcgtgtggtgttgaatttgattctctgaaagccttaattgtaggagttatccatctcatgctgtgccgcttattttttgtcagttcttaagctctaaacaggcttccaaatgctgcatccttgaaatttgattcaaagcaatttttggaacataaaaaatataatatgtaattatactatagatacgtacatgcataacattctaccttgcaattgtgccgttcagtttgtagcagttttaagaagtctttccatgaccagtgatcttccttgactgaactgcactgtttctctttgtagg

SEQ ID NO: 71454 - DNA, 451 bp, Prunus persica
  Intron number 1 from transcript ppa002380m (locus ppa00238 0m.g) derived from phytozome v7.0 (chr-ID scaffold_7; pos 19771838 to 19772288 reverse strand)
taagcttttggctgtgattccttctcacacatcaagtaagcctccttgttttttctgtttcaactgaagaaaagttgcccatttatatatcaaaatgttaaagattcacacaaaaatgcaaactgcattgcatgttcgctaataatgctccttgttttttctgtttcaactgaagaaaaattgccagttaatgtttcaaattgcattccttttggttaattagggaactttctagtgtattggcaaaatatgttctctcttcctctgtacttgactattgggaatttgaaaatcttaccgatggcatgttaagtttgacagaggtgcttcacaaatttgaagctttgataccagtttcaaaatcaattgaatcacagccgagttgaattatgtatgagatgtatctgatttttctctctctttcaaataccatgtgtccaggtaaaaagat

SEQ ID NO: 71455 - DNA, 524 bp, Prunus persica
  Intron number 1 from transcript ppa008762m (locus ppa00876 2m.g) derived from phytozome v7.0 (chr-ID scaffold_5; pos 12502161 to 12502684)
attatattaaccaacttgaaagcagggcttctgaggttctcattcttcccaattcccattttttatatgctttgctgggtttgtttctgagttgggttttggttttagatgcctcttctacttccttgaagtgaaaaacttacaaatttgggatctttatgtatataaattaatgttttcctaattttgtatactattcctgtggttgatgtgtggaaattgtcagttttatttgatgtttggataattggttgttctctaacaaattaaatctgctctatgagaagaattgtgttcatttgattccttcttctgttgttgagacattttatgttgctgcttacagtttgttttctgtgaattccatatagcatgatattgcttgcacatggttgttcatgaaccgagttaattttgttcaaatataatgacaagttatgtgttcagtttatttgttattttgttgttttggcatttgttgctgccactgataatagactgttgcgtgcattaaagattgcaga

SEQ ID NO: 71456 - DNA, 699 bp, Prunus persica
  Intron number 1 from transcript ppa005384m (locus ppa00538 4m.g) derived from phytozome v7.0 (chr-ID scaffold_2; pos 22444081 to 22444779)
gcgctttctggtgctttcttctttctctttatcagtctgattttagctgaaaaatcttaatttttgagtttcgaaggtcgtagctggtttagggtattggagttggtaatgttgctgattgagttggtgtgtgggaaaatttgaccacgggtgaccttctttgactgactaactacatttatcctctgtttggttgctgagaaaatgtgggaaaataaatggaagtagagccagaaattttttgtttcgtagtaatttgattgcttagttaagttagttatttgggtatatttattttttctgttgttttgtcagtgttttaaaaattgactgctttatttgtttccgtatcttttttcatttttccacatttcaagttggggaagaaatttttgttttgttttgttttgttttgttttccttcatggtttcagcgttctgtcatttccttctcaaaatcaaaattaacttactccatttgtcatttggtttggaggaaagttttttgcatttggactgtcaacttcaatttcagccgcttgatacattttattatttttcttcccaatatggctgttttagttttaccatatatgtttgtatatgttttcctttaaaggttcttttgcgaagtacgtttcgttttgctcatgattcttcattgttatactttcacctagagtctggaaagattattac

SEQ ID NO: 71457 - DNA, 766 bp, Prunus persica
  Intron number 1 from transcript ppa013237m (locus ppa01323 7m.g) derived from phytozome v7.0 (chr-ID scaffold_6; pos 9631803 to 9632568 reverse strand)
tccatcgcattccatcatcactcttcatttttaaggttcaaatctctctctctctctctctctctctctctctctctgttatagctttcgttaacttatctagcaaattatgctttgttgtttttatttgattcagctcactatcttgtctgcgatgtctgtgtctcgttttgaaagcttaaactttttgttggttatttctgcgatttcagggaattcatgaactgggtttttcttttcagagaggcattctgattaggtagaggttttgtataaattattaaattgcgtggggggttttaggcgtttcagctccgaaaatgtttctgaaatttgtttacttggatttgtttttggattttggattattttcagcttcaagcgtcaaatttgttctcatatcattacatgcaagtagatattttggtgtttgttgtagttgcttattggttaatggaatacaatcgtgattcgtgtatgtggtattgagaaaatctaactcgggtggttcttacaataaagatgaaataattttgtcaaaaagttttatatgactcgttcccatgaagtaacagcaatcggtatttgcttttcaaaaatctctttcacagagttgcaattggaattgtgggttgtgttttatgaggaacttggactgtagttagttgaaattggtatttagcctttctgaaactcattttttgatcagtctgttgttgaaacttcctcatttaattattaacactaatgttgtagggataaaatc

SEQ ID NO: 71458 - DNA, 1027 bp, Prunus persica
  Intron number 1 from transcript ppa004091m (locus ppa00409 1m.g) derived from phytozome v7.0 (chr-ID scaffold_6; pos 26278247 to 26279273)
cctctaatcttcactcctccggcctagagaagaaggtaacctaatgtttgattgaggttccgattgactggccttagcgcctatatctccatttcccattctaggtgattgggggttttgattgaattgattaatagggtgtttattaggtttgttgaattgggttttactgatgaagataaatatgtgtgttttttttttgggtactttatgcatttgctgctttagttttgattggaattagattggattggttgattagtggttattatctaacgttttcaactatacttcatgcctttagctgaaaaagatgctaggtttagtggcttcataaacattttttgttgttgagtaaatgtcataatttaggtttgattctttggagagttaatcagactactgaagttgggggtatgagatcattgagttcatgataagcgcttaatcgtttttatcctttgtgcggctgctaaatgcatgccgattactctagtgcaatcaatttaggactttagttggtgagtgttttatatttggttgactttaagaccacatgctgacttgttgctgttttggttagtcttgtcttctattatagtttcagatattgcttagggttcagaatgtttagattttgaagttactgaactgtattgaggttatagtgccatttttgttgctgctcatgaatgattggtattttctgggtaactcagttactatatttcaatctgctaatacactcctcagtgtctaagaataacatgctttcatttttttgtttctggatcgattggcagaaatattctatatatgacttgtattaattattttagtttcgagcattgctaggttctgcaattgtcaaaaaccttatgcaatcttcaagacttggaaatgaagggaaattgttgcctgtaaattgaactagttatgcttttacttctggtggtgttgatgtcttgttggggattgtactaattatggttgaatttttttaatacagctagagcatctaccatct

SEQ ID NO: 71459 - DNA, 741 bp, Prunus persica
  Intron number 1 from transcript ppb022557m (locus ppb02255 7m.g) derived from phytozome v7.0 (chr-ID scaffold_6; pos 28590759 to 28591499 reverse strand)
ctccccaattctcaggtttttttttcttctcgtttggggttttcttatttttggtaattttgatgcaattcttttgctgttgtaaattttggggtttgaatcgagctaaatgtgtgagattctatctgggctttgtttggtgattttctgatcaacgaaacgtataattttgtatttttgggtttctcaacctgaatatgtgaattttatgggtctggctggaaatggttaatgcaattggtagtagggtagaagtacaagcggaaaaacaaaaatgtaatttacttctatttagtactttgctgctactctttaattattattaactgacattcctcatgttgggtacgctagttctctgagagtgtgttctcaacataatatgttctttttaagaaagaaaagtaaaacatctgaatttgtgattatgcacttccagatccactttttgtataacagtctctgctttgtaatttcttggtttaaactgaggtttgttaagggactggcagctcaactaaaggacaatcaccataaccaagaaggcaaacgaacattgtggatgttgatagttacaaagttgacaaaagaaattttatttttttggtgtgggagtgaagttaattatggaaagtcttaaatgatgtctagtaattcctgcttgatgctgtttgatatgcgatcttcaactcttatattcttccaggcgctcccatctccaaccaccggaacttttccgtt

SEQ ID NO: 71460 - DNA, 525 bp, Prunus persica
  Intron number 3 from transcript ppa021705m (locus ppa02170 5m.g) derived from phytozome v7.0 (chr-ID scaffold_1; pos 25777474 to 25777998)
cctgcctttacctgcatactggcagtcatctttaggtcgcgccctcctcttattactcaccccaccctctggggttacctattttacttttgtctcagtggaagctattttagcttgtttttctattttacttgggaaattgagcacacgcaggtaggcagtctggagcatacttttggtttgttttgtgttttgtaaagaaaccttctagggaaaaataataaaaaaagtttctgaaaggttatgttttgagtcttgagtctttggccttagtttcccaggagaatcaagtttcttctgctgtatctacattgcagtacttattttgtttttcgaagatttctgtagaagaaccagtgtaaagagttcaataatcattttctcgtctccaatgagaatttcagctgatgagctttctctcatcacagataagactgtacaaattttgagacagcggtagactggtagtttggtaatgtcacaccgtcaacaatttctaaattcattcaactgggtattttcaga

SEQ ID NO: 71461 - DNA, 707 bp, Prunus persica
  Intron number 1 from transcript ppa020913m (locus ppa02091 3m.g) derived from phytozome v7.0 (chr-ID scaffold_3; pos 15437477 to 15438183)
gagctttccacccatctctcttcttcacttcacaagtgagttcttttctgtgtttttctattttttttttcaagaatatcatgtgtgtatgctttttctttgttgacagaagagaagtttgaagaagagttcctcaaaaaggcatctctcttacttgtttatttggattaataattgtaatttgacaagaagactgtaaaggggtgaaagttgtttgctttagttcagtgcaattttacctgtttatgaaagaaatgtggcatcatgtgattgtgttgagttattgttagtttctttgtgctgttttgtctcttgacaatcatttctttgattattcaagcaatggggtgagcctaattgtcaaaagataactagtaaaaactacatgtgatatctgttgacattctaccttaactttgaagatgaatccagtcaatacttgtttgataaaagtccaaatgctatacacctattggtttcaagaaaaatgtatccttctgctaaggttcttctctctggttttctaattgaatttgtcagatttcagatttttatctttgcactaggattgatgtggtgcataaaaggcaaaagaaagtttcccttgcatattagagctatcacttagatttatgttctgcaaaatctctaaatttttatctacattttcagaatcctggggaccccttaccaagacctcctgaggc

SEQ ID NO: 71462 - DNA, 423 bp, Prunus persica
  Intron number 3 from transcript ppa009326m (locus ppa00932 6m.g) derived from phytozome v7.0 (chr-ID scaffold_8; pos 8941873 to 8942295 reverse strand)
ccccactgagttgatcaagtgcaggtcagtgtagctcctctttagaaatgaaaaagacccaatcttgtatacattttcaaaatttttacttcaattttgttgcattatcatgcctatattctcttcggcccttgcacaatatatctgtaaccaatcttagaaagtgttctggaaaaatttaacgtaattgttttgttcattaaatagttggttatccaccttaatcatttcttttcctttcattttgattttcaatgagggaaaaacctgtatgtacattttgatagttttcattaaaattagctttttggcagaaactgttaaaactgttcatcactttgtcatttaaataaggaaatgaaaagaccttatctataagctgtttgcgcttcatggtagaacaggttgcaagcccagagtgca

SEQ ID NO: 71463 - DNA, 907 bp, Prunus persica
  Intron number 1 from transcript ppa006323m (locus ppa00632 3m.g) derived from phytozome v7.0 (chr-ID scaffold_7; pos 20946420 to 20947326)
tctcgaagctcagcgcaacgagctcaattcccgaggttcgatggatttgttttctaattcacacctgtgatgcgctaaccctaatttttttttatgggtttctttacataattggaggaaattttgggtttgggttagtcaattgtcgattgtggtggatttttgtagttcggctattgtatgtttgctgatttgattctgacacagtggtgttggttattggtacttataatttgatgaaaactagcgtaaagatttgatttttggcgagtttactagtatgtgggaatgtagatttttactaggaagatgattcaacaaattctctagagtaattcgagataataatggaagacttcggtcttttcctatctgaattatggcattcttttgtttgaggaaatacttggtactaattttctttgatataggattgcgcttgctgacaccgagtgtttgttgatgagtgaagtaacatttctaacaacccagtcatattcccatttgttgtccgagagtaattataaagaataaatgctgaaaatcaaaccagtttaactggaggaagctaatccagtataataccatagaagataaaatgaatgcatatgtagtcaaaatatcactcagaggatttaacagtattttataacaaaagcattaatttgttatgtgcttgagctagtaagcaatatctatttggttgtaccaatcacgatgtcagttaatcagtgtttctgctttgttgcaatgtgaatataacgtgtggatctggttttgatggagttcttgaagccttttttccccatatttattatccattcattatacatattgtagcaagtcaagttggaactattggattgatcaatttaatttatctaacttcgcaacttgaacagtgaga

SEQ ID NO: 71464 - DNA, 534 bp, Prunus persica
  Intron number 4 from transcript ppa008840m (locus ppa00884 0m.g) derived from phytozome v7.0 (chr-ID scaffold_7; pos 10218148 to 10218681 reverse strand)
gtacagtaaaaatttgggatttgaggtaattgttgacaacacacgtatgctgtgatgtaggatatgggtgaattgagaatttaggtagtttagcggaagcgaaaaccatggaaaacagaaaatagaatgaacaaggataggtctggaatcacgccaagggtatggcttcacaccaagtagtctccaatctctggaaaataaacttttctttatatctcaacaactcaactccataatgaattacatagaaggggtatttataataatctaaccctagagtgaaaaggaaaatcaaacttattctaggaaagaaatctggaaaacttagagaacctaggaactaacaaatacattaggaaactaattaataattccctcttccatctctttcgtttgtgaaccctacaaagatgtcctcatcatgctggttgtgctatctatttttcttttattaagtcttgttcatattttgtatatagtttgtttttcttatatgttgagttaatcacagagctccaggttgtcaacgggaat

SEQ ID NO: 71465 - DNA, 785 bp, Prunus persica
  Intron number 2 from transcript ppa004571m (locus ppa00457 1m.g) derived from phytozome v7.0 (chr-ID scaffold_2; pos 18270697 to 18271481)
tcactttgcaaggtcagtactagcacttctgctacttcacatttttgcttacttatttcatttattttggtttttttttttcctttctaatttgttatagtaaaagcatgggacccacataatttaacttccccaactacttgcctgctaaaattgtatgttgtccattcaatggaattgtgaatctgtgatggtaaggaaaggaaatcattaagtccattattgttaatgcataatttggaaatgcaaccattaaatgatcataacctactgcatctcctttaaacattttaagcaaggaatcttatcgtcaagtctaaaaaagaataataataaaacttagttacaagtatgcctatataccatgttgaattcattgcggataattattctaagacatttgaaacttgttccataattatgatcagatatctattcagcaaatttataataagctaatatggttttttaattctttggctaaaaaggagcagttgaatgataatgcttatatttggtttcattatcttcattttgatacgagctttcgtgttaagtttgatttgtattgttgtaagatctgtcacgactgtgtattactttttgagtttaaaaaatatattgcattttaattaaattatatcataaataccatgtgctggttggtggaatttatatctgattttaatttgaaataagattggctcctttaatttattcagctgtttcatgtgaatttttgctgactctggtgtggctaatcaaatgttgggcaggagggctac

SEQ ID NO: 71466 - DNA, 874 bp, Prunus persica
  Intron number 1 from transcript ppa006880m (locus ppa00688 0m.g) derived from phytozome v7.0 (chr-ID scaffold_1; pos 24960957 to 24961830)
tttgcggccaggtactttactttactttttttaaaaaaaaattttcctttaaatttaaagtgtggtacttttcttctttgtatctcgttggtgggtttaatggtttttgttttctgggttctgtattttcgcttagataatgtagcagcaatgggatttatgaaaattgtatatccggaaatttgcgttaaaaactattaacttttgctgcgttattttcaaagcaatttttttggcatttgagtttaactttttcacttatttccctgagttttcttagcgaccaggtttaatctgtgtgctttttaagacctatgtttctgtgatgctggtcagcagtctaagtatggcaaccagatcagatgggctttcctgcctttgttttgttggcgatatgaaatttggcataacaagagcactcgttttatatatcttgttcttcgcctttcttctctttggttttctgatccattgcacctttctactgaaacttgcatgagttttatgtatctgatacggttcagacacctgtggaagtgttggcccaaagattagttgggtgctgaaagaacccaaaggaaatagaaactgccactggttataaacttttattttctctagattttgtgacttttggtttagaattgacaattgtttctgccaactaaacagatatcgtcgcattcatgtttctgccatctatgaattatgtaaaggattatcccctgtggtagaatgtttgcctagtgaaatgatcatgcactgaatctatatctgaatcattgaatgttcttggaatttcttgattggtggattccagcttgtcttgtgtctgacagatatgccctttactattgtgcaggaatcaggcaga

SEQ ID NO: 71467 - DNA, 614 bp, Prunus persica
  Intron number 2 from transcript ppa002128m (locus ppa00212 8m.g) derived from phytozome v7.0 (chr-ID scaffold_8; pos 9618405 to 9619018)
ggcgtacactgactctgaaattgaggtactgaattatggcatattttacaagagagattttcggcaacgtaaatattatctagtcagatgcttactaaatttattgtagaaatcctttttgtgccaaaataatttcgttgctgaaaatgtattatataagatgctgttgtttcataagcatgatttctctgaacaactctgtaactattagctactcttttgtatgtggtactcagcttttgaacatcttgtgatactatcatcttccactcaatttctgtcattttatcattttgattacttgagagtttttgacatattttggttttacttctcccctgtctgcttaaattggttggttattatgtttgttctttggtatctgtcttccaactttaaaaaatgtgctttctgttattttctatttgactatgaaatattatattatctccatgctttggtaaaaggttaccaaatttgttggcatgtctattctgttgcagatctgatggttgccattttatatgtatatgtgctcgatttcttttttgttatctcattttgctaattgtgaaacaggttctggttattgggacattcttggtaagtcaaaa

SEQ ID NO: 71468 - DNA, 806 bp, Prunus persica
  Intron number 1 from transcript ppa010721m (locus ppa01072 1m.g) derived from phytozome v7.0 (chr-ID scaffold_1; pos 4834059 to 4834864 reverse strand)
gtaagttgaaagcctgtttcttacttgatcgacaggtattagaattttcttttgaatgggttttttctttccagattacttcattattttcccaatttgtagaatttagaaaaagagtgaaacagaagagctggtaacccaatattgcttgcattgaagtggtacccaattggacgcctttcgatctaattatgttttactatagagttttcaacgaatttccagctttggtttccaaatatcttggggttaattccccaaaaaatgtatgatttacatatttggtaagccttgtaagatttagatcagcagtttgatggtttaaacttaattgaatttgggtttctgcaaggtcaggtttagattcattcggtttgtggggttagcttgaatgcaaaggaagcaattggttttttttgtttttgtttttcctttgaatctttacttggtgcacattttgcttggtgagaagtacctgggaaatgcgtgttcacgttttggttatgagggtgctcaagttgagaggcttaaagaaattctcaaattctgttctatatgtgttcccagtatgataatgaaaacaactttttttttttttggttgattattctcttacaaaattaatgagttctaatattttgccactttcacggggcttcttatatacttcttggccatcaaaagaacatgatatttaaaagatttttgttttttcttttggaaacaaaagcttaagagttttgggtattggttgattattgaaccttaagttgttttatgtttgttcggtggcgtaggattttggg

SEQ ID NO: 71469 - DNA, 326 bp, Prunus persica
  Intron number 1 from transcript ppa001257m (locus ppa00125 7m.g) derived from phytozome v7.0 (chr-ID scaffold_6; pos 8226370 to 8226695)
ccgtatcacattttgctcaccgcaatcgcattcaggttcattgttatcatgctttccacatcttcagtttcttatcatagagttactctttgaaaatgggttttgagtttgttatacttgagcgtacaatatcattttggtgaaattttttatgtaaatcaatatgctagtatcatgttctagaagtgtaatgatgtgttgttatgcctgtgcatttctactggtttctaggcatggaaaacttttcttgttactaatatgtcaacatgttttttgtttttctgtttttctctcgcagtccttgctcagaggaagattcttacgaa

SEQ ID NO: 71470 - DNA, 916 bp, Prunus persica
  Intron number 1 from transcript ppa016534m (locus ppa01653 4m.g) derived from phytozome v7.0 (chr-ID scaffold_3; pos 4385057 to 4385972 reverse strand)
cttgtgtgccagtttattggatcaagaaaacccaggtacaaataattttcaaacttaaatcatcctccatttaggtcataatcgaataaaatgattttgttatcaacccttaaatttagattagattttaattttggtctttcattaattaagtagattatacattcacatatatgcattcgtttgcacgttacatgtatctacgtgcataattataatcatatacctattaacgaaaatcaaaatctaatctaatatatgagcttagcgaaaaaaaaaaacaaaacaaaactatcgtattaaagaatgagaattctaatgccccctttctttcatataagttggaagagtttccactttagttcaaacaattacaaccacatctctaatgttttacattaattagtcagcaataaggccaaattcacatgtctacctattctttggacagtttgatgacgtggcaacaacaaaaaaaagaccaaacatacgtcatcaaaccataaaacgaagttaccaatttgaccttaattaaaaacaaaataaattgcatgggtcaaaattgtaatttgacctaatttgtcttgctccttttaacatgagttttttttcttttttttggccaaataacatgagttatctttcgcgtgcagatattgagaaagtgggcggctgtgtagattcttgctcagacagatgcgcctcgaataccttcttaccaccaaataagaattagggtttagctaatcatattatgtaaggccaatttgaaactaaaataatgaattatgaatgatatattattttggattggctctgcttccaaaactagttcttatctaaatgttcacgggttggcacgcttcatagtttaagtctttaatttaaatagaaagaaagaaaaaaataaggagaa

SEQ ID NO: 71471 - DNA, 392 bp, Prunus persica
  Intron number 1 from transcript ppa009020m (locus ppa00902 0m.g) derived from phytozome v7.0 (chr-ID scaffold_1; pos 28244509 to 28244900 reverse strand)
attgaagaggtgcaattggataacaaagaatagtggtaagtttcattgcttcatcacacattgcagaaaactttgatttcttgttttcatgctttgacaaagccacatcttaattaccaggcaaccaaagagaaaaaagggaagaacaaaaaaaatggtcatcgcagttggtatgaggaatctaacgaaaatgatagtgcacataaataaacaaaagaaaaagtcatcaagcttccatcacaaccaactggttgacatttcaacaaagtgacgttgtatatatacaataaatagtataagaaactctttttggttttgctagagtaaatagaataattctatgcagacatgcattgatcgtagaattttgttatgttatgcagataaagttt

SEQ ID NO: 71472 - DNA, 962 bp, Prunus persica
  Intron number 2 from transcript ppa008219m (locus ppa00821 9m.g) derived from phytozome v7.0 (chr-ID scaffold_1; pos 37094838 to 37095799 reverse strand)
tcgctttagcaggtttgctcttctgtgcataatttgatattttgttctcagttattgtttctcggtgccttttttttggcattggaaaatgttgttttgtaaatagaagaaatatataaatttcagactgagttgttgattggggaagtaaaattacaaaaagtttagaatctcgatgggtctttcactgaagaaaaatgatattatagtctcttaaggcttcaaatttaaagagcagcagtggccttggactatcttaaagattattcagtggctatatatggcattgcttgctgttggtgcaggaaagtaggaatgacagagccaccaataaatttgacttcagaccaatatgatttaggatatccttgttatttgagataagcaggctgtcttagggaactaacatacactgtatgtagtggccagatttcgttctgtatttttctcattgctatatgtttttgaaatggaagggtgatgtgaaatttctggaaaccctctctgtcacttcttgtttgacaggcaacttggggaaagtggaagagcggcaaatatgtgccttgaggtttacctacctattttccatgcccgaccccagtgttataagggcactgcattctcatttatctagtaaaatttgcaatgcatatgctgtaaaatgtaaatgccatggttgaagttcgacggattggttaccagttaactaagcatccacatgtcaaataaagggacccctgatttcatttgtttttactgttaactagccctttgatttcatttgttattactgttgaactagtcacttgattttatttgttattactgttaactagctatatgccatggctagtttttacttcccagagtcagcggagctttaacatcactgacatcgatgacatgtggtcgttactttggttgcaggtttaacgttagcaccacttgttgtgaacgtagat

SEQ ID NO: 71473 - DNA, 753 bp, Prunus persica
  Intron number 1 from transcript ppa026588m (locus ppa02658 8m.g) derived from phytozome v7.0 (chr-ID scaffold_1; pos 1963746 to 1964498)
ccttcatacctgtcagtacctctctctttcactctgtgttttgcttttcatgttgatacgattttatgtctttttggatctgatttcttgtgttgtgttccttttcttgacatgggttcttttggtacataagtcattaactttcctagaaaatcctggaaaattgtgatcttgttggcacaatggctccgggtttataggtttgattttgctttaagaaaaagctatttttgaatcattgtgagtcatatacatgttgatattattattaggtaatatggaagaactgcagagccacaatgctttgcgggactgtaattgtgaataggactttaaagatttacccgcattcttaaaggacttggcaagttcatgtaggtagcatacatgcctccaatgtttgtttctccttttaagggctttgattgtcagaaattttacttaattctccatgtttttttactcattcctcctctaatctgttggtttctttctaattttgactcaagtatatggatgtgatctgcgttaaatgttttatgtgccccagtctcacaacctgttggttactttctaattttgactcaagtatttggatgtgatctgcattaaatgttttatgtgccccattcttacatggaatgcagatcaaatgagctgcatgttaattttcgttctgtgaatcaatatgactcgtttatttcggttttgagaacagtttgcaggaagtgcatatataagaagataatagat

SEQ ID NO: 71474 - DNA, 1050 bp, Prunus persica
  Intron number 2 from transcript ppa026588m (locus ppa02658 8m.g) derived from phytozome v7.0 (chr-ID scaffold_1; pos 1964529 to 1965578)
gctgatttaggggtttcaccactggaaaaactcaggtatttgattatctaatctatgtttataaatgtttaaacattggctactcacagaatgcatgaactaactatatgctattctagaaaatgattagattttaatctggactatacaaaccttttatttgatgtacaaactgctcaattagtagcaaaggccctgcaagctgaagttacttaaagggaaactactagtctagtagccacttacctgttattccagtctctattcgacaccagataaatttcaaaatttttgcagagtttaactgatgagtgtagaaccatttttgagaccatctaatgtgttaggaaggaaattgtgtcaaaaatctggtctagttgaccatgtcaacaaagaacacatgcaacggatagttttcttttcttttagtaatcaaatcctgttatgcatcttatgaccaaaactcaaatgataataataagattattggttcatgcaacgatttgttgcaaagattcgactaagttgctggggacccttttttttctttgtcagttgtagcaggggatctttctcaatcttccatgagataaattttacttgataagaagatgttaatactttgcatatgagaaatatgagttctgaactagcagtagcccattttagtgactttacattacattttcctaatgtgtggatgtttcttacttgttccattttccattgttacctcaactggtgaccaaatatatagttgtcttcggaaaatttcatttctcttccattgaaatttcttgatggcctaacatacactagcaattgtaaatatcagcaatctttgaatcttgatcaaatgtgagcctgtgtatttactgcaagatatcgttgattattcttgtggctcaatctatatcttatccacttgagagagacacaattttgagaattgataatatgactagagcagagatccatgcttgttttatgttttttttcttcttcttgtctacagggccgacaacaattgggaagatataagggccaagc

SEQ ID NO: 71475 - DNA, 718 bp, Prunus persica
  Intron number 1 from transcript ppa008920m (locus ppa00892 0m.g) derived from phytozome v7.0 (chr-ID scaffold_1; pos 36470209 to 36470926)
gcaagctcatcagctctctggtatgcatttctctccgtctccgccattttcgttttgagtttttcttgaggtgctggaatttagctgttccgatacaccgttgcgttctcttcgatttctagggttctaaattttgattctctgtcgttttcgaaatcttatcttgtaaatactctgcatttgttattaattgattttgtcgaactatgcaaatcgttttaaatgtttatgccagcgagttggcttcgaattgccagcgtaaggtgtttgattaaatgtgaaagtgattgccagtgtgcggcattttctttttttagcattttaaatctttaatttttatgttttggcattttcactgattttcgaatttcgatactctaattttctcctagactgagactgagttgtttaagtgtgaaaaatggcttttcacactttaaatcaataatcagtagcagtagcattgcttggctttctggaatatcatatccagtagacatatttttgggcatcaaaacaatgcatatgtatacattattaatgtatgtgtttatattatgtacatgtatatatgtatgtatgtatgtatatatgtatgtatgcatgtttctatctatgtattaatatgtacttgtagcatataggttgctttggctgatgagatattcaaatgttgagtacaggccaagcagggaatcagctgtttggagcttcccct

SEQ ID NO: 71476 - DNA, 668 bp, Prunus persica
  Intron number 1 from transcript ppa023937m (locus ppa02393 7m.g) derived from phytozome v7.0 (chr-ID scaffold_6; pos 5213646 to 5214313)
gcttccaggcatgcccctttatcctttttttttttcttttctttatattgaaatttgaacttttggctttgttattgtcaaaattttttttatggatttgtgaaagttttcgatttttattcactcgaacaatcgaagtgttgctttggattattattttacagagttttatgaagcaattttagaactttttttgaattgctgaagcctttcatttcaactgtttgggaatcaatcttgttcagtgttcactttctgctttttctgggactattgctttcttggttctttttagttttggtcttttgttagtttgtggggttggggtggaaaagtttgcttgaattctagataaggtggatttgtggtgtcatctcagttacattgcttgaatacaggctgggaaatggcatatttcaacaataatcaactgttctagaaaggaaatgatgttaaagtgtaaagcttgttagagcatagattctgtactaactaactgttgttgtacagatttacaagtatgttttgctcataggagaatctgattagtgactagttccagatgcagttttctttacatgttttatgtttggaattgtagttgtccaagttttttgaggtttatgctattttccattctagtgttcaggggcataaggagtggatta

SEQ ID NO: 71477 - DNA, 611 bp, Prunus persica
  Intron number 1 from transcript ppa023329m (locus ppa02332 9m.g) derived from phytozome v7.0 (chr-ID scaffold_3; pos 12506749 to 12507359)
caggtttgtgatgactattcagactccattgaccacatagtcaatggattaaaaatttaaccatataattagcagagtattctaaatatcatatataagtattttcacaattcaaattccttttaggactaggcaggaaaagtcactagttgacgaatatctttagaaacgacacaataataagttgtttcctttcgtgacggaatgattcgaatttaggacatcttccaacattgaaagagacaaaatacgattagaccagtttttctattcaattattaatgagtgaagtcacaaagatcccatttacaggcctcacttctattaagatatgattcaagatgtaattcatacctgaattaatcaaaagaaagaatttgataacttgaaagtgaaagggaagtgtagatacgttggattcttcaccttaactaaccagagctatatgcatttcattaacttgaaatgatcaaacacctttaagttggttttgctgctgtaagatgcttgctgatgatgagaaaaaacggttggctccaaaattggatcatttctgttttcttgaaattaattaattgtgtcatcaaacttttgcaggtcacaagacttgc

SEQ ID NO: 71478 - DNA, 613 bp, Prunus persica
  Intron number 1 from transcript ppa006014m (locus ppa00601 4m.g) derived from phytozome v7.0 (chr-ID scaffold_1; pos 40508157 to 40508769 reverse strand)
gccttggttgctaccattttaggtaagttcttcaaatcttgttttcgaaatctttattcggttgcttttggttggatttgtggtaactaaatttgggttactttcctttttagttataatacagtaaagattcattatttttccattttcttgatgagaattcttgggtagcttcaattgggttttcttgggttgcttgaggttttgaatttcgtgattttggtttgacctgtattcttgtggggtttactatttgtgaactgttcatgatgaataaaacagtggaatttggttgttgtgtggttggttgatttgcaattaatacatctaagtaagaattcttacaggtctctgtttttccattatggcttccttgatgattttgttattatcatctcgagaatttcattttgttagccaatttatttccttatgtatgcgtttaatggtgtgttttcgtattcaattgtgcacctcagttgtctggcattcagttgaatttgatgctgaaactacaagttatttaatactatgcgtcttttcttggttaaattattcatgtactttgccggaggaacctgaaaatgatgataaatttgattttgctgcagaa

SEQ ID NO: 71479 - DNA, 876 bp, Prunus persica
  Intron number 2 from transcript ppa006244m (locus ppa00624 4m.g) derived from phytozome v7.0 (chr-ID scaffold_4; pos 14838100 to 14838975)
cttggattccggtggtggtgtttttccgtagaaaagtaggtatctttattggactctgtaaatatcttgcattattgttaaagggcttgcttgtttttaagttttggggttgtgggttttggagaagctcactagtgaagtgtttatttgggggttttgagaatttcactcatcctcatctcagctcaatcttggttttgtttttgtgggtttggttctcagttctgggttttgtctgtttttggttgatttcttggttacgacatagtttcatcgataattatgtgttagtacaccagttcttctgagttagctttgcttaatttcaaggtaaggttcggtgtctgggccttgaacttgttaacgtgggttttggtctccgatttacaagaaatttgtgtttacttctatatcaggccgaagttttgggtttctgtattcttcagtatctggtgttgcttaattttttggtttgggttttgtgggtttttctgaaagttcattattgtaatgtttggcgtctgcattctaaattttgataatttgtgttagtttcaggacattctgagatttagatttgtgggtctggtggcccgtatcgtagaaggtcacaatttggcttggacttgaggcctagggtttagccaaatttctaatttctaatttatgctttagggttttctattttggaattggctttttgttataatatataaatttgtcctcaattttgcttaatccctgagccggtcttccgaattaactatctgagtctaaagttaaagctttctacttaaaatcttaaattggagttacttgagttttttcagaaagatctttgttgtgccttttcaggttcctttcctgggtgttttc

SEQ ID NO: 71480 - DNA, 928 bp, Prunus persica
  Intron number 1 from transcript ppa011981m (locus ppa01198 1m.g) derived from phytozome v7.0 (chr-ID scaffold_8; pos 3987549 to 3988476 reverse strand)
gaaggtaattcaagctttgatatatgttattgagagagtttggcttatctgggttttgtgtagtttattatgattgtcttggttttgatttgaatggaattatgcaattgaaattaagctacaattgcatgggagtgaacaatttggtaaactaaaaatggctcaactgtgaattaccaaatcagtaattttaggtagcaaaccctaaaaatcacatccccaaaagggccaaccaaatcagtaatcctttccctgaaggattactgattttgacttcaaaagtatgtaattttgatttatccctcttctctttttgggacataggccagggtttcatgctgtaggataactttttaaagaacattgaaatgacttggaaattgaatttttgtgaagtataaaataagaagaattcattatttacctggattcaaatgtttgggagtgggaagtatattcaattgatcagctttctgtcaattggtgtttgacaacagcttccaaggaatctacattttacttgtcaacatttccaaggaaccttcacctaaacaaaatcaataacaaatgcaacagccctatggaggagtaaaacttccatgtaacatgtttcatacacctttctctctatctctctatctctctcaccacatgatcatgtgatgagagatagagagaaaggtgtatgaaaatgggatagggaagtttttttccctatgtagaaccaacatgctttcctaacttggcattcaagtgaattacaatgctgattttttcagccttatttgatcctcaaccaaactacttgggtttccatgaacagaaggaattttgtttacctatattggtctgtatacttgtctgacataatttggtttcttgatctgggatcttctttcttatgttatttcctttttcggctttacag

SEQ ID NO: 71481 - DNA, 574 bp, Prunus persica
  Intron number 1 from transcript ppa022900m (locus ppa02290 0m.g) derived from phytozome v7.0 (chr-ID scaffold_2; pos 1579564 to 1580137 reverse strand)
gagatactctgacagtgctctgacaagaaaaaaaagtctacaagttttctctgggagattgaactttttaatcgggtttggaaacagcgcatgtgtatgtcaggtagacgaaaagttgcttacatataaaaccatttcaaaaaaataatacggcggttacatataactacgacgtataaattacaaactacgacggtacatttaacttcgaacgtggtaaataaatacgacagtagtgttgtaggtaccgtcgtagtaaactcaaaaattaaagtacataagtaataactcgcgtcatggtagattatttaacacgtcgtttttattaatttaccgacatggatttctgtaatatacgtcgataataccaacgttgattttacaatttaaacggcggtttttttgtaaggaccgccgttggttttaaaaatttattctataaatttgtcgctttcattcattttcggtttacatttaaggttccaagttcttcctctctcagtctctcacgtctcaaagacaataatttggatgtctttctcaaagagaaattgagcttactcgcatcaaatat

SEQ ID NO: 71482 - DNA, 366 bp, Prunus persica
  Intron number 1 from transcript ppa008240m (locus ppa00824 0m.g) derived from phytozome v7.0 (chr-ID scaffold_4; pos 451138 to 451503 reverse strand)
cccccgattcccgcgaaagcaaacgcgaggagaaggttcctccctcaatcaattcacgttccgattctattctattctattaaaattttgatccgattctccattgttttttattttgaaaatttgaaacaaatcgggattggtggcttcttccatgaaccaagcaattgatttgggatcacttgaggatgaaagttctgttttgctatctttttttggtggaatcaaccaaatagagaaattagtttaatttaaatgaaaaagaacttgtttgttcattggatttaatcaaaagtgcacggttttgaattcttaaatagacataatgcgcatgctgatctgtgttggaatttcgttgctaaccag

SEQ ID NO: 71483 - DNA, 648 bp, Prunus persica
  Intron number 3 from transcript ppa000155m (locus ppa00015 5m.g) derived from phytozome v7.0 (chr-ID scaffold_8; pos 5514990 to 5515637)
gtaaagtgcattgcaaccggtgttcgcagccaaaggtgacaatattaagccactgatttcccttccttatttttatttttaaaaattttctcttcatcttgtacttatttatatatatattttgaatataggtatttgatgtttgatgattccaaaaataaataaataaaatactctgacacacttttcttgatatcttatttatgttgaaagcatgtttggatttgtttcttcagagaatagttgttgcaagtttttgcaaatggaacacaagctttttctcctcaaggttgcatgaggattcagctatttgaattgtcatcaacaacttataatcttttatttcaccttcccattatagatattttcctaaaaaataatttagattttgttcttttaactcattagatgcacataaagctaatgcttgcctggtttcatggaaacgccacataaaagttatattttctttattatgccaatttataagacttgccagattcaattcaacagagctaatcacctcaataatgattctagttagcagattctgagaaaatcatttacttttctcatcttggaagttggaaacctgaatcaatgtatgccattgcagtcaactagtaaaaggtttggtcttcaaaaagc

SEQ ID NO: 71484 - DNA, 398 bp, Prunus persica
  Intron number 1 from transcript ppa012375m (locus ppa01237 5m.g) derived from phytozome v7.0 (chr-ID scaffold_2; pos 18688639 to 18689036)
tgtgaggtcaaatacaccctcaaaagcgctggcaggtttcaattcaactcttgtttttacatcttttttcttttgtcactcgtgatctatttgtggccattttaatcctgctgttggttttgaagaacctataatttttgtgaccatgctcgttcaatgaataaaaaaatgccacggtccggctacagatgaaaccatttaaaagtgtttcgttttttgaaatcaaggaatgagataaaaatcaaattttcattttgaaatcaacaaatgatgagatcaaaatcgaaacccttttgagatgtttgaatgagcttcgatataacaatcgcttgatattgatcatttttctgatttgtatgtatatatacatgtgaattagggtcattgcatctgggaac

SEQ ID NO: 71485 - DNA, 740 bp, Prunus persica
  Intron number 2 from transcript ppa006385m (locus ppa00638 5m.g) derived from phytozome v7.0 (chr-ID scaffold_7; pos 5868698 to 5869437)
gagtaagttatgattgctataactttctgaatatgcatcttactctgtgtcataggatgcctttggcttattttagttctcttaatactggcttaagatgctgatacgacttcctgaatttcttcttctgcttggttgcatcagtaccaggtgtcaaagttgcaacttgttgaacatgtgacaacgtgcatacatatgagtccccttaagaacaatgtatacttattttagcaagtgtcttttttgacaccaaagccattaggatttagatgctatataatcatggtgccttgaaacataagtttaatctggacatggctgagatacccgtatgatcaatctagatgtgcaatctacaaaaacagagatgggcgagcagaataattttaaaacctggtcagatttgaccccaaaagcatacaatttttttccgcccaaaaacaaaaaaaaaaagcatacaatttttattgggggcatggtcatttctagtaacaagtgctgaatcaattacgtgattcattttaccttttcagctggatatcatttagcactgaaggaaagcattatatatagatatatagatacgtatatatatcgatatatattagtagtaaaattattccaagtaggccatcagcaaggcatttgttgctatgattttagacttttaagatattggagcttaatcaatgttatgttctccaggttgtgcaaaggaggtgaactattggatagcatac

SEQ ID NO: 71486 - DNA, 406 bp, Prunus persica
  Intron number 2 from transcript ppa022831m (locus ppa02283 1m.g) derived from phytozome v7.0 (chr-ID scaffold_6; pos 10678409 to 10678814 reverse strand)
ccttcacccacaaccatccaggtctgttcaatcaaacaatcaattagttaacaattctttttttttttttttttttttttgagttgaaactaagaccttacccaacaaagaggagacaactccactagaccagagaagatcgttagaaagttgtaaaaatttgaataagtctatgccatttaataagggtaatcatggaaaataaaattgaagcttttactatattaaagacattgtttaaaatacgagaggaataatacatcgcatgaaaagaagtgagaagttccaaaaacaaggttagagtgaaggctagcattctcctatttaaatatctagatagttaaattaatttgtgtgtttatttctaaataacattacatttggttaattgcagaaaaaatcaccg

SEQ ID NO: 71487 - DNA, 619 bp, Prunus persica
  Intron number 1 from transcript ppa009126m (locus ppa00912 6m.g) derived from phytozome v7.0 (chr-ID scaffold_7; pos 20694571 to 20695189 reverse strand)
ttgcagcccaagttggtgcggcaggacaagaagatgcggcaaagaaagttaaagttgatgcggagctagagccaatactcacagcagtcaaaagcaagaagaggaagaaaaagaagagcaaaaccaagaagaggaagaaaaagaagagcaaaaccagagcccctgttgatgcgccagagccaatactcaaagcagtaaaaagcaacaagagcaaaaccaaagcagtcaaaagcaagaagagcaaaaccaaagcagtcaaaagcaagaagagcaaaaccacagcggcaaagaaaattgatgcggcaaagaatgttgaagggccaaaatatgttgaagtgggttctatttgtcattggtgaatctaatttttatttttctttagtaagttgataataattcctagtagttagcataaattggaaaagaaggattgctcgtgtttatatattgcgtgtcttgttgtttaatcatggaaatgttgtgtgtgccttgaatcaattttgggtttttttcttattgtttgaagaaattggttaattgtaatcttttgggaagttggggttatgattaggagtcaaatttatagtgatgttctggttttgatgtgttgcttgcagat

SEQ ID NO: 71488 - DNA, 626 bp, Prunus persica
  Intron number 1 from transcript ppa012552m (locus ppa01255 2m.g) derived from phytozome v7.0 (chr-ID scaffold_1; pos 23797370 to 23797995 reverse strand)
gccattgcccaattcatcaagttcttcacctcctggtacttgtctatctcttttttacacaattcttcggatttggatcttgcccaattcatcaattcaggatttttttaatgcatgttgctttgcttcatagttcttgtttctgattgactttttcaatgtacccagaaaatgggttgaattgaattgtaccatgcatagcttttgctaactagcatttgcccagatcttgattcttgaggtgaaaaatgaaatcaattcactattcttttctttttaatatttatatataaatttagaaggtcctttaatcaaaacaacaataagccttaaaaaatttaccaaccacacaatgcaatatcataattgaatgagtgttgggtgaatttcatagctaggagtctacagattggctaaatttattgattcattggccatttgattcctatgagatggtataggaaggaaaatgaacttctgtagagcaattctttaggggtacttgttctttccttttgtgacaagtctcaagagtagagatgttcttgatcatttaggattgttgactattagtttatcctaagagttcttaaaccttgatagatttgcaggtacaaggaaagacg

SEQ ID NO: 71489 - DNA, 398 bp, Prunus persica
  Intron number 3 from transcript ppa007338m (locus ppa00733 8m.g) derived from phytozome v7.0 (chr-ID scaffold_7; pos 16982461 to 16982858)
ttctggcacagactatcaggtttggtttattttattttatttttggttgaaattttagctggtagtattatttgttttgtttcagttgcattttgtatatgttattgacttcttatggaaaaactgtgagaaatgtatagaaggaaacatagaggaaatggtctatggtaaagtttctgaggttcgcacgtgtggtttcccgagcagtgtttttgcttctgtattcatatttttatgttcaagatttaaatttgtgaagaatagtttatggtcctgggttttagttatctcgtttgatttagagccgactagtcaaatcttcttttggacacaagtaataccttcttgatgctttctgaagttgtggtgatatctttgacataatgatttgtttgcag

SEQ ID NO: 71490 - DNA, 892 bp, Prunus persica
  Intron number 3 from transcript ppa003033m (locus ppa00303 3m.g) derived from phytozome v7.0 (chr-ID scaffold_4; pos 23720241 to 23721132 reverse strand)
aggtgtggttcctttaatgttttggttcttaaatctctccgttcttttatctagtccttatcatatggtgatatatggatgaatgtgattagtagtactaccattgtatccagagtgcaataatttgtagaaaaaggtccttgatcaactataatgctcagtcaaaacacaaacacaaacacaaacacacacacacacacacacacacacacacacacacactctctctctctctctctctctctctctctctctctctctcttcgtggtagtttggagtgggtttgaatggctgatcaagaggtagactacttgtaagatgcataggctagttgcatggtgtgctgtatttcgtgacgtttaccggttcaccatatgccttgtatcttcaccaatattgaaattttgttttgattgactaaaattttgtaggccttaaagagctccagcaagatattagggatgcagtatggatgtatatgttcttattattggtcatttggaagaaaatccttgagcatccaaaattcttgtcaggaatttttcttgatatatgcattcagtgcttatcttcaatataagatttcctttaaaatgggttcttgtaacatgcaggatttttgttataagttctatatcctgtcacattcctgatatttgtaatatatcaagatagtttatttgtggattgcctcctttcagggtttcacatgattaggcacagaacatagaaattaagttttgcaattcattggccatacgagaattgtccttcatatatatatatttcactcaatattgtaggggataatgcttaactcacatttgtttttgcctcctgtttatttgtgtcacatgttgttacatgctatctttttctaaaggcttgtga

SEQ ID NO: 71491 - DNA, 378 bp, Prunus persica
  Intron number 3 from transcript ppa003862m (locus ppa00386 2m.g) derived from phytozome v7.0 (chr-ID scaffold_3; pos 20145040 to 20145417)
ttgcagtaagtctatatatctactcacttttcttctttctttcttactagttttggttcttcctcttggttcttcctcttgtctcttcttttggtaaagaatttaaaacttaccagaaactattatggttaatttgtaattttctggaatttgtctgatcaagatgcttcagaatgatggattaagatggatggagcctgagtcatcgtcaccaaatcttattttcattagaatatttgggctgtctggtcaagataattgaagatagtttgattttagtgtgtgtttgcttcgtcatgtcacacttgtataatttatgagtctgtatggctttgttttttaggggcttgtggccttaacatcaacagcattgaccag

SEQ ID NO: 71492 - DNA, 1012 bp, Prunus persica
  Intron number 1 from transcript ppa009249m (locus ppa00924 9m.g) derived from phytozome v7.0 (chr-ID scaffold_1; pos 17805605 to 17806616 reverse strand)
caagacgtcgacttgagacaggtctttcttttctctctctttgggtccagagtctctgctatttttctgactcaatttctgttatgagttttagcattttttggtctgctttcccaaatgaacactattttggttttgggtttttatcagttttggtgtctttcaactctcactacctcaatttagcttctgggttttaatacttttgtctgtttcaattctcacaacttaatttagcttctggttttaataatttatctctttcaaattgtagacttaattatgcttcattgaaactgtataaacttcagattaaaatgtttgttcgtctcttttcagttagagataattttccttgtgggtcttttggttttcaattttataactcaacatttctgttggaatttagaagcgtagcttatatttaggccaaatggttatacttgtatagagctcagtagggtattgaaacgtagttttctaacggtccagggtcggatagctctggggcgcgtttgtttcatgaagattttttcctttttgaaatatttttatgtttctttcaatttcatctgtttcagaatggagaactcatgattgacagtaatgatatttgttatttcataaaaaagaaaagaattatttattttttttggtgataacgaaatggaaacaagcaataaagactagatataagcttaattttattttccttgttccatagaataaacatgggaataaaagtagaactattcagttcattcctgtgcttctgtgctattttcatatattatgaaggccacatctttttcttctctgtcatgatacctttgttgatttcacttttaaagttgaagaagttcttgaatctttatgtttatttgttactgcaaattcctttagcttactaggaaagtatttataaatcttttaacctaagttatttcttatcattatgtatactgacttgtgattttgtggacttgcagatattctagctttgtgtacagga

SEQ ID NO: 71493 - DNA, 510 bp, Prunus persica
  Intron number 1 from transcript ppa003052m (locus ppa00305 2m.g) derived from phytozome v7.0 (chr-ID scaffold_3; pos 2191442 to 2191951)
tgaatcaactcgctcgccactcgcacactcctgtgagccccatcttacttaatttcatattcaatttggcttccaatgtgaaaattttcaccaatttctagtcttttggtactttttgtatacgaattctagctttcagtgtagtttcgtttcgtttactttgcaatttagcctgaaatggtacttatcccttaaaagaaatgtacttttatgtaactaggcttggaaatttgcagtgtttgtagcaatatagtttggcatataaattttcttccttttgcggtttgctttgggaaattttaagttttgaagggtagctctgaatatttgatttggaaataattttgcatgtgtttttatttctagtagatgggtttaggcgcatttatattttttggtggataaagttttattttattttattttggaaactataaaagttaactttatttatttactttgttttgttttgtatttcttttggggtttcagtttgtgtatttgagttgc

SEQ ID NO: 71494 - DNA, 415 bp, Prunus persica
  Intron number 1 from transcript ppa015254m (locus ppa01525 4m.g) derived from phytozome v7.0 (chr-ID scaffold_2; pos 4118063 to 4118477)
agctcttcctcttgattggagccacagctgctgtagtcggtatacacccaatatctctctatctctctctctctctctctctctctctctctctctctctctctctctctctctctcttttgtgtttatctcaaaagaaaaatgctttatactccagtttttctctcaatctttttctgacttaggcgtgggatggaacctaaatgtttgggtacccatgtgagagagttgggctgttatagctgtagcattttcattgtcagcattggttcagaatttttctttgccaaggtcaaaaattgggtaattttattggaaatattgactgaaaaagtgaactgggtttgatgtttaatggtttgtaaattgtaagaccaaaggatttgcctagaattgctagaacagcagggaggtt

SEQ ID NO: 71495 - DNA, 755 bp, Prunus persica
  Intron number 1 from transcript ppa009226m (locus ppa00922 6m.g) derived from phytozome v7.0 (chr-ID scaffold_5; pos 9366054 to 9366808 reverse strand)
ttgccttccctctcttgatcttgttccattttctggtaattcccattcccctaaagtttttatctttttaaattttatgtttaattcaatttgattggttgttaaatgctcaaaattttctctttctagaaattatatgcttacataaattcacatacgcataggtgatatgcagatatttgtagttgtatattgagctagaaaataaacagaaagtaaaatgctttgaaatttgttattgatgtttttgagccaaagacaagcacttgggtaacaaagctagtgacttgagttttcaactctcaacaagctgggtacttggcatttattggacattttctttgccactttgaattagagggaatgttatttctaaaggtgaagttattaggagaagagcgaatcatgaatgtgagggttgtgctcgtaattaagaggattgtagtttgtacattgctcttatcttaataatttttttgctgtggcaataaagctttcctttgggaaatgttatcgctggagattttgaattgctctgggaaatcttattgatgcatgtgagtgtcgtaaattgctctggtgggagtaacaatttaaacgctgtccattttatttggaacaagcaactgtaattggagcttttagaatttcttttcctgtttcaagattttgaattttcccattttaaacacttcaaattaagaagggtgacaaatttaacattgaaagtattgagtttggttatgtagttggtg

SEQ ID NO: 71496 - DNA, 434 bp, Prunus persica
  Intron number 1 from transcript ppa006340m (locus ppa00634 0m.g) derived from phytozome v7.0 (chr-ID scaffold_4; pos 8494082 to 8494515 reverse strand)
tccaatttgctttctggtttgacttttattgtgactcattttagttttcttatacttttcttttttgatgctatttctcgtctgtgttttgctttcttttaaattgaggaaaagtagctgtaagaaattacattaccttatatttagctattttttgttttttgaaccatacagaactaagttgatatttttttcaaaaggttttctttggctacttttctggtacttgggcaattgagaaatttctcatttttcaaaattatttataaatttcatcttagaccatccagggaagaactcattgaatttgaatgtatgaaataattaaattgaaattaaatttgtaattatttgtgctctgttagacttcttgccatcctattacatctttttcttgtcttgtttcagtattacccaagtcttaatagatcaag

SEQ ID NO: 71497 - DNA, 837 bp, Prunus persica
  Intron number 1 from transcript ppa025635m (locus ppa02563 5m.g) derived from phytozome v7.0 (chr-ID scaffold_1; pos 28049695 to 28050531)
ctggtagcggcaccagatcgaaggatccaaacacaattgtggcaacgttcgcatctgcgatttcgtcaacgtccaactcaatcctttcttgcctagccaagttcataattagctccttcaacacgaagtacttctctaccggatggctgacaattcggtggtatttgcaaaacttagggtcgttgactcggttcatctcttcaggccgcttacattctggcaattcgatcactttcttttcaagtaagtcctcgagcatacctgcgacatcggagtcagggaaggggtacgttttttcctctaactccttcaaagtgcgtcgacgtctatccacttctcgagatggctccatccttttgacttctttcttcttgtctcgggtagagattttgacggggacggtgtttattgtcattgcttccttagtaggcttcttggcaggcttatctgtcttttgtccaaagactttctcatttctttgctccatgacgggctcatgctttcctccgtgactagctatactcaactccatatcatgggcacgagtggctagctcctcaaacgtgtggggtttaattccttgtagaatgtaaaaatgcattccttgaatgcacatctcaaccgccgataactccaaaagcttatctttgcaatccaggcttaacgagcgccattgattgatgtaatcgacgacaggttcatctttccattgcttggtatttgtgagttccatcatactcacagtgcgacgagtgctatagaatcggtttaagaattcttgctccatctgatcccaattgtcaaaggaatcggactccaagtctatataccaatcaa

SEQ ID NO: 71498 - DNA, 644 bp, Prunus persica
  Intron number 1 from transcript ppa021456m (locus ppa02145 6m.g) derived from phytozome v7.0 (chr-ID scaffold_12; pos 549675 to 550318 reverse strand)
caaccggacaaacgcttcggtcgagcggccgtccggtgcgtactttttgaacttaaaatttgcaatttaattatactacatgatcatatgcgtgacatatatacatatgtgtgtttgaattttctgtttcatgaaaaaaaaacttttgttgattaaatttgcaaaatggtacaatataaaacgagtcataagaagtggggttccaatatttgcttgagactattgattattttgtgtgggttccatagctggagactgggacaatctatgaatgttgcaaccccacaatgcttttggtaagtgccatgcactcgatcacgatcatcatgattcaatgcaagtttctataataggcctcgattatgataaattttgattagattactctttttgtttattgcctaattaagcatgaattaggattgatattgaattactcaattacgtggtataattgataaagaattaccaaattgatagagaatcatatgaaatgagatttatctgaatcttctcatttattttgatatatatagttataagatctgtcgaggatcttccttgtaattttcttgctttgattaacaaaaattaagttttttctaaatttacaatctagtctttttttggtgcttgaagatttt

SEQ ID NO: 71499 - DNA, 1064 bp, Prunus persica
  Intron number 1 from transcript ppa012392m (locus ppa01239 2m.g) derived from phytozome v7.0 (chr-ID scaffold_5; pos 10467869 to 10468932 reverse strand)
aatttagagtgcagaagaccggtcgcaaaattgaggtaacattttcttctctttcgtgcttctgccttctagggtttcgtttactagcactcaatcttggttttgggttatttagtttttcaattggttcagttgtgttagcttgtggttgttgttgagtaactgactgctgactgagccaccatgatgggagtgcttgtggtttaggttgtgttaatttggcccattgtgctctgattagcttcatgcaagtcttatattctagttgcatgttagattcacttgcccttgatgatgctggtgatatgtgagtgtttctgtgtgtgtgtgaaatgtgggcctggttgatgaaaaggggttgcatgctggtgttgttgcatgattgcattggtttgtagttaataaattttgcattttgaggagtttcagaaggtttctgttttggaataagtgaaattgacttaaaatgctctgttttaggagtttattggcttcacgacaataatctagttcgtaaaggaagcttttgttgtattagtgattttggaatctgtatgtctttctctctgcataagtttaataataagatttagacagtaggtggtgcatgaggtgttgttgactgatattgttgcacataaatgacagtatagagttggtttagatgtgagcatgagttgtgactcactaaactcacttttatgatttcctctgttgatgtgtgacataattcttgaactggaagcaggtgcaaaatgactgttctgagagaaatgttggaatctgaaccaaattggaaatcttatcactatgttcgaggaacaatttttaaccttttccttttcctttccagtgacctaattgagcaatacagttagaaaagtatgtcaacttggaaacagaataaataattactgtcgatgtgtattaaaacaggaaatatattagtgaactaatacagaaagtttagaatcaaaatatcctgtcatggtgctatcactaagctcataatcacgttcgcatttgcagttttataccaatttggaaactgggaagaacttctt

SEQ ID NO: 71500 - DNA, 833 bp, Prunus persica
  Intron number 2 from transcript ppa016849m (locus ppa01684 9m.g) derived from phytozome v7.0 (chr-ID scaffold_5; pos 5187811 to 5188643)
caagttacgtacagtactacaagtgagtaaaataaccctatcactacatatcttgatcatattcactcatattgttcttgtcccaagttattattagtaataaacctctacacatggcgctaaatatttgaatcttcacttagccaatgggtatagctcaattggttgagctctagctttcctccatttatataagccgaggtttgatacccagacacccaatgaatatttgtatgaaccccctccctaatagcttttacatactcaaaataaataaataaatcttgacttatgtcatctactagtggaatcttgcaaatatggttaccaataactaagtgatcatgttgacctccaaaatctcttcggcggcaggtctagtctaaagagatctcaatgaacaacttgaaaaggatgtcattgggattggcttcgcttgcccctcggttctttggctgctcatttggtggccgactttgcctctaaatcttgtgtttcatgtgtgattgggatttgcttgcctcctccttggctgctcccaacacttgaagatgtaaaacgtaatgaatttccattaccattccaggaaaaacaaatcatataaatatatttatgtgaacaacttatttaaatttagtggtggtgaggggcttctagctcaagtggttaagagcatttatccttgtatgagaggtcttaagttcgatttcttcctctcttaatatcgcttgtattaaaaaaatgcaacgtggtggttgctacccttttcagatctctaatggtttatagaatgtcaaattcaggtgtatcaaggaggaagacaaggtacctaa

SEQ ID NO: 71501 - DNA, 402 bp, Prunus persica
  Intron number 2 from transcript ppa009692m (locus ppa00969 2m.g) derived from phytozome v7.0 (chr-ID scaffold_5; pos 6344832 to 6345233 reverse strand)
ggggtacgttatttattttgtctcttttgctgcctaagccttgtttggctggtgagaaaatgcaggaaataagaatgacatcaaagttgtgttgagttctgttctctctcagaagattactaggaatgtagtttcagaaaatacataaataaataaagtgggatgtcaaaatatgcatttttcactgacttatctgaatgtaggattaaacaggccactgtgactaaagctgaaacaaacctttcttaatttgcttgtcatttgttttttcgtcattcaatcctatgataagtgattgttaaaattgaaatttaattttgatcaaaattcgtctttaattttgatcaaaattcgtctgcttggttagatattaaacaagagggcagttgaggcagcagtgca

SEQ ID NO: 71502 - DNA, 752 bp, Prunus persica
  Intron number 1 from transcript ppa006288m (locus ppa00628 8m.g) derived from phytozome v7.0 (chr-ID scaffold_1; pos 5014149 to 5014900)
gcaaagaggagacacagagctcgaacacaaaaaaggtaaattttccaactttcttgtaaaagaaccattattttagatctgggtcagcataataaatactcaattcattgatatttttcatttctgattttgtttttccttggacttctcaattccattttgccctggttttcttcccattttctcttttttactttaccattagattttttatattccattgtacatctcttcccattttcttttcaattatttctgaatttcaggtgggtttgttgtttagattcagaattatattttctatttggaaatttctcaacgattctcttgaatctttggttcgccatgcagcattaatttctcgatgggcttagaatttgcatcacttaatttcacagaattgtcttattgctgaaccaactgaataacttttcaatcattttcctttgcaccgcctcttcactgtttccaaataatatacttcccaaattatctatattatttgcgtttttttctttttgacatatttttgatgtattttggtattttgaagctctagatttgtttagtgtttttcatttatcttgtatttctgtgaagtttaaatcacgttaaaggaagaaaaccaatgtgaattttgtatgaagtagacaaaaatatattgcaattgttctgctatgttgatttctgattttctttgtgccattgtggtttcaggttttgtgtctcctcttactgagaaagtagagctg

SEQ ID NO: 71503 - DNA, 961 bp, Prunus persica
  Intron number 1 from transcript ppa008247m (locus ppa00824 7m.g) derived from phytozome v7.0 (chr-ID scaffold_3; pos 18152060 to 18153020 reverse strand)
accatttcaagcgcaagttctaccagcgcttcatcgtccgttctctcatacccgctctttcttcttgttttcttcacaatttctgcacccagtactaattgattgctaattagcattttttttcttgggaatttggactatggacacttgaatctcaaatgggtttttctgttttgtgtatttggggtcacttttccaattgggtattttaggttttgttctgggtttctttgtttgttgataattttgggtatgaattttactttctttgctactgcgatcttctgtgaattgcttcattttcctttatgggaatttgaattcgcttgcctattatgtcttttgcatctcgctcactgtcacttgactagatgcacctcagacgaatagaaatttaatttagattcaattgattttgtcattcgggctttgattttggagagcctacttgggagcacacttatttttagttgttcattcagctcagttaattgagcaattgagttcacatgtaatggttaaaacaataatttcatcttaggctgacctggttttggtttccataagttgtctcttttcccaattttatgttaattgtttaaggacattttctctgtgattaattccattgatatcccagcaacataatttgattattttactgggagatagatatttcattcaatgtttgcttgttaaattttctcacaacttttcaaaaaagaatttttaccacatgagtacacctataaagtcatttggttgaagagttatgctattgggattgcgatatgagaatggctttgttggttgatgtctttgggattgtaattggtaggcgttgcatggcttttggaagtagatgaaaatacaaaatatcagattttgatttatctacacactaagtatagcgtttccctaattctttgcatcttgattttttgaataggatcctgatctt

SEQ ID NO: 71504 - DNA, 693 bp, Prunus persica
  Intron number 2 from transcript ppa017605m (locus ppa01760 5m.g) derived from phytozome v7.0 (chr-ID scaffold_6; pos 28523624 to 28524316)
catttcatcagttgagttttcttttttcttcttttctttatttggtttttctttttaaaacacatacatatatggtaaagtctagcgttttcatttctgggttggaatgaatcaagaagattttttttaccttattattgcctaaaaagtttggtggggttttaatgtttttggactaataatcatgctcatttgtttttagcaaattgttatgccgatccttttcttacgaacaaagcaatccctttcaatttccaacttgaggccccttccgactttattttactagattcctctttattttttattttttgtaattattgaggacggtccaaattcttgtcttgttttttgttttttttgttttccggctgtttataattatatatactcaaccacttatattattgattgtaattaataaatattacaatagcattatttttctctcaaatcaaaactcaaaagtagttttttttatctaaaaaaaaaactcaaaaagagtttaatcccaaggcaactccgatccagagatgcacacacgattggttttgaaaattgggattaatcccaaggcgttgcgttacactctcaagtgttgactctattacttgtttagtgttgacttgaagagatgattttgaatggttggtttgggtttgggttatgtgggtgagcaggagccacatagag

SEQ ID NO: 71505 - DNA, 700 bp, Prunus persica
  Intron number 1 from transcript ppa017686m (locus ppa01768 6m.g) derived from phytozome v7.0 (chr-ID scaffold_1; pos 16668043 to 16668742 reverse strand)
gcgttgcttacaagttcgaagctttctgcactaagagcattaagaagtgtcttgattgtgtacacggatgatgtgagttgtctcttagactttggaattgctttcagttgcgttctcagagtcagaaatttgatatctatagctgctttttatggtttaaaatactttaaagctaattttagtttaaaaaaattgttgatgtctaatatttcaaatatctgatttctcatttcaaagtttttgaaagttaagcagtattagtgatagctcagttgatgaacactgtgctgcaccttgccatgtctaattagggtgctgaagaatgaagcaaaaacactaggacctagagctagaataaaactctcatgatatatcaagtttcctatcgtcaaaactggggtatgaatggtataagcatttaattgtaccagaagaatactgattttattttgaaatacagctgtaataattttctaatgagtgtgacgaagtcattgcattccatctaatcaagaatatgatacgaaaaactgagttgttgaggttttaacatatagtgaaggccccaatattgtgttggaagaaatcacatgatctaaacagagttgcttctctatcttatgatgtatgcgcataaaagtctgtctttgtctgtttgcattcttgtactaaaaacatcaggttctggcagctcttgctt

SEQ ID NO: 71506 - DNA, 706 bp, Prunus persica
  Intron number 1 from transcript ppa008612m (locus ppa00861 2m.g) derived from phytozome v7.0 (chr-ID scaffold_4; pos 5595056 to 5595761)
ttttcccccagtctctccctcagatccccttgaaggtaaacttatttttattagttttcgctgttcctcatttttccaattctggatggcaagaaagctactgaatttcgtttgaaaattttcattttgttattgtgttgcttttgcttcagctggatttctattgttataattgtttgtctggtgcttttcttaatttgattcatttggttattgtgaattgttgaactatctatacagtggaaaacaatgaatttggttggttggagaattttcaaaaacaataatccagtgggtaagaaactaagaattgttaaatagattatccgttaactacccagataacagagcctggctttagactcatccaacggtccattagtcagcttgaaaatttcctttcagtcctaattttctaatcaagatttgattttctaattatatttagttctagctgaattgaagaaaatgttataaatttcattacatagatttcctttcaatccattcaaccggcctttgattgggaatttgatcccctctttgttcaatattggatgaaatatacacaaagggtggaaatattttgtacttttttagtctcttagaaccattggatgaaatatccttgaggtcatatataattgatcaaatatagggaataatactaattgttgcatgtgttgattcttcagcagactatcaa

SEQ ID NO: 71507 - DNA, 650 bp, Prunus persica
  Intron number 1 from transcript ppa025873m (locus ppa02587 3m.g) derived from phytozome v7.0 (chr-ID scaffold_8; pos 4652123 to 4652772 reverse strand)
ggcgtcctaaaaagggtaagctacacttacgacatcttcttatggactctgcttggagatattttttggaataatataaaggctaggaaacggcaataaagaactttgattttaggcaccatcttttagtgtaaagcttaccacaagtaaggtctgtctttggactcaaaggcttcttcacaatacatatatactatgaccagacatgtggtacagtaattcccaaaatccagtagaaaatgaatataattacataactacataacatattttccaatgaaaatttgttcatttttagagcttgatttgataaatccgcagatttagaacttcattccagagaattgaaccttctcaaactgtttcttctcaagaaccaaaaagatttgtgccaaactaacagatgccaagaagagaaaaatatctacatgtatagttgaaatggtgttagtagattaaatttagatggagaaaacttgaggcatctatggttatttgttggttgataacaaaatgcttctaatggtataatcaataacttgaaggtactcggatttttttttactccagtggtggttttccactcttaattttatgaagacaatcattatgcaggtggttgtgggggtaaaggcacctggggagggtta

SEQ ID NO: 71508 - DNA, 992 bp, Prunus persica
  Intron number 1 from transcript ppa012475m (locus ppa01247 5m.g) derived from phytozome v7.0 (chr-ID scaffold_5; pos 13739504 to 13740495)
gcctcctctcctccaccttcctctcatcaaatccggtgaccctctcgtttcctttccttttttttttctcgcttttttttgttgggttgccgatatattgtgggaagtgttgaattcatcgggtttggtggcagttaacatggttttgatgtaaaccgagactgaaaatgagcatttttgggttatagttttgttagggttttacacttgtttggaagtgaattcaaaagtatacacttcaattttgattttcttttttatcgacttttaatggttggtttgggtttagatgaaatttataatttgtatttgcatgtttatgtagtcgattgtgagtaaacttggtgtaattttataattcaggaacaaaaataatggcttgtacttgaattagtcattgggttttaaattttacatggggaagtagatttaagtagaccctattgcttgcatatgtggaaaaattatattttgatttgggaaatgtgccaattcgcctgttgtatacatggtacaactgttgattcagattgcatcaatgcacattgtatgtggttgtgcgaacatggatcatgtatatatcagtatgcatgtgactgcttcattttttctcaattacatcaaagtctgtttcttttccgaagaatggagagcattataggtaggctgggttggttagctaccaccgataacaataacttaccaatgccggaagtagtattaaaaatttgaaagttataggtggttgttataattttctgtatctagctttgctctctaatatgagaagtcagttcgatcaagcctgtgtttcaagaaacaaattctctctgatgcatttcttattgtgtttcactcatttggatactgacaagccacaagtgcttttagaaattaatgaatgatttgaacatatatgtggacaaatgatcttcttgtctgcttcatttctgttcttttgcttacattatgaaaaacttttgcagggtggg

SEQ ID NO: 71509 - DNA, 650 bp, Prunus persica
  Intron number 1 from transcript ppa007713m (locus ppa00771 3m.g) derived from phytozome v7.0 (chr-ID scaffold_2; pos 16496075 to 16496724)
gctctcatctctctcttcctccgaccttgctcgaggtaatcttctctctgccgttgaatttttcttatttgacagttgggtttgtgtcaaattgacagcttatgggcgtgctcgccaaatgtttgatgtaatttctctttgagctcttaacgcaatactgcttcatactttcaagttcccatataaattttgaagagaaaaaaaatttatgcaatatggaattaattgggttgtggtagttcaaagtgcatgatggtcctgaatcctactaatagtaatttaaccttttgaactggtaaaattaaaatttgaagtattttcgatgctgtctgaattcgggagagataacccatgtgacctgaatttccagtgtaccttttaataagatagttttggatggtactgcagcaataaaagtagtaatgtatttgtgcagttctttttctctttaatggtgttataaatcttcttttgacaatggcttctatggtacttttccaataagttctgtatgtcatgtttttggtccatttatttaaggaaatccatattgattttgataaaattttgagatgcgatggttgaagttttctagcattctttattgtttaacagatctaaaaattccagagagtgaagcttttgaaatc

SEQ ID NO: 71510 - DNA, 984 bp, Prunus persica
  Intron number 2 from transcript ppa007713m (locus ppa00771 3m.g) derived from phytozome v7.0 (chr-ID scaffold_2; pos 16496777 to 16497760)
gcattttcactggtaattatctctttgacccatatatgcgagtgcttaagtagaaaaaaatgttctcttgtcagattgttaaacggggacatacatttagaaaggtttatccaatccatgatccatattgaccatttgaaaatatagcgtgtcatacgtaccctatactaactttttctttgactgagtagttttttctataataaaaaaatatatgaaatgtctttctccttttagtgtccttctttactggtgttgtgccttcactggcaagctcacaagagccaaatataattgcatcattaagtacccagctaagagtgtagttggccacactttatattcccttgtaaacatgccttaagccccatagcaccatcattttccatcaatgttggacaataatgtggttttgcctgtataatttccttgctggtagtgccagtggatacagcacgtcatatatgcacttattaaatctatgtcaggtgaagtccctttgttgcctaatgttgatacctgttcttaacccaacaacaagtataacttatctttgaacttcttgcatacagattaaccctcagttaagataagtctgatacgtactggcttccttcttgcattcgatcattaattcatataatactttgattatatttcatttcttctccattttgtaataacttttgaaccaaagttacctctttgttggttgtcatgcattgtcattgatcacaaacagattaatcatcactttgagtgtagtctttctgtaactgttttgtgctattagagttggtttgtgtttgtttccgtaacctcaatcattttatttatatgaaagcctttcgttcttgtgtcttaattgttgaaagattttctcaagctgtagtttatgccaccatttttggtatattttgaaaactgaagttcaaagagtaaaaatttttcctgtctcctttaggtgcacaaactgcttgggaa

SEQ ID NO: 71511 - DNA, 983 bp, Prunus persica
  Intron number 1 from transcript ppa024292m (locus ppa02429 2m.g) derived from phytozome v7.0 (chr-ID scaffold_7; pos 3197035 to 3198017 reverse strand)
ggatttgaagaacaagtaggctgtcagttgcaactattaatttaatttttattttatttgtcttttagtatatcaacttatcaaactttatacatctggaacagagatttcttttgaattgtcgatttgagtccttcaaggatcaaatcaaattttcctctgtcatatgcagacataacttcttcctgtgttattagactgaatatctgaaacagcatttggtggtttgaagttagttgtgttcatgtgatgtcatgtaattagaagagccaaaatgtcatattttaagagagaaaagaggcaaaattgttattaagaaaagacagtatcttgtgaagctctggtgaaagcgatatacatggttttcagaaggctgttatgaacatactattcccaacggataccatggctacgttgaatcaatcaatgggatggtttcagatggcttttgagaaattgattcaaacagagtttttgggttttggactcaaattctgttttcagtttaaaattttggattaaaatagaataccaaatagccccttacaattcccaactgatactatggttatgatgaatgaagcaatgagacttccatctttttgacatcatcaatatgcccattcttgttgtgtctcttgttattaaaaccatatgaattgacaagaccagaaggtcttgggtagaaactgaggccattattgcctcccaagtgcaatttgaatccagctttgtttgctttatttactttccttgaaaaattaccaagctgctctctacaaatcaaagggcatacattatatttgaaattgcagctcccttcttcccttcaaattttctgtctcagtgaacagaactaaagaatactgcatattgcatactgtttctttgacaagttatggcacattttttactcctcacacgaactccttgttctccttttttcaggttcgagtcaaaagttatccaagagattgctgaaa

SEQ ID NO: 71512 - DNA, 489 bp, Prunus persica
  Intron number 1 from transcript ppa006977m (locus ppa00697 7m.g) derived from phytozome v7.0 (chr-ID scaffold_2; pos 24098812 to 24099300 reverse strand)
agcttggtggacctgaggtctctctctctctctctctctctctctctctctctgtttccatacatatgcttttatgtttgaattggccggctattgggttgtgctttttatttttatcagatgatcaaaactcacttgtatataattactggttacttgtctttatttctattagtgttgaagtatttgagattggtgaattcaattcacagtttgtatatagtgtatcaagtgtcttcataaataatccttcacataagtcggccagcagatcagaaaacaatatatagtttttgacactgattactcagtatccattgcttttttgtgggtaaggcagtatcagtttatgtctagttttcttaaagaaaatttatctttgttgtaatttgtctttgacctctcatctttgtcagctaaatgccattgttcccttactttcatcgtcattttacttatttttgtcatttgatggtgttaggtcttgaa

SEQ ID NO: 71513 - DNA, 707 bp, Prunus persica
  Intron number 2 from transcript ppb010285m (locus ppb01028 5m.g) derived from phytozome v7.0 (chr-ID scaffold_5; pos 1060559 to 1061265 reverse strand)
aaggtagtcgcagggtgagaccctctgtgaatcttgatgattctgattcagacttgaaaaataaaaaaaagaataaaaaaaaaagaataagaaaatgataccacaggacagtgagatcctctgtgaatcttgatgattctgattatgattcggactgaaaaaatagaagaagtagaataagaaaatgatactcgagttttcagatgctttctggttgcatgcgcttacacttgttgtcacatctaatttgtcaccttatgagtggaacttttatgtttgtttcttttttaggatcaaaattgcattggaaatatattcttcccgtccttcatattggctagaaagtactttctgttttgttaatgttaactaactgtgtggcgaagatatcaaagggaagaattaaggctgaatattaattaacaagttcacattgtttatgttatgtggttctcaccaaaatttgaacatgaatgaaagggatttttagattaaacaatgactaaaaagaaccaaaaagattattggaattggatttcactctctcaaataatgactatgcaatgaaatgggctgtgagtcaacccaaggtcatcttgtctgagtcaaattttttcacgtccaaccaaaatgcaatttaactctaaaaattgtcctccttttttgatctagcccctctttccctgggaaagaaactctttctcgcc

SEQ ID NO: 71514 - DNA, 579 bp, Prunus persica
  Intron number 1 from transcript ppb010285m (locus ppb01028 5m.g) derived from phytozome v7.0 (chr-ID scaffold_5; pos 1061293 to 1061871 reverse strand)
ggtgagtatttatagagtttggagtgagttttggggttagatttgatttggattaatttaaaatattattttgaccgtttgatttaaatttcagccattgatttttttttttttttaccgttaaaatagcttagatttaatatagatcattgatctaaagttactattggaattttaaaaaaaaattaatttgaattgcaatggtcacttttaagctggaataaagccagaagcgtgggccagtttctttttaaaaattactattatatatatatatttttttaaaaagacatttgaattacaacggtcacttgaccaggagtagacacgtgggatgggccagaagacaaagccaccagttgtgccatctgttggtgggctccactgaatagttttgggctcaggcaatactttgattggtatttgggtccaaatttgagtttttccaaattttagccccttcactttcttgggttgggagaggttttgggcaataatttaggatattttaagtttagcctcttgggatggcctaagctgccattttagcaggtataattagtgagaagaaaggggagg

SEQ ID NO: 71515 - DNA, 393 bp, Prunus persica
  Intron number 2 from transcript ppa016922m (locus ppa01692 2m.g) derived from phytozome v7.0 (chr-ID scaffold_6; pos 2669510 to 2669902 reverse strand)
ggatcgtcaggcacctttcagttgaggactttgcggtaacaatatatactactttctccatcctttatgcattttccaagttcctgcttgattttctcttaaatctttgtctattttacatgtttccatatattttctttttcggctttggattcaacggtagcccacatgataaatttgtaagctttagtttgttacttgttcttccattaaattgggcaattgtccaatcttatactggaccaaactctagcaatccagtccaatacagcctctcaaagagctgggcttggagcttgaatatctgttgtggcatttccatttgatttggaaatttaattacttcactgtgaagtcatttgtgtatttcttttgtcttctggtggcagctct

SEQ ID NO: 71516 - DNA, 909 bp, Prunus persica
  Intron number 1 from transcript ppb023295m (locus ppb02329 5m.g) derived from phytozome v7.0 (chr-ID scaffold_1; pos 35153442 to 35154350)
agcttttgaataagcgtggcgtgaagactatcaaggtctgattttctgccatttttattagctttctgactaatcacactttcacagaattttatctatatcagatctgttatacaattttctttcagcagtcttctccatttcaaaatttagctcaaccctttgtgctattgcctctgctgtcttaaatttcacaatttcttctttgttgtgctactgctatgacttggtaagctcagaggactgactgtatgttttaccacttgattatttgatttcttgcagagtgaggatggagatatcattgactgtgttgacatctacaaacagcctgcttttgatcatccggcattgcgcaaccacaaaattcaggtcgacttttaaacctttgtacatttggagaatgtatgaaacaaaaaataaaacattctccaagttttaaaaacgttttaaaaacaatctccaagttttaaaaacgttttaaaaacaatcatgttttcttccaaatgttgatatagttggtgtataatattgcagatgagacccagtaatcatgtacaaaatgatcataattcttctcagctggtatctcaaatttggcaaaggagcggaagctgtccagacggaaccattcccattcggagaattcgaaagcaagatttattgagagctacttcacttgaaaactttgggaagaaaatgccagtgcattcttcctactcccccacagatgacaagggcactgtgtacatcaacagcacccgagtcgaactcgggcctcaagtcaatcgttcagtaagcaaacatcgtgaagatttaattaacaaagtttactttgatccttgtctaacttgtgcaaaactgtgtttgctaggctgctatcctgttaactactggatacaattacat

SEQ ID NO: 71517 - DNA, 560 bp, Prunus persica
  Intron number 2 from transcript ppa005402m (locus ppa00540 2m.g) derived from phytozome v7.0 (chr-ID scaffold_6; pos 27510845 to 27511404)
ctgctaccgagaaaacaactgttctcaagcttcaggtatggctgaattctcattctttattttgttgacgcagttttatacatatttgagtgattgaatgcttataaattttaattgtcacaaggcaatgatttttttcagaatgctttcttaatattgataatatcagtgctgctgccatgtagtttgaaattccgaaactcattttcttgtaaaattagagcttttcatacatatgacccaatcaattgtttgttgacatgttgtccctgcttggcattcaatctagtttctgttgcaaatagatttccttcaattagcttgtggatgggttggttgttgaactaatatttttgtgctgaagcagcgaaaggtggagcttttttctttttgtggtggcccttgttaaagaagggttgattgtttgatattttatgttcttattccactagccttatattttagaaatgtgatatgaactttgttgactcttctgttggatttcaatctgatagtttcaccatcattttatccccttctctaaggttggtttgttaggc

SEQ ID NO: 71518 - DNA, 707 bp, Prunus persica
  Intron number 2 from transcript ppa025925m (locus ppa02592 5m.g) derived from phytozome v7.0 (chr-ID scaffold_6; pos 4577507 to 4578213)
atctcaagtgatcactctcctgctttaaggtcttcttccactcgttctcgtcaccaggtaatatcataaaattcttttcttttctattttttcttctttttaatatttgcttttggagaattgaaggcatgcatcaaaagttatttgacataattgtaggttgttgttttgagggtgtcacttcattgcaagggctgtgaaggaaaagtgagaaagcatctttctaaaatggaaggtatataattggtcttcccaattcgtagatagagatttgattttaatttcttatatatgcatgttgttttttggtgcttcaaaccaaattagtttattttttatattaaaatacagaaaatattctctcgatcattaaatattataacatgttatgttgttgggtcatgctagggagaccaactttagataccaacttgtgtaccaactctctaatagaggtggagcccaccaatacaatgggtcccagactctattagagagttggtacacaagttggtatctaaagttggtctccctagcattttcctatgttgttagacaattttaagttgttcttctgtaaaagcgtaattcaaattactagataatatgtaaattaatgtttgttgaagataaaaagtttgagacaataattgatgtgggtaatttctgcaggagtgacatcatttagtatagattttccaaccaaa

SEQ ID NO: 71519 - DNA, 788 bp, Prunus persica
  Intron number 1 from transcript ppa017915m (locus ppa01791 5m.g) derived from phytozome v7.0 (chr-ID scaffold_1; pos 45967910 to 45968697)
ccatttgtccatcaaactgtgaacacttacggtatgccaaatacttttacattaattcctatcacctttctacctatccatgtatgtatatgttgtatggtgtgtaatcttctttataagttttaacttggatagttttttttgggttaaatacatatttggtcattgtaaaggacattatctttaatcttccttccttcaacaaaagcagactgggtggggctaatgatcttgggaagcaagcctttgatgattgtatacgaaaattcaatttggaggtgcaatttttatttttatttttttaggaagcacattcaatattcatcctttaactcaactagggtatgttgtgcaattagggtttaaaaaattggggaaaagcttgggttgaaattgaaattgtgaggtataaggtcacggattggatactatattgaagcttgaatcgattgagtgagaaacatattgtgacttcggatggcaaggagatgtgatcaaagtgatagagcaccaaaatatattgttaagttgttgatttcattttaatttagtttggcttttttatttttccttatacgtcacaattttgattgcaacccaagatttacctcaatttgttaacagaagataacagaatgtctataaattgtaaactttaagaaacaaattgaccaatttggttaaaaaaatttatgcatgaaacccaatgaccaaaaaagtattttaacctttttttaaaccaaaaaaatacaggtaggaattcttttgtctgggtgggccccatacca

SEQ ID NO: 71520 - DNA, 675 bp, Prunus persica
  Intron number 1 from transcript ppa005882m (locus ppa00588 2m.g) derived from phytozome v7.0 (chr-ID scaffold_4; pos 7063123 to 7063797 reverse strand)
tacccttcaagaacttgcctctgctcaccccaaaggtatgtccttttctatctatctatctctctctctctctcttcgtctcttttttgtgtcaagtttttttttcttttcttattttttattatatagaggctttgttgagcatatggtatctctaaaaccatcattccatatgtttgtttgagtgtgaattatgaagcttttggctattgggtctgtttaatttgttttcttaatcgaaacagaagaaagtaattgattttttgtaacttgtgtgagactcagcagtatgcttgcgctcattgtaattatgtctcggtcaagctcaaaaccatgtacgtatatacctgatagtggatgatccgtttagttttttttcccagtaatttgttttctctttctaaatgcgacatgtatcttcctatatgctgcatcttgctagaaataacctaattccagattgtcatgtcaacttaaattaaaaaaattcctatcatccaaaagaaagttttttttttttggttcccttgagcttattttgatgctagaaatgcctgcttctcttgatgagctttcaatccatcgattaatttttcaaaaattttcttagacatcatgttaattggtctggccttggtaggtgttgcgagggtcgtcttgaaaaaagggaagaca

SEQ ID NO: 71521 - DNA, 992 bp, Prunus persica
  Intron number 2 from transcript ppa021096m (locus ppa02109 6m.g) derived from phytozome v7.0 (chr-ID scaffold_5; pos 8315880 to 8316871 reverse strand)
tcataattccaacatcactttacttcgtactcaaggttattataaatattctccaactttggccattctgttttgagtatgttattcttctttaccttttggttttgcaaacaaagcctagattttttactgctaattttctcattaatttttttttttacattttttcttctcctttatattaggcctttttaaatttaatatatattagttgaaaactgtctttagtttgaaatatcaaagtgtatggcaggaagtggtttcttgctccccttctgttcgtaaattgttagattgtaaaatatattttgatcagtgagcatgcattaaatgaacgtatttctatttggtcttgtgcttgcaacacggaagtagtcatgtgaattttaggcaaagaatatagccatgaattaacgatggtacttcctgttattgaaaagacttgtggctgatgttgttgacctatttttgtcctgttaaagtgggtcccatttgtaaaattcatgaagcaaattatgaaatgatgtatgtgggctagtgtcttgaagatgcaatcaaccttatcagtgtacttaattcaccagagatttgcatgttctatgcttgatatatatatatatatatatattttttttttctctctggatcccatgtcaaacgaggaaaagggattttgtacatccattaggtgcccaagtgtttagttatggagcagatgcgttgttccaccatctattgattatttgacgtcgttttgcatggtccatcattagtcgcttacttatattagtttatctgcagagttccaatgtactcacttggcattttgtattgtgtgaaaatcttggtattgggaaatgtattgatacttggaagttccaatttgatcttattaacccacatttttttaatcaatatattgtctattgattatgtgtcctttttgaatacttgcagaaattcgttttgaaaccttattaccttaagaggga

SEQ ID NO: 71522 - DNA, 841 bp, Prunus persica
  Intron number 1 from transcript ppa010734m (locus ppa01072 1m.g) derived from phytozome v7.0 (chr-ID scaffold_1; pos 4834059 to 4834899 reverse strand)
ctttcctgcgagtgtcgctcgatttttgttgcgctgtaagttgaaagcctgtttcttacttgatcgacaggtattagaattttcttttgaatgggttttttctttccagattacttcattattttcccaatttgtagaatttagaaaaagagtgaaacagaagagctggtaacccaatattgcttgcattgaagtggtacccaattggacgcctttcgatctaattatgttttactatagagttttcaacgaatttccagctttggtttccaaatatcttggggttaattccccaaaaaatgtatgatttacatatttggtaagccttgtaagatttagatcagcagtttgatggtttaaacttaattgaatttgggtttctgcaaggtcaggtttagattcattcggtttgtggggttagcttgaatgcaaaggaagcaattggttttttttgtttttgtttttcctttgaatctttacttggtgcacattttgcttggtgagaagtacctgggaaatgcgtgttcacgttttggttatgagggtgctcaagttgagaggcttaaagaaattctcaaattctgttctatatgtgttcccagtatgataatgaaaacaactttttttttttttggttgattattctcttacaaaattaatgagttctaatattttgccactttcacggggcttcttatatacttcttggccatcaaaagaacatgatatttaaaagatttttgttttttcttttggaaacaaaagcttaagagttttgggtattggttgattattgaaccttaagttgttttatgtttgttcggtggcgtaggattttggg

SEQ ID NO: 71523 - DNA, 740 bp, Prunus persica
  Intron number 1 from transcript ppa017863m (locus ppa01786 3m.g) derived from phytozome v7.0 (chr-ID scaffold_6; pos 11259840 to 11260579)
ggaaatttctcattactcgctgctgctgcaagaaggtattataatttatatgcatctatttactttaatttttttttttttttccctcttcacacctcctaaatcttgttattttcattttaagctctggtgactatcgtggctgtgtgccagccctaagttgccttttgaattctaattatgttttaaaaataataataaaacgaggatgcaatgtaagatggaaatagaactactttatttcaattggtctttgactccggccgaagaaaaaaaaaaaaaaaaaaagagagggagggggccttttgagtaattagttattttccagcataaaacaacactcagaatgctagttagggccgccgcggttgttggtgtactttttatattgattttttgtgactggagatcctctttaaggttgaattatagatatcgttttcacttgccaaaaaatatccttaatttgttttttttttctttttctctctctatagtttcattataacttttatattaaaggaccattttatataaatttttatttcatgagaaaatttatctggagttagcgaataagtccatgtaatactaaatccaacttccttacgctgatgagtggaacataagactttcaccatatgaaagtgatgccattgttatttatgtttttactgaaactaacactctgcgtcaatattgaaggcttgaaggtaaagtggcactaatcactggtgggg

SEQ ID NO: 71524 - DNA, 678 bp, Prunus persica
  Intron number 1 from transcript ppa013193m (locus ppa01319 3m.g) derived from phytozome v7.0 (chr-ID scaffold_7; pos 12895582 to 12896259)
tctctctctctctcactggctctggttttccatcggtatgaaaacttctgaaaagttctatagttttgatgttatttctttgtttttgaccgttttaatgcgttgatgtttccgatttagggattttggactgtttgaatttgattcatgtcattcacctttctgttttttcatctgggtttttttttgggtatgtttgatagtcctgttttattgaaaattcaatggatgaaggaaattattatggaaatgaaaaaaccctttgactcacacgcagtaatttggactgtgttgtgttgtgagactgctgctgccatctttcctgcaacttagccttatgataaaaacatatccatttctctcgtattgtgagcttggtattgacatgttgatgtatggttatatgaaatatggtttgtttccagttgtttctcattgcattgatgattgtagtattgtttcctttattcccaagtgtaggctacacatatcgaatagtgtggatgtaaaatgtttatgagttatttttatttttatttttttcataacctatatatagttgctttcgagcataggttatgataaataagcctgaatttgtgtgagatccacaaaattgttaattcttctgtttccagaatgcttactgggtgggtgttttcaggggcatttactcag

SEQ ID NO: 71525 - DNA, 832 bp, Prunus persica
  Intron number 1 from transcript ppa024704m (locus ppa02470 4m.g) derived from phytozome v7.0 (chr-ID scaffold_8; pos 19769867 to 19770698)
aagttccttgagtaattctgctgtttattttattgcatattttaggcaagaaaagctttgacagaactttcaggctagttatcatgaaatcctttcagaagtgtgaatttaatgttgcgagtttcccccaagtttcgctcaattaatttgatcgtccataatttttatttcttaatacatacattgtaaataaaattgaaaaaggaatgagattttcaaacatttcctagccttcactagaataataaggagagcagagattttcacaatctggttgttctcaatttctggaatcttcttccgaccgccatgaaaaattgtcagaagtgaatttgtgtgcataatccattcattgtggtattattgagacgaaacagagagtttcataaataattttgaagttacttttcaagatggttgtgatatattatgcatgttttcatatatgtggtagctttctggtaatacattcacaatcacatggagtagcagttagtttaacagatgtatgaacacaattgtaatacgttcatgttttcatatttgacattctgctcattgctttttttttttttttttctttttctcattcaattcaaacatgtgaaatggatgtaattcatcatcttcagatctttgtccctgcaatatcacatccatctgcatacttccataaaatctgccgagttaggtctcggtcaggtccttttggatatagtgctgctgacatttgttatacaacttttcattgttcaatgatcatctagttatgtttcctatttttcccaaatctgtacctgtcaggctcccactgtggccgcacattaggcta

SEQ ID NO: 71526 - DNA, 746 bp, Prunus persica
  Intron number 1 from transcript ppa019445m (locus ppa01944 5m.g) derived from phytozome v7.0 (chr-ID scaffold_1; pos 39356007 to 39356752 reverse strand)
cttgtagctggggctctgcttctcttcttaatcttgtaagccatcagcttccccaatattttcttcttttgcttctcaaaatatcatcaaggcatattcaatccaatagaggtctcattttgcatttttctcttcttttttttttggttgggtttaatctcctaatcttcatactattgcacaactaattttatgttaaggggagttttcatttcaatccatagcttgatttgatgttgttgttaaaccacccaactcttgtaaatcgcccttctcagtttgaccctgtatgttgaagagcaagtagatagcagctgttccattgacaaagaaaaagatagcattttggttaccgtttgtcaagagcatgacttggctccttaagattgagaagcttctccttaaaaccaattgagtactgatgcttgtcaaatctcagcaacattgacaaagtttcaacaaaaaaagtaaaaagaatattagaattatttaacacgtgttaaaaccacatttactataagaaggagctcttcctcaatcttaagaagccaagcttttttcttgtctaccggtattattgatttttgaaatattcccaagattctattctcaacatggaatcaaaacttttaatcaagatgatgcttatctacaagcatctttttctaatttcagaagtataattatttgtttattctaatagtatttccttgtttttttctttggtttttggtaggatcttgaca

SEQ ID NO: 71527 - DNA, 626 bp, Prunus persica
  Intron number 1 from transcript ppa009789m (locus ppa00978 9m.g) derived from phytozome v7.0 (chr-ID scaffold_1; pos 22559887 to 22560512)
ccaccatccttgggcattcacatttggtatcctaggtaaacaaacatgcattatactttgagatatatatttattttggcaaaagtcatatctctaatgcaagaaaaggggaattcaaactgtctagccaattggcataattcacatcttcattctttgagatatagagcaagacaaaaatatgatgcaggcgtcatatatatatatatatatatatttgttgagtgtcacatacacttgtttgttattgtcatattcttctcggttatgagtcatctttatttcttaattggcattcgttcatctttggcaaaatccagaggaggaatttaaatccacacaaccataaattttataaatttgacaattagttgtccaattttttcttctagttcatttacgggtaagtttttatatttaagtaacattgtaaagcagtgttatcttggatgatcaacctttcctcatcacttagataattaaactgtttttttccctttcttctattgtaatcttggttagtttagaaattccatttgaatgaccacactcacataaatatctaacaatttacaaagaaagtgtgactggttgataattaatataatttcttttgatgacaggaa

SEQ ID NO: 71528 - DNA, 704 bp, Prunus persica
  Intron number 1 from transcript ppa022613m (locus ppa02261 3m.g) derived from phytozome v7.0 (chr-ID scaffold_3; pos 2527580 to 2528283)
tctcaggcattgaccctgtcaaaggtttggctctaaattgcttcatggtcttgtttgtttgctgtgaaaattgaacaaatgaagagaaaaatcttatcttgagatctttgggtggcttttttatgtttgttttcctttttctttgtttgagatgaggtgttagtgttcatgagagtgattaaatgacttcaatttatgggttgcaatcactttcaggtacagttttagtgattctttttgtttgctgagaaattaagtaaaaatgaaagaaatatgaaatcttgaattttgtgaattggtactgttttgagaatcttaggtgttactatatgaaattggtaaaatgtctgttatcaaaagtttgagaatgttgtaatgaagaatttgaggttacttcctaggtcattgaaccctcagcattctgaaagcaccttctttattgtgttcaatttaccttttgtgggaaagatttgtacattaaaattgctaccttgtatatatgctgtataacagattttgagttctttcacctgtaacttaattcattcatagcggctaacttctcgatttgaggcattgtatctgtgtatgcatatttctcgttaaattttcttctttatactttacggtacccagaattaccagttatgcttgtgatgataatgtcacactctttctggaatgcagagtttggttttgttgta

SEQ ID NO: 71529 - DNA, 627 bp, Prunus persica
  Intron number 1 from transcript ppa005147m (locus ppa00514 7m.g) derived from phytozome v7.0 (chr-ID scaffold_3; pos 19906125 to 19906751 reverse strand)
actggaactactatttcttttggtaattcgttattatcctttttcttttttggcaagtttttgtcaagcaacattaatttcgagatggggattggttttttttggtttttttgttttttgttttggggtgataaatcagctaaaataagtaagaggctcttcaattttgttaagggaaggttttatgttatcaaagctaaatccttttcaaatcgtttcattctaaaactgtatgattttatataggtgatgaatttcgtgtaaattatcagaagctgaactgtttcatgggcatttagttagtattggaacgaaaaagtcttcacgagacagaactgatttaggcaggccggatgtatatttatttggtcaaccaaatttgatgcattgatcatttactgtttttgcatgttgactttattagaacatatggttgattgaatagcaatttagttatacactcgcatcgctagtgtctggcattcattaggaaattcccaactaacaggggaagacaaataccaacatcgttcattcaagtgcatactgcttgtatgcatcattcactgattcacttatgtgtgttggattggaccttgtgtaaatcagcggaaactaaatcttcga

SEQ ID NO: 71530 - DNA, 688 bp, Prunus persica
  Intron number 1 from transcript ppa003294m (locus ppa00329 4m.g) derived from phytozome v7.0 (chr-ID scaffold_5; pos 13642970 to 13643657)
tctctcaaagattgcctgcttttcctttgtgggtggtgagttcaaacttcaatcaagtctcatctgatcatcaagtcttcttttggatctggtacacagatagattgctctcttctctctctttctgtcaggacttgaattccattgttataacttatatatatatatatatatatatatcctttggaatccctatctgaattcacaatagtaggacaaattagatatatctttagttcatatatacctagttaatatcacatatacatgcctttcccccataccgtaaaccaaatattctgtcaagattttgtacaataaacttttggttattggttgaaatctcagatttggaaatgatagaagcgttgacaaatttaaaatttcctattggaaaggaaagaggagctataaggtgctgaattcttagtatatttttcaaatggaaaagagttgccattgtctttcttaatattgtttttcttgacagaacagtcatacacattctattgatatccaagctgaattgggacatgtgaaaatttgactgaaatctcttctttttgttcattgctatttcaacagagttcagaaattcttctacatttctttgtgagcagaattgttaatgaagtttgtttttttatgtgcagctttgcatctgtatatttgtgggaacaaacggaga

SEQ ID NO: 71531 - DNA, 340 bp, Prunus persica
  Intron number 1 from transcript ppa012188m (locus ppa01218 8m.g) derived from phytozome v7.0 (chr-ID scaffold_1; pos 3577036 to 3577375)
gccagaccaaccaccctagtaagttcatattatattacctctcttttttcttcgtgggttttcttgtttaattatgagctcgttcagaatcacttacgggggaaggagaaacaccttccacctgcttattcatataatcactttgagcgattcagtgtgagtttcaaaaaaaatcacttaaaactacttaaaagtgattatatagagaagattctacataaaaaggatggaatattggcctatctagaatcactgatccctatgactttcaagtcctagtgatttttcttgggtttttgatatcacactgcgtacaaattttgggcaggttttggaggaa

SEQ ID NO: 71532 - DNA, 749 bp, Prunus persica
  Intron number 1 from transcript ppa019623m (locus ppa01962 3m.g) derived from phytozome v7.0 (chr-ID scaffold_1; pos 35330362 to 35331110)
tcaccaaccattatctgcttacaacagaagtacaggtacataatcatcagtttaattaaggttgttgtttattatgtgggtttaatattaattaacatatgggcacttgcatcattgcatggagcttttgggttcatgaggttggtttttggcttttggtaaagatgttggctttggttggttcccaggcagaggactggtggaaggtcttttcatggaacatccatggtcttggttttgagtcttgtcaagcgctaaaaaaaaaatatatatatatatatatattttctcttccttaaaaatcttttgtctgcttgttttgtgggaagggatggctttggtaaaatttcagtactatggattagttgggcacaaaagaagaaaaatttatgaagccgagattggaggagaaataagaactagctaacaaagaccaattctttttgattggttctgatttcttttctttttccccttctttcccctttattttatcttcttctagcaaaaacaagaaattcatgattgttaatttcttgttgtagccataaatgcacagtcaaggtatagtttttgggtatactgccaactccttttttttacactttatattctacactgataaataattaacccctttttaaaaaaatttatcagaaagtcatgaaatggtttcttaaagttttggcttttctgtctggtcttttctttacctggttctgttgcaggccacaatactgggagcttca

SEQ ID NO: 71533 - DNA, 928 bp, Prunus persica
  Intron number 2 from transcript ppa011353m (locus ppa01135 3m.g) derived from phytozome v7.0 (chr-ID scaffold_2; pos 15003427 to 15004354)
gcaaactgtaaatctgggtctttgggatactgctggtactctctctctctctctctctctctctctctctctctctctctctctctcatgtataattcacatgctcaattggaattttgatccttggttgctagcgtgtacttcagatttctgtcaatttagttatgtttgacatgtaagtggagatcaattgtttaccacaacaaagaaaaacataaaaatggtatttttgtttgattttatcatcaccaaaagttatctgataatttgttttgatttatttctcaagttaaattggcttaagtctgcatctttgaacctcgtgtcaatagaaagaacaaaccatccaaaaccttccatagaaagaaccatttatccttagcaatgaaacaaagcagaaagccttcttgataatatcaataagtgacacatgaatgttatattttcaagataaaaaggaaaaatttctagaaaattgaactgtaaagctggttttagaaagaaaaaaaaaaagaaatattaaagatatgattaattaccaaagcagtaatatatatatatcagtcatattcacatcttatattataagcactttctcattgatgtttcaaacatgtcaagtttttggtaatgtgaaaaaaggtggtgtgagcactactgcatgagatcctaaaagggccctgctagatgcagcgatcattatacttcaggtgctataaggaaagcaaagtgcaatttcttccatcaacttaagaagaaaaaagaaaaagcaggaaataatgcatttgaatgacagctacatgtgacagcaaaaaaccagtctcaataaaagttttctcctgcctttgaaaaccattttctttttttacaatctatgaaatcttcatatgcaggtcaagaagattacaacaggctgaggccactgagt

SEQ ID NO: 71534 - DNA, 601 bp, Prunus persica
  Intron number 1 from transcript ppa004701m (locus ppa00470 1m.g) derived from phytozome v7.0 (chr-ID scaffold_1; pos 39923130 to 39923730 reverse strand)
cactctggtaagtgaaaattggttttgtatttatcgtgtttggtttatgagaaaatgctggaaagatcagaaagtttgaatctttgcttctctttgtttgattgctatgcctagtcagtctttcagtagtgttacttttgttggtttttttgacttctgggtaattcaaatttggtgtggtaaaatatatgtttcccttttcaccgattttctgaaaaaaaatgttgggaaatgcaagaaaatgatattaaagtttcttttagtataataagaaattagaggtaaactgggttgattaattgtagcatataaaatgagtgggacatgaagcattgattgtattatgaaccaatagaagaaactatctattggtcatttagttttctaatcatcctgtactaagtactggatgtctgcttgtcaatgataggaatcagaagtattcatgtctgctgctttctgtcccaatttgaattttttacactgtcttagacaccttgtgtttgcatatgaggagaacttgttcatagtatcagattctaataagctgaattttatatctgaaggtaccctgcacaaataagattgccaaagtgaaaaa

SEQ ID NO: 71535 - DNA, 853 bp, Prunus persica
  Intron number 1 from transcript ppa018955m (locus ppa01895 5m.g) derived from phytozome v7.0 (chr-ID scaffold_1; pos 8292449 to 8293301 reverse strand)
ttggctcttgctgacactgacatcaactgggacaggtttcattccattcctctcctttgcctttttctttgttttggttacccatttcattttcaccactctgttttcatttctttccatgctttaaaatgatatgattgttttaggcagaatttggaacactaattttttatgccctttttctttatggtttctttttaactgggtcttactgggttaacagctgtgtgtatttacgtgtgtaatgtacaaagtttagcagattgtcaatgagaaccattgttgagttgaaattatgtttgaatgttaaacagtttatgttagtcctgatcaatcatcatactgtttttgggcaagttgcattactcatttttatgtcagtttttcgcatatttaagaacaaatttcagtctagatggctggaaagctgctgtggctgggcagctcttgtgatttgcatattgtctataagctgtttcggtggtaaaataagtcacttcgtatgaagttttttttttctcctttgtttggttcgtgctgaggtttgattttgcaatctgtaattctttgcattgtgcaccgtaagcctatggaaatgacaatgaacttaggtaggatccttattgtacttaaaacaaaacacccaaaacccccctcttttcttctcggaaaaagagaaccgaacacaaccacggtccacagtcattttctaaatatgtttcttttccccaaaggagacattagggtatgttacaatgatattttaatatggattagaagaactgaccctcttttaaaatttattcacctcaatgtaggttggacaagacaaggtttcatattattggggcta

SEQ ID NO: 71536 - DNA, 711 bp, Prunus persica
  Intron number 1 from transcript ppa022561m (locus ppa02256 1m.g) derived from phytozome v7.0 (chr-ID scaffold_8; pos 11001479 to 11002189 reverse strand)
atattgggctttcagtttcggttggcatcaccattgttctcgctaaaaaaaactaccaagaaaaagaaattagtcttcttgaattacaagaatataacacagaaatgcaggaaattcatttgcttgcttggttcatgttttgctcaacccactgccagttttatgccattttcactcaaacaaactataaaagccattaacatgcagaacaagcaaggcaatagaaaatagataaatatggcaaccaccaaaatgggcttgcataatcttctctgtccaacataaaggaaaagcaaaactaaacagagcaggaaaaagaattaacaaaataaatgcaaaaaagattgcaaaagaaaagggtacctcagaatttcacttgtgctcctctaagtacgattccttccccaaaagttaaagaaaaactcagatcctgaagaccaagaaaatacataagcgaccaagaaaatacataatcaaagaaaaaaaccgcaataatcttgaacatagtgattaaaataacaaaaggttctaacttttcaaaggattagcaagatttgcaagtttcttaccaaaaacgtagtgaaacaatgaactgaacaagccaaaaggtagaaatgcagtggtcttccaaaacccagaagaccaaaaacaaaatttcaggggtgaggtatcatagggaacagtcctatcatcaataggaaagggaaggtt

SEQ ID NO: 71537 - DNA, 603 bp, Prunus persica
  Intron number 3 from transcript ppa009920m (locus ppa00992 0m.g) derived from phytozome v7.0 (chr-ID scaffold_8; pos 10758369 to 10758971)
tttgtgataagccattaaacttgtgagttgttttaaatatcatctttatgtgatttacttggtagttggcttgccagttttttatttgacacagtctgtgttcttggaatttggagaaagcactaaaataatgctgaagaaaggaataatacaagtaaatctagttgactagaagcaactctgtgttttaatgtccaatgtcattatattcattttccatctgagttattatcagtaccctccagcaacacatcctgctatatctcactatattgttaccgaatgtggcaactagatttcgcttaaccttctaatgtatttaattggtggatcaattgtgcaaagaacgagtttgattgaactactttatattctgtgattgttgggcatttattcgtctttttctgtgtataacatgtttgggcacattagagtccatagagtttgattttacatttaattagaaccaaccaacttgaaacaaacaaacaactgtttcttctttttcttttcgtcatacatttggtactagctacccatccgcaagctgaacttgatctttcacttgttacagatttcatcatttgaagttgtacccagagg

SEQ ID NO: 71538 - DNA, 360 bp, Prunus persica
  Intron number 1 from transcript ppa020778m (locus ppa02077 8m.g) derived from phytozome v7.0 (chr-ID scaffold_4; pos 19466194 to 19466553 reverse strand)
cagattagggaggaacttgagtacaatcatcgattgtcttgaaaaggatatgctggtttggaggatcaattggaggaaaccatgcctggggtagaaattgatcgatctaccttatggaagagagctagataggacaaacatggtaacatcccggatccaaaggtggcagagaaagcaaaattaattgtaagcctactcactctgttttaaatttttattaaactgtgaataattcttattacgtcttatgttatattttgcgtcgtgtgaatgatattaccacgtcgaaattttttaaaaaacgtcgttaaaggtctaaattaggaatcactactctgttttctgtaattatagcataag

SEQ ID NO: 71539 - DNA, 631 bp, Prunus persica
  Intron number 1 from transcript ppa019968m (locus ppa01996 8m.g) derived from phytozome v7.0 (chr-ID scaffold_3; pos 16353971 to 16354601)
ttttaactcgcgtaaatcattctaatctggtaataaccttatctttccaaaaaatgacaatatacatgaatcttgagaaataattatgaagtaattgatgtttccttttcattagcaattttaatccgcgtatttgcttagcgtatttttgaaagaattgttggaattaacttgaggaaattttatgtgtgtctatttttgatatattttaaaaagaatcgcctttaatctttttatttaccatctcccaatataagttgaattccacatcacatcataataacttaagtttttgggactagtggttgagactgggtaaaccaacaaattcttatcaggttgcaagtactagaaagatggttgaactaagcaaaaggatcttataagataagtgttttagaatataaatgctgcaatgcaatgtgttttgttacttaaacctagctctaattttgcatttatagaaatactattatgaataaatttaattttctctgagaagaatttttacgagttagttatccattttgtagccgttgcataacggatctctaagacgtgtgatttatctctaatcttctacacaatcaatgtaggtgcgcttgattggttattgcgttgagggctctct

SEQ ID NO: 71540 - DNA, 341 bp, Prunus persica
  Intron number 1 from transcript ppa021074m (locus ppa02107 4m.g) derived from phytozome v7.0 (chr-ID scaffold_4; pos 26267078 to 26267418)
tccattgtgttacttgtggctacattgattaccaggtttgtgttcactatcaatttgttttttcaatttaatgtggttagggataagatcataccttttaaatgtttattttctttctcatttgacattatgtttttcttctttcagaacaccgtggcccaaaatgacgcgctggcttgtcattcggatcatagcattgagcgtactcgagtaagtaactactttgaaataaaaatgaagcttattattgtaatttcatatggataatagaaaatataaataacttaatcaatttccattgaataggccggtcttgagccagattgccatattttctggac

SEQ ID NO: 71541 - DNA, 308 bp, Prunus persica
  Intron number 2 from transcript ppa000142m (locus ppa00014 2m.g) derived from phytozome v7.0 (chr-ID scaffold_1; pos 11120161 to 11120468)
tgctaggttttaaaggaatgtatgaatagaagagtaaagaaaaagaatgtactgttatgatcaaatttgtattctaggatgcttgttgaatcaaattctgtaaaaacagctcgtggcaactttttaaatctgtatactgcatctttgggtttgagggtcatgtgcaagtctggattaatgtcaagagctgtgtaaaagcctgtgcttgaataggcattgagcatttgggttttggttatgtattacaaactgatggttttcctttgataataggggacccgaagctctaggaaagctgcattcaccgt

SEQ ID NO: 71542 - DNA, 1030 bp, Prunus persica
  Intron number 3 from transcript ppa000142m (locus ppa00014 2m.g) derived from phytozome v7.0 (chr-ID scaffold_1; pos 11120498 to 11121527)
ccaagtcatccttacccatctgcgggagtccataggtaacagcaacccttataattgtaaacctttaaattcatgcatcggtgtttctcctagtgttatatgctttttttctttgttatctgtctcaattctgtcacaaaatccttttcgtgtatgttttgtttatatgcatatgtcacagtaaatgtggtgctgtggtaaatcatttatgtatgaatgtgctcagttatgcataaaccaatactgagtacataattataatcgcagcaatattttgttgtaccttcacaaggatgctccattcacaaatgtgggagtacctatactccataaatgtggctcctcctgtttcatctcttcaacttttcagattattcgagaaaaccaattagcatctcttatactattggtgagtaggttttgcatgtggttttaaagcggtgagtgcctgaggcgtatgcacatttaatatttgggtttaatgtgtcaagacaatagttacccacttaaaagtttactgtagttcaaaaccatgcagatgtatacatatttttgcgttttggctacatagtgtacaaaaaattagttttctttttcccttttcttctgaaagatatattagttaaggaggtgaccaagcaggagaaattgacacatgcaatagtttgattagaaattaaaccttgaatctgagctaatggttgtttagatgctgtataactctattaaacaaatgcccacctaaatcctaaacccaagtcctgaaaaatgcagtcttgcgaggtccaggtgcaccataattatactggtcctcatatatatttatctgttatatatgtttagcgatactgatctttggctttgcatttccatacatgcatttgttatcatgtaattggtcatttgtgtttaatgtgactcctgtgttttatggtacctggtcactgctcctgttaaatcataaaatgtcataactcatattggcagctactttttgctcccaggtccacggaatctcttccgagttggg

SEQ ID NO: 71543 - DNA, 316 bp, Prunus persica
  Intron number 1 from transcript ppa013054m (locus ppa01305 4m.g) derived from phytozome v7.0 (chr-ID scaffold_5; pos 13295043 to 13295358 reverse strand)
cctttcaaaaccagccaaccaagacttctggcctggtattagcatttaacctaatgtctctgtctttttcttcctttttttattcatttgggttgtcttctaaattttgggtttaccttatctatggattaaatgttgccatcatttgtttttttttaaatttttttaattgaattattgcccaattaaaggtttttcagaccaataaataaatgtgattaaactgaaagtataaatatgagccaatatctgcttttgatgcttatgaactaacaatgtaggtaacaagaacaagttcaagtttacaattggtttc

SEQ ID NO: 71544 - DNA, 561 bp, Prunus persica
  Intron number 3 from transcript ppa000948m (locus ppa00094 8m.g) derived from phytozome v7.0 (chr-ID scaffold_1; pos 37249208 to 37249768)
tacaggactctcttcctcctcgtcctttggaagaggttatctctataggtttcaaacttacaatatcattatacattagacttgctgaacaatgttggtaaaaatattgggtttttctgcctttgatgttgagaaaacctatatctgctttcttgatgttattgatatagtgtcttgtgttcttttgatactatttactgtttgcagatcttttaagttctgtcattcaaactcttcatcagggagaggattttttatccctctttgtcgtaggcttggccacgttatagcccggtctagccaaccttgagttccgctcttgatctcatttgttaattctgataattagggatctattttttatttcgcttgctaacatagtaacatccccatttcctgcgtctataagtttctacatacttcatgcatctgcttaaccttttgacctcccctcactctcaattttatattacaattatcatctgctagtacttcattggctaaactgaaaattttgtttccacaggtttgtcgaaccatacagaaagagttcggaaaatc

SEQ ID NO: 71545 - DNA, 588 bp, Prunus persica
  Intron number 1 from transcript ppa008805m (locus ppa00880 5m.g) derived from phytozome v7.0 (chr-ID scaffold_1; pos 803211 to 803798)
ccgatccaaaaccgtatagtccctactatttctttctctcttgaaattcaattgtttttgtctttactctgaatttgctcatctgggtcagtaggatttcagtttaattttcatatacattagttggaattcagcatctttgtttcttagtaaattttgaaacttttggttgttctgttttctattattttcaagtatactgaacttaatgaccagcaatgtttttttaatttatcaaaggtacttaggtgtatcaaaaacgggattgatcctcacattatctgttatatactgtcatattgaaatttttggtctccttattagatttgcttttctgggttgttgattcaaattcagtttcatgtggattaaattaaagattttttggttattcgagctcagagagtgaggaatgtggtagcaagctgagctcactgagtaattatcgcatgtgtgtatatttagaagattgaagattagactattattttcttggcaatagagaaaactcgtttgatgattttttggtgcttggatatgtttgatcataaaggaaagtgatttgcataccaaaagaacggggcatac

SEQ ID NO: 71546 - DNA, 819 bp, Prunus persica
  Intron number 2 from transcript ppa008805m (locus ppa00880 5m.g) derived from phytozome v7.0 (chr-ID scaffold_1; pos 803874 to 804692)
cgaagaggctgttggtgcaagtagacaggcagaaggtacttcttccggttgagtgttttgtatatcttgaggttctgttcagtgaaagcatgaaatttgatcttatatatttggaaagctttttagtgcaaataggttggataggttggatttgtacagtttttcggtagatgctatattctgtatgaatttaccgtatctgtgcaacaatatgatgcataactagagtttatgttgtttggatgtttgatcctggtgcacttcttcctttctttgtgcctttttttttttggcatgccttccttcctgctgttggaaatcagttttatttgaagggctttggttttttttggagcattaattttgtacctctgtgtatccatgttctattcaaattaagtctgaatatatactatgataactttggagatatgcataattcttcccccaatgcatggatttgcacagaagtgcataaagttatatgactacctatacttgttctcatcgttgttttgttaatggtcgttattcctataaacaaatattaatggtctttcttagaagttcttcactaagaaggctgtcggcagtcagtgcttctgcttgttcaggtctagattagaaatcatggttgtagatgaacatggaagatgcattttaacttttcaaattaattctgaagtcaggctttacaacctggttatttatgataggaaacatactgccattggctggttttttctttatggttagtcatttctgttactcttgtttattgactcgatgattacctgatcaatgtttcttcatctagaa

SEQ ID NO: 71547 - DNA, 763 bp, Prunus persica
  Intron number 1 from transcript ppa010355m (locus ppa01035 5m.g) derived from phytozome v7.0 (chr-ID scaffold_5; pos 11453293 to 11454055)
ttatttgcagacgccaaacgcgtccaaagccaaaggtgtgaattattgacttctagatgatggaagactttgttgaggggcttttaggctttttgctttgagtcacgtaatggacaaataaaaatatcccaatgacatgtgagaacatggtgtgggatcaccttgtgaatagttttggcaaattatactttgaattattcttcagtccagaacacagtcatggtttaaggaactttatttgaccatgaacacagttatgattactcaccaaactcggaatatcttaaaatataggcaattggccaactgtgatattatcacacacctatggcggcttcaagacgttgcctaaaaccaaaacaattggatctccaaaatcttacagggagatgtaccacatgtctataattttattttatccttttctttgttggctttgtttggacgtagactttttcctacatatggagaaatttttgtatgtttcgagtacaccgaagtccaaaaatatttcgaccatctagaagactattaagtccaaagctatattctaagcgcgtttgtttacatttcagcatttcctgggtcggtaattatgacactcatcatcatatttccactcttaaatcattaattaatcaaacaaaatatccaaactccaaacactatatatataacacactactcttccatcaactccacaaacaactactccctccacttccaagtttcatccacaaaaccaaaccaactacaaaagcag

SEQ ID NO: 71548 - DNA, 1022 bp, Prunus persica
  Intron number 2 from transcript ppa008451m (locus ppa00845 1m.g) derived from phytozome v7.0 (chr-ID scaffold_3; pos 10782358 to 10783379)
gtcatactggtgaagtttggtaagcttggttttagtatgtaagtctgcaaattaacttgtcaatgcatttgttgtggctttggggcacagcataaagcagctatatggattcaattcatgtagtttgaagttttcagagtcataggaaatatttattcataagtcctttagccgggattagacatgctatatgtagtaatataattttttgaagttaaaaaaaaattcagatcttaaaagtaataaatgaaaggagtattcagtgagaacgattgactggacttggtaaacatgccagtcctctataagttactgtgcaaaatgatgcatgcttactctctgcttcatcatatggtattcgtcatgttggtagagaatcacaatgtacaaaagtcttgcaattggaatctatgttttgggctactttatggactgtaaaggattttgtagttcacttccaattctttgtttgatcatctacttattttctactcatatgatcaccatggtttttgacctaggtacttgtcattcatttgttctctttcagcctttgtggtttcttagcaagaatgaaagtgggagaagcatacaggatttatttagcctacgtgtcttagtgggagagtgaaggaaacatatctttaacaattcgttatttcctttacttattcctcaacaaaatataagaaagacagagaagagagaactgttctttttgggtgttatttagaaatcccctaaagtgtttgaacgatgaaaatatgaaaagcaaatctattacaaaattccaaaagaaaatatttattacctaaatttctttgaaatattgaaatattactggctttataatcacttttggttatggttaaccaatttttgtcaaaattgaacttattttttttaaaacccaattgagtgagcattttctattttagttccacttctgttaaaatgggtagataatgtaagacctggagcatttagcagttccctgtgctgtttctgtaggtttggagctg

SEQ ID NO: 71549 - DNA, 923 bp, Prunus persica
  Intron number 1 from transcript ppa010754m (locus ppa01075 4m.g) derived from phytozome v7.0 (chr-ID scaffold_6; pos 4895274 to 4896196)
ttcagtttttgagggtattgctgttggagttgcaggtatagtttgagctctcattaactcttattgatttcacattaatttcatatatatggtatatatctattactctgcatgctttaccatttaactatgggcaaattttcttttgctggtacatagaaaatgactaattaatttgaaccttgtagttcgcgcgtctactcaattaagtccccatagttgtagttaggtcgctatagttgaggttagttcataacttcgtcagattgttagatggtgcctcaaatcggttctcacagctttgagtcacaaagaagtaataattttgtctaacaagttgataaacgaagcaaaaatgattctatctcacaatacaatatttcaaatattgatttacaataaagattatgttaggaagaatcgccctaaaaattatgctacggtcagtcgcttacgcatgcatgagagatttctgattgttggtgcatatgaggccaacaatagataaacagtcggatttcgcccacactttttctatagattatcaagattgtaaactaaggacttgattgaagaattgaacgtatatgaacctgattgaagaaaaaaaaactcccaaactatatatagagtccaaattggtcatctttcctatgtgtgttaatatttatgtataggtatgtaaatctgattcttcaaataagtctatgcaatttgaggcgacgatgtgcatatatcatttgaatgcatataaatttgctaaaagacacacattcaaagtttagagtataatattgattaacttggcaagatctaaaccctaaacttttaagttccacaatccgactctaggaattcgaacacccgtttacgtatacgcatgcatttaagtatatgtatatatattgcagatacaaaggcag

SEQ ID NO: 71550 - DNA, 974 bp, Prunus persica
  Intron number 1 from transcript ppa000626m (locus ppa00062 6m.g) derived from phytozome v7.0 (chr-ID scaffold_2; pos 22333484 to 22334457)
ggagtaggcagaagagtattgcagagatcattcaggtgaatttttagtgaagtttgttgctttaactggtttatataataaactttttatcttgaatgttgtttgctattggaaaaattagatgcactcctgtaagtgtttctgtttgtaatgatagtgtgataagttttgcctactggtttcaagtgattatttttcatctctaatttatgtgttttacatgggctaagtctttatgttcattcattagatgatttactcgatatctggttcagctcctctaagcaggccttttggtcatacccatgaagtggaaggagtccatgaattagtgcctttgacagtggtttctctcaattgtcagctgaataattccatgagatggaggtgctcattgggatgaggaattgaactagttcttctgacactagctcagttttcttaaattattagcctttatgttgttgacattgatattgggttttcagtcatgctataatcttgcttcttaagtatagttttcattctttgcataaatgtctcaccaatagaatgtaaacttaattggaatggaaactgttgctgcttatgtggaatgctggaggtatttggatctagtttaggtgattgatgtttgcttctcgctctacactttgtcttgcatatgtagatgcatatttgaaactttatattagcatgtagaatgtgaaagtggttacaagttataactatatataaattgcattttattacattttctggttatttttacttgtgtttttcatgattagagttgatttaaaccttcccttattttggtttgttggtagatctgctcttatggtctttttgttgtatacttcctttcctggtcaagtttgattgtctgctacgatttttgtaaaataaattgagtttgtatttcttttttggcacaaagctgctgtgtaaaacgtttggtatttcaatgcagg

SEQ ID NO: 71551 - DNA, 773 bp, Prunus persica
  Intron number 1 from transcript ppa015553m (locus ppa01555 3m.g) derived from phytozome v7.0 (chr-ID scaffold_2; pos 9864627 to 9865399 reverse strand)
agttgtaataaagaaggttgggatcgatgattattaactgtggccacacacacgaggaaagattggagaattatattgtctcatttactgactttctgttcttcctccagcaagaaaatttgtacaatttctttggattcccaaatcgaatatatatctctgatttgttagtcatgcttaactatttgtagcatcaatttcgttttcgtccttggagtttaacacttcataatcgaatatacttttcttagcaatttcagattggtctaaatcacataatcttaaatgctaactttgagctaattatccgatatcaatattttgaatggtctcactttgggatcttgtagctgaagcgcattgtttttggcctctacatatgcaaacaatgagaacgtaggtgccttcgattcattttaactggagcttctttgctaatgcatttggaaaatgcaaagagtcacgaaatttgagttttaacaactgctccaccagcacaccaaatgtatttttggctggtttgtttttatgcacatatcatcagtggcagagctggcgacaatggcatcatataggtgtgacctttgggtaggatgtacctgcatgatagcatgaccctcatcataatgtcctatatattcgaattcaggacgtcttctctctgtaattaatctcagctcaaattaattaagatgaggctaattatcatgactcttccagttttggtggttatgtcagttttgacaggtttggtggatcaaggggagggcacc

SEQ ID NO: 71552 - DNA, 810 bp, Prunus persica
  Intron number 1 from transcript ppa024431m (locus ppa02443 1m.g) derived from phytozome v7.0 (chr-ID scaffold_4; pos 13234227 to 13235036 reverse strand)
cgaagagttctcttctccggaagatattattcgaggtattgtaaagatttttgtttttgtttttggttttagtaattttgtttatttatggtttagtgaaaatgggagttgaaaaagttgatttcttttatgttgtctttgatgaaattgggaaataaaatgggggaaatgtggtggagttgattatctccatttaaaaaaagaaaaatatataataatacattgtttgcagatggtttggggaagagaagtaattctaaagcatatttcgatgtaagttgttaagtacaagaaagtagcatttttgttagatttgcagatgtaatgtaatgaatttttttatttataaaactaatggtttttgtgatttgggggattagggttatgcaaaaggtgaaaatttgagatgggaaaatgggtaggtatggttgaaaattgaaatgccttttaggagtagcagtactagtagggactttatttggtaaattaattgcttagagcaatggggttggttcttaaatctgggggttgataaatagtggcaaaaattgtaagctatatgcaagaggcataagcaagcacattgaataacgaagttttgtgtcttttgatttgtagtacgattaggagaactttctcggtaagttaatataatcatttttagattttttgctcggaaggtctgctttgcacataatctttcatctgactcattttcagacagtgtgctttctctcttccttgtgtgtgtgtgtgggtctaccctattggttatgtatttagattaatggttgccaaaatttgtagcag

SEQ ID NO: 71553 - DNA, 1014 bp, Prunus persica
  Intron number 1 from transcript ppa023648m (locus ppa02364 8m.g) derived from phytozome v7.0 (chr-ID scaffold_5; pos 11055855 to 11056868 reverse strand)
agaaagctgttggccttgggggttggcactggctggtattttctttttactttcctaaactgttttcttttcatttaattttctcctaatttgctttatgtgggctttgggcgtcattttgttttttgttttttgttttttgtgtttttggaactgttgtgcctaatttttgctttgatgtagttttctagattatttgggttgttttctttttctttttctttggtcaactgtgttttttttaggaagttggactcttaagcatttttcttttttccagtactattttatttactttcctggtttctgggtacgtaggataataggtctgtgcactgttgttgtgtttgtgttgtgtcaaattttcctcatttactcattcaaacacgtcttaacttcatgggacaagattcaaagaaatttgtaagtttaacaatatcccataaaattaggcatcaatctccagcaaggcatggttgttttctgctttgagtaataggggtttttgcttttccaaccaattaaagatttacgttcttggacggcaaaataggaattgtagttttctctggttgggtttcattgacctccctttgcatagagctctcatcctttatgagctcgctggatctaaccaatcatgtctgccaaagtatgttgtttcttttaatgtaattttgattcataaattactgtaaaagtatgggtcactagaatgttttcgagagctctgttatgtgttctgtttatttaattgcaattttgtaaattatatcttaatctagggttagagaatttacccaatagcttttagtctattggtacttcacttcccaatcttggaaaaggtcccaagtttgatcccctctccctggttgataaaagaaagaaaagaagtatggtttcttgatgttatgtctatgcgttcgtgaaaaaattgcagttcaataccctcctccacatttgggatgcatattttaacccattaattttcgccatacaaggttctgaaaa

SEQ ID NO: 71554 - DNA, 733 bp, Prunus persica
  Intron number 1 from transcript ppa013005m (locus ppa01300 5m.g) derived from phytozome v7.0 (chr-ID scaffold_2; pos 26302445 to 26303177)
acgcgtgttgttgtttttgacttttggaagcacaagtaagtcattctcttcttattcttgttctttcttttctcctatttgtctttctaaatttgattttgttagtgttgtttcagatagttctttgcatgtgttaggaatgatcatgtaaatgaaaatataaacgttgtttcttgattttagaggaataaaattgtataattttatatcccacattcatacatgtatcagatctgatgaagaaagttatttgctggcttcatatgggccatggtaagtgttgctgtgatcttggggatgctaacaatgctcttttatccaaataaaaatattttcttttgagcagcttggttctaaaagacaaaagaaatataaataagatgtctgtgggaccatctttgtcaggaaaacgttattaagcaatattttttttaaaaaagaatttaaatgtgaggatttgatgtgatgtgaaaatatatgcgtgatcaatgttgtacaatatggttagagatccggtatatatatatatataaacagagtgtgttcctgaagttgaacagtcaggactttgtagaaatttcatgcaagcatttagttattaaacagattccatatgaagcctggggaacgaatttctacgttgtgttggcatctgtagaacctttagaggcaaaggcctccgagagtggaatctgttcaattgactttattagctcatcaattcgcagttgca

SEQ ID NO: 71555 - DNA, 682 bp, Prunus persica
  Intron number 1 from transcript ppa002937m (locus ppa00293 7m.g) derived from phytozome v7.0 (chr-ID scaffold_3; pos 4856510 to 4857191 reverse strand)
tggtttctgtgcttttctgggggtttgccaatcaggtaatttccttgtcatgtgattcatgtctgcataatcgggatttgattgcttgcctgccaatcaggaatataattttaaagatgagttgatgtttatttcatgatttgattgcttgtgtacccatacacgttttctggattggttatcattttttccagtctcagtttcttaacatggttggtacatatgttgtttgttttatagatatgtttaaaaatgaggaattatttaaaacctatatatgtctgtatactgtgccagtttatcaaaaatggaagtgaaatatgttttgagattggaattggaggcttgattttttttcagttatctgattgtgaatggtgctctgttctatccttattaattaaacaggaaaaaattgatctctctttttagatggttttctcttctgtttgccacagcagactggacaaggattaactttggctatttgtaatgaccccagttgagtagtatcatataccaagatatggactcttatagaatacaagaaatgatctttgaagttttcattcgtctgaatttaaggtcttcgccctaatgttagtgactggaacttaaataaataatgttgcatggattttatgcagataactaccgtagacgaagcaaaaagattctaccc

SEQ ID NO: 71556 - DNA, 749 bp, Prunus persica
  Intron number 1 from transcript ppa006090m (locus ppa00609 0m.g) derived from phytozome v7.0 (chr-ID scaffold_3; pos 851204 to 851952)
aaactggtaaacattatgatttgttctaatttatattttttcaaattacagcatgctttttaagacttcacttctttttgaccggttgtttgggcttgaaagaacatctttatacatatctacccacatgaaatacatatgaagttttccccttcatagctaaaatagaaaaacaaggaaaggttgtgtgtgcccaacaacctatatgggatgttagaataagtatagatataaatagaagtgtatctgttttgagcttttagttatttttgcaataattggcagagagttgaattttcagacaaatgtagatagctcaataatgctagtaatttgattgagttgagcgtagacacacgaggcatcattaatttttcagtttcttattttgctaacattagtttctcctctgaatataatatatcagttttgctgtttaaataagacatcatttctcagcaaaatgtgaactaaattacatctatttcagtttgtaaaagtaagctcatgtttcagaagctatctgttcatatccacagttacagctacttaatatgcaaactaaataatactctccatattgaagattaggactgttaataaccatataaactctaacaaccttacattagtttatttgttgtttcttgatttgcatgattactgcatacctatagattcttcaaatcttcatcacaaataaaggttctgcaggtatccaaacctctacaactccatcaccaagatct

SEQ ID NO: 71557 - DNA, 661 bp, Prunus persica
  Intron number 2 from transcript ppa012927m (locus ppa01292 7m.g) derived from phytozome v7.0 (chr-ID scaffold_1; pos 39774523 to 39775183 reverse strand)
aggtttgatactctctctctctctctctctctctctctctctctctctctctctctctctcttcatttttgtgttttttgctatcaaagatctgttgggttcttccttgggccagatggaaactagcatgattttttctttgctaaaaatatgtcaagaaacatgaagtatgatttctatgagcagatctacaaataggatgtactacttgctctctttctccggctctgatagtttttctatccttctttattgacaaagaaaactgaaactatgtgaaatgtagcatccatgaacagatctggtaataaaatgtttttctctcccttccttttctttgcaaaaaattcaaacaactgagtgcatgtataagcatgtctcacaatatataagaaacgtcttttcttgatataaatatacatataaaatctctctctgtaccctctggttccttgactgatacaagcatataaaccggcttattatacacacttttctgctaacagatctgcatatgaaaatagacccttttacatgggtttttatatttcttttaatactaaattataatgtttttattttgttttcctagtaattaaactaattaactataaggttttgcaacaaattattaaaataaactcctgacagaacctcagca

SEQ ID NO: 71558 - DNA, 354 bp, Prunus persica
  Intron number 2 from transcript ppa014853m (locus ppa01485 3m.g) derived from phytozome v7.0 (chr-ID scaffold_6; pos 25917690 to 25918043 reverse strand)
agtggaacctgcaactttcaaccatcgcctactgtgtgagtgttctctttctgatatcttattattaggttcgcaacgttgatttcaacaattgatcatgcaaattcttatccgaatctgtagttcgatttaaaaaactcacagcagaacatgtagaagagaacattggcttttgtgtgtgtgtgtgtgtgtgtaaagtaaataaatgggacatcctattttgttgtgtcttattgggtctttttctccttgttggtattagatatatttgaatctgtcacaagttctggtcttcatccactccttacttttgcaatagggagttgtaatctcagcattagcctactacctgca

SEQ ID NO: 71559 - DNA, 728 bp, Prunus persica
  Intron number 1 from transcript ppa007817m (locus ppa00781 7m.g) derived from phytozome v7.0 (chr-ID scaffold_3; pos 19047951 to 19048678)
gagaggctccctgtacaggtaggggctattaattttcttttcttttcttttttccccattcttttttttcttccaaagatctttgttaattgttgtgtacattttgttttgaggtagctggtagccgtttttctaataaaaaaaggttcctcatttcaccattttcatcttcttccttcattatttccaatctgcaaactctgtctttgtgtgaacagcaagtgcttgaataagtgcattttgtttttacttgactacctgatgtcatccaacgaaaggaagaactcctttcgtctcttttgatgtttgctacccaacctttgtggttgggggaccctactaccgagggcagcaccaagatgaaggtttacgtgaataacccaagacaactatgcctcacccgagaaggcaactaattactttaatgccttactttgtcctggtgtgtactcattgaactgtagctttcgagtaaatgataaaaggtcgtaatagtaattccatgtggcatatttttactgaaacaaaggtaatttctccaaattattattattttttaaaataaaagtttttcacttgaaattttacaatgagcattgagcaccatttcaaagtacttacttgcaacactgaaaatagtttgagttgacgtttgacaatatgaatattattcatttgtttctttaatgcatttacaattgcagattggatcctctgaaagttttatt

SEQ ID NO: 71560 - DNA, 639 bp, Prunus persica
  Intron number 1 from transcript ppa001185m (locus ppa00118 5m.g) derived from phytozome v7.0 (chr-ID scaffold_1; pos 29798605 to 29799243)
gcacgccgggtgtttgcgcgaagatctcgaggcaggtgagggtcctattgtatctatttgattgatttcaaagtggggttttcgagtgattggtgaaaacgattgaattgggttttgatagactaggaagaacttagaagtgtgttggtaagtattgtgtgattggttgaattgcagcatatgggtttgtttgagtaggcgattctgctatgaaatgttaattttcttttatttcacaagttgtgtgcagtggggattacagacgttatttattgtagaaaaaagtgtactttaactaaaacaatagcaggtatgaaatgggtcttatggctatggcaaaaccgattgcttcctgtattctgtttgcaggtagtggattttagctgatttttagcaaatatcatattgacaacgttgcactgaagactatatacttcattgatattctcggaattgtaacttttagtttcttctgaactactatgttttgggtctctccaacgtgattaaatcatacgatggtagagaaattaagtttcatatttctatcatttttaatgatccgcttggtttgctcttaattgatttgacatggatgtggttataggttgggctgtattacgaggaagctttagcggc

SEQ ID NO: 71561 - DNA, 702 bp, Prunus persica
  Intron number 1 from transcript ppa010417m (locus ppa01041 7m.g) derived from phytozome v7.0 (chr-ID scaffold_4; pos 7249073 to 7249774)
ggtctaggatttcctcatcaaccacctcaaaggtaagtactctaatttcgagctttattttcaatttctgttcatgtcattgtttttgttggattatatatttgagactttcggtttcatgtatagatactgtttctgatcagcctctcgctttgctacttgtactttaatcttaaactttactgtttcactttttctttttcatggtttgttctggatgtaactagttctgcaaattctagcaacacttctctgccgctatcatgtcgaagtttcaatttttagtggctataacgttgttattgtttgttgaacgctctgcttggcagctgagaaagctgaggaaaaggaaataaagcgatgtgtattttgaatttgagaacgtatactagtgaaggaattttattttctcttccgtgtaaagctcagtttagcagagggtgttggtttctcaggttttgaagcaaattgatgcaaaataaattttgttgccatggataaccttttctaatgtgaaattaaagactattctcttatattttagattttcttgacggaaatataacctttatgattagcaacccacaattgatatgcatgcataattttgctttgttctctctttctccctcatggtctcacctgcttcaccttttcgttttgacagcacaaattgggtagaggccaccgggaaaagctcca

SEQ ID NO: 71562 - DNA, 742 bp, Prunus persica
  Intron number 2 from transcript ppa010417m (locus ppa01041 7m.g) derived from phytozome v7.0 (chr-ID scaffold_4; pos 7249767 to 7250508)
aagctccagcagttcataacaataactggagcgaggtaattgataatcatatgtaaattttctgtagtctgtcttaagaaaggagtttgtggagaatattatgcttctttgagtttggctttattgtaaacaaatatgggtgtagcttaatgttttattcctgtgtcacaagcttgttgtaatattgtgaaaaacaggttgtgtgagaggtgataagtgtttttatgtctgaatcctgctgtaacatgaaatgcattaaccacagtgatgatagtatcacaatataagaatcttataagcatgcctaggttcatgagtctttattaaaacccatttagatgttgaagttttgctagcttacatctgtcatgcattgatatttaaagcacccatttgaaccagttgatgttgggtgtttagttgttgatcatgaatggtcacatgtaacttcaatatcaatttttcctttctaagggacacatgtgcgtttgtactgtgctagagttggttgagttgagcagttgtaatggtctacttgtttatgtatcttttgaagttgagctggaaaaagtgtgtgcacacacacatacctgatttgtattagattggtggagttcttccataccttttttctttcttcctcttcttgagtagcttcagtttgatacttggaatagttgaaaagtctaacttcccatcatattcagtgaaaaagttgctctgcaggctttgaagtcgagtg

SEQ ID NO: 71563 - DNA, 475 bp, Prunus persica
  Intron number 2 from transcript ppa017846m (locus ppa01784 6m.g) derived from phytozome v7.0 (chr-ID scaffold_7; pos 7797133 to 7797607)
acaaggcatcacacaaaagtccccaaagtttttttgtgaggatgcatgctattattgagtggttgcttctcgtacgcattatggtttatagttcgagttaggtttctttatttcctttgttttcgtattagctgttttttcttgttatttatgtatttcattttatcaatgcaggaaaatcagattaagaatttcccctatccttactcaagcaaaactctaatgtcatcaattcaatctgtagttttcttccactgcgtggaaagggactggaagtaatggaagttggtacttacaacttcatattcggtgattatttttatttttattttttatattagtgccgaaaagtttactttgaatataataatgtcattattaattaaaagtgttgtgcaattttccaaaaatacttgaatttggttggaaccagatatgagtttctatattcctatttgattttatttagggaatc

SEQ ID NO: 71564 - DNA, 818 bp, Prunus persica
  Intron number 2 from transcript ppa007573m (locus ppa00757 3m.g) derived from phytozome v7.0 (chr-ID scaffold_1; pos 16430819 to 16431636 reverse strand)
tgaacacctgaagagcccgaagcattatacaggtacaattttctgacttttctttagaattatgaagagtttcctgtaattgaaaaaaggaaatcactttagtaacataaggtgttagttcttgaagtttctagtgattctagaatcatggttacagtgctaaattttgagttcaagttaaatccttgagctatcattttcaaaatttactactgcccccacaacacaagtgccaacattatgccaaactggcaaccaccatttgatgaaaacggtgttcaatattccattgccatgtttattaaatgacctttgccacatcacggatttcaaccacaatccatatctctgtcagcagtttctgaacattaagttctaattctcgactccaaatagcaaagtttttttctatggttttcagctttgaacatacgcaggcaaatgaaacctgtaaatttaatgctgttaaagatcacccattgaacaagtgtctgcatgtgtgagtactcatgtgtgtttatgtgttgatttttcctcatcagacaagcttatttaactagttttgtaaacgaaattttcaggagttattaatgtttcattatgagttggctttttgtaaaatcaatttgtttgaaaaaaatttagtgttattataaatatgaaataaattcaatagtttaattggtttttgaggttgctaacaaagtactggaacaatttaatggaaatgtcttccggttataacataggattattttggccatctattttttgcatgtttagggaaccaaaagggcaataaggtgtcagctcctgta

SEQ ID NO: 71565 - DNA, 862 bp, Prunus persica
  Intron number 1 from transcript ppa002294m (locus ppa00229 4m.g) derived from phytozome v7.0 (chr-ID scaffold_1; pos 39277285 to 39278146 reverse strand)
ggttcgtttgctttcgctttcttcaattccgttcatttcaagtttcatttaaagttcctcactttgaattacattctcattgggtttgtaaattcgagccttccgcttacttggtctaattttaagctcattaatttctaatttaagcttttaattattagtttaatcctgtcttttatacaatcgatcagttcatcagttatagtggttggatgcacctcctcaactctgttctcttacagcttcagcaatgcactcacatttcttgaaaagtttttttactttttaatcatctctaggcattcaattcttaccattactttaatcactcttgcccagggttccatctaatgtcaatgggtatgacttcttggactctgtgtgtttagactatctacgctttaaatttgaacgctttcttgttttttttttcccttagctgctttccaatttggcataaaaaatttcttgttgcccaatttcttcacaagtcatgccacttattaattaagattacaattttatttcttcatcgagcaatctcatagcatttaggaataataaccattaatcttgcaaacataagttgaggtggatccacactttgaacatcatgttaccaaaagatgaaaaagaattgcttttctgtcattttatatggtgggtagttttttttgggggtttagcgagctcttcaccagaaagaacagatttgaccttttctcaacagttgcatttctgctctctagtgtggataattgtttttccccctttgccattattgcactatttattgtcaatcaaagttgaacataatttctaggtatcttctaatccaaaaggttcacattcattttgcaga

SEQ ID NO: 71566 - DNA, 464 bp, Prunus persica
  Intron number 1 from transcript ppa009845m (locus ppa00984 5m.g) derived from phytozome v7.0 (chr-ID scaffold_7; pos 17459929 to 17460392 reverse strand)
gcatttccaagtctgctgaagatagcgacaagaaggtagtgcattcttgtgctgttcgtgggctaaaatttttgtgggtttctatgaatgtaactatgaggctgaaaattttgaatttttcactttgtcttctataaaatctatcctttttctgttagtttctgcagttacgtgtttctgagttaattgaatttgaggaagcaacgagctaacgttaaaagatttatgcatttgttggttccatatatttgaattccatgtttaggtctgacatttcgtgttcattatgccaatttgtagcactctctattatattaaataatatgaggtttgtactgtggggctagaagacccggaaaatttgtttagctgtaatcaatgcccatcttcttttcttttttcaataaacatttatgatgcttttttatttgaattttcatagggcacaaacaggagacttaagg

SEQ ID NO: 71567 - DNA, 1029 bp, Prunus persica
  Intron number 1 from transcript ppb013196m (locus ppb01319 6m.g) derived from phytozome v7.0 (chr-ID scaffold_1; pos 23549700 to 23550728 reverse strand)
gaggtagatttataattaccgacgtagattattttgttaaacgtcgttaagtgtactacaaccgacgtggattttaattttaaattataaatagagttttttttcccgtattctttcagttttagttttcaattccaaagcgtgataaatagatttttctttcccgaggaaatttaaaatgagggaaattaatgttctagaatttgtaaactaacacgacgcaatatttgcaaatctgtgtcatctgttaagattatgatgtggaacagagttccatctggtaagatttcgtaacccttgggatctcagacaaatctgattatgtcggcggtgttctatataaaccgtcgtggttatttcaattcttgtcattaagtagatctaccgacgtaggataagaaaatcaaagaaaaaaattgttaacaaaaattcttattaagacgaccgttaaaattaaaggtacgacgtataaaatgaataaatacgacgttaaattttattgtacgatttaaagataacgtcgtagaactatacgagaatgacgtcgatatatttatattttccgtcgttgtaaattaatttaatacggcgatattttgtattttaaagccgtggatttgtttgtaattatacgacgtcttatacgaaaacctcgtcgtgttattttatgagtaaaaacggcaatttttattgaaatcgtcttctttactttctacgtcggtcgattcataacttctgccgttctttgttggcattgattttacactgcggaaatctgtttcaaatagacgtcggttgtttaattatgtacgtcgttgtttttgaacagccatttgaaactccattttttagttgtctaaggttgtattacacgacggtgtttttagaaccgtcgtctttttataaaccacgacggttttcacttagaccgtcgttgttttctggtcgtctttttcactttttgtagtagtgatttccacgtcatcttttatagaaaaatcgaagtggaaaatttattttacgacggct

SEQ ID NO: 71568 - DNA, 857 bp, Prunus persica
  Intron number 1 from transcript ppa019047m (locus ppa01904 7m.g) derived from phytozome v7.0 (chr-ID scaffold_3; pos 17864182 to 17865038)
ttctgaaaagctgaagccttctgattctagagaaggtatactcatactggacttcatattttctttttcatacatggtgttaaggttgaaagatttaatttaattttttttagaaatatatttatatgttaccctcctacatgtaaaaataaaatcatcgctccgcaactgatgattgttttgggtctcatcctcaaaatttcataatgcccgttttaccctccagcagcaattaattttatgtactccttaattactgcatgtatattactggttttatttctatggtgggttttttcagttttgaattttgaggtttgtttgttggattcttttcttcttttattttctgttgccttctgttcttcttttatttttgtttactagttttcattctccagtcaaccgtgctcataaaataggtataataatatataatattgcgtgatattttgtttaattttaattttttgggtgttgcattctttttttttttagtttgagagtatacatctaggtattaaagggaggtgattttcttactctcattttctccacttacactccattttgttttaatactttttaatcaatattgttcttttttattctttctctttcttagtctacccataccctacattaatgttttgataactggaattaagaaacgtttatagaagataaaacaaaaaaagaaaagaaaagaaaaatggctagaaatgtgagtatttgtacgccaaattcgtagtttttttttaccaagtatgtgagtactatttatctttgggtttgttgtggttaatagataataatttttttgggctaacatatgaatatggtagcagaaccaaaga

SEQ ID NO: 71569 - DNA, 1036 bp, Prunus persica
  Intron number 3 from transcript ppa010251m (locus ppa01025 1m.g) derived from phytozome v7.0 (chr-ID scaffold_7; pos 19786478 to 19787513 reverse strand)
cccttcaaatttgtgcaaggtaaattttattatcaaaccaatatgcatttgtttatgtcagatgctcatgtactcagaatatcatccatttcagttatatattacttccacatatgtgcttttgtttctagtggcatacaactatgtttatcattacaatttagtacctatatactaagagtttctcggttgctttatcgaataactgattggttttgatgattggagcttctctttagatacgacttatgcatcaccatcgaggtataatattcataagtttagcaattagtatgttttttggcttgctgagagctccatttttgtctatcctatgcctggaccagtaacaaataataacaaaatggagacatgttcagtttgtaattgctttttcttcctatctataggtgattgtaacttttgctattaattatttggccctatttacctgaaaaaaattgtttcaagaacaagagatacacacttctaatgtatatgatatggtcctgtttccaaaaaaagatcacaatacatataggagccacattgaagtgctgcccattcctttccaatccgttttcagtaacatttaggggaaacaaattggatgcactttttgctgggtgatgagttataagactcaagtgtttgtatagcggtatcaaatccactgattcttccatggtagctcccaagtaaaattgatctgcaggatatgcagaacattgaattgatttctttctatcattcaccatcccaactatttcaaattaaacgcagagctaaatatttctatcatttctgctatgggggtcaggataaaagttttgtgacttggtctaatgcaagtgtgcttcagttttgtccccaattttgccatttaagaggcttattttcctatcgatatgttttactgcataaaatgttttctccatcttctcattacagtagctttgttccatataaaactgaggttctatttatgatttccattttagggtgtggtgattgatcaaatccgagcatctgtttc

SEQ ID NO: 71570 - DNA, 466 bp, Prunus persica
  Intron number 1 from transcript ppa009865m (locus ppa00986 5m.g) derived from phytozome v7.0 (chr-ID scaffold_6; pos 27940277 to 27940742 reverse strand)
cgtttccaggagattctccgctgaccaggcacttagtaagtttcttcccctgtttttgtgcggttgaaatatcttctcactttctatttgatttgggtatttttatttttgtaggatctcacctgacctgaaagacttaaactttctttgattttctagtatctttgctctgttttgcctgtgaaatatgtttcctttattgttttagtctgtgaaatttttttttactcttagatggtttcctgccacactatgaaacgaaaattagggataagtttcagaaagttactccttgccatgttcaaaattagaaattgtagattttcctttttaggaaagaaatggaattgtaggatcatgttaatctttttgtcttcctcaattcatgagtttttatttttgttgtagtttttcattgattactaacaaagttgtgttgttttgtttgtgaaattccagggcaccc

SEQ ID NO: 71571 - DNA, 1052 bp, Prunus persica
  Intron number 1 from transcript ppa012016m (locus ppa01201 6m.g) derived from phytozome v7.0 (chr-ID scaffold_2; pos 25602137 to 25603188)
gcatactgaagcagggttggaaagatcgatctaaggtatggccaaattcgtttcatttttttccttttttactctctctcttgtgtttatgttctcatctgaagaggtcaatcttctcactccattaactctcaatctcaaggtttggaatattcagaaatatttgtttctttatggctggtgccttttggcagtagtctttgtattgcttcctctttggttatcaatgaaagcattttctgccaaaataagtctgttttactgtttgtgttttctctttctctcttttagtcgcccttaaggatgtatatatattttttccaacaatacaatactcaatggaaataatcgagaaattcaataataagttaaggacttgcttagttgtcttggctcctcgaggcagtaagtcctcatgttggtatatccctgtttcgcaaaactgcaattgataacatactttttaaaaaattaaaaaaaaaaaacttatttccctgtttatgcgggttagtagtttcaatttttgtttgtaaggcttccatgtgaagaaaattaaaagtaaaaaaattgtacaaagcccatttggtatgtaatttggcagcttcatctacaaattcttggctcactcttaatcgaagttagtattatattgttttgtatgtccttttatttatttgcagctacttgagagaagattcatctgggatattttctctttcttaatgctctgttgtgcataaaaaagagaaagaaaagaaagatccagcaagaatgaaggacactgtagccaaggagattctagttagctttatctaggaagagatttcctgtgttacttaaatttgatctaatcaattgttttgacttctaaattgatgaattttattacattcttaagttgtaattcgttttcatttctttagcaatatgtatgcttttcttctttagcaaatgtcacgaaaaacctgttacgtatctagtgttttactgttgattggcttaatttccacttgacagcctgacaggtacttttttaaagagctttagagtgg

SEQ ID NO: 71572 - DNA, 542 bp, Prunus persica
  Intron number 1 from transcript ppa007212m (locus ppa00721 2m.g) derived from phytozome v7.0 (chr-ID scaffold_1; pos 40116994 to 40117535)
gagagctggtatgtttcaagtaggcttttgggtttgttgggattttggggtcttgttattagtttttcttagtgtgttgattaattttgttgttggggtttttgggtagctactaattttcaatataaacttgaatgttttgtgtttgatgttgctgttgtgttgggaatgttttatgttcctttgtttctgctgcgccatgataaggtcttcatggagaggtggttatgttttcaatttggcttttgggttggttgggatttgggagtgctgtgaattttgcttagtgggttgattaatttttttgttgggtggctactggcttcgtattttactagaatgttttgtgtttgatgttgctgttgtgctgggaatgttctatggtctggaatgtaactagattcactgttttcgaccatgaatttgttgtttagaatcaagtaatgctaacacttaaagttagatgtgtttttgataaaatttgtgtttttatgtgggtactttggcataccaattatttgtgacttccaggtgccacttca

SEQ ID NO: 71573 - DNA, 522 bp, Prunus persica
  Intron number 2 from transcript ppa006742m (locus ppa00674 2m.g) derived from phytozome v7.0 (chr-ID scaffold_2; pos 17403728 to 17404249 reverse strand)
cattagttctgtttcccgatcttggcgtcattttggtgagctgaagcagtttgacatattttagttcaattgctttcttaagtttccttaggtataactccacttttgattgtgtctgatatacacaatgcatgttgctcaatacttaaatcaatgtaggaaagatagaatgttttatgttttttgaaaaataagtggttccattttagttgtttgtaggtggtaagtagtatgtgctgtctctgctctcccttgaatattctattactggcttgattctccaatttatatcttttcttctggttgtctttgtgattgcatcaatttcttagtttgcggatttctgaagagatgataattaaggttcactcctgttttgggttgatattttgaatgatggtaacccatgttggtttttttattattttatagaaaatttatatccctttagtccaaagacatcttgtcttaccaaacgagactgaagagtttggaacttttaatgttttgcagtgatagaaa

SEQ ID NO: 71574 - DNA, 599 bp, Prunus persica
  Intron number 1 from transcript ppa006742m (locus ppa00674 2m.g) derived from phytozome v7.0 (chr-ID scaffold_2; pos 17404354 to 17404952 reverse strand)
ctttcttgtaagttctctacttgttctcttgtattttcttttgaataaagatttgttccaatttctcttttttccgctgacggttcgcttcaatgtcctcgatttgctgcatttttgtttacgttcatataagtttacagttttgaatttttattttatgatttaatgttttctaaaccatagataatgtgaaaaacttgtggttttccctatacccaccaacatcgttatcatcgccgtcgtcttcgacacaaaagtactgtacttgatgtcatgcatgacaggaatgtgatcaatttgattgtttttggagtgggtatttctttgtttttcttaattgtgcttgtgaggaattcggatgcttttagctcttataattttagcttttacagtgttgttatgatggggttcagtggttttgggaggaattgtaattcgtgtcaagtttgacagcactatacatggagggaatttgcattgcgtataatattttttaaatacttatttttgtctccaattttcattttaaactgtattgaggggtctcttacaatgtgaaatcaggctttgaggctcgccgaggcacccgagttttgttg

SEQ ID NO: 71575 - DNA, 714 bp, Prunus persica
  Intron number 1 from transcript ppa017562m (locus ppa01756 2m.g) derived from phytozome v7.0 (chr-ID scaffold_1; pos 27204453 to 27205166)
cagtggaaaacgcaggtatgttccttctactattgaaaaattaaagaattatattgcctggccagaggatataaagaatcacacaaggttttcatgtttgcttgtgaaaactagtcaggttcttcaagaaagttaagccttagttaatcaaagcaattgattgggggaattcagttattaaatgtctaatatgtgaggcaactatctaggttaataaccaaattatcttcatttaggagacaatgtgaacctaaaaactaagaagaaggaagattaaagacctatgcatgtagagttctatagatgtatgagagaggttcaagcgttggttcaatatgtttcattgtgtatcttgcacttgttggtactgatatatacacgtatacatttgtgtgtgtatgttaagttggtctctcttatgagaaaaccagagtagataatatgacataccataacatttttattttttctttagttttaaacaagcctcaatgttgtattctgaaaccgagattagtatgtacatgacgatcatgcactggcattattgaatatcgtctgtccatgcagttttgttttgtgcgcgtgatggctgtaagagtttaacttctgattgggaatatcattgtcatcagtaactttcccttttctctgttttttttttggtcgagtttagtagcattgaagaggttatagcaaagtttgctcaactaa

SEQ ID NO: 71576 - DNA, 835 bp, Prunus persica
  Intron number 3 from transcript ppa012266m (locus ppa01226 6m.g) derived from phytozome v7.0 (chr-ID scaffold_4; pos 3673352 to 3674186)
agtttgtggatttagagctctttgtactgccaaaggtgcgtgtagcccttccaccgtttctgtaatttgataatcaaatgtaatttcactcgaaacttcgatttgtttatgtaaacctctcaaataatcttaaagtgccaccatgcagtaaaccatcccatccattcacgaaattttcaaaatgagctgcatttgcttacttctcaggataagagatatggcttggaaaggctactttttcttgtgtgcaatccttaatccacatgaacaatgaacgaaaactaaattatccgcaaagtacaaacatcacgccgatatccagtttgtctgtgatctatttgtttgtcaactttattgccttggccccattctaaatcattttgtcttggttcacatctttgagatgttgctaatcacttcgagacctttacgagcaaactttatagttttaagttattcccgatcctattaggggttaggaatgcaaacatcactcgtattgtggtgactggtaagtactcttcacttcttggtaggttcatctttgtttttgctttctatcctcctcaattagcttgtccgatttcctgtagaagctcttattcattaaggggaaggaacctgcttcttgatttgttggccctattcacctgtttccctttttacctaatatgacgggcattggttattgacgctatttgttcagtaatataaaaatttggtaatactagtgttgtcatagctggattctaagggaaattttattcttcttatgtggcactgttttctggctgcatcagatttgtcaataaagaagtgtgtcccgtgcaactca

SEQ ID NO: 71577 - DNA, 757 bp, Prunus persica
  Intron number 1 from transcript ppa004987m (locus ppa00498 7m.g) derived from phytozome v7.0 (chr-ID scaffold_6; pos 20374649 to 20375405 reverse strand)
gacctggtgggtcactttagccattttctatgatacttgctgtcggtagggtttctatacaaaactagaccccaagtcttgatttttgtttctttgtttttccgattaccatctcattaatgctgctttgtacacttgtaaccccacgctagtttgtaggtggtgcaagacacttcccagtccaagaaaatgtggaaaaaaattaaattaaataattaattgatattgattagttaacactaaaactgggtattgggagtgtaaaagtctgcttaatgtcttcttgcttagggacggtggagaaaagcgcgtacaattatcatgttgtcgatggaattttgttgtatcaaacttcatattaagcaaaagaaaaacttttgttatctctttcttcggtactcaaagtgtgacgtggcattcctttgttagacaaatcttctctgtaatctatgatactttttccttatatatagctagaccccttcactccaacaacacccaataacccacttcaaacttgcattccaaaatcaaaaccaaaaccaaaacctcaactctctctctctctctctctctctctctctctctctctctctctctctctctctcgctttctttcctttgcacttttgtgatagtttacatctagcttctttttatatcaagagagttgtttttctttttcctttccaaaatcaaaatgtgcatgttgtctacaaaagctacgtgcaactctcacggccaagactcctcatac

SEQ ID NO: 71578 - DNA, 820 bp, Prunus persica
  Intron number 3 from transcript ppa004200m (locus ppa00420 0m.g) derived from phytozome v7.0 (chr-ID scaffold_7; pos 9180692 to 9181511 reverse strand)
ctagaccttttactgtggaaagtagtgagcgtaaggtgatatgttattttgcacaagttttggttttatatatttttgtaatctgttttaattgggttctttcaaacttcacagaggtggcctttatgcagtgtcaaaaatgattctaattgctagatgaatgtgggtttcctttgaaatgaaattttgaataattttattttcttgtctcacttgacaattcaagctgtgaaattctttcatgtcagagaagggggaatgagtgcaaaatgaattttacattagtgtctacagctataaagtaatacatgactggtagcgttgttaactttgtaagtcttccatttttctgcaatatatatggacatctgaggggcttcaagtatggacatctgaaatgcggattggctgaaacaatgcacaggttgattgatcaacatagctggctgatcgattggcttgcatagtttcgaccagtccaccttctttttacatttatcctcaaagatcctcctactctgctccattaataaaacattcctcatttactataaagaaatcataagttataaaagaaacaaaaagaaaaaggttcatttttgcccaatgtttagatttcttttcttcgtctataatccactgtgcatctctttccaatatggtaacatttatcttctgattgtatgctgaatattttactcatatcctattggccttgagtttaccatatgttaatttgtgcttgtacttctaatctgattctcagttttgcatttgcatttcaggttaagtgccacagtctaatttttgccacaggagc

SEQ ID NO: 71579 - DNA, 849 bp, Prunus persica
  Intron number 1 from transcript ppa001826m (locus ppa00182 6m.g) derived from phytozome v7.0 (chr-ID scaffold_2; pos 15413612 to 15414460 reverse strand)
ccgtacgaattcgtgttctgcttcgttttgctctggtgcgttgtcctttcggttctttttctgctgggaatttcctctgattattttatttatcttttaaatttggttgcggggagtgggctgtctcgcgatctttctctactctcactgtctatggattccacattctctgtctcagttactttcttttgaaagaaaaaatgttggttttataatggtgtggcttggaaatgaaggttttgcttctttgaccttgtgggttctgctttttatatcttttgttaggttttaatatgctatatatgtaccatttccgtaattgtagtggactgtgagtgaagttaggaatttgaggagccactgattgattcttaattttctctgatcaggttgggtttctagaaactttgacaattgcagtttcgtggttgaagggttttgtggtttgagttactgattgtgggaagggctatgcaactgtagacatttcatatttcaactttttattttcttcctattttctgttcaaattggtgctagtttacatcatatttaggtagaaaaagaaaatgaacaccaggcatttcaatttcttgtccttgttgtgggttggtggtatctgggtgcattattttttaaatgaatctttattatttttaatattatttctattagtgctgccgtcaaagacttggagtgctgtttgtttgctgattaagatggaatagaattaagtactgtttagtggactacctacacattaagatctgaccatatatgtgaagaatcctgtaagctaaatcttgatttactttactttgcagaattgtttcgattcggagattttct

SEQ ID NO: 71580 - DNA, 799 bp, Prunus persica
  Intron number 1 from transcript ppa025680m (locus ppa02568 0m.g) derived from phytozome v7.0 (chr-ID scaffold_7; pos 13437395 to 13438193)
gagatgtaaaataaaatatacatttacatatatttttatatcttttataggtagaacccacccgagaaaagaaagggaaaacaaacaaaataattataaatcttagatttacatcttttactattagagaaaaaacgtacttatatcctctagatatataaagggaatgtaaaagtagtttacacctccaaatttacaaccagaccgtgaatgctcaaaggacattgcagccaacgaaacaaaaatctaatgaagacagacgtggaatattaccatcaaattctagacacgtgttctgtcgacatagatattaatctacctagtgccatgaacacttgtggaattccagcacatatgatatgagtatcttctagttttttctagttcttgattttctgactattggcaccacaaatcattaattttcaatacaaacaagaaagtcattgaatcaaattacgtaatccaatccgttttacttttaatatttctttttcgacccataaaaggaaaaaaatttcaaatttgctgacccaacaaagacttacaaaaacaaaaacaaaatacaaattatcgtgttttccgatttacatggagtggctgcgtctgttgttgtggttgttaacatcgttagcaataacaaatcatgtttcatgttcattttcatgggatttggaggctggtccgagtttggagctgagtcaactaagtcgggagctgctggactcggcgaggcagcccgagttctttgattggttgaaaagggttaggaggaggatccacgagaacccagagctgg

SEQ ID NO: 71581 - DNA, 801 bp, Prunus persica
  Intron number 2 from transcript ppa025680m (locus ppa02568 0m.g) derived from phytozome v7.0 (chr-ID scaffold_7; pos 13438344 to 13439144)
ctctcccaattcaggtttgccaatatcctttctctgagagaggaagaagcggaaaagaaagagagagagagagagagattcgaacccaaaaaaaaaaaaagagagagaaaagaaagtgtgcgtgtgaatttttttaatttttaattgttttttgcgatgggaggtggaacacttttcttttcttcctgaatttgtgaatttttttaagttttaattttgttaacataataataataatattagtgaaacatacagcaaaaataaaaaatatttgatttaaaaaatacaaaaatagggaaggtaaagttatttgatttattttttgttttgctaagtggggaggtggggtggttcaggttgtttcattttaaattgttctaaagataaatctagtttttaaattgttctaaagataactctgtattgattggggttttgttgatgatcattcagtgaatgtagtattatcgagcatatttgtggattaaatttagtgaatgtagcattatcgagcgcatttgttgagtaaattaagtgaaagtagcattatcgaaattgattatatcgggttttgggtttgttaggaattggttgaatgggagcacaagagcaggaaccctggaaagatgctcatgtaacaatgctgcttggagcagctaagttacttcagagcaaaagcaaagaaataaaggtaacccaattgaaatatgctcaaaatataccatttatacattgcttaaggttttgcatatgtacaattttatagggcacaatcaagcttgtttttcaacctggagaaga

SEQ ID NO: 71582 - DNA, 677 bp, Prunus persica
  Intron number 4 from transcript ppa013056m (locus ppa01305 6m.g) derived from phytozome v7.0 (chr-ID scaffold_1; pos 32587960 to 32588636 reverse strand)
tttgcgagcttgatttggtctttaactttcacaaggtccgtttgcttatttctcacttttctttaatgtactacccgaactcctcttatatgattattgcgttcatgtttagttactgggttagggtagcattcaacccacactaaatcatttgctgaacttaccttcgatagtggtggccatttattgggatcatgtagtgaaaagagtggaagaagagagtctatttgtatggcagaatgaagcagacgtgtggtattgaaagccgttgattttgtccaatctaaaccaaaaagatagagagtggtttttgaatgttaatctaatttctttgaatgcatgctagcattcttctgtgttctccttgtacattataccatacttagaatttcttgttgtcagttaatgttaggctttaacaaagtcattctgcctggtacatgccagtacttcagatcagcctctccaaaaagaaaaatgaaaagcgtatataaatgtgtatctttatttacaacaaatttcttatccactccctttgtatgtgtgttggggggcggggtgggtgggcggggcggggcggtgtgttttgtttatgatcgttgtaatatattttttgtttgttatcttactgattacttattttcatttccatttatggaaggtctatctgatacttg

SEQ ID NO: 71583 - DNA, 919 bp, Prunus persica
  Intron number 1 from transcript ppa003456m (locus ppa00345 6m.g) derived from phytozome v7.0 (chr-ID scaffold_1; pos 32350858 to 32351776 reverse strand)
ttctttgtcaggtatgaacatggaggcactttgtcctatttgagtggaaatttaattcatgtcttaggacaagcacaactattaaattttcaaatttttatttatgttattttgttgattgggctgttattctaccatctccactgtgttgattgccacattgttaattttcgttttgattgtacataccctatttctttctttctttcccatgtttaccattttattttgatctaatccttatcgtctccccattgtctcaaagacctattatgttcttgactagaggttggagtgggaagtttcgtattgttttcccatgcttatgaatttcagtaattagatcatagccttaggcgagaactgtaattggaacttcaccactagatagaaatcatgttttggcataaatgttactttaaagaaaatggtaaatagggactataaattattgaattatcttcctgttatttgaattttacgtttacaagtgctttaatacacatggagatgccttcttctttttttcttttaaatttttaatggtatcttctagtacttgttttactatcttataaatgacagcagcactcactgagacttccttttcagtggatttaatttaatatttaaaatgcacattttaatttttttagtctaaaagatgattccagaattgttagtttaaacttctctaattttccatatgtttctatgtgaactctcctatattcgatatgcatgtaatgtaagcatgaagctgtttttggtattcatctgaatgattatcttaggttggtttgaagtctggatagtattttggatgtcacccattgttcttgtttagttcctttgtatttttcttcttgtttttatataaagtttgttgatagaaaaattatcttccagattggtttgg

SEQ ID NO: 71584 - DNA, 820 bp, Prunus persica
  Intron number 2 from transcript ppa002733m (locus ppa00273 3m.g) derived from phytozome v7.0 (chr-ID scaffold_6; pos 4293322 to 4294141 reverse strand)
tctgtcaagctttgggtgcttttcaggataagaaggtgaaattttttccctttttggtttttgatagaaaatttgttttatattttggatttgttaagatacaacaatctaatgctctgtccatattttcatttctaggaattggcttatcaaaagaagaacaaaaaaaattggaatcagcaattcttaaactgattacttgctgtttgttattgattatacttggggctgcttttgtttttcttatcaagaaactgagtttaaatgttaatgctgagtttggagtgtttaattggtgagcaaaaacgccactgcgtattagactgtcaagcattaataacaagatgcatacgcaagtttatctgctgatttttgatttttctctgcatactaatcctgtttactctgcatctgaagagatagagtgtgttttatgacgaaagagaatcctgtagataagataagaaatcagttcatttattccatcttgtcttattcaaaatgtaaagcaaagtatttcaagcatgccttgtatttatctcctttgtttttaagttttcttgtaatattgcagtttgtatgaaagacttaaaaacaaagcaggtcctgccaaaggtagagacttttccagctttccttagtactgcttctcaatgctaatggaattttatatttttgttatgacaatttcttggatagaaaacttttaaaattggcagttatatatcagaagtagatagtatggtcctgatcacctattctccccttttattttatgatattaggttgttacttgccttcgtcaaccatcacaaggacc

SEQ ID NO: 71585 - DNA, 381 bp, Prunus persica
  Intron number 1 from transcript ppa016274m (locus ppa01627 4m.g) derived from phytozome v7.0 (chr-ID scaffold_8; pos 3574590 to 3574970)
ttggcgagaagcaggagcagggcaacctgtgtacagtaagtgattcttctgaaaatggacctgttttctgaaaaggaatcttgtcctatgatgtggaaaagaatcttgacatgataatgacgcatgttgtgtacaaattgatagtctttaggtctttttgtgttatgtgttgtcgggagagtgggttctaatgcaatatacctttcctgatgtggtcccgtttttgttttcttctagttggctttgaatatgttaatcaaaccatgtttgttgtcttacttttaataagtggcttagaatactattttgctgttcttaaagacaaaccctttttgtttctgtgtagaggacaaagaattggtcacttttgaagtgcatcat

SEQ ID NO: 71586 - DNA, 707 bp, Prunus persica
  Intron number 1 from transcript ppa017682m (locus ppa01768 2m.g) derived from phytozome v7.0 (chr-ID scaffold_7; pos 12530931 to 12531637 reverse strand)
tacccaactgtcagaagaggcgaaattccatctgggtatgctgcatttcttcctcaatgatataaattacattcaacttttagttggtccaattgggttcttctctaagcactgttcattaggaaatgccactatgaaactttggttagaagattgtttttatttttcttttcctttttcttttccagttgggtatgtttgattttgctccaattagtgaattttggtctctgtaattttttcctttagctgttattgttagcttgtggaactggaagtttctacttgattattattctgaagtgatgctgcaattacgacattatgtcaaggtttgaaggactaatatagggtaagcggttgatagtacgcaatcctactattgaacatgtcaaagcagcaaaaaactagttagaagcttgatatagttggttgtacctatttgctttactgtggaacatgcaaatagaaaaggaaaaaaaaaaggcaatttggtgtctgtttatagattatactccctttgccttgttactgattttgattttgattttacatgtgttagtacttgattcggttccatatacatggttgcatattgattttggagactgtagtctatgagactcaagccctttctttttatggtattaaagtgaaagtgaatgctgccaggcctgcagtcaagttgaagctgctggatctgatcc

SEQ ID NO: 71587 - DNA, 798 bp, Prunus persica
  Intron number 1 from transcript ppa004645m (locus ppa00464 5m.g) derived from phytozome v7.0 (chr-ID scaffold_6; pos 3094626 to 3095423)
gcctcggttacctcgccgacctcagtttccaccaggtaagaatcgtaaagttaacaagtttcgattttttttggatatttgtttcggtgtttgtttcctgagaaaatgcgagaaagtgaaagcatagcattaccttgccgacctcaatttactgaattggaacaacttttcggctcagtatcactgacttgaatgaaattgaatagtgtttttgaattggaagtatatagtgtttgcatagtactatatgtatctgttatatgcacagaaattatagacataaggatcttaagctatacgaaatatggtatgcagctgtgctaccataatttggctttttaatatttgtttaaaggaaaatgcttttcttactaattaaagttcatacaaattgagtaaccctgtactatttaggaaatcagggaccggctttctgtgggtatggaatcagttaggatcatttgtttgtagagtaaccagactgtcactccgaactgttgtgattaagcgaaatcgtgtttaaatgtgcggtcttgattaatttccaagctgtctagcaagtttctcttttagtttatttggataatgactggctaattgccagtatatgcaattgaatctatgaattgtgtgagattgcttcttatttgatttgaatttctacatgcgctgttatttttttattttgcgtctcattgttcttttcattcttattgttctgaaattatgcttagaaacagactatatgtgttgcttacggcagttcttgtatccatctgaagaggactcgtacaagtt

SEQ ID NO: 71588 - DNA, 1008 bp, Prunus persica
  Intron number 1 from transcript ppa006718m (locus ppa00671 8m.g) derived from phytozome v7.0 (chr-ID scaffold_5; pos 1688660 to 1689667)
ttcagatttttgtctctcagcttctctcattccaggtacagagtaataatgcttttggttttcatggtaatcgaaagaagctgttctgttttacttttttcttcttctttatttggtttccagggtcgagcttattatcaaacattggttcagtttctgttcattgtgtaatgaaaattggtgcttgagattggattggaatgtctcatatgagctgaatgcagtttgggttttggcataaaaaacccatcaagctgattagacttaatggctaaacagatataaatagtcgctttggctagaaaaaggattctgaactgaagaacaatagtttgcaatttcagatctttttttttgggatagaattttcaatctaagatttggaattgatgatctagtaatgtgccagtcttttgctctgctttcttttccttgtgtctgtatgtttatatagttgccaaatggattttttttcttctctttctttgtatatattgatttttcaaatttgggttttccatcgaatagatggatggtgttggttcaaaatggaactggattctggttgattagctaactttatgctcttattagtacagagtaaaggttaaaaaatccctctgttgctcttcctttcacattaagcaatgtgaagggagagaaaatttgtttggtggattactttttggctggatgtattggggtgctagctatgacaggaaactgctaagtaaactagattgccttgaattttagaggaagaaaaaaagaagataatacttgtttggtccttcaacaattatatgaattatggagttatactttgtaagttagatatggattattgagtaaagagaagactttttagttttgagtattgcattctattaggaacttatggtactgttatttaggggaaaactaagtctaccattaagctatgaaacgaatgttctgtatactctttttattttatttttatatttatggctaaaatttgtgtgcaga

SEQ ID NO: 71589 - DNA, 694 bp, Prunus persica
  Intron number 4 from transcript ppa005663m (locus ppa00566 3m.g) derived from phytozome v7.0 (chr-ID scaffold_4; pos 14734473 to 14735166 reverse strand)
gctttcgatctttgtctaaggttcctttctcactttgtttttataaattattttgaattcatttttggtaagtaaattcgaaaaaagtatattaaagttcagtgctttagattttgtgtggtggattgtgaatgtcgaattagggaagcttttcggagctaggacaagctttgtagtttcattttcagctgaatttctatttaagcagtattttttctgataatcaaacaaaatcattcaatgattttgagatccaactatgagttaatggatttgaaatttcattttgtcattgaaaccaatttgaaaaaggaaaagaaatttagattggaattagagaaccttgaaatctgtgagtgttaataatgataaaatggttgttgaaacagagtatttgaggcgggaaaacgtaaaatataatatcgattcactaggatgacactgcagacgtgtattagagttagagccaggaactaaggcttttcagttgtagcgtatcatcgaatgcagctgcttttaatctttatttttctataggttgactatcattttttgaagtaactcctttttctatgatgaataaatgcacaaaatgtgccaaaaacaaatttgtgcaatttaacttaattaggctgggctgtgttgcaaaatattaaataaaaagggaatttcttatgccattttcagggaaatt

SEQ ID NO: 71590 - DNA, 635 bp, Prunus persica
  Intron number 3 from transcript ppa005663m (locus ppa00566 3m.g) derived from phytozome v7.0 (chr-ID scaffold_4; pos 14735374 to 14736008 reverse strand)
tggttaagaggttgggactgaccaccaggcaacaggtatcatttgaagaaccgtttttttatgtcgagttttgatttattttccttgacataagtgggagtgtcatgcatggtcaagttgtataaactattttagtttcttacgagtatgattccaactatggtacactattgaaaacttcatgcttatatcttagggtttttctttttaaattttctgttttgcttcttatcaccacctgacaagatcatgagagatcctcacccctagatctgctctcacaccaaccaagacacacatctggtattcctttgtggggcttgagtttttgcagacccaattgacggaatgtgtaaattaaatgttggggtgcaaattgatgaaatgaaaaatccgtggcccatttcgataatgccccctaaaccgtgggtgttgtgggagggttgtgattgggggagagagggtttgattttgcaatatttttcattaattttaatattgtatgttactgttgcaatcaaactttgtggtttttgatatgaaaactttctacgtggtttgaagatcgacaatgtgttcgtttgtttaaagccagtgtagtttgcaggtccaagagaaagaaggcataaaatcag

SEQ ID NO: 71591 - DNA, 957 bp, Prunus persica
  Intron number 1 from transcript ppa001213m (locus ppa00121 3m.g) derived from phytozome v7.0 (chr-ID scaffold_7; pos 15427213 to 15428169)
ctgccaatagatcggagcctcaccaggaacctccggtataagccttcggtgcttttgcacgatctctttctctctctaaatgcatgaaaacccagtttaaattctgtcattactggaaggtcttatatttctggtcaatgtgtgtgcctaaacacacacatatatatattgtgcatatatttgtttatttattttatgagaatttaataaatggatgtaatataggtgcaattatgtatgaattttatcaatgtgggttggtaaagagggataattagcagcattgcttatttggtttctgcttcagttagattttaagtgccaatttcaacgaggtcatttaagttccagttcatttaccatgtactttcgacaaatatcttccagcttaggaatggtgttaaaacattgccagaattgtttcgctggtcgaggattctagctgtattctttttctcttcttagcttgcatttttaaaagtttattgcaacagaaattgtggatattcctttcttgaaaaaataataaaaagagcacagaattattgagctttttgtgctcaacttcttgatagatagtgctgcctgatctcttgcagcccctttgttctgtgttcattcaagtccagtgtgacttttacatgcttattcattctctaccttttgtctggatttttttcccttctattttaatgatttagggtttttaagtgggctcaaacttgtcatctatcttgtacagatgacggcatcacaagaaaacatggatgtaacccggaaggagatttcattgatcatagattccctaaagaagcaagttgtttctaaccggggtacttccattaaggtgcatccctaaggaccttatggttattgttgcattggtatcagaaagtcataggactttatcaagttttgtcatcataatacgcggtatttgttcttttgcagaaaaga

SEQ ID NO: 71592 - DNA, 871 bp, Prunus persica
  Intron number 2 from transcript ppa009858m (locus ppa00985 8m.g) derived from phytozome v7.0 (chr-ID scaffold_1; pos 40184318 to 40185188 reverse strand)
ccttgagatagatttggaagcaggcagacggtctcgtttttcttctcccagttatatctttccagataagccatttagaagcccttttggtatttcctgcatcaagtcccttaaacacctctctttgtcctttgtaaatataaccggcgaacttgttgagcactttctatcctactgtgaactccttgagcatctctgcatttcttgctcagatcaattagtaaaattgaaagttgctggttcatcactccggttgaagttcctacaaataagtgagtgtacgtctttaggattagttgagatttgggctcctaatctcgtgtcatttatttataagggaatgttgggttattgtgacagtattcgattgaggcatgcacccttgcttgttaatgtatctcttgcagaaagtactaggtctataattgaaccttttctttcggttaaaagttgcattcctcagctggtgactctcaacatgcacatgaatctgaattcggtcggtatatgaaataattcaatgtttatttatgtacatatatatatatatatatatatatatattccaaattttgactttaacttttcatctttcagagaggaggggtgtggctcccagaatttccagaatttacttgtctcaaggacttatcgttgagtgttatcgcaactgatcggctaagcctccttgctttgactaaactgatagagcggtcacctttcttgcatagatttacattgaaggtaaatttattttcagtatatcttaaaattttaatagttgggaagtttatataatggtttgagaactgtgaattgtaattgatttatgtggaatcaactttccaaggtagattcgtaagcttttgtt

SEQ ID NO: 71593 - DNA, 709 bp, Prunus persica
  Intron number 1 from transcript ppa009858m (locus ppa00985 8m.g) derived from phytozome v7.0 (chr-ID scaffold_1; pos 40185665 to 40186373 reverse strand)
ccgcggctgtccacccctcaaataagtaagtttttccctttcgatttgcgtaacttcatttcctgttgtaagtttggaattttgagttacatgacgattttcaatcaaattcgccagcttttttgtatttgaaatcaaaatacctatcagtgtcagatttactctttcaaaggcgcaattatgtttcatggcttacatccaaaattttctttagatgttgtagttgtaccaaataagtagaaaaggttccgcttctccttcaaaaagagggaaatagaaatgtagtttcccagttggacttggatttggatttggtggattttagtcggtttgctgcctataaataatagggtagctgctttagtaattctagattgcaaaattttgaatgaaaagcaggggcttttaaatcagctattggctccctccctgcttttttatttacgcagaatcaaatacaagtgtgattttataaacgttgttgtgaatgaaaaacaccagcaccagcttttcatctgcagtcttgtcttcttttctttgtttttaaggttgcttagattacttgtattcacgaacccaactttttcgccttcttcgtttattatagatgatcgcttcttttcatctgtttgatagttggttttagtaataatcggtttgctccacttctgcagcttatttcattacattgtaatatttaagaagaaag

SEQ ID NO: 71594 - DNA, 222 bp, Prunus persica
  Intron number 1 from transcript ppa008892m (locus ppa00889 2m.g) derived from phytozome v7.0 (chr-ID scaffold_5; pos 483719 to 483940)
ctctccagagacccccacatcgtcaggttgcttgcttgccctttcttttcttcctttaattctacaactagggtttgatttcttttttaggaatttcaattaatctgatggagatgagtttttcaatcttttgttcttcttgtctataattttattgcgtttgttaatcaactctgtcaattaacgaaaccctaaaacccactatgccaatggcataggttg

SEQ ID NO: 71595 - DNA, 352 bp, Prunus persica
  Intron number 1 from transcript ppa026189m (locus ppa02618 9m.g) derived from phytozome v7.0 (chr-ID scaffold_5; pos 5947304 to 5947655)
cctaatttgctgaaaaagtcacagtttactgaaaagtaaacagtccaaagtaaccaggcttgggtttgcgataagcaggtagttaattaactggttaatcatgtggttagacttggattggctttttcttttgaatggtgttgtccaaaatgcagcctggaagtcatgaattgataatgttaagcgtgagtactatgtttgtggagttaggatccagaaccttaactcaaggatgaggtctttcaaggctgttgggattcttgatttttgtcttccataagtttttgaacaagcttttgggatttaaaaaatcaaagatccacacttattaattcctacattattgctggat

SEQ ID NO: 71596 - DNA, 677 bp, Prunus persica
  Intron number 2 from transcript ppa026189m (locus ppa02618 9m.g) derived from phytozome v7.0 (chr-ID scaffold_5; pos 5947703 to 5948379)
cggcctcaggtatatattcttttggagtcgttatgagtttatgacctttcttctcaatctctttttcttgcggttttctgatattcttaatggttgaaaagtgctacctttagttcctcttggaatcttaatatttaggagcaggagatatattataagggaacactatttcttaagaactacatttttcatgatacctactgaagagcttctcgggattgcagttgcctgtcgaccacatacacataatgtttcttgtagacataatttagaatctcccttttatgcaaattcaagttgttgaaaattatagaatatttgctctaagctaggacaaaagacatctagactgaaaataaagaaaagaaatatcataaactcataaattgagcagaaattcatagctcatgggctctcattccacttgatcgttgttagtgcacgtatccaattcttactaagaagagttaacttttctttaattccttgtatttgggtacatatagatagaacattacatttccattgacatgacattggttctattagcagtttatagctttattttgagaattttactttttacatatactctccccttagggtaatatcctttgatgtatggtagatctctattctactaattattagacattaaatgcaggcgctctcttctt

SEQ ID NO: 71597 - DNA, 613 bp, Prunus persica
  Intron number 2 from transcript ppa025694m (locus ppa02569 4m.g) derived from phytozome v7.0 (chr-ID scaffold_8; pos 12689145 to 12689757 reverse strand)
ctgtagctgcaggaggctcaaggtttgccaaatcatcaccttttattctaaatgcaaattaagggactaattaatataaattttggtacagcataaaccaaatcaaagattccataatacctacattttaaattaaaaatgttgattatatgaccaaaacttcgtagacttttaacatcttttgctcaatatttagaaatatagtcacttgaggctcctcaagtactgctcgagccctctcgaagaccctctcaaacagtaatcgagccccttcgagtggtcgaaattctaaaagtatgaaaaaaaaaagggctgaacatctttatcaagtccaaatttgactaccatttaaaattttctatcatttgtaaattgaattctcaatttaatgtgagaataagccaacaaaaataccaaatattctcaaatattctcgatttaatgtgagagtaaactactcaatctaaaagaaaaaattatttttgataagtcgtttacattgtgaacccactttttgacaaaaattcaattatacccttatttaaattaatttaatttttttttaatcatattggacaatgaaattaattcatttgtttagtgcagacaaaat

SEQ ID NO: 71598 - DNA, 746 bp, Prunus persica
  Intron number 2 from transcript ppa003926m (locus ppa00392 6m.g) derived from phytozome v7.0 (chr-ID scaffold_7; pos 16014243 to 16014988)
attaacaagctggaccaaccttttctcctaacgtgagttcagccttccatctacttctaatgctttactgtttttggttttgttgatgttgtggtagttcttggctcagggttctctttcccagtctattagctcaaatgccttagtctttttctttttgttttgtttttccttttttatttaaattaaagaacttttatttactgaggcaatgaaaagttccatgcttttctagttcagggcttaactcagaacagccagaatgctggtttggtatccgacatacagaaataaaggattggtagcggccctaaggggaatattttcccttaaatttatgttaatctgctatgaaattttaggatgacaattggaaagaaatttaagccaaaagactgcattatgcttactcgtgtggaggattttgttcctagattttaattgatgggaaatttgagcttgaaagtcttaattgagttttgtttcatatatttttccccaacatttctgtgccaccgacgaaacaattaggcacctcttaattcaggatttgcatagttgaagcatggattgcactggcttacatgtctgggatggttaaaaagttatagaaatgatgaaaagaatcatattgttatatatctcacaaatcttcatttctgttcttgtattcaatgtctgaatgattgtggcattcagcatagtgacatgtgcataacaacaaattttcttggccacaaccagga

SEQ ID NO: 71599 - DNA, 877 bp, Prunus persica
  Intron number 1 from transcript ppa022834m (locus ppa02283 4m.g) derived from phytozome v7.0 (chr-ID scaffold_2; pos 4162236 to 4163112)
acgccttggtgtcttgagtcataggtattctctctgtaagtccttttcaatacattgataatcaatcacaccgttccaatgtttagtccatcccttattatttggaagaccaaagttactggtcatggttgaataaatacttatgaggtccttaagggccatattttcatttatcccctcactggtttactaggtggaaaggggttgcagagagcattgatcatctctttcttcattgtccagtggctttgagattgacttggatgctccccttctcatgtaatgccttatttgtggtgctcccaacatgtggtgtgtgttagtcataattttggcgatatggactgagaggagcaacttaatatttaggggaaggatggggagtctgtctattgcctatgggataaggctagattaatggctttgctttgggcaccagtttctgttgcattctttgactgccccttctttcttctaaatatttggattggattctgctgtttcgtaggttttctgattgtagttgactggttcttgttctgttttgtttggataggagtcgttttgactgtttttcatgctaaggatgttcggcctagattgagagttgtttatttgtggactagtagtcgactatgattgtagttttcagatttttttacttattactatactcattctgtttcctatctgaaaacgaaaataatgaggcacatagaatatgtaatgctagacctgtacttaaatcaaagttaacatattcttatgttgtctgtttagaccaattaataatttctatggtaaattttccctaaaatgtgatgacatgaagattttcaaatttatcttctcttttacttctgtcatgcaggtttaa

SEQ ID NO: 71600 - DNA, 698 bp, Prunus persica
  Intron number 1 from transcript ppa008887m (locus ppa00888 7m.g) derived from phytozome v7.0 (chr-ID scaffold_7; pos 16860284 to 16860981)
attttcctgaccggctccacaaggacttcctcgaggtattcaattttgttttcttcttctttttgggtttgaacaaacaagtatgcaagtttttttatacccacaaatagaaaggtatgcatgttttgagacatattgggaaatttaagtagaaaaattaaaagtttcatatcaatgctagagtttcatgtttgattggttctgagatattttttttttcttttattattttggtgagcctatggtggatagtgaaattttgcagaattgtcagacataaatgggatgtgggacaaaggaaggattacacttttgaatgaaagggttaacaaatgcatctaggcaaattgggatcacaaaattgtatagatgaaagagttttgatattctataattattttcggagttgatattgtgcttatgtctaaaattacgttaatttataagcgaatgatgaaagagttttgatattctataatgaaagagttttgataaactttcaattcataaaatattgtagaaaatagtcattggatttgtaacgaaaacattgtaagctcgacctacgttcatattgtgaaaacgccttggtatgtgcatactaggacgataacatcatcattgttacgtggtttaggaagcaaaatcgttcaacctctagctaaaggtttttttgggctactgccaatctgtaggtg

SEQ ID NO: 71601 - DNA, 628 bp, Prunus persica
  Intron number 1 from transcript ppa006400m (locus ppa00640 0m.g) derived from phytozome v7.0 (chr-ID scaffold_4; pos 6904772 to 6905399)
aacctcatcactggtctgtttctgattgctctctctcttgttctttcgctttttgtggcctgtttgggttttcaagttttgggttttgttggaaaattcagtctgataattgttttgatgattgatgattatgtgggttgtctctgatgattgttttgatgtgtttgtttcttgtatctgatgaacaaaatggatggatcatggatagagttagagcatttcaggaaaattgacatcttgttttgttgatccaaagattttggatcaactgaatttctgtttggaaatctggatattaattttaactacttgggttgttggtctgcatttgaatgattcaaagtgctgattctgagcttgaatgatctgcttatgttttcaggtttgatattgtgttaaggtccaaaattaggtcatctctatctaattatctttctaatacaaactcaaaataaaccttaagctcaaaacactgtaatctaaatctcaaaagcaatatcaacatcgaaataagagaagagttaatttataaaggttctaatgctactttgaacataatgtgattgttctgtttgttcttcggttgatatgacaagttcacaaccgttgtggaatgtatttgcaacag

SEQ ID NO: 71602 - DNA, 702 bp, Prunus persica
  Intron number 1 from transcript ppa009304m (locus ppa00930 4m.g) derived from phytozome v7.0 (chr-ID scaffold_1; pos 26387119 to 26387820)
aatttgggtgagtgctctaatctctctctgtgtctctgtttttgagttccttttatatatttatatgtgggaattgctgcaaaatttgttttttctttaattgggatttggaatttttggaaaatgatgtgtttgtattgtttctaatttagagtgtttttggcatgttgactctttcactgactttaatttggtttgatctaagcatatatatacattatgtggttcaaattggattgagtagctttgttttgggtaggtgtttgagtttgctaattaattaaatcagacatttggagatgtttagctgatcttgacttttacttgaacgattttgggtgagatttcattttgtttgtctccctcctgtaaagggaaagggaattaaggcctcatgaagtttcttaatttgagaagattgtcctttctttgttttaatcacttagcaatctagtagcttgcgaattggtgttgaattgatgattctttggagatttagggttgagtcctgggtagaaatctacagagcagccctgagcttagtctgttgtaaccaaatttctttgtaataagtgtttagacatttagttaacaaaaacttttttgcccttgaatgattctctcctctagttctgttttgtctaattttcagaaaactttgttgcagtaagccgaagacagttgaggaaatcttaaagatag

SEQ ID NO: 71603 - DNA, 274 bp, Prunus persica
  Intron number 1 from transcript ppa024293m (locus ppa02429 3m.g) derived from phytozome v7.0 (chr-ID scaffold_2; pos 26124435 to 26124708)
tatttctgctcatcataccgccttcaggtccccaggtttgtaactcttctcttttcaagtcaaaatgcaaagtccaaacatttctttctttctctcttcttatataagattagttcatacaacaaaccaatgtttctcttttctctctctgtctctctgtctctctgtcctttgaaagattgaatctgtaattatgaaaagagaataaaggttgtttctttcgtccgagccacagatgtttgataatatacatgtattatgtatagcaggaggg

SEQ ID NO: 71604 - DNA, 298 bp, Prunus persica
  Intron number 2 from transcript ppa024293m (locus ppa02429 3m.g) derived from phytozome v7.0 (chr-ID scaffold_2; pos 26124813 to 26125110)
tgatctcctcttcccaattaacagagctccctcaggcccaactatttctcaatcaccctgtactcacctttctctctgtttttgctctcaatttgttttcatcagattaactcccacccaaaagtctctgtttctttctagctaataatagtttgattggttttcagctctttgttctagtttatgtgttgggttttattcatcactcgtcttcctttaaagtaaccatctttgtattttgctctgtttcggttggcacgcagtgagtagcggtttcaatcttaggctatcaaacagt

SEQ ID NO: 71605 - DNA, 313 bp, Prunus persica
  Intron number 1 from transcript ppa018397m (locus ppa01839 7m.g) derived from phytozome v7.0 (chr-ID scaffold_8; pos 12378816 to 12379128)
ggagcctcatcttatacgcactgcttgttttattggtaggcattaatttccacctcactgaattttcaccaattcatcaaagttttcttgaatttgatgtaataatttctttgattgtgttcttagttcaacagcatttgttgcagtgtgtctagaagttttttgctttgatttatttttttttgtttcatcctaattgcttgaagtttgaacatataatttcagactgcacaagggaataatgccaggaagattatttctcttggaaatgggaaagacaacaatgaagacttgattgatttgtatcaaggca

SEQ ID NO: 71606 - DNA, 766 bp, Prunus persica
  Intron number 3 from transcript ppa004055m (locus ppa00405 5m.g) derived from phytozome v7.0 (chr-ID scaffold_3; pos 20335532 to 20336297 reverse strand)
caacatctacaagatctcaacgccattgtctcggtgtaagccacttttgctacgttaatttttggattatgctattaagtctctgcatctcttgtttgctaccactaatgtatatccagggacccaattctagctcatcctaatagttaaactttctgtttggcttgatgtacttaggacattgttttctgattcctttcttgccttcacctctagccaaattccaaattcactttttactgttgctgcttttatatgcttttgtttagtggaagactctactttctggataatcaagtgctatctttttggagattttctatctttttcttttggtttgtgaccaggattctctaatgaccagttagagtttttgtttactcatcttatatttctttttcctttccctaacctagattaaacgactttgtgtgctttcacatgggaaacttgtttcgttatttatcagttaatgattcccaatgacactttttctttcataatttcagcttcatttgcattgttaggataatcaattatcaaagtataaaagaaaataaagaaaagatgaacttccatatttctttgattttatattgatcagatacacaaacaaattgagttctgcactcttaaaatcttctcactttctacaaagcaaaaatttcttcatcactcagttgcctattaaatgcttgttatctgttgaaatattttggtatagcctatcattcttttatatgctgaatgagaggatgatatgcag

SEQ ID NO: 71607 - DNA, 1026 bp, Prunus persica
  Intron number 1 from transcript ppa003743m (locus ppa00374 3m.g) derived from phytozome v7.0 (chr-ID scaffold_6; pos 9721379 to 9722404)
aacgggaggttaagtcaaatttcagtgagttccaggtgagccaaatattttgattagtcaaatttgccatgtttttgttttttgttttttgtttttccaatttgaatttatgtaatggacagagatatagtattcaaatttgaggaattgagagcagagttcaagatttaagcagatatggatgtacatgttatattttgatgctggttcccctcaatgtataaggacattcttgtttctgatagataagttgggattttaataataaaacatgcaggaactgggatgctttcctgtttattaggttgtcatattagtggtagattcatagatttactatacttaatgtataacagggtttatgtgaatttcgtagtacttttcattaccccaaaatgacagactcacatcaggtgtaacgatgactagtagccttccacgcattactcaaagtcataacattaattagacctcttttattgtcccaactaacttcctaaactaccaaggatgaccctttcctaggtacagcacagtttataattatttgaagcttctagacctctagacttatgtgactccttttcttgaaactctcttgaaactctctgaagcatttattcattcctgtggggtgggtattacttgaactcccagcttgggcctgctgtaccatggtcccaccagatcaattgggctgagtattcaattttttcttagtccggttataaactttaatgtgggcctgattgcccatcgagatgctgctgcataatctgtggtggtgtttctttaattttcgattgcattggcatttagtcttgcacatttgttttgccttgaaatgacagaaatcagaattaatgaggcgattttgagttgttgaggctatgaagaagattaaagtagcaaatccaatgtttttttatgtgttcaatttgattatatttgggtcaatgttactttgcaaacatattgtaattcttattttccccaatgtcttaataaaggattggctggacaaac

SEQ ID NO: 71608 - DNA, 516 bp, Prunus persica
  Intron number 3 from transcript ppa007943m (locus ppa00794 3m.g) derived from phytozome v7.0 (chr-ID scaffold_6; pos 7902209 to 7902724)
gaaccctactgagatcatgtgagtatggtggtaccaccaattgttgtacctttttccaatcaaacttaatgttttacatgtcacatgtgtatgtaaggtaaacatcaaggcaaactgtcttgtgtcttttagtaggggaatgtgtgaaacacagtttgttttttatttttgaaggggaaatgctacttaggattctggtttttttattccctttttattctaaagaatcttccaagttcattgagtcgttacatcaaagtaattctccaaatttctgaacttactttcaacttttactttattagtttaaataattatcatattactgatcacatctctcgtgtatgtgaaattcacggataaccttttatattagcatcattgattttcttttttatatttttttgttgccttatttagattgagttgatacacatttaaattatgtttgtagagataataataataatgatgacttattatatatgatgtaaataatttacagattcctggtgg

SEQ ID NO: 71609 - DNA, 538 bp, Prunus persica
  Intron number 1 from transcript ppa013047m (locus ppa01304 7m.g) derived from phytozome v7.0 (chr-ID scaffold_1; pos 31569530 to 31570067)
caggtaggttccaacgcccccctctgcaactttcactaaccctaaacccccaattccctttttcttttcttttttcttctttatgatttatatttttgatgaattaagccattcaattctgtagaaaaatcgtaattttgaggatagatagacaacaaacgagtaattattctttagcaaatatgtggctctctttcttcagggtttatttcattcatataccttgaagacctggtataaatctttcacctttgatctatgcttgcagattgaggtagttcatgtcacattttttcaccttttaatttactttgaagttggaatttcttttaagggaaattagaagaaaataaatgttgcatagactaatctgggttaattttactctaatctcaaaatttgatactccaaactgactcctaatataatctaaaccgtagaacgatttataatcacattttgatccctgtatgaattgaaccctgtttttgaatgctgctggttaatttcttatttgttatcttgtcctgttgattag

SEQ ID NO: 71610 - DNA, 844 bp, Prunus persica
  Intron number 1 from transcript ppa004647m (locus ppa00464 7m.g) derived from phytozome v7.0 (chr-ID scaffold_1; pos 16584323 to 16585166 reverse strand)
tgggattggtgggcttctctttggctacgacacaggtactactgcagccaattcttactcttatagtcctgatacaaactctcatagatatatacatacatgtctctctatgtgtatactcgtatttatacatgccctgtacgtatatacttgtatttaaacttaccctgtacgtataattagtaacaggagaaaaatttgggtttgatcacggtgccatagttatggtttctgttgctgttttttgttttaattttgtttttctgttgctgttgtttgagtactaagttattgaataagctcaaggattaatcaaatttctgttgtgtggcatttcttcttttctttaagttcacatttaacaagcattgtttaagaagtaatcttactttccctccattatgattgggcaattttgtcctatctttttttctgtgtgtgttaagaatcaacatctgcactaaaacttatgccaaatgtaactaagatcataacatttgtgcttgttaatatttgacttccataatgctttgcaagtcaagcaccaaattgaaattttacctatattttatggatgcagaatgcaattaaccctgattttgaatctgtggactctcaaggtttatattctgtattctgcatttccttagtaggccctgttaccttctttctgagaatatactacgtatgaacttgatatcaacatggtttagtggccgccctacttctctttagttatacagctctcacttcctttttctttttctttttctctgaatatgttttcacattggtgatattgattgcaggtgtgatatcgggggcacttctgtatatcaaagat

SEQ ID NO: 71611 - DNA, 984 bp, Prunus persica
  Intron number 2 from transcript ppa014943m (locus ppa01494 3m.g) derived from phytozome v7.0 (chr-ID scaffold_3; pos 3030036 to 3031019)
gacgttggtcaaacagctaatacagctggatacaggtgagccattgcttaggaaaaatttatgtatggtattaaaatacgacaatataatttgtttatctatatatataaagtaaaaagcagagaattttaaaatatcaaaaaatgcctttggctaattcaaacactaagaattgaaattattaattaaatgaggatgatatgataaattcactttttttttatattaaaaacaaaatcagataataggtcctacttttatgaaacataactacccatattttttttaaattctaaaaataaaataaataaataaataaccaattggcacatgctgagctagtgtttataatatggttagacgcagacccctcacctctttttaatatatggtctactttttatatatattaaatttactatatctattattgttttctctccaactatggtttgtttgggtttgtgaaatcttttattgtgttctctccacatatggtttgtttaggtttgtaaaattttgatttataatctctcttgagtttaatgggtcttccaaaaatttgtgtgtagattacgaaaggaaaaaatttgtaaatattttttatatatgtaatatatgatgttttggtcctcttagttactttagcatgtattgtgacttcgaatctttatatatatatatatatatatatatatatatatttagtgagaggcccccacacatgaaattttaactccgtcataaagtagacgacataatagatattttctactttttagaaaataacgtcaataaatatctacttttattataagatgtgaactagttatccatctgacatggccgtactctaataccactctaaaattacttgtggcgcaggagataatatatatgtttgcaagtattcaatggtatttttgccgaaaactaaactgatgatgtatatttgtatggcatacaggtatccgaacgatattt

SEQ ID NO: 71612 - DNA, 780 bp, Prunus persica
  Intron number 1 from transcript ppa007912m (locus ppa00791 2m.g) derived from phytozome v7.0 (chr-ID scaffold_3; pos 19857485 to 19858264)
ttctgccaccgagtacgggccctacctccaaagtgcgttcaacatctatctttctctagtttcttcgattttgtgagccctctgtttgtttcctgaggaaattgaacagaattggaaaatgaattttggatcgtatgcttagatttaggcgtttgttctggactaatagtctagcttatcgatctgagatgtaggttatattagggcttggattcggtgttggttcaattgaattagaattagtaagagcagcactatgatccaaccttagtgtttcacgaatgctatggttttaaatacgcgaactttgcaggtggattaatatattagggtgcatttggatatgcgtaatacaaagggggatttgggtttggctgcttagtttatattgtttgcatcaaatgttaagtaaagataaaagagtttgatactttttgttaatggattgaaataaaattttttgtctaagtgattaaagagtgaatttgatctgcactctgtataacttcaattgtgtttctgaagaagagtatcacaattaaggtgttccaaaaatacgtgcatcattgggactgtgtgaaactgaaggaacaaaagtaggctcaacttaatggaagacaaaaggatcaatctttttcctccttatgcatacaactacatttgacaactctctctctctctctctctctctctctctctctcaagtcaatattcatgctctgcttacttgacaactttcttgcagaaccttccccgttgcatacaactacaattgtggaa

SEQ ID NO: 71613 - DNA, 337 bp, Prunus persica
  Intron number 3 from transcript ppa004687m (locus ppa00468 7m.g) derived from phytozome v7.0 (chr-ID scaffold_4; pos 2596103 to 2596439 reverse strand)
gccaaggtaactcattcatttcactaattctttgcttttttctgcagtttccattacatttctgctgcctaaataatagttaatcctatgttatgcatgggaagcttggttgtctgcttttgacttttgcaaacactaagataaaactcaagttgcattgtaacttcaaaaagaggaagggaaattgtagagggacttccacaattgtgaactctaacaaacttttgaaatctttggttccttgttctttcttttgagcttttaaaagggaaagtttgactcgactttgactatgctgacttttgttgtgaacattttatattgtcttgttttccag

SEQ ID NO: 71614 - DNA, 655 bp, Prunus persica
  Intron number 2 from transcript ppa005811m (locus ppa00581 1m.g) derived from phytozome v7.0 (chr-ID scaffold_7; pos 20852450 to 20853104 reverse strand)
catcaatccctgacgacgtcgttcctggtacaaaggtacttccctgttcttcatgctagctcaatgctcagcttgcgttttatatctgtgtaaataacttagagctgtcattgattgaacatattttggaatttgtcttcagtttaatagcaaactaatagatattgagctgcacaattgtgaagcccattggaaaactaataatttattatatattgggcttgataaatccaagtgtaagacaaacatacttaaattatttcacttgagctcaacaattcgttatcccatatgctacttttagctcaacattccaatggatgaaatttctaagtttgacagttagtctgttgattaccattttgtgcggaatataagtactttttcatgagatatgatgccagtttgaagaatctgtcacactatgcttgggatttccctacacgctacaggctgtgtttattgtatattactggtcatgtgaaccttgatacaaattttggaacaagttttcagtgtctctctattccctatttctcaagttcatggacaactggtgcatatatgaaggtcatatctcttgttaactgaacatcttttgtttgtcctgcttttgattggcaggtccgtttggaaggtagagctactatacgta

SEQ ID NO: 71615 - DNA, 793 bp, Prunus persica
  Intron number 2 from transcript ppa022635m (locus ppa02263 5m.g) derived from phytozome v7.0 (chr-ID scaffold_5; pos 5259256 to 5260048 reverse strand)
agtgagaaacctcactgtagttcagaatattgcttgtaatcaaaacaaaataaaatctgattgaaaagcatttgtaaggaaaaattgcacaatcaatcttgtgagccggttatgctaagctcatgaactttgatttttctaaatcattagtaatttaatttgttttcctccacaaggaactgtctcatacctagaaaacacttgtttccaaattatattctttagaaagcacttgtttgtgatacgactcccttatttaaaatcaaccaaaaacaactaattaatgcaaacattactcaacttcaaataaataaataaatcatggaggcttttggtaaacaactatgccaaagaattatgtatgccctaatttctggatctagagatttggtaaaattatcctttaaaaatagaaataagatttagattcatagggttttatctgcgtcactgcgtgggcttttaattgtcctaaaatgtcaagagccctaaaaaataaaaaataaaactattaatatttttccgtttcctattgggaaacttggccgacaaggacatgtcgaaatctataaatacgcgttgctctcttgctctcttccgtatcctaatcactctcatgtctctctcttgctctcagtgttgtcaaagatgatgatcgccgccaacaagccgcctgcgtttggtttggggccgatccataattgctatggctgctgtggctatggccgtggcccgtatcataagaagaagttgaatagccgtactgatcaacttcatctgatttgtgggtcgt

SEQ ID NO: 71616 - DNA, 866 bp, Prunus persica
  Intron number 1 from transcript ppa021287m (locus ppa02128 7m.g) derived from phytozome v7.0 (chr-ID scaffold_3; pos 3717182 to 3718047 reverse strand)
ttcggagcttatacattgccggcaaagataagactgtaagtactcaatgtttgatatatttcttctttttgtttattaattaatggtaggttttgggagggtaagagtttttttttttttttttgggaatattgatgagtgtgacatgtaggggttgaaactttggagagaccattaattatgatgccccaatgtgtcaaaggaagagtgagatggtgaaatcggatagggaaatcacatatatatggacttggatgccccaacctagtattatagacaattttggaattaaatttatgtagtggtcctccagattaagatatttagacttcttggccttctaaattgttttttttgggttcatctaatgatcacatctctcatagaaattcgagtaattagcggtccattaaaataaatttgttgctgtacatataattatagttggatttgtatgaaaagaactttgtaagaattcatattgtaaaatgatttctagctattgagagattgtcgacgttgggactggccaacggtacacatgaatgcatatcccactaccacatttggagctgatttattgaattcatagattttgttggtcgtcttttatgaccattattagacaagacaggatgaagtgcgaattaaattttccctctcttatgctaaaattagtagatggaacacaggaacagtcattaattagtactagtaatagatgaatccatcgcatatcattcttgttcttggtttttgttgttataattgcaatttgctacaaaaacttagtcaaatttactttgattaatatttctatctatgtaacagataaagcatacgggtgctgtaacatcactagctat

SEQ ID NO: 71617 - DNA, 691 bp, Prunus persica
  Intron number 2 from transcript ppa006058m (locus ppa00605 8m.g) derived from phytozome v7.0 (chr-ID scaffold_1; pos 36307879 to 36308569 reverse strand)
gagtttctacgtattcagtttttggggtatttttctgtctgtctccgcttcttctgtttttatcatttttacctggtctgccatttatattgaagaaaatgtagaattggctaagaagttaatattgatgttaatcaaaggggaaaatactgttacccaatggtttgattgagtttgttgatcagctgtttttggtggatttttgttgacatgctttccctcttttgtcttttgatatatgtagttttctaatttatgatactatcacttagcataagctctatttcatgtttagataaactagatgtatttgaatatgcagttgatagcggtgattgttagactagctattgctcaaggatgtgggaatagtgctgggaatattaaatttgtgcttatgttttgtaaacaagttcttttaagccattttaagacttgtgctgctaggtctgccaaaacaacttttgttacattttgtaggatctcttaggtagatgttttattttgattgccccttctacctaatcttgggaactctttttacttctatttccaagtttactgatactaccgaaaccactattgaagcatgggtatcctctactaatgaattgataatcattcaaagcttgatggttactgcttaagtgctctggattgctcttactgaaccatgtcttgcagctatttg

SEQ ID NO: 71618 - DNA, 362 bp, Prunus persica
  Intron number 1 from transcript ppa006058m (locus ppa00605 8m.g) derived from phytozome v7.0 (chr-ID scaffold_1; pos 36308816 to 36309177 reverse strand)
accatttgccatttgctaatcattccctctttcctgtaatttttcttttcttttcttctcttttcctttctcgaattcgtgttcatatcgacattgctattatttaactgtctcttcatttgctgttacgatttttgagatgataaaaatggcttgattcgtttttgtgattgccgtttcgtttgaagatctcgctgatttcgttgtcgtcgtggcagttttagccactgatgtcgacgatttcttattaagattaacgagatcgattattagattggagaatgcgcgaaacgcagcgtttgatttacgtgcgtttatttttgccgtcttttgttttgcaggatttggtttgagaatcggag

SEQ ID NO: 71619 - DNA, 676 bp, Prunus persica
  Intron number 2 from transcript ppa007564m (locus ppa00756 4m.g) derived from phytozome v7.0 (chr-ID scaffold_1; pos 4655297 to 4655972)
tggtacgttgataattcttttaactttctttttgtctcttaaagaatttatatcaagatggtcatcaattgtaacatcatcttcaataagttggaagtaattctttaaatctttactcaatctactcacttccatgccttttgggtgtcagttttgttttgtttttttctgaataagggcatgactcagtattttgactccagatgacagtttttgttgggcagcataaatttctaaaacttttgttttctgatttttgtaagttcaacgatgtggaggtagcaacatcggtactgttatgctaatctttcctgatatagttatttgtgatccgatgattatgtagtgttctctatagtatgacatcaattgttatcactactgtgatagattttgctaattcgttaagtggttctaaattacaggattatctttaaaacaaaagttgtcaggggctcgtaatttagatgattatcataggttttttgttcaacatcctagaattctgttgatgacactcactggcatgaaatccaatggaaagagtctcaatgctgtctggaagaccaccataatactcaatgcatttggtggttcattcatgctgcgtttagttaagcattaactttcagttgctattctaattgtacttgtgcttctctgttatgtagtaata

SEQ ID NO: 71620 - DNA, 841 bp, Prunus persica
  Intron number 2 from transcript ppa010708m (locus ppa01070 8m.g) derived from phytozome v7.0 (chr-ID scaffold_2; pos 9708996 to 9709836 reverse strand)
acaagattcttcaagtggttctagtatctcctcaggtaccaagtacaaatttttagggtggctaacttaaattcacagttatttaagaactgggtaactttcttatataattttgctttttgcttttcattatatcgaaatatgatctagtgtgtatatccatgactcactgtgataaattgtatccattgttgttacattgagaagcaacagcattgttagtggaataatgggtgggatgaatctgtgttttgagtaatttgtgcacaagtggttttctaaatgcatcaaatactaacaatgatagattgagtaataaccgtattttcgattcatcagggtctgtaagcatgatgctaattcgatcttggatggtttaaacccccttgttaagaaaatgtgaggattaactcattttgttgttggttgataataagctcaaaattcgtaaataggtccgactgcctacctgagtttgttgctatggattttcccaatgatgtgttcccaattgtgggaatgattattttagtaaccatggacactggtaggattacattgagaacttttctgttcgcgaactctcagttatttacatgaaaaaaagggtatattgaaatcctaattgtgcgtggcacttccgcatcttaccttttctttttatattaagttcttctaatcttacccaaacttttcggttcctggaaaatgtggtgactcaaagagtataatatgtgtaccccttcctttaggtcacgaatctctcaatttcatgaggctggctctgagatttctattgtccttggcagattcctggaaatacaggttgcattgccagaac

SEQ ID NO: 71621 - DNA, 603 bp, Prunus persica
  Intron number 1 from transcript ppa021782m (locus ppa02178 2m.g) derived from phytozome v7.0 (chr-ID scaffold_6; pos 6221140 to 6221742)
tcagtatagaggggtcaccttctatagaagaactggtagatgggaatctcatatttggttagtccaattttgatttccttaatatggttctattgggtttcatgtttcgttacttggatttgcttattttattctaattttttagggttgttttcttttgtgttgagtttgaattgcaattatgcaaatgcatctgtttcatatagtattaatccgatttactaattatttttaatttttgctgggtgcagggattgcgggaaacaagtgtatttgggtatgtgtttttgatcttgcccatttgattagcttggatttagttatagtaattattaaggcaattatttgtcatgcttttctatctggaaagcttttgatgaaaatttaagtgttgggtttgacattaggtggatttgacactgctcatgctgcggctaggtaaaaagccatcttcatatttttttgcttggatttcgtactgtttgtgaatttagataattagtcattctggttactactgtatgtattttttattagtattcttaaattgggtttgttgaatttagagcctacgatcgagctgctattaagtttagaggagtt

SEQ ID NO: 71622 - DNA, 749 bp, Prunus persica
  Intron number 1 from transcript ppa005591m (locus ppa00559 1m.g) derived from phytozome v7.0 (chr-ID scaffold_6; pos 25391379 to 25392127)
catctcaaggtctggttttcattttcgttgtatttctactgatgttcaattgctcgacctcagtttttcatatctcgtatgtatccaatgcaatttcaatttttcaatctcaaatcactttctaggttttggaagcatgcagttctcattgcatatcataaatttactaaattcatgttgattagttctcttttttttttcctctctgttttttggcagtgcatgtatcatttgaacaatttggctggggctacaacttagaagaattcttataagaaaattaaaataataatgaattctttactgacaatgtttttttttctggaattgagaaccctaattctgggcagatgttttcatttgagagatgtgttgatctgctgtttccaacctgagtcatagtgatcaccttggtttatatacttcttcattgccttgggtttgtgtgtttagattctggtgaagctggccttgggttaaaccttgtgatcatattaattccttactaaattttcccctgtgagaacttgccaatgagaatgagaattcattaattgtctattccacgtattacggagcattaagaagctcaagttatgacccagcagtttttcttttattgttaaaactgtaaagctgacattcatgataagcattagctgtatctgtcaaacataactagggggattatcaatggctgtatttctttttttgatatctaattagttcatttctgattcaggaggaat

SEQ ID NO: 71623 - DNA, 721 bp, Prunus persica
  Intron number 1 from transcript ppa024717m (locus ppa02471 7m.g) derived from phytozome v7.0 (chr-ID scaffold_4; pos 19361234 to 19361954 reverse strand)
tgccagaaaggtacccctttcttgtccttccccttctgtccagctaatctctggcttgttctgtatactttgattcattgtatatattctaatttctgtttaaaatgtcaccacatttggatagtgcagaaagcctaggttggaaaaataattttctgatcatcattcttctccccatggcgtatttaagctacagaatcacaataaaaggaaatttggaagaaaagtaaagtaatcccagtacttatagcaaattacagctaaacaaaagctttcccaaactaattagtcaactatacatctctatacagtccaacagatagtaacccatcacttcttgtattgtatattaccatttcgttatgaacacaatgtacatatattgtttattgttattaccattttgttatgaacagaagttagcctttgattattagcctaaataacaattttggcatatggtcaaaacttaagccttacacagggttttttaacctgatgtaaaagattgtcttggcaagatattcttggttaccataaaattttggataaatatttatatatatattaccacttccactgctattaccatgcatgcaattctctttatctgtcgtaatggattgttcatgttaacctgttggaacattattagtgcaatcaattcccagattatatcatgacatccatgtttcctgcaacaggcgtcatttaaactttc

SEQ ID NO: 71624 - DNA, 697 bp, Prunus persica
  Intron number 2 from transcript ppb023403m (locus ppb02340 3m.g) derived from phytozome v7.0 (chr-ID scaffold_2; pos 12066762 to 12067458)
tcaattcggcgttcccaggttcagctacatatcaggtttgtgaattacttgctatattccaagtctacaatttcttactcaaactttctgaatttctccaaatgttaaatctatcatctatgactttttgttacgctttgtttctcattttcaatcatttgttttgtttagttttatttgaaataaggcgatacagggctgaaaatgagaaagacatatggagaaaatatgtcaaatattctttgaaaataaaaattctaaaaattttaaatagttttattacttgtattttgtctgcctaatttaaattcccttctctcttcttcctcatatgatgtagtttgctaattagtcttagtcaaccattaagcagggcagagtatatatatatatatatatatctgtgtttcgaaatttcaaacttattgtcaagcctttgattttggtcactttttcttgtatctcttgcagatattgaccttttgctgacattcggtaagagtttgcatattcctttcccttctctcttcttcctcatatgatgtagtttgctaattagtcttagtcaaccattaagcagggcagagtatatctgtgtttcgaaatttcagatttattgtcaagcctttgattttggtcacattttcttgtatctcttgcaggtattgagcttttgctgtcatacggtaagagtttg

SEQ ID NO: 71625 - DNA, 868 bp, Prunus persica
  Intron number 2 from transcript ppa003999m (locus ppa00399 9m.g) derived from phytozome v7.0 (chr-ID scaffold_5; pos 15024151 to 15025018)
gcgtgagtacctctaatccacattcaatgattgtttttcttcttttcctaatttggattctgagctcttgttcccttatttaacgatagtgtaagagtattcatggtggatcatagtttctaactgtgattcttatggatctttttggcatatctcaggcaggttgtatataattttcttctttaatttattttattttggatacgagattcatgtattgaattgttgaaagtagcttttctttagttatctctttttctttggtagataccgcttttcagaaaggaaatgaaaagttgaaattctatccttcttttgtttttctttaatagaaaaaaacatactgtttttcttcttcaccttcttttccttttttcttttttgattgcctttctggggggatttatttgaatctttttatatatattctgttaattgcttggttatctattctttgcctgtgcagctgtactgattaagttttgtactattttcgtaacctgccatcttgttttgcattaggcgtaacctaagctatgtgcccaactctaatttggtgggaacccatttgacttttgtttattgggcacctgtaaaattctcttatggctctggtttctcgttactctttgtccctttggcaaagcttttctgtcactctttggtaatggtactctaagttctgcttgaccgtcttctgtttaggaaatttaaattgaatatgttgtggcattgcagatattgggtagttttgatttttactgtagttgagcttcattactcttaactcatgtcgttacttcattagctagtcatgaataattgaacagtgatataacaaaatcatgggccattactggtgcagctg

SEQ ID NO: 71626 - DNA, 578 bp, Prunus persica
  Intron number 1 from transcript ppa004427m (locus ppa00442 7m.g) derived from phytozome v7.0 (chr-ID scaffold_8; pos 18120917 to 18121494)
cttctctcacctctctccctccgatccacgctcaggtaactcttcgctcttcaaatctcatacattacctctgcttttcatattctaagtttttcgttttgtttgttatttaagcctgctttagatatcggtttgtttaatggaagtctaaaatcgccttctttagttggtagtgaactgatttaagtttgaagagagttttttttttctttcttagaatcttttttgtgtacggaattaagctgaatttcagttagtggatagtttgagccatgtttcctgatgagattcgagaagaacatttattttgaaagtacgtatataaatagcgcgaggaaattattattatttatattgttgtggaaaggtttgtaatgtgtcttcagttaactggagaaaaaacttttcaaatatctaattgaaagaattggagtagtattgaaatttagtattttaaaaataaaaaggaaaaaaagaaatgcagtatttttcaatatacgttttagtgaaatcatctgcatcagtttttttagttcaatgtgtaatgatgttgtttggtttctggaggttgatcagag

SEQ ID NO: 71627 - DNA, 818 bp, Prunus persica
  Intron number 2 from transcript ppa010768m (locus ppa01076 8m.g) derived from phytozome v7.0 (chr-ID scaffold_7; pos 15796097 to 15796914 reverse strand)
gaagaatccaggtcctttttctcacttcaacctttaaaaagtttgatctttttgtttaaatttaggcatattttggtaagtttcctagtgttatgccttttatgcgattacccgtccttgcgaacctggtttttgttagttgtttgatgagtagagatgccaaacttttgaagttagctgatatcacaatctcaaatgttatgttcgaagtctatatttcacagcttatttactctgtgattatatcgaacatgttatgcaaatgcaagtaatcattaaaaaaaaatggtttgtaagactgcaactaattccatgtatacactctgcatattttatcagaattttttttgtgggaacataatgttgttctttacccccaatcaacatttgccactactacatgaccacgtcattatatcaagagttaatatgtttttggtgcccatggcagacactgcctttttcttgttcaaaagacaaaaacaatgcaaccattggtgcaatgcctagtttgggggtggctgccacaggagccaccaagcttggttgccatagcagtcaaaaaaattcccctgaaaaagtttccagccatcttaagcactccttctttcttctttcttttttcgtggttcctatacactacaaaagcgccccttaacaaaggctaggttcttggtatgctttcatttcggctgctttatgcccaggatgaggcatgagtaaagttcctggatcatcagtgcaatttatccttgttttttgaaacaactaaatttgaaaattgagtcaatgcatttattttggacaggggcatctgg

SEQ ID NO: 71628 - DNA, 870 bp, Prunus persica
  Intron number 1 from transcript ppa009876m (locus ppa00987 6m.g) derived from phytozome v7.0 (chr-ID scaffold_7; pos 21461567 to 21462436)
gacaaccaggttcacaattcattcatcttttctcttttttatttgtatttttttgtgctgaataaaattctctctcattacgtttaaatattcagtttttattataatatgcatcatttgaagccataaagttgatgtcttgtttggattatcacacatagctgctgcactgaccaatttgaatgcgaccctaacaataaagggattagcgagtcttaatttagatgcccatcaataaagggattgccttttctccatactctgccttgtttatgtccaatattggtattctagtattggagttgcagctgatgttacaattagtttagcacaattgtcaaactacaaatggaatccctcttgcatgtttgtgtgttcggggtgttttttgtgataattggttcaaaacttgatgatcatttcgtggcatatctcactgttgagttagtgtctaatgacatgtttctctatcatttcttttgaatttcttttgccatattcgctctgttgcattcctaattttctgactgccagtaaccattaagcatatatttgcatatgtatacatctgtgtgcttgtgtatatgtatacagggcgtttaacatgcatgacacaaatgcacaatgccccccaatgtagttgatcgcattgacttcattgtgtaacgcaattacagcccaacgtgattggtgatgtcccgtaggtagttgaaaatccgcatgtatatctgttttattttccttttcttggcaaaggatcttaatatccttcaattttggaggatgtgtgtcatgtctactcaattaagatgacaaattgctaagcatatctgaattattatcctagcttctggagagagcacttgaaga

SEQ ID NO: 71629 - DNA, 786 bp, Prunus persica
  Intron number 2 from transcript ppa013008m (locus ppa01300 8m.g) derived from phytozome v7.0 (chr-ID scaffold_8; pos 15180675 to 15181460 reverse strand)
gctcacattcccgcccctgatactccctgcaacaggttcctttttctcaaagttgtaacctttcttttttcagtttttcagttttgtttgtgttgttccaatttgacccagttctcaatttagcctctgatcacttgttccagcgttgattgttatcactagcaaaagagtttgataaagggttttttttttcttttcacaaaagtgacaacccatcttctaatttttcattcatcctcttgtttgtattagcagctatttgtctcttcacccataacgtcacatgctgtatgattgtccattaagcgtttgctttctgaatctgtatgccgtttttcaaacatatgaatgagttgaggttgctttacatgactgcggaacatttgtgactgctgtttaaatccaacaatgtgcattgcatctaacttcccctgaaaagctttaaaaagaaaacatagagaagacatctagcattgttgaaagcatggctctgagagatctaggatcctcattctacggcatgaggttgttctagtttcttttcctagcagtttaatgtctaggtaacctttggttttacacatatttatattcaaagtgcatcaactataaaaggatctgaaattttttctcatccaattacatcttcaaattgttatagagaaagagaatctaaagcttgctccttctggttctctaccccttatacattgatctgagttggagtgcctaagtcttgaatcatacgttacatttctaatatgggaaacaattttcttaaactag

SEQ ID NO: 71630 - DNA, 579 bp, Prunus persica
  Intron number 3 from transcript ppa019129m (locus ppa01912 9m.g) derived from phytozome v7.0 (chr-ID scaffold_6; pos 20536915 to 20537493 reverse strand)
attacactgaccaaatcaacaaagggcttacactggttactgtatttgattcatctattttcttatatttatatgcacttttgtaagatcaatgattaatggctcttaccggataccaaatgttacattcacgttattttggccatattttatcgaaattgagaaatactcatcatatttatcgactatatatcgataaattatcaataatatatagatattctacatttatgcaatgcaccaaatactgtagatttgtatcgcaagaaactgtcactcttccctttattattcatttctttatctatggtacatatatgtggtatatactatcttgcatggaccatatcttttctattttattattaaacatgttactaactcaggaattttcagatcttgctaatgggtggaaccgacccatcataagtcacactagaatgggcaatgtttaatgtacttaaccatccagacaacttaaacaaagctaaagttgaaatgaataatctacttggccatgaacaacgcttaatggatgaatcagacatttccaaaccatatctccgagactctccagtt

SEQ ID NO: 71631 - DNA, 549 bp, Prunus persica
  Intron number 1 from transcript ppa019129m (locus ppa01912 9m.g) derived from phytozome v7.0 (chr-ID scaffold_6; pos 20537725 to 20538273 reverse strand)
cccaccttctcttcttccactccttggccatctccgtctcctccattccgcagaaccttccaccgcctcgcacaaaaatacgacaccgttttctctctctattttgggtcacatcacgtcctcatagtctcctcctcatccacagccgaagagtgcttcaccagaaatgacaacgtcttagcgaaccgccttctgcccgaaaagcacctccactacaactacaccactctattggcctccccatatggcgatcactggcgcaacctccgccaaaattaaagcctcattaattcgacgtccaaaatgattaagtcaaacggctactcttcaaactttcgcaaaactcatgccaagatttcatgaaggtggagctcaaaagaaagaacaagatgtttcttttgtcccttccaggcgatcggaaaataaagaaatagttaatatattcaagagtctatgctctctgagctcaattttagcatcataatgagaatggtggcaggaaatagatattatggaggcgaagcttcggacaacgaatagagatcataa

SEQ ID NO: 71632 - DNA, 718 bp, Prunus persica
  Intron number 3 from transcript ppa013473m (locus ppa01347 3m.g) derived from phytozome v7.0 (chr-ID scaffold_6; pos 27866201 to 27866918)
acaaaccttcctctgcgcttgagtgagttcatctccttgactctgtgatccaaatgctctatttgaaccaagaatcaagctttaaatgatttgctagctcaactaatagcaacagctatctgccagttttttcagtttttattaattaggctgaaatcatatggtatttacccaagaattcatatgttattattagttattcattcttccacatcactttatcaaaagttagattttagcttttaccgggtattgcattctctttttaagtatctcattgtcattgcacattgcacattgttgcccaatctttaacctttaggatatttgtaatacaagcgtacaagcagaaattgtgaggctttgaacataatctgcttgttatgtattaagtagtctatatttattgggttttgtcagaatgctatttcagttgtgtatcatttcttcttggaaatggtacttaagttgtaattgcaatattccatcttttacttttgcaagtgttgagtagttgtgcttagttgtgttcttctgtttgttctggtttgtgctaacaaatgtattttgtttcatgtatcacatccaaatagaattatcttgtgagatgattttttccatgcttatgccggtgtgcaaatgttcagatatattttgatttttgatttataattttttgacaggtttgttcaacaaaagttagggggtccatctgtgt

SEQ ID NO: 71633 - DNA, 380 bp, Prunus persica
  Intron number 2 from transcript ppa007876m (locus ppa00787 6m.g) derived from phytozome v7.0 (chr-ID scaffold_5; pos 5195469 to 5195848 reverse strand)
gcaacattctggtcgccacctcctgggacaaccaggttcatgttctttttcttttcttcgtttttttttggttttatcagttataaaagcttaggttttgtttgtttgctaagaaatttatttgtagagattttgattgaatttctgtgaccatcttattgaactagtggtttatggacaacccagaatataagacaatatgctatgaggttaatgtaaatttttttggtataatctgcttatgtaatttatgttaactggaataagataaacatggggcatttataatttcttttcttttccgttttctttctttcgcaaccaaacagtgtattgttaggatttactaatgactggtggtgttcccttgtttaggtgcg

SEQ ID NO: 71634 - DNA, 830 bp, Prunus persica
  Intron number 2 from transcript ppa026757m (locus ppa02675 7m.g) derived from phytozome v7.0 (chr-ID scaffold_7; pos 3450430 to 3451259 reverse strand)
cccgcttcagcggacgaagaatctttcacggtgattgattgattaactttttccatttttattgaacagaaaaaatagtgatcaactttgcatatgatcattgtgaatagtagtaattctaactctggtttggatgcctctatgagttttatagagtaatgtttgtacatatgttatatgttacattgcaaagtctagtggatcaaaattatcaaagaccaaataagttcataatgcaatttcgacaaattcgatctgttttactaagaataaaatcatatgagattttaggtgtaagtcctaaatccaagaagctgttcttaggagggtagatatattttacttttgttttttgcatcatttacagggtacatttgggaggaggagtgatttcgtatatttcgacgtagttattattatatagtgaaacttcttgattgaactattattatacattgacacattcatatttttatgggaagaaaacagaagatatgcatttctaatatttaattgcaaattagttatttcaaatattcctaattacctccacctctgctagtttcttctaactattcccctagccttaccctaaatcctcttaaccttagcccgaccctaaatgatgattatgtcactgtttctaattgctgtacctattcagctttgtaacacatggtatcaatttttttttcctaccagacttcttattattgggatttaatttattttttggtttcgtctccagtatttctattgttgttgcaacacatgtcatatctttggggttttcaggagtgtgtggcaaaggagaaagaagagaaaaaagt

SEQ ID NO: 71635 - DNA, 501 bp, Prunus persica
  Intron number 1 from transcript ppa007228m (locus ppa00722 8m.g) derived from phytozome v7.0 (chr-ID scaffold_7; pos 10985671 to 10986171 reverse strand)
aacagagagagattgtgttctatttccattcaaaggtactctttttttcttcttcttcattttttttttaaatttaaatttttgcattttatttgattttttttatgccatcttgtctggttattgggcatgatttttgaaaacattgatgggttttgcttgatcatctcaaaattatctacatttatgatttttgaaaacattgatgggttttgcttgatcatctcaaaattatgttcttgaggcattggattgatatttcctctcaattttgatgttttaatgatgacgatctgcataacctgcttgttgatttgatttcccattatttttaaactaagccagcatctttagcatttcttattcctgggtatcaaattggtgcatcaaattgcacatactaataatccacagatgcatatgaatgtgatccaagggatgagcacttgtttgctataatttgatgcaatgctggtttgtttctgcagcaggcaatagaaa

SEQ ID NO: 71636 - DNA, 624 bp, Prunus persica
  Intron number 1 from transcript ppa001223m (locus ppa00122 3m.g) derived from phytozome v7.0 (chr-ID scaffold_4; pos 2984718 to 2985341)
cagtgagagcctgagaggtatgcctcttatcttcttcaatgaacttttattttgatatggctgtttaatgaacaatggtgttatcaactgtaatgaatttaacttgcagaaatactttttttggttttctgggtaattctgggttttatttgagatagttgtttgtttctttgaaatggggggttcacaattaagtttcttcttttggccctcacttcaaggttactgtttgttagatcttattgatggaattgtgatgagggttgcagattgttgttgtaagggttaattctttcttcttggccagaactagtaattcttttggttgtgagactgtcagagtaggtaaaaatcagttcgtctactaaatgcttttctgttagttatttattcataaatcccagtacctactgactgtctttaaattattggatttggcttgtctgtatagttgttaatgtttttatcaactgcttttctgttttgttttttgttgttcaaatgttctttccagtcatatctattacaagtagcaaaactggagttgagcatgctagttgatataaactctggtttgttttagtgattttattcttctccgtttcaggatttatttcaattggg

SEQ ID NO: 71637 - DNA, 797 bp, Prunus persica
  Intron number 1 from transcript ppa012114m (locus ppa01211 4m.g) derived from phytozome v7.0 (chr-ID scaffold_2; pos 19120934 to 19121730 reverse strand)
ctttggttaggcacatcaaggcccctgcgcatctcgtaagtctctctctctctctctctctctgtggaccgtctggtcaagctctgaattctgtttcttttgatttggttggtgttgggttgtttgacttttgttaaataaatgatttttgctatgtttgactttcttggtttatggagatctgggaaattggggacgatttgaagatgtttttggtttcttttttatgtttattcttctgggttttcgttgtttttgttcaattgggtccggtttgcgttaagaattaggtgattagcttttgggtctttgtaagattcgagtttgattgttattttcaatgaatttgtggttactgaaagtatttttggtaacagaggatgataatttgtactataattgacatgcagcttcagctgggtttggtttgcatgccattttggaggatgcaatctgattaggggaattgaatttaaaatagctgggcttaatatgtcttcaagttttccgttccacagtttgttgtattgttttgtaagtttataatccatatggttgctgaaaagtcgtaagaaagtctaaaagaaaaactaagaattgagtggttttttctttctccatttatttcttcaaactttagcttctacggagataaaagcaagttggtacaatttcctttcttacactttctcagtaaccaaacaaaatgctaatattttaatggcagagatctagtagaagtttcgcagctcttgctttaacgcctaactcatgtttgatggtgtcttttatcaggt

SEQ ID NO: 71638 - DNA, 630 bp, Prunus persica
  Intron number 1 from transcript ppa013166m (locus ppa01316 6m.g) derived from phytozome v7.0 (chr-ID scaffold_6; pos 18126568 to 18127197 reverse strand)
agagtaaagaaagacagagcgcgaagaacacagaggtatgacttccgtttaatttttcaaaaattttatttatttatttttgaaggtaaattagggtatgcttttcgttcctattcagctcgcctatgtctgtgatcttgatttagggtttttggtggtgtaatggcaaataattttgattagggttttccgttgtttattccatctcactgttgggatttaaggatttttcccttttttcatggtatttcaatgtaaagatttagggttttccgttgtttagagtgtttcattgtaaagatttgggattttccggtgcttatggtatttcatgtaaggatttatgatcttgtgtcgctattccatttcgatatcaataattagggctcctgaattttaatttagtttgttaattaaggtttacgaaaagacctgaatgttatgaactgggtttgtgcaaattctatatattcacttttctatcatttgggcaatatccatctttgttacgtttctgaaatgatttcctaaaagaaatacttcttttcctgttgtcttatatttttgccaacaaaaggtttaattgtgtgctagaacaaatgttaattttcttttctgttatgtgttcag

SEQ ID NO: 71639 - DNA, 773 bp, Prunus persica
  Intron number 2 from transcript ppa013894m (locus ppa01389 4m.g) derived from phytozome v7.0 (chr-ID scaffold_7; pos 20768198 to 20768970 reverse strand)
catcgagtctcaaagctggggtttagttcctcaaggtgagatttttactttaatttgacgcttcatgcgcttaatttatgcagcttacatacgatgatatggtgtttacatgaaattgcacaccatctgcttgtttctttgacagccgcaatgtacttattagactgcggtgttaggctctgtgaacaactctgattgtttcatgctgtattgctattagaattgctctgtggtaaagtcaccaacatttcaacgttttcttgttttggatacttggcgacatgggattctcgaactctgcatttgcttttaagttttttgattgagttttagtgatctaatgtatatgtggcatttggcactatgcgtgggttgaatttctgttcgctgccttcatatgagcttctgagtgaggtggtcttattcaggacggaatttttaatagctatatatatatcttgttgaagaaatcctttcaagtcttctcctacaattagtttctaaagaaaaagaaaaaaattcaaatgagacatgattttcagcatagaatcgattacaattcatatggaactggcatgccttctctttgttcttagaacttaagctctgaattgacaatcagttcctgctaatcatatattgacaatatgttatacctacatggaacaaacaagttaattgtaagtaaaaacaaggaagttttgataaccctaagttaatgcgatatcgagtatgaactctaattcttcctttcgcatatttcagggatttca

SEQ ID NO: 71640 - DNA, 645 bp, Prunus persica
  Intron number 1 from transcript ppa006153m (locus ppa00615 3m.g) derived from phytozome v7.0 (chr-ID scaffold_1; pos 34539172 to 34539816)
ccagaagctcgctcgttacaaatttgcaatcccaggttcatttcttggtttctcttcttttctccgggtgcttttattttctgtttggttcttgggaataatggggaaacggaaacggaaaagaaagcacaaaagaatgctaaagaaaaatgctttcgaaatccattttcttgcatttcctctctttcctatattccttttcaatattctttgattattttgaagaacaataaaaagagacaccaattaacatttgattataattttgagtagaggaatgttgcatgatcatgtaattttgagtttaatgttttggaagttaacgaattaacaatggtaattctgtctgttatgtggcattgaatttaggtcttgaagcacgaattttacccccattaatatcaaattctttgcatcataccaatcaatatttaatggatttagcatatctttaagctgtaattttacctcaaaagcaacgttcataagctgcactaacatttctttttcatgttgtattcatgatgctgtcttacagcgttgttatgtaagcatgtttttatttttgcgttttctgaattgaatgacagaacctttgtcattgtgactttttgcaggtgtatcgtatcgtatttatcttgattt

SEQ ID NO: 71641 - DNA, 314 bp, Prunus persica
  Intron number 1 from transcript ppa001016m (locus ppa00101 6m.g) derived from phytozome v7.0 (chr-ID scaffold_6; pos 26713302 to 26713615 reverse strand)
gtgaccctggtgagtattgaatactattctgtctttatgattatagatatgtggcttctagtttacttcttcattaattagcttcaatggttttcctttgaataagtatgtaattatttattaaagaatgttgctttatatcttaataccagaaccccaaaagataaaggagaacatctcaatttagaatttttttaattttattttaaaagcccacaaattttgaggtctcataattgaacatttgttgattggtttttgagtatgatgtgttttcattttctttttttcattttatttcattttggtagaaa

SEQ ID NO: 71642 - DNA, 264 bp, Prunus persica
  Intron number 1 from transcript ppa025310m (locus ppa02531 0m.g) derived from phytozome v7.0 (chr-ID scaffold_2; pos 4797449 to 4797712)
gagaagaaaggtgaggcccattgagtttacaaacactgaaaaagacaaaccagtcttaatattaatttattgagcaaaagtcccaagtgtgcacgtcagaaaccaaaggaagctgaaaactggaagttcctctccccctcttaaacttcatcaccttcacaactgcaaccaacgactagtctttgatctgagtatggctcctatggccaaccaacaaggacattctttttcttcttcttcttcttcttctgtaactcaagatcc

SEQ ID NO: 71643 - DNA, 902 bp, Prunus persica
  Intron number 2 from transcript ppa025310m (locus ppa02531 0m.g) derived from phytozome v7.0 (chr-ID scaffold_2; pos 4798128 to 4799029)
gcaagtttgaaaggatatacttgcaaggcgggagagtatatttctaccctctatactgcacatatatatggttaatttagtggcttgattctatatttcagggtcatctatctttttcaagtttaattttttctctactttttcgtttggttatatttaattgttacgcattaaaaaaggtactgttttgatagaaatagaaaactgtaggcagaagatttttttcaatagctgtaggtagaagattcaaaacccatatattagtctctccaaaagccgtactagtcaaatattgtttgtagttaaagaactattaagcacgttgagtagggttaccacagtggtggccctccccctttccccatgcttggtacccaggatcgaaccccaggagtctttcctaccaatgtaacccaaaaaaaaaaacagaaaaaaaaaatataactattaggctccatggaaggattccaaattcatggatttagatgtatattgtaaggtaaacttgtttgtttagactagtaaaattataagatttggacaagagagaaatgaagaagataaatggatttcaaatgattccttacatgtggtcaatttcaaaactacattttaaaggcacaacatctagttattccaaataccttcattctaatgttgttcttgttttggcagcaaatttagccttattctcaaatctaaatcccttcttttaaatccctccatccaaacggaacattactttagcagactatccaaccaaactcaatggagtagggcagtcggctaaatagactaccttgtgttctttgcgtgcttgcatgttaacattttattccttaatgtgtcaaattttttaaatggtaggtcagaagctacatttatcaaccacatcgttgaag

SEQ ID NO: 71644 - DNA, 975 bp, Prunus persica
  Intron number 1 from transcript ppa007991m (locus ppa00799 1m.g) derived from phytozome v7.0 (chr-ID scaffold_3; pos 16105082 to 16106056)
tgctggtaagtaccaaatatttagcataaagcttctcttgtctcacacacatttaatatcgagtaatgctacacttatcacatttttatcccacatttctataccacatgatatggcatgtccatatcatatgccacatcaattaaatcaatgaagtatatttcaataaacaaagtttaattgacaatttttttttaaagtgttaataaatcataaaagaatagaaaatgttaaataattttaattgacatgtggctgtccacctcatctgccatataaggtggtatgggaatgtgatatacaaatgtactaagagtagcattattctttaatatcatatgagctactgatatgggttaggccagttggccagaacagtaggctcgcttctttgcacataagttcgaaacttcctccccataaattaaattaatttaatattacctcttctataaaaaataaaaaataaaaatcagatggcctttacccttacctcttactcagcatgtggtgttcataattggacttgaatgtttatccttaccccttacccaatacgtggtgttcacgtgttgggcttgaatgtttgactctgatgtggacttggcttcacatgtagcccactatatggtagtcccacgcgacggggctagttgaagaatatgagtcccatatcggaaacttgactaaataaaatacaaaatacaataaatggttccactactaatataaccgaggccttttgtgatacaacctcatacttactgggctttgtaggtagctaagttggggacaatatcgatgttgctagtagtgggtcgatgatccatctttctaaaatttaacaatagattgatattggatactagccaattagtgtccattccatcaatatcatgttcaattttcctttttttaaagaaagtaccagttcatcatttgtcactgccttaatttgcagtctgtgataccact

SEQ ID NO: 71645 - DNA, 180 bp, Prunus persica
  Intron number 2 from transcript ppa015144m (locus ppa01514 4m.g) derived from phytozome v7.0 (chr-ID scaffold_1; pos 25568917 to 25569096)
tttggcataagcttgatcatcctaacattactaaggtactacgacaatggttatttgtttttgcttttcgttcttctgtctactctcaaatatttttatctttatttgttattaattctttttctttaattttcttgatgattagtgtattggagccacaacggatatcgactctgcctc

SEQ ID NO: 71646 - DNA, 1024 bp, Prunus persica
  Intron number 1 from transcript ppa001079m (locus ppa00107 9m.g) derived from phytozome v7.0 (chr-ID scaffold_3; pos 16636184 to 16637207)
tacaaattgcagtgcatttcttggaactgttgaaggtatttcctgaaactcccttctatagtgcacatggaattagaacccgtttctttctgcgcgaactaagttgcaaatttcctttaattttgggagtaaaaaaaccaaactgctattaattcttgataagaaaacaggttttagagaatatatttattctcaatttgggatgtacttcatttttatcaaattagtggcctttaatgttgaatttgattttctgttctgttgcccttttgagagttcagaattctggcattgtatgccttttaaaaaatcaaaactttgacttgcataattccaattttgttgctgcagattataatgttgataggatatcttgggtctctgtctactctacttcatgttttacattttgttgtttagttccattttgatgtttttcctgcttaaaactgtagcaccgtaaaattattgctaagtaagaatgctaaacgattgcagtcttgaaaatgcaagtccaaaataagccattctgatccttgtttgaggataagtgatatgatttctaaaggtgtcctccgtgtatacgtattatgatcggtaaatgacttgttttgtatgattcttcctgtttgagtgccatagtttgtaaaagtttcttgatgttctgttcatccacgccattgattttattgctcgaattttatggacgtcaatatgtccttgcatcgacatgaagctaaagatatctaaattttctttcttaaagagctatatatcaaataggactttctttaagttgaccccaggcctgaataatgcataattggccatctaacctcttgccaataatattcaacacctttgagttataatctgcaccttcataatggtggattaaagtcttggatgagaaaataaaaaaccaggattgcatgtatacttgtagtccttgccttgctttctctcttaaaactaaaaagtaacactgatgtctttctccatgcagcgttgcagctgattgaag

SEQ ID NO: 71647 - DNA, 537 bp, Prunus persica
  Intron number 1 from transcript ppa016921m (locus ppa01692 1m.g) derived from phytozome v7.0 (chr-ID scaffold_1; pos 30293072 to 30293608)
tgtctttccccctcttcaattcattccttctccatgtaagttccttcaatttattcatattctctctctctctctgtcttaaactctctgcctatgctggtctagcctagtgaagtcaaatgaggaagcgtgtcatacaatgaacgtgcactcactgtatggtctaggtcataaatgtcaccttcaatcccatatattcattagtttactgtaaaatttccattttttccttttgtttttaattagttccatagaaatttcaaagctgaaaatgataccagggttgacatatatagatatgtgtacatatcttattcttatctaagcgtaaatgacacgagttgagttgaatccttcaaagtcttacagtacccttgttttataattaaagtctagctgtatgattatatcccagcttgggatatgcatatggatatatattatttataataagccagaacttttagatacctagattaagtactgatctcaaacgttataacaagctaacatcattatttgtgtaacacagtagga

SEQ ID NO: 71648 - DNA, 779 bp, Prunus persica
  Intron number 2 from transcript ppa005988m (locus ppa00598 8m.g) derived from phytozome v7.0 (chr-ID scaffold_7; pos 15604145 to 15604923)
aattaaagaaggttgggcaaagtttctttctttctttctttctttcttttttgataagttagcaaaagttaactgttcggataatctacttatattttctgtgttgatattgacttgtattatgttcgaaacttgaagttttcgtttatattggaaagtttaaaatgatataaacatagggtttacactcaaactaaatattaagtaaaatgcacgtgtacatttagtgttttttttttttcctacataaacttttaaacaattccatttttggtaaacctaatttttttacctccaaataaaaacttttttaatgcctaatataattaacttgttatgttcttaaactcaaggggttttgaatcaatatgctgctttaactaatgaattcttcaatatctacgggtgtttactctgcatgatggcagttcacatttgatgttgctgtcttgtttatctttggtcacttgaagaatcaccaccacaaagaactgctcagggaaaactactacacactagacaaaggttagaattctttccccacaaacctacctggctcttcgtacaataaatcggtcttggtaagcatagcaatgccatgatcatggattaagtttaattgtatcttaatctcttcaggaggtaaactaatcaaactaagttactctcttttcttttaatgtttaatattctcttgctcaatatcttttgtgggggaatgggaatctaaattcatttgtaaaggcaaggagaagactaagcttaattgtcagtgagat

SEQ ID NO: 71649 - DNA, 519 bp, Prunus persica
  Intron number 1 from transcript ppa009333m (locus ppa00933 3m.g) derived from phytozome v7.0 (chr-ID scaffold_6; pos 24224366 to 24224884 reverse strand)
gtccccgccacattgaaaagctcacggtgagtatcttcatctgttagttttgttggtgtagttgctaattgttactgtttgaagttagtttcgttgcgtttttctttctgggttaattcagctgaattgatgttcggaagcagttaattatctgaaataataatctgggttatctgcaaaaattggaattttcatttcttcaagtgaatttgatcatcatgattttgttaatttgtgcctttagaaattagattttagcgcacggacatttattgcataattgatataccatgaaacttagtgactccctttttgagttaattgagctaaaaatgaaggagcttttagcagtgttagtattttgtcaactgggtatttgagcttttaaatttcttagcttttagcagtgttattgaagcttaattccacttggttcagtagcatgagcaggctagtgtttttgagtgattggttttaaacttgttatggattttgtaatgtaggtagttcttgacttgg

SEQ ID NO: 71650 - DNA, 849 bp, Prunus persica
  Intron number 1 from transcript ppa007776m (locus ppa00777 6m.g) derived from phytozome v7.0 (chr-ID scaffold_3; pos 17738872 to 17739720 reverse strand)
gaacatcttcaaatgtattaaaacatttccgctatatataatggctgtccacaaacaggggaagatttttctcatgatttcaattgcatccccatgcattcgggatttataatgtgaccaaattgaagagctcgtaagaattgttaaaagcatgtggtgatattgatacatcgaaaccttttcatgcttgttggagtgagcagtgcctttgactggttgctagacatgcattgcaccttttttattgatctaatcgagatgacatcgatttgagcatccacaattatttggattaaaaagactacttaacgatttatgaaaataaataaataaattttcaaaaactgaagccaatcacaaattactagcagtttcatcgcatcttaagattgtatgcatatgcgccaacaggtgtagctcaatgaaaacaaacaggtgtagctcaatgaaaacaaatgttgacttgcagagtggtggtttcaagtttgaatctccatgacacgttggcagtgtgtatgagaaacccaaccaatcaatgatttctattttctttttggactatcgcttctattaaaaacaaaacaaaacaaaaatctattcatatgcatctaccaaccaatcaatccaagatttggatctagcaattgatttctcatgttataaatagtaatttgtcggctgcttagtgcttagtgtcaattgattagtacctgctccagtaattgtgtatagatttaaccaaaaaatttggacattagtgtggtatgttactatgcttcccttctttatataacccgtgttataggcttatagcatatgctttgtttgtgagaactttagagaatcaaa

SEQ ID NO: 71651 - DNA, 608 bp, Prunus persica
  Intron number 3 from transcript ppa007655m (locus ppa00765 5m.g) derived from phytozome v7.0 (chr-ID scaffold_4; pos 12817528 to 12818135)
gtgattgaaatttcagaccctcatctatttgtcaggtaactttggttatatggctgttgttgtgatcatttctcctcttatgttaactgttgtttgaaatttgtttttctttcgcacgtaatgacttcagtgaaaagaaacagtacaccataatgaaatagcaattcactgaaaatacaaccaatcaaagccactacgggcgcattagcaaaaccatattataattcaccagacaacaaaagctcttcaaatctgaacagtttatagtcaacattttacatgcgtccttactgtagtaaaaattcaagtgcttttaattctttattcttctgattttttggcacaaaggtttttgtcaacccatttcccgataggtagaaactcagggatttccctgccaaagtttcaacttatccaaatcagatgcaagccagcatggcttacatttagctctggtatcttgtttaacttttggcaaggatctagacgggtttgttccatgttcccgcgtaagcatctcttggttgacttttgactatgtatccatggtaaatgtcgatttcatctggctagaagtaagacgatattttcatatggcaggccaatat

SEQ ID NO: 71652 - DNA, 728 bp, Prunus persica
  Intron number 1 from transcript ppa004950m (locus ppa00495 0m.g) derived from phytozome v7.0 (chr-ID scaffold_1; pos 30444116 to 30444843 reverse strand)
aacagattgaaccaaagaaggtcgaccgccaggtatgttaaccgttgatggtgttcacttgttcatctttattttgtcctttatggcagtaattaatgatcatctactttatatgcctcgacatatcttccctgaaagttataaatttatgtatgaaatgtaagaaacacttagttgagcgttggtactattggccacaagctaaaatttatgaaatattttatagttcgtcccattcaccaggtatgaggattgcattttcattttcaaagaaaatcaaagcacactccggaagaattggatattattgtatgttaaattttagatcagaatatcgttagaaaaatccagttaaatgatgggaaaagcactgcagccaacaactcaagttagatgatgatattaccatgctggaaagactgatggtcacaattagctcatctactttgcacagacaacctgttctcgtccaatgtccttattaagtttttttgtttccgaatttgtggcaacctttcaaatgattaaactggttacactgaactccattctaagtgtgttctgtgtaataaccttaaaagcttcctttattttgtattaccattgtttagtgcttcctgttatagtatttatgtctcatccattctctttcaattaactacttctgattctcttaaatttttggttgttcagaccaaggtcttcttttctgtctctgaaagtgtagc

SEQ ID NO: 71653 - DNA, 789 bp, Prunus persica
  Intron number 1 from transcript ppa018982m (locus ppa01898 2m.g) derived from phytozome v7.0 (chr-ID scaffold_3; pos 19250649 to 19251437 reverse strand)
tgcatccatacatacatacgtcaacgtgtattcctgtgggcaaacgacatcgaggtggaagttaacaactgggacgaaatataattaagatggtgattttgatgattaggaacgaactaaataagtgttagaatttggatcctttgctttacttgattcagtaactaaataagtgtcagaatttagcttctctatgttacttaatgcagtaactaaataagtgttataattatggctttctatgggtaataaatgttataacaaataaattaatttgcattttatccagtggtttaaattttagataaattgagtaatatctgttaattggaattttagatatacccaaaatcaaattcttgaatttgactctatagggtaatgcagcaagggtttttcttttcaaaggaagaggtgttcctaaatcctaacctctctctaaacgaccaaaactcttgtttttacacctgcatcttctgcaacttcaatcttttcgtccacaagatttcaactatctcaggccaatggaccgaagtggaatattacctaaggtgagattcaagaagggatggcaaaacttactcgtgccgaatcaatcttttgattgcttttatctgtttttggatccatgtcaaagttttttctgtcaatcttactaataatggaagtgcaaaacctatgtttactgcttaatcatgtcttctaggatatatgatcaagggtaatatttgctgagcttttcttgaatattcttgtaggtaacggagattgagagcaagaattggatta

SEQ ID NO: 71654 - DNA, 227 bp, Prunus persica
  Intron number 1 from transcript ppa001323m (locus ppa00132 3m.g) derived from phytozome v7.0 (chr-ID scaffold_2; pos 16769822 to 16770048 reverse strand)
cggattttgctgactgtgtggagttgcagccagaggtacttgttcattttgtttccattgctaatttgaacttagtttggtaatgccggtggttaatatcttcttaacttttttcttttacagctgttcttttaggttttttttttggtgtttgtgtgtatctaataatgtttgacatttgttctaccacagcttaaaaggttgaaacttcgaaaaaacaattggga

SEQ ID NO: 71655 - DNA, 931 bp, Prunus persica
  Intron number 1 from transcript ppa012398m (locus ppa01239 8m.g) derived from phytozome v7.0 (chr-ID scaffold_7; pos 14493538 to 14494468)
aagaggagaccaagcgtttggccactattcgtgaggtttgttctggtcaccccaacacaagtttttaaggtttacatgacaattatgggcttaatcaaagactcaatttttatttttgtttttgtttttttaaggtttacctaaacatgggtatgatgattttatgcaaagaaatttctgggtacaagggaatttaactttctgaaaatttaaggttgagaaaagttgatggcaagctagatccccaaaaaacaaaaaggaaataaattgggggtctattttcaaattattgtgttgttttgtcttttcttttctctttgcaaaaatttgggttgtagattatcaagggtctgaatttattatgccatggaacactttgatgtaaggaatttcaactttattactattttccttggagcttttggttaaaaggaatattaagtctgaattatttggcagattagattgttgatccaaatgttataaacacaacaaaatatgaaatttggcagaggaattatgacaacgaagtttaatccttttaggcacagacataagccttgagatggcaaaaacaattagtgttttttttttttttttttttggttctcaataacggcaaatttgtcatatagtcaggtcttctcagtttttttatgcttgccacaacaatatcagtccaaggatgccttgctgaaaatatctgtatcccatgtgcatcgacttctgctggttaaactagaaaaaatagccgttgagtcagtactattagctagttgaagatgtttaatgtagatatgtgggtctaggtttttcaatttcatgcaatctaatgtaaagtaaaaaaattgttgtcggtaattgtatgtcattaatttccttgttgtgtaaattatggatcttccaggagcttgaaggccttgcagatcca

SEQ ID NO: 71656 - DNA, 585 bp, Prunus persica
  Intron number 1 from transcript ppa000983m (locus ppa00098 3m.g) derived from phytozome v7.0 (chr-ID scaffold_4; pos 12487777 to 12488361 reverse strand)
gggacgtaagagactatataacatctttttgtttcagtaagataccttatcatatgagtgttatatcttatatgataaatttgttcatattaatgttattcgttttaaatttgtatcaaaaccatatcttatatagggatttctgtagtacgcctctctgctcttatttcaatagcatcatgtcatatatctggaccgaacagtagatccgaaaattagataaataatctaaagctttttagttcgtgaaagtatgtttggagcttatgaagtattcttgtactgaaatagattttgattttgttaattttactaaaatgtttgtgcacaacttatttgaaaaccagaagtagtatttgacaaagtgatatcttgataagtctaacaaagttgtatatctattgaagataaaaaaggccaaaacagaattgaaaaaaattatatgagaaatgatattttgatgtatttgagctttcacttttcaccaatgaagtttcttattcttcatcaactctgttatatgcttgtttttgcaaaagtagacattaaaatttgtaaattctgtgggctgtaggcacagctgtt

SEQ ID NO: 71657 - DNA, 215 bp, Prunus persica
  Intron number 3 from transcript ppa024217m (locus ppa02421 7m.g) derived from phytozome v7.0 (chr-ID scaffold_3; pos 15204401 to 15204615 reverse strand)
ggagggttttccagttacattgttgctcatcaagggcaagttttctccactttccttttgaaacatgcagaattggtgtccagatttctaaatgtctacataattggttgtttttgtttttgttttttggttcgaacaaaattagttgcttgattagcagatggaagatgtaaaattttgttcttgaatttataggtactgcttccggataccag

SEQ ID NO: 71658 - DNA, 548 bp, Prunus persica
  Intron number 1 from transcript ppa019053m (locus ppa01905 3m.g) derived from phytozome v7.0 (chr-ID scaffold_8; pos 17723317 to 17723864)
ctctggttgttactgccagtggttttagcacagcggtgagcttatttaaaatatttaattgcttcaacaatcttctcctttattcatcatatcttattgaattttcaagatcattgttttttgcttttgatttttgccccttctttgccacatcaaagcctggttccctcatattaaggtgtatcataagttgttgaatgaactactgattgaacaagtttcaagcagaaaaaggggaatgagtttggaagatttctagtgatgttcacgaatgacgttcacgaataaccttagaattatgtgaaagtggtctcatgaccaagcaagtatagtttaggaagccttttcccaactaaaaccttgaattcaatagttgaaacctaaaagtgcgggatatcaaaacttcgcgttttttttttttttggtttcgcttatgattattaattttcaataggtgtgatatactttgaattagttcagtttctgcagatgagttatttgcttattgataattgcagggtgataaggataggaaaattgaggaactt

SEQ ID NO: 71659 - DNA, 849 bp, Prunus persica
  Intron number 2 from transcript ppa006805m (locus ppa00680 5m.g) derived from phytozome v7.0 (chr-ID scaffold_1; pos 30364270 to 30365118)
agctcggaagaggcggttttgggcccgtttataaggtagatctgcgtacgtttaagttttactaggctgtttggttgctgagaaaatttagggaaagaactggtcaattttttttcaagctggcaaattttttttttctactgaacttgttttccaaaattcgtgtgtgtgctttttggaaacagagaaaacaagaaagcggtccattgtctctttagtgaatgctgttttctaattgttttagactgtaatgaaatctttttgttacttggtattgttatttatatttatgctggcactcagtgaaacaaattatttaggaaaatgcgtgaaatgtcataattttaagaaggttattcctcagtccctttttttctttcttccaaggcagctgcaagtgcaaatgtgccattttagcccttttggagatggaatcatggctactagtgagtaagaaactcaaagttagcttaattaccaactcaatcatatacttgtaagcacaacctgctactctcttgggtgttaaaggatttagaaagtttgtgacggcagttgaaggattatctattggacaatataatggagaaatgagtatcacctttctagtgtacatgtatgtctttcatttcattaggaagctacatcgaaggtgagtcacatatgactcacccagtgtagtgtattgtaaggttctaaattataagcttctggtttctctccctgattaaaaggcctttaaattcccaatgggcagcctttttagtttcttcttgaccaaacagggcaattgatgtgtcttccccacttgtgtggtgcttttttttttttctcaggggaagttggagg

SEQ ID NO: 71660 - DNA, 632 bp, Prunus persica
  Intron number 2 from transcript ppa006874m (locus ppa00687 4m.g) derived from phytozome v7.0 (chr-ID scaffold_6; pos 1345795 to 1346426)
tcaagggagatccactctcaacatttagcttcttggtaagtctctgatttgtttcccccaaaacgtacttaactaggaatttctttgcttcattctgggttttggtattttggtttcttgaagcaattggattcaatgccaatgcccaaatacacacatcaatatggttctgttctaaattttcagtaagcaaaacagaacaagaaccaccatagttgtgaaaattaatggttattatttctgtgagaacatatatggtgtgagggtttacaattgttcatactaattccttttgtgtgtgggttttgaattttatcaaacactgttctggtcataggaactaaaaaaattagaaaatccagttcataaatgaagaagcttttctgttttttgcccactttttaacaatgctttgaaattcgagtagtacaaaagaatcaagtagggaaactgttttgagggaccctttggaccaattggtgcttacagcaggacaccaccatcacgttctttgtccacaaaaagtcatgagctaggaaatgagagcatcatatcaatccaaacacggccttattgagttttgctactacactgcaggactacggtgtgacaatacaattctatcgagctcc

SEQ ID NO: 71661 - DNA, 922 bp, Prunus persica
  Intron number 2 from transcript ppa012647m (locus ppa01264 7m.g) derived from phytozome v7.0 (chr-ID scaffold_4; pos 3845141 to 3846062 reverse strand)
ggcatcggctggttattgtaagttgattcaatcgaattcaatctttattttacttttgttatttcttcatttatttgtgtgtttttgtgttttagggtattgagctacaccttaagaagaaaaccttgagcatgtaggtgtagcttaatgcatgtgggcatgtaaagaaaaccttgagtaactttgatccgctgcatacactgatatgcataaagttcgtacaaaacatattaattatgaaaagggttagtcaagaattaaaagagagagctagggggatcaaaaggaagctgaaataggcttttttttggggctgaacatcatgtgtcttgtacaagttatggtaatcaccgattcatcgtataggtacaggcgtgtaaacatgaagtagtccaattataatacctttatgaaattgttgattttgtgttttgataagacaagatattccttcctctcccaaacaagccttgagaatttcgattagctatattttctgccaattataccattgcattctatttttttgaagttttgcttatggatcagtggttttccagttgtcagttctgaaacaccatcaacctgtatcgctttggctaaggcagcttggtgcttggcactggtgcccaagtagtttacatagttggatgcaatatgtgcttacagcaagcagcttataatgggatgataatttcttgaacaagttacaaatttaaaatttattgagttatgctagctctgaaattcatcataggatcataacaagagaaaaccttgtagatgatcttttattatattttcaatcctcgactttaaaacataattccatgagcattcttctggctggctgctgctgacggattacactttgactttttctgaaggtttataattgggttctttcttggaggcatcccct

SEQ ID NO: 71662 - DNA, 610 bp, Prunus persica
  Intron number 2 from transcript ppa024456m (locus ppa02445 6m.g) derived from phytozome v7.0 (chr-ID scaffold_8; pos 21799457 to 21800066)
caacagattttcaaggagacttctgattctacaaggtataattagggtatcactgtgctattacataatccaatttcccccaatttattgtatgaaacacgtataaaaaaaaaatagaaaaatttgataagtatgtcaattttacttaattaggcacttgatttttccttaatatagaatcatgttagtttaaacagatatgaagccataatctgttagaaatatgagatcgctttttattaacccaatcagtccagttggcaagacgttttttaattaatttaggatttgagaaacagaagtatgttttggacttaaattgaataatttattttcttgttgatatgaattcagtcataaaatttgaattaggagaaaaaatgcataaaattgagatttttcaatttgtttcctttttttttacttcaaagggcaagttgggcatagaaaacgagtaatatatgtcaatggatgtggatcaacaaacaaaagaatgcagattagacctaataccagccaaaccttttggacttgaatctgacaacccctttattttatatgatatcttcatttttctcaggtcattgttcatatcaatctttgaaataag

SEQ ID NO: 71663 - DNA, 830 bp, Prunus persica
  Intron number 1 from transcript ppa020868m (locus ppa02086 8m.g) derived from phytozome v7.0 (chr-ID scaffold_3; pos 15925178 to 15926007 reverse strand)
ttgttaaaccctcctcacctccatctcattctcaggttcttcttatccctccaattctctagataaggtagctagctagctagttcgctaattcttttggattttcttgcccgattttccttggttggctttaatttactatatttatttgtgttttgctttgttggcggctgggattggattggattatatggtagaattggattacattggattggaaatgataacactaatccaatgatgtgattgatactacgcatgattatgtggttagattaattgaaatgttctattacatggcttagtaggattagtcatactccaatccaacttaatcccaacattttggcaggattcataatcctactacatttggctttagtaagattagacataatccaatccgtgttgcttttaggcaaccaaacatttgaataaaattatgaatcctatccaactacataattcaacttaccaaaaagggcctaaggttttctatcgggagcatttttgctcaccactttaacccaaggtgtactctcatcaccctttgcaacatttgacacgtgtccatgagcataaccatagttccataaatacaaagtaaaaagttaattatggttaggcccatagacacgtgtcaagtgttaaaaaaaaatccaaccatgatcgttgttttcttgcaaattgaacaattatatcagatgtatgtttccttcaatttgccatatgtgccattctgtttccttcaatacgaaagtttgaactccaattccattgagtctctttttgcaggccttggtttttgattttcaaccaaaagatcctga

SEQ ID NO: 71664 - DNA, 382 bp, Prunus persica
  Intron number 1 from transcript ppa016570m (locus ppa01657 0m.g) derived from phytozome v7.0 (chr-ID scaffold_1; pos 30517764 to 30518145 reverse strand)
ggccgccgacaggtcgtagggtgaggttctttttattttctttttgagcttttcttgacaaggcttttgttatgttgaaaaaagttggtggctgtgacgactcctccaattcattctcatcatcatgggggtgggctcaagagtccctatcaaagggaacccatgtgtattttagtccatttggattatagcttttctctcctttcttttccaacaatgatttactttttaccttgtctgcccatataattaaacaattattgatgttcttctgatcttcggtttgtgcaagtcagtattgatcagcgagctacatatatatttctctgtgatggtaataaaaaaatggctgaataatttatttatttgtttaatgttgcag

SEQ ID NO: 71665 - DNA, 615 bp, Prunus persica
  Intron number 2 from transcript ppa013685m (locus ppa01368 5m.g) derived from phytozome v7.0 (chr-ID scaffold_4; pos 11263932 to 11264546 reverse strand)
tctctgtgaacccaaccaacctttttcaggcagtagtcagttccagttgaaattttattttgtggagttagatatatgtgactactattttagtgctctgtttgaaccggctgacaaatagtttaattatttgttgtgtttgatatatgtatatactgttaaaacatgaaacaaaatagctcatggtataggaaaagtttattttattatccgttcacttggatcctcattttcttcccaaaagaaggaaggggagtaatctgcgtacaatggaaaatgcaagcgctgtttcatgtaaagacggatagagaaatgtattggttttggctgaatatcagatgcataaatttgttgtttttttataggcacaaaaccttgatctgccatttttctttctctaggatcttatgttggttagaagacactgttcttgttatgaaaccttcattatctttttaaatcaccgagtactgtccagttttttggtcgaataggtgtccattattgctatacaaatttcattttttctcaacctcatgcagatcctgggtaagaaactacatttgcagtattttttctgatttgttaatgaactgcattgcagaatttcccgtc

SEQ ID NO: 71666 - DNA, 873 bp, Prunus persica
  Intron number 1 from transcript ppa013604m (locus ppa01360 4m.g) derived from phytozome v7.0 (chr-ID scaffold_7; pos 13581096 to 13581968)
accattgaaggtacaattcttagtgtttcacttttttcttttttttcttttttttctttttttcttctcttcatatatctcaaatcttcgattcttttcaaatcaattttggttttggctgggcgacgaattttgtgtgtgcagaatttcgttgaataatatcaaaaaactgagataagccttttctcttgttccaattccccactgcaaaaattggagaactggaatcgtgtgggcttgagagctgaacattctggaattgtgctcaattaattagggtttcgtgtagttgattctttttagtacaaattacaatcatattttatgatttcaaacaccccagtttgaatgcttatcttaatcagaactttttttataaatcaaaacttaaaattctatgtatgtttccgatatgatatcttataagaaatggtttttttttttttttttgtgtgtctaaaataagaaatggttaatcgtatcaatttgattttagtggcaacttactatttcggtaacgttaattggggagctcgaatttcatgcacgattactatgtgtaaattgggggcattagttcacagattgtgaaagggttgcattgtatgcgtcgagcatcaattcctgtgactatatataagataatttatgtaattgtgtttattattgaaccttcactcatattttgatggcattgagtactgaccctttttgtttttggtgcattgttgctctgcgtgttgttgaccggtcgtgttctttgcagtgtaagtaggaatttagttctgtgatcttagccctgttatgcagcttatctcaaacagacttctaacgacgaatttcttcgtgtacaggcttgcaggacttgctttt

SEQ ID NO: 71667 - DNA, 678 bp, Prunus persica
  Intron number 1 from transcript ppa011264m (locus ppa01126 4m.g) derived from phytozome v7.0 (chr-ID scaffold_8; pos 17720662 to 17721339 reverse strand)
caaactactgggtcaggatctctctcttaaaacaagtgagttagtccttttctttcactcttaatttgtctaaacattcattaatctgcacttggtttaaagcttagattcttctgttttctattttggaatttccactctctttggctgctgagaaatgatttaaaacgatgagttgggcaacttaaaattcagcaaccccaattttagctgcttgtcacatttccactctgatatgactattctcttgtgttttctgagcagccaaacacaaccaaactatgtacccagcattcaaaacatgttcagttcaatttcgttgacaattgattttgagcttatttgtgtataaagtcgaattctttataaatgagcttgctttggaataatttgtttgctatttcaagtggttggattagatatagttgtggtattcaacagatgtcatttgactcgttacattcgtaaaatgagtttccacggaagtagttcctgaaaattcagaaactagtttactcgtttctgtaacattataatgtgagactttacacgattaattatgcattgaactcgctttggtatgagagttcattttcaccctcaaagtctctgtcttgcttgagttcctgaaaattgaaccttagattgactcttagaacgatgtctatttggcagtgg

SEQ ID NO: 71668 - DNA, 1016 bp, Prunus persica
  Intron number 1 from transcript ppa010668m (locus ppa01066 8m.g) derived from phytozome v7.0 (chr-ID scaffold_6; pos 1490056 to 1491071 reverse strand)
gggaagagaccgccaaacgtgggttcttcgaccaggtcaaaatcccatgtttctcttctcttttgggtacccagtataacgcgtatttgtacgtgtctggatacgttttctgtttcgatatacaatttttcgcctaatctttggtgggttgtgttgggttctgattgatttgtgggaaagcactgattttgttgataattaagaaccatagctaaaagagtttacaaaattggttaaaaattgcaactgtaaacctcacctcaattagtgtactgacaacttccaaaagagactctttatgcttaagtatgctggaaatataattggttgtaccactaaagctgctgctgatgtgaagaatggggagcaaaagcatgccacatgtagcaggattgaatgttgtttcttttttgttaaaaggggctgctagtattttcctctgcaagtaatagctgaagagtgagcttgtatgaacctaaccagtgagtgttgtttggtggttcactgtctgtgtgcctgtagtagtcatccctgctgaaagtgctttcagattatttatcttttaccatgttttgatagctgattttagcgggtttgctagattgtctgtctgctagggaacttaagctacagcaaggggatccactgtcattaggtctcattaaacctcaaacaagggagcgatcaattgagatggagtgtgatagatggttttacaatcgaggagttgtatcagtatttacagttttgtcgtatgcaacatctcatccttctaattcttagcctaaatagggacatgcttgctcttgtaaatttattgcttttagacttttgcatgccttttgccttcacaacatgtaggagaagggaaatctgatcctatcacgggttctgcttcaatttctatattgtgacagataggttctccttcttagcataacttactgtcctaaaagcctgtgcatctaagagtatgttatcttttcttttgtagaaactcaatagaaagtttgtgc

SEQ ID NO: 71669 - DNA, 636 bp, Prunus persica
  Intron number 1 from transcript ppa003582m (locus ppa00358 2m.g) derived from phytozome v7.0 (chr-ID scaffold_1; pos 30478465 to 30479100 reverse strand)
ctgaattttgctcgggaccgttgtagtcttataaggtaatgatgatgttttggttttgaggagagtatgaattaaaaagttcttttcttttcctttttgaggttgtgaatttaataaacgatatgcatttgaatataaagcatgggatgaaatgttttttctatttgggtatttcaattgttatgcaacctcagcagcagatttcgtggttggagttagaaataacattagcttgttttgttttatcattaccatcaattttccacgtgcttgcattttcatatcactgctgtatgcgtgtgtgtgtttgctcttttgttatcttgtttctgtaacctggaagcaggttgatatgagatttttcccaatgcactgaagttctcattgctttggtctcatgaaagctaattgcacatgagctcaccttatctggataccatatattcatatccgccgtatcgagatagatttagaaccaagggttgtttgtggagaatccagtctttggttttcaggagggcatatgttatttactgattttgctttgaaacctgataattttattctagaccttagttcattaaattccctttgtggccaggctattgtcaaggaaagatatccggaccattgcag

SEQ ID NO: 71670 - DNA, 429 bp, Prunus persica
  Intron number 3 from transcript ppa010611m (locus ppa01061 1m.g) derived from phytozome v7.0 (chr-ID scaffold_5; pos 18252468 to 18252896 reverse strand)
gaattcatcgtagtcttggagtgcatatttcaaaggtttatttgcctacctatcatttttctatttcctctatttcatatccttttttagtcagtaaaattttcttgtttttattctttccttctctggcttttaaaattcaattggattggtactaatgagaagttatctgggaatggcttcactcttcattattatagtcatgtgaatgtaaaattatgtttggttactggcatagcctgaatgtactataagctatttatatgttctggctactgacctgttggtttaccaaaattcagtaattttctttatttgatcattaatctgtttgaatagattatgtctcatataattgcagctctatgttctaatgatagcgtagcctggtttgtttttgaaataggtacggtctactactttggatac

SEQ ID NO: 71671 - DNA, 546 bp, Prunus persica
  Intron number 2 from transcript ppa010611m (locus ppa01061 1m.g) derived from phytozome v7.0 (chr-ID scaffold_5; pos 18252944 to 18253489 reverse strand)
tgctgattgtcggagcaagtacacatttcgcaattcatttccttctttaatgtgtttttttcttctgtcttaaagtactttaatttgctacatttcatagtctttggttaaaatccgattatttgatggccatttcttgatgatgcttcagactcatatcttcgaatttctctctctttcttgttgtgtacacaaccatgttcatgttcctgttcatttagtttgtaggtagtcatcatctctttgactgaggtctcatttaggaaaacaagtatgcgtgcacaagtagaataattttgtataacacacaatcttgaaattcagaatcctttgagttagagttactcatcttggaccctcaattatttatcccaaaatctgtttccttaggtttgggaaggttcttttaagtgttaaagctttttaaactaactgctaaaactcttcaatttcagttttagatttgttttcccaagcctggtggcaatctgatatggatattaatgaaatttttgtgctgcaatatttttctttcagagccccacg

SEQ ID NO: 71672 - DNA, 981 bp, Prunus persica
  Intron number 1 from transcript ppa015329m (locus ppa01532 9m.g) derived from phytozome v7.0 (chr-ID scaffold_6; pos 9852349 to 9853329 reverse strand)
atcagattcttggttgatttcttcaagagtatggtttcttgaaggaattgacactttcatctcataatcgatatttcattcatcaatgacgttttggagctgagttgcggtgtcatggggtgaagaagttgatggactcgctgtcatttccatgaaggacaaactactagctcaactaagtttggagaagaaggttgcaaaatgaggcaatgttcatttcctaaatagacttaggattgtttgagcttgtgattattttctctgtaagaatcttcttaatttagtggattgcttggtcggtgtttcccaatggcgggtttctgggtgaacatttcttgtgtgttgttcttaatttcttgagtagtcataatcttattattatctatactttgatttgatggatgttcatgcacatatcactttagttattgctagcataggggatgcctagattgatgggtccttctgagttcctaggttgtcacataattatcttctaggattgcaggttcttatatttgatttgaggtgagtatgtgctttgcttgtttgttcgtaggtctatgactagtatttgactagtcatattgttcctaagaacagttaatcattgttgtaatatatctattccattgtggtggttttaatttacgcacttcacctatgtaccaatttcaagagatgatgcatgaattgttatggaagtgaaagattcaccttcgaattctccaaagaaatagaaattaacatctaaggtatggaaagattttgttaaatttaaagggcctgacggcggtgaacttgcaagatgtaaccattgtcataaacaaattgtgggagatagtattaaaggaactagccacttaaagaagcacctggctaaattcctaggataaaaactaaagcattggtcaacaaatgttagctatagcaaaagatactttaggctccactggtggagttaaaaatcacgagtttgat

SEQ ID NO: 71673 - DNA, 435 bp, Prunus persica
  Intron number 5 from transcript ppa008333m (locus ppa00833 3m.g) derived from phytozome v7.0 (chr-ID scaffold_7; pos 3422097 to 3422531 reverse strand)
gagaaaatagtaagcacttctctcaaagaggttaaaaaaaattatggttatgtagtgcctcaagttgctctcagccatctttgtgtaggctgaatattaaacgaatctttgatgagcactttatcactaaagttctcgtagattgatttggcatttcttttcagcattttgtgtgacttattctcccctgatgaaaggtgtagatctggactaatatatctgttgcagcttgtttgtacgaaagtttccattctaatttgtttgacgggtgtatattttagatccagatacctgacattttagttgtcactcaacagtattctcgtagtgtttttatggatgtccattagaaacttattgctacttctctgttctttcattttgattatgctttatacagaaagctcagaggctacaagagtctggtgtggtaga

SEQ ID NO: 71674 - DNA, 537 bp, Prunus persica
  Intron number 1 from transcript ppa008333m (locus ppa00833 3m.g) derived from phytozome v7.0 (chr-ID scaffold_7; pos 3423464 to 3424000 reverse strand)
ttctttttcaatctcatcgatcggctcccacccaggtatttttagtcttcttttttatttttgattttttaaaatttacgatttaatttatgttcgttttgctcgagtttttttcacttgcagtccagtttacttgtttatggttatatgattctttaccggattgtttcagagtttgtacatctttttcagtcttattgaacactatccacacaaaattgtagcaattaaggatgttgagtctctcatcttgtgtttaaaaaattttgcattcttgccctgccgaaacggattgggaaattccaaagaaaacaaaaaggggaaaagaaaaccctaacgacactgctgaaattttgatggcattttggttttttagtatttaaaataattatcaaaataattgtacaacatgtcagatgtctaatagttatatgggtaggagttgttttattcaagagaaccattttgattgagattattgatcttaaaagtcttctatcagttccaagtgtaggacaagagaaggagggtttggaa

SEQ ID NO: 71675 - DNA, 988 bp, Prunus persica
  Intron number 1 from transcript ppa013040m (locus ppa01304 0m.g) derived from phytozome v7.0 (chr-ID scaffold_7; pos 19974521 to 19975508 reverse strand)
cctcgcccgcaccgagcaacaggtctctgcttcgtcctcagcttttgcttcgttttctatgcctgcttatctgtattttctaaaagattacgaatttggctccaaatctaattatcggaaccaaaagctccgatttttttcgctttgaatcgtgcatttatgaaatatgaaattgccaatgcccaattgttcaattctgggtttacacgtctttggtgagatctcagtacccaggttgctaatttagatccaaaactaaattgagttatttctgttggctatatgatataagaattaaaagtttttaaatttttactgggtgtctcagatatctacttcctgaaactgtggttgcatgtaagggaaataggatgtcctggtagagtcagatcgaattttcattccttgataaatttgatgatttaaagttaagaataggtgggttctgccactgaattgtttctcctctcatttactccaactttatgaatatcaaacacttgttacgatacccatgttttgcattatgatttatgaaacatgaaattttgtgggaaacctcattggtgactaacccttttagaagatcatatctttgggccctgctgaacttaaatcatttgtaggagttcactacttgtcttcctgcctcgaaagagatcctattagcaggttgcattggtttgtaggatggttactcattttgttgactgctgcatactaagggcagcgtttctttatgatgccggtcatgtttagcaccggttatttctttgcttgcatatctatggcatttagctgggctcttttccataaagatttatagttgagcagcataaatatataaaacttgatccttttttctttctgttcggtaaactgaagttagtatatatttatgtgacagcagttatacatgtttatattgctgatatttattgtacattgaacagtgttcatttgttgagcaccggaactacaaaattgt

SEQ ID NO: 71676 - DNA, 951 bp, Prunus persica
  Intron number 2 from transcript ppa008114m (locus ppa00811 4m.g) derived from phytozome v7.0 (chr-ID scaffold_1; pos 46450367 to 46451317 reverse strand)
atactgttgctgagaatctattagatcgtttggaggtaaaaagatagttctttttagtttaagtccactagttctatttacggattgggttatgattacaaaatagtttttttgcttctagcatttgttggcttcatcactcttatttcaaagtctttagctttaagagggttattttttcctgagttggtctttttcttgtctcacatctttctgtccatttgtaatgataatcacaccacttctgaccactaaactatagtaacaaccaaattatttcccggttagttctggcatctgtatggcattgcgtatcttgggctattttgtcgctgaagaatgatgtcatcatgcggtcctctactatagtttctctaggcttctgatgattcttagattccaatttccttgagtggctatattcttttgaaagttcctgcctgtcaatatgtgggttgatatggttgaataatgtagttctgtttctttccaaacttaagcgaactttcttgtgtgatgttttttccgttgcacagaagctcaattcctagtcttgtataagattttcttagagaaatgatttggtatccaaagcttgtctcataacaataacaaactattcctagtgcactggattccaccctcgtctgatgtattcagttaacagcaggactgctaaccttctcggtgtatattttccaagtttaagtccctagcgctcaatattcaaaacaagattttttgactttgtatttaagaatatgtatttgttataaagagtaatgataaatgcaaagtttgagcttatgccattgcagtatccatatgcgaaatgttagaactgtactatgtcatgacctttatagtaccaatattttcttctttttttaatgtttaaattggtatttgtctcatattgcaggattgcaagaaaacatttccgacagcatt

SEQ ID NO: 71677 - DNA, 851 bp, Prunus persica
  Intron number 1 from transcript ppa001500m (locus ppa00150 0m.g) derived from phytozome v7.0 (chr-ID scaffold_5; pos 939434 to 940284 reverse strand)
atatttgactataagtccataactcagaaacacaggccaaggtatgcttctgttcatatatcctataataatatcctgtctttctttaattgatgattttcttgcatttatttccttgtggttttctgggttgctcctgatcaaaacttaattagacatggtcttcattagcaactatataagcgtttgttaattctatctgaattacctggaaggtatacacctaggcatcagattattcaaatcgaatcaaatcaaaacctgctttgaccaataataaatctgtatccaccctatgacatagcttaatttgcagtttcttagaccacattctaactgggtaagtacttgttgcgctttatctttcttattgtgtattgttactttggtctctaccactttagttgaactgggtaatcaaattccaatattgtgccagtgcgtgtattccataaaaactgcatcaagccattgtcgtttcatcgacatcttccctaccaactttaacccaaacacatacagttgtgattctacataatagttttaatgatctgcctgatataggagatttggaatgtttgattctggctttgaaattctggtgtctcattgacctgttcttttataattttttctagaacattcatacaatacaaaagctgctgtatactttttacattggaatggagtttgaagaatgttcagttcacttcccaaacactttccaccagttcctttagattctcgtttaatttcagaattagtttagtttaaccacttgttttatgattgttagtatgttacttaaccttatgctatattactttggtgcagtaggagatttaggtcag

SEQ ID NO: 71678 - DNA, 485 bp, Prunus persica
  Intron number 2 from transcript ppa014643m (locus ppa01464 3m.g) derived from phytozome v7.0 (chr-ID scaffold_8; pos 2948811 to 2949295)
acatcgcctccggttgccagatttacaaactccaggtatatgcccgcatatcataatttgagtctttttgtttttgtttctattatggttttgaaagttggatacttgcttattttttattaagtttattgttggtatagtcttcatggtggtggagctcatatgtagtaccaaatgatttttcaattagtgggactgtataatttgggtgtttttgattgcttgtagcttttaaatatgagaggcatgtctaaaatttgatttggaaaattgtgaagaaacatgagttagatagccaagttcaagtgagaaatgtttgtttatgttcaatatgcattagacatttaccaaaatgtaagtatgacataatttgctcatatattactagtcaaagtgtatggtggttaggctaaaagctttattttcttcattttctttgtttttactaagattccattggaagcttctctgatcagcgaaggaaa

SEQ ID NO: 71679 - DNA, 802 bp, Prunus persica
  Intron number 1 from transcript ppa000603m (locus ppa00060 3m.g) derived from phytozome v7.0 (chr-ID scaffold_7; pos 3890015 to 3890816)
ctagggtctgttgctttactgatcttttaagtttatatgaatgcttttatgtttttgctagtggctgtgaagttatttcttttatatgcttttatacttaaatgattaatgcttttcttgctttgattcacctgcacctttaaatttgagatgatattatgtcttcttttcctgtcatctaattgtatctaagatataatttttctaagggcagtgttatcgaacccaacagttttaccagcattctcttgcaaccaacatggcaagctgacatgtgatgatgtatgtattaattttcctgaatgtgatgatgaggtgcggccatatcattcgccatgtaggttgggaaaagaaattggataagtagtatttcttttggtgtcatatatgttataatatttcctaaatcttgcctgacataattacttaatattctaaaaacaagttaaggtaaaatgtctgaaccaaatatttaccaagcatgtcttcttgaaggaacatataattaaatgaaatttgaactttttgaagtttgtaactatgtataataaccaatcgtacatggaaatttgaaaaattaagataatcaatgatacttggaaaattgaaatatgtggtatataaataatgcatttaaagttgaagaatttacttgcccttttaggtaaatacttggaaagttgaaatatttgatctataaatagatacttttgtattctattcaggtttttatttttcttaaatgtggaaaccgatttttatgatttatctttgcatggcccttcatatcatttattgcagg

SEQ ID NO: 71680 - DNA, 406 bp, Prunus persica
  Intron number 1 from transcript ppa022974m (locus ppa02297 4m.g) derived from phytozome v7.0 (chr-ID scaffold_4; pos 18849492 to 18849897 reverse strand)
ttggagaatacggaggaagtcctaccttatatcgagtatgtatgaattttatttttcatatgtagccattttaaatattatttttccttatgtctatcttatatataagggatcgtaatgcttgattttttcgtgtcaatgtagggaacatatgatctacatcaagaccactgatccaaaatttagaaagagaacaaattggctgcaagataaacacaatagcactttcattcaataactacactttaaggtatatgttgaatgacatttttgaacttttaattttctttctttctatatgttagattgaattaagatatatgattaatttgtaggttcaaagtgaacttaatggggaagaaaataatggcgtatcagaaaatttgaggtagcagctggtccaagg

SEQ ID NO: 71681 - DNA, 870 bp, Prunus persica
  Intron number 1 from transcript ppa000979m (locus ppa00097 9m.g) derived from phytozome v7.0 (chr-ID scaffold_1; pos 34606097 to 34606966 reverse strand)
caccataagcgagccaaagttcactccttttctcagtgagcttctaactctctaaccgtcttcttctattctttttgggctttgtttctctaggttctcagtttacttgattgttaaattttaggtaatttactcatgggtgtactaaagttttgaccttactagcaactgggttgttaattggggctttatgattcacagatgtgttttataattgatagtggtttgtgcgagttcatgtctttgagtatttggttctggtataatttgattttcaactgggcacagttgacattaccataatgatcttgcgtgcgtatattctatgtactgtttgtttggagagatctctggtattcgatgtttagtgctgcaattaaggcgggggcttacgtgtttgctctacatgaattaatttgtttcatgatctaaaccttttctctaacatgagcaatcatttaaagaaataattcacatcaaatttagaaggtagtcacagtaggcatgcttagaagactctcatcgatagaagcatattcataacgtgtcaattgtgtattctctgattattaaatttgtgattgacgttcaaccctagtccaaaggaaatgatgaagtataatccttattaaccattcccatctgatttgctccacattttaggagaattatgagaaataagtaactgtttaacgtgtaaagttatatatatatatatatctgatttatatagattatgcaatgaagatttatttgacagatatgtattttaagcttaaagtgaattcgtgacatggcatttgtgctacattgtctctcatacttatgattggctttgacactgtttcttgcagtgacgtccattgtgca

SEQ ID NO: 71682 - DNA, 355 bp, Prunus persica
  Intron number 2 from transcript ppa002509m (locus ppa00250 9m.g) derived from phytozome v7.0 (chr-ID scaffold_5; pos 11197418 to 11197772)
accaaatcaggtgcatacaacatcacttgcattttaagttatttgattttttttttaatacaaacaatattggaggagggggaatcgaacttaggacctcaagtgcagagacaatgcttttaaccttttgagctacaattgaacactgatactaggtagggtcaccaaattcatttaccaattaaacaaaatttgattaaacaaagaaaatttggtgacttgcagtaccgttagttgaattgtttaaattatttagaggtttggatttgaaataattgctgggtttttttcttctttttgttgggtgtaatttgtgttagatttagtaaacaacttggggacaattgcaaggtct

SEQ ID NO: 71683 - DNA, 678 bp, Prunus persica
  Intron number 2 from transcript ppa001710m (locus ppa00171 0m.g) derived from phytozome v7.0 (chr-ID scaffold_1; pos 42344445 to 42345122 reverse strand)
aggtttttcacgccgtcgttgaacctatatttaaggtacgatgtatttcctgttacctaaattctctgtgttagttctactgctttttgtcattcaggagatggattaattatatttgatggatataactcttaaactgaactgcctgtgtcacacattgatgcatcacccattaattagaattattctaatattagggccattgcgtgtttgtttttctgtttttattttttattttttattgattctcgtttttattatatccctgttcctagtgagattgcatttactttcctgtttctagcaagattaggtccttataaatacatcctttgtaaattagtagagacagacgtgtgatgaatgaaattacttcttcctagggttgtcacggtggatgtacactttgattctgtagcctttacatgtagcatatatgtcaaacttaggcttaaggataagctcaaacatgtatattctaggtaaaagagtacattactactattataaactcaaaatctaattcagttctttattattcttttttgtacacttgaccttaatggttgcattggcttgctatgtactcttttagagcttctcttcatattcatattcatattggagctgtaaactgttacagcttgcaggtttcaaactggaggtagtcaaaacaac

SEQ ID NO: 71684 - DNA, 667 bp, Prunus persica
  Intron number 3 from transcript ppa024617m (locus ppa02461 7m.g) derived from phytozome v7.0 (chr-ID scaffold_6; pos 16209725 to 16210391)
aagtacttggccaaattaatacataccccaaccatgtaaatcttgaatagtaatatcaaaatggaaaaaagaataccgcatccagaaggaaaagagttgaaaagtaatacgacaaattatgttatttattcaatattatatattatagtagcatagggattagtatgtagaatttatttcaattgagtaatcatttcaatctgacttaatatattatatattttgttgtttatatatattcgtgcctctagattatagaagcactttctgaagaagcacttattatgtacttctttcgaaaacacttgaacttcttatgaaaatttcaacctccttataatagaagtgcttatgagtataagtgtttcctatagtgaaacaatctcaaacgagccattagacatataaacaaacaaaacagtgcaacgccacatgattttggatctaaatactttgtgtctctactactacatacacttataccaaagtacttttgaggcaatctaatccctttccttttatcactttttgttctttccattaattcacttgttctaataagctgtattaaaaatgtctaaataatataatttctaacaaatcctttttctttctgcatgcacatcatttaggtggtcgctgattgctggaagacttcctggaagaa

SEQ ID NO: 71685 - DNA, 733 bp, Prunus persica
  Intron number 1 from transcript ppa004732m (locus ppa00473 2m.g) derived from phytozome v7.0 (chr-ID scaffold_6; pos 784331 to 785063 reverse strand)
tttacaagtgtattaggtaaaacagtaaccttgttctgatttctgttcattccagttttatattgttgagtgaggtagtataattaagagctcaatctttctggagttccttgacatggggggcttggcttactgacttttgcaattttttattgctacttcatgtttacgtgactgtttttaagctctgtattacttatcagtgttgatttgctttccaaagtacattagtttcttgacttatgatacatgtgtgtagttagaaataactctatggtcctcagaatagttgcaaagggtacgtctacatcttgagcagatgatctttgtttcacttagtattttcagagtgactcaacctatgccttgattttgattgtttcttttattatatgatttctggttttttcccgttatcttctctctatttgtaatatatatattttcgcttgtgaaatgtcatttgccagacccgccttgtgcttgaggctttgcctttgtaggtacaatcggtcttgggcaaattttggggcatggcgacaggatacattgatttttttatatattttgaggattttttatatgttaattctttactcagatagaagggcaccatttggaattttgggatgcctttattcattgttgtagtgttgtcactctaacaagatactgaatcacaattttgaaacttataggtgcattcattgggataaacattgggaccgacgtc

SEQ ID NO: 71686 - DNA, 1065 bp, Prunus persica
  Intron number 4 from transcript ppa007778m (locus ppa00777 8m.g) derived from phytozome v7.0 (chr-ID scaffold_6; pos 3853191 to 3854255)
gcttggtgggctcaaagaaaaacctgcggcagcttgtaagtaggatgcaatttcggtttaacttaatgtgttttatgttgcctttttaatttattatatgacatcttgagttgaagattctgcttattttggttgttattacttctgtttattagtctgtttattggctaccaaatcttcacttatgatacaactgcaccaaatttgaagttaatttgtacaactctttagatggtatataacttatggtttctaccacatccaaattttcttataatgtgtgtagcctgtatggaagaaaataagaaacaaaaccactgtcggattgtgagttcaaaacaaatttataaattatgttttcccccagcatttgtgcctcctattcactattcttcaaattcctttcttctttgaccatcacctctaacatacaccgcaacaatgcttctatgtcagaattagaaacaatggtagacaaaataaggatatacgcataaaaaataaaaaataaaaaataaaaaaaacagaaacaccatggagatgcaaaaaaatacagttttgcaaaacatatgaaaagattatagggtcctctttctccactaaagcctagcattgaatgggactggatgagcaggtaacctctaagcaggaggaattgcgtaacatggatatcaatatctgcccaattaactcatcttcgaaatcttagtgaaagactggatttgttatctcctgtttgcttttcgtgaaaaaataccagttgaagcaaagggttttttcaaacaagttctattttatgatatcctctgcttccatcttacacagtcacgaccgcttttgcactgtttattatgatgtccttcttttttattacttataaatatatttttccaccacaaatctttcaattatttttctcctgtcattatttggattactattatatttataagttgcctcaaatgtgagatagtatatgattgtttgagttcaaaagttcaaattctaaattgctgatttgataatgcagctacaagcgaattggaaactgcactgtcaagttat

SEQ ID NO: 71687 - DNA, 665 bp, Prunus persica
  Intron number 1 from transcript ppa022474m (locus ppa02247 4m.g) derived from phytozome v7.0 (chr-ID scaffold_7; pos 15702207 to 15702871)
gctgaagacatctgtttcttcaacaaggtgctgcctttactccctccttttcgttattttctgcttttaattctcaagtttactttctgtttgaaatgaagtagtgggttatgctcaaaatgctgtttttatacataaattttgtttattcaaataaaatattggtaagagatgtattctggtagtcttgaagcatatgtgggcgtcttctttttgtttttccagtttctttttccttaatcacgtgtaaaaggtgttatcttcaaggctgttccttcagctttgtgggtgaaagacaaatgtatatggatttgaaggagaatgtttggtgctggccgctcctctggatgttcgatctgggttttgagactttaatagaatttatctgtaaccaagtttattatgctgttaatattaccgctgaaaaggacacttacatttgtattcttcgaactgggttagtagtagaactagtatttagtggttctatggattgttatacttgattattgttgtgagtgttacttagagagcatatattacatttgtgcatacccattacaactttttcatcaactctccttatcaagattttcatttaactccccctttccccattttggttcacaggaaactctgatcataaagcctcctaagaaatctcc

SEQ ID NO: 71688 - DNA, 379 bp, Prunus persica
  Intron number 3 from transcript ppa001173m (locus ppa00117 3m.g) derived from phytozome v7.0 (chr-ID scaffold_5; pos 5305082 to 5305460 reverse strand)
aaaaatcagcaggaagttattcattggcataccaggtacatgaatcaaaattgtattttgttgcatagtggaaagtgtttggcattttcggtgctactacttaaaattacagctatcagggtggtccatctatttttgttatgcgttgtaattttctttaatcagtgtaactgccctttaattcttcaatgggctgccacaatttttcgactcagcctacatttgactgactttctgttttctgtgtataactccatcttattcatatgtttttcatttggagtttttgcactttgtagttatatactaattttgttgctaacatttgatatttatattcttaggggagttgctgcacgtgctttacatctctcaagag

SEQ ID NO: 71689 - DNA, 553 bp, Prunus persica
  Intron number 1 from transcript ppa001173m (locus ppa00117 3m.g) derived from phytozome v7.0 (chr-ID scaffold_5; pos 5305722 to 5306274 reverse strand)
gctatcattcgaattcgctgcacttcacccagcaggtacctttaaacgtagaatttctccttttgattgcttgctgttcccttaaattgtttttcttgtttggtttctgagaaaatttgtgcatactgaagtggatagctgtttgtttgaactcagctgaaccttatagctatgcaattcttctgcttgtttggaaattgtttccttcattctcgatatgaacaaaatggaggaatacctttcatgttcttcatcgtgaaagattgtctggtccagttattttttccttttgatggtattttccatctatttctgtgatcaaatgtcgtgcatattttgttggtgtggaaactcaagatattttgttttgcaattttgttactattaatttcaaatgcgaacttcctttttctcgtagaatttggttttgtgtcatttcaggtaattgatcattatgtaggtgtggaattgtgaatttgtgggtgctggattatggaattgatggaagtggtgattttgattaatgtagtgtcaaattggtggagcaagagtt

SEQ ID NO: 71690 - DNA, 827 bp, Prunus persica
  Intron number 1 from transcript ppa023765m (locus ppa02376 5m.g) derived from phytozome v7.0 (chr-ID scaffold_4; pos 5089431 to 5090257 reverse strand)
tgccagggcagtacaaccacttgatttgtccaatagtacgttaagagttttacttctgctgccatttatatttatttcagaaaatcttttgggctttgatttgttttggcttttggatttcatgaattatttaatctttaggatggtaattgtaacagcatacacttatgtcccatttgtgttcattattttaagtttatgaaatctataagatgttcagatattccccaaatgctaggcatcttagctgtaaataattagttgtaggaaaaaaaagaagatattttcttatggataagtaattgccattgtgtatagtaacaaaataagttaccggtactgtttttaatcaaaagttttaagtatgagcagactcaacctgaaggaaactatgtggaattcaaggtagttattgagagtagttgatattatctttggacaaaaagaagtactttcttgactatgtaacttgttcaataaagggattctgtaagaatataacaatgacttttgagaacaacaaagataatttctgtggacatgtcctcatctaagggctgtagacacatttaagggtgaagcaggcgcaaaaatatggaaaattttcatacaagtagattaagctgagatttttattttattttatattgtttagaaattataggataaaaaaaatcagggaattgagtggacatgatgtactaataccatgtatacatgcgtttattttaaataagtaaaagaaaggaatgaaatttcagtgtgaaactgaagtgaattctcatatgctagtgcaaaggtggcgattcagaggaaaagagcttatc

SEQ ID NO: 71691 - DNA, 772 bp, Prunus persica
  Intron number 1 from transcript ppa006229m (locus ppa00622 9m.g) derived from phytozome v7.0 (chr-ID scaffold_8; pos 18602760 to 18603531)
aaaagcttgtaaattcaaggtatatttatctaaattcagctgcattttaatcgggttggctcaatttggagtctttgaatttggagtgctcattgcattataatttgtttctggtaggtttgtcggaacagaggagttacagagctccaagaattcatcaatggcagactggtcagtttctgtactatttttttattttcagtttcagcttcagtgtcagatcttcaggtgtagtttacttccgatctggtccgtccaaatggcttaaagggtacaacgttaagccattgggattggatctgaagaatctaggccgtttatttggttatcatagctttcccctgttcttgctctgttcaaactcagagccttttaaattgacattgctctgaactcttatgatttttattttttcacgtacgaaagtacccttttaatctgaatgcttgaagtaattaaattaatttatagtttatcatctctcttttcccataatcaattctctctccacgcttatcgggcggtgcctgtctcttagtgcttattttattaggtggttcccgttagtaacttttactaactctttcttaattaaaaaaacaagaagtaaacttgtgtatgggtattatagctcaaggagttacaagtagttatttatgtatttgaggttttgtgtttgaattcctttttttttgatatcgtttgtataaaaaaaaaaaaaaggattcatgaaaattaacttggtggaaataattctctgtttgcaggtcgg

SEQ ID NO: 71692 - DNA, 131 bp, Prunus persica
  Intron number 1 from transcript ppa011387m (locus ppa01138 7m.g) derived from phytozome v7.0 (chr-ID scaffold_1; pos 27349935 to 27350065)
accccattcccgattctcacaagctcaccgtcagggtacgcttcaattaatttcttcaaatttgactacttttttatttattaagaaaacaaacaaagattgaattttcgatgtgaaggtgacgtcgcact

SEQ ID NO: 71693 - DNA, 322 bp, Prunus persica
  Intron number 2 from transcript ppa017887m (locus ppa01788 7m.g) derived from phytozome v7.0 (chr-ID scaffold_7; pos 4805399 to 4805720 reverse strand)
tcaagcttgtactttaaaacgagctggaaccacttgttagggctctcattttgcttctattacaagtttgatgagtttatttaaagagactaaattaattacttctgaaaatcaatgatcatgaacctaaccaacagtttcgtggcgaagcagagagtaactatattgctatgatgtcttttgagtttgtgtttgcattggttttgatggatcaaaattatgggatttaccaattttctttgtcaagcatttcagactaaaactgaagacattgtaagtgctttaaattttgttggaacacacaaaaatgcaacttcaagat

SEQ ID NO: 71694 - DNA, 472 bp, Prunus persica
  Intron number 3 from transcript ppa007195m (locus ppa00719 5m.g) derived from phytozome v7.0 (chr-ID scaffold_4; pos 12078578 to 12079049 reverse strand)
cagacacagccgtggatcaatatcacagatttcaggtgaactgcagagtgaccttgattgactttaaaattaacattgtagagttttaaccttacaagcaatagcagattatctccaacttttctttcttttcttttcttctaagtcttctctagtttaaatataaaaaaagttctcacttaattaaacaaagaacctgtccattgaatggttatggagagagaaattatttggataagattatttataatcttctaacaatgaaagaagtataaaattataaaagtaagaacattgagataatgcgatggcaatgatgcatcaacaactttaatagtataacaggaaacaaatccaaacaagacagttggcagagttcaaataaattattagccaacggactgctaatctcttactttgccccaaaatagagagactaaaatctcaaaatttacagagtgatatagacttg

SEQ ID NO: 71695 - DNA, 440 bp, Prunus persica
  Intron number 1 from transcript ppa015318m (locus ppa01531 8m.g) derived from phytozome v7.0 (chr-ID scaffold_2; pos 25694256 to 25694695 reverse strand)
agtgttactcacacaaagtcacatacgtgggtgagtattaaattaatatacttacaagctctcaaactcaaatttttattttttaaaattttccatctttaatttcatcagatttgtgcataaactgaattatgttgagaaggactaagttcatactacaaaatgttttatgtgaatttcaatataaattttggcatccttgtgatgaacttgggttcatgtggctttccacaaatacccaaaaaaagaaaaagaaaaaaaaaagagaaaaataacaaaatggttttttttttttggtcgaagaaaatgaataggccaaaattagcaaaactctgtggacaatttcggaaccggcgttgttaaattaaaatgtgattaattttttgctcagctcaaatagttaattattattattttaaaataattgcaggcaagcattt

SEQ ID NO: 71696 - DNA, 674 bp, Prunus persica
  Intron number 2 from transcript ppa025708m (locus ppa02570 8m.g) derived from phytozome v7.0 (chr-ID scaffold_9; pos 1237353 to 1238026 reverse strand)
ggcacgcatttcgagagagtagtacggggaaattgggaaaggttttgaatgggatggttttggtatactattacgaaatatgggtttcactttggttttgacttaactatatatacatatctatcactacgtcggtttcgaatgcatgtcgttttcagcatcgttttctaaatggtaggggttatattatgttgttttcaaatctaacgaaactttgtttttctccactcacaattttctgttttacgccctcccccccccaagtaatagattagtcttgaattgagccatcgtatcaagtcgtgaactccgagccgagcttgtgtagggcaaactttcatctattcttaattatgtcaaacttcatttcgttgtaaactgaattccatgagatatgctctattatcgcccatgttagggttaattctatggtcggaggcctattatgtaaagtgcatgttattatcctgtgcatgttgctattaagtgttagtaagtgggattgacatcagattaatgtcgaaaataccacatgattcgtcctgaattttgagaaattcggggctgatcctgtcagcttagtaacagagccttaggttcattgttcttcgaatttcacgcttcctttgcatttttgaaactaatggctcctctgttttctttcatatagaact

SEQ ID NO: 71697 - DNA, 534 bp, Prunus persica
  Intron number 4 from transcript ppa006593m (locus ppa00659 3m.g) derived from phytozome v7.0 (chr-ID scaffold_6; pos 21595002 to 21595535 reverse strand)
ttggatttaaggtttcaagtcgaaaggtgtggatggtttttccttgcatgaacttagacaatcagattcaaaggtcttcataacatttgtctttccgatattgttcgtctatctgtgggaggtctgtttccaaaggctttgtattgccacatgcttctcaagttgcttttcaagatagaaaatgaaaataacttatacatcccaattaatttgaacaatataatattctgggatattatgatatactcacaatagttgccagaagccacacaaaaaataaaaataaaaaagctttgccactgtctgtttcattaaaatgagttttgaggattttttttttttttttttggctatagtttatgactactagtctaccttgttaatctttttagttttaagagacatttgatccacactcatcctcacattagaacttttgttttattattgatttttggaaaccagggcagatgattcttctacttttcttacattacaggttttgcaagaagtattgaggcattactccatacc

SEQ ID NO: 71698 - DNA, 957 bp, Prunus persica
  Intron number 1 from transcript ppa020585m (locus ppa02058 5m.g) derived from phytozome v7.0 (chr-ID scaffold_8; pos 340254 to 341210)
ccctaagaagcggcgagcacttcgcaaagaccaaagtatacccctcttcttcttcttctgatttgatttttttccagtcagttaattttgttttaatggagataccttttgttattctgtttatgattttgtcgactttagagtttagataacttcatgtaaatttattgctgattttgaggactttcactgaaaacatagacgaatatcaatacgttgatttttctcattctagggtgctaatcattatgttggaatctgttaggataaattgcatgctatagagcagtataatgcttgttttaattttttctttgtaatattatacgttctttataggttgaagttgaacaattaaaaatcatcagctttaatcatttacattctaattttatattgagaattgactctccgctaaatattcttatagaaagatcatgtgttaaataaactattatttttggttatgcacgactgggattatgtttgcatacttcacgtcaatttctcaataaggtttaatttgcaaccactttaaaaccctggacggtgttcgtgtaaaattctggaagtgtaggtttaaagtgaaaatctgctgaagcaaaccatgttcacctgtagtagagggaggaatacaatccttcgttgggcatttatttctcttatttcattcactcaatgatatcagagttttggactccacaaaaaaataaataataaaaataaaaatataagtttaacacaaatgtgcttgagttctgaagtctactttcccaatcaaatttatttaaagggaaggcatcataacatatgattaatttctatggactatgatcatttgagaattagtctgagatggaaatatgttttcaaaatcatctcaagctgacacaaaactttttggcattaatttcatctaatgggagatctttcttcattgtgtgtttgtcagattat

SEQ ID NO: 71699 - DNA, 650 bp, Prunus persica
  Intron number 3 from transcript ppa011569m (locus ppa01156 9m.g) derived from phytozome v7.0 (chr-ID scaffold_5; pos 13980499 to 13981148 reverse strand)
tagtatgtggactgtatttccttgctttaatatgttaggagcacttgttcaataagtgcaagatgcaattttgaatttgtcatcacgtgtcaaacttcttctttttggttgcacaatggcatgctgcatcaggtcactcagtaatcagtctatgtaagacatctaattgcattttcagctgatcgtgtacttatttgtttcccgctattatatttgtaattttgttcttatttcattttacataaacttatctgcaaattaaagacctattttttaagaagcatttgtatctagtccatgtttatcagttctggttgccttggggtttcttaaacccactttacagattatgttttatttatttataaagtatcagtttagctgtagcatgatgcaataattagatcagaaaataatttctgaagaaaagtaaaaagtgaagactaattacatggcttaaataaataatatctgtacacttgcatgatatatcaagacatgattataaatttatttgacctctgtcttttctgttagttatatctctaatctggaatgtatggttcttgtttccattatatggtttgttttgtccgcatgaatttttattttttatgaatgcagagtggcagcaagtgcttagctgattt

SEQ ID NO: 71700 - DNA, 649 bp, Prunus persica
  Intron number 1 from transcript ppa002757m (locus ppa00275 7m.g) derived from phytozome v7.0 (chr-ID scaffold_8; pos 13555726 to 13556374)
gcctagccccgtcttcaaccctcctccctaccctggtactccttcattcttccaatgctttgctctttctagggttttagtcttctagttttgttaatttattactattcgcctctactattaattgaaaattaaaaaaaggggaaataattgttaactatagcgcaagatatgtggagattttggattgtgtgtgaatggaaaaaaaaaaaaagagttctactttcagtctagctctttggtcgttaaacctgactttaggtttagggaatttaggtgatagtgagcacttgggattaagtaatgaactactccaccccttggactgtttgagcttttgtggagcatctggtgctcaatcatgggtatcagttcccacgagtgctcaatgtcctcttttttgtttgtttttttttttaaggaaaaagagagcctgttgcgtggatgtcatacagtagttaaatataaagattagggctatttcttgtagtgcgtctgcatgtttgaatccaagatcctctcccattgttttaggagtgtggtgttatattttcatacaagcatccccatttttagaactgcatgagaccttcgttttctaactaaaaagttggttcagtttcttttaccgcgcaatcaggccagtctt

SEQ ID NO: 71701 - DNA, 870 bp, Prunus persica
  Intron number 1 from transcript ppa004778m (locus ppa00477 8m.g) derived from phytozome v7.0 (chr-ID scaffold_4; pos 10745239 to 10746108)
ggttttcgtattcaattccttcactgtaaataaaggtttgtttttctttatccctgctccttggacatccacactaatgtactcatttttaacacagggattagtatgcagagtcctgtttgatcaaatttatagagttgatgcatacaagtatctaattgtctaagcttaatattattttgatactctgagattgtcatgatatgggacatgatttcacggatggaagaaacatggtcattattgcacctttagatattacaagaaatatcatctgattgagttcacatgcttgtcaaagtcggaaccaattttggtttctagaatgttttcttattttctgtacaaatttcatttattgttctctacatttttttaaaaataagctaatacatttttctttaattgtttatgatgatgtaccagaaagcagtaatgtcattatcactcaacatagtgaaagtgtgataccttatcgcaaggataggtcaagtagttccataactttcgctggaatggaagataaacatgacatcaaaataccttctacagagaatactgtgacaggaaatgttaaacatagaatcctgattccttctccttcccatccccttattcagccatccactgttgttcgtgaccattgtgaaaattttgcatttccccctcctcctcctccaactgatcgaaaacgttatggaccacgtcgtaagtctttgcttttttcttttttctttattctttcagtggtataccctgatattcaatttggtttaacatctttacatgaacttgagaagttatcacaaacattctgagttaatgcatatcctgttgatgtaccattgattttgttcattttatttcagc

SEQ ID NO: 71702 - DNA, 203 bp, Prunus persica
  Intron number 2 from transcript ppa011431m (locus ppa01143 1m.g) derived from phytozome v7.0 (chr-ID scaffold_7; pos 17434511 to 17434713)
atcccgtcttagaaaagctcaaatccctcaaaattgtaagtttacaatttcctattttcaaattataattaatttaggaagaaaaaacaaatagttagggtttaagttcatcggtgtttggattttctaaacgacatttgaattcacgtttgagttgtttcattgtagtcgacgccgatactgacttcacccccggctgaggg

SEQ ID NO: 71703 - DNA, 794 bp, Prunus persica
  Intron number 4 from transcript ppa011431m (locus ppa01143 1m.g) derived from phytozome v7.0 (chr-ID scaffold_7; pos 17435113 to 17435906)
agcaaaagacaggtttgttttaacaagatacaacattccttgttgaattttgagtttgtttgacataactctaagttctttatggtccacacgggcactagccgttagtttttgatggctggaggggttacttcacacaacctcaaagttgaggagacattgaatgattttaaaatgtaggaagaaaattagaactcgattcagggtttagggtattcttcctatttcccaaagacattgtgatgaatcatattttcaaaggcagtagattgatctttggcctgtccttatgcatcttccatccgccaacttcaggccttctatttggatcaccatggaacaaagaaatatgcgaggttacttatgtaattggatcttgtctgagacttggttcatttgatgttatagtggatgaaataatatcacagaattaaagggatcaacagtttagtatgatatcagttaacgactgccttaacgaagatgtttccatgaaattcaagtatagctctctgtgcagtattagccagtggtatgaacttggtgaaaatccaacataattgcacactgttgttatgtcttgcaaatcggaaagttttatgtttggaacaatttatgtgtttgcccttgcttttaagaagcctgtgttgcttatgctgaattttgtgaaaggctggcagcaaattaggaacattgacttgtttttccatcctttctcctcacctggaactacgtaaacttgatttgttgataattgttgcaggaagacatagaagataagatagaagtagctg

SEQ ID NO: 71704 - DNA, 838 bp, Prunus persica
  Intron number 1 from transcript ppa009583m (locus ppa00958 3m.g) derived from phytozome v7.0 (chr-ID scaffold_6; pos 8719363 to 8720200 reverse strand)
gaattttggggtaagccgtctcttcccttatcgcctcctattcttcttttattccttttctcactgtttagcgtttctcagtgtttaactgaagacagtgcttttgttcgtttttgataatctgtgtttaaggcttaacttggtgcattgtcttgtgataattgttttactggtgttttcatgttttgcattttatttctgataatttcttcaatgtgcttctgtacgctagaggttatggttgtgagtaagcttgtctcggacgggtctgaaattgtttgtgtggtttctgtgtataacctggttaaaccataagttttggacttgatgattttcaatcagtggcttcttatagttttggttttatggttatgctgatgaaaaattattgtttctgagccagcctcattttgtacatgaattctaggctttaatcgtgttgaatttgcgaacaatttctctgtaacatgtgtcttacaggtgccagttccctaaaaaccatacgcttgatgatctgaaccccacttttctttttcttttattttatttgaacctttgatgatttttgttattctaaaaaatgcgtaaatccccccagaagttacgaccacttctggttttcccataaaaaaatttcttaagcagtggagattagtcttcttctcgcctagtcgtggtcgtgttatgtaatgtggacggatatttttgcatgcagctggtttagtctttatatgcaataatccttcctgttttgttcttgatattactgtactctttttaataattacgtttgtttattttaggtgttgaagtgaaggctggagagccagtaaaatat

SEQ ID NO: 71705 - DNA, 484 bp, Prunus persica
  Intron number 1 from transcript ppa016812m (locus ppa01681 2m.g) derived from phytozome v7.0 (chr-ID scaffold_4; pos 10692231 to 10692714 reverse strand)
cacctttcctctcggtcctcgcttgagttcttcaggtgcgaatgtgggtttttggtacttgagattattaaagcataaatgatgtgctttccctctccattgtatttgtgccaatttcttgtaattttgacttaccttttggatgatttgtgggcatatgagaaggaacaacttcgaatccaactagtgcatgatttggttgtcaaagattgaaaagaaaaacaaagagagagacatttgagcttaaatgctgaaaaggcattgcaaaaaatttgtccaaaatcaggcagattcaagttggataagttttttttttttttttttttttttttttttttttttggggtaaaagcaagttggataagttgaatgtgtgattggtcaatgatttttcataacatatattaaactagacttagctgcatgaccatcggttatttggtatgtaatatgttattgctcttcttaatgcggcttcaggaat

SEQ ID NO: 71706 - DNA, 424 bp, Prunus persica
  Intron number 1 from transcript ppa026101m (locus ppa02610 1m.g) derived from phytozome v7.0 (chr-ID scaffold_1; pos 12483272 to 12483695 reverse strand)
caagtagcatctttgtcagggttcactttggacgagtaaatttctaacccccttatataatgcttttccttctgttttgtttgtaataagtgtagccactatatttttatgtcaataattaattaatagtgcgaaaattattatggttatacttattattaataaattaattttctccgtttaaaaaattatatttattattgaaaaatataagatcgtgtattttaaaaataaaactagttttgattccaattcttgaaaaactttaattggaatcagttttataagagttaatttattcatcgtcgctcaaaattctcttctttttgtgtgtataatgttctttatattttttattttatgtagaaatgccatgtcactaaatgcttcattttcttttcaattggcaggcgtcaatctgaat

SEQ ID NO: 71707 - DNA, 626 bp, Prunus persica
  Intron number 1 from transcript ppa008397m (locus ppa00839 7m.g) derived from phytozome v7.0 (chr-ID scaffold_5; pos 17761505 to 17762130 reverse strand)
aagcctgccctttctgcaacaaagttaaaggtgaaaaatgttctctttctctcatggttctttacttctccttgcttcttgaattgcttttgaggttcggtgtttttgctgcctttgaatatttcgcgaatttttcacctaatatcagaaattggactagatttcatgtcgaaatattggattttagtgtggatgaaacattcatttgaataatatccagttggttcagcatttctctgcagtctcgcagcctgtcatggttaaatgacaggaatagaacaaacttttacttgtagttcgcattctatttggaattttctggtaagatttgaacataattttgaacaaatagtgcactgggtttgctggtagcatgataggaaatagccatatgaacagtcaataaatttgcaaccttgtcaatcatttggtgttttggtgttctttcggttattctcgagcacattcaattttttttttcctattatgtcccttttcttttgttatgattctattaaacaacggtaattttatgttcttttccatttatcatgctgtttacaaattggggacactttattgttgtctcagcattcttggactaccacgatataccctacaaaatt

SEQ ID NO: 71708 - DNA, 769 bp, Prunus persica
  Intron number 1 from transcript ppa013583m (locus ppa01358 3m.g) derived from phytozome v7.0 (chr-ID scaffold_6; pos 24578970 to 24579738 reverse strand)
ccaccgtcgccaagatcatcagcaagcccgaggccgtacggttctctctctctctctcgcgcgcgcgcgcattatttacccagattttagaatttttgtgttgaactctaaattttaggtagatgcatgttccttttcgaattttgttatgtttatttttgcttgatgatcaatatttggtattttagcttaaacaaaagtaggtttataagtcttgctaattttgactttcggtttagtaattttgattaggttgacttttcagtaatttttttttgattctacgatgcataacttgaacaccaaacaaatgagaaatattagtgagcggtagatgttagagattgaggtttgctttagttaatattttagggaaagcaatgcaatgtacctcctctgtagctcgctttgcttgccatagaaaaagggttctctaaccaaactggtgggcttggggttcttgagtattcgtggaagagggcaatcatagagttatatgcttgtcttttaacgatagcatccgagtttccaacaactcacccgatgtgttctaagttctgtttcggaattggttgagaagatgttttggttttccactgatattggatgggaattttactttttaggtttatagtgatgtttcgacgcttttgtatgtgatgtattgctccattacttgtttgcttagttccctttttaactattttcctcttttgttttggtcgtgtttgagatcttcttatgtatattgtgattgtcgatatgcagt

SEQ ID NO: 71709 - DNA, 681 bp, Prunus persica
  Intron number 2 from transcript ppa010237m (locus ppa01023 7m.g) derived from phytozome v7.0 (chr-ID scaffold_6; pos 789844 to 790524 reverse strand)
actgcaggtttgttgtggcttaccatcattctcttttttccttctagtaatatgattgcattgcaaattttatgtaaggacaggtgatggatattttagaaaaacaaaaaacaaaagactagtgatagatgatgagcatttcagcaaaacgaaggaggaaatatgttgaatagatgtgatacatcagttcatatgtatgcttcttgtaaatcatggttcatatcatacaatgctttggactctgtattagtcccaatcgtgtcctactattcttgtgattctagcatgctagttattgtgaataattgaacattcaacaaatcatgtttgtttataattttatatggaacatgtttcctttagaggatcagcctggttgatgtttatcattgattttttttagtttttttatttccttatctgtatgttggactttttgctttataacgtctgcaaccattttctttcttttcggttgaacgggatcaattgctagaagtttattgttctgaaatatgttcccccaattggatattatgcatcttgtggctttgtatgcctttaataaattttgtttaacatcttagtcgttaaataaattttgaattaatgagatgtttctttttcattatgttctcttatgcaggccagaagatctccgcaagccatttgggcagtttg

SEQ ID NO: 71710 - DNA, 732 bp, Prunus persica
  Intron number 1 from transcript ppa010237m (locus ppa01023 7m.g) derived from phytozome v7.0 (chr-ID scaffold_6; pos 790664 to 791395 reverse strand)
agccaaacccaaactcgctaattaaccatcctcaggtctctcctctctctctctctctctctctctctctctctctctctatttgtattttgttgtgtatattacacatatgtttcaatattagggttcaggagtttatgcctgttagggtttctatattcgcaggattttgtcaaattggtacttgttcactcaagtatatgcttgtaattcatcatttatgtagccaatttcaatttcattgtttgaaaaaagatctaaataaacgtactttaataaattaaaaattggtcctttttcgaagaaaggttcgctgtgcttctttcttcttcttctttttcttctatcaactttacctgggtagaacatggtttttctgttcccattgaggtgttttttccccgtttcaaaatccttccacaggtgaaccctaggtttccctaagaagctaatagagtgagttacattgtgcttatctattattctccacaaagctatgtttaattttgttgttttttatgtaattttcttgtaccggaaagaacttgcattggtataacttgggatactttttcttgaaatctttctttcttatttgtagggttaatttggtggcttataaattagcggtgaacttcacttgattggtttccgtaatgttataatattcctttttcatgttagtaatgaatttttgaaattggacacagggctgctgacagtcaactaaaa

SEQ ID NO: 71711 - DNA, 489 bp, Prunus persica
  Intron number 1 from transcript ppa006008m (locus ppa00600 8m.g) derived from phytozome v7.0 (chr-ID scaffold_2; pos 19888924 to 19889412)
catccaccaatctggtaatgttttagtcctgaaagttcattgcttgatttagttttctgggtaagttttgtttttctcgtgcatggtaagccaagggaaggagaagagaattggatttcaaattttgtttttcttgggtttttaagtactgggtagctgagatttacgagcaattccacttaatcaagcttaatttaagtttttttatccaacaattgaaaacccagaacagataaatcccaagcttccaactttcagctttgtttctcggtggctttaattcagtttgatttgtgtcttatttttcaagttcatggaacatcagtatatctatctaattaagtttgaagagatttagaagtacacagctgagctttttctttgtttcccaaagatttagttatctcatgaaatgaaagagtgtctaagactatccttttcaatctttgtgcatttagcttataacaaaagaggaaggcttggagctgt

SEQ ID NO: 71712 - DNA, 839 bp, Prunus persica
  Intron number 1 from transcript ppa005622m (locus ppa00562 2m.g) derived from phytozome v7.0 (chr-ID scaffold_1; pos 40040888 to 40041726 reverse strand)
tgtatcctcttgggtatgattacctctttcgctttggggtttgaagttttcctttcaattttttttattgcattatcaagtattcttgttgtattgttttgtttttcattcttgaatttctctgattggttgttgaggtgtgattatgggttcctggacttggtttcgggttaaagctttaatctttcatatattcactaagcatgttattagagttggaaatctattgaagtttcttgacccactttttcatttttaacaactgctcggttttgttgactctgccttgtattttttttaatcctctgcttatactacgaatacccttttccagtttctgatttttctttttttattgcctgaactttttcttagatctctcactctcttctggaagctttttatctaatagcatactcaaaaagtttaatctttcactgtataaaaagtgaaaagctgtcggtccgatccctttttccattttcttttctttaggtaactcattttccttcatagtttagttgtattcctgcactacatatgagctacgcatatgcctgccagaattacaattttaatatgtttattgttttccacttgttgcatgattatttttatgaatttgaagcttctattttcttggttcattaaatttaatgcttttaaaatactttttttggtgatgttatgaattggtgttctgttctggcttttctttttgcctccatttttatatttttcttctttctttttatcaatatgcggtgaatgacctcaagatttgattgtattttcactccgcaggtactactctgtgtccatcaacataggctacccag

SEQ ID NO: 71713 - DNA, 371 bp, Prunus persica
  Intron number 2 from transcript ppa003220m (locus ppa00322 0m.g) derived from phytozome v7.0 (chr-ID scaffold_6; pos 22951672 to 22952042 reverse strand)
caggtttgaatttgatttatccaaaaagatgaaagttttgttgggttcagtgttttttccctcattagtaaggcatttaagtttgacgagggcattaatttggttaatcatagacatttctatgaatgtggaaacttcaatgcattggttggccccaaaaaaatttcaaatctttgtattaggatcaatgaagtactgaacttcatttctacttttcccttaagaaaatgaaaattctgaattatatggtagagttgtctataaacttttttgtgttgcccaagtaactaaatgcagcttcaagtctttgttttgaagaattttcttccgcagtatttaattcagcatgtgattgatgtgtcagggcacag

SEQ ID NO: 71714 - DNA, 662 bp, Prunus persica
  Intron number 1 from transcript ppa014770m (locus ppa01477 0m.g) derived from phytozome v7.0 (chr-ID scaffold_8; pos 21580902 to 21581563 reverse strand)
tgtctcaccagatatcacagcaagagacttaaaaagtaagcaaaaagcaaaaactatattaggaataaaagtaaacttcattccaattatggattttaaactgcagattttggtctctctcctttgtttgattgagtgtgtcatttttcttgtattagtttgatatatttttgtacttctacagtagaaccacttcttgtttcacttatctcttgtttttgttctgggtagtgatttgtttgaaaacgtccagtctagttcattgggcattaccttctttttccctcttattagtgattgcgctagtggtgacgcattgtaggatttagctgctaggtgggttttgatggcaatggcatatgttttttcatgcctggtcaaataatgttaaggattctcaggctttttctttttggcataagcttctcggcccctttcaatatccgacagatcggacactctgttacattacatttaaataatcttctacaaagcagagcaaagtgtttacttttgtagttaatgatgttatgaagttattgaaccttagtgcagattgtagcatcctgttattatctgccttattccatttacgcaatggttttcattgccaaatctgttttgcaggggaacttgagacacagcactccaattgtttctgg

SEQ ID NO: 71715 - DNA, 396 bp, Prunus persica
  Intron number 2 from transcript ppa002285m (locus ppa00228 5m.g) derived from phytozome v7.0 (chr-ID scaffold_8; pos 19344557 to 19344952)
gttccttcgggaggtgaattaaacccttgaagaaatgatttctctgtttgttttcgtattttctgtttggttcctgtgagtatgaaacgatgtggaaatgatcatttatatgatccaattgaattaaaacggatttatttcattttttatctgtcgtcaccccatacaactctgagatttgaagttcatgactcggtaattttcctacattttagtcgaaatacgtcattaagttttgattttggttgaattcgatttcatttgcacgattagattaatttattgtaactatatttaattctatttgttttgaccttgcaagcaagtccaataatttaatctgaaagaaatctaactatttgatttcgtaaatttttgacagtttagaagaggcat

SEQ ID NO: 71716 - DNA, 467 bp, Prunus persica
  Intron number 2 from transcript ppa000165m (locus ppa00016 5m.g) derived from phytozome v7.0 (chr-ID scaffold_1; pos 34493313 to 34493779 reverse strand)
atgtaagtttccttcttttaaagttgagcaataactgtgatgatttgtttagtgagggtatcagttcatgcttctgtttgaggctataagcggtattatcaccactccttttggaaagaaacttgagttttccttcagaagtcaggtagatccagcttgccacaattccttttttctggtcctttcgttggtagcctttctaaatgattattgagtttttacttgttttacccactgttgatgcttcatttatttgatttctagcagagcgagaaccttattagaatatgaagaaaacaattagcggggttccttgttaaaaatagcattatcaaagacttacatttttgcatcgcatgcaaacagtcatgttagaatccttgtaaaaaaaatagtattctcaatgttttgtagatgctattaagttaatgcatatccttttttattttatcttgtaggtgctagta

SEQ ID NO: 71717 - DNA, 765 bp, Prunus persica
  Intron number 2 from transcript ppa018841m (locus ppa01884 1m.g) derived from phytozome v7.0 (chr-ID scaffold_3; pos 7571863 to 7572627)
tcaaagtaagtattttatcgttcagcatcattcaaatatatttatgctgcatcgtgtgcctagttggacaatgtagcagttgtttccttgttttattgtctcgaacttgtaatgtttttgattgcatggtaactcttttaattacaccatcattagactgtcttttatactgtatttacagaaaatcttaaatcttaaggttggtctctttgttctttttttttttttttccaattatatttgttgtttataacaaattgtcatttgaattcttcaaagatttataaactttgcttatagtttgtgcctccataaaaagttaaaattctgtcattgagaacttgtttatataccgttgatatacaggactattgtattgtcacaacttacctgaagcaaaacaacagttcatccgtgatagatttgatactgtgaattgtatggtatatgatataatttgttatcatgtcctatactttaatttcttttgtgcagcctgcccaacatttgtttttcaatgtgaaagatacaaagtaaacttttgctgcccttctgcatattagctgtctgcagttattaatattgatttacatttatctggattggaacatatagtattttctactgctgacaaccattgtttcttttatttcgttttgttgcaattgtaatacagttgggcacatgtagttcctttttcttttctttgtctaataaatgcttctgataggctgggaatattctcattgattcacgcggtgcaat

SEQ ID NO: 71718 - DNA, 573 bp, Prunus persica
  Intron number 1 from transcript ppa004642m (locus ppa00363 4m.g) derived from phytozome v7.0 (chr-ID scaffold_1; pos 36492709 to 36493281)
aagcctcctctgaagaacgaaaaagtaatcttactttgaactctgagccaagctaagctatgtgcttttgacatttttttaatcatagttttcgaaaaacggttttcactgtgagaggagcctatcccatattgccatggagcgcataattatttccatttgagctagctttaaccgttttcaccacaaaatatggcttcaaattcgatgaggaggctcccaaaattcttaaattgctggcatctttggatagatttccgagatggggtcttccatttcaatctgagtaattgtttatctccattctttttctcaattttggttattcgcttaactgtgaccatcccctgtttcacaaaattttctcaggaaggtaaattgttttgttgcccaattcttcgttgtccctacaggagacattaaagttagcttctttgtttcattttcattatgggttataaatttcactgatttcccattagttcttctcttctcttctcttctcttctcttcccagtagactattttcttgtggaagctaattgttgtatatatttaaaggagaaggtaaaa

SEQ ID NO: 71719 - DNA, 563 bp, Prunus persica
  Intron number 1 from transcript ppa004628m (locus ppa00462 8m.g) derived from phytozome v7.0 (chr-ID scaffold_1; pos 40085863 to 40086425)
cacgacttcgtcgtcgtcgagttctacgcaccctggtatgtaattcgcatctctcgctctcttgtcgccgttgattctgtttacttttgccgatctaagttgctctggttttgcttagttgtgtttggccttttgtgagtggatctgaaattggcttaattcattttcttgtcttttttttttttttttcaaaatttatttttgatttgatactgaggttggaatttacagtcatgtttctgaattcaagttccagctggtaattttcagagcttgctgcatctgcatgcagtgattgaaaatgccctaatatcacttgtcggttataaaatgattgctaaatgcacgatttagcgttttgtttcttatttttcgtaaattttttactgaactaatatgatcagagtaacatgcatgtggaaagttatcatctgtgctgaagataggagatcgtgatttgcttttgggtttctttgtttctatactttgtggatgggttgtcctaatattgactatgttttcttataggtgtggccactgcaagaagcttgctccggaggtac

SEQ ID NO: 71720 - DNA, 370 bp, Prunus persica; identical to SEQ ID NO: 71040
  Intron number 2 from transcript ppa017299m (locus ppa01729 9m.g) derived from phytozome v7.0 (chr-ID scaffold_2; pos 17690365 to 17690734)

SEQ ID NO: 71721 - DNA, 907 bp, Prunus persica
  Intron number 2 from transcript ppa006719m (locus ppa00671 9m.g) derived from phytozome v7.0 (chr-ID scaffold_2; pos 12404169 to 12405075 reverse strand)
gtggctgcaagtgagctttatttctcttctagtgattttgtttttcgaaatttaacagccgttttttgttattttatatccgtggtactattttttattttgggtttctttttgtttcccaatttgatgctaattattagttgacgccttttataagtttaaagaaccttttttttaaaaaagctgtccttgtttacatttcgttggtttatgatgtttgatcattaaagcttgcttaaactgtactgttgtttgatgttgttggagagtagctgtgctgtttgattgctaaatctggagcgtaaagcttcccatctgcttcactgcttcattgttgtaatagtactataattattagtgcttgataggatatgtgggtacacatctgtatattttcttttttaaatgcttttttatttttattttatttcggtggcaaggttcaaatatttggctttcttgaaccattttaaatttagaacccagaagataagatttttgggtcttccatatgctttattttcctactatcactgccttttgtttgcacattttgacttcacttcaactaaagaacatgatctctgtataaagatatcattcaaatttaaggtggagtttattaggattaaaccaagatagagacaagagcatgatggggatacttttctcgtataaattgttgttcaacttgccagtgtttgttggctgattgagcttcttttcctcctgctcctcctctttctgtgttagctagtctgtttattgagattctagtggaggttatgtagtcctcaagtgtggctacatccagtattttgccttgagttgtcagtatatctcatatattgaattatatttttttgggagaaatgcagattgtttgagttatacggccaagaatcaa

SEQ ID NO: 71722 - DNA, 873 bp, Prunus persica
  Intron number 3 from transcript ppa009817m (locus ppa00981 7m.g) derived from phytozome v7.0 (chr-ID scaffold_1; pos 6014162 to 6015034 reverse strand)
agtttactctgtcggtggttggctccactgggctggtattatctaattccactttctacattttaggttctttcttccagtttgatttgtttactggaaagctaaacatttaaactttgctgtttttctaccaactttctgaactttagctataaagtacaatacttgttagccactgtaaaaagaagaatcatggttgtttagtaaattcccttccttatcccccaatatttattttcacaaatcaatcagaatattagacatgatctaaatagttaatcagtttatgccctttgctaaaaaaactccccaagatgatacatttgtgctgatttgtgtagcagtggaaaaggtgctttgtacatacaattccatctgatgttaagacaagtttgagtgcatgcgtaaagctgaaaattttatcagtgccagatgcatgcctgaatacgtaggttcttggtcaaaataatttgggttgttcccagcatctgtttgctgcgattactgtaatattgtcttaaattggtgtgaagctttagatatgttattacccacattttattttcacccacttctgcttaccggcaagcaggagctctaaaattcactgtatctagtgttgttttccacttatttcattctagtaacgtattataacttaaattggcattacccttatcagtgtcttcaggtggtaaaagaagggcatctgggcatttaagaaatgcctagtattgctggattctctgtattctataagtacatttatgctatatgtttttgtttgcttttagaaaatagtatttatttttcccactaggttatgtggctaatctggcttataatattcaatattgcagggacttacagcta

SEQ ID NO: 71723 - DNA, 907 bp, Prunus persica
  Intron number 1 from transcript ppa013570m (locus ppa01357 0m.g) derived from phytozome v7.0 (chr-ID scaffold_5; pos 16511769 to 16512675)
cagatccgatccaaagtccgcaaagcacaacacaggttagcctgcctctctctcgctctcttgtttgtttctcgagaaaatgtaggaattcaaattatcaaagtcatctgaacttagcgaaacggaattctgggcttagaatttactctagattttgtggatctgtgtcgtagccctggttttaattacatatattgaacattggggtttacacttgtgcttttactatggagtcgcctcttcttattcttcttgtcgaatcttactgttattaatttttggtggtttattatgatttagtgtgttggtgtttgcatggtttgaaatttcaagtacatattatttctatgaatttacaatgtgtgggggttttttgcctctttgcttggtccctcgcttgaacttttcagattgcagatgtgtgagttttcttaagctatctaattgcaatatattgaatcgcatctgttgttactgttttcaagtcaaatttaagtcaaattctgcactctgagttcaagttaaatttggctgtgacatggggatttcatgtgacatgggtaatattgggttcttagttcttactcacttttaaccatttttttttttgttttaatttaaaataaattgaggcacatgtaaggtgtagtctttttcccccattgtatactgttgtggtgttgattctggagagatggattgtggcttaagagcacataatgtatcaaactcggaacttgattacaagattagaacagtttaatgtgtgatggcgttttcatgcttctacttgtgattcattcaatgctgaagacttttagttgaaattgttttagtttcattcctttttggtttatttataaattggttagaaatatttgtgcaggattcattcactctagacgaa

SEQ ID NO: 71724 - DNA, 980 bp, Prunus persica
  Intron number 1 from transcript ppa019724m (locus ppa01972 4m.g) derived from phytozome v7.0 (chr-ID scaffold_8; pos 17491373 to 17492352)
taggtcctttttttggctgttggtgagtaccaaaggtaagaaggttttgtaatgtaccaaacatatagcgagggcttataatttcagtgatagagcactttatcctacatttccgatgagagttgaacttacaagtcacgcgctctccgtcccaaaatcattataaaaatgaaaaaaataaaaataataaaagaaaaaagaagagagatatagtaatcttcgtgacgttggcgcggtaggtgttgcatgacaaattttgtttctttctattttccttcatattattcaaaatcttcttggtctccccttgtaaaattcaatgaggccttctgcaatgcgacctcttctggttctagcatacgcacggtactcatgctgcttagaagtttcctttaaaagaaaaagaatacaaacatgtgagtttatagcccaatgggttcatatttctggcagaaaatattgactttttcatggccaattagccggcttgacttttgaaaagtgtctgttttttgagttttcttgaaggaagaaaaacaaaggaagaacattaacaagtactacacaaacagaacattgtattttaaagataaggttaacaggtccaaagggagaattgacaaatcaagccccttgtcttccattttggtaatttcgtgtcagattccttattcaacagatgtatgtatatataacatatttagtacaagtagaaagcaaatctctcattttgatcaccttgtgcagatagcgagcaccatttcctctcacatttggttagttccattttttctgttcttgttttctgcatttaaattagctctaggtgaatcaatcaaaatcaacaaggaatatggggcttccaaaaggaatattaatcacctttctagttgtcccttttgccataatgctgcatcaagctgccataggcactgcagaatcagcggctaagccgaaagatttcccttttcctgtatttg

SEQ ID NO: 71725 - DNA, 592 bp, Prunus persica
  Intron number 1 from transcript ppa016490m (locus ppa01649 0m.g) derived from phytozome v7.0 (chr-ID scaffold_1; pos 46793906 to 46794497)
ccaatatcattgttggcttcggttttgctctcttggtaattatacatttagtttagcatacctcaatctctcaactcactctaatatatatttggttgattttcactcttgacattttgcatgtatctttgttaggccaattacattcgtctagggttttcagtcgattgcaattttggtgttcaatttggccatatgtgacaaataagaaaagagagacaaacatatagatatagccgccctacgccctgtaaaccgacaaagaagtggggaacaagagtcaaacttaagatcacttgcaaagaaaagctctgataccatgttagacaatcatcatctccaaaagcttaagctgtcagagaatggacatggacataaaatattggcctacttggcctaacttacaaacataaaatattggcctaattgaaatttcaaaagaaaaattgtgaggagacaatttcttcctaagaaataaaccacaatgcacaaattcttttcattttatatgtttaatgagtcatttctatgtcaaactataactaatgactcttttcatttttgttttgttttgacaatcaattagttagga

SEQ ID NO: 71726 - DNA, 960 bp, Prunus persica
  Intron number 2 from transcript ppb018035m (locus ppb01803 5m.g) derived from phytozome v7.0 (chr-ID scaffold_3; pos 6201763 to 6202722 reverse strand)
agtggaaaatagcatttaagagtaaggatagaatggttggtgatgtcgtttgggttgttaaatgcaccgagcacatttatgaggcttatgaattaggttatgagtccctttattggttcatttgttgtagtttgttttgatgacattctgatttacagtaaaaccaatgaggagcatatgatacatttgaaggacgttatgaaaattctgcaggaaaagaatatttgaaggagcatattattctttttctaggcaaagttgattgtgcgatgatgactcactaacggtttggctaatggaaggggcaaattgtaggcagagtcggtcctgggttttctaaggcccagggcaaatctctagagagtgcccttttagacaaattaaaaactaaaattacaaaaaaaatttatcaacaaattaattttattaggtaacaatttttattttattttattataaaaacacaaacaataacaataaaactaatgaacaaaggataataaaatttggattttgagcatttttttttcttcaactggaaacttcaaatttccaattgtgaagaacaagaatctctgttgagttttttgctaaatcaaattaaaagaaaaataagttaacaaagatgtctcttacaaaattgctattatacatctatttataaaaaagaatgacacaaggaaaagaccttcaaattgctaaagctttccaatgtgtgttgcagctactaccaggtctctttttttgtctaagataagaacattcgtttggttttttttgtcttttttagaactctttgtttccatatgtttagtttcattaatttttgttctttgaaatattatattatataatttatatttagtttcctagagaatctcaaagagatttggtgctgccatgattaatgattacatctacttccttctaggacactacggttttggattttttttataa

SEQ ID NO: 71727 - DNA, 504 bp, Prunus persica
  Intron number 1 from transcript ppa009805m (locus ppa00980 5m.g) derived from phytozome v7.0 (chr-ID scaffold_8; pos 21670943 to 21671446)
acaatttccactcgcacaagcgttacctcagcgaggtttcttttccttcatgccttatcatttcatcattttgatttcattgccgtacatatgtttgcttgtgctttgctttatttaacctcttcgtcgtctgtcgtctgtcgtctgttgtctgtcatttgtcgtctgtcttcttataatttatttgatggaatcatacttgaaggacttttctttttcttttcaagtttgaaaatttactgcttctgactctgactctgattcattcatgggtcttcttcaaggaattttcttcatttggaacttctttttttcattaatgttttcaaaaatatgtacagttacttactagaccatttctggcatgatgatatttccttattacccttttcaatcatcacagcttcacatgccatactttcctcttcacatataacttataagcatatgaataatcagtctttgatccttcatttccctcacaacttgtttcttgtgcagatt

SEQ ID NO: 71728 - DNA, 986 bp, Prunus persica
  Intron number 1 from transcript ppa012224m (locus ppa01042 0m.g) derived from phytozome v7.0 (chr-ID scaffold_1; pos 1533623 to 1534608)
tattctcttgacaaacagaaccctcttcttcccaggtacaacttcgcaagccatcccttgttaaagaaaaaacagaaatggaagataccctttaagaaaaccagagattaaagattgcccctttctttgtttttgatcgtttctgtagtttttggttgatctgagcttgatgatttgtgagttgtttggttttttctgtgtgggtttctcattttgtttgcggtttagtttgcttctggtgatcggaaaacgttgatttggattaaatctgtagcagagtatttctgtaacttcgtgaagaaaaaataaaaataaaaattgatagtatgtgttttggctctattgggtaagaagaaattttagagattggcattcactgataggcttatcgaaattatttttctgctttatcttatttttttaaatattgtaaagggcttaaatgatctgtatttatttgggtgaggtagtccttgatgaagactacatggtttcattggatggtttctttgaatgaagacaaagaacatatggtttgtttgcaggagaaatgagacaaaaggacagattaactctttggctatatcttctttgtttttgaaatgttatgggtatatattgtttggaatgagatcattgcattgttgtttcacattcatttataattttttattgttttcggatgtagaagatcgatcctatgattttgttgtggttacctcctattgttgtttcatgaggagaagatttaacagtggtactttatgatttcacatgccacagaaaacactgtcgatttttttcacatgccaaagaacaattaactccaattgtgttctcgtgtcgattttttagcaataaatttttgtccgagggtataactcttagttttctttttgtcctgatgccacttcaattcaatgtttgatatatttcatcgtatattgttaggctgtttgcggttgtggacgacattttttgcctgt

SEQ ID NO: 71729 - DNA, 1013 bp, Prunus persica
  Intron number 2 from transcript ppa016974m (locus ppa01697 4m.g) derived from phytozome v7.0 (chr-ID scaffold_7; pos 4513746 to 4514758)
aaactacagcgttgatttttgcctctgggaaggtgagctctccagaaatttctactattcaacttgctgataactgcatgatttcatttcagctattcctaattttgtttctataaattttttggaactggtatgcttttgaatctctcaggctcctgtccagtcccacctttggaaccatatgagatctgaaagaacagtttatcctacttatgtttttcaaatcataatccaattgattgtgctattatctgttgacatgtctatttgggtacagttcagacatgattatgtatttgttgatatgtgtttggaactccacatacacgactgtgttaattgtcatgctaagtattagtaatgtattttgcctttttcttcgccataaattcctgtttttgtcatcaactaattttgataattaagtctaaattgaagcttacgtttgatattggttctggttatctggattgcatgttttgtcaaaaatttacagtacctttgaagctgaaattgacaacttttgatgctcaagatggcaagatatatttgtttctatgttttttccttttgttagaagtttaggtcttgcatggtctatatgtgttttcgctatttagactccccaccatcttgggcaccttgtattttattgtcttacagcaataaattcaaatgtcgtgtatgtagtagaattggctttgaattagttgtcacgttttgaaattatgttttcagtctcttttattggaactaccataagtcatgggtggttggtcaataatttcataagatcctgtttttgcatcctgcacttctgcggctaaaactggctttaaaaaatttacttatgcaacgctggttgattactacattgcattctcatgaccccttgaacgtgataagccaccacccccctcccttttccctcctgccttgtttataatttaaattttgaccattttaccttttttgccgctgtttaagatgtttaatctctctggtactcaggt

SEQ ID NO: 71730 - DNA, 815 bp, Prunus persica
  Intron number 1 from transcript ppa008092m (locus ppa00809 2m.g) derived from phytozome v7.0 (chr-ID scaffold_8; pos 17127262 to 17128076)
ttcctctcaaaggttctttttgacttttcaccatttttaaaaagtaatttgcctttttgggtttggattaactaaaagtttaatgagattttgaagtaagggtttatatttaaaagagaaaaaaatgaaaacccatttgtattaattataactaaaacggacttacatcactatcatcctggtgcttaaaaattgaaattttggataagctttgagtttttgtccccctccccccaccaatttagatggctttgattatagggtaaatattaaaaaataatgccacttgttactcaggttggtattatctaaaaatatgtaggaagaccgtacactcttcaaatgatgcagaaagataggtaatattatattattcatgtatatatgttcaagaatttctagagctattttaatggcaatactgttttgcataactttgactatgcttgtaaggagagattgaaagtttgtagactagggaaaaagattgaccaaaaggaaaaaacgctaatgaaaagtagatggaaaagttgggagggaggacttttcatccctttgaattgtttgttagagtggaaatataaagaggagataaagccagagagattcttgtaagaccatcgtcggttgattaggcgctaccgtgctagtttaagtccgcttgcggtgatgatctcttgctttgattgaagcttccttgatctgttatttcaaatgttttgcagtatgccaattgttctagttacagaatggctgatgttcccaattttgtttttgcagcttgttcatcttcggtatcgaataactcattagat

SEQ ID NO: 71731 - DNA, 794 bp, Prunus persica
  Intron number 2 from transcript ppa009023m (locus ppa00902 3m.g) derived from phytozome v7.0 (chr-ID scaffold_3; pos 3001023 to 3001816)
gtgccacataccaactcatttggacagacatttaggttatacacttttgcaaacataaatttattttatatgtacccttcaggattatatctatagagatctgaatcacagcccgtttgtcatggacacggcaaacacgactaatagatttaatacgatatgagatgatctgatctagagttagagcaaatatggatggtctccttattagccctttgacttatgttataagttatttttcttatcatctacaagtaaaattcactataaaatgtatgtgaccacttaattaattactgatcatactagagacaaatgacctggtaatttgatccccttgaagctgtgcctttttctcaagaattttggaagaaaaagaggaaaatgataaaaaagaaaagagattgggaaacctggacgccaaggtttcaaagcatttgctcactttcatttctaattacccaactaaaaaggtcaaaaaaaaatctttcctgtgatggcaaatgaaaacccaaaagaaagaaaacctttcctaccatggaaagacatgggttcttatcattagctcaagcaacagaaatagtgaaggtctatttgtttatcttatttttgaccaaccaaggcttcttgtgcagccctctgtgctggcccttcggccaggcccatacttttgccttcaacaaaaagttttttgtcttgttttggaaattcgttgaattttttttaccctctccattgaattatcaattaaatttagttattaataactttacatggattgaaaaacagggatt

SEQ ID NO: 71732 - DNA, 641 bp, Prunus persica
  Intron number 1 from transcript ppa008987m (locus ppa00898 7m.g) derived from phytozome v7.0 (chr-ID scaffold_1; pos 7607359 to 7607999 reverse strand)
aatttcagtttctcaagcatcggtcactcctacaggtatgaccaattcatcactacttgtacttccattcatgatgatattcattttgtttctttcttgaggcctctagaaaaaatggacatttagtatttaagtcaaattattcatttatatttgttcgcatatttgagttgcccagttgagttttctccctctaatttttttgtttttaattatacatgaaattcgttcttttctttccaaagttttttttaaagtattgttggatttttctttttgcattattatttggtaaatgtccagtcttgaattataagataaaacgaccttacttcaaccggatctgttctacaggattgtacctctgtatctgtatccatgagttgccttcagttttgttggaataaaaagtgtaggataaaaacagtgcatatcacggttgttttttatttttgcataagtttactttttaaccttaatttgtcaaactactctgctttattacattattgatggacctcctataatttagtgacaaggaatacttgtaattattcaaatgaaaattgttggttagactgcaaagtgcagccatattctgtattactttttttcttttttttgggatatacaggatttcg

SEQ ID NO: 71733 - DNA, 909 bp, Prunus persica
  Intron number 2 from transcript ppa006393m (locus ppa00639 3m.g) derived from phytozome v7.0 (chr-ID scaffold_4; pos 9541302 to 9542210)
gtggcaaaattacgttcccttcttgccttaaacaggtattcccttggcaatatcatcttcgattgattgaattatttttttaaatagtatttaggtttttttagtttgcgatttgaatagtctccttaggagatcgatcaggattgtctgaaagtttgctaatttagtggaggattttgctttctgcaatttcactattagaatctgaaatgatgataaacttttcttggatgatggcaaaatcaagagttggaaatggtttaaaaccttaaagggtcgcaaattcataatggggctcttctgtgattggagtgaatttgcgtaactcagaagtttttgagtaagttttgaagaaggtgcatgatataaaaacacaccgaatttcaacgttctatcccattttggagccgttttggtttcccatttcgaattagtttatgaccgttaaatgaaaatttggaatttaaaagcactatatgcactggccacagagttcaaagaagttcgtaaaatttgatttcattgttttgtgtgtcttaaaaacaatacttttatgggtttccctataaataagttatttttgtgttttgcaaaacaaaatctaacctgttgatgttgtggttgcagaaattatggattttctggcagattattgttattgttactcttagataatgaacgaagcttaatcgtagtccttacatataaaagagaatgaactatcaagattatttggttagctatgttttcaggcatttcttgaagagagattgaagttttaaaactaagttgcttctggtttgtcattgacaatattgatgtgttcagtgattcattgaatttagtggtttgtaataactgatttgcaattggttgtcttatttctttgtgattcttgcagccaggacc

SEQ ID NO: 71734 - DNA, 857 bp, Prunus persica
  Intron number 2 from transcript ppa024588m (locus ppa02458 8m.g) derived from phytozome v7.0 (chr-ID scaffold_1; pos 13852507 to 13853363 reverse strand)
atcggattgatacccgtgtacccattgaagtcacggtttgtttttttctcccttgaattttgatattacaatcgcagaacaattgtgttgataacttcatatgataatatagtttccattgaattgagaaaacaagacatgtgtctttagtaagaatggtgctcgaggagaactaattgaaattagtaactacgcatctgcaggtctaccgaagtcatggttattcaaagacctacaacatcttctatcattttattagttcaatccccattcaattcgtttgtattctaccaagtagaagtatggtttgaccacatcttttgactgaaaccccttttttagttccattttctaaactacattgtgttgagttgttcaagcgggaaaaggttgtctttgatgagtgtatttttatatctttaagcgtcaagtgatgatgaactcgttatagaagtttgaattactctcagttatttatcaacaattttagatgatggtttgtgtaaatcttcttactgattttaactgaaaaacatttcatcttgattttttctttgtttgaccctcagttattacaatctgcaccatttcctccccactagatgaaagggtcttaattgtttgggctgtgttctgtgtgtgtgtgtgtgttatctttatcatatgtctgaactctgcactggatataggcagtagctgtgttactttccttatatgcttgactgttagtattattcttttttgtactggcatgcatcatgattcacttattttgagaaatgcatgtcattccttaaattcctttatcatgtcatttacaaggttggggaactgaagaaactagttgaagaaggtaa

SEQ ID NO: 71735 - DNA, 583 bp, Prunus persica
  Intron number 3 from transcript ppa009578m (locus ppa00957 8m.g) derived from phytozome v7.0 (chr-ID scaffold_2; pos 21902080 to 21902662 reverse strand)
aacagaagactgtaagtagtctttttccctttcaaaattgtatcccaattttttttttaatggaaatcatatgaaccagtctttaaaaattataccagtctttaaaatgatcagggattatttttccatagtttctatatctttcaaatgtacaaataagtttgaaaaagtaattgtatgcatcaatattccatactagtgtagtgatttaatatgttatcgcatttcttaatagaaaatgtctttaaaaaattaaaaataaaaaaatctcgggactgataatcgtccctccagcagtagaaaatgttttagaattcacctctcttggtaagcttagctttgatttactgatttatcttctcttcaatacttcacaacaaagtatatcaaaaccattattgggatcatttaaagtaattgtacaatcacagtttatccaaatgctgcctctacaaaataagttaattaggcccccaaccccacttacaataatgcaaccttctcttctgctttctttctttctttcaagaaaaaaaagaaactgaagttaattggtcatggcaaatatggcagtgggttttac

SEQ ID NO: 71736 - DNA, 566 bp, Prunus persica
  Intron number 2 from transcript ppa021756m (locus ppa02175 6m.g) derived from phytozome v7.0 (chr-ID scaffold_2; pos 21529514 to 21530079)
tatatccttgctagtcatgtaagtttcaatattttatcgtgatttattttactttcatagtacaattgcttgctttagataaattttttttttacatcaaagataaacttcaatagtccaatcaaagacatcaacttgacatttagagtaccaatcacaagagaacaacaaactaacatgttatttaaaaaaaaaaaactaaagcggacaaaactatcaacaaataaaaggcttatgtagcattgtttggttggatttcttggtaaaatttcgggcaaaacgatcaatatattattcgacaaaaaataaaacaatataatatattataactttaaaatcttctttcaatatgtggagtatgtattttttttttctcttgatgttacaataggggattcaaactctagatagtttgggcgtgagagtaaatatattatgcaccacgataggtagaaaccctcacaattcttagtctgctcaattttgtttcttcataatttcataatcatctctaagtctaatctaattaataattaccttattattcttcaggtacttggtgccat

SEQ ID NO: 71737 - DNA, 370 bp, Prunus persica
  Intron number 1 from transcript ppa017408m (locus ppa01740 8m.g) derived from phytozome v7.0 (chr-ID scaffold_1; pos 25494056 to 25494425)
tctctctgttcttcatcttgttatcatctctaaatgtaagccatctcatattctcaattcagataatactttttcttttttgttggtgttgtttcttagagaagattgggttgttattcgcatggtgggcatgttctttgcaccaaagttcgaattttctctccgtagattaaattaatttaaaatactttaaaaggttttattttttatttttgtatgaattgttaatcttatattacgcatttattttattttattttagttgtatcattgaattcattctttgattcgtattttattcatcctttcacaaacaacgttatgtccaaatccaggttactttcgcgacggccagctcaggggaaagccc

SEQ ID NO: 71738 - DNA, 924 bp, Prunus persica
  Intron number 1 from transcript ppa004051m (locus ppa00405 1m.g) derived from phytozome v7.0 (chr-ID scaffold_5; pos 15315682 to 15316605 reverse strand)
accggaaggagctccgaaagaaggagttgaaaagggtaattacttctcaaaactacgccgtttttgctcttttcttctttcaattccttgattccatacttaattcgaaattgggttgttcgtttttgcccatattcaatcgattttcacaatttggtactccattgctcctagttattgctctaatttcatgtttcccctcgtttctttgccagaaagcaccggaaaatagaaaaagataaacttatattgaatttgaaatttaactacaatatccgaatatctaaatttgtctacaaagttttgccttgagtagccaattaattgtcgatagtcaccatttaaactaatctgaaataaatttaaatggggtacctattttagtgtataaatttaatcaatattgtattttggcatctgcaatcccaatttatttttgaaaggaagatgtaagcatagcaagctttgggttattgtaatggaattaatagcatcaagtttgtgaaaggtcaatgctgttatttgatactaccctctaagttatcaggcttagcgaaaggtcgagaaaggtatatatgtgtacacacacagttgtatttggaaagcagatgtatgaccatgctgttacctttatgtttttgagtttgttttgataaatgtttttttatagcatatgtttgtgcctcctcatcttaaaattgagatgtatagaaaaacgtatttgacctgtgtttaggtacttgcacttatccattgaccgtatgattatgtgcagttccaagaaattgcccccatttatattgttacctttggtgttcttgataagcttattgcatagattaaatctttattcatgcacttctgactttatgttgtctatgacgaacagaataagaaagaaaggaagaaggtgagggaggtggg

SEQ ID NO: 71739 - DNA, 727 bp, Prunus persica
  Intron number 1 from transcript ppa002306m (locus ppa00230 6m.g) derived from phytozome v7.0 (chr-ID scaffold_2; pos 10754115 to 10754841)
aacaattctaatcaggacacgcaagatcagaggtaaggatcatctgggcatctctcatttctttggtttgggttttttgatatgagggtttcaatgtttgaggtcctttatctcatatggatgtgttatactatctccgtccctatgttggttaataattttcttttctgtagcatgcctttctactttttgggtttgaagagagctgaagaaaagcaaagaaattggagctgattttgggagaccagggggccttttgcctggctgggctgtccgctggaactgcttttacgcctatccatttatcacccatcccacctcttggaatctgttcgtcgaaaaaaatcctctccgaacccaatatcttccaagaggccaagaatcaaacgtgcctcatcaactatagcactccccctcatgtgccctcgattgctcgtctgctgtcggtggtcaggtactgtcgtgtagcagcgacgtcgtctatcaggtactgttctcgcctctggaattgagtacgctcgatccagatcaaaattcgttgggggtcaaccaattaggcaactatgggttgtttgaaagagtgatttattcttttattccttttgaaagaatatacatatgcataagcacactcacacaacaatttattcgtcatcttgttgattttatgcattttcgttttggtgctaatgaaatagtttccatacaaatcaggagtaatttgggc

SEQ ID NO: 71740 - DNA, 578 bp, Prunus persica
  Intron number 2 from transcript ppa017684m (locus ppa01768 4m.g) derived from phytozome v7.0 (chr-ID scaffold_8; pos 21031032 to 21031609)
tggattctgccgagaagacgtggaaagagttatcggtatgattctcacactaatataaattataatgttttgttttatcgagtattctccttctctgtgtgtgtttgtgagcttttgaattactatctaagtatatgggttagggttttaggcaggggtttatggatttgtctggtggagaatttgaatggtttgggaaggttgggaatatggcattttggtcattaaattttttatggcagtgattgcaattgagggccatttcagagaactctggcatgaaactttgactcaaaattttatggttcctcctccgccctcttttttatgcaataggcgataactccagactttctctcgaatgatttaaatctaagacctagtaccattacggcatttctggaccatgccatcaaacaaaggattaagaaagaccagcataaattgggtttaattggttcttcagtatagagtattgtactatgctgctgcacggttagttattgctgttgttttctctacatttgagtgtacttaataaaataaaataaaattgcaggttaagctggctgatccag

SEQ ID NO: 71741 - DNA, 989 bp, Prunus persica
  Intron number 3 from transcript ppb010908m (locus ppb01090 8m.g) derived from phytozome v7.0 (chr-ID scaffold_7; pos 8507133 to 8508121 reverse strand)
cctctcatctataatgtatgtttatgttttgatttttatttaaatcatatgaattcctaagtgcattgacaactaaaattaattgattggtttgtgtagcaatagtctaacttgtggattggatttgcttgcaagtttggatatgaatatatgcttatcagaatagctatagcttgcaacttggaaccacattattaattatgtggatataattttattttttcaccaccctttcagtatgtatatcttttgctctgttgagaaatctgattagatttatattttccttttagatacatagacagcaggggagtggctggaccaagattccatagagtaatggtttatgattttcctccaatgttttaattcatgcttttatatgcacctttaatacaattcatctcacgggactaatatcaagcacagtacttttgttaactaagttcccaagttgttaatgcctatatgtttttttaacagggacttgggctttgacaatttaactggaggaatcccacaatccatgagtggtttaaatttaattcacttgtaaggatgatactgcagttgttctcaagtcaaggctgaggcatctattttattgttggtggacctcatattcaacaatattttttgacacttgaatttctgtgactgtccacccttgccatttcatttcttaacttcatgttttgtaatgattttcctcaggtaatttctaaactacaataccttgacctttgggggagtaaaatatctgaccaaggtacaattccttgacctttgtctctcctttcattttattttgtgcttgctcatttcagttctaggcttaatcacccagaccatatcttctaaacttcgttttcttttctcacatggttatcaagtttggcttaatcacctaggctttttgttctgacagataagtttgcattaattttattgtgacatccaattacaggtagttgctggattagcagctg

SEQ ID NO: 71742 - DNA, 629 bp, Prunus persica
  Intron number 2 from transcript ppa008683m (locus ppa00868 3m.g) derived from phytozome v7.0 (chr-ID scaffold_2; pos 24007850 to 24008478 reverse strand)
cttcctgacaaagtatttgttcattgtaaggaccattcttttgcatcatgcattcagttaatgctgatacagttactcgattaaggctttgttggattacttattaaggaaaaaggctttgttgggttgagctctcaaatacctgcgatcctttttagttcttcctctgtttttggttaccatttttggtataatgtaattattgatttacagagccaaaaatgtacctttttttcccgaactttatcttgattttttacctgccactcatttaatttcttcttaatgttactaatttcatataagaggagattggttgaagaaaagaatcattaaaccggagaaaggtggtccatatatatgatcatcctgctgcttataggattggacaatgtttgcatatttggattttctagtctatagttaatttgagttccccggagttgagttttggattctagtgcccttgctttgtatatatttagttatttttatttgtaagagaaattttttaagtggaattagagaaatattaatgtgatcaatggcatttgatattgtttgcagacaatataagtttatccagtctaattaagttggttgaaattcatctgcaggtagtgaacgga

SEQ ID NO: 71743 - DNA, 587 bp, Prunus persica
  Intron number 1 from transcript ppa008683m (locus ppa00868 3m.g) derived from phytozome v7.0 (chr-ID scaffold_2; pos 24008487 to 24009073 reverse strand)
ggaaggtctggccttttcaatttcatcgtttgttaatttacttcgaacaaacttgatttcatcaagatttgatttctgtacgataaattttatttctttatgctttggatattgaccaattcttcaattatcggaggattgagaaggtttaatgatggttttgctttctttgaaagaaaattttgtatttgaagtgatgttatcgacaaattgtttaccttttcatggttttgatgattaatttgatgttccgttaaaattgttagttccaaatgtatattagatctactaaaactttgtttttggtccatagttttgattttatgcttactttacaaatgtatgtttgtcatattgggcaaaaaatatggttttctgtttacctttcttttcttaaattggaatgtgtctgctttggttgtgtgtacgttaaattgaatcttttagcatgaccattaatacttcattttgtattttgggtatttgaaactcgtctgctggaaagttttactcatgtagaatgttgatattgttctttatttgctcgtgcagtgcggcagattggaagtttggagcggagcaatttg

SEQ ID NO: 71744 - DNA, 410 bp, Prunus persica
  Intron number 1 from transcript ppa004761m (locus ppa00476 1m.g) derived from phytozome v7.0 (chr-ID scaffold_1; pos 31198322 to 31198731 reverse strand)
aagctggttagctcttttccttttgagttttggtttacttttattttttgattagtgattacttgcttgcttcattcagtatttgaatcttagatatcttattctttgaattaagccactgggtcagtggcgattccgatatataacagaaacggagtggttggctctgtttgcttcgattgaagcagcaatggttgcatatgtactagcctaaataaacgtaaagctatggcatttcgattgggttccgcaaaaaatgaaatttttgttattttctttggaagaataaatttaatgcgatctaataaaacctcataagaattggcgaaattgattattgattttcttacccttcgggattgatggttaatctattcttgcagggggtggcggttctgataactgcaaag

SEQ ID NO: 71745 - DNA, 1015 bp, Prunus persica
  Intron number 1 from transcript ppa001906m (locus ppa00190 6m.g) derived from phytozome v7.0 (chr-ID scaffold_3; pos 5858027 to 5859041 reverse strand)
aggccttctcagcaaactctaacctccatatcactgtaagctcgcgttaccttcctcatccactctgcttgtaattgttcttacaatttatcttacattgttcactttctgtttgattcctgagaaaattagggttaagaaaaggaattttcaatggaaaggtggataaaaaccatttgggattcaaaatttaaaaattatggagtaggattggaaattcagatactgggaagtacttagcttgcttgaataaagctgtgacagaaaaaaaaaaaaaaatcggaaatttacagttggcaaccaaatggaagaattcagtttctttttgaattactctaaaatttgaaaaagatcgaaactttaaatgaaagtagcagagaattatgcaacggagctttagatacaacagataagcatccgaattttgcatctggtctgtgcgtagagaggattgacagggagagtactgaggaactgagctacatttattgaagatagataaacatcatatagtgaataggattgagatttttctgtcactccgcaataacaaagagcctacttttttcatagcaaaggaacagccagaaaacaatatttaagggagttttcgattcatcataaaagcattagagttttgcatatgttctgtacgtacgtgtagagagaggagcaactgagctacacttattagaagaaagataagaatcataaactgaacaagatgagacttttctgtcactttgcaacaacaaaatggccgtcatacgcatgcttggtttgcaggctatttactctctattagaaagaaattagaaaacaagatggacaagaagtccatcaggagcaatgcatccaaaaagaaaaccaagcaatgacttggttggcatgctattgttccatattttttttcttatctttcataaactctgcttgtctttggattatcttaagaattaatgacttgtttactattgcagatacaagaaggttcccaaaacagcgagcaactgct

SEQ ID NO: 71746 - DNA, 279 bp, Prunus persica
  Intron number 2 from transcript ppa000989m (locus ppa00098 9m.g) derived from phytozome v7.0 (chr-ID scaffold_1; pos 32077460 to 32077738)
actcacagatatatagttttcaagtggagaaaaatgtgagctcatgtcttcctctcgcatttctatttttcttgttttaacttaatattttgatcactgtttatttatttggtgatgtcttgtatagtgcttacttatttgggttatagttttgttgttcttccatattcaaactgttaaccagtttctaggagctacatgtttgtacatcaagaatatgatctcttcaggcttgtttcttatatatttgtgatattaatatataaatttttatttcag

SEQ ID NO: 71747 - DNA, 637 bp, Prunus persica
  Intron number 3 from transcript ppa000989m (locus ppa00098 9m.g) derived from phytozome v7.0 (chr-ID scaffold_1; pos 32077836 to 32078472)
atcatcctctctctgagtatcgtatcctaccatttcgcttttgatgtatatagaattaactctgagattttgttgttgaaaagaacactgagatcatgacattgcaacaactttgatatatgtaagtacatgcatacatatgtacatatatatgagcatacatgagcatatgtttaaccgttgtggggatgattgtatcctttttgggatatgccaaccatgctaagaaccatatctaggtctgctaaatattttgatcattttggtgtgtttctgtgttcaggcagtatgcttgaaatttagagtaactgaatttgatctgtgcctaacagcagttatagctttgaggttggttaatgtattgtgatctcaatacatatgttgacatacaaagcctactgtatgacattttttttcctttttgttatcaaactcttttaggtattacattaagcattgtttatcccaccacttgagttgagctctattactaaaccttttgggaccgcccaagtcctaactctaatgtattcatgatagatccttcttgtcctgtaatatggtttgtcctacacatcttacccatttatttatcagtttcagcatataattccttaacctcttccagatttggaaa

SEQ ID NO: 71748 - DNA, 537 bp, Prunus persica
  Intron number 1 from transcript ppa021929m (locus ppa02192 9m.g) derived from phytozome v7.0 (chr-ID scaffold_6; pos 28421722 to 28422258 reverse strand)
aagcagatttgaagcactccagagaggtatgtaatatgaagcctatcttttgtcaatttggaaataatgtatctgcctatgagcacaaacacaatcatgtgaaatgagaattagaaaataagatgcgacatggaaaatacattcttgtttacatgtattctataataatatatatgtataaaaacaaggtcagaataaaaggtgcatcattgttagtgcttagttctcctcgagtggctgactgactccactattatgtgcgttcttaacccgatacttcatttctgtatgtaatttgtaatcaccgatctaatttctttgctacagatctttgattttagatatgctcatgctggatctgctgccgctggaactaaaatgtaggttcacattaacttcagaacttattggtttcttatattttaattgcttacttcattcatcgggacagtttgatgcatgaagaagaacaactgcatgatgaggaaaaaacaggcagtgacgccttacaacaggctggaaaagttcgtggccaga

SEQ ID NO: 71749 - DNA, 703 bp, Prunus persica
  Intron number 1 from transcript ppa008302m (locus ppa00830 2m.g) derived from phytozome v7.0 (chr-ID scaffold_4; pos 12985467 to 12986169)
tctctaactgtaggtacaaatctcaccaccttcatttcccagtctataattttcttattatgaggcaatttctactctaattccaccttattttcttttctgaaagaatcaatgttaatactcaaattctctcattttctttgctggtttttatctttttggctcataatcttgttacaattactcataaatggtttggttttcttgggtttttaaatttttattatgctcctcattctggtgctcaaaatgcattgaaaaataatgggaaatgagaagtagattttctgggttttggttattacaaatggggtcggttgcaaatggtgagtataagtaatggacacaaaaaaaaattccttgtatttcagttgtgcactgtcaattgtcaatgctggaaaagcaaggtgatttttctttgagtgaataatcttcaaaatgtttaataagctaactttagatgcacaccatgagcattgatcttgatcttcaactatagcaattcccaaatgatactacatacttgtatgtagttccaaatgcaaatatgcctctgtgttctcatatccaaagcgacaaccaattgtatacggttaggttttaaacacattttgcaagctagtgttgtgtttcttttgttcttatttagtccaaagagtgaccttttgctctcctgttttacaggggagtgcctggtaaaata

SEQ ID NO: 71750 - DNA, 1024 bp, Prunus persica
  Intron number 1 from transcript ppa011020m (locus ppa01104 0m.g) derived from phytozome v7.0 (chr-ID scaffold_6; pos 2985391 to 2986414 reverse strand)
cgctcttccttctccctctctctctctctctcaaagtaaagtttctatctttttgttgtaattctccaatttctgaatcttccttttcgttctgattctctcaatatgtttttttcaattgcccgaattttctccacggccaaatagatcgctgagctccttctgtttatatttgcgtctttcaattgcgttcggtttgttgtgctcaatgtttggatctcggattcggattcggattcggattcggggattgctagcttgtttttcatgtttctgtttggtgttgtgttttttttgtgtgcgtgtggatttatgtttggttgtggaatacgtatggaggattggggagttataattagtcagcttccgtgatttctaagctgaaatttagtgtgaaatttcttacattttgccggattatttcttagttatgtgttgttaagcaatcacaatgccaatttgtgttgtgaattcagtaagcacaatacagattcgtaatttatatttcgttttcttggtttgaattgaaaatttgtttgattatgtgggttttattcggtgaaataattgtgcatgtttttcttattcaaatccagttagatgtttggactctaaaaccgttgtggtgtatagaaatagaagagagtgtttagctgaggtgaggtactgtaaatgctattactaggatggatatgactaaatcatgaaattgttgctctttttcaatggaaatgtttaggttaggattggatttagattttagtatttcattgtgactgttttgttggtttaagagctacatttgacccctttcatcttcatgtaaatttaaaaaattaaaaattaaaaaaattaaaaaaaactttggtcaagtcatatacacttccattgcttcagttattgtgggtttgcttttcgtttcgggctttacaagagtaaaacctgtttttgagatgggtttctaatctaccatgttctacttgattcagttcagctatctatcaaaacagatatagctttggct

SEQ ID NO: 71751 - DNA, 713 bp, Prunus persica
  Intron number 1 from transcript ppa009366m (locus ppa00936 6m.g) derived from phytozome v7.0 (chr-ID scaffold_1; pos 39144982 to 39145694 reverse strand)
gaaggtataatttttttttttcttgttctttacaaacattttcctctctttctttttggaatatgagaacttgcttagaaattgagagattgaattgctgcttgggatttcagaaactttttgttcagttttgtatggtaattttgcttcaggagattaaaagattgtctttaatgcataatattgaattttggatgaaattggttagtttttcgttgttttaggccatgttctgctgctgattggcgcagattcttgtaactatgctgtagatttatgtttgtaatttgagtttgattagccaattgaatagaaagaaaactgagccaacttttcattttctgaccctggatttagttttattgtgacttgcaatttgttcttccatccttaatcaccaagtttgattggcaaaattgtattgaaaaactttgcccgtgtttcattttgtgaccctcagtttaattttactgtgacttgtaattcttctgtctttaatcaccttgcgcgataggattaaggaagagtctgccatgcttaatgctttagataggctttggcctaaagcaccacagcaatcattgtcaaccatgctatattaactgtattatcttctttgccaagagttgatggcttctttcactacttatatattctgggtctggttttggaatgcaggagctgcaagacagggtagcagaagcgaaggattc

SEQ ID NO: 71752 - DNA, 343 bp, Prunus persica
  Intron number 1 from transcript ppa019095m (locus ppa01909 5m.g) derived from phytozome v7.0 (chr-ID scaffold_5; pos 13479480 to 13479822 reverse strand)
tgcagtgctgctgttcgcgcctgcgtttgaccgtacgtgtacggacgcctttggatcttactggagaagatttacgcacgccacgattttctcagattccacattccttttgattttcgttatttaattattactttattttttttatatattaaatccgcttttatgttttttgttttgtttgttcttggcatctctttcacaaacacaaggggtccatgtgtttgtcttttctgcatttcaacatgatgaccaaatccaatgattaagcattttcctctttttgaattttaatttttttttacgcattttaatttttgaattttgttttgcagctgtattc

SEQ ID NO: 71753 - DNA, 632 bp, Prunus persica
  Intron number 1 from transcript ppa006888m (locus ppa00688 8m.g) derived from phytozome v7.0 (chr-ID scaffold_1; pos 314016 to 314647 reverse strand)
tgtaagtagtacttgttttctactcttttttctttctcttctgatctacattcattattttttttcttgtttttatttcattagaattttttataaaaactttggatcatgtttgttctgtgtgttgcaccccaaaaataaaaataaaacacacaaatttgggtagatttcggcaaattggacaccattttatatacacactttgtttttcactatttcaaaggtgtttgataatttttcccttaatttgtcatttatgcatgaacatgatgtgatttcatatttgtggggtttgaattcaataaattggtttttttgttttttgttttgggtgcaataaatagaacatggaatttgaggtgggttaggtcacttgggttggaggagaacattaaatatttacaaggtccaccaaatggagaaatgtctctctgtctctctgtctctctcctcattgagggttggggttggggttggggttcaatttctaaaactccatcgctgtgccaaaaacagtaaaaagtttgcgtattgccttgccactggatttgattttcaacacttaataattcttcagcacttgtgattgtgaggtaacttttctgtttatgcttttttcaggtgacaaatct

SEQ ID NO: 71754 - DNA, 551 bp, Prunus persica
  Intron number 1 from transcript ppa006293m (locus ppa00629 3m.g) derived from phytozome v7.0 (chr-ID scaffold_8; pos 16369939 to 16370489)
gagattagtccagagactttgaagaggatacaaaggtgtgttatttgattattcagaatttgttttttagttgagtaaatcattgtttatggttttaaacttctgttagttttgtttgtgctagcaaatctgcctatctggtcttttgcacatttgaatatggttttttcttttgactgccatgaccaatctccacttggcaacaaaaaaaataaaaaattcctccaaaatatttttgtgtatgaattgaagagtccaccttgcatcacgttttactgcccatattccattaatgaaccagtataaggggaatactttttcaattttcatccttaatctacaaaagcgtcacttttgctgccataaattttcaccatgttagcaattttagcatgtttaaggcacatgagttttagtttcttaatttaagattgtcatatttgtatactactagaccaatgtcttttcctttgggtttgtacttattatgcagtgaagagggtgtataaccttttatggtgtaaatattcagggttaagaagttgacaaag

SEQ ID NO: 71755 - DNA, 451 bp, Prunus persica
  Intron number 1 from transcript ppa001147m (locus ppa00114 7m.g) derived from phytozome v7.0 (chr-ID scaffold_3; pos 14786612 to 14787062)
cgatctgcacattactggtcactctctctctttatctggttatctcttcacatttatttttctcgtttacttagctcgagtattttttttccccattttctcctgtgttcatcacgacgtgaaatgttcaaatttcaattgctctgtttggtttctgagaaaatcaaaacatagtgtagagcgaagtagggctgaaccttattttgtatgtttcctttttcatcgaaattgattttgaattgaaatctgaacgtgcgcaatagttgagcttagtaggcccctgtgtttcattgtttttttgcccaaacatcatcaaaactgaaaatggaagtaattgttttgtatttattttctcagtcgcaagtttagaaagaaggagttttctttcgaattatttatcaatttttattgttgtgttgttcagacgaagtttgaagtcctagggttacta

SEQ ID NO: 71756 - DNA, 376 bp, Prunus persica
  Intron number 1 from transcript ppa014578m (locus ppa01457 8m.g) derived from phytozome v7.0 (chr-ID scaffold_2; pos 17864591 to 17864966)
gatattgtgttcccagattggtctttttggggctggtaaatatttgcttctgtcttatacatgttctgtttgcatgtgaaatgccctttgtttttgtttctttgtttactttagaaatcatgtgttacatatgttctatcaattcccaatttcttgcccatttgaaaaagcaaagaagcccataaattgtaaattgtttgtatgagatgtgtggcctaaaactctattcatctccaccaactttggcccaaacatttgaattgggtgaccaaaaaaaaaaaagaagaagagattttagaggagaaattaattttattaatgaaatttgtagatgggctaattttaattttggtagggttgagaccaatataaaacc

SEQ ID NO: 71757 - DNA, 644 bp, Prunus persica
  Intron number 1 from transcript ppa020197m (locus ppa02019 7m.g) derived from phytozome v7.0 (chr-ID scaffold_1; pos 9359134 to 9359777)
tgcagatttcaggttcaatctcatacgtcccctgtttttttgtttttatttttattaaattttctgacttgtttgtttggaaatgttgtggtccactaattgtcaatctgtatttttgtttttgaatacaagcgatatacggtatggagatttgaacatttttttggttttttatttttatttttatttttatttatgaaacattttatttattgtttaagtttgagggttacatcattttctaatgctggactcacttttggaggtgattagtttaaaagagatagtggtcttcagctgatgcgaatttttctttttggggtttgaatttcatggaaatgttctcatgttagattgctgtgaggggttacggtacatatactcagtatggacatttcgaaatacactacttgttgggtcatcatgacctatagagtggttcccaacgagtggtatttcgaggattttgtactggtgagtatgcgaatgtaacgtaaaaaattgtgttgctagattgtgactagggcacattgattaaattagtgtgaaatgttgtaaacgtttagaagcaacatatatagttgcataaatttcagttctgggttgtgatagataaactactcatgttacaggagccaggagtg

SEQ ID NO: 71758 - DNA, 410 bp, Prunus persica
  Intron number 1 from transcript ppa010162m (locus ppa01016 2m.g) derived from phytozome v7.0 (chr-ID scaffold_4; pos 2903088 to 2903497)
tgctaagctcgccgaacaagccgagcgctacggtctcagttcctcactctctcactattttctcttcttttttttttttttttgttctttttgttctttatatctttttccttcagattgtgtgaacgtatactttgtttggctagtgagaaaagcaaagaaaccagagtagtaaacggactgtggattattactttctctcgttatttttatcttattttatttaatcatcatgagaatctgaactcaaacactgtttagccacttctcgcagactcgattttgttctaccgaaaaagcattgagatctaagcctttgatttctttctttttcttgcattttctcggcgtcttaattcttggcctgcacttagggttttgacttgcatttactttaccttttgacagaa

SEQ ID NO: 71759 - DNA, 945 bp, Prunus persica
  Intron number 2 from transcript ppa023216m (locus ppa02321 6m.g) derived from phytozome v7.0 (chr-ID scaffold_1; pos 9315026 to 9315970)
gttttgcgtgctttggagttcctttcacagaaggggttggtttatctttctctccttaataatttattttgggaatttattgtaaatttctttaaaattattattttttatactttgtgggtgttgttatttttccaaaagttaataaagatttgtactttatgtctatatgcaaccaaatatgtgtttgtgggtgtattcatttttcataacgaaatcatttctgttgaagttccctttactataacttagaccgatgtatattagttgccaactagttgctgcctcgcttgacttctgtcctaagttgctagcttgcttttgaagtgtttgagttaataatggttcaaggttctgaaatctatactttaaacttggctaagttgttcattatggttgattatcatatctcatcaacttttcaaaaaggaagtagttagataaagattgggagtcacatctctttgcgataagaggagagaagttggtttgggtgctttgagaaaatataacgtaggtcactaattcacctatagccaaagaaggcaagttaaagtagaaggtaaaaatgaacaaggggctgaataggactaacatgggaaggagcaatatgcaatatattacaggagacactggatataagagaaaggaattgaagacattcacctggctggccttatgtatttggaacaaaggaaaagataggggtggcaatcaagttgtgttgtgtcttgtaataatcaagctaattcattaattttgtgttgtgtctaaagttttgactcctaggaaaacatattgattgtgatgatgatgacgacgacccatcaatttgggcataagtgaactatgttacacaataaaatatgcttataaatatatatatatatatatatatatctcttgttatttttattgttttactgccacttttaaataggcagc

SEQ ID NO: 71760 - DNA, 883 bp, Prunus persica
  Intron number 1 from transcript ppa008946m (locus ppa00894 6m.g) derived from phytozome v7.0 (chr-ID scaffold_7; pos 12395945 to 12396827)
cagtgcaagccactctcggaaccacaggttctgtacattattcatttcttgaattcctttcgtttttgcggatgattgattggtgtttgattgggaaatttgaggattcgggttcggttggggtccgttgggttgcatggaaaatataggaaaggaaatggattcatgggattttttattttctgttggatttgtggagatttctaattctgattgaatttgagttggtatgtttgtatataaagaaaagttttctcagcaactaaatgggggattttcttaatttgtgtttttgtagtgatgtaattcagattctgttttttgtgattttaaatcaaattctttactttttcttaaatttttgtgctttgatttgtttacaaattattgggaccagtagagataacttatgagctctatttagtagtgaggcagaaaatatgagctttaaaaaaatgtggcacctattgatgtgggctatttttggatttggaagttgcttttcgccaaaatcagttttagagatgaatcattttgtcatgattttgagcgaggtgccgggtattttgaaatttttaatggagagagtggtaaagatgttttggtactgaaatttaacgattttgtgggaaagttgtgaaaatatccgaccatagaaatggctatggataatgcctgtgaagtattctatgtcaagatttgctgcaattttttcaaaaagcaaaaataatcttctgctttgagtatcaaaaccctccctcttcaacatccacttcttatcttttgtgaaatatttgtaatcagtgtagcaaataaagctcccaattttctctcttctccaacatgatcttttctttgttgcttcattgtaggtgagagggtt

SEQ ID NO: 71761 - DNA, 1029 bp, Prunus persica
  Intron number 1 from transcript ppa022930m (locus ppa02293 0m.g) derived from phytozome v7.0 (chr-ID scaffold_1; pos 25498549 to 25499577)
gtaaattcgcaatttcatatttaaaaaaataaaaattaaaagaaaaataagataatttattccatttttatggaacacaaccaaccattatcttttttaattctaaaataaattttcttaaaacaaggctcttgtaggcgttgaagcgcgtgcggaaatgctagtatatactaaagcgcaatccaactagacactgttataatgacaaaaatgtccgcttttcccttttgttttcccagccacatagtggaaagttagaattgccctccactaaaccctttctaacgttccttttttgcccctctctcttcggatcttaatgctcccgactgtcagttgggagatcccacggttcttttgatcttcgtctcgtccatttgtctgttggttgagagatttgtcatcgtttctacagccttcatttggctacgagttcttgcatcgtttgtcttcaggtatgcatcccgtcacctttttagcgcatcttttcatcttcgtcttatcaaaacagacatatattgagtattgaaattctttgagtttagcattgagtctgcgtttttggtggtgtagggttatgagagagaattttcaaatctttgatgataactaccatgcaaaagatagttcttttgggattttgattgtttaaggtgacttttgataaggtaacttttgattgtttaggcaggttaaaatttttttatttataaaaagattaatatttgaattgttagttatatttataatagaaaattagttaaatactcattcctagacataaaactataaaaatactctatactatttaatgtatataaacacacccaaaataaacccaaaaatcgatagctgtatattttttaatttaattattaagatgaaatacctttattacccttttaacataaaattggaattctaatcaacaccagatgagaacccagttcacgacctccagtctctcatcttcatcttcaaccccaattttcagtttttgttcaacctcatcattctaagctttgttgg

SEQ ID NO: 71762 - DNA, 651 bp, Prunus persica
  Intron number 2 from transcript ppa004452m (locus ppa00445 2m.g) derived from phytozome v7.0 (chr-ID scaffold_7; pos 22590919 to 22591569 reverse strand)
attcacaagaagcaggaatcgtgttcctcagccaggtatctatatccttcatgaatctttgcttttttatctttcgctcccatatgcccggacaaccataaccactcacacacatcacagcatggtttgaatcataacttatactaagaggcatcggtacttgaaattttctcttttttgtttttaatgtcatacaacctggtgcggcagaaactgaacatgcatagtaaaatgagtagcattttctattggaataaggaaaaaaaaaaagaaaaagaatgtaacagaacttcggaaaaattgtaaattatttatttattttattgttatgcagacatttcgtgtccgatctctgccaatgcaaaggtttatcttctatatagatctatactcacatttgagtttaagtggtcttatctagagaaaatcaagtgattatttcttttttcattatttcggagactaattcaaatatctcttatgattttgtggtatgtttgatgcttgttttctgtcatatgctaaaaactagttctgaatacttctttctttactttgttagaacttcttttatttgcggtattactttgctgattattgtctatgttcttttcaggaactaattagtgctcttcttgggtgctctttatt

SEQ ID NO: 71763 - DNA, 664 bp, Prunus persica
  Intron number 2 from transcript ppa000153m (locus ppa00015 3m.g) derived from phytozome v7.0 (chr-ID scaffold_7; pos 10192692 to 10193355)
aacgcggccaactgtaatgccacttttcatgcccattctttgcattctaagctctctgcacattcgtttcaatggtttcatggatttaatttatacagttaaaacatattatttgttttgttttattatttattattttaagggttagtgatttacagaggtatgcttatgtttgactaaatagaggcaaaactgaaccactttattttggaatgagtattctactctcagagatgtgtggaaactgtaatttgggaccaagccgataatgatgttttatttgcttagtattgtccactgttttcttcttgcattaccatgaatggtctcggagaatcaataatatggcatagaatgaagttctacaaaatcttgtatgccagaacgttaaacaaaatcttgatacattgttaacttatgacctgttagagaatactaagttttttcacgagaatgaagtgtctttttggaatctgtattattatcatatttcttattcttactttcttaaattccattttttgtagtactttataagtgattgattttggtcagtgcagctatctagttcgaatcctgatgttttgacttattgttgattgacttagttgtttattttttttatgcagttgccaaacgtgtggtcagacagcatatacgtgtt

SEQ ID NO: 71764 - DNA, 903 bp, Prunus persica
  Intron number 1 from transcript ppa015095m (locus ppa01509 5m.g) derived from phytozome v7.0 (chr-ID scaffold_5; pos 14396992 to 14397894 reverse strand)
tcccaagactgggaaatttatcaataaagattgtggttagtatacttctatgtctgtttgccttgttttctttcaatggtggctttcaagattgtgtttttgtagattagtactgcatatggttggtgattcttaaaaagttcagacttttaagtagaacttggatttacattgatcttaccgcattctatccactttcttatacgataaagatatcgtatatccaatgaggaggagttgctatgaagatgatgagaaatgctggttcgcttgccaataactgttttgattgttgtagtggataatggattcagaaaatttaagcacaatgagttatggtgaattcatgtctgcaggtgcatttgaaatcgaatgaaaatcgagcgtgtttgacccttttagtgggttgttgtcatagcttttaaacaagattattgatgtcctgatgtatattagtttcgtcaagggtgatgatgattgttcattctccgcgtgaatttcttgtctcacatcttaaggaaataaaaatatgcaatgttcaaggtacgagttatctatttgaaagacaaaagttagggtgtgtttttctcagtagccctgagtagtcagacagtaagtatatttttcttcctcttaaatgttgggagcagtttgcagtttgtcacattgttatgtgatcatgggaaatattcgggtaagaaggaatctttgtttactaaatttactagattgtcttcctgttaggcctaacctttagtttgtcaaacgaagttgctgactcggccattgatgtggtgcattattgtcctactagcattttagcatcaaccgagatctctatattaattgtggagaatttttgtgctacaaatgcagggagaattcttcttactctttctctgc

SEQ ID NO: 71765 - DNA, 773 bp, Prunus persica
  Intron number 1 from transcript ppa008927m (locus ppa00892 7m.g) derived from phytozome v7.0 (chr-ID scaffold_4; pos 16769388 to 16770160 reverse strand)
tcacttggcttacaatcttacctaccctgactctggtatcaacgctttctctgcatcttcctgtttatctttcgttttctgagaattttatggttgggttttagtagggtttggcattttggtggtcagatttttccaggaggtcttattggacatttgtttcttgtttgttttatgcattgaggttttttgcggactgattttatgcattgggttgattattccataatatatgggtttttttttgctgtttcttggatgtgaagttcctaattcccatctgctactaatttgaagtttttcattcaaatttcttataaattattgggaattgagcttatatcttggttttgtggatggtgtctgttatgcattagcagtacggttgggatgtttgttgctgaaaaaaaagaagaggattttgtgggtttggtatcagtttaaatgggtttctttgtatatttaggcagatctaattttataggacaagggttcctagaggcgttgtttccacgtctgtgcaggagccttgatcagaataggcagtatgctttttgcacctgcttattatatttgaatttgtataataatgagtttatttataggattaagctctgttgttgtagcaataaaagttacaaatttaatttttcatttacatttgagtacagtgtgagtgtgtgcacacatcttacaagtagacaaaagtgatgatattgactgtggcatttgttttagataaaatcccttatattgaatctggtgagtacgtg

SEQ ID NO: 71766 - DNA, 476 bp, Prunus persica
  Intron number 2 from transcript ppa023785m (locus ppa02378 5m.g) derived from phytozome v7.0 (chr-ID scaffold_2; pos 16104277 to 16104752 reverse strand)
ctgccaagctaattgactgttcttctgttcaagtaagtgaaatttcccagctttctaagcttaattatactttctgggttcttctttcctaataaaacaaattctacatgcatatcatcatgtagtgtatgtatgcccttgattggtttacaagcacctaaaaaagtcatcttgacaaagagaagtgaaaaagtttttcatgaccaaaaagtaaagctgttaatttcttcctgtatctgtttctctttcattctcacctctctctctctctctctctctctctctcgcttgctgaaaaatggatggactatgcctttgctcaaaaggtctcgaaacaatagcatgaaatgaacccatatttgaattcaattctttgattgtaaatccctgttctgatattctttgtgtgagcatattctcaagaactttctctctctacagtcgtacataagcaacagtgcaaaagtggtgttttt

SEQ ID NO: 71767 - DNA, 756 bp, Prunus persica
  Intron number 3 from transcript ppa007634m (locus ppa00763 4m.g) derived from phytozome v7.0 (chr-ID scaffold_1; pos 32285557 to 32286312 reverse strand)
cttgtcgcagatcataggtacgtccgaatctaatctacccttaatcccaccccatctaattgtaattaattaagggaggagaccaaagttaattaccataattattattttaattgtctctactctttatatatcttcaaacctacaagttctacaactactatgtccatatctttaagccttgcattcatatgtgcctcacaaattaggtggtggaattaattaaacacccccacttcctccttggcggagtcctctggtgctcctttccttccactacacacaagttgtacttgtggggtaatataatccttttggttttgtctcttgtggttgctttgcttgccacgcatatcaccatgtttaggagaaagtgaatgatagccccagttagtaatggtaaggcactggccaccgtgcacttagcaaagcacaattaagggtgggtttgggagtaattttggatacgtcaacgtcacttttgaaaagaaatgaatatttcccacatgcttttccaaaaaactaccaacccataaagtcacttaatctaattcaccataaaaataattattggcatctttaaaaccactctcaaatgaactctaaattttttacaataaaatatctcgtgtgatcattagtttaagctacgatgagtttgaattaatatatattgtggttaagttaagaataatgtgagatgccattggattggatgaaggtacgtggtgcacataccagcgaacctgccattgg

SEQ ID NO: 71768 - DNA, 887 bp, Prunus persica
  Intron number 2 from transcript ppa007286m (locus ppa00680 6m.g) derived from phytozome v7.0 (chr-ID scaffold_3; pos 4666990 to 4667876)
ctgtgtcactggcccaggtttgtttctcttatcccaaggactaaaatctcattttgattggttttatgtttcgctgtaaccatggaggcattgagaagtgaaaatgattttttatttggttttggcgttgagataaatggtaaacccaagttattggacaatgaaaaccggttagtttgttctttgagggtgagggcgtgtttggtgctgattctgattgctggaaacgatgaatatgatacaaaagaggcatttgataattcatgtttgaataagtgtttgactaggaagctatgcacctgaagagtgaacaagctgtttgtgtgtgcatatcgggtttacttttctgggtgtaaatacattttaagaaacacaaaatgagagaaaaattgcaaccttttcctataatagtttttgtgccaagattttaataattgaaacatgcgtctttcaagttgaaaaccattataaagaaccaaataacatatctctgaaatcatgactaatgggagccagtccgtcccaattgtcaaacatgagccaacttgcttaacttaatgaaataaaacactctattttgttatatgttaatttatgttcaccaaattcctgacctttttttaatctatattttgccaaatctgctaacttgtttatgttattttatttatctatttttttacggaggtttgcattatatgcatgcatgccagaacggatgttctaaaaagcagtttgaatttgttcatcacattggagttttcttgcatcactgcttattttatgtgttctctatcccttagttaggtttggaaaataggcttaaatgttctttggttgaaatgtgcgtagggagtagttcactggcaaccacccaaacaggcttt

SEQ ID NO: 71769 - DNA, 698 bp, Prunus persica
  Intron number 1 from transcript ppa010515m (locus ppa01051 5m.g) derived from phytozome v7.0 (chr-ID scaffold_6; pos 26157145 to 26157842 reverse strand)
cttcatagctggcatcatcgttctcagtatcacaggtacatacatatacataatgtttgctgttattgccatttttttttacagaattcgaaagttgaagtttttggaaatgataattcttaattgaatatgtaaaagatctgtcctttttaaaattttattggctcttaaatcttcccatttggttgcaagcaaaatgcaaggaatttaaaccaaaatcccgaatttgaagaacctatagatcatttgatcaagcgaagtccatcgcgcgctgaaagagtgcagcttggatctttatcataatgctatagttattatctttgaatccatgatattgttctgaaatgaatctgttgaagggggtggggcagttgatttgtcttatagacctgagctgatagcttgaaagataaatcactattttcatgttaatgttctgttattgttgtaatattgcatgcattccggtcgaatggagttataaatataatgtttctgtgcccaatattttacagaagtttttgtttacagtctgagatttgtacccatgatcgattttttgaagcattttgtgatttgctaacatatgcaatgcaatattcaatttttagtcttttttgtagagaaaatttgtatccattactaatttagaataaattttgatcttttgatcttatttttttctccatagctgaaaa

SEQ ID NO: 71770 - DNA, 435 bp, Prunus persica
  Intron number 2 from transcript ppa006626m (locus ppa00662 6m.g) derived from phytozome v7.0 (chr-ID scaffold_4; pos 929119 to 929553 reverse strand)
tgcagcttctgtgctggagtgttatttactaacaggtaattttctttggtgggtttctatcccttgctctaaatttgccatttctatttaactgtagagcttgtttcaagtacattatgcattgtggccaaatgtttgaagtcccggaattaattcgcttttgtggaagaatcttgaggaaactgttttaaattctatgtatttcagtggctaatgatggctgcttaggtgattattctatgtccttgaaatggggatcactaattgtattttcagaaatttgagttcttttctttttctttctagtttagtttggagtttggtctaagtgctacttatgcttgagtcaattatatgtgtgatatcacaactgaaattagtgatttagtatatgcttgtcataatagtcaagaatttttttttatcaggttgtcg

SEQ ID NO: 71771 - DNA, 426 bp, Prunus persica
  Intron number 1 from transcript ppa024757m (locus ppa02475 7m.g) derived from phytozome v7.0 (chr-ID scaffold_2; pos 16642222 to 16642647)
gcgttctggggtgagttaaccttcttttttccgaaaaacaaaaatgaaaatgaaagaaatgagcctcttgatttctgaaactatgtcaaagaaaaacatggaagtacaaaagaatgaatcttgtgaactatgatgaattggttgaaggctatttggttctttcaggtctcaagaaattgaagtttataattattttttcccaattttaaatttttagtaatcttttggttttccaatcttatgtgtggttttgattgttgcattgggttctcttcaataatattccacatagcaatagactttcttcaataatgttccacataacaatagactttcttcaataatgttccactgggttttcagtcttatgtgtggttattgattgttgcaggaactgaagtgaaacccggaaagcctttcactcat

SEQ ID NO: 71772 - DNA, 648 bp, Prunus persica
  Intron number 1 from transcript ppa024348m (locus ppa02434 8m.g) derived from phytozome v7.0 (chr-ID scaffold_2; pos 13429377 to 13430024)
ctctatcagctggtgagccattctttatataacaagtttcatatatatatatatatatatatctaatttgctttcttaattggattttatttattatttatttttggttacattggcttgtttctgtaggactttttggttcaagtatttattctttaacaactctggtggttcaaattaattcaatatagtacgtttttttttttggtagatttgaattccatggaaagcgatagtctgataaattttagtcatcaaatttttcctgaacttttgtgtgccagcttatgtggaagtatcttatttatttatatatatgtacgcccattccaaactttatttatttcaagaaataaggcaatgccgattatattgttacactaagtttgccttaaatgtagagaggtatatgctcttggctacttgatttacaaacttgcaccaaaattttcttctttaccaccttttagaggcctgatcatagtgttaattgaacaagagttggtgcctctgggattattcttaatcatatatgactaatgtatctaaagttttaatagatcagaatgtatatggaaaagcgattgtgattcatatctattaaagttgtggtttacttgttacccaatacagctcttaatcttttga

SEQ ID NO: 71773 - DNA, 1004 bp, Prunus persica
  Intron number 1 from transcript ppa025017m (locus ppa02501 7m.g) derived from phytozome v7.0 (chr-ID scaffold_6; pos 21150427 to 21151430 reverse strand)
aaaacggcaaacctaccattcaagacacacagaaagtcttgcattttcccttacccgccagactttttcaaaagatggttagttaagaagattgcccagatgaacaactaccagtctatctttggtgcccatcacaactcagtcactgtcttttccaacctagtctggcttctacggaccacctttctgctgctcatgttcaaagccattcaagtgaaggcttgttagcttctaccaaatttttttggtacaggctgtgtgcatattattcccacattgctaatatattcttaaatgtacaagtatttcatcttattagcaaaagttgtccacagagcagcaacttttcttcacattttgtcagtgagatctctatgaaaactgaggagattgacattcccttctgaaatgtactcaaagtgctctgcgtttctccatggatcctgcgaaagccggagttgaactcgggtctatattcaaggtcttttgaggtaatgcagaaaggcttttgatatatatctatgaattttcaaattttcattttgctcatgtttttttcttctttttttgtgtttaattatatgaacatttgacttagatctttccccttgtgacttgtcccacccatttcatgttacctaaactaaatttataggttcatgagcttctaacgttggttgaggcctcagatcttaaaattgtctgttactttatatttaggaacacacatacacattgatgcatgtcattaaaatctctgttttcatactgcaggggaaaaaattattataaccacaggaagcatcacagcagagctgtaggaatgtgttccataatagatggactgaagcaccggaagcttcaatcgatcaactctcaatcatacaatttaacgagtaccacctataacgtaatgcattacatatgttcattttcttgatgcaatagtatctgcataatgaactttcttaaccaatcttgatttctccttgtacaattacagg

SEQ ID NO: 71774 - DNA, 714 bp, Prunus persica
  Intron number 1 from transcript ppa004375m (locus ppa00437 5m.g) derived from phytozome v7.0 (chr-ID scaffold_4; pos 13644520 to 13645233 reverse strand)
cacgcatttatatactcatcgtcttcctgcctactgtgagtcattttcatcttttctacttttcaatttcgttgttcttattgttattgtcaatttatttctttggctttcaatccgaagcccaagcttcgtctcaaccagagctccaatttttttttattgacggtatcttagattgtttttggggcttttttttttccgttataatttgttcttgtgaactttggaaccctatagaattgatgctatgcatagtctatgtaatttaatttatatgtttgattaggataatcggcttagttagttgagctggcctgaatatttggaactatgattttgctccctttttttctgaatgttttctatgcattttcctgggaaacaaacagtggttagagaaataaattgaagaggaaagtgctagtgttattcggtgttgatctgcttcagcccaagaaatttttttttttggttgacttttttggtgtatgcctgattaattttcaaaattataatatatacttgcttgaagatacgtttaagagttcagtgcatgtgtatgtatgaatttatgattatcggtgctctgtgtgtgtgtggaaactcaactgtcactgtggtggagtactattccgattataagtttaatgattttgatgagttttttctttcatgctccaattaagaaaatggattcttctgcatgcagttaac

SEQ ID NO: 71775 - DNA, 372 bp, Prunus persica
  Intron number 3 from transcript ppa002654m (locus ppa00265 1m.g) derived from phytozome v7.0 (chr-ID scaffold_6; pos 307328 to 307699 reverse strand)
taccagcggtccacaaaacattagcccacgcgttggtatgcacaataagtttattttaacatcttttttgttggtagtctatctttgttgaagatggtattaattttcttcttacatatctaacttcagatttttctattgttaattttgtttatatggatacttcctcacccctcttaacaaggcataagacgtttgattgaaaagaatttttttttaatcttgtctgattcagacatactaatgtatggttttcacttcaatgtctttcaaagttttgtgttttgggcttaattagcattcttcatccattttcttggttgctattgataaataggactacctcaactgcggaaagattggattgaaagg

SEQ ID NO: 71776 - DNA, 896 bp, Prunus persica
  Intron number 1 from transcript ppa002654m (locus ppa00265 1m.g) derived from phytozome v7.0 (chr-ID scaffold_6; pos 308231 to 309126 reverse strand)
tgaagaacccttcttctaccagccccaggttccaggttcgtcctttatctctcttcaaaacccaacatttcattctcaatttaattggtaagccttttagctcacttgggttgggtcttaattttctgtatggttggctagaaaggtaaggtgcttgtgaaatgaggccaaattgtcaaaagttatttttataatgaatttggtatcgtcaaaagctagatatttttaagccttttagctcacttgggtctcagttgtccgttttgtttcctggaaatgtaagaacttatgaaatgaagcaagattgtttctgtttcttatgttttgatttgtggaaagctatataattttatttgcatatgctcaatttcgcttttattttctacataactgactgtttatgataaagtctgatgttttttcggctctacttcaccttctgatttgaagtttggcattggcatttatgttgcatgcttcacttcaattattcatttttttgcagcaactgtttttgtttggtcttatggcaggtcgagtatatattatactgtctttttgcttactttgctttgctagtatttctctgtcaatgtcttgatcctgtatacgtgtaatcatattgtggagacatgaactatggtaagattgagatggaaatttcatatcttgccaaaaaatgctttgggtttggggacatattgccttcggatattcatcaattaccatgatcctaggatagaaaaatgagttcatttgcatgccccgtttttcttacccgacccatacattatttcctgttgcacttaactgaattggctgtaaattatgtgtgtctagtttttagttgtttgtggattgaattttaatgttccaattctttgctcaactcagag

SEQ ID NO: 71777 - DNA, 865 bp, Prunus persica
  Intron number 1 from transcript ppa007385m (locus ppa00738 5m.g) derived from phytozome v7.0 (chr-ID scaffold_1; pos 29955482 to 29956346 reverse strand)
cctcccctcggcttccgctttcgatcgcggatcaggtaataccctactccatccccgccgtactttcaatactttttttctttccgtgttatcatttatcatgcgcaaagtaaaggtgtgtctcattcaatttgttgtattcttcggatttgtgacctctcttttttttttttttttgaactgttcgctataattcatggtgtactatggaattatgctgtacgctgtttaaacttttgcctggcaccatccaatttcaggaaactatctgggaatggacccaagcaactcatttgcatcttcatttttagtttttcacactatctcaaataccaaacaatacttgttttttagtttattggttatagaaagagtacttaaggttggcaggtttcgttattgctctgcccattgcagttcctgggaattatataggttgtgtggtttgttcttgttagcctactgcttttggcaagttttgctgtagtgatatcgactacacagttactttatctaatggttattagcatcatgacgagacaagttaactgtgatgatgttgagtaatgcactccctcaaactattgtcaagctcagggacgagggaaagggtaactttgctcatcacattttgtgatttgatgaagaaactttgttagttgaatttaaggggtcaccaatacttaagagattcagacgtcttaaatatgttataaacttatattttcttccaactctttttatccttttattgttcttctttattgcagattcaagttttgtttatgttcatagttgatggcatattagacagctgatgtgcaatcatttgacttgtctgaacccttgcaggaagattgttaga

SEQ ID NO: 71778 - DNA, 518 bp, Prunus persica
  Intron number 1 from transcript ppa003434m (locus ppa00343 4m.g) derived from phytozome v7.0 (chr-ID scaffold_7; pos 22210488 to 22211005)
gcctcactttcccttctggccttgacgccccaaaggtctatttctcgtcgcttttcttcaaatttcagtatatctatgttcgccactgaaagattgtcattttgattgttgtttggggttactttatgaaaattgatttttgttatgtgagttcgtgactacttagagctgttgattgttgttcttattagttttgatgaaatttgatggatttggtgggcttttatatctgtaaagtttcgatctctgtatatgcggggattatattttttttgtttacttgattgattttatgagatcaaagcagtaaatgattgatttttgtttttggatttttgattttgttgtatggatcaagtaattatttggctgttatgttttatagatacataattcgtgtacaatttgattgattattatgggttaaattgagcaagaacttaatttctgttgaactgaaatatcacttgtgtgtttgtgtcaattcctgaagatctctttcgctgtaaaagacatcg

SEQ ID NO: 71779 - DNA, 799 bp, Prunus persica
  Intron number 1 from transcript ppa006851m (locus ppa00685 1m.g) derived from phytozome v7.0 (chr-ID scaffold_6; pos 23683058 to 23683856 reverse strand)
gctcgacccctccgttaagcgcaagccctttactggtatatatactttgatctgaaccaaacccttcaattctttagtcaatgtatgtatgtctgtttttaaaattttaaaattgagggtttttttttccttccaattttgaaaaaaaatatatggttttgttttaagtgttctcttttggggtttctgaacgatttggtagttcaaagtttcaaactttcaagcaatctatcttcccatttaattgggatttctgatgcataatttaacccaattcttgctttttacaatgtagtaatctatgttgtagcacatttttaacaagtgacttcaatgttatgcatttgaccatgatttggcaatttaggttatgttttattgtggcaaccatgtttttagtgtccgaaatttggacagtgtccagtgtccttgatacgtatgttttgagaattgatgtaatcttttatttggtagtgaatatgatgcaatcattactggaattggataatgtaacaggaggcagagagaataaagtgggaagtaaaaactctactgagtttgtgtagttcacatgttgttattgttagtctttttcttactacatgaagaaaaggcacatttgagactgtgagttgttatttgcatatttggttagtggacgtgttcactatattaaatctgatggtatataaattctcaattatattacttcctgctgttctggccatttgttatgaatttatgtctatgccgtttttttttcctggagaataaggctgataattgtgaattcttccag

SEQ ID NO: 71780 - DNA, 1025 bp, Prunus persica
  Intron number 1 from transcript ppa011355m (locus ppa01135 5m.g) derived from phytozome v7.0 (chr-ID scaffold_1; pos 36178034 to 36179058 reverse strand)
agaagaagatcggttctgggattgattatatcacagtaaaatctcttcctttattcaattctctcgaatttagcttcttttactcttctgggtgtggattttgttgtgccaaatttaataattggatgtttccatataggtctcagtttggattgcttgattgcccattttttatttgttccatataactatcgttttccatagaagagggtatgagtaagagaatttgggcaactgagaattttgaaaaacatgagttattatctatttggatatgcctgttacttttgtaattaaactgtgtatatcaatcatttctgttttgccattgatcagactgcattgcttttgaatttctactactcttatcttgtatgaatcattcaactctggctcattaaggatcagccatctttttcttttttccttctaacaactgttctataggaacttggggcttatgttagcttatgcatgtaatgtttgtcctccatcatcggatatgcattttcctaatgcttccccaatgaactctggcactctggtgtgggagtgtttacgctccatcactccagtgcagaatggggttggggctcagtcactctacttccctttagatatatagttatctgtattgtttctggtatgagcttcaccagtgaatgataagtaagaattgttacttgttactttctggtgttcagaacacaaataatgaacagttagttgaccgaagacgttttaatccactcctagaatcctgaaatgttgaaaagtaggttgtgtgatctcaacaacattcatccaaaatggtggcacttgacatcaggcagtcatgtttgaattctaaaaccaaatatggaaatcttcttctgcattcgatactttgtcaaacatgagcaccttttggttttcttaagtatctgatattagtgttttacaagtgaattggatttcctaaaatgatgcaaatttctctttttgggttgacaggttggttatcatcctgattttgaaagctcaag

SEQ ID NO: 71781 - DNA, 495 bp, Prunus persica
  Intron number 1 from transcript ppa003440m (locus ppa00344 0m.g) derived from phytozome v7.0 (chr-ID scaffold_3; pos 2611910 to 2612404 reverse strand)
cgtcttccgtcgcttcttctacttccaggaaattggtagctactaactttctgttcttttttgctcacaaattccattttcattcatggcatttcatactattttgctttacatttcttctttcttgaaactcttctgggaaagtttgcggcaaagggaatgttgcatttttagtgttcatgctattatttggtttctgggaaatgaaacatgaacttggtttcgcactgtcatatgataagaagctcaatatgaccacaaagtttgtaaatttagtttggtttcttttcgtgcattttcttaaaaaccaaacggagcatatggttatatttgaaggatcataatttgattgattgattaagttgggtgatttaatatgaaagactccaagttttctgaaatttctttattgaatgttttttgttcatcaatgcattgctgactgatggttatgaactttttcttttgctggttgttgatgtgatttggaaaggt

SEQ ID NO: 71782 - DNA, 305 bp, Prunus persica
  Intron number 2 from transcript ppa005970m (locus ppa00597 0m.g) derived from phytozome v7.0 (chr-ID scaffold_1; pos 971531 to 971835 reverse strand)
ggcctgtctttcttggagacaaagcattggcactggtagttttcttcttcttctttctcatttttttctgctggtgttacttattctcttttttagtgcatcttggtttctctttttgttttgtgtttaagcgtagaatcttgctttttccacgctttgaattaagcgttaaagtgttttaacccaaccactaatgatgaaaaagtgaaacctctctctttctctcttctttctattacttattttaatgttgttgttttgaacacacagagaacttgatagcagacgagttctcagctgaactt

SEQ ID NO: 71783 - DNA, 653 bp, Prunus persica
  Intron number 1 from transcript ppa013084m (locus ppa01308 4m.g) derived from phytozome v7.0 (chr-ID scaffold_6; pos 22698288 to 22698940 reverse strand)
ttcaactctcacttcccccaagctattcatcagcggtaaatttcaaatcaaacccatcactctcttaatttctttctgttcttttatgtttgctcgccaaagaaagttttcattttgttgttgtttttaaactcatctttcaaattggcttcttgggttaaaggttcgatccctttttttccttcctaattttggttttttttttcttcgagatttgggtatgggttttcctctgctttttgaaattagttcatgatctctacccagataatgcgaacttaaataattgggtgctcctttcgtgtagattgtgtgtgtggtttatgaactattaggccttttccattgcgtattcttgtgcttcaatctgtgtttatttttgttgtttgattcttgttttgggtttaattacaaagctgcaaactcagaggttccaatattttgactgatttatcaaaaatgaaaaaaactaaccaatatggctgcaaatctgttcaagtctttattgccccatctgtttgctaaacagatgtatagatagtaactactacataaccatttgtattatatacgaatacgaatacagagaatgttgattcatcactattattttatccatatgcaatgagcaggtctttccagattaacaacag

SEQ ID NO: 71784 - DNA, 466 bp, Prunus persica
  Intron number 1 from transcript ppa001639m (locus ppa00163 9m.g) derived from phytozome v7.0 (chr-ID scaffold_1; pos 41906184 to 41906649)
gggtaatttttctctacatctctgttttcttccttttgtgtattgtttcctctcattgtagtctaacaggttcttaatgatgcacatgattgaattttcagtttaatggtttggatttccatttctgttccttattaagtttttggagtccattttaaggaataaactttggtgggtttttgttttaacttaataaaattgagtactttcaactttcaagtttaaaaatatcatggaattctaccaaaatgtatttgcagcagtgaaactaccagtgttttagtagtatactgtatagtgataatttatgataggacatggtgaaagtgttatcttctaagctggaatgactagtttgatgttatggtgctattttgatttgtgaagaaccaattgggttactgttgatttgtttgttaatgttttattagattgaagttgattaaacaagtatcgggtagcaatc

SEQ ID NO: 71785 - DNA, 855 bp, Prunus persica
  Intron number 1 from transcript ppa001144m (locus ppa00114 4m.g) derived from phytozome v7.0 (chr-ID scaffold_6; pos 18121676 to 18122530 reverse strand)
gcaggcagccgaccagaggcagaggcagaggcagtcatagattggaccgttggaaacttggaatattatgtgtggaatgtcaattttgtcaaattcaatcaatccacttattagattgcttccttccaacacccgccaaataggttcccttcagtggaaaacccgccaacctcggacttttccaccaaaatcattttagtgactttcccaaaatagaaaatcccgtcccaacaacgttcttcaccataatcaaacatggcacctccagaccgaggctaaggtacttttctttttccttgaaaattccaatgctttttttctgtattaattatctctttcttttgtgttaatctcattcattaggcttttaacgttgttgggttgtgtctttttttctttctttgtccactgttccattgcttttctcaactttcgttaattcatgcctttgacgttcaatctgtgaaatattcctgcttttctgatctggatcttttgaaattcaaccaaagaagctttctttggtcatatgaaattcaagaccatctctgctctgcatcaaagtcctcaagaaagccctctaagctacaaatttgcatttggtattgatcccgtttcattgtttttgctttgattgagaacagggtttttattcgtatggaacttttttcaaagtcaatatccatgttcataactgttttaaaggattctaagggattggattgaccatgccaattttttatatttttctttgatggtttttttgctttggattttaatttgtttggtgatgggtgttttgtgtgttcatggtagaaacagatcgctcgagcttcggagatgcagcaacaaata

SEQ ID NO: 71786 - DNA, 641 bp, Prunus persica
  Intron number 1 from transcript ppa023425m (locus ppa02342 5m.g) derived from phytozome v7.0 (chr-ID scaffold_4; pos 20684308 to 20684948 reverse strand)
agtctggttgttctgctcaggttaacagcctgccctgctaccactgtttcattttaattttttttgcctcttaatttataaaaacaattttttagtttaatggcaaagtttgggttttgggtttacactataattgtttccctcatctgaaaaggtcaatacttgaaacctttatagaaacaatgaggtgagcttgagttctccaatcctgggttcaattctgattgttttttaaagggaaaacaacaactgtgatatgtccttcttctactcccttttcactttgactctgtcagattatgcctattgtgttacatcacttactagtatgatagtatcttttttcttaaggtgttggaagcataaattgttaggtttaaacatggctcaggagcaagctttcagggagaaaaattatcctgttgttgaccttccatgttgtaaatgtgttgttgctgttttggttcttccaataggagtataggtcagttttttgttagttgattaggaaagttttaagccgtttaagataaattcttttacacacttcatgtctttgataatcttgttataatggcttggattttttcttattaattcactcatgtaatctctttttcctttgccaatgttttaggtat

SEQ ID NO: 71787 - DNA, 763 bp, Prunus persica
  Intron number 3 from transcript ppa008930m (locus ppa00893 0m.g) derived from phytozome v7.0 (chr-ID scaffold_7; pos 22432988 to 22433750)
acgagtggagaattaacacatcagaacttgcaaaggttgggcaccatgtattctttgaaaaatgttaaaatcatctgaggttagattatgcattcggttttcttcctccgatgatggacaggccagactagtttacagtatgcctttgatgtaatattatcaacttaatatctgccagtttctctgcttaaaactgtttgactagcatgtaggtattccaaaaatatggtaacaatagtgctgatttgcattgatatcaccatgaactgtttcatttctgaagtttaagctcagtatcatccagaaagtgaaccttttttttttccttccaaatttcctatatgcgaaagagtccaacttttaggattagaagtttatgaaactgatgtttctaaaattgtttctaaatttgtactgcctctactttatatgttaaattgtggagccatggttatgcagattttcatgataaaaatattagttcgaacattttgtttaaaatgttattttgcataactgttagtctctcatcatttacttatttctatgccccctctatctgcttttcggtttattcatttttttttgtattcaatctttctgtccagcctttctcttttatagcaatatgctctacatgcctctattgaacagagaagtggaatgctatgtgttccaagaacacttttttaaaaatcttattattgatgtatctactaggattcttgtaacttctactgtatgttgttatgaaaaaggagag

SEQ ID NO: 71788 - DNA, 439 bp, Prunus persica
  Intron number 3 from transcript ppa009492m (locus ppa00949 2m.g) derived from phytozome v7.0 (chr-ID scaffold_4; pos 7154703 to 7155141)
cattccggggtcctggcctcactgaaggcttaaaggtgatgcacagctacatcattttgttttcattcaaagttaagatacaaaccactttggtttctgtggtgataaatatagggagtgtactagatatttattaatttttaaatagactacaatttcagtgttggtaatcagtttttcccatcgtggctagtcatgtgttcttgaactttgaagttttcctgtgtcattagctgatacatttagccttctaatggcttagctgcaattactagggcatacaaaaaaatcatggttagaactttctagagtaaaatttatctttcctagcattaacttgacattaattgtcaatagagaagatatttaacttggaatcactaattcctcattatttttcccgaattatttcagatccttgaaaaggttaaagtagcat

SEQ ID NO: 71789 - DNA, 601 bp, Prunus persica
  Intron number 3 from transcript ppa011771m (locus ppa01177 1m.g) derived from phytozome v7.0 (chr-ID scaffold_7; pos 19890229 to 19890829 reverse strand)
ggaattggtatgtttactctctctctctctctctctctctctctctctctctctctctctctctctcttaaagccagatcaagcattttgcttttttcttagttctcattgaattaccattttccagtgttatcagcactagatgcgtggcaatgggaatttctatcaattacatttcattaatgctttgaaatacattgggttcaactttgggatgggtatttaataatatttattttaacaatgagacctaatacaagtagtgaatatgtggtatcgtcaattaacaagtgtaaggatttccgttctgatattaagttggaaaatttcactaggtagatcttgttactgtggaaaagtttagaaataagccgtgggttgagtgcatttttgttgtttatggaactttggaaatttgagtcatgtagtattttcttgtcaatctgttctcttcatttgttgtcactctctaatattgatgatgagacgaaggtcagatgggcaacttgtttattatatgttgaattttgtggctatgtttttctgaaagatatgtttactaactgaactgtcatattttgttcttaatcacagcggtatc

SEQ ID NO: 71790 - DNA, 824 bp, Prunus persica
  Intron number 1 from transcript ppa010760m (locus ppa01076 0m.g) derived from phytozome v7.0 (chr-ID scaffold_5; pos 14001052 to 14001875)
ctgtgagtacaagccccttcctattttttcctttccaatttgcttttttgtgtttatattgtattttgaaactgggtttgagaaacgtgaaataaagttataggcttctgagtttgtactcttagtaatgtaatgttttgtaatggtttttcttccatattcaacatttactattttgaggttgaatcctactctgcaataacgcatgggtttctatttccttaataattttggttttggttttgatggattgtttctgcaaaaaataattggggaagaaagagagaaaagaaaatagttattttgcatttcagtatttttatttgttctgaaactaatatctatttgggtatgtggacataatctgcatacaacgccttttatcctcgctgtcatcgttatgctaaatgaattccaaaatttgttgtcatgttgaccccaattcacaagctttgatctttatgttggataatgagcatgctaggaagtttgcaagtcttctgtacataatcttggatatatactactggattcccccagttattttatcattacattctctgctggctatactaatgttgggggtttgctgaatatttgcaatgttaaaagtggcctgaggttcggtccatggttttaggagcacgacgtccggttccttgcttaccttgttttatgaatttgttgctgacccttcgaatgttttgctgagttaatagacctttttcttggttgatgaagttaagtgacttttgatgttacttgaataaatatatgtttgcagggcagcttccatccccagacgcaagagtggtacggttctt

SEQ ID NO: 71791 - DNA, 570 bp, Prunus persica
  Intron number 1 from transcript ppa003329m (locus ppa00332 9m.g) derived from phytozome v7.0 (chr-ID scaffold_6; pos 1516375 to 1516944 reverse strand)
gaaaagtggtcattttgtgagtggcatttgctgctaagtctcatgttttcttaaatcatttatgtgtgctttttgcttctgcatcttgttttggttgaattgaaccagacaactcttaaatcataagttcttctgtgccaaactagaaaaatggtttttctaaatttgttagtgtttattggtgattggctgattaataaatgtgggttcattctacactgtgaagaagtacttctgcattgaattaccaagttgatttgaagtgggggtttcatgtgaagatcatctaataagatttttttcaacatggttttagcttgaagcttgaaaattgtttggaaagcatgaatttttgcaaatttttctatgtcaactttgaatttctatatatttgaatatcatatatatggtattattagccttaaagttaatgtggatgtgctatggatttcatcctatcaatgtagagactcttccatttcttatattaaatcacggtttcaatagcctaaagtcagatttcatcaacttgcaggaatttgaaagatctttgtcttggaggagcattgg

SEQ ID NO: 71792 - DNA, 776 bp, Prunus persica
  Intron number 2 from transcript ppa005697m (locus ppa00569 7m.g) derived from phytozome v7.0 (chr-ID scaffold_3; pos 4192012 to 4192787)
gcagggtatgtttctggtcaatctcgttcttgggttttggttaatctcgtcctgttgatctttgtttattttattttctttttgttgctttttatggtcttgtgtggcctgaaaaataggctttttttcatgctctgcctcaagactttttctgttgtcccttttgtttttctttacaaatagatgattttctgtttgcttgcattttgtgcataatttcggtaatggcggcatgttattgttgcttccatctgatgcatcatccattcagagagattatcaactggttgtggggccctgttttgttgtcaccaccaccatggcttgccctcacacgtttcatccatgcatgaaatgtaccctcatgctggtcatgcattttatgccctctttttactcataaaatctttctatgtggggaggggtggcatgatctgttttgcatgatgaatatgcgtggggcatgtgaaacaaataattttggccaattgaaatggtaaaatcacctatatgtatttatgtgccttgtcttttgtacttgtttttatcttttatcttttgtactcttcctttgatcttctttcttgaatgtgttatgctagcaaataatgggttgctctcattgtaacatagcagatgatccatgatttacattttgcatgaatacttgtagcagttgttcactcacaaagcgtccaaatcattatatcttagtcaatgcctaactcttcattatttttgtgaatcaggctgaggggcttctggttgagcaaaat

SEQ ID NO: 71793 - DNA, 555 bp, Prunus persica
  Intron number 2 from transcript ppa011206m (locus ppa01120 6m.g) derived from phytozome v7.0 (chr-ID scaffold_1; pos 22457878 to 22458432)
gtcacttgcgacgctgacaatcgggtcacacgactgtaattcatctcttcactttctcctctttttttgagttgtttaatgctttggttaagattatgtgtttatcttcttcttttttagccaaaaggattgtgtgtttatctgctctctggttcttagattagattctccaaaatattctacttggtttacattaattattaatgagctaggttgctgtttttgtttactataaatagagtataaaatatatggaagtacactgcatttcgtttttatatatgattcattcccccttccttggaagcccgtgatcaggcggctcacacacagttcaaaagaaattaaaaaggaaaaaaaaaaaagagagaataaagaaaaaccatgctcattttgtgtgcagttcagcttcttttgttgttctctcccttctctttttgtattgtgcaaatgaaaaaagattgatatgaagttgtttgggttgtttgattttattttgtaaagatgaagtagtaattagtgtagaataatattgtatgcgcagagaccttggaa

SEQ ID NO: 71794 - DNA, 447 bp, Prunus persica
  Intron number 3 from transcript ppa015668m (locus ppa01566 8m.g) derived from phytozome v7.0 (chr-ID scaffold_1; pos 25394445 to 25394891)
cctcgagttcaaatccttcacaatcacacgtgggtaacccaaaatgcctctcacttcgttctgttctgatgactttttctcagcaaccaaacagttttgagtttcttaatatgggcttttgaggttggtcacatcacaatcaacaattcatcattgtaaatattgaaaaagaccaccttttaagacgagaccgtggaaatagttgtattgttttcactgctttagcttttattgaaaattttagaatcacccactctgtgctctctatcccaaagccagttcctagaaacagagaagacccacagctccaaggctcctcaaagtgcctctatgaattatttattatatgcagtagatggatcttaaatagcatagacattctgcttaacatggactaatgttgttttgacaggacttcgttggtacccgagtgttgatccctgtgct

SEQ ID NO: 71795 - DNA, 912 bp, Prunus persica
  Intron number 1 from transcript ppa014844m (locus ppa01484 4m.g) derived from phytozome v7.0 (chr-ID scaffold_4; pos 5488694 to 5489605)
tttcagtactgcagtgagtcttcaaggtgatgaactagcacctactacgtactacttttgtggatctcatttttctctttgctttgctttgatgggttccattgttttattttttaaaatatatttttggtttattttctcttttttcttttgtcagaagatcttgtgttttgattcatgggtagggctaatttttttacctttttctttttgcaaacttccacgctttgattaattgtaatgtgtttgatttgtttcaattctcaactcctctccttccttgtgtcatgttgttattttttgccagttttggttttgttttctggagttcttctactgatgatctggtcctactctctctcctccctcccaatatattattttttaattttcttttctttttttctgagcaccgtcgcaggttgattttgacacagtactaaggtttggttttgagttttggtcctttagcctcatcagattcaaatgatttgaccaattgagtacatttacttgccatctgcgcagatctgcatacctagggttttcctatagcatattaatttctgacagaggcaacttcatgattactatgtcagataaaaacaaagaaaataaaaattcatgattaaattattacttctgcctcagcacagctacaatctctatcgtctgatcatactctttactttttgtttttcttttgttctacttgctcttccttgtctgagtcataattacttacattttgtgcaagtgcatcactaaataatatattgaaatgatcaaattgtatcaaatttatacattaattccttttcattttggataaattgtatcaaatttatacattaattcagtggattcaacggatattaatgtcagctgcattcatattttgtatggtttagc

SEQ ID NO: 71796 - DNA, 573 bp, Prunus persica
  Intron number 1 from transcript ppa023484m (locus ppa02348 4m.g) derived from phytozome v7.0 (chr-ID scaffold_16; pos 98900 to 99472)
ggaaacatcaggaagaaaaggtaacatatctgaactttgaattctctgtttttttaaaaaccattagacgtcgttattattaataagaccgtcgtttgaaatacataccacgacgattttaaaaataaaccgtcgtttgtatttcaataccacgtcgtatttagtttacttgttttacacgccattaaacgtcgttatttttaaaactttgtggtttttagacgacggagttagtcattcccgacgtaatagatgaagagaagaaagaagaaaaacaagatgaaaaggagaaagaagatgacgaccaggtatgttcacataactttgccttttttatttgtttttcaaaattccagacgtcgatatttttctttaaaccgtcgtttgtctacaacttagacggcggaatttttttctaagacgtaataaattattcaccacgacggtttcttcaccgtcgtttaaattcttttcagacgacgttttattccttaaaccgtcgtttttattgaattaccacgtcattttttttatttctttaaacaggttattaaagttgttgattattcaaat

SEQ ID NO: 71797 - DNA, 606 bp, Prunus persica
  Intron number 1 from transcript ppa007002m (locus ppa00700 2m.g) derived from phytozome v7.0 (chr-ID scaffold_7; pos 10183081 to 10183686)
tcttcatctcaggcctcgttgtcaatctcattcaggtaaccaccttctcgcttttctcttcatggttctggattttattttcgtaattgcgtagatttggtttttggttcactcatttttcagtttctttttgttattgatttcttcatttttgggctgtattttatgagggttctgcttctttcctttccggggtttcagtataagttgcttatagtgattgattttagccttatgtttttgttctttctcaagtgggttctttgggcagcgtacgtctctcagcgtgcatgtgaatctcggctttgcttctactttctaatctggcctgtataattccaatgattcggagaacaattgggaatgaaacgaaactctagaacttcgtttttgaatctcacatgctgttgagtccattgagcttaattctattattcaaaactgagttaaaatttgagatttaggagttcacttctgttcttttttttctgttcaattatcatatcgattgtatcattttcttttcttttgagtttttaatctgtttagcatacttggtcaattgtttcaggcgatttgcttcattcttattcggcctgtgtctaa

SEQ ID NO: 71798 - DNA, 847 bp, Prunus persica
  Intron number 2 from transcript ppa007002m (locus ppa00700 2m.g) derived from phytozome v7.0 (chr-ID scaffold_7; pos 10183740 to 10184586)
tggtgtggctcattgattggtgggcaggtgttaaggtattagctagccccccatatcgtgtgattttagtggttttgattgatttaacttccttaaagtgcaaataagttaatatatgttgagcatttttaaagtgctttcccacttattctgctagcttgtaactacgtatttttcaaaaaaatctttgcccatacaattgtacgaaccaattattaaggttattgctggcttttgaaagattcaaagcagcaattgctaccataagaaagactagaagatgtaatgctgaaggaggaaatccaagcatgtggatcaaattttcttctcataagcttgtataaatccctaaaatgctatcaattcaattcctaaactaggaaggttttggttgcatatttttcttttggggggtggagagaggcgattggttgcaaatttacttgtgttttattagacgaagggcaacagtgcactgtctcttttatccgtttcaaggtggtgagagagagtaacttatcaagaaaaaaagaatagtgagagattaagatatcctattgtgtctagtggggtatcactctaatatggacagtgcattactgggtcgttatatttccagtacagttgaaaactttagtataggaacatggaaaggcgaatagcatacacatcctatttatttacctattttatagaacctttagaaaagttatatatatgaagacccacttaactcgaagttgaaccataatttatttttttccatgtccacttaactgaatcttgatttagttaaccccctttgtttttttctttttctttctgtagattcaagtttacacagacc

SEQ ID NO: 71799 - DNA, 958 bp, Prunus persica
  Intron number 1 from transcript ppa010308m (locus ppa01030 8m.g) derived from phytozome v7.0 (chr-ID scaffold_5; pos 16635061 to 16636018)
aaaggcaagctctttgagtactccactgactcctggtaatatatacctccacgtccttcctcctatatatatatattattattcatttaataagtatctattatttatttttgtgtctgtgtcttttttagggtatttctctctttttgttcatctaaatttattacccaattctaccagtacgtttcatttgttcatgcactagtttttttgtttcgacttattattagatccatgggcttttgagattacatttttcatgagtgagtatcttttctggggattttcttcctctatatttaatttgatttcatgcaaataccagatgttggttgaggggggagagagagagagagagagagagagtaaatatgggacggtcgagctgttcatccatgtaaaacaaaaacggaaaggaaaattgttcatcgcaattaacattaacattcttaaaccccaaataatttgtatccttaattcttacttaggaattctaagttgccttgccaagaaggcggacttccactttgtgaaacgtacagcagcctggaatatccctaatttccctttcttcttttaagttattaatatataatttatatataggggtctataagaaaaaatatctatatatataggggggtctgtcgtctgtgcgtgtcttacaaactttatgtaggctcaagttcgtatcttttttgagtacatattggggagggaattaacctcctctatcaattccattataggatatgtgagctcagattttaattcactctcacaacacaagggttttgtgctatatatatttatatatgtacggtacacctcaaattaatgattttagcgtactgtctcctgactgttatttgatcttgaatgaagtttggtttataggaactatataggagtagttgctggtagattatttctgaatgaatttgttaattataacagc

SEQ ID NO: 71800 - DNA, 566 bp, Prunus persica
  Intron number 2 from transcript ppa011780m (locus ppa01130 0m.g) derived from phytozome v7.0 (chr-ID scaffold_2; pos 17574303 to 17574868)
attttctgggtaactatctctctccctctgtgtctgtgttaaggatcttcgatctgccagctgatcattttctgtattatttgtagaaacacataaacaagagaaataatttttgggttgcttctatggatctccattctttgctagctttgtcttatatctgaacgaatgcttttgcttgacttttataagcttgatgaccctgttttctcatgtgtgtgtgtatatacatgtgtatgtgtgtgggtaaaaagttgaatctttgatgcactaaccaaaaacaaaagaatcaatgaaagttctcattcacttttgcatagatccacagcaaatttaagttaaggagaaaagatctatctacttttgacatgtgggtgcttgagtttacttataactatgctaaactaaatcaggatttttattgatactttttttgggtcgacatatttggatccacaaagaatttgatataaatctgttatactttttaatcttgctgctttaagtttctgaatttgctaattatgtatgtgtgacatgggttgaatgttttatgagcagctgac

SEQ ID NO: 71801 - DNA, 496 bp, Prunus persica
  Intron number 1 from transcript ppa004934m (locus ppa00493 4m.g) derived from phytozome v7.0 (chr-ID scaffold_1; pos 12913843 to 12914338)
actctgttaccaaaagcaaggtatgcgtttctcaaatctgtgtttttgttctcatttaatttctattatatagatctgtgttgttttggtagttttgattcgagttttgctgactttgatatgattggtttcatttcattgcattctaaatcttatctgggttttgcttcagatctcatttcatgctggaatttagatttgagatttgagattgaccattagatccatagtttcatgcttattttaatatcttcagcgaagtgggaaatagaaatgcttggattatattgattttattacaattaactagaaagtaagaaatagtaagctaattttccagattagttggctttgccgtataataatggtggttttgttgacccagattcttataactgcctgattaattggaaatttcaataattgaatggatcttctggtttttgttttgtgcatgacagttcgacaacttgtacgggtgccgtcactctctccc

SEQ ID NO: 71802 - DNA, 580 bp, Prunus persica
  Intron number 1 from transcript ppa007077m (locus ppa00707 7m.g) derived from phytozome v7.0 (chr-ID scaffold_3; pos 7644581 to 7645160 reverse strand)
ttcagggcgattattacattgcgcctctgttcgtatgatcatatcctgtttgtttctgcttcttccttttgtgtttcatccaattttagtgaaattaattaagttgtgagtaatgaattcttcattttgagtattaaacttcttatagatgtgaattcaatgatcaattgaattgattcttgcagtagcaacgacaattcttatgatcgattgcaaactaattatttggtatcaatgtgaattctgtgtgaatttattattagttgatatcatgtatgtagatcacaataattgatctttagcctcttttttctttttttttcaattttatttttatgctgacaatatctggtaagtgattttgtgtctttttcgttgcctttctctttgacaggataaagttggtaagttctatgatgctgggcaaaaggttagaaaaaaatacctgtgatgtttcgggtaaaaaaaaagtaggaaaacttggtaataatcattgtacctatctcaccttcctgtgctacattcttttccaatattttctacagtggtgttggtggccatttgctatatatattttgac

SEQ ID NO: 71803 - DNA, 395 bp, Prunus persica
  Intron number 1 from transcript ppa023345m (locus ppa02334 5m.g) derived from phytozome v7.0 (chr-ID scaffold_1; pos 4043483 to 4043877)
cacaaagggttttacctgagctccattgtatgcaactgttctccccttctcaaaagatctggattttcttcttactttagtttggtccataccattatcaaatttagacaaatcacaaactcctaattcaaatactgtaactgacttctgcaaagccaatatccctatgtagcttctaaagtagtttcactttacggattctgctagacttgtgatctttatcttatgttaaattccacagacaagttcctttgcacatgaacaacatttagaaactgaaattctaatcctgtcatgcattattggaagtgattcatttacacataattacagactagaaaaggtatatataatgacgctttctgtgttgtgcttctaaaatttcttttgcagat

SEQ ID NO: 71804 - DNA, 930 bp, Prunus persica
  Intron number 2 from transcript ppa011756m (locus ppa01172 2m.g) derived from phytozome v7.0 (chr-ID scaffold_1; pos 30461689 to 30462618 reverse strand)
cggccctcagtcagaagactcgcccggtatctctctctctctctctctctctctctctctctctctctctctctctccaacttattactgattttagttaaataaccaaccccccaataatttcataatttcatctccatactctttttctggtttttgtactttgtgagttacaaaaatgaacaaattgttttaataacgaaatgagttacaacaagtaaaaaaggaatgagcattatcatggcattagaataaaatttgcttactcaaatgagaatatttaaaagtaaagtacagtatagatttgaccaagtctctagaagtttagacacacgggaacattctcatccacatatttctaactgaacctggaaaatatctatgcatttttagtcttggacttactggcgctgaagaatgtttgatctgatcaccacagcacagctagcacccctgttgctttacccttatgagagaattcatccaaggagaaacacttgcatgaaacgaatagcattattttgttgcacttgattaatcacagtatgttatgcgtgataactttttcacgtggcagtctgtgattagtcgagaatagcaaatttaaacatgttatctccgtttcacacaagtttttccgccatcccagactaaaaatggttttatacttagatgggtttagttatgaaagttacaatgtcatattgcaaatttctaatcttttatataattatgttaatctagatgaaagaatatttggttgaatgtgcaagcatcaacttgtcaagaataatacacgtgacattaacaaacaacattaatttgttttagggaaatgtacaattaagttgcatgtgtacaaatgagagagtgaattgttgtatgtggcgtgcagggaaagttcccttctccgcttcttcccattgaagt

SEQ ID NO: 71805 - DNA, 909 bp, Prunus persica
  Intron number 2 from transcript ppa013157m (locus ppa01315 7m.g) derived from phytozome v7.0 (chr-ID scaffold_1; pos 44454175 to 44455083 reverse strand)
gttattttggagatcatcccagaagtcttattcaggtaggtggatatatgtaatagatataaatagtatatattttttatatataacgtacgatggttgttaaatatgattagttgaaaaatattcatagtttctgtgcactttaaaatgtacggagaaaatagtcttttttttccaaaagaattaaaattttactcctggaaaagtaaaatatataaagtttctgttcactaaaacatgttggcatccatgattgcaactctttcttttaagtaactgaattttgcctcagatgctagtcccacgctcttacatccttaaaaaattatctttagtccacatcttaaagttattcgtaataaactccaatctcttcacgtgagaaatcttataacactttagcaatcttaagtttgtaactgcacctcttgttgacccacgtgattccaaaagccatatttagttatgattcctggagatgtgaactttcccgttatgtttctcaggatatattagattgtatttaatgtgtgcataagaaaaagtaatctgatacttgatgttcaacatttccctttagttttgtctgatctaaataataaatattcaaatgagaacattaggtatgaagataggtacaatatttgattgaaaatattagagcattagatcctgctgcatttcccatcaatcatgcctgctttcacatttacgcttctttctgtataacgttgccaagtgtattcaagcattgaacatcataaatgtcaaatgattttgaatgaacctctctctctctctctctctctctctctctctctctctcaggtgtattcaatcataacatcatatatgtcaattatcttttctacagagagggcaggaccttccttttttcctgcggaggct

SEQ ID NO: 71806 - DNA, 680 bp, Prunus persica
  Intron number 1 from transcript ppa000667m (locus ppa00066 7m.g) derived from phytozome v7.0 (chr-ID scaffold_2; pos 12707471 to 12708150 reverse strand)
agatttcctgccgcctcgctccgacgcgcccgaaggcatgcctttaaaaacactgatttcatttgtacaagtaatttgctcatgcattgcattattctttctgttgggtaatacgttgtatttattattgcttgaatcatgctttagctgttttttaattttaaaatttaaattttcccatcagtgaaaggactattcttccataattctcaatttatctgtattaacgacccatgtatttttctcacttttgcctcagggtttgacaccttttttttaccagttcttagtaactatgggcagctgtccagcaccatttgtgagcctgatgtttctcttttgttattttattctttcgtttctcaggagtttcatagagttgggttcagtttaaatcatttgaatcttcttttgggcaagctggtcacaggtttatggtttcttaggaaatggctgttcgtacctgaaatccaaagtagttttcttaaatgagtttatgttgtatttgatttttggaatatttttgacgattttatactgcaagtattgtgtagcttgacgtttttagagtatttcgatggatgctgtgctattgaaagcactattttttgtttatttataatgattatgattaaactttgtcttttatttcacatttttaggaacgttttctgaacttt

SEQ ID NO: 71807 - DNA, 596 bp, Prunus persica
  Intron number 1 from transcript ppa020230m (locus ppa02023 0m.g) derived from phytozome v7.0 (chr-ID scaffold_8; pos 927153 to 927748)
gcttcttcactgtatacctacctcttcctccttccatttgtctctacttttcactccactaaaattgctaattgatcacgtttttagactgcattagcttgaccacatgatttattacatacatatgttgtattatgaacattaatgatgttcttacgtttcagttttatcaaacaaactacgattttttttattttttatttttgcacattgacgattctgatcattgaactacatcgttgagtagccctaaataaaatacgcgtgcatttttctcaaaataagggcacttttatgtatgtatatgcacgtatattatctccttacaaagatcccttttgatgagtagaaaaaatggatctcattgttggagtcattcaacaatgttcctccttcaaaggttattccccaaaagaaaaatcatccaaatctagaagattttgattatctatagttcactaatttttttttaataaataaataaataacttgtttcttaattataaaaatgaatatattgcagtatctggcacgtataatatttctttgtcaagtttgagtggtagtggccttgatgatttggcaggtgacaaatc

SEQ ID NO: 71808 - DNA, 592 bp, Prunus persica
  Intron number 2 from transcript ppa020230m (locus ppa02023 0m.g) derived from phytozome v7.0 (chr-ID scaffold_8; pos 927940 to 928531)
cctgacgatcgcatgtaaaccaccttctatattaaacgcaatcattggctatgcatgaagtaattaattcactttcccacaacaaaaatgggaggttctcgaataagtattttatgataagaattagttacatacttttaattttagtcattaaaatatattaatagtttcttaaatgcaagacaccatagaagtttgaatctgagatcattaatttgcaaaataaggctcttttccatttagctagatctcgttgacacctgcttttctaaactttattttacatatagattattacttcacttacagatcgatttcatctgctttaacaaatttaattattataaaactaatagtcgtatttagaaaaattaggttacataaaagatgtttgtatctagttgatgtgatgcgtagtctttgatgatacttatcttggtaattaagacaataactttattctttcaaaaatggtacaacaaatagttctgatactttaatctatgtttaaacttaattacctaacatgcaataacaatttttggtgtttatacatgatgaaagcagggttttgcaaaagtatagtgagata

SEQ ID NO: 71809 - DNA, 994 bp, Prunus persica
  Intron number 2 from transcript ppa012858m (locus ppa01285 8m.g) derived from phytozome v7.0 (chr-ID scaffold_5; pos 9109144 to 9110137)
tgctcccactccacaatcccctcctgcaaccccaggtaaccaaacttctcttctatgtttaccaaattcaaaataattatttgcatcaaaatttgagttcagggtcatcaaaagtcaattgggtaacttaaatcctgattagcagagttggattttatggtcactgattattatgagcaagagttggggcttaaatcctgggtttctattttattattacttttcttaaataaaataaaatattctgggtaggtcctggtttaagtttgattgtcctcgcaaacgtgaggtgggtgagtttttcatgatagtgtgtccggcccattaccaccaatttgaattattttatggtgcattagaatagtttagaatttctccattgtaaaagaaaaaaacttcggtttgccttcacttcacctgttctgcaattcttgtgtgattggacccgtaagaatcagtaggtaaaatgagtgatggccgaatagagccatgccaagtgttcgagtgtaatataattttggtaacattttgttggtgccttccaagtttgactgatccatagaagattcaaaagcaagccactccaccttttggcatgtttcctgtgtcgtgcttatgtatttctggctcctgaaaattcagagttcgaccgcaaacagtaaaagaaataaaattttgaccatttcgtgctcagcagtcaacagtttgtcatgccctttcagattgttgaaaattattacttgaaaaaggctgaaactcgcttgctaaaccaatttatgcatgaatattattattttgtttttaaataaaagctatagtttaaattaatctgatttatagaaatgaagattcgaatttagttacaatttgaaaggggtcgagcttattgtcctggtcgattgacctaatcgatgtttgctatatgaattttttatatattattattattaaatcaagtggtaatttaatcttgcaggtgcaccaaaagctgacg

SEQ ID NO: 71810 - DNA, 453 bp, Prunus persica
  Intron number 1 from transcript ppa009626m (locus ppa00962 6m.g) derived from phytozome v7.0 (chr-ID scaffold_8; pos 11636285 to 11636737 reverse strand)
tcagaaatttgacattctcgataaaaaagattccagtaagtttgaatgtgtgtgcgcgtatatgctttgtttttttttttttttcggtgaacctatatgctttgtttggttgctgagaaagttgagaaacttggaagtggacagaagctttttaataacgttaaatttgaaagcaagaggaatgtgagtaagctggagaaattaggaatgttggattcaattgctatagctctgtttggtttttgaggaattgtaggaaaagaaaaatcacaatttgagtgttgagttttgtgctgttttgctttataaaataattgagaaaattgaattgtttaagctgaccgagttagtgattggtatggactacagtatgggaaattttgagtcattgatttccttatttgttgttttgctgcaggccctgtgacaattgcagatcaaacagcggaggaa

SEQ ID NO: 71811 - DNA, 766 bp, Prunus persica
  Intron number 2 from transcript ppa011072m (locus ppa01107 2m.g) derived from phytozome v7.0 (chr-ID scaffold_7; pos 19722447 to 19723212)
cttggtgtgcttcttgccgtgcattatttcctaaggtaatctcctttgtcacttgaacatttcttcataattttgttccagtttttaactacttgaagaaataaaagtcaagtcgtcttcattccttctagttactttctgctttaaaaactttcgtatagtttctgagacaataaatccgtagttgtttgaccttaaaacaagcggcgaagaaggtaatgttcatatgcgtatatgtgtaaatacatacatgtatactaggactggtgtcattgaaacctttcctggtttgcgcttgctaacttgaactgtaagacttcaagttcattggaatggtttgattccagatgtcaactgtacctaaggaagcagtggcatgtcttgttggagaactcggaactaattctggtcagctgagtgttttctttggttgtttcactttttcctggttatattgcatgccgcctatgttataaataaacaagaagtcacccagttcaaactgctgtatatatgtttttgaggaggcgagatggctttactacccaaagattcagcttaaatgtccaatggaacataagaagtcttcaattttaaaaattcatttcgtaaaaatctcctcgaaactacttcacttcaatggaaacttagataatgttgaatgtatcacacttgattttatatagttgaggtgctgtgttcctgatattgttgtttaatgcatgtgtcagctctgcagaacagctgaagaccaccctgagatttt

SEQ ID NO: 71812 - DNA, 519 bp, Prunus persica
  Intron number 5 from transcript ppa009861m (locus ppa00986 1m.g) derived from phytozome v7.0 (chr-ID scaffold_1; pos 37329102 to 37329620)
caagtagtttgtgaaatcaaaggtggcacactacctatgcactagtaattcaaattttaggtagaagtttgcaaaccaaccaattaacttgtactgtatcatgttcacatcttgcattggtggtgaagaaaactagagaagtctaatttggcgttgattgttagtcgatactaatgtcacacaatcaagggatttggatacactttcaccgttgacttcagaaacatttctaatgttcgagagatttgaatcctgaaacataatctctgttactggaatggaaattgacagctttgtctagtatctagtggttaattattatcttttttgaggtccttaaaagactatgtatgtctgaactccaatatgcttgtttaattcatgttgccaattcaaataatttgaacttttacaatattagtgtcaacaattatattggactttgttatatttccaagtaaatattgtttcgtctcttactgtctgcagaaattggatcctcaaaatttttcaggcttg

SEQ ID NO: 71813 - DNA, 458 bp, Prunus persica
  Intron number 1 from transcript ppa001632m (locus ppa00163 2m.g) derived from phytozome v7.0 (chr-ID scaffold_6; pos 8071321 to 8071778 reverse strand)
ttaagaaacaatacaaggtaatttccatgtgggttttgtgcgttttttattgagtatgtatcgagttttgtgtgatcaatcattaatgcggttgttgtttatgcacaatctagtccatcatataatgtaggaggatgaaacaacaagaaagttaataaagctctgctcgaatttgttgatttatttcattctttatcgagtgaggttgcattgaaattttttgaggatgtgtatgtcctttgttctatgatggttcaagggctatatttgagttgatgtcccatcacatgcattcttctttcaaatcttcctggaacttgtctgatttatgtaggatttgttattcaacagtgtttaactttttgtttatgactgcatttcctttttctttcctctaatgataattggggttcacattgataggaattgggagatttgggtcttgttgcaaaagcaag

SEQ ID NO: 71814 - DNA, 754 bp, Prunus persica
  Intron number 1 from transcript ppa011596m (locus ppa01159 6m.g) derived from phytozome v7.0 (chr-ID scaffold_7; pos 18175926 to 18176679)
tctctttccgtgatatttaccaactactttgattggtctgtactaccaacggcttctaagccatccacgggatttagtagccgctgtgtagtaatctctttttgcatttcaatctaaagccatttcagaatttcattatctcttgctctgggttttacttcagttgcttctctgcaactcgatcggattcaaagcccaagtccacagctccctgcgattgggtgtggcccttgtttgacgagggtccatttctcaacagcccattttgaaatatctcaacttttctttttggtcaaatccaatcagaaatatctaaggagttgaaatatcaggcatagagttttacctatttgcccccaacacaataatatcccgcactaatacagctgttgcgtactacacgttttattctagcgattcgatcagtctcaaccaccagaccataagtcctcaagggccaaaatatcaaaccccaaattcgtcatttcacaaataaccccgcacgtgccaccgctgccacatgcgcccgaacgtccacgtgtcctccaagcttgcgaagaaacacacaaggaaacacaaagcgaaaggccaacagcaaatggagagagggcgcacggatagctgacgcggcaaaacatttttgaaatcccgcctaaacccaaacttcaattttttttcgttagtcgaaattcaattttgccccttcttattttttttaggctgcacgaggcccctcttcttatccctctcactc

SEQ ID NO: 71815 - DNA, 623 bp, Prunus persica
  Intron number 1 from transcript ppa000170m (locus ppa00017 0m.g) derived from phytozome v7.0 (chr-ID scaffold_6; pos 28081988 to 28082610)
cacctcacgtagccacgtgcgttccccctattctggtaagtcgcttctgtttcccttctcttcctacccctcctccttcttcttaggctttgcagagtgttgtacaaacgacaccgtatcggtcgagaataccaagtattgctgtggttacgcggcgtgctcaaaatagcgtgaagctttgattatttttctatttgcggagatagtaattttgttttggtttgcccatatagaaaatctaggtattattattattgtaacttgaaatgtgggcttaatttacttaaccaaaatcatttcgagaactttgaattctgccctatgtctgctcttacttgaatagcgagcttggattcttattagccatttatcacacagagggaccgaatttgagaaaatcgtacggatgaagctttcacatgaacttctaaagccattttgatcctcaattactagttgaagtataccatatcaaagcttttttttttgggggtttagggtcacagtaaattggagtttgttactattgaatgaaatgctctgttcattgtttgagactttttaggtactgattttaaggcttacttgtcattttgatgtgcattgatattgttgggcaggta

SEQ ID NO: 71816 - DNA, 629 bp, Prunus persica
  Intron number 1 from transcript ppa015353m (locus ppa01535 3m.g) derived from phytozome v7.0 (chr-ID scaffold_4; pos 384191 to 384819 reverse strand)
cagttatcagcactgttgctgcaggagatacaccagtgagtatactatacttatagccaaattcttgctacagctttcccaccgctaactatatatagctagctaatttgaagaaaatatatgacatggtataaagaatcttatgtgaaatctcaattttgttcttctaccaatattaccatataatatcctactgtacatatatttttatgaaaaagtcataacatatggaaaacaactcttatatatgtattggtgctgcataatatatcttgtacatcatattccaatttttgtgtgtattatgtattggtactgtaaaacatggcctatgatgatgtctacttttgtctgagcaaaaaatactttgacagttttgagtctgattaagacttttactccacgactgtgactggaatgctgagttttttatgggctattctagagcttgacaggcagatgtaatatgttgctagatctgagtcccaaaatcgacctgagattcacaatcaagcaacatataatacttgtttcgtttcttactctcgtaccaaattgagctgtagttaaattactgctaattgatttttgcaggacttggaactcacggggactacagaaatttcacc

SEQ ID NO: 71817 - DNA, 405 bp, Prunus persica
  Intron number 2 from transcript ppa010930m (locus ppa01093 0m.g) derived from phytozome v7.0 (chr-ID scaffold_6; pos 12192532 to 12192936)
tcaaatattgtagtcagtttccgtttaactttaatggcctcctaaatgtgttttgtatttgttctctttcctttttcttcttttacatatctgagaacaacccaatttgactgtgattggttgcttaaaaattgtgggtaaatgggaagatactagactactggatcccagttgtttaatttggtttaagctcctgaaatatgatcaaccataaaagtttctcataatttcgatctttaatgtacgaatccttgaggaagctatttgtctatatcattttgatcaattacgattataattcattcacaggaaggttttgttttgttttgtttttttgtttttttggggtgggtgtattttatttttcaactttaatttgtatttgtcaaatttcaggtcagacag

SEQ ID NO: 71818 - DNA, 1023 bp, Prunus persica
  Intron number 1 from transcript ppa000933m (locus ppa00093 3m.g) derived from phytozome v7.0 (chr-ID scaffold_1; pos 18572111 to 18573133)
cactacaggtcagtttctctatccatgtgtatgcaacaagaaatcttctctctctctgcctcccttcttctttggtaatggtaaatccatacacacaggggccatatgtaactgattgatccgaatccttttttttctttttctttttttcttttttgtgtgtgtgttttgtgcctctttatccaaactttgtaggttcaaatttgtaaaattagtagatgttgggaaaaaaaatttggtataagatcttcccacaagttccctaaagggtcatagaaaccgttcaacccactaaggggagtgaaggaaaaacttctggttaaaagttgttcccattttttactttctattgcatgcatggtgttaggttctcaggaaaagatatcgaagcattagataagagtccaaatgtgtttttaggatctgtatgttgtttttacgtcttatttcatttttagatgccaaatattatccaatagttggaaagttgatatacctctcgattttaatcgtcatgctagtatgggtatttatattaatcaaaacaataaatactagggtaggaatgtgcagaatttgtttcacttcattttccattggaactgcgtcaattgttgttagactacctaagacacctccagatttctgcacaggtatcttaatgcttatgatgcagcaccattactaattcttgtgagggtgcttcccaagatcctgtacaaattgcatgacctatatgctttacatgtattattgttattgtgaatattaagtatgacaatgaaatctattttgatgacaattttttgcaggctgtgaatttgaggaccacggtgcctcctcgacttcttccccaggtacaagcagaatattgtttcttgcccatttgtcaaaatcttatctccattacaacccaaagaaaaataaatttttttttgaggaagcaaaaattgtagtattgttttccttgttaaaattttctgcacttcttacaaggtaatctattgcttgcagtgcctctca

SEQ ID NO: 71819 - DNA, 818 bp, Prunus persica
  Intron number 2 from transcript ppa004991m (locus ppa00498 1m.g) derived from phytozome v7.0 (chr-ID scaffold_3; pos 19158191 to 19159008)
tcaactctgtaaggacgccgggggagctatttctggtaattccaaaccacttatcgattgtttctttgaattggtacattttctttgaatatacttaatggattttgttaatggcgcttataattcttcagatctagttcattttcctttgtttagtagttaagcttgaaacttttgatttcatataatcattcgtatatgcgtggatatgatttgcacattggattttatatatggatccgttttattgataaattctcacattgaaaatggaaattgagctacttgctcatggatctgctccaattccctaagtatggatttgagttctgttgcaattccgggttgtgctccttctgattctagatctaccagaatttttgtagatctaattttgttgtttataatcaagcctttgtttttgtttaagcaatttttgtttggataatggaaacgaagcaatgaagaaaaggaggatttttgaaattgtttaggctaaaggtctagatctgggaaccgggtttgaaatagaacaatggctatattagatgatatagttgataggggtatattctggatgagccattttcgtaaattgtaagatcaaacagactttccgtccttgaattgttctttgctgcaacatgagagtttggttcagtgggtgaatatcaaactcaatttcatatgatttataggcagtgaatactgaaacaatatctgaatatgtggatcgtttccattttgttttgttttgtcttttcgcgcccctgacatgtactagcttaactatgggcaggttctagagtgaaacaaaa

SEQ ID NO: 71820 - DNA, 328 bp, Prunus persica
  Intron number 1 from transcript ppa003756m (locus ppa00375 6m.g) derived from phytozome v7.0 (chr-ID scaffold_7; pos 14843895 to 14844222)
ccaccgtctggctcgcttgggacacccaccactctgtacttatctcaccctgtcttctcttttttctttgctgatacttcgtttttattgcgttttttgatatgctgttgtatcattgtatgatgagtttgaaaatgtaagaaaaggaatggaaaattttaatcaaatttttaatccaccatattggttaatgcaaaacataaaacatcatatttggtttctttaatttttcacatgtttagttttaacttttaagttactcaatggaggattaatgaaaatgtgttggtttttttgggtgtctgccaattgtacaaaaaccagcgtt

SEQ ID NO: 71821 - DNA, 995 bp, Prunus persica
  Intron number 1 from transcript ppa004836m (locus ppa00483 6m.g) derived from phytozome v7.0 (chr-ID scaffold_5; pos 16016973 to 16017967 reverse strand)
cggacgtgcctggtgacgtggacgactacatttcggtgagtgtgcgtttgtgctgtggtttctcttgtttggttgctgagaaaatgtcgggaaaccaggaagaaattgagtaatttgtttactggaattatgtttattttttcgaggaaaacgtgatttttttaatttgataaatataagaaaatgtggggaaaaggatcttttaaatattttaaatattttttttaagctgtgggagtggaggaaacaagaaaatttagctcaactgtgcttgctacatgtaattggaacttaggtggagaagttgaagtttcttgtgttttgtcggcattttcttggagaacgaactccgagaacggagttttcataaacaattggattcgtggtttgtttgtttcgattgtagttttcttttaaaatgttttgttgctgtgaagactttacggaaaaacaagcttattaagtttgtttattttctttcctttgtatccaactgtttggttagttagtaatcttaagaaaatgaattatcatgtgaaatttgtattcttttttcattggttcataaaactggtgcatttgattggttttttttagttctttcgaactattaaagatgttactttagattttggaatattatgcagtttatatatgtgagtgtaagaactcaaactggagcctgttcatgtaactatatgtggtcctgtagctgcttcattaggtgcaatatctctataaaaaataaaaagtaaaaaagggcaatcctttttgagcttttctgaattagttaggtggatttctaatttatgtgagactcaagtgaagaatataagagattaaactttggttcgtaatatgttactagtttaaagtcagggaaaaacattgcaaatggtaaatttgattatagttttaagatgataatgtattattctgttaacaatttaggacttgtgagtctgatggtacggaaatgtccgaaatgcaggcta

SEQ ID NO: 71822 - DNA, 856 bp, Prunus persica
  Intron number 1 from transcript ppa005287m (locus ppa00528 7m.g) derived from phytozome v7.0 (chr-ID scaffold_1; pos 35698586 to 35699441 reverse strand)
ctttgcctcaccttagcatcaaagacactcccattgttagtacttctctttctctctccaagctacatccttttttgcaattaaattaattttctgcatgttgaaatgttaaaatttccaaattggggtctaaagttttatgactttttttaaagtttatcactctggcagctataaacttgtcttagtttgtgttcatttttatgaagatcaatgcttttcttgttttgggttggctggtttgtgagttattgtttgttacattttccagttcctgaaatgaaagaaaaggctcatcaatgattttcctgtgcatgcttgattttttaatataaaatttggtaggacatgttgattatttccttgaaatttttattcaaagtaagttactttgatttcacgcatatggatttgattaacatggaggaaaaatttaaagaaaaagatggtatgcaaaccaacctgatgttgggcactttaccaaactttttctttttttaatactaaaaatactctgcacaactggtttagatggccattcttttctaccaatatacactgtgtgcagcattttcctttattccttttaccacatatacccccttacaatccgcatgaactcataatgtagttatcaattacttaatgcatttgaaaggaactgcactggaatgttgaatctgagtatttgatgcccattttccagtaaggatgtgagaatttgtcatttctgcatttactggacaggatcatgacctttattcatcttcatttcagttttcggagaccctctcaacatgattttgtaatatctattgcaggaatcttcatctgctcagtatatattgcagcagta

SEQ ID NO: 71823 - DNA, 897 bp, Prunus persica
  Intron number 4 from transcript ppa021802m (locus ppa02180 2m.g) derived from phytozome v7.0 (chr-ID scaffold_3; pos 14542931 to 14543827 reverse strand)
gctatcaaggaagcatttaaggtacactcatacttatacatagggtttttttgtgatttgaagaagctctgataaataatacagctgtgcttgtgctaacaagttacggctttatcatgggtttgattgtaggacaatgaagattcccccaatctttcgcctattccagaagagccttccgatgaagggtgagtcatatttatacataagcgaacaaatttaactgaatctttcatatgtcttattatagtcttcttttctactttgacgagtattctctatctgctatgtatttccaaattgttttttatccattatttgatttttatacgcctaattcagtagatcaaaggatcacgaggcatcaaatgacgaagcctgtaaaaagaaatcaaggaagagaaaacgaacgaaggcaaagaatcatgatctagaggtgagatattgccttctccgtgtctgctaatgtatttatctgaattgttggtacttggtatagtacctcgttatattaagtctgtatcttccttcattttgaaagcctaggcatcacactgttgaaaattgggtgggtgcaagaaatagtaaaatttgaatgagaagacctatctagtttaaaggctaatgtaccacctaagggaattttttaagagaatgagggtaaactgagaaagttagcaaatttttcaaggaccccaggtgcgctgagcagagactttttgaagctcccaaaaagtttcccaactgcatgcctagtaagggtcctgcaatctaggattcttgtcgttgcattacatttttcattgtccttgcttatgttcaagtcatatctttgttatcatgttcacaacttaattgctgccacattccaggaaacttatattgcaaaggtggagc

SEQ ID NO: 71824 - DNA, 570 bp, Prunus persica
  Intron number 1 from transcript ppa007546m (locus ppa00754 6m.g) derived from phytozome v7.0 (chr-ID scaffold_4; pos 3485998 to 3486567 reverse strand)
ttgttggtgagctcccaccgcctctctctctctctctctctctctctctctctccataatatcattttctgctaacttgttaatgatcacttaatctctttagtttcctcatctaatcatgctctaggaagtagctaagcgttttggtaatggaattttgaaactaagacttctctgtgtgtcatggattttggatacatgcagcctttatgattatcatctgcattctgagggaccatttgttaaagtaccatgcctctcctattcatttcgttgaaaattaaaataacaataaagaatgctacagtagttctcaacccatctgccttcctcatttatgacattaaagagtgaaatttatttctctgagcctttcatctgttgctttctaaaaaacccagaaatcccaaaaataaactacatggtcacataattcatgaccaggaaaagaaaactgcttgtgtaaaaagtaaaaaaccaaaacattaaaattcagcataactctatatgatatatgtactgatgatcaagtgtccttcaaattatctgcagctgagcttttgggttttg

SEQ ID NO: 71825 - DNA, 1023 bp, Prunus persica
  Intron number 2 from transcript ppa026873m (locus ppa02687 3m.g) derived from phytozome v7.0 (chr-ID scaffold_8; pos 16892067 to 16893089)
ttcactactaccagctcaaagtggcgtccggacaggtgcgtaatgaccattctgacatcgttaagtaagaagatgcatgtttatgccatgggtaatctggtaattttgagttgtatagataacattggtccaacgttaatgtgggtttgttagttatgttatatggttttgtttttgtttgggggtttggggtggggacaaacggcggttgttgggaggtgtgagggcagatggaggtttgaaaattttgatgggtcctcttcattggcaagtttctttcctttattggggggcctgaaaaagctcttctgccaagcctgaaacccaaccacaatacaaacatctctgttgggatgctcaacttttttatttatttaatatcgaagcattttttattttgtaaacaaaacaataacactatctgcctgcaccaatttgtataactttttcagcacattcagtttttctgcaacatcttggtctacatcaatttttgcatggaaagattttttatttatttttataataaataatagagattagcttcatgatcatttcaaattcttcttttgggagatgcagttgaaatcaaacacaaagaatatagttaggagatttcaaagcttgatgggtcccaatggggagaatcctgttcctatctcttcaatgggttaaaaaaaaaaccagcaaaagatgagtagctgggtcagtcttttgattccaactttctaaatgctttcttatctcaaaaattaagtatttttgtagtttaggatttgtaaaacagacccctgtagttttattttattttggtttttgggaatgaagtggcaatgtacttggaactgatagcaagaacactgcctggctttaagcagtttttggttagtttatagagaatttgctagtccttgttacctttttttttttttttttttttttgggatgattttatccaaagatattatgctcatgaaaaatgaagcagattgaaaacttttaccaagcaaggaagacgcatcg

SEQ ID NO: 71826 - DNA, 810 bp, Prunus persica
  Intron number 2 from transcript ppa011118m (locus ppa01111 8m.g) derived from phytozome v7.0 (chr-ID scaffold_3; pos 4291365 to 4292174 reverse strand)
catctactctttagcgccaaccgttgggagaagaggtttgttgtgttattctttgcaacatgatatacgctgcttgtgaggttttctataacagggaagagaaattgcacttattctgattgttgttttagtttttaattgatgtcagggcaatgcgtgtgtgatatttcttttttaatgattgacttgtgtaacagtctggtttaagaacctaatataattcagcttctgttttgagttgagaaaccaacgcagcatagtgatcaataaaatgtgtaaatgaaatcataagcacatatgtaagcagtagtgcggaacaagagattgatatttttgtttctgttggcttctagtctttatgggcattcattgtttttacagatccgggtgcttgtttacatcaaatgtgtcagtaacctcatgtattccgcagttagattctcaggtccctggctacaatctataaacatgagaccaatgtatgattgcaggatgtagtaaataggcgagaaaatagtatttgtttcttcgtctttgtcctgtattttttgtgccacagaaattcggatttgtattaaattaaataaacttaaaatcttagtatttcaataatgcctactttagaaaagagatattttgaggtgtttccatgttatgtttaacttacaagttaaactgaaacatctagtgagtaagggcagactacaatgtttccttagtttgggtttccattcttggatgaagaatgaggttgtcacaaatcattgtactattgtactaaatattctataatgtttctgcagatcatta

SEQ ID NO: 71827 - DNA, 889 bp, Prunus persica
  Intron number 1 from transcript ppa004722m (locus ppa00472 2m.g) derived from phytozome v7.0 (chr-ID scaffold_3; pos 18273269 to 18274157)
ccgctgaagccaccaagtccctccctccttcttccgtaagttcttcacatcaccaatcaatccaaaaatcatgtttacaagatttatttttctttatttttgtttttgtttttgttttttatcatctcaagaattcaaatggtaaatttccagttgaaggatttttactgtttttaacttttaattaattaatcggagatggattaggtcaattagttaggccggccagtaagtccgccttcctgtaaccaagctcaaattctccttcgaagattagattagattaatttacagtaatatcgctcgaaaaataaaataaaataatttttaactaaccatgcaaattctctgcaataagaggtgaagacctacttttgcggttttctatttaagataaagacgagatttaagatggtacaactggatggtgttacaaggacgaagtagagggtgccacgtgggatcgcagatcctactttgtttacttatgccacgtgggtgtgacatggaccacacctacgtagtttctgggctgtttgtcactcgacctggttttgtaggtctattagttgtcggttgccacttgatttaccaactaaagattacctggctggttacagggagattccaagatgagaaaaatctggacccagctgactgtgtccttcgtgttaccagttgttaagactgccacgattttcaaaatcacaaatggaacaaacactagaagttattgaaaaacacaaaacgctagatgttttgtctttctgtcaacatcgtagttcacaccaattccttgtgaagtttgggttttgtttggtttggtttgatttgatgcatggtggctgaagacgatgtttttggcttgtaacaggtgagctttattatt

SEQ ID NO: 71828 - DNA, 854 bp, Prunus persica
  Intron number 1 from transcript ppa003651m (locus ppa00365 1m.g) derived from phytozome v7.0 (chr-ID scaffold_4; pos 8849428 to 8850281)
cagatcacccaaagaaggtatctttctctctctctctctctctctctctctctctctctctctctctctctctatgtggatttttttggggttcttcaagacctgggttggggtaatcatcaaccatttggttgctaagaaaatgtgtttctggagaatgaaagatattacacaaaatttatgggtttatattattctttaatcttttttacctgaattttcatcctattattcatatttgtaaggtgactaataaacatcatatttgttttttagtaacttcaataagcagaataatttaattactgtgttttgaatattctgtttgatgtggttttgtaaagattgtgtttttcttttgctttctgtttcttgtgtgctggctttgcattcaaagcaaggaatctagtctctaatataattttttgatgttctaccatggcatattattttactttgcgcccttttcttgtagcacctgattctattatattattccattacttttttcaagggtcatatgattttatggttttcaaaatgcatgtcgcggttactcttcacggactcagatatgggaacaagaccatgacctgaggaagaatgatttgtcataaaattagttgatgttttgtgatcgatcttgggctgttttcttgtggtccattagaatttgctggatttgtgttgcttacacactgtctgttataaaacttactttaaaattttgaaatttgttggttgccaaaaaaggaagttgcaatttgttccattttttaaattagcgtgtattaatatttgcaagcgcattttaaacttatgtattctttggtatttttcaggacctgaaaggt

SEQ ID NO: 71829 - DNA, 359 bp, Prunus persica
  Intron number 3 from transcript ppa004330m (locus ppa00391 8m.g) derived from phytozome v7.0 (chr-ID scaffold_6; pos 8678732 to 8679090)
attcaactgaccctacaatcaaggtaaactttcctaaattcagaaaacaacccatcatttggatcaccccactaattattctcccacatttatcgttaaaaatgtaatcttttcttcatcatttttccttccaaccaccaccgccaacaaatctcatcattctagtgacatgggtcttttcaatgtgtttgttaaaaagccacagagaatgaagtagcccaattattgagttttctggcgtgacccttgtggtttctgacatgggttttgtttcattttggccatttgactcgtcgcattaacaaaatgggcaagtgggtttttaataaaactatcaaaaactgacgtttttgcagcaa

SEQ ID NO: 71830 - DNA, 813 bp, Prunus persica
  Intron number 1 from transcript ppa012807m (locus ppa01243 5m.g) derived from phytozome v7.0 (chr-ID scaffold_6; pos 23506321 to 23507133)
tcggggctatatttgcgccttcctccaaggaactggtattgcgttttcccctgttcaagttcttttctttttattgttttctgaatctcttttatcttttatctgttttttatttatttttgtcttcaatcatttaattgggttttgattgctatcttagcattttacggtattgctttggattttgagggttcttgactgttttctgtttaatggtattggagttctaatgttgtctctgtttttcttaattgaatataggttaaagctgtcgccttttgtttgattttatattgttgggtgcctgtttttgcatttctgctcgtaaaatcttcctggggtttatctatatatatattttttatccgaaattgggtgaaggccttcaatcgtcatctacaagttcatatttgctgaattgggagatttctgtctgatatttaaaaaaaaagaagtggatttgcatcatcaagacaagatttttatttatttttagtgagagattgcattatctcttttaacgaagggctttagaattatataatgctgggatatgtttgttctttggaaaatattttgtttcatctcccctccgagcttttaaaccatattttacaataaactcgcaagttcttttgcaaattaaatttaacaacttttgttattggaatctctctctctggctgacctttactagattctgtaaagtgtatgtgaatatttatttattttatgttgtaccaagttctgagagaaagttgtcttcgtgttcgtgaaggtgttagggagggaatctctgcgttctgaagtcac

SEQ ID NO: 71831 - DNA, 601 bp, Prunus persica
  Intron number 1 from transcript ppa010238m (locus ppa01023 8m.g) derived from phytozome v7.0 (chr-ID scaffold_8; pos 17713234 to 17713834 reverse strand)
gcagtcctacgcgagcttagctctctgcttttaaggtacgttctcagtaaccctttatttatttatttatttttgtatttctggggcttggtaagcttgatcttgtttatacgattggtttcaatgttgcccacttgatgattgctcataaaggttcttgctttttgtgctggctgaggcagttgagtcaaatttcctgaagataaaaaaatgagcatttggagaacatgtttgcagaatagctataagctattcggaatttcgaagagaagcataaatttttgcccttttttttgtaattttaattttctgaatgttcccacagtttatgcgtttgtttggtcccctccttgcaacagaaaagttattttgagagctaatttttcagagttgaggaattgaagtttctatttttcagatttgttttttaattgtaatcctccaaattcatcagtgggctgttccatttctgtcccgtttgtggcccttgttggaataatattctgtttcacttgttttatgtattatgataatcatagttaagagcctttgagagtgcaatgtatttgattttctttctctggtttcccatacaggttca

SEQ ID NO: 71832 - DNA, 787 bp, Prunus persica
  Intron number 2 from transcript ppa010870m (locus ppa01087 0m.g) derived from phytozome v7.0 (chr-ID scaffold_2; pos 25557601 to 25558387 reverse strand)
tctgattacgaacttgaagtttgtttctctaacaggtaatgcaaatttgtgcttcttattatgtgttttcatggcttctcttgtttactctttagtataccaaatccacctccccactttcctgttagacggctaattaggaatctcagatcgattgcatatgcgttggttattatcagcaatgttcatttgtagcttatatatgcatatctggatatgcatgcatcaataggtagccacattgggtatcttggaaaagtttatgcagacaaaaattttgttttttattttctattggactatcttcttgatatctgtcacacctacgaccattgggagagagtcaatggattcatttctgagtgcagcatataaccccattgctaccacttgttagatgctgtgagatgggaatatgagctttactttttgagaaggggatatgtgggatattgcatatgtggtggtttctatgtaagttagctttattctggaaaaataaagtgaaaggtgttgcttgtttggatggatgctcgttcttagaatcttcatgatataagatagtaccttcagtgtaatggttgaaagcatccttcttaggagagtttacttttccttttcagttctttttccggtggacgacaattactattgttttaatgttgcggactacattagcgttgtagccgtatatgcgaaatctctttctattgcaatatttttaccctttgagttacattgaaattgttctttcgtatgttttaccctttttgcagttttgagtata

SEQ ID NO: 71833 - DNA, 503 bp, Prunus persica
  Intron number 1 from transcript ppa002973m (locus ppa00297 3m.g) derived from phytozome v7.0 (chr-ID scaffold_2; pos 22450592 to 22451094)
tgttggtgagttgcgtgttgttgttttgtttatttcgcggctggtcaatgtttatcgttgactttttgacaacttgaaagactatagttttggctgactaaagatttgaaactttgacttttgatcttggcagatagcgttggttcagatgacaatattgcactcatagcaggtatggattgggttaaattccactcacattaaagcaattggtttgttgatgtaaaatcctactaattggtcatcaaaattaaagttactatgagtttcaaattttatatatttatttgatttctggtatggaaattggcatggataaaaattacattctagtttaatctgtttttgctttttagatgataactcagaagaaaaatggtgacaaatcatagccagaggtgcattttgaatagtgactggaaatctatatctctggtgttaaaaagaaggaaactggaacttgtgcaggtttaacttctgggattggtgcatcactagttgcg

SEQ ID NO: 71834 - DNA, 230 bp, Prunus persica
  Intron number 3 from transcript ppa001334m (locus ppa00133 4m.g) derived from phytozome v7.0 (chr-ID scaffold_1; pos 32951701 to 32951930 reverse strand)
tttgtgcagagtggaattttgggtaccgtacatcttctaattatttaattaattttgttttttgttagagttattgtatctgaattctgtctctgcagtggagtaaatgctacatatcagaaatttattattattttcttttttgggttagttgcatatatttcctaactttaagttgagtgcttaattcgactctcatttgtacagaggatttccggtttggctgaaat

SEQ ID NO: 71835 - DNA, 600 bp, Prunus persica
  Intron number 1 from transcript ppa005729m (locus ppa00572 9m.g) derived from phytozome v7.0 (chr-ID scaffold_3; pos 6824185 to 6824784 reverse strand)
cctggcagcaacccaggttttctttctcattgcaggtgattgtgactcttcttctcttgctccatatatcaattcacatgcttgtactatatctgggtatgtgtttatggtctggaaactgggattttggacattcagccaccaaactagtagtttttgaatttggagtttgaatcttgatgccttccattttcttttggtggaactgtggattgaagttcataaagttggttttgttcccacgtttgcataaggtttttctctgctatatatggttatgtatggtgtgccattctttgtggaaatcatatccttattccatcatttattttcttggaattcttgatgaattgggtctccttactgtaatctaagatgggtatttcggtaggcaattaatcatatctagcacacatgaaccataaaatgaagtacttgtgcaaacgtgaaagcctgcaatcaatgattttggcaactttatacataacgacagcagataaattttagtccatgtatctacttcaatttgtaagtgtactattagaaaattattttgttttatcttattttaaatgttgcagcactgagagctcataggta

SEQ ID NO: 71836 - DNA, 666 bp, Prunus persica
  Intron number 1 from transcript ppa002720m (locus ppa00272 0m.g) derived from phytozome v7.0 (chr-ID scaffold_2; pos 24872760 to 24873425)
ggtctattcggaccgccattgatacaggctgtggggtactgcatcttcgatatttgtttattttattaattaatttagattctgtctttcctaaaaaaaaaaaattagtgattaatactcttggttgaccccatcgtgcattcagtgattacttattttggtgtgatttattattattcgggtatttaaaacattttggacaatcttgatttaatattgttttagatggagattagttggtgattgatggatacaactaaactacttttatgtcccttttttttttctcactaaattgagaagaaaaatatattctaaatgacaattctacccccttttttagtcaaactatcaagtcgacatattctatgggggttggtgtagtgtggtcaaccatgaagggtaaatttggaagtaggatttgaattaaaatatcttttttgttttggcaagaaatttcacaaaatctgagatttatgacaattgcaatttttaagggggcatggcgcgagatgagatcagtctaaaaactttgatctgattggatatgatgggatcgtgcaaagtcatcctagttgactttgacacgtggcagccatgtgatatatttccttattttcatgtcgtgcaggttgccagttggggagcttacctattatcccgaaa

SEQ ID NO: 71837 - DNA, 383 bp, Prunus persica
  Intron number 1 from transcript ppa015327m (locus ppa01532 7m.g) derived from phytozome v7.0 (chr-ID scaffold_6; pos 11305580 to 11305962)
gcctcgaagctggtctctggaaggtacccatctctctctctctctctctctctctctctctctctctctattttatttgttcttgtgttaaactcctgccaatttggtttctttcatacttattagaaagataaatgtcaagtaaattcaattcaggaaaagaaaaaagaaaaaaaaagaggtatgaactcaaaagtgaaagaaaatattatgaattgattaagggaaaaaaggtctagttccttttgagctaacagctgaaagcagtgtaagagtttgagtaaataagtggtaaatagtaagctatatctatatgtagtcacaaagttttgttatggaaaaatgcagatattcagctcaaaagaagaaggaaagggaggtgt

SEQ ID NO: 71838 - DNA, 422 bp, Prunus persica
  Intron number 2 from transcript ppa015934m (locus ppa01593 4m.g) derived from phytozome v7.0 (chr-ID scaffold_2; pos 23702718 to 23703139 reverse strand)
gcaagattgtaagtttctagtgttctttcctaaataaagttgaacaaaaattataaagaatctggaagagaaacatcagatggaactttgagcaccaatttcatcatctttcttatcatgaagccttagccataacattctcacatgtagtcctccctacagtttattatacagaacccccagcaaaacctgccaatatttcgaagtaacgttttaattaacaaaatcatacgcaacattaaagctattttttgtctaattattctccagaaggaacattgttcaaactagtattgttaccaaagaaaacaaaaatccttgctaaatccagcatgtctaattttctctcatatgaatacgatgttctttatcgaactgttgcaacaggttgtagcaaatttcagtgcatcgtggtgtagacc

SEQ ID NO: 71839 - DNA, 950 bp, Prunus persica
  Intron number 1 from transcript ppa005778m (locus ppa00577 8m.g) derived from phytozome v7.0 (chr-ID scaffold_1; pos 14775990 to 14776939)
tgatccttcttggtttattcataaatttacagagagtaagtgtctgaaaatcctgtattaatgaaaagctttcttactctaggatccaaatttaatgcaattgaatgtgttcaaagtatttgtatcctccttttccaaacacaaggccagcactttttaagcagtgttgaaattgttttgactaagtggttatgttgaaggatacatatgtagttattatttatttctaaaagcttttgctttttacaatacaacagaaatatcaaataaaacaaaatgagttgtcatatgcttttctgatttgatgggactgttttgactaatagatactgttgctatagttgtacatcctgtatgtttaacacctctgttcagcgctttgtttaatcttttgagcaatttttatgcttagccacttaaagtttgcaggtagaagtagctggtcaggggctttaaacttatgaccctcatgctcatagatagtttggatgtctattcataatgtttacttcccagccacacaactccaattcattgctgccttaatctcactttgtattttcattatgtaatttgattgtgagaataggtctgacatgccttttgccttttgccttttggtacatatatttgagtttgctggtatactccatggcttaaatataatattcacaacctgtgatttttttttgttttggtaagaaatcacaataaatttgttttttaaaataataaatgaaactttagtcatgtgaattaatcatgggtaataataattgaaactcttcttgtgtataatgtcgaatctgcgtttctgttaccattctggttctggtttaaagtagttagctagatgtaaaattatgtgactgcatttaaacagggagacataacagttacaaatatgctttgtaggtttaccaggaggaacagataaaggggttatccaa

SEQ ID NO: 71840 - DNA, 313 bp, Prunus persica
  Intron number 1 from transcript ppa023261m (locus ppa02326 1m.g) derived from phytozome v7.0 (chr-ID scaffold_3; pos 5616081 to 5616393 reverse strand)
ccaagctcaatacatttctcgctggttttaacacggtactaattctaattatctttatattttgtcttgcaatgtagagttgtaacttgtaatcttatatggtgaggttttcttcgtcgccatcacatttctgacagaggctgcatttaattttttgttgtgatttatttttactgcatttgcatttggaaactgtgagctacctagatttcagagactttgattctctttacaatttagggttctagaaacactggattttctatgcaaattaatactgcaaagttgaatgacattttgctactctaggtgt

SEQ ID NO: 71841 - DNA, 433 bp, Prunus persica
  Intron number 1 from transcript ppa005510m (locus ppa00551 0m.g) derived from phytozome v7.0 (chr-ID scaffold_4; pos 19524556 to 19524988)
gttgagctgggccgcgtaattgaccgaggtcttcggttagttccttttcccgtttctactatcaatttgtttttacttttaattttagttgaaccttgtgtgttttccaaatttggaattttttttcgtaatttatgcatatttgtataggaaaagtgagaaattcaataccaaataaaacatactgtatgaatccatttttacttttgttttaaagttcgatttttgttatatttagtcttgctctggatatgacgtgcatggttaaattttcacattgtttataaattttgggactactgagctgaacaatattgtcatttgagtaatgagaaacaagaaagaagagatatgtgacaggacagtgttgttatgcattgaaatgaattaatatgcagggaaagcagggcggttgatacagaatcgctttgtg

SEQ ID NO: 71842 - DNA, 925 bp, Prunus persica
  Intron number 1 from transcript ppa000914m (locus ppa00091 4m.g) derived from phytozome v7.0 (chr-ID scaffold_1; pos 1051888 to 1052812 reverse strand)
aagtaattacttcttcatatatgttctctttattccatatttgatttatcacatgaacctttttcattctttgaaatatttccgcttaatttctcattttgcattattgcactttatgctctttgtgaggcacatgagaagttagattgtaatgtatttaaggaatcatgtaaattggtctcatggacactctgaacctgtatgtgatatacgcataatatgcttgggcaatttgctataaaaattatcaataatgacagggaaacatgtaaaaaaatctacttggttgtatattaatttgaatcaatattttttaagaagataataacaatccaatatattccatttggttatcatattaaaataaattacaaaatttgaacagagagatgattgtagcatgcaagcaccgttctgctgggaaccaactgtcaatttattatttgacaagttttcttgaggatatatcttgtgattttatgcttgttttctggttatatcttgattttggctgcagctgattgacacagttttagtacactatagttattcagctcattccaatctttgcttggaattattttctcctatttaaatggagctgaatgatggatgttatgggagagtgggtttttattttattttacacaattttcaactacatgagtcgtcttttattgcatttgaacacttaatagaatgacaatgtagttatattccgttgtgttactgtgaatacagaatcttcttgtatgtatgttcgatatgcaaacacctttttttatgtttatttttgttaatttttttttaaagacaatgccatgtgtaaaatgactatttctttgcgttgtggttccagtttagttatattggttttgctttttgctcaggacaaaggaagagagattaaagaagaagaaagaag

SEQ ID NO: 71843 - DNA, 385 bp, Prunus persica
  Intron number 2 from transcript ppa019954m (locus ppa01995 4m.g) derived from phytozome v7.0 (chr-ID scaffold_8; pos 19961325 to 19961709)
tagatagtgccttcccaaagcctatattttccctggcaagttcatataaccattgtcttcttcagctattccactcctgtttttttttttttttcctgtgttttctttcaaaactatctgatttcaatgttgcaaggcaactttgttaatgaaattctgttggaaaaaaaaaatccaattaactggtgaggaacattgtgaggaatgacagaattattgctgctatcaagatatgtttggttgttgggctgcctgcggtgcctttgtttttttctgtttgctgccattttgttgggttttttgagcttcgtttgcataggtttcattatttgtctgataaattgtgacagcttagagcaatacttccacaatcgaaatttgcaag

SEQ ID NO: 71844 - DNA, 848 bp, Prunus persica
  Intron number 1 from transcript ppa023083m (locus ppa02308 3m.g) derived from phytozome v7.0 (chr-ID scaffold_2; pos 499607 to 500454)
ctggtaatttaccctctttctccgttgctcttttcttcattgtttgtttgtaaagctattcccttttgagagttttaatccgcaggttctagagcttctttctttctctgcattagtgctctgtttggtttgaaagaaattcttagaaaaaagatggaaaataaattttttgatttgggatgttgggctttttggataatcattcttatatttttcattgacaaccgggcccttttcggtttgttctgttagggtataattggttcccaaaacttcagtggttttgaacgttcatcatttaattttagctactttttggtaattttgacctgtgtttgaaatatggagaagttgtgacaaaatcaaagaaattgggttttagggttattgctggtttagtggttggaccttgttctactccaatttcccccctgttatttctgggcagttgtgcttgagcttgaattccccaaattaaggttctcttttactcctgcccgcattctctctgatagttccatccgttttggtatatggatacatgaatcaccagaggggatgcgttctgtctaggccctggaatgaaactaaaagtaacaatttatcatttgctctcacactaattagacaattgatgtcaaaagtaataatatacctgatgcaattagggtgctttggcgtccctaaacatggcattgcccttgccatctatagacgaagaactgttgatgtaaaaatgattcattttctaatcaggaaggtcataacatctatattttcattggatttagatatttactatctacttgttgagtgaaattctgatggaaaaatcttctcttgtagtt

SEQ ID NO: 71845 - DNA, 961 bp, Prunus persica
  Intron number 2 from transcript ppa026462m (locus ppa02646 2m.g) derived from phytozome v7.0 (chr-ID scaffold_7; pos 16189443 to 16190403)
tgggagtatcggtccattgcctaaaagtggaaaaggtatagctcttcagagagctaatgcttacaaatctcaacaccctttttctgtcattgttgccatgaagccctcttatatcacagggtacattttggtaagctttctatagacaaccatgcttgctggctgggccataacaaattcttttacttatatcagtggaacaatcattagtgttctctctctttaaagattttcttattgttctcttttttctttccattttttttttcttttccagtggttgccatccgagtttcacaacctatatcctattaagaattcgggtgaggttatccttcgagttttggatcggagaagttggcctgttaatttgaaatatggaggaggaagagctcaattcctatctggttggatggaatttgtgcttgacaataatttgaaagttaatgatgtgtgcgtttttgagttgattgacaataaggttaagcctttatttgatgttgtcattttccccaacatagaagctgcaaattgccccaatgatagggaacaaacagtgcctgagatagaagaaactaatgaagatgatgatcctagtgatgactcgggtgatgagtctggtgatgctgattatctttctgacgattccgataacgattctgttgaaattatagaaaattgtacacctttcccaagaagaacaaaggagaaatctccaatgccatgtcctcagcctcccaagaaaaacaaagccagttcaagtggtaaagtagaattacaccaagatcaaacttagtcagactaagaagcattcaatatgatgaaatgaagtttgagaagtccatgaaaaaagaaagattcatctattttgttaaccttattttgttctgttctaaccagtaatgtttggttatattcttcaataggaaaagttgatttccctgcaagcggatttgctata

SEQ ID NO: 71846 - DNA, 1038 bp, Prunus persica
  Intron number 2 from transcript ppa018387m (locus ppa01838 7m.g) derived from phytozome v7.0 (chr-ID scaffold_4; pos 14531107 to 14532144 reverse strand)
ccttagcaaggtccaaggtttgtgtagcttcttccgttgtcattggaattgtaacacgtatttcagtcatgtttaagcttttcatatcattatttattttccatataattcaggatacatcattaactttattatccagagtatctaatttacatctattgtttgaaaatgaatttggtcataattctttactcctaaaacagcatgaatggaatgaaataataaattcctagtttatttagacaccaccttccatttagatggaaacagagtggaccaccaaaatgaggctgtgcctgttttttgtttcttaaaatgatcttatgcattcattttgatattcaagttcatagttccgctgcaagttttcccattcctcttgagtgcacagggattgtggcctgagataagctgccggaaacttctcattaaggctcaatcatatcaaattgttcgagcagaacaattatatcccagtgattggtagctatcattgttttttctgttgagaaggttgtgtgttcttgacgtcctcatggttggtacttaccagattaaggcttctagttaaatatttataattggaggattaggcaaataactatttcattctattcccacatgtttaagttttactttttatttgaaaaacattcatttccgaccctttatgttaacatatcgagctctaagtagctcagtacctgcttattctttgattgaacatctgaaccttaccagcatatgaattgagttttccattatgtgaactttgttgaaacttaaaaacttttctttactttgttttttctttcacttggttcttatctttgttttattttcagtcggttattatttcctgtctctgatccattggctattatatcaaattgtacatgatcttttaaagccaatttcataacttatgccttgtgcatgaaatatatatgctatatttctctgcatgcacagttaaccgcaatgacaaattgtgatttaacagtttttggtgaattttcttggagagaagcccgcaaa

SEQ ID NO: 71847 - DNA, 582 bp, Prunus persica
  Intron number 1 from transcript ppa016539m (locus ppa01653 9m.g) derived from phytozome v7.0 (chr-ID scaffold_1; pos 1514440 to 1515021 reverse strand)
tgccattagttaaactgggtagtcaaggattggaggtaagcttgtttttctctatcatattgatgtgtatgaaagtcaactatattattctgatcagtttagaaccatctgaaacaattaagagcagcatctgtcacagtttatcaacattcattcccatcatgctgagactgccaggctgattttcagtcgttttctaatcagttcactctagctatttgtttttcagtttcttggtgctttgactatttaagtcttgcatttgtgggtaatagtagaaacaaattttttgtttgacttggtgttcgagaaatagagagtgagtcttctctgattttagtgccctgaatcatacaactgtttgtacaactggattgcactcacttgggaaaaaaaaaacacctaattacataatcaaaggcttattcagatttagtcagtcctttgcaacagtttggtatatacttcattgaaaattggatgtgggaaaattattaattggttgctgcttataaagaaactcactgttcctttctcctcatgggtcttttctgcaatgtaggtttctagactgggttttgg

SEQ ID NO: 71848 - DNA, 974 bp, Prunus persica
  Intron number 1 from transcript ppa010105m (locus ppa01010 5m.g) derived from phytozome v7.0 (chr-ID scaffold_7; pos 18139275 to 18140248 reverse strand)
tacggatcgagagggtaagcctagttcgattttgtttgcatctttcaaatatctgtgtgtttcttgggatcttcttgttgctattttgcttcgttatgttgctaaatttgtgattgattatcttggaacccgattgatggtttaatctaattctgacgcgtcttggattaagaaaattaaagaggaaaaggaattggttgatttgataatttgatttcgtggctcttgtattttcacgtagaattgagttttgggaattttagtttttgatacgtgtttgctttaaatctaagctaaacataattgggtctttttctcattgatcaagttagtaaaatacgtagagcttggcttggtattgaccatttatgtaattcatcaaacaaaatcctgcaactctcatatgagaaagacaggtgaaccgttgcaaagctcattgactatgcaatggtaactcaatttaaataaataagtaaagggcccattttaccagtttggaagttagggcgaaatagaaacttaatctatctttcaaggactataagtgtagttttttagcctaaaatttactgaatttatgattttcatgagcagtctgtgacatgttggaatggatagagaaattgattctatattattaaaaaacctgagagcatatataaactatgttcaattgtgtgaatgcgaacctaatgcttctgcgtgtgacatctcatatggtttcttgcgtttggtagcatcagttggttgatatctcatatctaggaaaaggtgttttattttctatgctttgtcatgcatctgtggttatttctgtttttgtctgtttgatatgggactggtagatataattatattttttaagaataacaaatgtagggttttagacattaggtgtcagggaagtgtgggttgggtttggttttattaacaggttgagtgggggattttctcttttttgggtattaagggca

SEQ ID NO: 71849 - DNA, 641 bp, Prunus persica
  Intron number 5 from transcript ppa006685m (locus ppa00668 5m.g) derived from phytozome v7.0 (chr-ID scaffold_4; pos 8825211 to 8825851 reverse strand)
gagccatcttctaacactcaacaacagagagaaaggtaagctagcaattattaaattttctcattagctcaaaattgtgactatctagttaaactaaaatgcttatgtaattgttaatgtattcttttgtgacaaacttggacttcacggtcaaggataaaaacatccgccatacagatagcttaaataagggggtattttggttattagggttgggtgtgccatccttaagtttttttcctctactttctttctgtttggatcatgtcagtggaaatcaagcatttttgctctgttaaaggccgatagcagggaaatcttgggaatataggggaacctttgctatatcaggaaaatttctgggatagaggggaagaacttgtttcaaccccactatcagtatcagtgtcttgatatgttgcatactgatgttcctgtactattgttacatactttgattttgttgttttaaagtttttaacttgtaataattatgcccaacccacttgataaaaggttttgatataaatgttattatctgctccatcgttatttatggtttaattggtgtgtctttatatttttagtttttatgttaagtgattgaggtttgtcttgtacctgacaggacggcagagctt

SEQ ID NO: 71850 - DNA, 652 bp, Prunus persica
  Intron number 2 from transcript ppa006685m (locus ppa00668 5m.g) derived from phytozome v7.0 (chr-ID scaffold_4; pos 8826491 to 8827142 reverse strand)
cgcccaaggcagtcttcccatcagtatgtgcttatttatttcaactaaatagttcagctaaaattttcataatgtcaatcacattactttgggttgttctttttcttgttcaattgctagttaccgttaaaaagttcacaactttgttgctgtgcctaatcaaaatgcaaacttgtagtttaatactaagcatttttgctttatagatccaggaatgttacaatctgggtcaagttactgataatgcagaatgtgtgtggctttgcagttacccatttgaaaatttttaaactacagtactgatggaaaatcatcttcagtagaaggggggttaaagttgatgggatttatgcagttaggtgggaagttcatggttgcgtttgaatcagttgggaatttttgcagaatggctggaacttttcttattttttgaatttattagttatggaattataacatatgcattgaatttctgagcattagaggatggaccttactaattaaatttgtcgaattaggtgtagaatttgtttactatgttttagtccgttaattggagagttattattactagttcatatgtaaatttaaaatttaaaactgatgttggtatctgtttttgtttgttaaggttgtcggatcaattgatcaa

SEQ ID NO: 71851 - DNA, 625 bp, Prunus persica
  Intron number 1 from transcript ppa013129m (locus ppa01314 6m.g) derived from phytozome v7.0 (chr-ID scaffold_8; pos 19956870 to 19957494)
ttccttccttcttcagcttcccgagaacccttcaggtttctctctctctctctctctctctctctctctctctctgttaatctgtgttagatttctctctctaaacctctctttgtgctctcgttgagaattgtgtttctagattagggttttttcttcactttctttggatactgctttgttgactttaccaaattttcatttttgggttattcgagcagagctaagcccagatctagacccttttcttcgtttgaagtttgtggtttgtacaattttgtagtctatatttaaacttgaattttctgaattttcccactttgatctccgtgatacttttacagatctggttctcgttttgcttcatcaaccgagtttggatatttatttatttttgtttgtaaatacttagtctagatttgccttcattttattcaccgacggtgtttcagtgtcagatttgcataactttctcctaaatatttttctgtttattaaaatcagaatttcaacttgctgtgaagtcctgattggtttagttttcttggtctcctgtttatcttatcgttttgggttttcttatttttttatttgtgaattttgaaaagaatttttacaggcagaa

SEQ ID NO: 71852 - DNA, 1017 bp, Prunus persica
  Intron number 3 from transcript ppa004086m (locus ppa00408 6m.g) derived from phytozome v7.0 (chr-ID scaffold_6; pos 18526472 to 18527488)
tgcattgatcctaactgtacgtgggtggagcagtaattatttctctctactctcttatagttgcttgtggatttcctaggtgagctattcagtggcaataagttgatggtttccagtaaggttatgtttttgttccttggaggtttgccaatcagacatagaaacagatctgtttctgtgagtacgagtgggtggtttggggactgcgtatgggttctctgcaaggccattttgacagggattggtggtccttccacagggtgaaatctcaagggcatgcttgatgtgggttaaatattttttcttctcaaactttgttttgtttttgtttttgtttctgttgtggggggcggggggttgagaggtaatggagatatttactaggatcaagctgtcagtagagtgatgctggagggttgagagataatggatatatttactaggatcgagctgtcagtagagagagattgtggaagacttgtagagtggagtgggactgtgggagtgagagagaagatgatgactaccgattaaaatgaatcgtttgaacttcaaagtttagacacatgaactacttcaaggagtggtccactggaatggctgttatctcgctcatgttgccatgtgtctttagaggattttgaagcatttgacgttattttcttcaacaacgcctcaattgacgagttaactgaatgtagtactctttttttttgactttcttttagtgttattagctgatagtcgtatcaatttgctatatataatattcagcagggagcacacatgtttctaggcttttcaaaattttctacattgggctatgataggtcttgaaagaattgcaaattgaatgtaatcatatcatattaactccttatggatctcttcttacgacatattgtattaactccttatgcaatactggcttttcatttggatgactgcgatttctgatgaatatggtgttgaaaatttccagggttcatcgtgctgggcctcgagaaaaaatatatt

SEQ ID NO: 71853 - DNA, 531 bp, Prunus persica
  Intron number 1 from transcript ppa020774m (locus ppa02077 4m.g) derived from phytozome v7.0 (chr-ID scaffold_1; pos 13438525 to 13439055 reverse strand)
gtgccttggcctggagtcgcggtcagctttatacggtatttccatcatccgcatctctccattctctctttgtttgtctgtgaactctggaattactgttgagacttagataaaattttccggttgtgatttgttttctgtttgcttcctgagaaaatgatttgtgtttctcggtagcgaaactgtgtatgacttgttacggtccgacggatgtggagaaatcgagcttgattcttctactgtttctcatattaaaactctgcgtgtttgtgaatttacatatcagttttcagatttagatatatattttgggtaatttttattttctgtttgcttcctgagactatgaaggaaaattatgattccgtaatttttcggtaatcaaacagtgtatgattggtcaggggttagaaattggggtggatgaatctggtgaaatcgaacttgtttctactgtttctcattgatcggttattaatcgaacttgataatcatatgcaggcaggatagcttggttagttttggtttctc

SEQ ID NO: 71854 - DNA, 814 bp, Prunus persica
  Intron number 1 from transcript ppa002713m (locus ppa00271 3m.g) derived from phytozome v7.0 (chr-ID scaffold_3; pos 2669587 to 2670400)
accttccaggcgttgctcctcgcgatttccacactgtatgctctcttcgaatctcattttctcttttctcccttcaaattcgttgacccttctgttggttcttgctttaattactttccacgtcttccttagtctgtgcgttggcgctgcatcgttgtgggtttgtctttgtttccacttaaccagtgttggatctggggttctggacttgatctattttcgttttttcgtagatctatgccaatggattctggggtttgtgttttggattggatttttgagcttgtggtttaataaagttgctgcttctatttcaaaaaaatttgttttgagtatgcagtatacagtggttttaataattcggctttcagtatacttgcgggtaaaaagagtttaagaatctgtttggttgcaggattacaccatttttatgtttcgtatgatgaaaagtaacaaaagcgatcgagtttttagagtatcaaaagtaaaatatggttggaaataataatgtcatatcaccatgaaacaaaatttagataatcaagaagcaacaaaaccattgaatgctgccaaagtgaggagccggctattttactgatataacgaaacatttctgtgtcttttatatttgtgattgaattattgtactttttaaaacgtaatgggattgtagaagtgtaatgattgtagcctggacttcaaattgaatagatttttactgtggcactcaattattcactaacgtttattgttttccatattattatcaaagtaccaatatttgctctctggttctcttctttctgacagggag

SEQ ID NO: 71855 - DNA, 594 bp, Prunus persica
  Intron number 1 from transcript ppa001393m (locus ppa00139 3m.g) derived from phytozome v7.0 (chr-ID scaffold_4; pos 1872311 to 1872904 reverse strand)
gctaagcgcgcatataagctgcgtatccttttctaaatgtttgattttcttgagatgcttagctggaattgaactctgttttttacaatcttgatctaattataatgtggtatctttttaacgtgcagtggctaagctcaacttgaaagtagagagatttggatttttcttttctctttttttttggttggaaattgaggaatttcatgctctgcttggtagctcagaaaatgtaggaaaatgagcaaatttataaagattttacgtttcgtgaaatggggctgtcactctgttaattcagttatgctttcccattatgataataataaggtaagatttcaataaaagtactcaacttgggttataaatttttagtttaggatttgcatttaatctcgcctagttgtttaattttggatttttttttaaatggcaaaacgagggatggagaggagcataagagcagatttatttggtaacctgttgtgcattgtgtttggcatttttgtgattatgtatttttctcaaaggaatgttttcttgacttaatggaatatagaggaatttgtggctcattcagacaatattaattgt

SEQ ID NO: 71856 - DNA, 450 bp, Prunus persica
  Intron number 1 from transcript ppa026433m (locus ppa02643 3m.g) derived from phytozome v7.0 (chr-ID scaffold_1; pos 38228904 to 38229353 reverse strand)
tgttgactttgccaaatccttcatccaactgtatatcaaagaggtatgtcttctttatctttgaaactaggagttttttggtctatgtttatatgcaacgtgatataaacaaaataggcaatctattcacccagacccaaaaaaagaaaaattgtatccatattttgttttgtctatctgaatgcatcatcttattcaacaatttcacgtactaaaattgcagttctgtattcttcatttgtcctatttttcttgcagttttttagactcatgttctcatttcttggcgtgtttttgaacagtaggatgatgtattattcaaagtgctcttgcatctgctttgtgtaccttgttgtgcagaacagtaaggaattaatatcctagttttccattgttttaaaagttatcgtcatggattccttttaacaagatttttgggtttatataggg

SEQ ID NO: 71857 - DNA, 561 bp, Prunus persica
  Intron number 2 from transcript ppa020416m (locus ppa02041 6m.g) derived from phytozome v7.0 (chr-ID scaffold_1; pos 40992488 to 40993048)
gctgaggtaattttgtggatctcagattgttgtacgtaattttttcatctgaatacaatttgaatctaaaaccttttcaaacagcaccatgccttaccacttgagcgaatacctgaaaacacaattacaaataatagtatgctggtcctgtttgatattactttccagttgaactgttcttttatttttatcattagtttccatttccactataatccaatatttgggaaaatagtgacgagtgcatgtcttcatcgtatacgtcttctctttataacctacttgtagatgtagagatatagaactctttggtgtatgcaagcctctttggcagcggatcttcactagcttttcttcacccattaggactgtttcgtttaatttcttttacttttttgctttctgtttatttctttgttggagttgaaagaagcagagagagagaacaaaaacttggaattttcttttcttgacgactaagttgtactgatctattttttttcatttggtttcttgtcgacgatgaatattaagctcgtgtttctgtgcctactttgcagc

SEQ ID NO: 71858 - DNA, 844 bp, Prunus persica
  Intron number 3 from transcript ppa008825m (locus ppa00882 5m.g) derived from phytozome v7.0 (chr-ID scaffold_5; pos 1727422 to 1728265)
gtgtaagttgaatgttgttgcattccattgttctccttttgttgtgaagtttgtaattttttgagattggtcgattttatcttaaaaagtaacaagaaattaattgatatagttagtggattgcaactttaagttgatactcttgcttctattgattgtgagagctcaaggcgatcaatatggtttttatcgaattcatcaggatcatgggtcgtgtgggaagagaatatgctcctgtggtcttgtattcactatttgagcttggggttcattttgaaccacttattgcttctgtaggaagcgaaaactcagaagtacatgggtgaatacatgaacaattgcatacaagcctataaattaataggttaaagcatttagtgatttgaataagttttgctaagtttagctatgtttactacatgttcctaagttttttcctttaaattttcaccttttatttatttttttcttccacatatatcgtgctatgttggatcatagataaggttgtttttaactgtaacccattaaagattggctgtaattgaatcaacccttaaatctcttttctttgaaagaatcaggtttaggcagacaacttgttttgaaaatgtggctttatctttgtttgggttcatgcatagaatagtggtctggtatctactcttcctggctgaacctgttgtgtatctgtttcatctcatgccccaatctgatcttcttactcaatttggacaaaacacccaagtatgtgatatgggtctgtatccatctcaatgtaacatatgggcttgtctcaacagtatcttatatactttttgacctttttcttttaggtgtaaag

SEQ ID NO: 71859 - DNA, 420 bp, Prunus persica
  Intron number 2 from transcript ppa026591m (locus ppa02659 1m.g) derived from phytozome v7.0 (chr-ID scaffold_8; pos 12067606 to 12068025 reverse strand)
acaaggactttactattgctgattttccacaggtttgttgcttttgcgcttgtctccagataacttgaagtttgggttaatcgttttattagtttcctaactttgaccggatttgtatttgaatacctcaattttcaaaatggtacctaaagttctttaactttagtttcgtttggattactagtcccaccgttacttctatcaatattttcattaaatttaagagtagatgagtcttttccctttgagttagagccatgttgatactatgtatgttagtagacacttattgaataaacgaagactgtcatatttttttgttgataaaatattagcgaagcgagcatagcggtagtcatatttctttaataggctaatgattcattttcttgcagagagtgcatcttttgtggggagaga

SEQ ID NO: 71860 - DNA, 584 bp, Prunus persica
  Intron number 3 from transcript ppa016117m (locus ppa01611 7m.g) derived from phytozome v7.0 (chr-ID scaffold_1; pos 28977931 to 28978514 reverse strand)
ctcagacattgttggatccccttttcagcaatgtaagcatattcaatctgaaactagtgttttcttttacaggctgcagctcttgaatgtttctgttttgttttttattttaatatatgctattcattgtagtcaccatcaaagaaattaagacctgagaaaaattggcttggtggtctatactataacaagctgataatgacactacacttatatggtataatcaaatgaaatccaaaatcataacttaacaataagcaatgcctttttctcaagaactagcgtagtttatgggtaggagatgtcaatcaggctggggcctctgttcttattcagctgttcactgtcaatttttgagtaattgcgtttactgctaaggtggtggacatgaccgtagacaaattccatgccaaaatcacatctcttttaacaactgaacctaaaccattgtctcaattggtttctgaaagttgcaatacttgcattcaagataattaaataattatgcgctcagaaacataaattcagatgcatcttctctgtttgatactcacactaattttttcgtttttcaggtcacatat

SEQ ID NO: 71861 - DNA, 922 bp, Prunus persica; identical to SEQ ID NO: 70605
  Intron number 1 from transcript ppa017828m (locus ppa01782 8m.g) derived from phytozome v7.0 (chr-ID scaffold_7; pos 3922838 to 3923759)

SEQ ID NO: 71862 - DNA, 716 bp, Prunus persica
  Intron number 1 from transcript ppa019768m (locus ppa01976 8m.g) derived from phytozome v7.0 (chr-ID scaffold_5; pos 12222707 to 12223422)
cgagtaagctcaatttctctttgagaaaacatccaaattattatctttgagacatgagagactgagagaggaagaacttggaaccttaaatgtaaaccgaaaatgaatgaaagcgacaaatttatagaataaatttttaaaaccaacggcggtccttacaaacaaaccgccgtttaaattgtaaaatcaacgtcggtatgatcgacgtatattacagaaatccacgtcggtaaattaataaaaacgacgtgttaaataatataccatgacgcgagttattacttatgtactttaatttttgagtttactacgacggtacctacaaactactgtcgtatttatttaccacgtccgaagttaaatgtaccgtcgtattttgtaatttatacgtcgtagttatatgtaaccgccatattatttttttgaaatggttttatatgtaagcaacttttcattctattcataatttaaaaattaaaatccacgtcggttatattaaacctaacgacgttaaatgaaatgattccacgtcgaatgaaaaatattgcgtcgttttagttaaaaacgacgtagttaaatgtaaccgccgtattatttttttgaaatggttttatatgtaagcaacttttcgacttacacatgcactgtttccaaacccgattaaaaatttcaatctcccagagaaaccttttcgtcttttttccttgtcagagcat

SEQ ID NO: 71863 - DNA, 545 bp, Prunus persica
  Intron number 1 from transcript ppa016427m (locus ppa01642 7m.g) derived from phytozome v7.0 (chr-ID scaffold_4; pos 10522703 to 10523247)
ggccaccgttaccggtttcgctctcgtaaggtaactctctctctctctctctcatgtcctgtccattctgtatactattaggaaaaccaatggaacagtctgtatgtgggactagagtaatttcatttgctctgtctctgtcagaaagaatggaagccgtttttttaataatgctttagatgtgctcttgttattaatttttcagaggagatgagcctaatagaaaatccaagcagtaggtttaaaaaaaaaaattgtgctcttgttattggtattcaagtttcatatgggaaaagccatgtacaagaattgtgcacctagcaagcagcctgtgcagttcagaaaatgatcaccaataaaaaatttggacttgtctttatattttaatattctagtagctggcaattcttaagtagatgtccagagttgtatctgagatgacataaataaatttgataagattccaggtcgaactttgattgttttcttatctattatttattggttcagattgggttaagtggagctcttgagacactgtgtgg

SEQ ID NO: 71864 - DNA, 655 bp, Prunus persica
  Intron number 1 from transcript ppa009842m (locus ppa00984 2m.g) derived from phytozome v7.0 (chr-ID scaffold_1; pos 13398948 to 13399602)
caagaatcaggatccaagaagtcgagattcaaaaggtattaattctaaaaatagatttgttgactatattgatggtgggtctaaatcaagcaggtcaaatgaatgaaagaatctaagagaaaaggtccaatgtttcaaatgtgaaggctatggacacatatcttcataatgtgctaataccttaaagaagcaaaaggatgggaagaataaggcattgcatactacgtggagtgacagtgattctgactatgaaaataatgagaaggccattgcacttatcacgaccgtaagcttggatgaaccaacgaagaaggatgatgattgtgaagatatgaatattgagttcatcatgaacaaatatgatgatttgctggccgcttctcaaaaactcagcaaacaaaatgaagagctcgtaaaatccattgttgtgctgaagctagaaaattgcaagattgcaaacaagtttcaatcctctaacacagattcctaaaaggtaagtacatgtatgaacgaaaaattgatgtttttgcacaaaaaattgactgatcagaataaattaattgcatctctaacttctgacaacaaagcccttgaacttgaaaattcaaaggaaatgattgtttctttgaccattggtgcagaaaaaattgacaag

SEQ ID NO: 71865 - DNA, 920 bp, Prunus persica
  Intron number 1 from transcript ppa011983m (locus ppa01198 3m.g) derived from phytozome v7.0 (chr-ID scaffold_7; pos 18520584 to 18521503 reverse strand)
tcttgtcagataaaacaaaagagaacagcagtaaggtaagctctatgctcctcacctctcgtatctcctattttttcttgtaatatttccagtaatcattttgttttctatcaatcattattagttcagtgggttggtttgggcagctggtgaagttccaattgggtaaagattgcatttttctctggctgcccaaattcagctgcgcaaagtgttcatataatccatgaatttcatctgccaaattcatgttataaagaaaagttcttgtttgtatagacttctggtcagatttcaggcacttgggtcatggtaatagctgccttgtgttgtgaataagctttctttagtttctatctccatttcatgggctaagccgaagtgctggactaacccatcacttattatattgaatagattggatgaaagctctgatattttttttccttaaagaactttaatttcctaactagattaatagaaatcgaactgcctttgtaaacaatgctgccacttgtgtttccatgaaccaagacaaatcatgaaaaggaactatacagagggatgctctattttaatctgtagagaattacgaatttgggttctgtctaagtgagttctggcctcttcttagtggcattttcacgagaattatttagattttggtaagctaaaatcaagaagaattgcaccactgatgaattggatgatctgtttgattaatttgattgaattcctggaacttgtttttcaaaatttacacttgcaccactggtggatacattagttgagcatagaagagattagtaagcttccaatatggcaaactacctctgaattagtgatgtcaagctgctaatgttttgtatttcttcatatctccagtagcagtaagagaagaacaaggaagaggaagaaac

SEQ ID NO: 71866 - DNA, 391 bp, Prunus persica
  Intron number 2 from transcript ppa011028m (locus ppa01102 8m.g) derived from phytozome v7.0 (chr-ID scaffold_6; pos 30194 to 30584 reverse strand)
gtcaagattagtttctgcacctcttgctcttacaagtacttgtcttacttcttttctgcctttctcgtattgggtctttcattttatgtcaaattattatattcacctgcttcatagattttggcttgtatatattgtgtttatgatgtgagatgataaaagatcaatttgaacagctattcaatagaaattttggaatgttattctgatcctgggctttgtcctccaacccattaaatgctcttgatttatctgttagctcccagtttgtgttccaaaagagatatgtgatgtactacttggtttgccattcacatgttagattgaatcatggaaaaaaaaaatttgagctatgtttacttatgaatagagtttggttttggtaggggga

SEQ ID NO: 71867 - DNA, 405 bp, Prunus persica
  Intron number 1 from transcript ppa026549m (locus ppa02654 9m.g) derived from phytozome v7.0 (chr-ID scaffold_4; pos 18787756 to 18788160 reverse strand)
ttggagaatacggaggaagtcctaccttatatcgagtatgtatgaattttatttttcatatgtagccattttaaatattatttttccttatgtctatcttatatataagggatcgtaatgcttgattttttcgtgtcaatgtagggaacatatgatctacatcaagaccactgatccaaaatttagaaagagaacaaattggctgcaagataaacacaatagcactttcatttaataactacactttaaggtatatgttgaatgacattttgaacttttaattttctttctttctatatgttagattgaattaagatatatgattaatttgtaggttcaaagtgaacttaatggggaagaaaataatggcgtatcagaaaatttgaggtagcagctggtccaagg

SEQ ID NO: 71868 - DNA, 942 bp, Prunus persica
  Intron number 4 from transcript ppa007639m (locus ppa00763 9m.g) derived from phytozome v7.0 (chr-ID scaffold_2; pos 21321669 to 21322610 reverse strand)
agtataaccagaataagcccaccgagattgtatgtcaatttcagtgttatgatatttgcatttgattgcgttgctctctctctctccccctccagttagacctatgtctttctatccctacttctttccctacctacccacccttcaaatgtttctggttacttaggatggaatatggaggcctttcagggcacgttagccgttacatcaattatgtttcatgagtggaaaaagagagagagaaaaaaaaaggaggcaaaggtttagttgcatgggacgttgatcttcttttgaaactagtacttttaggtggtgtaggtcagctttgcaatcattgatcatatgggttatgttacaatttaaatagttgatgtcacaatctgataactgatttatttttttgaagaacaagtcattggcaatggggcatgttaaaatgctcaactttatgcaagtacatgtagtgaatttaggtgatggatttatgtcttatcgagttggagtggatgtatgcttttactcttttcagttgtggtgggtttaagcttctgttagaaaaatgtgatctggtatctctaatgctagcctaatgtaaaagttctgtttggctggttgctttgttgaatgtttaagtaagaaatatgcttgtaaagaatcagcgatgttgcttgaaacttttgggattatagattggatctctattgtgggcaatgctagtgaattaacttttggtggggttattgaataatggagggataaattatttttctcctctagatgagtaaacattcaaaaatttaaaatagtgatagttaaacagtacaatacttttttaagttatggttgggcaatttgataatgtagcagtatatcttgttatgaatcagttggcctttaatatgtacaggtttgcaaacacttcttggaagcagtggaaaagaa

SEQ ID NO: 71869 - DNA, 624 bp, Prunus persica
  Intron number 1 from transcript ppa000302m (locus ppa00030 2m.g) derived from phytozome v7.0 (chr-ID scaffold_1; pos 2942604 to 2943227)
tcagctctgttccaactcactcccactcggaccaggtaatcctcttcatttaatcaaatgcttttcagtgcttattgtttgacaataaagattggatttgactttttacagttttaaagaattgggttatgagtatgaactaagtggaaatgtattattgtttctttcgtgatctgagagagttggtgttttgggattgaatcttttggtgttttattggatatttatatgtgtgtccgtgagtatcttggtaggaagttttgtctcactgtgtcagtgcatgtgtaagagcgtttgattatttgttactccatcttatatgggatgctttctttttgtttagttatgcacctatcgtttttaaggttgtcaagcatagtcttcaatagttcgaattcagcttgaagtacatttcgtggaaggttacagatttattgattcacaagccacatttttattcgaaacagtaaaaagaaagattttgatgaaaatggactatttgttcttttcttggttgttatgttttgagtttatcatgtgaaaatataattgcagaagttgcaatcacagcacagtgttattcagtttgatcttttccccctctttccctccatcttgttaggt

SEQ ID NO: 71870 - DNA, 542 bp, Prunus persica
  Intron number 1 from transcript ppa008707m (locus ppa00870 7m.g) derived from phytozome v7.0 (chr-ID scaffold_2; pos 366607 to 367148 reverse strand)
ggggtataccgtcaaagcctcggttcgtgacccaagttagtcatcagtctcacttcactcctttgtttgataaatagttaaatacccatttcttctttttctttttatttcaattgattgcaatcgcatcccttttctgattaatttgatgatcgctgagccatttgtgtttataggaagcttatggtactttatttggcaaaattctagtttattgaacaatgtatcaggcttgatatgttgggttagtatattttactaataatgcttgaatattttcatcaaagttggtaacttttttagaaaatttgtgttggtttctgaaattaattagtttgatcaccatgattttgtgtgattaggaccttgataacttgattagtttagccacctcaagtaaatattggtagtatcaaactaatccccaagagttgatatatagatgtttagttgattgggagtgttttgattgatatcacacgatcttttgttaaggtagggtttttatggtttatggggttattctcttgtatatgccacag

SEQ ID NO: 71871 - DNA, 554 bp, Prunus persica
  Intron number 1 from transcript ppa001094m (locus ppa00109 4m.g) derived from phytozome v7.0 (chr-ID scaffold_5; pos 14731278 to 14731831)
acttatctcatttggctttggacataggaggtatagttggataattcacttgttttaggacaagtcttgtgatttctggattttaacctctctgttttgttggtttggtaattcagttgtagttttcactgcataggattgtgttttcttttgatctctgcttatatttttagcctaaagtgatcatttttgtttgtttgtttgtttgtttgaggaaactagaagtttgagttggtgcagagaaagggtaattatgcatgtcatgagtttcccaatgagaattacttaattgtgatcaatggttctataattgctggtgtttttagtttgacacgaacttggtagtattcttatcatatatagacctcagtgcctggttgtgagagattacatgtaaaattatgctcatctattcacccctgtttcttgcatgtttcccattctagtaagttggagaaagttgttttagtctgtttataaagatcggcattttgaaattatttaatggtttactggcaggatctctcatcaagttagtgtatttttctagacat

SEQ ID NO: 71872 - DNA, 661 bp, Prunus persica
  Intron number 1 from transcript ppa006095m (locus ppa00609 5m.g) derived from phytozome v7.0 (chr-ID scaffold_4; pos 605707 to 606367)
gtgccattgacggacagtacgtcaaggtcaccggggtaatttcactctcccccatctctttctgatgctcgttcttaaaataattcagcttaactttgttatttaaattagatacacttaatactttcccaatttgttatttttgaagattttgattttgggatacttgctgatgctactatatgttgttttttctgttttgatttatttggtacaacgtttatttataatttagtcttgagacagaacacgtcaattgtttgattttgacaaatactaagctatattattattaagagtttgggttatcatcactatcggtgtcaattggggaagggaatctgggtacgagtccgctttgacccaggaggcatagattgccatttttcatgaataattgtggttaccgcgaccatttgcattggatgctgtaacaagatgttctgcaaaatgtttccaatttcttctgctcatttccttgttgtagatattagggcattcagaaccacctaggaatgagattcatcacaagtgctctttttattttactatgatggggtttggtttttcctttttatgtttgttttaatccgtagtaaatatatgatggagatctctttatgtaggttgttacctgtggcagtattcctttggaatcgtc

SEQ ID NO: 71873 - DNA, 615 bp, Prunus persica
  Intron number 1 from transcript ppa005854m (locus ppa00585 4m.g) derived from phytozome v7.0 (chr-ID scaffold_2; pos 14474692 to 14475306)
cagattactactcagaagctctaaattttccaaaggtgcccatcattctctccttatcttctctctcactttcctatcgtcaaaacaagaaaaatcccaccattttttatgtgtataaactctactgtatgtgtgccttgctttaaactctctgtcactttccttcttgatttatgctgttaattattcattatctaccactgtatttgttgccattgttattttgaaattcacgagctcatttccattgcaatctcaagcaattcttcaaaactcttttccaccagtctgggcccgaccctgaacactattttagctttttatgaaacccatccacgtctggtagctttaaggttgaggaaatcatagaaatttgcgtttcataaaattgaaaaatctgtcttttaactactggggttctctgttaagtttatttgtttctccccttttcaatatccgttgtgttcctgactattttgagaaattaaatgtcttttggtttggtgcgtgattaccatattcattttaaacttaaatgacttgtaccatttacaaatatttgtttcccctcctagtgcaggtccgtacttgatacctagtgccagaatttgtcca

SEQ ID NO: 71874 - DNA, 721 bp, Prunus persica
  Intron number 2 from transcript ppa009134m (locus ppa00913 4m.g) derived from phytozome v7.0 (chr-ID scaffold_7; pos 20402875 to 20403595 reverse strand)
aagccccaggtttctgcttctgcttctgcagcaaagtaattagctttctttcactttccttttccttttccttttttctttgcagaattgtgtgcgtagaaagatgattattttggctgctgaattgtggtattacttctatttgttccattcattaattttttgcttggttcttaattttttttcatattatcttttagtttgtcttctttttgttactaaagaagcctccagtccagtgggttaattagacaaaattgtgcaggtcttctttgtccctttacgttaaattaaacaattctatgttttttcatgcactttattttgtagaatggttgttgcatctctcatattgcatatatttctttccaaatgtccactttgtgagaataatttcaattatttccatgtttgaaagtacggaaaaagattttgtgtcaaggtctcagctcttcctctccaccctttgcttgcatgtatatttccaattttgtctccaaacagattaagaatttttcagatgtacaagccaggtgttagctaggtttcattatattgaaattactactttctggacttctccacacgaaattgtaacctgatgtatgttatacagccatagattccattggtaagaagttatagtggctcttagttaagatattcatagtaaaatctaatttgttttgtcatgtgtgtgtgacagggcacaggttgtagg

SEQ ID NO: 71875 - DNA, 1050 bp, Prunus persica
  Intron number 4 from transcript ppa009601m (locus ppa00960 1m.g) derived from phytozome v7.0 (chr-ID scaffold_8; pos 10318940 to 10319989 reverse strand)
aggattgagttagtcattacatctcctttgctaaggtaatcatgccataattctagaattttacccagctctctgtcttttgtttgctggataatgcttttcttgaacagagattcttaaatttatttttgtatttgtcacttgaaaggttcagtacaaaatgcagaattatagagaaagacccattttgtgaatctttttcattgaaacaaactgagcaacagaaaaggcttattctggttagttagactaaggtgcctttacataaggaaggagcttgagaggagatgaaactaagggttgggttgtacataaaaatcttcttcaaagaagtgttattttggagttgcaaatgtggtacctagaggggtcatttggaaattaaattgttagttattttctcaatagatttttctttctttgttagaggtttgctaagcacatggaaaaacttttaaaattttataaagatctatttctttttagagtcatttggtgtattcgggacatgggtattagagtctttcttggcatgaatagttgaatactggtagtcactgacggaaactcccaacgttctaggtacaagctgacaactatctgtgtgtcattgagcatctaaatagatgatatagatgatatgattttgagacaatcttaaattatccttctgttttaatttgatatatgaaattttttatatactattttattgttcttccaagctattggaaggaaaagaaatataaacacttgtctcagtggccaaatagtttatgctttcgtgttattgttattgaatttggttggtccattagaaattttctttttgatgtaacaatcaagttaaaaatgatgacatggctataatcagttatatgtttaccacgaaataaataaccagttgttttacttaacataaatgctacatatatatgaagatgcctcctccctggaaaacattctatggtttagatgctgctaagctttacttaaaagtgctttgactttttagagctctgcaaacggctgttggagtatttggaggtg

SEQ ID NO: 71876 - DNA, 1008 bp, Prunus persica
  Intron number 1 from transcript ppa009601m (locus ppa00960 1m.g) derived from phytozome v7.0 (chr-ID scaffold_8; pos 10320518 to 10321525 reverse strand)
ccttttgcttatcttctgtgtctacccctggtaaactctttcatctcaaatcgtactcgtatttcatatatttcaatttcttaatttgtagttgtttctggtgagtttattcgatatgggtttgttttactttcgcatattactgacttggtgcattttttttccgatttatatgatataattttcatgatattcctttgatttatgaatttggatggtagaatccttgcttgatttctaaagtcatgtcatgtcgtgtgttatggtttaattgtaagataatgctggcacgggaattaaagattttggctttggaacatcgcatttgggaatggtgacccttccctgaactcttcctgattttaagtaactgggttgaatttcttaatattttttgttcttttcttccttttgttggttgaaatccatgataggaagcaatgctttggatgtggtaggcttcagaacagagggatttgagaagtaagccaataagagtaaacaaagaagtgaatgcagtcagaccaaaagaaagaaaaaaaaaaaaaaggatatgaatgctgggagccaaaatagaaaatgtgttaaaaataaatgtccatagattcagcttgaattgtgtccggcttccattgcagataatttattctactaggaagactatgtcagagtaatgaacgcatcctgctgactacaatatttttccccaagtctttgctagcttttcaaacaaaaatgaggaatttgaaacagtaatatatggatgtttgggttctgcagaaaatgatgatttcgaaacattaacatgtcgtatttttagaattgctacttaatggctgattattatatctctttaacatgtgaagctttaaatcttgaactgtggttatatacttaaagttataattttcaccaaatactcgcttccttgtttttcttgtactcttatgatcatcttttttttttccttttaatgttaatgtatcttttattggctaagctgcagat

SEQ ID NO: 71877 - DNA, 663 bp, Prunus persica
  Intron number 3 from transcript ppa007431m (locus ppa00743 1m.g) derived from phytozome v7.0 (chr-ID scaffold_6; pos 15863363 to 15864025 reverse strand)
cactgctgaacaaattaacagggaccttctcagaggtagagaactgttgattaatctcaatctacgcaaaatctgtatgaggcaaataaatttttttgagaaaaagaattatttgtcgaagtgtgttaggcatggaagcatatagattttgattgagattacttatgatgtttaatctgttgacacgtctataatattgggtcaaaattaaatttctaattttctgtgcaatctactgggattcattgcctggtctccctatttagaggtcctcaatcaatgtcattgcctgaagtacatttttttttatcattgtcttatgtcttttaaggatgctattgcatagaaactctcagcaaatgtaatttaggatcagtggattagaactatgtgtagaaatactttgtaatttggtttcatttataaccttctgctttaaaacgttggggttttgggtgttagtccttcctgtgtttgtgtctgatatctacatatgtgataaaacctaaatgcttgtttactttgtgaaacctgaatgttattattgttattccttccttcattgtgcagccatgcaataattgtgggttgccaactaggattttaagaaaatccctgatattctgaagaccatgtaatgtttttgtttacaggttgcttcct

SEQ ID NO: 71878 - DNA, 400 bp, Prunus persica
  Intron number 1 from transcript ppa007431m (locus ppa00743 1m.g) derived from phytozome v7.0 (chr-ID scaffold_6; pos 15864321 to 15864720 reverse strand)
aggtatttgcctgcactgcaatctctgttgtactttttctgcgaatgaaaaaccctagaacattctttattttccatttggtcaatgaaaactaaaagaaagtgaggggaagcgtaaaaaaatttagccttatcatttctttgatgcttagggctttaatagctaagaaaaaaaaattcgaacaatatgtaaatagaaggggaagcatatattttgtcataattcttagggtcttttagatttgttaatttccaacagttagaaactgtctatgtccactcaactccaatcaaggaaaatacaagaacaaaaaattgaaattttgagtttggcttttggttcttttaatagatttccaagatttttagacaattgagggctctctgctgattgtttgcag

SEQ ID NO: 71879 - DNA, 779 bp, Prunus persica
  Intron number 4 from transcript ppa013545m (locus ppa01354 0m.g) derived from phytozome v7.0 (chr-ID scaffold_4; pos 13450008 to 13450786)
gaaagaagtgacataccagacattgataagaagaagtcagtcttgtctttatttgtttcacatgtgctttatatatttctattttggtggttcccaattttcttagtaatcaagacttcatactggcttgtacgtgatataatttatttatttttcctgcttggatgagttatgccatgatgcttgcttcctggtactctgcaattttctaaaaggttttccttttaaagaatgtgcacgtgtatgacacttctttggtaaggtcaagacttgatacatgcttctatgttatagatttttttttccctgctttgacgagttctgcatgggcttgcttgctggcactttacaattttccaagccattttgaaagaatgtgtgtggtgttgttggctatatatgtcttgcatgggattaagttagacattgccaaactatggttacattatagattatttcctacatagggtgtttcatgtgtatgattaagtgtttaccgtggagcacaaacaagttatgtgtctttgatctagaaatttaacttcacatgtatcactagccatcacgagttctcacttcataatattaccagaagaaattaggaagagctagtgtttgcattgaagctgaaatgttagtttctaacaaatggacttttgattgttacactctctgtaaaacattcttttcacagtgcacgatctaattcaatggattttgtgtaatgatcaatgatcgaaacagatatctggttcctgctgatttgactgttgggcagt

SEQ ID NO: 71880 - DNA, 1002 bp, Prunus persica
  Intron number 1 from transcript ppa006916m (locus ppa00691 6m.g) derived from phytozome v7.0 (chr-ID scaffold_6; pos 25763126 to 25764127 reverse strand)
agctcagcctcgggactcagatattcgcttaataagtaagcactagagtaagagccaaaaaattccatgcaaggcttttgcttttcttgtttttcatttgtaattttgctgcaattcatttggctttgtactcggcttgaattgtctgttttttgaattgtttttgaactttcaaagctgggttcttttttctttgagattgagtttctgggtttttcttattattgttgttgggtgctcttatgttatgtgttcaatatgcgtttgtgatgaagtctctgtttcaagtttaagtggaaatgagcaaagttagtttgtgagttaaataattttccagagtgctcagtttgaacttggcagtttggcaattttattctgaagttatatttctttgttttgtttgtaatgaggacatgtgaatggatctgaatatattcgtagaagagaaatgagtcaaaagttaatgtctttggcacctaattttgtgattggttgagaatttgagagtggatggtgatatagctctgtctgactttgtattcttgtttctttgcttgaaagtcttgtgatgtggttaaatggttttcctagttttgcaccaaactcaattacttgctttcatttttactttttgtggacaaattttacttgcttacattactatagctatgatcgcttgaactggaagagtggtactttccagctctctagatctgagtccagatttgtgatattttctataatttatggttaacaggactgattctcttcctgatagagtttttagcttttttctttaatgggtgtgtgattgaagcttgtctgatgaccttttctttagtgtagttactttggaggaaaattttatgaaaactctcttcccatacttttaatatagattattcatttacttttgcatctctatatgtcacttagctacagatgacttatatgctgaggtacttactaactctaatatcggttcgttttcagcttgtaaaa

SEQ ID NO: 71881 - DNA, 644 bp, Prunus persica
  Intron number 1 from transcript ppa011868m (locus ppa01186 8m.g) derived from phytozome v7.0 (chr-ID scaffold_7; pos 18784545 to 18785188 reverse strand)
ttcgggtttgcagctgatatcctccccatcctcgggtatttacaattccacatattgatacataaatatttgtataacacgtatttacatgtttgttcatatttgtgttcatggattgatattgaattgtcattatctttttcatctggtgcattttacttactgtttgatggttttggtgttttgggttgatgggtttttttttttctgaaccattatacatgcaagttgtgttggtagaggaattgggttttccagttgacagatcttaatgatatgtatataggcagcattgatgcatttgacatggaactgaaatttccattccgagagagagagagagacaaattcctctctctccttttgctttaattttgttagacacttatgatttgacaaagtgtttcatatctgactctttgttagcccaaaaatgaagaattgagatgaagtactattgtattgattcaaatatcagaaggaaagaaaaatgattttccctttcagaaacataaaaaattacccatgttgctataatcctaaaaatcaatgaggaactggttgaagttgggaacttggtggatttggtatgttttcttataatgacgatgatttgaattaatcctttcacagtgcaagatctg

SEQ ID NO: 71882 - DNA, 897 bp, Prunus persica
  Intron number 1 from transcript ppa005573m (locus ppa00557 3m.g) derived from phytozome v7.0 (chr-ID scaffold_8; pos 20457626 to 20458522 reverse strand)
tggcgttggcaacccaaagattgcagcttgcccaggtatttaccattttgtttatgtttccctgctgagatttttaaggaaataaaaatatttgacatcatatttatattggtaaaggttcaatgctagtagagaagaaagcttcctaaattttatcagcagcccaagttattagaatttagcttttgttttgctgaatagatttagttatccttcttttgcgtgcttttgtagtgttaatttgggcgtcgttgttattttctgtgtcaataatttgagttctgtacagtattttggtggacctcttttgttgattagctgcacccgtgaaccttttggcttttggctttgtcaactcttcatctatatcacaatttcaaatgttcaagtactgaggaaagttctctgtttgctctttcgtttcggttgttttgttatattttttcaattttctctctttctgcgtgcccatgtcagcgtgtgttgtctttgtctacgattgtgtgcttaaaacaatcttcttctcttttttttgtcctcgtatgccctttgaaagtggaagtgttttgtttgattaccttttctttctgaatctaaaaagataaaagaaaactattttgaggttttcttttttactgtatttgacattgtgattgattatatcgtgatttttcatcataaccctaattaagtacattgtggttcctctttaatggctatgatgataataatggtactttgaatcttctctaattaagtacattgtagttgctctgtttggtgttcatttatgttttagactatgatcaacctcatggtttgaattatgttctaaccaggagtagattgtacaagaagatcttattgggtttctgtcttctcttaagaacagatttg

SEQ ID NO: 71883 - DNA, 937 bp, Prunus persica
  Intron number 1 from transcript ppa010266m (locus ppa01026 6m.g) derived from phytozome v7.0 (chr-ID scaffold_6; pos 4636750 to 4637686 reverse strand)
ttgagcgtcaagaagaggtcaatttggcaattaaggtactcttctgtgcttaaatctagtgtctttttgcatttgctcttctgggttgttctgaaattttcattcttgggtatataacctgtgctatgtaaatccacttaagtattgctagtatagaattgtcgtggaaaggatctcagtgggtgctggttatgtgtttgattaaatgcccaaaagtaatgtgcgctcttggacaccttgaatatgcttagctaatgtttaacagtttaagaagcattatcacttttctgttcctgatgtaagccacttcgtcaacttagctttagtattagttttgctgggttgtatttctgtgagcaatgcaagctcgtggtgtatggtaaagttggattggagagggtccttttttaggtcaattccatctttttcgtatggttaaatcggccttaacttttcacttgtagttatagatgttaagattgctttttggatttggaaatagctagtaattgttaaatgttgttgaaatctcattctcaagattaccatatgaacaatgactcagagaagaccacattgccatatgaaagtgagaaacaagagtagtttgtattcacattttgggtttattatttccttcaagcgctcaggttcaacccaaactctttcccatgcacagatggtgttttcattttaattgtttctcagaatacaaattatagcatgctgtggtttgcaaacttgtttctcagaacgcgtgagaaaaaaatggatttagctcattatttcgaatgcaattccttctagatttccaccattgtgatttttgtttcaattgacttttcaacttttgtttaaattgactattgagttttatttttctttctccaatttttgattgggcttacaagccactcagttaattttcaggtgttta

SEQ ID NO: 71884 - DNA, 1062 bp, Prunus persica
  Intron number 1 from transcript ppa008029m (locus ppa00802 9m.g) derived from phytozome v7.0 (chr-ID scaffold_2; pos 18583951 to 18585012 reverse strand)
caagagcacgacaagtttctcgaagctcttcagctgtaagccagctcaattttatgttattactgttgtttttttgggtttatgtttgcgaatttgggctctgttttgttgctcaagaaaattggggacagggtatggaaaatagatgaaaaagcttggtttttttacaaaatataagaattaaatggaaaagctttgttttcaatttcaatgactgaacgattggtttggaatggtttttttttttttttgttttttttttttggggtaatggattatttatttttccttgcctttcttactaaccaagtagagaattggagtttattgcgggtcattcggtttttggatatttggtacttataattatagataatttggtgggttttactagtcaatttacgccaaatatattaatttggctaagttggagttaaaagtttgtcccaagggtgagttttttgggttttggactattggggtagcagctttcaagtataagagaaataagaccttgtatattgtgaatgttcttttgtaccttaggccgtatttgaaattaatatatcggtttagttgatccaactgatcggattaggttcatttaagtgatgaatttattttatacaagtttcaaatcttgaacatttctttgattttggaatttcattatcgataccaatttttaggtagtactaggtgctttacatagtttggtatccaagaaaattgagatacaaaagtggtgggggaaaagaaaccaaaaatagtactaagctcgtctaagtggagtttactgttttctcaagtcgtaatttttttttttattccttatatatttagatttgttgaatagcaggacttgcctcagtaggtcgcccaaaaaaataaaaagatagagtagaaaacttgaatgtatgtttaattattttcatgcaagtcattcctccttgtttatattttcttttaaaaaaattcgtccttgtttatgtttcattcttatttttgtttacttggctcaacttagatttgatcgtgactggaagaagattgaagcatttg

SEQ ID NO: 71885 - DNA, 611 bp, Prunus persica
  Intron number 1 from transcript ppa007791m (locus ppa00780 8m.g) derived from phytozome v7.0 (chr-ID scaffold_6; pos 5760918 to 5761528)
tcctccaaggtatcgacttgttttctgttttgttttgttattgcgatttttatagcgcagaattcttgttgattggttcactttttcaattctgatttcattgaatggatttggatttaaaaaatttacccttttggcttttggtgcattataacatatatggattttcatgatcggattggtcttatctgttttcttgtttgttttgcttaatttttgtagatcatgaaattaatggaggatttggttgtttgctttgggaattatgaaattcatagatgaagatgttatgattgcatcttttcttttaaactattcacgcctttttgtacattataatatataggtgttttgaatgatattacttttatatatgggctctcagctctgttactatctctattttctttagaaataaaccaaaaaaaaacttttttttcttcatatgtttaaattcaactggaaacttcaataaggtgaaattccaaattagcaaattaataggctaattgttatgttttaaattctgtttttgtttgattttagtttaactttgcttttcttgggttcctttaggtgctggtgtagttggaattgtcctccctgagaag

SEQ ID NO: 71886 - DNA, 840 bp, Prunus persica
  Intron number 1 from transcript ppa003866m (locus ppa00386 6m.g) derived from phytozome v7.0 (chr-ID scaffold_4; pos 4256695 to 4257534)
ggtcttcgagtttcccattattcaggtcagctttcagctacttatgtacatcttttgaatctgtctctgttttcttctttgtcctaaaagaaaaattatgttatactctttgctgctatactgtgttatagtttttggtgctatagctttggttgctgggaaacctggaagtagcagaagtaaaatgcatggctggttcaaagtgtgcaggctgtgtaaaataatgtttcattctgtgtttgttttagtggagtaacgagcacctgggtttggataaaatggtagattactatgattagatgctcaaataccctagtcaattgattgaaagtgagtttctagttccacacacaactaatcatatttcgacaaattgcgttcataccttagatatctaggatgattacagtagtttcatgttttgagatgtagagctcaaagggagtggggagcaaaagaaagaaacaatccaagttttgctataaattgccaaatcatgttaaatatgatgagatgctatctgtcattgggttctctgagtaattaagggttttcccatttatagtgtctatgttggagtacggaattcctctctttttagatatttttacttttcttgtttatgagctgcaatacgcattggatgtagaagcatgttaaatttaccggttgagagttgagactctttgagttgcactcagatttactaagttttcagtcttaattaattgttagcctgtttaaatatcctcatgttgccttttgcgttctcctcacacaagtcgtggctcttactctaattgcttatgtcaacagcgtcctccttttttcagcttcaag

SEQ ID NO: 71887 - DNA, 452 bp, Prunus persica
  Intron number 1 from transcript ppa000338m (locus ppa00033 8m.g) derived from phytozome v7.0 (chr-ID scaffold_4; pos 3568858 to 3569309)
gtttctaaggtacatgcattattcatatgttttatatatatttttttgtatcgacccaagaacaagaacaatatttctttgtgtatataaaagaaaatcaagattcttattggttttttcctttttctttttgggttgtttgctgatctttttctttttctagccttaattgttgttgttatggttttgcggtgagtcttaatcatatgaagccaaaaagcacggcgaccatatacaatgtgaatacattgcctaatttcatcttcatttcattttgccagttggtgttgttgttgatggaagctactgaacactatatatacgtgtcaaacaaaacacaactcatgagcttccgttatcatgcaaacactacatcccaattttgaaatttgtcctccttgtatcttttttttccaggtgtcgctaaagtttgtgtatttggctattggcac

SEQ ID NO: 71888 - DNA, 932 bp, Prunus persica
  Intron number 1 from transcript ppa009122m (locus ppa00912 2m.g) derived from phytozome v7.0 (chr-ID scaffold_3; pos 20305973 to 20306904 reverse strand)
ccagagatcgctacttcctctctccattgacccaggtctctctctttctctctctcaatctgtctatataaatgtatatttttacgtatgcttacaagttacagtctatcactgtgagtgagtgcattttgggttcttgttataacaattattctcgttgcttgaatttggaagtgggtttgttggttcttcttttggtactatgaaattcttccatgtagttggatgatctttcatcggttcatttggtttttacttttgttctaactctatgcttaagcaaatatgtaatgactttctgcttgtgaaaagagattgaagtcaccaccaattcatatgaatttattttctttaggtggaagcatattcatttgtgactaatatgaattccaacctgaaattctgggtagttgctatctcaaaattatggtagcctgtaatgaaatttgagtcagtttaatctgagtagttagaaccatttctctctcattcacacccacaaacacatcgcatctgtttatagaacacatgcattcaaaatccctactctatgaaatcatgtgatagaacacatgttggtttcgaattgtcatatagcattgtcatattaatcgttattataacttttactaataaaatgcagtcatagtgggtattctgttttgatatatatgcaagtaggtcaaaaattggcatcttggtggccaattcaggagattattgctgggtgaaaactcaagtagtaattgatcttgaaaaacgttgtgcattgtttttatttcatttcctgcattatgcatgttgatacccttggagttcctcaagattgcattataactacatcccacgtttatgttcaccatattctttcatatagcaccaaacaactggcttcttatttgattgttattaatttattttaggagttggaa

SEQ ID NO: 71889 - DNA, 472 bp, Prunus persica
  Intron number 1 from transcript ppa003468m (locus ppa00346 8m.g) derived from phytozome v7.0 (chr-ID scaffold_2; pos 3485934 to 3486405)
ccactgcaaactcatttcccgcgaaaattttactggtccgtgcagttttcactctctgatgccttttctgtttcgggttttatttttgttgtttgggtttttgtagttgactagagtacttagctctgttgggttcagttcaacttttacgtttggttgctggcttatgaatcatgaatgaaagtgaaactttggcttcttgtccctgttcttggggtttcagaatctgggttttcatcaaaatttcaaattgaagtaaacacctggaatatttgtgaacttcaaatttgattggttttgttaggcttatgaattcccaaaaaaaaaaaaaaaaagaagttgaggagtagaaaattaatttttggttttgattaattggcaatttgtgttatggatagggtgagaacaatctaacccatttctcttttcttttggcattgatcagaagtgttgtcggatttgcacaagaaat

SEQ ID NO: 71890 - DNA, 659 bp, Prunus persica
  Intron number 1 from transcript ppa024470m (locus ppa02447 0m.g) derived from phytozome v7.0 (chr-ID scaffold_4; pos 13997675 to 13998333)
aggagccgccgcgccggaagttccgctacacgcccgtaagtaaactaccaacaggcatatacatctgtgtgcttcaatcgctgcgtatgtgtttctagggttttcagggtttatggaaattgtgggttttggtgtaaaatctgtgggggatttttatcttttgggagggaggatgtcttgaaggatttaattgaagtgtgctgtataatgttaggattttgtctttaaaattagaaggttaggaatttaagctgctcttgttttgaaataagaacttgtatgattatgtgttgtacgctataagtgatgttctttgtacaaaattattgctaagttgagaatgttactgttgttttttaatgtacaatccttccaagtaatgcagttttggacaaatgttttgctttctggcattcaaggtcatgcatttttaactttgagttgcccagaatataaccaaaaatagatttaaaagtcctgggatgcgtagattagaagcttgatgctgttaattcttaaagaaaaaaaagagaagaagtaaaagaaaacagaaatttgtgtcatttataatccgggtcactcccattttgagcattggttagtggcttatgattcattgtgcaggttgctgtgctagaggaacagaagaagacagccaa

SEQ ID NO: 71891 - DNA, 533 bp, Prunus persica
  Intron number 1 from transcript ppa001984m (locus ppa00198 4m.g) derived from phytozome v7.0 (chr-ID scaffold_4; pos 286724 to 287256 reverse strand)
ttcttcttgctctcatcatcgtcttgacttctcaggttaattaattcacaaccacaatccttcctttctctcaactttctcttcagtttttttatttcttcttttcgtttcttttctttcactgaacttggaaggtttcactttctttttcctttttgtttttttgtttttttttcttttttaagaaaagaaaacgtattctagtaatattttgaattttatatttcagtagagattttggaaatttttatatatagcagatacccattccatgaccatgaatggccttatcaggctgccgtgcattcaatttcaataaatcagtgttttgggttctccaaaaagaaaaaatatataataatagtcgttaataaagaaatagcctttcaaattcagaaaaaagtttttattttattttaaaattatacttgggatagaggctagcaaacatgaagaagccaaagatttgtgaatagttgctgcaatttttgtttgaatttctgggttttgtgatgatgtgcagatattggggt

SEQ ID NO: 71892 - DNA, 657 bp, Prunus persica
  Intron number 2 from transcript ppa005156m (locus ppa00404 0m.g) derived from phytozome v7.0 (chr-ID scaffold_2; pos 4001091 to 4001747 reverse strand)
accgccaaatttccactgttgctcctggcactagtgtaccttcttgttactctttacctcttgttactgttattatgttatgattaatataaagctgcatggacaactacttagtgcttcaggcttttatttatttatttatctactgttttttgttgcttgtttgatttttctgggttgtttaatatatttttccgcttcctgttcagtagaattagaaaatttttgttctttcctatgtatatcttcattttttccagaaagccaaggtcttgcctctgtggtgatctttatctctaacttcatgtcaatttatcttttcttctttttctatctcttatgacatgtttatataaaacttagaatatctagaaatgaataggggactgaagtggaatggtaaaaaatgttgcaatattctgttcatacactacagaatcctgagtactacctgtaatgctaatgcttgcaggttcaccataccaggcgattttacgagaatttagtccctaattgtaccatatatgaagttgagtgcccagaccatctataccgtaaaatcactgaggatggtcaatacctcatatgtttcagtagaaatcatcaggatctgattgtttatagaccaacgtggctttcatattcatgcaaggaaga

SEQ ID NO: 71893 - DNA, 646 bp, Prunus persica
  Intron number 1 from transcript ppa023736m (locus ppa02373 6m.g) derived from phytozome v7.0 (chr-ID scaffold_8; pos 3610977 to 3611622)
aacaacacaatctgagtcttcatctggtgcaacaggtctgttttcaatcatccaaagcatcaactttcattcacttcttctatttcttttcctaatctgaacttgctttttctttgattttatcttctaaaaacatcaatgcttttgcaaaaagttcgaagcaaaatattttgttcttcaagttcatcttaaactctagcttgttctgaacttatttatctaaacaatctttaatcctagacaatttcttcctcatccttttttttttttttttcttttttgttaagatttgaagagagttcttctacataaaataacagtaaatattatttttttccctaagttctttctgatatgataacatgctaatatatgtttctgatattgcatgctgcatagagtttgttgtaaacatagcataagtaaggaagattagaacttctaatctatcaactttctagagaataatattacaatccaccttcaaaattattcttaaaaaaaaaaaaaaaaaaaaacaatgaaacagtgtcttccaccatgtaagcttaccatctcaatatggtataacttgtatatataaatcttcttattccaatactaattatcaacatatttttacatacaatgacagaagaagctacaa

SEQ ID NO: 71894 - DNA, 1007 bp, Prunus persica
  Intron number 1 from transcript ppa010508m (locus ppa01050 8m.g) derived from phytozome v7.0 (chr-ID scaffold_5; pos 13817670 to 13818676)
ctccaccaagcctgacaaacgcctcattctcattggtgaatccctacttatccatccttcattatactctttcatatgcatatatgtgtgttgtttgagtttaaagcttttattttgttctcagttttttgtcaagttttgatttttaatagccgcccagatccgagaattcgatgtgtttatgtttcaaaattttggtgccttttagcttattttatgtgtttctcgttatcttgttctcattcctgactgagatgtccttgcgactgtgccctcgatttattgttttcctttgattggttactgagaaaatgtaggaaaatcctatggatagttggaatcatatttctaaggaagaaaataaggttgctgaaagaggcttgatttatttcaattatgtcttttctttttcggttgacagttcaattatgtctttcagttattgcccttttgctctcagtacctataaaccaaatggtgattgagattttagacttttgatggtttgatcctggtttttttgtttgttttcatttttttaagctgtagacggatagggtgatcaattgtctattcatctctctttctctctcttcctattgtattctctattatgcagtaaaatgctgagacattgttcccaaaggatgttatgctgacgaattctggcatgcctgcatgccacctttaatacattgtatacacatgtaggtatccctgtgtgtatcagtgtgtttgttttaatttgagatcttatttccgccttccttccctgaaaagaaaatagggaaatctatgagttttagacgtgtctttcctatgttgcttcctacggtggtgatacatgaagcaccaaatttttccaggctttaagaaatttttctcacagtttgctgggtttcatgctaggagtgttttctttctttccttggctgttttcatgtgtgtaatcatacaagttgtatggtgcaggcccacctgggtcaggaaaaggtacccaatcacct

SEQ ID NO: 71895 - DNA, 826 bp, Prunus persica
  Intron number 2 from transcript ppa009101m (locus ppa00910 1m.g) derived from phytozome v7.0 (chr-ID scaffold_6; pos 13157436 to 13158261 reverse strand)
tcatagacaacagatttggcaggcttgatatcctggtaggggagggtttctactctgtgttttttgggtttttttttttctgtttaaattctcatatttccaaaagagtgattctctggacttagtaattttcttttctctttttttttaatccataattgttttaatatatagtggaaaatttatcaatttggtcattcaaaaatttcaccaccgacccctcctccttcccaaaggctccctcaaccactcagatctaagggcagccagcaggagcgaggaggcaattggctgtgagacctatgtccagctgtcaagaggcaattggctggggatactgaggtggaaagcttaccttggcatccccatggcacgcaagtttttctcataaattagagagtatgattgaagttcaaattttatatagagctctaaaataacttttctgtgtttttagctaaattttaactaaaaaatagggagcataattgtagatgctctaacacacttgtataatttatcaaactcgagaaggttcatgagcaaaccaatagaaaaacataggtaccaaagaactttctttgtaatcaatgaggtgttatttggattggcctaggcctttggcgtgcttccaagttgtcttaggttcaagcccccgtgctacccgtgtgtgagttttctcccttccccatcctaactttggccaaaaaggaaaaaagataaaaataacttgtttgtattgttctgtaaaattcagtaggaactgtttccacctttggtgggtaaaaacgaagtgatctgacagtttgattcctgcaggttaata

SEQ ID NO: 71896 - DNA, 344 bp, Prunus persica
  Intron number 2 from transcript ppa003823m (locus ppa00382 3m.g) derived from phytozome v7.0 (chr-ID scaffold_1; pos 21504711 to 21505054 reverse strand)
agtacaaaggtattccctttcaccatttactgtctttttgttttgctttgtttattatgtaacaatcttacgttgttgaagaaataaatagtcgaaacttgttcttatggtttaaatggttttctgtgatgtgaacaagaaacttgttcatttggtaattcaagtcattttgaactcatatcaattgatgctactgtgattaattgctgtatattttcggcaacttcctcatgcatgtaggccacacttgagctctctctgaatgtgttgctttggcagtgaattttgtgtactgatatgtttatataatttaggtgtctggaaactgtccaagagtgagggac

SEQ ID NO: 71897 - DNA, 766 bp, Prunus persica
  Intron number 1 from transcript ppa022687m (locus ppa02268 7m.g) derived from phytozome v7.0 (chr-ID scaffold_3; pos 6816776 to 6817541)
actcgaggtttgtttatctttctcactatttttttggattttcgcgctgtctttttgggtttaatcacaatgcagctgcaaattttaggttttggaattttcctaatttttcttggcaaccaaacagtggaaatgtgtaaattggatcaagtggttccattctactacacagatcagtttaaattaaattcatcgaaatgtgtaaattgggtcaagtgtttactgattgctcgagcctcctttgtgtatttagtgaataattagatttgggttatgactatctgagctatgggaattacaatcatttgtatttatgaattaatatttatttatttggtttttttatatgtaaaataatatatataagctcatcttaatatgcatgttgtcataggaaatttggggctcctctaatctcagtggcattttgttctgctctcttattgtgtgttgtgtgttgtgtgtaaaaaagaaaggggaaaagacaatgtgcactgtgattttgactaccatattgtaggtaaatacatggtactattttcatggtagtttctttagttgatggttgtaatccatgaatgtgccttgtatgaatggggttcgtacttcattatcagattttgtttcggttgccggttgatttgcccgtctccctttcatatgcataaggggagttatactgctggtattttatctgcctaatgtaattcaaactgtgttctctcctgtaggggcaaagcatcaatcccatcaagattacttagag

SEQ ID NO: 71898 - DNA, 1030 bp, Prunus persica
  Intron number 2 from transcript ppa012526m (locus ppa01252 6m.g) derived from phytozome v7.0 (chr-ID scaffold_4; pos 8773358 to 8774387 reverse strand)
atcccaagcacagtgacaggtctcagactactgtggtatgtgtaatttttgttgttgttgttgttgttgttgttgttgttgttgttggtatgttatttgtgattgcaagttgttattttgttggttagagttcaatttattactgcattttgtactttggcagtctggttatgctgtcaagttgtaaaacaataaatttacttgtatttattaaaacattagtaacttataaataaatagttttttctttttgtgtggttttaatgactttttttcccttagttgaagatgtcttctatgctccagctcaatggagctcctttgatgtgtagtgtgcaaagatttcaatgtcctctgtatgaatctaggttgtgaaatctcaattgagtggggaaaaggagggtcaagtggttgctatttctaacattttatagtggctgggccttgatttggtatataattgatggtctaaaagtaattcttcttagagttattagtttatggaaatgcttggttagtatgctgctatgcaatttacgctgtctaatgttttatcgtgtcaagagtaacctgggacttcctgtttttctggaggtacatgatttttatgtagtgtgtgatcctagttatgttttagtgtttagtatttagtatttttatatttgggccctaagttagctttctaaatctttttaactaatatttagacaaaggtgtccactggatgttaatattgagaatgcattctgatgctagccaaactttgatatactttggtgcaaacatatttgaccagattaaatgccgactttgatatgggattcctttttcgaacagtataaaaaatactcattttcagtgtgcgtcctctctctactgtcttacgaatgtgatgatttgctgcttaatacagagtatttatttagttatttccttttccttttcaaaactatcatattatatttctgattgacgtgattgatttattgctttctgtttttgggcttggatgaataggtgcctaaggggc

SEQ ID NO: 71899 - DNA, 615 bp, Prunus persica
  Intron number 1 from transcript ppa000516m (locus ppa00051 6m.g) derived from phytozome v7.0 (chr-ID scaffold_1; pos 22804043 to 22804657)
agcacaagtcaaacgctttttctgcagttcgtggtcaagttttgatttttcgacaatcactgaatatgatgcaatcaggtacgtaggatcgcgagcttgttctcttatagtcagaaagaaaagaaaattacaaaattactagtttttgggttgaatttgagtctgaaaatgcactgtttatatagatagatttggaaaattttctgacccccttcatgtttataatcagggcatttggacctgttgactggtttttttaattagggattgtttacaaccatcaaaatttgcactttgtcttggttaatttctttctgcatgaaatgaagtaacggttcaaatgtgattcggctgtttttggtttatcttgtagttaatttaatttggaacgtcagttttaagtctatcctgctgcaaataatttcatttttgttttagattgggtcttaatgtctgacatttctgttttcctcggattctatgatcttatacaaagcctgtgctatgttgcaatcacagcctttgtaaactatggttcatggccattataagttgtcaattggaaactgtttgacatgtgtactattatgcgtgtgttctcagggtataatatta

SEQ ID NO: 71900 - DNA, 393 bp, Prunus persica
  Intron number 1 from transcript ppa009588m (locus ppa00958 8m.g) derived from phytozome v7.0 (chr-ID scaffold_5; pos 10927007 to 10927399)
ctttgcccttgtctactccactgctggtatctcaggttagcttctcctcccttttcatctcttcagctttcaagtctttatttaaagttgataacttccactgaaagattaaaaaaaaatattcttggtgtatatttcatgggtttcttcagaatttatttttagtgatttttaaaaatattttgggtagatttttgtgggtgtttcaactatctttgatgtgggctttccttgttatctttgatttttcctcttaaaatttgttcttctattttaaactataatttgcttcttttcatggttacatttttgtgataaaattcttttgtaaccagatctgtgtgcttgcatgtaacaggtggacacatcaacccagctgtgacctttggtctc

SEQ ID NO: 71901 - DNA, 836 bp, Prunus persica
  Intron number 2 from transcript ppa009588m (locus ppa00958 8m.g) derived from phytozome v7.0 (chr-ID scaffold_5; pos 10927656 to 10928491)
tccctgtaagtattctttattattattattatctctgttatatacttttgcagcttctgattgtttaattgttttactattttgacactcatgtgtccgttgaatgggtttagcgatgattgagtgctccaaagctggtttatttttcatgggctgtttataaattggtttctggtttagttctttgggctgctgctgaatgtctttggttaatttatagtctgtgtggaagaaattgttttctgatcttctagtttttctattctttgctcagctgcccaaatggctgaaagggggactgtagaattatcacttctctagtccttattttgtgaatgctggaaaataatgacacttgcatgttgcttttgtttgtttgtgtcattggtgtgggtgcctttaaggtggaaaaagttctgttgtgcccagagggtctctcacatgcgtgtgagacccactggtgtgtttggtggatcaaatatgcatgtaaatgtgaaagtggggactgaattatacctcccaggacactcctccctttttaaggcaaaatgttatccaccatttacgagtaagactccctagtccctaccaacaagagatcatttatgggcttgcttatccactttgttttgtctctccgtggttccttttgctctacagtacctctaccaaatgatcatcttcaaacatttgttatatcctaagtcaaacttagcaccatgcttggaagctcaatgaatcagaaaggtcattatttggactgtgttttaacttagaatgtatatgtatctgtgtatgcagattttggctcctcttcccattgggtttgcagtttt

SEQ ID NO: 71902 - DNA, 711 bp, Prunus persica
  Intron number 1 from transcript ppa000568m (locus ppa00056 8m.g) derived from phytozome v7.0 (chr-ID scaffold_1; pos 42206683 to 42207393)
aaggtaacacgcaaacacactctctctctctctctcccattcaaatttctcttttttatttgctgtatcgtcgcctgtttgtttgctgagaaaatggagggaatgaaaatggaagaaatggaatatttaatcctttgaatccaattatctaaattacgacaattgtctcatttgttgtctgtcactgtcttttactttgggtgcgtgtatcaatttgtgggctttttgaattcttttttgcttttactcgtcgttttctcattaaccaatcctattccttggttggttcttttctgaacaactgggaaaccaagtcacttttttcctttccactgactcattttcactcagttaacttcaaattttctatttctagatgtaggataaccaaacaatttataatgtcatacgcacatatcgttgaagatttgtctttctcttttttttagggtcgattgaatcttattgagttataagatgaccttaagatagagtagaacaggaaagttctgaacaattaaaattcttgtatacgatgaggatagtgctattgtatggacatgtttttttgttaatatttatccgaaatcatggttggatttaatacttcatgtattatgcaatcatcaatggctacacaaatatctgcttaccatgcttgtcaaatgttattgggctactgcaggttaccagggtaggaagaaattgaca

SEQ ID NO: 71903 - DNA, 824 bp, Prunus persica
  Intron number 1 from transcript ppa007665m (locus ppa00766 5m.g) derived from phytozome v7.0 (chr-ID scaffold_5; pos 6487008 to 6487831 reverse strand)
gcttccttccaagccacttcctcctactcaagctggtgagttttagattcatttctttgcttctacagttcatttcttggttttgtctgctgaaatacctattgggttttctggaaatagaaatgaaaatgaaaatttgggcatcattgaatctgttgtctgagtttcatttcatggttgggtaccgtcgagaaaatctttatgacttgctgtttgttgattatgttttgtgttgaggttggaagatgttatttggataagttattgctatttggtgtatttggtattgttattgagtatatttgatcagatttggtgttaagtgttctctgtgtgtggtggtgcatattcttacagtttgattttttgggttatacaatttgatatctatttttggaactgaatgatacgtatgcactatcagagctttttttctggttttttttattataaaaaattccagtaacttttcatgaaccaaatgagattgaatcagtggaactggtgaaatgaaatctaataaatctgtggcgtgttcatgctctagatgtgtcagctttcatatttgaactagatatataatgttgatgaaatttaaatatatataatgttattctctaatgattagagacattcagaagtttagtacttataagattttcaatgtataatgttgatgtaattttcttgtcaatgaaagatggttggtcaaggtgctggtatgattttctggtcttctcttaatctatgttatacattttatgttgtatataatatgtgtatcacacaaccggtgttatcatgtgcagtgagggaagggaagt

SEQ ID NO: 71904 - DNA, 618 bp, Prunus persica
  Intron number 3 from transcript ppa016996m (locus ppa01699 6m.g) derived from phytozome v7.0 (chr-ID scaffold_1; pos 5778329 to 5778946)
gctgatttaaggtataaattcgtggccaaccccacttctttttctggtaatttatatcttaatgtagtagtaatcctttagaacaatgtaatgaactacatttgccatctttgcatttgttattatctgaaacaattcttatatcatctttttttagggtttaaaaattgcttgaagattttagttgtatttagtacatatgtgcaggcacacacacagagcatgcccaagtctataaagtttctttggtgaaacttatatgaaacttatatagcagttggtttaagtttgattttgctctgaagttgctagtcatcaaatactatttttacgtgtaaataagatccactgattcttttcatcttttctcatcttccatctaattttccaatcctatgaaataaaaataccttgatcagatgatggcatgaagtgggtcttgtagaaagtggaaagctaattattgtattgaagtgttgttggatgctcactcccatggaatattctggattcaccccttcttagataaatgtatactattttgcttctccttatgtgtgattgacttcattttgtcatgcagcaaatcggagttggaggaatctgaattttctaagt

SEQ ID NO: 71905 - DNA, 800 bp, Prunus persica
  Intron number 1 from transcript ppa013684m (locus ppa01368 4m.g) derived from phytozome v7.0 (chr-ID scaffold_4; pos 587747 to 588546 reverse strand)
agcgctgtggaatcacccggccggcccgaaaaccagtgagtcacagtcactccaatctcacacctgaatcatccttttctctagttatttttatccgaaatttcaattttaaaatttttattttccgtttcgcgcgatttagatcttttcctttggatagagttaacccgtccctaaaatgaatcataccgttaactatcttctggtgaagagacccaattgagacttatcctagaaattagaagtaggaggactaattgtttcttttagactaataaagtccaagttttaattttgcatcgtttgcatttaagctttgatcaagttcttccctgcaaattttgttcattgattgattgattgatcttttttaaaactaaagtgcgttgacccaacaaatttctgtagtgcattgcactaaaaaagaaaattagtaatggaaatgaccttaaaggagaactgagagttggatttctgagctaacttcacttggtttgaagtggctttcacaggtttagaataaccatttattttgtttgcatttgatttggttttttgttgttgttgttgttgttgtggtcgtgtggaagtttggaacaaagcattggttgaaaccaagttggctgctaatatattgatatttgggaaaaactctgctaccttttggagaccacgtaaaaccaatctatataaactctgctatattgataattgtaatgctattttttacggatagtgatttgtattaattaattactctgttattgcattgcagttcacttttgggcacccacatttaa

SEQ ID NO: 71906 - DNA, 588 bp, Prunus persica
  Intron number 2 from transcript ppa007563m (locus ppa00756 3m.g) derived from phytozome v7.0 (chr-ID scaffold_3; pos 20843102 to 20843689)
atcaaatacaggtaaattcaccttaattagctgagcttatggggttaatttggtcggaacttactagacttaaattattagccaggagtggtgtttagattttcaaattttgcttagcttgacatcaagattgcgctgaattctagctagggataggtcttatgattttgagattccactttctgaagtctcaagttgagctagtctagtgtgttttggaccttcaaattctccgtgttcactctgagattatgctgattttcttggcaattgatttgatgcgaggtatggccatatttagtgttttagttctgttttgacttcccttgctgactaagggattctgataaattcaatgaactatttagatatgtgcaaacttctgaattttgttctacaaattgcattatgtggttcagtctatgactctgtccttttatagaattaaagagtgttaggttattatttactgtaaacaaaaactccctcctcctcgctttcttggcaattgatattatttactgtaaatttctcatgcgactctgaggttgtttttgtttcttgatcaaaggggattgaaagagtcag

SEQ ID NO: 71907 - DNA, 819 bp, Prunus persica
  Intron number 4 from transcript ppa008279m (locus ppa00820 3m.g) derived from phytozome v7.0 (chr-ID scaffold_1; pos 10701371 to 10702189 reverse strand)
aggtagacacttatttctgctagtggtaccaactctttactttttttttattcttatattgactcacacatgttttcgtgtccatgtattatgtgggttttgtcttttgaattaatgctgttgctgccaagatgctttattgatgatgttctgaataatcctctgcctctttccttccgtaaacttgttggcttttgtaaatgtgttggacgtatagagtgttttgtttgtcatagtgttcgtattcttctttgcaggacactccagtagtacagcccataggtattagattaagcactcaaacaatagaacatagaagaatataagagatcggggagacgaaaatatagattgaaaagacgaaagaaagggcagaacagtagaacaaaaagaatatcggaggtcgagttgacgaaaatatagatcgaagggacgaaagaaaggaccgaaatcagagaaccgagaaggaaggacagaaatcacaaggttttaagagaaggtttactcaatatccgaatatgaattttaaagaactacatggggttatttataggaaactaaaacctagacataataggataaaaatcccttgcttaaacagatctctaacccaaataaaataggaaacttaaaactagaaatctggaaaagtagaaatcctactagaatttggaaaactagagaatctaggaaactaacaaatatatcaggaaactaataaatttaggtcctacgcttcctgcatcagttttgtttgtcatagtgttcatattcttctttgcaggacaccccagcagtgccaatagggaggagccccag

SEQ ID NO: 71908 - DNA, 652 bp, Prunus persica
  Intron number 1 from transcript ppa007029m (locus ppa00702 9m.g) derived from phytozome v7.0 (chr-ID scaffold_2; pos 21394380 to 21395031 reverse strand)
ggctaaaagaatccctccgacatattgaatacaaggtatggagattttgttcatttcatgcttaaagaaaagaacttgtttttgttctatattatgcttcaatgttaatcattgcaatggaattatttggtatgcaatttttattacaaacccatatgtctgtatagacattggatttatggttttgatatttgtctcacttttgaagttgataaattttctggaaataccccttagtttgtatgatgatctattcatcgataaagtttgcatttttgtttttctagaaaactcttgctgtttctgggcatgcccattttgttatgtctttttcaattaaaacctactgagtttaaggttgcttgcaatttgattgtcgtcccaaactcatgttgtctggttttgcgcacctttcaatctgttttttattttgggtatacttttgactttggttgtgtttgcagtttaatctttatctccaatttatatgcaggttattcacatacccatcaaatcgttcaaatcgttagatgttttacacccctgcagattaatgtccccattcatcaatgagtatttgatttgtggagtctgttacttggattttgtaattgtagggaagctagaggaaacaccaagattagatcttgtt

SEQ ID NO: 71909 - DNA, 722 bp, Prunus persica
  Intron number 1 from transcript ppa012732m (locus ppa01273 2m.g) derived from phytozome v7.0 (chr-ID scaffold_7; pos 17769028 to 17769749)
ttaacccggcaaccatatttgatctcattcttgtacgttaaaaccctatcttaaccctaatagcgattctcttcttggtggcgggcgattgttttgtttaaactttaagtatagtatagggttttggaaattgaggctggctgtttccgaattagggatttggttcaattttgtttaaattttggatatgtttcttttgttaaaggtaggtttttactctatcagatgttttctatgatggttgattggtgatgctacgattaaattgatttagctttttgttaggtgtttgatttgggggtttttacgaatttgagttggtttatgctgtgttttctttactgatgcgatgtcttgatgatgaaattttgtgcctgcatagcttctacttctagtttgtgtgtgcgtctgttgaagttgagataaagatacaatagcttcatattgaaattttgttgccttctaaagttcggtagtaagaaaatgtgtctctttctgtaacatctgtgatgtgttagtattgataatacttaactagattattatgtaacgttattgtctagtttgtggtgataatatggtcagaataaatggattatggatattggatgtcatgtctattcttgctcagaaattacagtaatttgatatgttgtttttctaacatgttgcattttcggttcacaggctgcaaacttcttgaacatcaagagcctgctgga

SEQ ID NO: 71910 - DNA, 338 bp, Prunus persica
  Intron number 3 from transcript ppa008255m (locus ppa00825 5m.g) derived from phytozome v7.0 (chr-ID scaffold_3; pos 2533471 to 2533808)
tgatccactcatcagcttaggtgcaaagtaagtaatgtactggatatcaaatgaatattgctttgtgctctcgcatcctttagaataatgcccttcggcatagatgattaaaatcttgataatgtttgaattacatccttgagaccttcttcttaacgtcatgacattcagttgttttcagtactagtagattcaccaacaacaaaatttcttatagagtagttgtttattggtagttttcttttatctgcacctttcaaaagccacaagtgggttatctcatttaactgaatggttatgcagatataaaccctctcctgaggaagtcgctgcatctt

SEQ ID NO: 71911 - DNA, 887 bp, Prunus persica
  Intron number 1 from transcript ppa007128m (locus ppa00712 8m.g) derived from phytozome v7.0 (chr-ID scaffold_7; pos 10979217 to 10980103)
agtgagcccctctcttcttggtttctggtttttggattttttcttttctttttctttttggcttttcttgggattgttggagttgtttgtaattttgtgaatttgtgtgtgtgtttttttttaaaaaaaaggggttgttttgttttcttctgttcttgttgttgttcctgtgtcttgtcattttaaatgtgaattgtgtttgaagcagagtctggctttctctactggttaaattttatgtttttacttttttgggttttttttccttctctgcatccccgactcgtcctttgccagttggggttgtcttggtgctgttatttgaagaaatttaacttatttatcttgaaaaagaaaagtttgatgagaaaattggttccattaatggactcgatggaggttgagttatgttgtttatctattttgttctgcgtacttggagtagatttggatgttcaattatggaaaatgataagatttttgtttattgagtgcagtttattttctttcttttctggtgtatgtatagagatctttgtgtttctttattgcattgtctttctcttccactccagagtcagaccctttgttttgagatcccaatagagaggcttttagctatatgtgattgtggaagtggatgaggaagatagtttaagaatacaggcgtttcttttgtacatgttaacatcccttgaggaatttactcgccagacacttcaacaacattgaaggtctctcttgaaacatagacatgtttgatactctttgttgcaccactgcttattatctgcattctaggcttcaccgtccaattgctattgtgccatacatgaagtacttttggattttacaaatcgtaacttatttaagtgtgtttacaggac

SEQ ID NO: 71912 - DNA, 961 bp, Prunus persica
  Intron number 3 from transcript ppa013063m (locus ppa01306 3m.g) derived from phytozome v7.0 (chr-ID scaffold_7; pos 10093932 to 10094892)
tccacatttgcatacgaaggcacggtgtcttccatgtacgtttcccttcatgctttcctttctcttttttttttaaaaatacttttatgggtttactttggcaaattcttctgattgcgttaatcttaaaaggaaacatcccattcagaatctaccatgttaagcaccccgtaatctaagacagaacaaaacatgttagacgaattcacgccaaatcttccctgacacctggagatcccttgcctcgtgtaaatttgttgtacatagttcgttgggtggttttactaagtgattcttggatacttcttatcataggcacgtaggttaagcacacaaaaggcacttttcctactatatgtggaccttcatttggcaggcctgcataaggtggcctggagcctccttttgtataataaatgttatctaggagattaggacttggcaatatctccatagaacaaaactcatagcggctacaatgcttttagtcatcaatttggcagaagagaaacaacaatttatggagtcaaggatttaggttactgcgtcttctaattctaactactgagatggtggttgccatttttttacacaattgtatctagcttacttgctccatgtggtgtttttcatgcatgtgtgtctataatcatactttttgctgatatgaaagtagcttttcagtttttcattagttctgtctggcatgtagcatgaatttagtcgtgtgtaaagattttaaaaacttcagaacatgttagtagtaacctaacatgggaatctgtatgttcacaaactgctgcatatctgtatgtagatatctcacatgcgaatctctctcttacacatgaacttcctatagaaatgtgatgtggcaatggagtgaaattggcaattttctagttgaatgtttgaatccttttcaggtacgcagagactagtgccaagctagagaacagct

SEQ ID NO: 71913 - DNA, 852 bp, Prunus persica
  Intron number 1 from transcript ppa003178m (locus ppa00317 8m.g) derived from phytozome v7.0 (chr-ID scaffold_8; pos 376556 to 377407 reverse strand)
tcaatacgataccgactgattcaccaacctgcaaggtcggcatgtgattcttattctttgtttcttttgaacattttgcttttctttgtttttttttaatagtattttttgaattggatctcatctttggttaccccaattgaagctggaattattgtctatccacttagactaagatctgcttacatttatataattgcagttttttgcttttcttttctaataaaaaaagaagatattttttgaattttagagacagaaccaggctggcatgaagggttgcttcatcttctattttaatttagttcatgggctttgtttgttttactcatttcgccatcagttttggtgaaagagtgtatctttaagagatcaaaaggttgttttgcttggctgcgaaggtgaatttggttcttttggtggagaattcccatttcaatttaccgaaatgggtgtctactcaatctttcttcttctttttttctcatcaatttgtacagctactagataattcggtttggtatttcacccattaagttttctcttaattgtatagcttgcaatctaaacacttcatttttttttttccattaaagataactcatttcacatctgcttcaaaatgtagttgcatgtagctgaatctgcaagctatacatgtttgtatatatatttatttatattgtattctgattgattcattgacttggattggaatccgtttacaacaatcatagctgtgaaatgtatgtaatttcattttcttatatttttagagagtggaactcaactcaagtctatgttttgttcggtacaggtactctgttctctgttttttcttcgttcagcagt

SEQ ID NO: 71914 - DNA, 667 bp, Prunus persica
  Intron number 2 from transcript ppa016431m (locus ppa01643 1m.g) derived from phytozome v7.0 (chr-ID scaffold_3; pos 12282157 to 12282823)
agttggaccataccaagcccactccaattcaggtttagaattttataccacggacaaatttcttcttgttgcttccacttatttttatttcatttactgtatatccatattgacaaaacattaaacaaaatgttgaccagctgggctcgacgtccatgggggtagccatggtcaacggggcacgtatgcgtgtattagtgtcatgtgtgtaagtctaatagttatagatggagtgcaatgcatgttttgtgacttagaattggtgaatgagaaaggagaccaaaaaaaatgagaaaactgaaaactgaaaaaaaatttagatagatttcaaaatatggtttgattttgaaacatttttagatttcaaaaaaattgaataaaatctgaagactgaaatgaaataattatcaaatgcgctctaagtagcccaggtaaaggagatcccagttgctctatgcaacccaagacagagcccaatatatcttttagcagcccaatgtcctaagagattactaaatattgttttttttcattacaatgaatattgttggttgtgattattttggaaaattataagcagcctgaagacgaagaggaaggcgatgatgattctcctcctaatattgccgatgacaataatcagcctttttttgctccgtcagaggga

SEQ ID NO: 71915 - DNA, 882 bp, Prunus persica
  Intron number 1 from transcript ppa011492m (locus ppa01149 2m.g) derived from phytozome v7.0 (chr-ID scaffold_8; pos 15437674 to 15438555 reverse strand)
attttaaatcattcaccgtcattttggcttatctggtaattttccttttcctgattacttttttttaaatttcgttcatgtaattacgactctttgttttgtgcatttatgaaattcgaggtgatttgagcatttttataaatattttacagggaaatggaattgtattggatttcccttttggttattaattgttagggattttagggttactggcttgtatgaaatggagtttcaggttcagccattaaattttcccagtggaagattttagggttgggttgggttgggttgggttttatcttttttgaattatgcatgaaggattcggttttttcatgatgatattacgcaattaaattataaaattattgttttcattttcgaaaattatagataactgttgtttgcacatttgagtactgccgagttgaggtaaactttactgaactgagagtaaaatagatgctaattgtcaataaaagagtcttataggacatccctgtgatcttaaaacagctcataatgaatccagttatatgaaattgaacaaaaggaaaaagaaactgaaggtagaacaatggatgaaactccttctttgttttatatttcttcacacaatttcaaattgttgcatttcaaatctagatccttatgcaaactatgttttgcaaaactcagtagctgaaattttttattcagttatctcagtccctatagaattttacattgattttcagttttgattataaatgttgagtgttgtttttttgttagttttaataatttgttaatgtttgaagtttgtcctcgagtgcacattctaatctagaccactaatctgcagattgattctctggtggagtttttttgttctactct

SEQ ID NO: 71916 - DNA, 859 bp, Prunus persica
  Intron number 2 from transcript ppa014850m (locus ppa01485 0m.g) derived from phytozome v7.0 (chr-ID scaffold_2; pos 21979202 to 21980060)
tttctaacagcgatattgaggtagttcttttgttctttttttttttaattcgtttctgttatatgctttctttgtttgtgtctgcatataatgtgttgaggtttggtgaaatttctatgtgggtaaagagggcacaactatgacaaacatgagttttcaccaaaaaacagaagaagaaaacagagctgtatatatggtatgtggttggcttccagattctgagatggggttgcaggtgtgcggtgtatacctatatggttactatattactgtgaccctgaatctccgtctggggtttgtttgaaatggggtctgtcttttgatacagtctttgtaatctatgtaggaaatgagcaagaaaagttctcctggaaccaagattgagaacgtgtcatttcatgcctcctgtatctaatgatatttttggatatgcactgaattcttccaatctagtgttattaggatgggtaattaaacttgtgtgttttgtggcagcatttgaaaaacaaagtacattgattttcaacacgagtctgtattcatttgttttatttctttgatttttgcttgtatacatggaaatgtgcatgcatggtgtttgtagggtatggttctgtagttgctaataatacataggatgctgctcagtcctcaatggatgtttcttaatttttcttactgttgttaggctaggacttctacatgacaattggtgcatcagcacccatcttttgttttaaacttaatcttctttggacgttatatatgtatccacaacttgttggaaattaagtggaaaagttaataactacaatgcacggcagttgctcttctctgagattggtcacgtgaaacgaca

SEQ ID NO: 71917 - DNA, 453 bp, Prunus persica
  Intron number 1 from transcript ppa022807m (locus ppa02280 7m.g) derived from phytozome v7.0 (chr-ID scaffold_8; pos 21613243 to 21613695 reverse strand)
gatatttctggagcggtatgtgggatcttttctttccagatgatttgataaagttccaaatcatatgtgaaacatggagcaagaagtgatttaggattgatttggaaagttaggaggaatcattcacttgcatgacattgaagatcatgaagtttacatagaatttttgagcaaacatttctcaattatatcaaacccacttctggcactttccatgtgtttcggagatgtctttttgaattgtagaggctttatttctctaagtagattttccttgtaaccatggatctaaattttcagtttttttttaaaataatgaattcgctttcatttatgaagttactaatagaaatagttgggtattgtgtgtgtcagttgtatactcgaggtcttctgggctaatagtttatctgatgcatttgctcatatctatgctcccacagccactagcag

SEQ ID NO: 71918 - DNA, 370 bp, Prunus persica
  Intron number 3 from transcript ppa000317m (locus ppa00031 7m.g) derived from phytozome v7.0 (chr-ID scaffold_6; pos 28285220 to 28285589)
ctctgtcagaagacacaaaagctctcaatcagctggtatgcagctctttgtgctcattttgctttttaatttatttctcatataaacttacttcttctgttaagataaactggttatttaaaatattaattctgatggatacaccattggaaacacttttcctttcctttgccattgttgctatttttgtcctcgattctttttctgctgtagcttttctttttcaattttaaacttttgttttttctgttcggataatttggttattgactgtgtaaatgcattatggctagattttcttattcatttttgaatgtatctaaatgttttctttgattgtgtttttgataaacactgcaacatatgtaga

SEQ ID NO: 71919 - DNA, 492 bp, Prunus persica
  Intron number 2 from transcript ppa011045m (locus ppa01104 5m.g) derived from phytozome v7.0 (chr-ID scaffold_3; pos 846299 to 846790)
gaaccataataggtctgtttcaaattttgcttgcatttttcttgctctctaccttcatatgtttagatttgaaaatttgatatgtgcaatgactatattttagttaaatactgatccccaatcttgcatttgcttctggcttatggacatgttcaattttttttgctttaaataacatgtatggcatgcataagtatacatccccatgtctgtacctcacaaattgtgatccatgatgccatttgatgttctagaattccaatctcagtgtcctgataattagaatatggtattggaatgtacatgttatcttgaacctgttattgtccactgtcatgtggcaaggattgttggatatcaaatctgatagtgaagtttggtgctcacactttagtttttttaataccaggctgtaaattcttttcacatcataacccgggattactgcgtgttttagcagatcagtttattgcttgtggtaaatcgagggac

SEQ ID NO: 71920 - DNA, 465 bp, Prunus persica
  Intron number 1 from transcript ppa007190m (locus ppa00719 0m.g) derived from phytozome v7.0 (chr-ID scaffold_6; pos 21074060 to 21074524)
cttcatcaccaatcgcctcttccccttccttcacagtatgtagtacaccctctagctctacagaaacacccaaccctgtttttgtttttactttttagctgtttattttcttgtatattcagtaattacatttcaattacaagaagaattttatgtcttgagaccaaaaagacctccacttgacttatagatcatacagatttgcttagctcaagtagctattcaactttgaagaaattcaaaccaacatagaacatgctttattgtgttcttattctattgtttttcctttgacttaatattttcatcaattaatcagatgggtatttttctttgggttattattatgataaagttcacaacttttcttcaagatgaaagggaaagatttttgtttttatttaaattgagttggttttttattcttcagagttttcaattgagcaaggtggactgtcagaggat

SEQ ID NO: 71921 - DNA, 913 bp, Prunus persica
  Intron number 2 from transcript ppa011769m (locus ppa01176 9m.g) derived from phytozome v7.0 (chr-ID scaffold_2; pos 9346038 to 9346950 reverse strand)
ttacgaccgtcacaaaaagtttgttaaagattacggttcgatttttcaatccaattttcttaactagtatcattttggcgttggtataatgaaaatccctgaagaaatggcaattttggaacttcgaatgatacatgtatgcatcatttgaagctaagtttttgttaaggaaggacattaaggaagcatgcacaaatagtgagctctttatttgttgaatcctaatgtcctaaagcaaatggatgatgaacagtctcctccacttagaaggaagggaggctacagttgtccatacaagtacatatatcatacttcaaatcgttggtttttgttttttgttttttgttttttttttgtttgtttgaataaaccatgtaaacaatgtaagctactggatccttgggaaggtagcttcttattgctagactttggagttattagatttttaaaagccatgatagctgctggctggaagcttcatttttattgccattttagtgtttacaattttgttctgtaagttttttgttcatctacatgtattgctttaccttttaagctttccactttatcaatgtgaatattttttctctcttaatccaaattccattgtgttgtttctgggacttgaataggactgtttttgtgtattttttttcttatttcttgttgactgtagtgtatgcacaactttgtatctggtttcaatactgtgtaattttttttttacttttatcatttaatcctgtttatttgaggcacaaattggattttaccatatggctgaggctccaattggttgtttctttatagttcagctttggcaattggatagtagttatcaataccactgcattttcctcttgcagttatagcacatcttgatgaatactttatgttgcagttagctttt

SEQ ID NO: 71922 - DNA, 979 bp, Prunus persica
  Intron number 4 from transcript ppa011279m (locus ppa01062 3m.g) derived from phytozome v7.0 (chr-ID scaffold_3; pos 1719471 to 1720449)
agccaaacgaagcctaatgtatgcttcaaattcactcacctttcttcgtttttaatttaagtatttgcacttctttttcgtatatgtcttttaaacatgttgaagcaagcagaccaagaaaaaatgggatggaattgctttcggctttttgggaaaacctacgttgttggtttactttttgctttttttattaaggcctttattcttgctacgccacttgagaagagtcctaatggggttattttagaattagaaccgacagttgatgggcctcttaagggtcaatagttctatctaaatagataggcccaatgatttgatgtttttatggtgatttgatcgcttgtattcaaatattaggaagtacgggttgaccataggatggtttagctaacaaacctaaatctctgtgggcccacctagaccattatgtaatttcatttgtttaactacaaagaagaggagaccaagattaagggaaaggatgagatgtgactattgattggtaaatcgatggttatgagacgatttgttctgtgtgcaaatgcacaaatttgcattgagtgattagtgcatatttgtaagtgtcagtcgccatgtgcacgtgaacaactgtgagctgttgattggtgtgagactccctgtgaggtccacgtacatttctagcgaggcttagtgggccagtaactctgacaaaaatattaggacatagagaagaatgctgactgttgtggattggttatggggtctaactattttgaatttgtgtgcactagtcataatcagccatgcagtatgattaagagattactttgatgatattgcatgttctttcatcttttttactgggttttaatgaaatttctgagctgagcgttgtaattgtaatcataagtctccctggttgcatttggaataatcatgatgatagtgtttctgcgtactactgacatctggagattgggtaattgacaggaaa

SEQ ID NO: 71923 - DNA, 898 bp, Prunus persica
  Intron number 2 from transcript ppa008167m (locus ppa00816 7m.g) derived from phytozome v7.0 (chr-ID scaffold_7; pos 8865572 to 8866469)
tgcctgttgttactggagtggtgattgccagtggggtatgcttattttgttcattggatcatttattgtaatcaccatttcatagctttaacattgctttttatttgcttctgtgtagtttttattttttaattttttgggaaagttaatgttgatttggtctgtatacaaatgctgttaaattcccggtgtatcttgttttgaatttgtttactttcgtatgaatatatagttgagagatgctacttactgatccagatctggagttcagctacaggggttaacttgtgatggtttattctacactagctagatattctatctggctgaaacttgaaatcatgtcaatttccggtgattattgcatttggcttgagaagtggtattgaagattacagtaattggaaatgctctgttcttttaatagagaggatattggtaaaaaaattaaaactaaatcacttgtaattgataatgaccggtgctagaccgtggctggtgtaatcaattaagaaacaaggatggaccataatccaaaaccatgtatggctaatgtagtgatgcgaggctggtgattcaagtttgtgttggcatatgatatttgtatctgatagttttgaagaatgtaacagcctgcttcttagtttctctacttgttttgttatcctttcttctttgtaaactatacatgtataataaacaaaggagaagaagaaataaactattcagttaattgatgctgtggactgctaggttccttattcatatgtcatactgtaatctacgtttttcatttttcgtataagcaatgtgcttccattgcaatattagtggaatcacacgaatttcttggttggtggcagggtgagccaagttttcacttctttgggtttgttat

SEQ ID NO: 71924 - DNA, 340 bp, Prunus persica
  Intron number 1 from transcript ppa014322m (locus ppa01432 2m.g) derived from phytozome v7.0 (chr-ID scaffold_3; pos 4729607 to 4729946)
ccagtcgctgagactgatataccacattgatataggtatactctacttaacaaaacatttgaaatccgggagttcaactgtaagcttttgaaaatctcaaggaatttaaaacagaagcatgcataccagcgttgtctgaggacgaaagaaacatgatgagtgtgtcaaatcttggaaccccggttaagttctccaaataattgacggccaaatccatttcttcactgccaaagaaataaatcaaaggtggggccataagcattttatcaagctcaacaagaaaacatacatatcagacataaacattacttacacgacaaaggttgccgcacacttgata

SEQ ID NO: 71925 - DNA, 483 bp, Prunus persica
  Intron number 1 from transcript ppa005370m (locus ppa00537 0m.g) derived from phytozome v7.0 (chr-ID scaffold_6; pos 2022032 to 2022514)
tccatactcgcaagagcttcttcgtctaccaaaaggtatggtttccgacttttattttattttattttcgttcccttttaaatttgtttatgctatttatgagttgattgaaacataaaggaattgtaattttcagtaaacaaccttaacatttgatgctgatttgcgcaaatagaagagttagctagttttttccattaagatctgttcctttgtacttttttctggctcctctgcttaatcgggtgggtttttttaatatcttgaaaacaaaaaatggaattaactttgaagctttatgtgttttcaatttttttttccttaaattagagcttaatatgagtcactacgtataattgttccaaagggttggttttaatttagggagaagtgagaaaggttgttgcttttttgtgttttgatggcggtgctgtttgtgccttttcagggttcaaaggctttaagccgcaaatttgtgcaaaa

SEQ ID NO: 71926 - DNA, 783 bp, Prunus persica
  Intron number 1 from transcript ppa000501m (locus ppa00050 1m.g) derived from phytozome v7.0 (chr-ID scaffold_2; pos 4892002 to 4892784)
gcaagtttgaaaggatatacttgcaaggcgggagagtatatttctaccctctattgtgcacatatatatggttaatttagtgacttgattctattttcagggtcctctatcttgttcaagtttaaaggtttctctcctttttcctttggttatattaattgttactcattaaaaaaggtattgttttgagaaaaattggaaagtgtagggagaagattcaaaacccatatattagccagactaatataaataatacatatcattgtatacttacatatcattgtatacttagtaaaacgagtcaatattgtttgtggttaagaacttaaggctccatttggatggaaggattccaaattcatggatttagattacataataaggtaatcttgtttgtttagactagtgaaattcatgtatgtcaagatttggacaagagagagatgaagaaaaatgaatttcaaatgattccttacatgtagtcacttcaaatctatttcaaacgcactacatctagttgctccaatatattcagtatctatattaaatgcactacatctagttattcttaaatccacatccctccatgatccatccaaacggaaacttactttagcgagctatacaatcaaactcgggggagtatgacagtcggttgaatagactatgtacctaaatatggtgttctttatgtgcttgcatgtttaaattttattccttaaatgtgtccaatttttttaaatggtaggtctgaagctacatttatcaaccacatcgttgaag

SEQ ID NO: 71927 - DNA, 707 bp, Prunus persica
  Intron number 2 from transcript ppa017489m (locus ppa01748 9m.g) derived from phytozome v7.0 (chr-ID scaffold_4; pos 8237221 to 8237927 reverse strand)
tctcaaagaaggtactttttcttgtttgacattcattttcacttttaaagttttgatttggttgaggggtgaggactcaaatgttcaattgattatcagaaatgggttttcctcattatcctctgtttggttaatgagaatatttgggcacactgaataagttcacgggttgttgattgtaagaagtccaaaagacaaagattgaggtgctacaagatgctaattaacaactttgaactttaaattgaatgtatgtgattggactttgttctctctatgattagggaaatagccatagagttttactaaactctcagaaagaaaaaaagaacaaaagagagagttttatagaagttgtttcaaattgatatgactgcttatttggaaatgccatatcggtttacggcccttttaccaactgatatgacctgagaaaaaagagttttagagaaactgttttcaaactgatacgattgcttatttagaaaggccatatcaggtgatcatttacaaactgatatgaccacttagtacatttaccatttccttaaggaaaaaggcctttgattttgaagttatttggaatttcatttgcaaatatattgaatgtgggaacaagttgttcaaaatgagtttctttttcttttcaattactaaaaacttagttatgatatccatttccaattcatatagagaagttgctgaag

SEQ ID NO: 71928 - DNA, 388 bp, Prunus persica
  Intron number 1 from transcript ppa010959m (locus ppa01095 9m.g) derived from phytozome v7.0 (chr-ID scaffold_7; pos 9933242 to 9933629 reverse strand)
aagaaagttgaggtatgtgggcataattaatcttgatgaaagtgctattattgttctgcatgtgggttaattatttcctaattatccatgttggaaattttgctcatgatggtttctctgactagttgagattaggatggtttgcaactttctttttcattgattgcatactatttgccatccaatattttttgagcatgtatttggtcaaacaaataatcagaattttgattatcaaacattaataatgacaataataaacatcatcatcttcatcatcataatgttatgacatactttcttttggtgaaactattatctcatcaatttttgtgcttgtctaatttgtgcagaggaagttggaggagaaaagagcaagggccctaga

SEQ ID NO: 71929 - DNA, 923 bp, Prunus persica
  Intron number 1 from transcript ppa021896m (locus ppa02189 6m.g) derived from phytozome v7.0 (chr-ID scaffold_4; pos 2954641 to 2955563 reverse strand)
agaagagaaagagaggcgattcgtgatattcaagggcaacttggagttcattgaggctttttttttttttttttatgaaatgggggggacaaaccccaaagaacaactagactttgtcaaggggaatctgacgggcccgacggacccctagcaagtcatcaaccagtacatcactagcccccacaggggtattttttaaaaagcaaatgcccaaatcaagattgtagctccatcttgcaagacagcaagataattcttctccatgtatgttgaatctgatagttctcaaattgccttagaagagtaccgcagctatgcagcaagccagccagaggatggaaacgataggctacagtttgttggataaactggacacaaagtgctgagtccatttcagtgatgagcctgttgacacctttatccaaagccattttgagaccaaaaaatagaccccataactcagcttcaagaacttggccatttcccaaattcacagcaaaacccttaatccaatttccaaaggagtcgcggaggacacctccagctccaatattaccagatgcaggtttacaagatccatccacattcaacttgaaaattccagtattaggagattcccaccacgtcaaaaaaatctgcactctctccagctataatatcaccacaagaagcattactccattcagaaagagctgataagataagttgccttgggttgaagggcgtcacctcctcaacggtaaaaatagattggtttctccatttccataggtaccaacagatgaaaacaaacacagagcaccaagaggtacagccagaccaactagccttggaaagaatattattctttaaccaaaaggttggaagtcagtgcaaatgaatttgcagacctcagtacaaataaagattcttttaacaaacac

SEQ ID NO: 71930 - DNA, 877 bp, Prunus persica
  Intron number 1 from transcript ppa004822m (locus ppa00482 2m.g) derived from phytozome v7.0 (chr-ID scaffold_2; pos 25223717 to 25224593 reverse strand)
tctctgtgatctcagtcttctctttcggcttcgtaatttagctctagctacccttccatttcatttattaattctatgcatataatttacataccataattcatatataattaatggggtgcatgcaatgttcgtatcgtcaatttacatagtctaggtggggtcagatttaacaactctgtgtctttttctacttgatttatgtttttatgatttgggtttcttttgttgcactcgtcttcttcttcatgcttttctttattctgctttttagttttctatttatttattaaaatggttaaaaatatatactttctgggattagacggcacacactcttccagtctccgagactgactaaacttgagttgagagtttttctatgtttcttattgaaagttgtagtctttgaatcatactctgtttcccagttgagaaaagctcggaaatgataagagattttgtatgacgaggagagagagagagaggcgatattatttatatatatatatgataataatccctaaaaatttgaaaaatgaacccaattattctaatggattagtctttttattttggataaaccatattaacgaacagagaaaagtcaaatttaatttaaccaatttttttaaaatcgaaatctaattaaaaggaacactcaaaactctgtctttttcccctttgaattattctaatgggttatgtcttaccattatggaattatgtatgtatgtatgcatatgatagatcattcaaatcaaatgcgcgattgatttgtatgcaatatgtacaatgtatgtagcttagcagcaaaaccaatgtcttggaattgaaggagctaaatttgataatttgtacaaacttgtagctcggc

SEQ ID NO: 71931 - DNA, 827 bp, Prunus persica
  Intron number 3 from transcript ppa012681m (locus ppa01268 1m.g) derived from phytozome v7.0 (chr-ID scaffold_3; pos 3598360 to 3599186)
tgccaaattctccaccaaatcaaacccatacctaggtaagcaaagattttgcttttagggttttgatacgtatttgttgatccttcaacatttctttggttcccaagcaaatgatagagaataaaatttctgggtttcatgaatttagtgatttgcatttcttcaaatttaaatgatacagtgtctatgtggctaagtagctaggtggcattagaggttttgtttgtatgctgaaaaattgaagaagagaaaagaaatgagatcataaagtttgggtttttgtagtgctctatatttaggttttgatagaagtgagaggctttattgatcacttctccaaaaacaataatgaagaatggcccaatgtggtttggtatgcttatgttgcctcgcctgtatggttgctgagaaagttggggacataaagaatggcaagtgaaatcttgggctttgtaagttcatgtttcttgttgatgtaactatctatttaatgaataatttttctctcgactactaaacatccggtttgggttctcttttgtaccttttctttgcaatcaagaaatttggctttattctcatcctcttactaaaagattgagaatgttgaagggaattgaaagtgattaattttgtgtagtaggctaaaatgggccagtctaagtgtcaaagtaacaaccctttttatttatttaaatgaaatggaggttttgttagaaaacttagaagagataaacttctgaacaataggttcagtgggaaacctaaaaattgggtttgtgtggttgtttttcttgcagtgaaggttggaataccagagtttctga

SEQ ID NO: 71932 - DNA, 743 bp, Prunus persica
  Intron number 1 from transcript ppa006817m (locus ppa00681 7m.g) derived from phytozome v7.0 (chr-ID scaffold_1; pos 24990357 to 24991099 reverse strand)
ggcgtcttctaattgacttcataggtacttcctctgcaacttctctttgctccttaaatctctctctctctcactctcttcaccaactttacaaaacaatgtcatgtttttgtttctgtttctgtttgccctttgctataatgttatggtcgttttctcaattctcgaggacatatcctattagatgcagaaagggttttggcaaacttgaaaaacgaaactcatttttgattttactggcgtcagatttgaaactgtgctgcatgtgactccatttcatgaaggatttggatccaccaatattatcattaccaagttgaaaaacaggacaaaagttcagcctttgcatgcgttctttagttaaaaacaatatgccaaatatgccaaaagtattgggctctgttcttcgatcctataccaagcatggagattaaataatgcatcaaacatgcagagagtgacacactcgacctgaatctgaagtccttgtttttttacatgtctaaatttactgattattattaggcttatttactgtttcacttcctaaaacaaatactcggtctcattttactctcttaaattgaaattttctcacttaaccaatctctaaaagttcctaaaattttctcactttatcacttccgtccatatccatccacaaagcagttttgacttgcatcttcttctaacctccttgtttcaaagcggaaagcttgagattgcctcatctgagtgctttt

SEQ ID NO: 71933 - DNA, 967 bp, Prunus persica
  Intron number 1 from transcript ppa006733m (locus ppa00673 3m.g) derived from phytozome v7.0 (chr-ID scaffold_10; pos 367075 to 368041)
ctataacgagctctcaagtcgtgagttttctgaccttgatgctccgctttttggaccgtttgatcttctagttgtcaattgcgatgtggtttagtatggttttaggtgatcatgaatctgggtttttttttttttggtagttttggacctcgaatttggtacttccgttgaattcttatggtttctgacttttaaaatatagggttttgtgcttactgggtagctgaattttgatggaagttttgcacataaatataagaaattagagtgaattaccttgttttataattgaactgcgaaagttggttcttacaaggtagaggcaagtttttgttcttgttagataactaattattatttggctaatgtgatgattaaataaaggacccttaaataaaagatgcccgcctggtagggtactctgttaccatgattcatcaaaacattggttgggttcgatgtggatgaaaatcaatgttgactttttgcccatgtatgatgccgattttcaaagctggcaatttgtagatttctggttcctttcagaacctgtgctgtatcaagttatttgtttgttctttttggtctcataaagtagagaaaactgtattcttgacatagaattgtgatgttgtgtgagtgttgggtacttgcaagtctggacggatggtttatatgatgatcttagcgctacataattataattgtgaacaactatccgcattattaatgaacttaaacaaatatgaattgctttgtgaattgaaaatttgaactgattcacataggtttggaaaatcttaggaatggatacacatcatacattctcttcgtgtcttatgccttcaatttctactgtatagttgctgctcattagaaacaatgctaccaggcagtatggtagtattttatatgtgtcaatggaaaatcttggcatttaattccttattctttactccttttcagg

SEQ ID NO: 71934 - DNA, 515 bp, Prunus persica
  Intron number 1 from transcript ppa006138m (locus ppa00613 8m.g) derived from phytozome v7.0 (chr-ID scaffold_5; pos 13736494 to 13737008 reverse strand)
tgtctctgccttccctcctgctccttctaatcaaggtaccatctttacatacatacatacatacatacatacatatacaaaattacaatacatacatgcatacatatatagattttcacatttgggtttgattgatttatgcatatgcttgttgggtaacgttttcttggcagataacatttatagaaagtggatcatgttaagttttttgttatatgtgtatatggtgatgaacaaatgattagtcaataagaatttgatgattatgaatgttattagaagaagaaaacaaataattaacaaagaaaagtaagacaaataattttctgttggaatttgatgaaggttctggaaaatttgaattattatattcaggattggaaattaaaaacctttttgtttgcctcataacaactatgattgatgtgtgtgtctaatgtttattggattattaacattttaaacgtttgttgtattcagtgattgagataaagtcagacaccagtttagctgaa

SEQ ID NO: 71935 - DNA, 585 bp, Prunus persica
  Intron number 2 from transcript ppa002558m (locus ppa00255 8m.g) derived from phytozome v7.0 (chr-ID scaffold_3; pos 21827151 to 21827735 reverse strand)
ccggtcgattatactttgtctgccctatcacaaaggtattattatgtacacaccataccctacttacttaccttcctactacttcactcatcgtattcttctttcttttccatataatataatttataagcaagctctctctttgttcatccctttttgaactcattttttgtacctattttactgcatcacatctctcattattaatctcatgcctgccagtaatgtaatgtgaaattattaacatggtttatttaacttctgagggcttgcgtccgatggtggtcgcatctctgtttgggtacatttgcgtggcaaaactgtgtaagtcggtcttgttcggttccaaatgctctttctcccatggattaagataaaagtaagcatggaggtctgaaacaaattcattcatccgcgcaatgcaacctgctatctgttctttagttctctaacctgctatctgttctttagttctctagttctaactcgcgtagcttttcagtttttgagttttgcatacttccgcttggtttttgtgtttatcatgtatggatgtgcattgatttctggctcttggacagggtc

SEQ ID NO: 71936 - DNA, 828 bp, Prunus persica
  Intron number 1 from transcript ppa008742m (locus ppa00874 2m.g) derived from phytozome v7.0 (chr-ID scaffold_3; pos 4022647 to 4023474 reverse strand)
tccgagaaaattgagcaaagctttgcgttctcaaggttaggggattttatttttgttaaagttcttctgcactaactagatattttttacggtttcctattttggatgttaaggcttttgtttgttgattccaatgaatctaaggtcagtgtttcttgtattttttttttttaaaattttgtagttccaagtttctgaatttcttgggtttttcagattttgtatatcagaggctttggtaatttctagctgcaaatgagactaggtttttttttttttttttttttcctccttactgatggttgtgctggtcaaagttctgatcttggttatatttttgtttatttgtttggtattttgtatatggaatcactaattgctaagatgcaaccaattatcaacctgaaatagatgggtttggttatactggaattctattgtttagtatttgaattgggtaattctaagctttgagaaaataatttggattgaagaaattatagaagtatatatatatatatatatatatatatataataatctatctgaataatttatctttccaacaatggattcagattttgatattctttgatagtatcaaatgtagtttcaatttctttatatgaaaccatcaaatttgaatttgtatgggtccagattgtatgatttttaatgattttgaaacaagtggctgaccttgtgtctgaatccttttttgatctccctatgttaccatgctcagataaccttcgaagattgaggagttcagagacgagacttgttgcttgtacaataagatttgaaagagcagagggagaggagata

SEQ ID NO: 71937 - DNA, 673 bp, Prunus persica
  Intron number 1 from transcript ppa003354m (locus ppa00335 4m.g) derived from phytozome v7.0 (chr-ID scaffold_1; pos 30380239 to 30380911)
gccaaaagcctggaacctctggtctccgcaagaaggtttgtctctctcgccttttcaatttcatgatcaagtattttcttcatgaattatgtattctcgaagctggatctgttgcgctcgagcattcttgcactctgtttttgcaatcaaatttttgttgtttcgatttcgtgaattctcgcattgttttccggtgctttgctattgctagattattggatcggtgcctgaaattgcaacagtttcagtctgatctctattcgatcaaaccgatccgtttgctacgtgcgtcgaatttttagatccattttaattggtttctattttgattagatcttagttatagtgtggaatagaactccggatgtagcttccaccatgttactggttttattctaacatgtaatctgcctttcggattgcttcagtgcaaattcaatatgattttctggagaacgttttaacttctatttttctgaaaactgacatggcagtatgtctgagcactatgagactagagattgcctgttacaaaatgcatgccttttttctaagctacaatacactccttagattgctttgattactgtatgtttttccttattcattttagtattatgctggctggaacttttcaggtgaaagtttttacgcaaccccattacttgcaaaa

SEQ ID NO: 71938 - DNA, 482 bp, Prunus persica
  Intron number 1 from transcript ppa022488m (locus ppa02248 8m.g) derived from phytozome v7.0 (chr-ID scaffold_4; pos 2368476 to 2368957 reverse strand)
gacacctctacacgttctgcacgccggataacaaggtgtagattttgtgatctcaaatctgaattttgcatgtgtttctttacattattaattctgtgtcttttgttttttctattacagaaactgagagtgatgtttaagaaggagttgaagaacagtgatgttggatctttgggcaggattgtccttccaaaggtgatgtttgtttgcctgtagaatctccgcttgtttggcttcaactccttttactcctttttttggttttttgtttttctaagggaaagagaaagaagtaaaagggccaaccaacctacttctttactctgatttgatttactcttattgactactgcaaaatgattctccttatctttttatgaacattgtattaaaagaaatgaaactctttgatatcgtccaagctgacctaataccgtgttctaccatctcattcacagaaagaagcagaggaaaaccttcca

SEQ ID NO: 71939 - DNA, 509 bp, Prunus persica
  Intron number 2 from transcript ppa008878m (locus ppa00887 8m.g) derived from phytozome v7.0 (chr-ID scaffold_6; pos 28721307 to 28721815)
cttctggttcgttcagctttaccatcgatcaatcagtaagttctctttttaaagattccttatttacaacaaacaagaatctgatattcggttgattcatggtgtttttgttttcttctaatatgaacgccaaagtgtgtgtgtgtttgtgtgttgttctttttacctctttatttctttttaattttgtagtattgggtctgtagcctgtgccttacacacacaaacacactcatttatgtttatccatttgagaatgaatgagcatgtgattgtgatgaatgcaaatcatggagatggaatatgctgatttcttgaccctcctagtctagtctaagtgtagcccatctgatctgaccattttgttgcttaattcaagttgagaatttatgtcatggagatgggcttttcttgtattatgttgcttttgtttatttttgcttggcaatggctcaaactcaaagtttatgcttttgcagtggattctgtatttgatacagaggctcaaa

SEQ ID NO: 71940 - DNA, 627 bp, Prunus persica
  Intron number 1 from transcript ppa003802m (locus ppa00380 2m.g) derived from phytozome v7.0 (chr-ID scaffold_5; pos 5292628 to 5293254 reverse strand)
caagggtttgctcatagcagaaatcaaaatcaaaggtattggttttctacttgacgtttggaagagctttgatcatattggaatttatcgtattgtggtaaaccagaactaaaccttgttcatataagagcttctgaaccctttaaagttatttatatatggtttcctcatttctgtgtaagcggagagtttgatagatgcgaagagtaattttttgaaaaacaagttagaaacccagaacctcttttgggtttttcggttatgaagggacttatttggccgtacttcaagtgattttttatgtacaagtctcttcttctgtctttagaagctgatagggttgttcatattctagccaaacatgtcattgtttatttgtaaaaccccctgatattgtgttaatctctggactgggatcttaatgataatgctttgtataggaaagtcactatgtacctctgttatgagtaatatgattaatgaagtttgtttttttgttggattaatgaaaaatcagagctattgttttctcgtaaatattgtccagacgaaattttgaatattatgttgggttttacctattgttctatttatttgttcatttttgttctgtttaatgtgcaggaa

SEQ ID NO: 71941 - DNA, 550 bp, Prunus persica
  Intron number 2 from transcript ppa023433m (locus ppa02343 3m.g) derived from phytozome v7.0 (chr-ID scaffold_5; pos 12069564 to 12070113 reverse strand)
atacagaagcgccttggcagttgacttctccagaggttggttcatttgtcaattcatttctcatacacacgtgcatatttatttgcttgatatacattgttagctcattttcagacggccttaagtttttggggaaattgtatttttctctatatgacagtgttctaaacctcccataatggagccttaacctatatgcttctctatgtctacatgtgagcttctccatgtaaatgacgtaaccgttagcttgatatacattattagcttatttccttgataatttaagcttttggagcctagtgattgtctaatatcgaatcttccaaccccatcgttgctacacaattccattatatttgttccgtaagacattcaatttaagcttttgagtctagtgatcatctaatagtattcattatcttgggttattaggggttttcttttcaacatgatcattaaccaatattatccaaatttgaaattgaattaatagtacatatgcatgcatgcaggtgctatatatcttggttttgtagacagcacaagc

SEQ ID NO: 71942 - DNA, 839 bp, Prunus persica
  Intron number 1 from transcript ppa005899m (locus ppa00589 9m.g) derived from phytozome v7.0 (chr-ID scaffold_3; pos 10809757 to 10810595)
ttcgttgcagaacttcgatctctatcggatttcaggtaggagcctcagttcagcatttatctatgattgtaattttcgtttgattttgaatattgttttgttatatttattcacgattggatcttatttatcttcgattgtttacatgttttgagtcatctcagttattttagggttaattggaatttgattttttgattttttgattttttgatgtttttggattggatttggggttgttgttgggtttagttgagttgcgatgatggttgttagtgaaatttgtctgttgaatgtttacttcggaactgattgtataatatatgttcttacctaataatatctattccaaaaaaatatatgttcttacctaataatatgatttcagtttgtcgtataaagttggtaactttggagtatatgcgtaggtgattttctcttatatataattctccatagttatatgcaactgatggaattttatttatttatttactttttctgtatatattttgcaacggcgatggcaattgaactggtttgcaaaaaaaatttgggattgtctctttggatttgtagtaagctgttgggacttgacttgaattctttaccattgtaattatttatgatcttcattagcatgataaaccatcacagagtgtgttatccttttgaattattgttgcttgagagatggaaagttatgtctattctttacatgattcttctttcatgtagttccatagactactctctaatctgtagagttctttagaattttaatcctcagcattcttgattcaggaaacttgcaggtgtatctgttaccttcagatttt

SEQ ID NO: 71943 - DNA, 426 bp, Prunus persica
  Intron number 3 from transcript ppa011250m (locus ppa01125 0m.g) derived from phytozome v7.0 (chr-ID scaffold_1; pos 41646350 to 41646775)
tggagtgcgtggttcagggaattatagaaacacaggtaagtactttgataatgtgggggttgggttaggcttacattttgttatacaatttctggaaatgcctctaaattctgatcacttgatagcacacctatgtattgctgctaggggagaaagattgaatcttctgcttagagctcactttttgacacatatcttctaaccatgtttaccaaattgttcattggaggctaatatgcgagaaaggaagaaaatctatatttggttttttattgagtagtttttgttttcttgcatgtacaagttattcatgattatggactctattttgttcacgattggaaatagatccctaaaagaaccccttttcccccatctgtggttagttgctgtagctgcatctaaaatatggttttcatttgcagc

SEQ ID NO: 71944 - DNA, 692 bp, Prunus persica
  Intron number 2 from transcript ppa023513m (locus ppa02351 3m.g) derived from phytozome v7.0 (chr-ID scaffold_5; pos 4168305 to 4168996 reverse strand)
ccaccaggcttgaaattgaggtaattaatttatatctcaatcagttacatatatataaacttatcataataatgctggggatcaacatcacattgagaaattttttatctctgcattcgatgtcctaaacttgatttctccctccccaaatatcgcatataaaaaaataataataaactacagcagggcagtatcatactaaaagcatatgctctcttcagaaagttttgccttatgtcatctaacttgttcttgcttcaaactccttttgttgaatggagtttgtgaatttccaaactttattttattttattttgctttttttgtttcttcttttagcagtttactaagctgatataatatatatatatatatatatgtatgtgtgtgtttgcgcgcgcgcgcgcttggcttattgtggatgctgacaattttatatcatgcataaagcctgtgcatatccatgtcttttgtgcaatggttcatgaatgaactttcctttttgtcacatcaaaatattctctttaaaaacactttcacttttgtttcaggtgatcatctcaatcttacacatattctacttcccaactgacttcttttcagttccattcaaagcacaacatagacttattcagtgcccatgggaccttggaataatgtctggttattttcttctgtgcaggaacaacctg

SEQ ID NO: 71945 - DNA, 730 bp, Prunus persica
  Intron number 1 from transcript ppa023513m (locus ppa02351 3m.g) derived from phytozome v7.0 (chr-ID scaffold_5; pos 4169151 to 4169880 reverse strand)
atcgagtggcagctcttgaacataggctttttcaggtgaatttttgttgtttaatttgaatttatgaggtgaattatggttaattccatctcaatgttatataattgcttgtttgctggagtttaattatcaaattgcagcttactacttctagaatctagaggaagtagcaatgtgatttttttatttttttttggaatatagagaattttacccgaaaaattataacgatacaaccaagacatctacaaaccaactataaattgtgtttatacgaaggcaataatatacacgtaatagacctagttatgatagggaagctaatatggtagctgatgctctggtcaatttatttggtcacaagtctgagaatcatcatatttggttttgtaactctccttcctctgttttttgtaaaaattatgtatgatattcagaatttcgggcttcttcaagaagcctctatgtaattttattttagttttaagaaaaaaaaaaattgtgtcaatgtgtctaacctctgtgattatgaaactagacaactatcatcatttggaacaaaggagtgacctaacaaaacaaaacaaaaaaaaaaaaggatttgatggccaaaaagaaaacaaaaatgggtttctcttttcagtggatgcagttctatatcaataaagaacacaattaatttcctgcttttattttccttcaacctgtggtgcttcagttgtgcttagag

SEQ ID NO: 71946 - DNA, 445 bp, Prunus persica
  Intron number 1 from transcript ppa005671m (locus ppa00567 1m.g) derived from phytozome v7.0 (chr-ID scaffold_8; pos 1044445 to 1044889)
agaacctgagcacaagaatcaatcccccaaggtaatgtagtctctgcatgaacaatttaatcaaaagtctgtttgtgtttcacagtttcagttagctagtggtcccgttgtcatgattttagtaggaatttcattgttaatagattagaatgtgttgcgaatatgaaatcgttcgtcgcgcttttgtaaactttgcatttcaatatataaaatgttgggtctatactcaattcattgccaattagttttaggttggatactcaaactgtagtgctctgataccatcagcgcttagcattttccggtgctaataagtggtgatgaaatgctgagactaatgagcacatttgtttacattgtatatatatcatcttctagttatttcacatctctacataaattttttgcagggtatccatagacaactctagctgcagtgactgta

SEQ ID NO: 71947 - DNA, 843 bp, Prunus persica
  Intron number 1 from transcript ppa012414m (locus ppa01241 4m.g) derived from phytozome v7.0 (chr-ID scaffold_5; pos 13582187 to 13583029)
gggcaaaaaacagttaaaaacagtaaatttcctaggttagttctgctggctctcatcaaatagttttcttgtgaatttgtggtattgatctttgatctaatttgggtatgtttgaacatcttatcacaataatcacatagactaaaccaccattatatctctctttatatgcatgcctttgatagaaagcaaaagggttcacttatcaactacttaaatcctagaaaaagaacagcaaccacccatttgatagaagatcttcattgactagtaaacaatagatatagaaaagctctttgatctgtcacctggaagttagcatgattctcctttgatctgtctatattgaactttgtcaaatttctggcttgtttgtcgaatctatcacctatagctaccttttacagttctgattttattttgcaatgaatcttctgtgaaacacacaataaaccaagagagaaaaacccaataaagaccgagaagttttggattcttgtgatgaagttttgatatattggttctcagttcaagtgctaagaatggggatcaaaattggaagttttctatttctaaatcaaacactgttagaaaactaccagcaatttattattagatttgtaaagtttatacctaagatagtcctataaaaaatgcactaaaacacttgattgctcaaacctgctctgtaacttcatctttgtctagttccatgcttcacataatgcttgaaatttccttctgtttctgcaatgccttagtcatcttgcccgttctagtaaattggtttttcgactatttgatgcagaagctactataggtgcacgcatcaagggtgcattg

SEQ ID NO: 71948 - DNA, 975 bp, Prunus persica
  Intron number 2 from transcript ppa012206m (locus ppa01139 1m.g) derived from phytozome v7.0 (chr-ID scaffold_7; pos 12790460 to 12791434 reverse strand)
gaacaggtgtgtaattttaatatggtgaacttggatcaattttttatttctctttctaggtcagaacaatgcaagggtttagggtttagggtaattagtatttctcttttgaattggtttcttgtgccgcatgctatgctgtttcatataccacaacaaaattcagattgtttgggctgagggataagtttggcttagaaaggaacctgtaattggatttaatgattaaaaagttggtgcataagttaagggaaaacaattgaacaagatgtgaaaatcattaatctaatatttgtttacccgtatgagatcattgaaatgttagaacaatgcatgtaaaaagattttgttgacagttatattttgttttgttttttcttgtgtgtggtggtgtggttggttttgtgaactaattcattgtctttgaaataaagaatatttctcctttttttgattagatatagagaggaagttacttttatcaaattgatagtatgaatacatcactatagacaaggagtccccacagacaacaatacaaaatatagtcccacaaatcctgacaaatctaaagtgttaacaattttagaccttttacattccaaatatagtttaggctgtactacacttcacattgcatctagactggatgcatagaatatggctaggaaatattgttggtgaatagattttgacagtccatgatactgagaagaaattaaattttcttcttggagtttccctgaacagttgaaatgacataaaaatgtctagtgaaactaggcatagagggttttatcctatgcttgtatgcttatctgagctttttgttctgggtgaaactggcatagagggtttcattagctatgcattaattgcttcctcatgtcatgcattaagttgttttccaatcttgatattatattttgttgtgcctttattttagtatagctgatgttgtttattgtctataga

SEQ ID NO: 71949 - DNA, 788 bp, Prunus persica
  Intron number 4 from transcript ppa007142m (locus ppa00714 2m.g) derived from phytozome v7.0 (chr-ID scaffold_6; pos 22830190 to 22830977)
ggtacttctccttctctgcaattaagtatactttgtgttctgggtttattttctcatgccgagctggtatagaaagtggtatattagtctttccatgcggttttcagttgaattcatgaaattgaggataagtgctgttggatactaatggttgttggcatttactaatcgagatgtagactaataaggttatattagttgaattagaacgaatttagaaatcacttcaaaatccaaaaagaatttggtatttcttcatttttgagctttctgtacaacctcctgactcggataggcacattttccatgagaagaaaagcataaaaagctgtgatttcttagaactatgtttagattttgtttcttgaaataatcaatgcaactgcctcgagcacagtttggtttctgagttccttaaagccagagaattataatgtcattatgtaatctttcataatgataagctcataaccagtgtgatgctgcaatagtctggtggaagacttcaatcttgccattttgatcatagcctacagtttttacatccataagagtggaacccatgaattttcatatatatattctggggttccgcaacgttgatttggaacctgaaaatgccatttaacatgatgcaaatggacagtatttattgtacttgttgaatggtttatcttgcttactatatgtggctgatggtttgtagaagcattttattttgcatatctcaaacataaatctttctaccttcagggtccacgtgggtgctgctgaccaaatcgtttctt

SEQ ID NO: 71950 - DNA, 547 bp, Prunus persica
  Intron number 1 from transcript ppa009102m (locus ppa00910 2m.g) derived from phytozome v7.0 (chr-ID scaffold_6; pos 23754491 to 23755037)
ttgtcagcagcgctttctccgcttgttttgcagaggtgatcaatcaatctaaccctgatcagtgatcacgctcttgtttatgcgaaattgaatcgttttatattttgtatttggatctagtgcactgtttttgatctcatagtcaaccaagagccaaaacccaagtgttagctagtgatcaattttgtctctgatatatcagctatgtcaagcttgtgaatttctatgtgggtgttcctggttgtgcccaaaatttttgcatgaagaaagaagaagctattttgctttgtactgcgttgagaaataacatttttgctatgcggtttaattttctgtgtaatgaaacccaatgccgcccttgaatcttatttagcttgttgtgatcagaaaatcctgtatgcacacaccacacgcacaattcagtgtaagcagacaattgattgtgctatgttccaactgtttgcttagaagggcctggaaattttaaagcgctttttattaacttgatgcagatttgtactattccattggacactgctaaagttag

SEQ ID NO: 71951 - DNA, 817 bp, Prunus persica
  Intron number 3 from transcript ppb013321m (locus ppb01332 1m.g) derived from phytozome v7.0 (chr-ID scaffold_12; pos 471970 to 472786)
aatacgaaaattacaatcacaattgccatttagtaacttaataccaaagcagatcaaagacctccaaaattggattaagcccagcctctgaaaaattctcatcacttgatttcaaaacccaaaagaaagccagcagatctttttactaaagaaagttttctcaagagagctccacgtgactttgactttggaaaagtcaaaattttcaactatcacggaagaagtgacagagagttaatgaagacagttcttataggagaaacttctccatttctttagccagggaaaaaagatcaaaatcccttctcaaaatgcagaaaggctctgcacctaagcaagttatatttccaagagagaacagggagcaagggaattgttcaccatatgaagcaaattgaccattatggcagattggattcttacaaatgaacaaaatagagaaacaagaagagttggatttcttttaggaaaaagcaaggaaaagaccaccatgaaagctggctattgatggctcttctctaccaaaaaaataaaataactcccctttttgtggcattaaaaagagaaaatatttttgaaagatatgccgcccagtattaaagattaaaaaccccactccatcagtttttctataaacgggagagggggtgaacagttcaaggacagccgaaaaaatcaatcaagacaaaaactctcaaagtcataactgacaaactcacaaagatcaattgatctcaaaaagcctcagacactgaagcaaccaaagctctttgatccactagaacaaatcaactagaattcaaatatctgattttag

SEQ ID NO: 71952 - DNA, 859 bp, Prunus persica
  Intron number 2 from transcript ppa004499m (locus ppa00449 9m.g) derived from phytozome v7.0 (chr-ID scaffold_6; pos 20821525 to 20822383 reverse strand)
tttccacctacacaaggtttgtcaattataagtttgatacttcttcttttgatcttgtgtgccttttgtaattttttttacatgggtttttttttttgtattttgagagatggataaaagaggaaaagaatttggcagccatttgagagagaacgatgaaattatgtttatattgggtgggatatttggtacattgtcctcctgctaggttgaacaattagaatctgaaattgggatgtttggcctatttggtttgttaaaattgggaaatttcagtgcaaaagttaaagtactttggttatattcgttgggatcgaaatcttgacctaaaaactatagtcattgtggggtagagtggcgagagataagcctccattgattttatgtgatttatagacatgaatatcgaagctgctttatatattaatcttgcaaaaactgtttgaaattttataaaaaaatcaaactgcttcctaaagaagaacaaagtaccgaaagaggagttttgatacctttatgtggttgttgtatcttataggattccgactctctacatttgcgaaatgcgggtaaatgcatagtctctaaatgtagagaactcggatttgtatgcatatatatatatatatataaaataaacattttcttaagaactttcaattcattatagttgaaatggtttaattaacaggcaggtcgatttaataatacgagtgaatttaaaataataatagtatgtcaatgtttttgtttggttttcatgtcttgtccatttgaatttagaaacgtataaaatgctacttattttgcattcaatgacatccataaatgcttttctcattttctgttcattcatagg

SEQ ID NO: 71953 - DNA, 679 bp, Prunus persica
  Intron number 1 from transcript ppa013180m (locus ppa01318 0m.g) derived from phytozome v7.0 (chr-ID scaffold_3; pos 811087 to 811765)
taagcgactgagcaccagttttcctttgttttgaggtacgatcctagggttcgctgcttttttgctttctctatattcatctgagaatttgtgcccatttttcttaatctactatgttttctctgtttttttccagttgaggagatcacgattttcttttgggttatgttatgtatttcttgaatttgaaggattttattattaagttgtcagttgccaaggaagaaaaaggttcatgaatcaattgatttctgttgtcttgttggattaggagccatttggccgaaattgggatctcattatggaataacaaattggtttatttgtttatttattcttctggtttcatgggttctcagataagggtaaaattgattctttctgccaccctaattacctgaaagtagggttttttttagttcaattgagctttattgtgtagcatgagttgggttaatgtgggttcaacaacaaattattattacttgttgcttcaccaatttaccctctttgattattggggcagtgcatagttgtcctgtgattacctgtgttttgagagctcattctttccacttatgaatgctctctgccatgtgcatatactctttttgtgcattgttttcaattttgtgatctagacataaatttttgctttcttatcttatagacaaggaaa

SEQ ID NO: 71954 - DNA, 548 bp, Prunus persica
  Intron number 2 from transcript ppa013180m (locus ppa01318 0m.g) derived from phytozome v7.0 (chr-ID scaffold_3; pos 811902 to 812449)
agctctcagctggtaagtcatccttttgatatcaagttgaagtcttctttctttcttttttcttttctaggtttaataagctgcctttttacccctttttattgtcatgcaaattgagaaaggtttggtcagatacgtgtgttaaaacacaaacagaaatgaagagaactgttctctaacttcagattaatttttagtttactatattttatcaattctgtgtgtgatcaatggttctgggatcaccagtaccctccagtactactgtaatacttaatgccattactactgaaatacttaatgaacagtcaatgatgctaatttctttgatttggtcatagtatcattatatgcaacgcagtttttcttactaagtaagagccaacctagtaacaaaattcaatactgtttttgaattgaaatattatgatgatgtttatctgggttccttttcatcatcccattttagtttccaaaattattccttttgtttgaatttaatcattcaatgggtgtaggtggaagtacagaactatcaacgaaccctg

SEQ ID NO: 71955 - DNA, 578 bp, Prunus persica
  Intron number 2 from transcript ppa010757m (locus ppa01076 7m.g) derived from phytozome v7.0 (chr-ID scaffold_4; pos 4813151 to 4813728)
tcaaagttgatttgaataaagccctcgtattccaggtaaggttacattgtcaaatgtttcattttattttatctatcctttcatgggagttgattatatgcattgggtcactgcatttgatggacttaaatgactacattgtcacatatatatttcacgtttgatctcggggctcatagattttgacagcaccatctttctaggtttctgcaatagcagattgtgtaaagaagaataagtaaaaagacatttgttaaacaatagcccagtttatagaaaaactttcttaactgtcctgaagaatttcaataactttgtttcactctaaagtacttgtttggcacttccttaccactttaattggctcctcattttccttttttcgtagttcagaacaagcattgcattttagttttagaattactttttccactttcattaatctttgagcagagtgctatacctctacctgctcaatttattgtatttgatgtgttgtaattagttttactgtaaattttaccctttgacaatttttcacaggttggccatcttggagaagcataccaggagtgggt

SEQ ID NO: 71956 - DNA, 586 bp, Prunus persica
  Intron number 2 from transcript ppa023400m (locus ppa02340 0m.g) derived from phytozome v7.0 (chr-ID scaffold_3; pos 1551936 to 1552521)
gggctggtgctctggttgagacgtttcaagggtcggtatgtaagttttacatttgagagagaatgatactgccatgctatttggtatgaagttgacatttcatgatgtttcccctttcttttgtcttaattgttaacttttgtattaacttgacaagaagtaagaaaatcgagaaagtcgtaggtacatgcataggttgtttcacctcatcatactgatatgatacaagaaactattaacgaaatgacacgtaatcattgttaatgtgctctatattcgtatcatttacatcggtgtgatctcaaaaaaattttgaatttaaataacgtaaaggccccgtaacaataattactcatcatcttattattagttacatgaggtcatattacaaccgttgcatctaagaaattctcgaagtacaaaatgtttaaaatgtgccctttcgtatatgagagtcgagaaaataaaaagttttaagtattgttgtatctactttagactcagaaagtgtagcaaaatagttatggaactttcatattctcctatttcaggtcattgatcttaaaacacaactgaagtattataa

SEQ ID NO: 71957 - DNA, 830 bp, Prunus persica
  Intron number 1 from transcript ppa013202m (locus ppa01320 2m.g) derived from phytozome v7.0 (chr-ID scaffold_4; pos 12467876 to 12468705)
acctcgccgcggtccttgaataccttgctgctgaggtatactcctctttctcaacccctttctccctctatatttgtacgtgcatgaatatctctctcttcccattttgtaaatctagggttagggtttcgaattgggaataagattgtttcgtaagtttgtatgagtgtggaaattggttaattgaacattaagaaaactgtgaaaaggaggtaattttgcttcaactggtcgtatcgagccaatgttaagatcttggatctagtttgtttcctaaataatttttatttatttattattttttggttaaccaatttgattatttctttctttaaagtacggggctttgaattgaattcgatttcattgtctggtaattttcaagttatgatatgaatgtttctgtctgtaatattgagaaatcttggatttttttaaattgcttcatttttttagtttttttatttatcttttaggctaatagcactgaaaatctttcaactgtcgaatagggttgaattaatatcggccctttgcatttgaactgttttattcttgttcgagtcttcattttaatgtatgaggcatgtttgtggaattggtgttttgggtaagtcataggaatgaaaaattagtgttggttcttggatgtgttttcacttccattttagatgtcaacgctattgaattggtgtgtccttccaaattaggatattttcttggtaaaggtatggttttgtgtgttaattgatttctgtccacaagttgaggcttttattctaatgttgtttaattctgtttgattttacaggttctggaattggctggta

SEQ ID NO: 71958 - DNA, 650 bp, Prunus persica
  Intron number 1 from transcript ppa003827m (locus ppa00382 7m.g) derived from phytozome v7.0 (chr-ID scaffold_7; pos 21833189 to 21833838 reverse strand)
tctgtggtggctcctcctcacgttctacttacgaggtaccttcttcttattcttcttcatcgtcgtccactaaatttgatgtctttaattcaattttcaatacccatttttggatttctcatcattttgacctttttgaatgcaaaattcgatttttattggtttttcgatgatttgggatttcatcatctggtgcaaaatatagatacctctatcataatcatgaaacaaaccagtgcaagttttaaagccttttaagcatttttctttaaaataagttgttttggggttttattttcctcaaattcaatttgcaatcgaagaaaaatgatatgggatttggccagctgatgcagtaggttggccccgtgctcggtaatatcgtagttattctttgacttatcatttacctgtaaacgcaaatattgtccccattatcgttgtgatgctcttgttgaaaaaaagttggggatttagttcatcgggtcatataattgagggttccgaatttaaatatggccttttctacctgaatccttaaacatttcatgattcagttagtagatataagctatatttctaattagttttgtacttggtagttatagattatggaaagagactgatttgtttagttgtttttcctgcag

SEQ ID NO: 71959 - DNA, 553 bp, Prunus persica
  Intron number 2 from transcript ppa020942m (locus ppa02094 2m.g) derived from phytozome v7.0 (chr-ID scaffold_5; pos 16700912 to 16701464 reverse strand)
gaagtaatttgtggaaggctatagagtggttattggtgtgtctaatgctctctctctctctctctctctctctctctctctctcgctctctttctccaatgagcatttattgttgtagttacatctctttcaggctaacagaaacgtcctgatatattgatcatttatttttttttcttctttaaatgctattccactttacaagcaaacaaaatgcgcatattgattatgaatataatctctctgcctcaatcttgcatttcgtcacttatttaaatgccaggttttacaaaattttatcatactagtaggaatataatctcttgattcctagatgatccaatatagtcatgggagtcgttcgacaatgtggaaccattttattgtcattgcttgctgggtagttttgtttgtcagactgctactaggaatataatgttaatgaaacacacttcgataatcaagcagtcaagcatcaaatttttctcttctacacatatagtcattatggacttctagttgatctggattttcatgcagtttaaaactggaa

SEQ ID NO: 71960 - DNA, 835 bp, Prunus persica
  Intron number 2 from transcript ppa009012m (locus ppa00901 2m.g) derived from phytozome v7.0 (chr-ID scaffold_8; pos 1018099 to 1018933)
ttcccgtaaattaatacacaatactctttatgtttgtctttttatgaggcccttcaaggaaatccaaaatactattttctgtttcaataaatgattaattattatacttgagatttggttggtggcgctagttatgctgataattcaaaaatcctttagtagatttgtgacaaaatctagagccacctgcgagtaggactcgtaggaatcattttgtaaagttttctatctgcgaatagtcctatgctaatgagcagcatgaaacatctcttcgcttccaattcttgacgagtctacttgagggaggattgatgcatagaaaaacaggggtggccccctatttttgttttccttgcatggctgggccttattttgttttccttcctctattaggaattcattacgtagacccagattagactacaaggttcttaacattgcgctccttcatagttaaatttcatttagagcttattttgttttgaacatcatgactatgttgtaagtgtgaattgtgccctttctaactctcagttctgagtgcccatttcccgatcttcagcataacatttcaatgcaacaattgatttgtcagcatctagtaattgcattttattttacaatgaaggataaccctgtttttctttccttttatgccttttgggcttctccctttggttggtttggagttcaagctttcttttttctttgaaagttaaaaggttttggttgcaagctctgagtagttcctacaaaagaaactgaagaaaataaaaactattgaagctaacagaatgattttctacacttagttaggtgattttggcctagccaa

SEQ ID NO: 71961 - DNA, 407 bp, Prunus persica
  Intron number 1 from transcript ppa011312m (locus ppa01132 5m.g) derived from phytozome v7.0 (chr-ID scaffold_2; pos 21911504 to 21911910)
ttatctcatcaagcttctccttattggcgacagcggttagttattgttattgtttgatatcctcctctgtttggttcccgagaaaattatgggagaaatgggagttgaacattttcgagatctaatgtgtttttcctttactttggtatcaatgggagccaatgtgcttttcttttcatgtgaatgatctatttattaacaaaatgtcatttttctcaaagtgtttttagttgaagaataatgggtgtgttgaaatatttaattgtgtccagtttgaatatatccaattttttataaacgattgtgtttaaggacatgactgtatgtgtaatttgttcatgaaaattaaacattttcagctgaatgtttcaggtgttgggaagagttgtctgcttttgcgtttctct

SEQ ID NO: 71962 - DNA, 326 bp, Prunus persica
  Intron number 1 from transcript ppa022071m (locus ppa02207 1m.g) derived from phytozome v7.0 (chr-ID scaffold_4; pos 21908136 to 21908461 reverse strand)
ccggtcccgccaaactccaggttgcccacctcattccctttgtttttttttctttttcaattcttacgaagcatatgtttgatacccaattctttatttttcttcgaccagaaaaagattcattatttttcttatttaaagttttttgggttttttaggttggaaatttatgctcaaattttgtgtgttgtgttttaaataacaacaaagtaagataattgagaccatttcttgaatttttttttttttgaatgcgcagattccattattgtttctagactgaattttgtttatgtaattttcatgtcaggtaatagcagattttg

SEQ ID NO: 71963 - DNA, 966 bp, Prunus persica
  Intron number 1 from transcript ppa012896m (locus ppa01289 6m.g) derived from phytozome v7.0 (chr-ID scaffold_4; pos 3855080 to 3856045 reverse strand)
aacctagcacccaatctcatcacttcgcagccgtaagcaaatctgaaatccaacctatgctctttcatgtagtatgtctcagattgatctgtctgtgtgtacccaattcattttgtgaggctttatgatgtgtgtaagaccccagacttccatcttttagctgctagcgtttcagatccagaaaccttgtatatttttgtatcatttgtgaggaaaattgagattttgacttgcctttcaaatgcatcacctttttgcaaactttgcaaatggaaaattgcatttcgtttttattttcgttgttaaaaatatgattatctggttactgtttttatcaggaagaaagcccttggccaaattcagattagtcagtctgagggtcatatacctaattggtgaataaattatccaaatttgtttattaccgataatgtggtattttacttgagttggagtcaatatgtgtgcttacttagctttgagtcaatttctaagcgttggttatgttgcagagaatttagtatgattatctcatgttagtggatttggtttcatatatctacaacgcatactaatcaagttatgacatttttgtgtaaaaaaggcattttgttttgtttcacctgtagcacttgagaaatatgaagaattcatattttgattaagttcatgaaacagctatctgtacagaattcatttttcagtaataggaatagattttttggtcggataataggattagttattgggaaattaaacttgtttgagttgtttctactgctagagtgttcttgttttagtttcaaaaaatgttgttattggtagtggatggttcaaatatttatttttatttttgtttttgtttttttaatcaatggtagagctagttcttcctgattttgacatctttttgaatttatgattgctacagtcaaggaggaaggttagggaaccaaaagaagaaaa

SEQ ID NO: 71964 - DNA, 373 bp, Prunus persica
  Intron number 1 from transcript ppa023583m (locus ppa02358 3m.g) derived from phytozome v7.0 (chr-ID scaffold_6; pos 10517620 to 10517992 reverse strand)
tcgaacttggtcaatccctgatacacaacagacaagtaagtatatgttgtttcttttattcttattctatctttgtgttcatgccaagaattatgttatattttctttggatttatttcactgcttcgtttttgttatgttattctttggagaaaaatttcatgcatttacaatcatgaagatttgaacgttcagggatttaaatctcatcgtttatggaatataaaagtcattatattcatctggtttgatatgtttgcagaacatccaacatgtatctatatttgttctctctttttttcagtattgattaatttctggatttgatatattattgaaccaaaatgtttatccaattcgcaggcaaagaaat

SEQ ID NO: 71965 - DNA, 750 bp, Prunus persica
  Intron number 4 from transcript ppa003970m (locus ppa00397 0m.g) derived from phytozome v7.0 (chr-ID scaffold_4; pos 548652 to 549401)
ggaaaggagttttcagctattcctgctggttcttggtatgcctgcttggcctttctgttagagctattttcagtttgtggttaatcattcatcactattaaccgttagcatatgcaataagatctaagtgctacccatagtacgtattacctaaagttctgaataatagtgaaggaaggcaaataataaatgggattgatagccctgtatgaattgtcctccaatttatatatatatatatatatatatatatccaaaatcaacaaataattacagtaagcatagaatgaaataggttaggtaataaatgttcttagatcaatataagtgaaaattaaaatgcgacaagactacaaagagcaattaggcaatgtcaaatgatcataatctatacaaaaacttaatagtgacaatcctggaaaaaggggaacatttttagatcatcattactgcaaatgtattcatatttgggtctgcaggagagttgtaattgattgtcgtccatttgtatatgtttcacaaacaggagttgaatcaattattaaaccatcggagcacttgtttattaattaaattgagtgtagagttaatcattaatgaaactaatagtcttgacatgaatacatagaagagctttacataatcaccaattatggttgcaatcgttttgtccatctacatatcaaaataaggttgttttgataatatctcttaggttcaacttcaacaaggttgcacaatacaagcaac

SEQ ID NO: 71966 - DNA, 564 bp, Prunus persica
  Intron number 2 from transcript ppa017922m (locus ppa01792 2m.g) derived from phytozome v7.0 (chr-ID scaffold_8; pos 12685279 to 12685842)
tggcaggtccacctgttgcagctgctctggctgcagtctatccctgtagcctcaatggggaagtggattgactcttttttgaaaaactaagaaaatgctgtgaaaggtttgcaatagaggagattaaaaagaagttgcctcaacattgaacaaaacataaaaagaggggaaacctgtcagacaaccgtgtgaccaccaccagccaatcgttcattcttgtttctcttcaacaatttgtggaggaaaccgaaataggaggcaatcgatactcgaggactttggaggaattgaacaagttcaaggaaataggtgatccttttactaaagagtacttccaaatttttcaatctgtttacatgcaacaaacactaatgcttgagaagttgaaacttccgaagaacaagcttgataagaagctcaaaagcatccatgcttggagaaaggtctctactatgatatttgtggctataattgctgctgtgtggatttgttcagctgttgcagcagccatggcaggtccacctgttgcagctgctctggctgcagtctatccctgtagcctca

SEQ ID NO: 71967 - DNA, 661 bp, Prunus persica
  Intron number 1 from transcript ppa010096m (locus ppa01009 6m.g) derived from phytozome v7.0 (chr-ID scaffold_2; pos 12685004 to 12685664 reverse strand)
agttcgcatccaatacagagaggttggcaaaattcatctgtgttcaggaaaaagctttcttttttccatctattattaagcatgtatatgttgaaagaacaaagctttctatattgttatcgtgctaaaattttatttatctgtgaacaaaaatagttaaggacacctgtatttgcagagccatgtttgatcattgaaacagtttctttatagtatagaggtcttttgaaatttcatatgttggcctgtacctgtgctttggttatattatttgttgaagattgatatttcgtgagtgactctgccatatgaacgaagtcgtctatatggtgccatttgaaatcaatctcaattacatttagatgtctttatcgatttctttgatgtgattcatatcaagttcttgaaagctacaagtatcacaaattgttccttcatatagactattggtggtgttttatagcttcctatcactgattcattaatacatttggattgactcttaaactgagggaagttccaaaatggaagggtttattcacaattcaactataacattatagaattattttctgtatacctatatttcggtgaggagctttttacatgacaccttttccccttgcttatgtttactgtgaatcaaatggctcatagggag

SEQ ID NO: 71968 - DNA, 736 bp, Prunus persica
  Intron number 1 from transcript ppa012779m (locus ppa01277 9m.g) derived from phytozome v7.0 (chr-ID scaffold_2; pos 26300823 to 26301558 reverse strand)
tgctctcaactctcagtatcagactcaactattaggtctgctcatctctttttctgcttcaaattatttactttttgttgcaagtcgtgaactttgtaaaaatctgaatcggaaaaacatctgctttgtcaatgattgtgttttatttaagtctttgtaatggatcgatccaattcttgtcaacttttttaggtttgctcgaattgagaaacatattttactctaattgttattgtagatgcttcatatgtgtcactgtgtaataatctgattgatgctatatgatgtgtagtgtgtaattttgtttagctatagcctgcctatatgctctatatgtattattaggattttcataattttttatcagaaatttggatttgttcttttaaaagtctgcccagcccagtgtttttccaggatttttgacaaaatctgaactttatttttcctgtaagttttgggctttgttgacttatcattccgtattaggttttctagtaactgtgtgttttcaggattcttaacgaaatcagtacttcctagtaatttttggattttgttgctctgtcaatccttattccttattgggttctagtgcctcttttcgccttaaatttccttgtttgctgaatttgagtttcaaaacacagtttaggttgcttttcatacaatattttcatcttaaattcataatatttgatagatccaatgttgtgctgtaaacaggtaaaggatc

SEQ ID NO: 71969 - DNA, 850 bp, Prunus persica
  Intron number 1 from transcript ppa008436m (locus ppa00843 6m.g) derived from phytozome v7.0 (chr-ID scaffold_1; pos 30854779 to 30855628 reverse strand)
gaggagccttcaatcaatctcaagttgctcttcaggtacttcccttccatctaacacttgattgttttcctttcctcctcttcttaaataatcttctaattcttttgctcctccgtttggggaataattccgtttatattctttatactcgctatctatccagtctagatggttccgttcttggtcatatagttgcgcatgcatgatgtaggaatggcccatttccaaaaagctaggacaacttttttatgtcgtggcccagatttgactattatcaatttggctctgagacggaaatccattacaaagagactgaactgaacaccattatttgtctgctttacatccaatcagcttctgacacattatacaattgtattattggagtatgtacagctcagagcggatattcctttttcttgcactacgtctacatgtacacggaaatgattggtttctggaaaataatgctttatattactttaggtaggccaataaataatgctttatttcaaatgggttgttcacctactaaacttcaatcatctggtactggtaggtatgaattgcaacttgaaatttcatcaagaaaaagatttcacctttaccatgtataattgcatagtttttccccatggggtcaagtttagtaaaaaagagtattgatttgcatattagtggtatcaaattcaacctttcacacattaatgatatatgtgtgagaaatctcatttcctttagttttaggctatcactagtattcaaaaaataacataattttttggtttgaagttttgtaagtataacggaaaatattaactaaccttcgtccatgcattcaaatttgtag

SEQ ID NO: 71970 - DNA, 919 bp, Prunus persica
  Intron number 2 from transcript ppa016654m (locus ppa01665 4m.g) derived from phytozome v7.0 (chr-ID scaffold_4; pos 14008565 to 14009483 reverse strand)
taatcaacttcaaagcagcgagtctttaacaaagggtactttgttttatgttcttgttgcctatttcacatttatcttcgtttttgtcggtttccatgttattttataacttctagggaaaagctaacttattacagggaactggtgcttgttgcgtcctgttatggatattttggtttgattctgtctcacacttactgcaaatgatgattatgtttatgattatgcatcgataccttactggcgtctctatactttaattttttaccgcacaagatactgaaagtcgataaaggaaaggaaatatgcaactttgtttatttaagaatgagcacttatttaaggatgacagtttaatttcctatttaaggtatagaacaaacaaaatcttataggcattgatttgggtaatctggccccctaatgtcagctgaattatgtaccctaggttcgctatataaaacgttctttttggaatataaatatgtgcgtgtatttgttaaataagtaaaataaacagctaataattgatcatcagatctctttctgcagtccggattaaaacaattcagattggagtgtcttgatctcgagtcttgacaatgcggaccgtggaagtcttttaatcttggatctaatactttaggactaactagttattttagttacttatttaagtacttactggagcatctctctctctctctcatgttgcctgcctctgtcacgtactgcaaaatggatccagatcttgaatttttccatatatatgtatatttttttatgggtttggttggcctttgaaaacttaattgagttcatatatcatcaaatttaaagctttggaatgggcttcctttgttgttatttcttcacctgttttgtgatccttaatatttggactttgcagatactgaac

SEQ ID NO: 71971 - DNA, 380 bp, Prunus persica
  Intron number 2 from transcript ppa012158m (locus ppa01156 6m.g) derived from phytozome v7.0 (chr-ID scaffold_7; pos 19384575 to 19384954)
tgagaaacaatcagtcagtgttcaggacaaaagtgactctcttattctttaatcacttcatttgattaccgcgacttgcttgctaagtcgggtcatggaaatttcagctccaaaaaacaaaaagcttggaaatttcagctcagagaaaaaaagaagtttggaaataaacataatttttaatggttgtttgtggttcaagaacttttgtttgtgagagatgttgaagagatgccccaaaagcttgatatgttgcctgttggccatgtcagactagattctctttgatactacatatacattctctgtttctttctggaatgaaatcttacttggtttatatgctgatactgatgcagattttggagttgttagtgtccacc

SEQ ID NO: 71972 - DNA, 1012 bp, Prunus persica
  Intron number 1 from transcript ppa013587m (locus ppa01358 7m.g) derived from phytozome v7.0 (chr-ID scaffold_1; pos 24959564 to 24960575)
aattgtcagcaaaatcaagcaggagacgacacatcgtcatggcgttatcggcccttgattaagccagtcacaggacgcgtggtcccccaaaaccgacctcccccacccaagacccagccaatgccgtttccttcctcatgttccaccacccaaaatgacataaaacaccctcctgattttcttctaactaaagaaacaatctcaagatccaactagtctttggtctagtggtatttgttttcccttataacatgtttacttattacggatgagtattgaacagttccaagaatgattctattcctaactttctctatattttattaatatacgaggaataaaaatttatatgagttttaactcacattaaaatccgtaaccaaatgctctcaaaataaaaattagaaagaaaaattgatctggttttaattattttttcatagacttccaactcacatggatgataataacgatatatatatttgtgatgattttgatacttaattgtggctaacctttttgcggtaatgtagttttattgtggatatttattttgaatttgagtgtatctaggttccttaaaacatcaaggaactttagatatttatgataagtttgatacctagttgtggttaaccccttcgtctccgtgtagttttattgtgagtgtattggactcttgtaaaattatcttataaatatcttatcctttatcgaaaataaataaataagaaaaacgatcttaagggcattttggtaaaaaagaaagagaaaaactaggttaaaatttaataataatcaatcgttaatggaaaatagaaaacaaagaaagaaggggaaggaaggggaggtggggtagacgacaagtgaaacggcttcatttcgtgtaggtgcagtgttgcgttgtgaggacaactgccacccaataccagagaggccacagcccacacaccctttccttctacttattgtttcagctttgctttctcaacgttctctttccccttttctt

SEQ ID NO: 71973 - DNA, 591 bp, Prunus persica
  Intron number 1 from transcript ppa007037m (locus ppa00703 7m.g) derived from phytozome v7.0 (chr-ID scaffold_8; pos 20166103 to 20166693)
ttgcaggtactttgctttctcttctggcttcaattggatttccatctttttctttattgcgtttaatgacatacagggtttgttgcataccgaattctccatgtttcagttttagactttcaaacctaatttattggttgtcaatgaaattccaccagaaatgaaatggaattaagaaatttacattttgagctggtacacaataggccatcatctatagccgtttcgtatactactaataacagatgccagggattattatattgtttgagttgtcttacccatccgtagtaggaagtgttagtatgctggacttgaatttctatttttcattgtttttatactcaaggattacaccgtcactactggaaagtagctatatatgtgtgtgcttgaataagtatagataaagaacaaagatttttcgtatgtgtgtgctcgtgtattgcaagtcttatgtctcgtttatcagctttataaaatataagaaagtggtgctatttatagtgatcctgtttttttatttatccatattgttctcatggcctgctattcttgatattatagtgaaaatattggattggggggagg

SEQ ID NO: 71974 - DNA, 896 bp, Prunus persica
  Intron number 1 from transcript ppa004493m (locus ppa00449 3m.g) derived from phytozome v7.0 (chr-ID scaffold_1; pos 154224 to 155119)
tggcgcctcacctgcactactgggtacctaggcaggtaaatggctgcatcccacatcagaaagccttgtccattgatataagtttgaaatgtatggttactctctcagtgaggacacccaaggtataaaggaggcgagatggtgttactccggaatcctacattatgcgttgggtattaagaaagccaagaaattcagaagtcaacttcagagtagacttttggatgaggccttgggttgttacaccttttgaaaagaagaagttaggagagctgtttgattgtctgattccaattaattaaataaatttcttctaaaagattacacaaaggaatattagtgtttgttttatgcttgccgtggagtttcttttgtaggaaggataagttgggattgtagactctttagagaaaattctttagttctttgtactttctgacttgtttactctggatatatttaaattctagcctttctatgggcatctctatccaacatagtgtaattcatcttgattggggggaatatgagttgatgtaatgtgagctatgtttattgaaacttgaaagtaagactgattgctttgtagaccttgtccatctatcttgtagttttcttcttttcattaagaattttgtttcttgtattaatacaacaacaaattcacatgtgcgagaaagagggagaaagcaaaagaaatatagaactagctatgcagcattcttaaagaatttgttgtttgttttttgaatttatgagcaccgaccatttgattttctttttaggcggaaggggaggggaacttaagtatgagggttttactctttcccatttaatttgtggtgcttgtgagctttgcagaaagatcatcaggccattgatattcttcttgcgga

SEQ ID NO: 71975 - DNA, 840 bp, Prunus persica
  Intron number 3 from transcript ppa009960m (locus ppa00996 0m.g) derived from phytozome v7.0 (chr-ID scaffold_7; pos 13332766 to 13333605 reverse strand)
acacagaaatcttgggtgtttcagttgacagtgtggtaagttcattcctgcttcctactatctgtaatatcataatgtgctttgaaaagcccttgtttcaaaaaaaattctttaatttgcattgttcttttataatgcattgccagacattacacaacaaagtcaatattctgctaacagaggtgttataaccttgtccaaggttttggtctgctgcaccatattgcaaaaggtcaatgagcatgcacatattataatgtgctaaattcccccttggactatatgtatgcttcattattttgatacgagagaatgattctgtctgtaccgtgggatgaaatttaaaaatgtcaagattaagtgtgttcaagtaattaagtttttatgcatcggattttctgacttccaacagaaattggactcctggggtgggtggggcaaacaatgcatgtgattttgggccaaaatgccaattcccagtgttggtggaggaacaacacttacagacaagaagggcattcaaccgagaaaaaaaaggatggttgtaacattaaaagaactaggagaactgatatttatggttggaataaaaaggattcaccaaggctggcaacatcagaaggttgtgtgcttgatgatgattgatgatgatgatgtgaatcagcttattttctccaatttttggttattttgacttctgtatttgatgttttgcacatctgatttgggcgtatgtatgtgtgcttacttgatataaaatggtttgagaattactcttgggtttgtgagatgaatttatattagtcttttactgtatttttcgtagttttcgcaccttgc

SEQ ID NO: 71976 - DNA, 653 bp, Prunus persica
  Intron number 1 from transcript ppa024803m (locus ppa02480 3m.g) derived from phytozome v7.0 (chr-ID scaffold_5; pos 12858589 to 12859241 reverse strand)
ccaaagagtcggcccctttcgttgcaggttcgctgtcgtctcaattattttgttttcgatcttctgaggtatctcatcaccatgcatggcttctcttcctccctctatctctctttatctatatggcttctcttcttcatgtgtttgatgctactcatcctgctagtcagatatatcctatacacacacaaacactcacatagttgcagcatgaagcctctgcttgtcttattcatgctgcaaaggaaatagatgcaaaacaaagaaggacatatatatttgtcatcaaaagtagagagaaacatttgagaaaacttgtccgaagcggtgcagagagttataaatatcatggtttcagtgaaccattggtatggtggagaaactccaaccatgtcagaatctttgtttgtcgcgtattgatctcttaaaccacgtttcttgtacccaacatggcttttcttaatccctttggcttccaattaataactgccaaaagtataaagatgtttgaaacaacaaaaggaacgaaggaatcaaagaaaggaaggaaagttcagcaaataaacaagtaaaaactaaaacatactttttgcaagaacagaacagattctcaaaccgtgtttgctttacagactgtggagctcaaagtcagg

SEQ ID NO: 71977 - DNA, 382 bp, Prunus persica
  Intron number 3 from transcript ppa013429m (locus ppa01342 9m.g) derived from phytozome v7.0 (chr-ID scaffold_1; pos 30054345 to 30054726)
ccgtaagttactcaactttacttaatcaattatagctcactttcccaagttaatagtttggattgcatttgcttggttttgtttctttgaatgagggtatggtttgttttttcatgaaatttgaattgctaattacagttcgattttctgtttttcttgtatcatttgctatgttgatgcacacagtttctgttgttggtgttttgttctcttcggagtacatggttatacatctgattagtgtcttccgagtatccatctgctttcagcatttctcattttcagaagctacctctcatttttattgggttgcatagaatggaagttcattcgtagtgtgttctttaacttgttcattttattaacttgtttgcagcaatac

SEQ ID NO: 71978 - DNA, 724 bp, Prunus persica
  Intron number 1 from transcript ppa006037m (locus ppa00603 7m.g) derived from phytozome v7.0 (chr-ID scaffold_5; pos 12421558 to 12422281 reverse strand)
gcttgaacccattgctgcggttgataaaattaggggtgagttgtttgtttttgttttgtttttcagaattcccaatttgaaaaataacaaaaaataaatctttatttcaggacaacagtaaaaattggaactttaaatattatgttccgaatgggtttttatcaatttgtcatctttatgtatgagaattcaagaattgttccttttttattggaaacatttttggggttcagttctcaatttgtctctaggtctctattatcattacaagcttatagtatccaatcagtgattagttaattgctttgaatgaatggtttagcttaagtaaattttctgtgagttttgttgagatgaccctgggttgtttgtttaattgaggtttattttgtagttgcaataatcttctttcttgctggtggttttgattgtggtcaattggtgatgtagataattcaatgcatataggcaagttaatatctatggatcagctgttgttactgcaaattcactttgcgaattttcgatctcgatacattttgttgatgtttcgtagataatattcttgttcaaacagttccaagtttgccaattattaatctcttttcctgtcatttagaatttctatggattgactatctattccaaatcttgattttcagttgaaaaccactttgaaagtttgctctttcaattgttcaaagcatgaaccttgttggcgcac

SEQ ID NO: 71979 - DNA, 843 bp, Prunus persica
  Intron number 3 from transcript ppa009519m (locus ppa00951 9m.g) derived from phytozome v7.0 (chr-ID scaffold_4; pos 16808653 to 16809495 reverse strand)
tggctggtgggacaggtgagcttgtgatatgcatttatatatgataaattcgtcaaattatgtgaaccattagactttgggacacatgtattttgtcaggtatttttctgtagtaacaagtggtattaatgataccaaattaccaaatattatgatgctaccgtagtttctgggttcaattatcattttgaggtacatatttttcacaattttctttagagaaactaaaaatacattttagatgcagccttctggctgatctgtgcctttatctccttgcaaaaggagaaggtccaagtatgaaatccagtttgaattctctacatttacaaacttttgtatactgctcatgtatgtggttcagttttgggtattttaaaataaagcttacattcctatcactgaatattgaatccagtttgggttgggtagagatctgacttatggagtgggccaaggatgcagttagccagacagagttagtaggtatccaaaaatttccgtcagaccaaaatggactggaattgcccttgggtccgaatgacaccatcccatcctgtattatggggtggatggtgatcttgtgggtatattacctgcagggtgcaggagtgcatctaccattgaaaaatagaattcttaaccattctccttttcagagatctcctattcctaacctgaatgtagctgctataatgctacatgacaatgtgttttccttgcctggaatggtattgaaatgaactgctttggtctaacctagttttatgctcttctgagaatctttggattatatatgtcaatcttactgttatttttaaaatattattgttttgtcaggcg

SEQ ID NO: 71980 - DNA, 747 bp, Prunus persica
  Intron number 2 from transcript ppa009411m (locus ppa00941 1m.g) derived from phytozome v7.0 (chr-ID scaffold_6; pos 18492518 to 18493264)
ggctgaggatctcgctggaaacacgtggcagcactgtgagtttctgcttgccttttgcctcttcttttctttgtcgatctctgcctgattaatttgcttcaatttttcttctacatgttgttttgaaaattatgggaattgtattaagataaggttccaaatgtcttggttgctttgtcatattccatttgccaattttgcttcctttgcttgtaggaattgattggctcctatcatccatttttcatgaatattaggagttgacattttaattgtgttggttattctgattaatccctgtttctgagatttgtgaaaaataataggtgtggtctgtcctaatcttattcggtagatttatggatgaacacgagaatcgacaagtttaaaatttgtgaggaggattagccaagcaaccgcatgtaaaacgcttagccaagtgcttgaaaagtgttctatataggctggctgttagtaccatcctctagtttctctaaccatctgaactaatttcctgttgaatgcttttcttttgttgtttcacactgaatatgcaaataaaattctgcttgtgtcaggaaaaaaatggaatttcaatctctcttgatctccccagttttgcttttgttattcctattttttactttgtccatttttttgatccaaaaatatcgtgattgtgatggatgaagtcactaatcatcctgttttatttcaaactagtgaaaacaagccctagttttgctg

SEQ ID NO: 71981 - DNA, 430 bp, Prunus persica
  Intron number 1 from transcript ppa009894m (locus ppa00989 4m.g) derived from phytozome v7.0 (chr-ID scaffold_1; pos 27518464 to 27518893 reverse strand)
tttgcttcttctttgctttctgtggctactctccggtgagctctcatcttacatactctcatgttcttcactgtgaattctatttcacgggaaaggctcgagctaatcgatttggtttgcttttagaattgctctggtaattttagacccaattaatgaggatttaatgggataatttacagaaagataagcttttgataagggtcttcaactgggtatatgtgattattttcacttccgttttgtgtacttggaagttgaatattggaccaaaatgtgttagtttgagtcaaaactcattttgcagttgtgtttgtttcacatgcccagtagtttatttcttggtgttgcatgcttgaaagatttgttgttagagatttggttcaagtataacgtttacgattttaataggacttattgaacattgtag

SEQ ID NO: 71982 - DNA, 337 bp, Prunus persica
  Intron number 1 from transcript ppa011799m (locus ppa01179 9m.g) derived from phytozome v7.0 (chr-ID scaffold_6; pos 26575108 to 26575444)
gctgctgttcttgaatatttggctgctgaggtgatttttctgatccgcaatatctcagatctaagcattttaacttgttttatcgaaataatttttacatgatctgattgttgcgtctgatattacttccgttttgattttctcttgatatctgatccttgtgttttttgtttggaagaattgatcatggacgtgtttctctttcttgtttggttgttgagaaaaggaaggaaatgaaaagaaaactgacatttttattacaattgtttgatttctgtttctgtaattatatcattaaatcacaaattaatcggtcaggttctggagttggcgggga

SEQ ID NO: 71983 - DNA, 395 bp, Prunus persica
  Intron number 1 from transcript ppa014360m (locus ppa01385 2m.g) derived from phytozome v7.0 (chr-ID scaffold_2; pos 9684416 to 9684810 reverse strand)
aaacctacaattggaagatcagcagagaggcaaaggtactggctttcacctcttatgcttgatttctttattgttatccgttaaattttaattttcccattatgttaatgtgttcgtggttatatatagcttgtaaaagttagggtttcagaaaccctaatatttgataagtgtttatacatgtctacactcaaaaggtcaattggtgtgttgctatttggtacttgtcaaatctttcattcaattgaataaggtttttttgttctgatgctttattttctcttcctgattacttttatatttgtcattcaattgactaacttttgttttttgtttttattaaatattttccaagtttagctttttagggttttttagtagagcttcatcatcca

SEQ ID NO: 71984 - DNA, 651 bp, Prunus persica
  Intron number 3 from transcript ppa014766m (locus ppa01476 6m.g) derived from phytozome v7.0 (chr-ID scaffold_3; pos 7819033 to 7819683 reverse strand)
gttttctttcagggtgttcccccagatcataataagtaagactttggttctactcatgtatatacatcttagcaatctgaattaatcagaagaactcttacttaaatgtataatacatatgaaaaaaatgattacatagcatatttagatatatggtaagaggtatgattggactaagattagtagtcttagatccttagacaccagtgtgtgtgagtaaatacccttccctcttcctacctttgacccaaaaaaaaaagaagatatatggtaagagatggtgtacggtttgtatgcataaggaaacattttgtaggataattttggtgggcttggttagggtcatatttttgcccatgaaatgatgcatattcaattacctagctctatggagtaatatttttttatatttttattttatttgcacttatgtaacaccatatgacatgctaacgtagtattattaatgcacctagattgtagcacgtgactggcgcacacttgcaccaaatttggttatatatgtaatgttttttcagtggaagtgattggggagagccaacttcaaagcgatgtgagggacaaacaacaccaatggttgggcatcagtaaccagaggttcacatcgagcacagctagtagtagaaagag

SEQ ID NO: 71985 - DNA, 977 bp, Prunus persica
  Intron number 1 from transcript ppa010794m (locus ppa01076 9m.g) derived from phytozome v7.0 (chr-ID scaffold_8; pos 4706371 to 4707347 reverse strand)
aggtgttgttcttagctcctagtttcttttaatttacattttattgctgattttgttcatttttcatctttgagtttcttgtgaagcataggatttgagctaggtttttttttatttttttatttttttttcctgtttggttgcttagaaagtgaaggaaaatgaatcatctgtaagtatgagaacttgactctgcctatgggggatggcctgttttgattgttgggttcagtcgctgggtattttcattgatttccttttcttcacctttatgtatttctccgcaaccaaacaggagaggtctagggttttagttattgtttcttccctggaaatggtaattacatatgttgtgatttaactgactgtattggtattggtcgaaatatatttgttcttattttccatctttctttttctctgcaaccaaacgaagggctatgcttttatttttacaaaactgaatatagtgagattttggtgaaattataccagacccaaatgggaaagagaatttgtaaagttagatttcttatttttctgtccgtctcttttgtatgatacgatgatgcatatacagaaagtttattcaatgaatgcaactatgtttactattgcacttgtacaagtcttgcttttccatttttattttgtatactcctttaactcttgattctatattatttttgttttttgtgcttaaactgccatattggtgaatagttgtgcaggaacgcttggttagtgtaggatctagtagctacaagcttatgctagtctgatttgtcttacagtacttgcttcaagaagtgaactataatgctaattttgttgttattgatactgctatatacatgggtttccattttcttctcattttctggtatatatgtatattgtaacagtttactcggttggtgtttatattcatttgtactaattttcatttaaacatgtaattttcagccgacatccta

SEQ ID NO: 71986 - DNA, 519 bp, Prunus persica
  Intron number 1 from transcript ppa025818m (locus ppa02581 8m.g) derived from phytozome v7.0 (chr-ID scaffold_5; pos 16792215 to 16792733 reverse strand)
agagggcagtgtccttccttatccttcctgttggtgtaacttgtagggaagggaagggaagggaagggatatagaagcaaataattgagtttgtaataggacccgtgttcttccttccccaataacacgacagacataacataaccttgctttgaggaggagacacacatgcacatcatcaaattggtggacagtactggacacaagcagcgacagacacctatatttgacaacttcctatctatctcattctcattctcattctcaactcctatacactatctagaaaaagaaaaccctaaactccagttgggttgggtggtttgcattttacaggtaaatatgtgaaagctaaatgaggtagtgaagaggtccgattgtgtcctattcaaagacagacaggggtggtcttacttatcttataataattcattcattcattccttctctttctctttctctctagttgtttttgtttttgtagcctactctctttcctcctcaagtcttgaagtccct

SEQ ID NO: 71987 - DNA, 566 bp, Prunus persica
  Intron number 1 from transcript ppa005720m (locus ppa00572 0m.g) derived from phytozome v7.0 (chr-ID scaffold_1; pos 37243793 to 37244358 reverse strand)
gttggatcagctcaagtctaagatccacacccttggttcgtttctcgcttgttttacgattttacggtttgtttgaacttaaaaacttaatttgtgttttagaagtgttgtttattcgattttcctcggttttatcgctgcccaatcagatgttactgaagttaaagatccttcagtttacgaatcctgaagtgtattaatttcgttctatttctagttttttcggtttttgggaattcaagtagtaccaataagctgagctctccgagcttaacttgtcaagctttagttttgaactttttataattcttgtcggagctttaaaaaaataaaaataaatctaattttagttaccgttttgagtggaaacaatattcagaagagcacaagttgatttttagctttgttccgaagaataatccatagtggcttaccaaaatcaatgttaaaaagcagttcgtagactttttggattttggaatggtgcttcttaagtgttttaagtgctgcttgggcttgttggctgacgttttgtctttctgtaactgctgaagaattcgacgtgg

SEQ ID NO: 71988 - DNA, 382 bp, Prunus persica
  Intron number 1 from transcript ppa006729m (locus ppa00672 9m.g) derived from phytozome v7.0 (chr-ID scaffold_3; pos 8898727 to 8899108 reverse strand)
caacaaggtcgccaagcgcttcgagaaccacaagggtgagacacctacttaccctctgtttgtttgctaagaaaatgcaagaaaaaaactgaaaatttcatctttttaaacattctactgttgttttgtgggtaggagttctctatttatgcttataagagcgtttgaggtcacccacttaataacattagtaatttttattgaaatcacttgggtttctgtggaaactcaaggacataaagacaaaagtttgagtctttgttctataattatgttggattgaaaatttggtgccttttgttctttcttgcatgttcttggaattacaatgaaatttcctttcattttgttattgttgttgttgttgttgaagggtttggga

SEQ ID NO: 71989 - DNA, 589 bp, Prunus persica
  Intron number 4 from transcript ppa009826m (locus ppa00982 6m.g) derived from phytozome v7.0 (chr-ID scaffold_4; pos 5906670 to 5907258)
gaatatgtaagtaatttctccatggaagacagttcttatattagtctagaagcacatgcatacacatatatgtttatatgtctgttcaaaccttcttgacatctggtcagaagcataatttaccagtgttataacaagtctcaacaaaaaccaaaaaagaaaaagaaaaggggaaaaagaacatttgcatataatttaagttcattcctagtcacatttgattagactcggcacttccctatgggcatcggtttcatttttggctatcttttatgaacggggagttgctgtgttttcagtttaaagtatgttctgttttatttttgtagtggttggcagatgtgttgttagacttttatggttgtactttttgggtggaccagtccaccagtcttgtactctttgtggtagtaaaatgaagtttcctttcaaaataaaaataaaaataatgaataaatactagccaacatatacacaaatctttgattagaaatgagtaacgtttgccatgttaaaagcggtataactcttaatatggtggtgttcaattacaggttttccatcactcactttctggaattgcagtagc

SEQ ID NO: 71990 - DNA, 830 bp, Prunus persica
  Intron number 2 from transcript ppa008215m (locus ppa00821 5m.g) derived from phytozome v7.0 (chr-ID scaffold_2; pos 24047172 to 24048001)
ttattggcgtggcaatctgtctcagtttgtaagaggtgattctcttgcctttttgatctatcttctttctgtttgtttatgtgtggttgccaagaaaatgcatagaatgaaaaagaaagattgatctctttttcttagtacataaggatactgagtcttcactcaattgggcttaagaggcttacacaaaagaatatctgctatcatggtgtttcaaaacaatcaaattcataactgtttttttgttttggtaagtgaataatatataaccaaaaaagaggcaaattcagaacttttggatatgggctgtgaacaaaattaaatgatcagagagaaaccagggcttcaaaaaaattcttttctttttcacctgggtttggattgctcattcatttcaaattagcaaactttgtgttgtggaacaggaagttaacttctagcaggtcttttatcacttccacttataaaattctgtattgttctaatttccaatttccctgttctgcttttgactcatctgtttttgtctgcataaaattgatctctttttctgcacgttatacaacactatttggattctttccttcataaattatatctgtcacctgtcagcacctaacattgtcagtttctcctcccatgttcccttgagataaggatgactatgccttagcaaaattaaacatctgtgcttttcattaccaaatttagagctcttctctgattaaaattctttatgtatgtatatttttagctcccaacttcccataacttagaattgatagataaactttgcttccaatgacagaaagcaatcctgactctcacaa

SEQ ID NO: 71991 - DNA, 413 bp, Prunus persica
  Intron number 1 from transcript ppa010636m (locus ppa01063 6m.g) derived from phytozome v7.0 (chr-ID scaffold_4; pos 27920303 to 27920715 reverse strand)
ccccgccatattttcttcactttgaatttcttgaggttcgtatctctatcctcctgttattactttaagtctttgtacccgtttaaatgtttgtggctttcaagtttgcttttgttatttgtttgatttaagttaattgatgaactggttttcttgtagaaattggatgtgggttttagttgttctgttcatgagtattattgtttgctggtcgaatacaatcttgtatctgctacaggaagatctgatctgattgttgcttcttgacatttgtttatggtgtttcttttcaaatgtttgtgtattgttaggcttcattatctatctgactcgatcccttgaagcaaaattaataggtgttgctttccataattgttactttgattttgaatttgtgattttttgagcagtta

SEQ ID NO: 71992 - DNA, 801 bp, Prunus persica
  Intron number 3 from transcript ppa012901m (locus ppa01290 1m.g) derived from phytozome v7.0 (chr-ID scaffold_7; pos 19866011 to 19866811)
agtttcctcgtgtggccaaggctgttatcaatcaggtacctccgaatttcatatcctgagctctagttttagctattgctatttgagttgaattattaatatgcttaatatcaatgatgcttgaatgcaatagaggttaattacaatgtcattgcaatcttgttatctgtgtagcccaagttgttaacatgttaatcagccgcctggttactttttagcagtgatgagcagctaacacgtaagaagatcctactttgtgtaggattttcaatgaaatacaattgttacgcttggcttctgagcactcttttatacctgaaaattgacatggtatttgaagacccaaatttagtgagaacaaaagaaaaatgaaaatggcctttcaatgttttctgatttgcgttcaactgtggtgtcattataatgaagttggttttgtggaacatttgatatgatcatactatgtttggagcctctcattccagtaataacttatccagtttaatgagtgtctataattcctagccgggtttaacataaactctctctctctcttcacaaatcatgcgatcataacagaattaatggtttgaaattgttctgtatgatctggaatagtatgtttcttttaagccctcttgtgacaaacatatggatttttgtggttcgccttttttctcattgtagagcacaaagttgcattttgtttcctacagttttgatatctgcactagctaaattgttttttaattgtaaattgttccaggtggcggataatttctatagacccgatttgaagaa

SEQ ID NO: 71993 - DNA, 615 bp, Prunus persica
  Intron number 3 from transcript ppa015946m (locus ppa01594 6m.g) derived from phytozome v7.0 (chr-ID scaffold_3; pos 3022239 to 3022853)
gtccttggcacttgattcgcggtatgacacgggtcaaatagcaaattcaaagcaattgtataggtcagtaatttctgtgaatattataacacacacatacagaacttcacttgagaaatccctcaaataagcttatttgaaagacacccttgtgggtttttcatctattctctccacccatggtttgtttgagtttgtgaaattttgatttattctctctaagtttaatgagtcttccaatttataccaaaggaaaatagttgtaaatatatatttttttatatatgtaatttatatgatgttttggtcctcttggttattttggcatgtattgtgagttcaaatctgccacggtgtgtcagtctggtgccaatatggatgtcgacatgtagatgcatgtgctccatatgtggatggtgtcatgtttttgatatatgaatgttgatatattctatatgttgtgcaatctgttgtccagtattgcgatccagatacactggaacgggatccctcttaaaggggattatgtttatgtatatgtataaattagaatttccattctttttcattaaccatgaaatatatcatctgtgtttaggtatccagacgatatat

SEQ ID NO: 71994 - DNA, 1025 bp, Prunus persica
  Intron number 3 from transcript ppa012780m (locus ppa01278 0m.g) derived from phytozome v7.0 (chr-ID scaffold_2; pos 15363401 to 15364425 reverse strand)
gcgaccgtgtgacagctagtggcaaggtatgctatctcaacatccgtaattaatttgacatgtgttcccttttgacacttattggatcattcctagtattaatttccatttagtttctgaacatcatgttgttcttgtagttatatctagaacatttgtctttttgctcttgtactgaaacttgctattctgaaaagaatacatataactgaagtggatatttttaattggtaaataaattatcggctgtggcgctggcttttgggttcaaataagttttcttcttgagagaaaaaaaattactagagtcgggtgtatgtggatccatattgagatatacggtggacacatccaggaaatgttccaaaaactagtcaatggcccacttagatgtttatagaaagcaacatatgtgtactgtatatctaaacatgcatgatattatggtcatcgttaacatttatgtatttttttcattgcatttattattatttgaacctcattagtagcaattattaactaacattttatggttgtcagactaagaaactttgatgcaataggttgtataagaaaattcttttcgatatccaaacacctctgttggtaccattgccttctcatcttaggtgctgctattgcttaggaaacctaggtatgaaaagaatccgaccctgatggcgagcatgagtattgggtggtggcttttaagtttgtgaacaatgctatgtttcatttgaaacgtgtcatggtttcaaaacacagcttttacatatgtgttggtcctgtcaaaaccctgtttgtgtaatttccaagcacacaatgtctaatcataattatgctaaacctcagaggtgtttcaattatgaactcttattgttttcttttaatagtatcttcaaggtgtgcctgctacgattattgtttttttttttctttttttagttgcatagctcaaaacttttatgcttatatttttatggtgtacagataaagacagagagtggtgcaaaagcaaaacttga

SEQ ID NO: 71995 - DNA, 541 bp, Prunus persica
  Intron number 1 from transcript ppa009911m (locus ppa00991 1m.g) derived from phytozome v7.0 (chr-ID scaffold_8; pos 16126410 to 16126950 reverse strand)
aatctacaagctcacgaaggagaagacttgtgctggtaaagtattgacctttttagggtttttttgtttgttttccctttgttggttttgtttggctttcccaacaatttttaggaatgctggaaagtgttgattcgattttggtacaaacttttctattgcggcgaatgggggttcttcaatattaggatgactggaatttcacatgcaaatcctttattgggttttgtttgtttgatgagaaattgttatgaacggtggaaaaatctgggatttattggcttgacaatataattgttagaacagaaattcataagcttatccttcaaaaaaaagaagattaataaggctaaagttttagttttatttttaatttttacatgttttatctccggtatgtttttcttttctgttttaaattttcctccctttattttcaccaacctgttgaatatgttctatgctatgaaactcatgttttgattgggaaatactggaattgtttgcagggttatcactcaaatcccaggagttaacagct

SEQ ID NO: 71996 - DNA, 572 bp, Prunus persica
  Intron number 3 from transcript ppa005699m (locus ppa00569 9m.g) derived from phytozome v7.0 (chr-ID scaffold_1; pos 37150106 to 37150677)
ccaaaatccatcagtgaacttctccagcctggttagtatttagaatctgatacaagctcatatattttgtgtttctgtaagtgatttgatcctttggcatagttaatttgtattgtaaaagaggaagggagaggagtggcttaaaaggaatacttcattaaaatcggattctctagcttccatagaacattaattttgagttacatgtactcttctttttttaaattgttacatatatatatatatatatgtgtcaataaaaggcacaattaaaaaagtcatgccaaattgaccaggatagaatcgtgtaaactgttattggcacttaaaaaaagtcatttagcacttcccaccgtgcaatttttccctcatgattttacaggggaggggtgcataacgatttttgtgggtgctaatgatagctccctgtaaaaccttttatatatgatctgaaaattttaagaaacatgtctcagttctaactaaatttcactcatcttctcacttgttctccatttatgtggttaaattttgtagactttgctgaagaaaagggcaccactgtcggcgtt

SEQ ID NO: 71997 - DNA, 533 bp, Prunus persica
  Intron number 1 from transcript ppa004339m (locus ppa00433 9m.g) derived from phytozome v7.0 (chr-ID scaffold_7; pos 20702433 to 20702965)
aagctgtggccaagttggaggaggtctgttcctcggtgagtgttgtttactggtttttatttttcattcttcgatttgattaacgtttgtttgtgctcaatcattgtgatttggttagtttgagtacgtgtttgttttcttttgttgctacagtgaataacttaccagtttggttgctgagaaaatccaaggaaagatagttgattgagattttgaatcttgaagctttcagtgattggggtccgagacaaatggaaatgatttttctaaatggttcttctgttaattgggttttggttattcatttcttataaacggcataaaaataaataaaatgaagttaagcctcaagattttgtcactaaaaatttagagaaaacaagaacacaaaacaaaacaatcagctacctaatgataggactcttatggtttatcttgttcttagggcctttgagatgcttctgagtatctaaccctgcttctctctaaaacaatcaggctgccgtacaaattggaagatatattgtgaccat

SEQ ID NO: 71998 - DNA, 517 bp, Prunus persica
  Intron number 2 from transcript ppa009453m (locus ppa00945 3m.g) derived from phytozome v7.0 (chr-ID scaffold_6; pos 28572775 to 28573291)
ctagtggatccaaagatctcggccgtcgtagcaaggtttgacgacaatcatctctctttctcattttacaatctgtttggttgctgagaaaatttagcagaaatgaagacaaagaaacgttttctaacaaccactaatctgatgcatcatcattttcttatctgattgtatgcaagttacaatgtgatgcttcatcaactggttagagtgtgagttggtagcttgtatatcattcaattgtatttttcatcgaattaggtagtattgtgtaaaataagtttattatttgatttgatttatagtttgacgattcagaaatttggaaacagcaattttgaagtggagctttatttgtaggtctgaaattcagtcgcaattaaattgattttggtgctaatgcacaaaaaaagtatttggtttaaatggaagatttagtatcttgttctttgattttacttgtcgatatttatatatattaatttgtttgtacagattaatttgggctttcttgaagtta

SEQ ID NO: 71999 - DNA, 597 bp, Prunus persica
  Intron number 2 from transcript ppa004315m (locus ppa00431 5m.g) derived from phytozome v7.0 (chr-ID scaffold_2; pos 11470717 to 11471313 reverse strand)
attcaacagatccaaccattaaggttcttccttcaaactcatttatttaatttaatgatttttttttccttctgcatattctttaaccaaagttgatagaccgatatgtcatattgctctagtaaagtgtaaatttgtactagacatttaaataaacatgatcaatcattgatattagtaattccatcacctaatatgttagactgtttgacaagagaatattttatattaatttatatgttgtttaaggattttttagtgtctgtggttcaaatcttataaaagtgtttcaatgattagtctatcaaagagaataaaaaaaagtcatcttggtcaacctcatagataaattttaaccaatccaaatccattcactaatgtttaccatgtttaccaatccaaacgtgctctaatccataaagcaacccaaccaaagtcaaccatgcgactttgaccttttgggacaagagtccaaagcagcaatttccgcatcgaaacacataaagaccaaaactttcccaattcactcaacaaacctttcaatttctgatgtgggtttttggccttaaaaaaattacaggatttggtggagctaga

SEQ ID NO: 72000 - DNA, 985 bp, Prunus persica
  Intron number 1 from transcript ppa012107m (locus ppa01210 7m.g) derived from phytozome v7.0 (chr-ID scaffold_1; pos 41821053 to 41822037)
aggcgcaaggcgacaaaacccaaaccctagctgaggtaacattccgatcatcttctttatgtatcgaaatgttacaatttcgttgatggcagtggtcaccgatttagttcgatctagaatctaggtgctgtcacaaatacttcatttaaagtgaaaaatgttttgaaattctgcatccaattatggatctagtttctggtttaataagctctcagtgaattctatctattgaatatactattcatttgtttttaatttctgcgttcttgttcgagtttgtcattttaggatgattagttgtgccgaaaaagttttttttttaatatgtatttttaaaaaataaagtatcatttcttgttgatttaatttaaagttatgcagaattacttgaaaaattgatcaaaggtcgcgggctgcgttgttggcacatagttgctgtttcgaactcgactggatgttcttatggacaaatgttatgctttgattacctgtctatgatatgcatttcaatttattttgaatctgttacgttgtaaaatcctttaacaagtcaattgttttagtaggatattttttaggccagtcaatcaattaggcaagacacactggactattaaataagtaaacagtttatgtgggtatcctagatggaaaaacatcaccttgaacgacatgctcctaactcagtgtgatgtggctgagagtgctcaccccccttcccctttcccagacacgccacctaccgagttgtattaagcttaaaaattaatccacaacctagttgttaatgccaaaaattattgcatcctgctggttgctgtgccctgtggctgttttctggagaatgatagaacgattccactcactacatgcttcattatatgtgctccttagttagtcctttcttttaatgacataagataataatggttaaagtgttttcccgcatacttttacatacagcaatactcattggagaaaccag

SEQ ID NO: 72001 - DNA, 880 bp, Prunus persica
  Intron number 1 from transcript ppa003325m (locus ppa00332 5m.g) derived from phytozome v7.0 (chr-ID scaffold_6; pos 10039337 to 10040216)
ttcgtcaacaaagttggccccttgaacaaccccaggtacatcttcctcactgccaactaaattgcagtttgtttatttgttgcttgtctgtaacttttgtgagaggaaaacgatagctccttttaggtcctgcttggtatggttttccagaaactctatatatatatttcctagttttcagaaacaatgaaaataaggatggagtggcatacccatttggaagggtgcttaaagaatttcatttcagcaaactgtttatgggtcacttagaatttgatggttctgtgtggttttttaaagactgaggcataattgtgaaatttgataactttggaatggggtttgattgacagttttaaaattagagcgatagaaggaggggtagcagtaagtagaactacgatgaggtttaggaaaggcaggagataaattttgtagtgtatgagctgtttgtgaatgtttgatgaaattagtagttctatgatccgtctttgaattctcacttcttatgcctgtttccttatgaataaaatttcaagaagagtgattttaaaatgattcaggggcgtcaattgcaaataatcttgtttgaggttttgcattggtcctagtctttgtagtggccatcttttccactttctatgcaattttactgttttttcgcaagtaaaatttgcgtctttcttttttaatttttttatttaaagtttgttatcatgaccccaggattatgtacgtatggtttcagatctagataatagtgggcacattgcatattaggaattaaagatgaataatttctcttcctgccttttttttttttttccacatttaatttgtttctcctttttattctcttgcagtgagacctatcaatact

SEQ ID NO: 72002 - DNA, 479 bp, Prunus persica
  Intron number 2 from transcript ppa003399m (locus ppa00339 9m.g) derived from phytozome v7.0 (chr-ID scaffold_1; pos 13456967 to 13457445)
tcgagggacacctttcaagttcaatctcggacaaggtgattcgtttacaccttctcattgttttcaattatttgatgttaccaactgtcaatgttgttaagtttgtagattgaatacttgaaatctgtacgtctgaaaccaaatttgtgcttaaaagaatgaaaagaaccttcagttcaaaaactagaaactaccacattcagcaaaattatggagtttttatcaaaaccaacaacaacttacctttattttctttttctaagtatggaactttttaagaatagccaagtctttgtcattatagaaatgtcctgtataactgctattttttattcataaagaaaaaagacatagaagctgctatttttgaaatatggttttccgtgtagttagagcgttttcatgggttatgattgagtgtgtttggtttctttgagttatatgaatgtttgtataattgcaggacaagtgatcaaggg

SEQ ID NO: 72003 - DNA, 479 bp, Prunus persica
  Intron number 3 from transcript ppa017428m (locus ppa01742 8m.g) derived from phytozome v7.0 (chr-ID scaffold_6; pos 2784459 to 2784937)
gtggaagtaagtaactttcatagccttcttcataactgtcacatccgatcctatacggtatatttaagggcatttttaagaattaatgttgtaatgttttgaacttaggtaattaaattgtgaacaatatcgttacgatcttagatttagtaatgaacctgtgggtattttacacaacagttttgtgggctggttttatttagttaaataaatagaatgagatacaaaagaatctttgaaatattttttatttatttcttcattctatgcatatatgttctccacttttcttcccatccattattcctggtctcacttttctctaatgtgtttttcttttctctttttgtaattgaaaacaaaaacaaagaaggaaaaaaaagaaaaaaaagaaagaaagttattaaactatttggtgcatgcttttttatcttttattttttaaaatttgtttatctatttggtgcagtgcttgctgc

SEQ ID NO: 72004 - DNA, 525 bp, Prunus persica
  Intron number 1 from transcript ppa009641m (locus ppa00965 5m.g) derived from phytozome v7.0 (chr-ID scaffold_5; pos 15950616 to 15951140)
tgtctttctcagcccacctctcttaccttcacaaggtattgttttcttgatttggtgtacgtttttttttcttcctttgaattccaattgggtttgattgtattttggattttcaagtctaggatatcatatttgcgtgttcggatgaaacccagttgtgaaaagtaatacaccgttggaaatgtttaaattttctgaaaaactgtcacagagttttattggcgtgagtccaaatttatactggaaatcatttcattctgatgatgactgttggcatagatgaagataacttttttggagctgcacccatatgtgctttctttcaaagcgccattaagaaaatagtgattctttcttgctttatgagaagggtgaatttcaagtaaatgtattcatttgattttgtttataaagagcagagttctgtgtgctgtgtgcaaatggatattatggtcatcaagtttgatatgttggtatttgactttgtgcctgactgcaatcgtgctcgtttgatttcaggaagaa

SEQ ID NO: 72005 - DNA, 1008 bp, Prunus persica
  Intron number 1 from transcript ppa005505m (locus ppa00550 5m.g) derived from phytozome v7.0 (chr-ID scaffold_1; pos 18932511 to 18933518)
ttcaagggtaccaatccctgttcccaacagtttctcttttttattttcattttaaatttatagtttgttttctcctaatttatgattttcctcagatttgaaaacccattgagcaaaagcttctatcttatacataactattagactttcataattcgactgtttatctcacactcgtaaaatatagcttatttctctccaattctacaaggtgattgagaaaatgactacgggttttggtgatttcgatttattatgtaaatcagtagaaaaaattctgtgatttgtgagattactgtgcttaaattgaattattcattaatactctgttctgtttggttgatgagaaaatggggacaacagatgcaatcagactatattaatttaattggtaattcgcagtttgatcctgcttattgtgcttagttttcttgtttacccattgtataggcgtaaccttaaattgatgtcatgtagctgaaaattggtgacagtaaattcgattatttctgggtttattttcctgactaagaagtacgtacttgggtgtctcagatttactcatttgtgccatttattatatttagttttagaactatggttcagttcttcagtaatttttgcatttattttgtcccagtcctgcactttccatgagctctggatttagattttaggtacatttggtataatgttctgtctgatatctgcagtatcagtggttatagaagttcgcatgaatccttaatgtgtgtcaaaatttctcataaaacttttggttattattagtttgtgtcacaaagtgaagcaacccagagctcttttgatagcatatcaggaagtcttgtggttctgttgtgtgcttcagttactaaatgtccttctggacaaaacaaatgtgatgtattgtcctaaaatttgctaaatatctaattttttatgtctgtcttggtttatttgtcatgctttctaggttgctcaaagggcgtagtattcctggtaaagtgt

SEQ ID NO: 72006 - DNA, 689 bp, Prunus persica
  Intron number 2 from transcript ppa018675m (locus ppa01867 5m.g) derived from phytozome v7.0 (chr-ID scaffold_8; pos 896203 to 896891)
aagtttgaaggccctgctaaaccagctggtttcaggtacaagaaaatagtgtttttgaagaaaaggaaaaaatcgtgtgtgcacgacccatgcatcaacctactcacctaaccaaacaaaaatcctaaattttatttttaatttataaaaagtgttttttgtttcttctttgatgaataagtacatgttttaaccacttaagctataattttaataaaaaatgctatttttaacaaagaaaaaagagaacttattttcgttaaaaaaattaacaaaaggatttggattgtatatttgtatcttttgaagttatattgtgtttatattttagtttaaagataatcatggtttggacttaactgtaaaatatacatgagattggttcggtttctaaaaactaaaatcgcgattgcaccaaaccattataattcgatttttgtttgactttttctgtgataaaaaccaaatcaaaactgtcattacgattcggataagtcagtttagtcatttcagccagattggtgcccacccctaagcacaaggatagatctacggatcctaataattggtctaattcgactttcttttaccccctactttgtctttattaaatggcctaagattaagcttaatttatgtctatgttacttacagggaggccttggaagattattaccaaaggaatcgag

SEQ ID NO: 72007 - DNA, 563 bp, Prunus persica
  Intron number 2 from transcript ppa005710m (locus ppa00571 0m.g) derived from phytozome v7.0 (chr-ID scaffold_6; pos 26841812 to 26842374 reverse strand)
acaagatcaacaagcgagttgctcaactaaggattgtcagtatttcatctctctcttaatttttgatttattttttttcttcatttcctaaattttctttaattattggatagatttctgaaaattgttctcaaatcactaagttaaaaaaaaatttcagaatattgattttcgaatggatgaggaaatggcttcacgagtttgcatcgaattgcagtggtgatttggatgcttacttgagtgtttgtattaatatgtgcacgactgcacttgtaggcatgtgaatgcaatgcagactcctttgcctactcacatatgacacttgagtgtggaaacttaattaaaattgtgcttcccaatcctagaaaggtcaatagtaatttgaattagatttgattccctcttgctctggaaaataaaaacagattcttttagtgccatcaaatgcagcttgattttgttttctttaagttggtatgtttctatattgagttcttggtttttgttatttatggattatgcaactgaattttataattttctgggataaaaggctggcgagg

SEQ ID NO: 72008 - DNA, 949 bp, Prunus persica
  Intron number 1 from transcript ppa004531m (locus ppa00453 1m.g) derived from phytozome v7.0 (chr-ID scaffold_4; pos 2157988 to 2158936)
ttctactctttttctatttccaaaatccctcaaaggtctgattttttatgtttatgaagcttaattgaattttattctctcaattttcttgtgtttattttgttggttagtccttgtttttatacttgttcatagatgctttctcgaaaatggagtgcaaagaaagcaaaatgatctttgagctctatatggttgttgtgttattgattctgatgacatgaaaatctcaaataatttggttttttctttaatattgaaaaattattctgaattcggatttgaatttgtctttttggcccattttctcgtcaaccaaacagctttttgtgaagaaaatcattgcaatatactgttttgattctcaaggtgttcatttgcctgcctaatttctgtttctttgtatggtttaccttcttttttaatagtatcactctgttagtggacaacagggcaagtggatttgagatattaactaattgatcaatggatgatgagttcataatatgtgaaatcatggatgagagagaagttatgcggtcctacactacattataaccaatttgatgttccattaagaaattttaatgggattactttatccacgacgaaatgaatatacactaaattttaatgggattactttagtctttgaattctatgatccatgaacttttgctaaaagcatattctgattttgaatgatactgaaagttgtaccaaaacaatatttccactttgcatgaacatatataccaatgtattttgtatatgcatggtgaagaacccatcaagaaagaagttgtagttttgttggtctgttcatgaattctactgagtatttcacttcctcagttttggctctgcattgcaatttgagtgtcctaatggagtttattttactttttattttacagcaatatcagaaaaactgcagcctgcttccttacca

SEQ ID NO: 72009 - DNA, 934 bp, Prunus persica
  Intron number 1 from transcript ppa003692m (locus ppa00369 2m.g) derived from phytozome v7.0 (chr-ID scaffold_5; pos 11613392 to 11614325 reverse strand)
aaagagaaggagggccgatattaagagagacagtggtaattttttttttttatagttatttattcatttaattttgaaatttttcggttggtggttggtggtctggatggaattgggttttgtttgcttgctgtgaaaacgagggaaatcgaaggaaagtggaggtctttaatggtttctttatggatctttgagtggaactgatggggagtgtgtgtgccttaatagtgctcaagtgggtgcgtgtgcatttggcttaattttggtcgatagggtttagggtttgaaaatgtgaagtgtttgttagtttatgcacaaccccataaagcatagtttcttgaatttaggcaaaaagctacattttttttgtgcatgttatgttggcttgttgttttgtttgtcgtgtaagatagtctactacagtgagagaaaactacatttatggcactttgccgtgtccatgattgttgataagtttttaaatttcagttaacgaggttaatttaattaagaggatgctatttttgaagaaatgggtaataatataaatactcagcaccagttattgaatttgcggtatctaatagcatgtgtgttttgtaataccttattggttaacatataataacaatatgatggtgtaatggcctttgtatgttgtctctgtttaacaagaattcttcctatttctagtttttattctttcctctcttttttttcctgccacatttctttactatcttgagtttgaactgtttaggcatttcgtgcatcagcacacgtattttacttactctagtttttacgttactagaaaagaaaatgtgaacttttgcttttagaatccatgtgaatatccatattactgatttggattataattgctcttttgctcttagctgaggacattcttgcgcacagtgaggagcaggtc

SEQ ID NO: 72010 - DNA, 618 bp, Prunus persica
  Intron number 1 from transcript ppa002194m (locus ppa00219 4m.g) derived from phytozome v7.0 (chr-ID scaffold_3; pos 16030077 to 16030694 reverse strand)
gcttctcagaaagacagagttcgatcataatctgagtaagtcatctgaattctcaatctgggtttcttcaattatggatttttctttcataattttattattgaggcttaattggtttcaaaaatctctgtactattcaatttagttcgttcatttctatgcctatggatgatgtcgatggtttgaaaactgtttgcccctttattttttctcagtttgagctgattttcattgaaatttcaggtgaattcttgttttccactttatggggtgctttgattaccgctaaagtggaaaactttatgtgggttttctctgtcatttcaaaattttgatggtggaatgaagaaatgatagttttcattgggctatttaaaagactgatgattttcacttagctttcttcattattgcatttcagtaaataaagtttaagaatttaagtatgcatcttgtataagtaattttggtgtgttggtaaatctgcattgcatacatgcttatatatgagaagttgacattttctctttggctctatagctattattattaaagacaataaacatgctgcatgcacataatcaaaaacttttctcacaccgtgttttgcaggacaac

SEQ ID NO: 72011 - DNA, 753 bp, Prunus persica
  Intron number 1 from transcript ppa007418m (locus ppa00741 8m.g) derived from phytozome v7.0 (chr-ID scaffold_7; pos 17084114 to 17084866)
ttgctcgccaattattgaggttaggccttttctctcttttggttttttgttcttcttcttaaattttgtgtaaagtcgtagaattgagctgcgaattcatgaattgggtattaggaagtgaatttgggagcttcttgttgggaaaaaccttgctttcttagcttagctttgttcaattttgagtttgaaggcatgaaacagatagagtgtaaaaggtagagagtttttggtgtgaatgggatttgagaattgctgggtcgacgaggaaaagaacaaaagtaaggtttaggagtggacagagtggggttttaagaagaaaaagagaaaagcctaaaggggaagtgaaatttttttataaatataaaaaagtaggaaaaaggcaacaagaataactcaaacagggaagagggtgaccggaaaagatccaagcccagaagtggtaagggcaagtaaggattgattccattctaaagcctccctcttcttcacacacgcaaatacaccaagacatattgtcttctagttttgtgttattttcatccagtgcatgtcatgcacttcaacttttgtcacttgtttatgttccttgtctaaattgttgttccaaccagcttcaccagtaagttaatgtggtaattcatgttcttattatatttcattgcctgaagttacttggaagcatttgtggttttaagttatactgggtattgattcatttagaccattttatggtgatttgcagaaaaaaaaaat

SEQ ID NO: 72012 - DNA, 500 bp, Prunus persica
  Intron number 2 from transcript ppa021305m (locus ppa02130 5m.g) derived from phytozome v7.0 (chr-ID scaffold_2; pos 13688248 to 13688747)
acaatatagggtgagctccagtatctcatcaagtgcgtgaacctcgctcttatcatttttttcttgttgttttttaacttactttatgcacatacactgcttcattatatcaaatcaaatcatctaagtcttgttgatgtcagacagagaatagatagggaatagaagggagtggggagaagattaaggccttttatagacattcctaactcgataaaaaaaaccctaaatagtgataagcaaataaatcctcaacccctatgtaatatataatcccaatcttaaaatatgatacgacatccaaagatgggagaaattattatatggtactagaaaacggccatactctcgtactacattataaaaactccaaagttggtacataaactctaataaagttttttttcttccatataatcgggatctcttgttaattaattctgtgtatttattgctattggatcgttatacaggcgtggttggccagagactgacaatac

SEQ ID NO: 72013 - DNA, 656 bp, Prunus persica
  Intron number 1 from transcript ppa1027123m (locus ppa1027 123m.g) derived from phytozome v7.0 (chr-ID scaffold_7; po s 20195540 to 20196195 reverse strand)
tcttcctggctcaaagctgctgaaggtttggatcttctgttctttctcttaatttgctggtttttttaatatttaatttggttttcatttagatttggaatatgtttagggtttgatcttatgctgattgaaattattcgaggtgtttagtggatgatataatgcgggacgatgtttggggttgttaagcataaagtagcaataatggggttaggtttagatttgcatgtctgataattgcgatgccgttggcattgggtatttgtttcttgaatagcattttggagttaattgttgaatatcgaattcagtttggacacatttgcatgtctgataaacccaaaaactgggagttgccacagttcatgaattgtgtgaaatgacatgaaagtgagctagagaaatttggtcagctcagtctaggtccctggttcagttcaagactagtttcttgagttttcatcaaaaaagaaaagagcgcctgcaccatccatatgaacaatacgatcatttattctctatatcatccttgtacaagccccacatcaaaatccttataataatgtgtcttttcttctgcccttgatgtgtaaaattttatcaccttttctctggcctcagatctgtttgaagttgtcgatcggagggcaaagctg

SEQ ID NO: 72014 - DNA, 366 bp, Prunus persica
  Intron number 1 from transcript ppa003727m (locus ppa00372 7m.g) derived from phytozome v7.0 (chr-ID scaffold_6; pos 14580447 to 14580812 reverse strand)
ctctcgctactggtggcgccgatttcgacatcaaggtactcacttctactctctctctctgcattttcacgaatctaatgggtgggccaattaatattaaagcttcttcttttttatttccgtgcaatttcgcctactctcagctcaaattgttgattcaatggagcatcagagccttcctttttgtttttcggataaagggtttttcgaaattttctttttgttattaggttttatttagctcattcgtaagtgttcagttgatatacttcttgatgtcattttgttagttgttagactaactgtgttcattttatttaatttttacaagctttggttaataaattcgagcgaaacacagaagaa

SEQ ID NO: 72015 - DNA, 684 bp, Prunus persica
  Intron number 1 from transcript ppa010495m (locus ppa01049 5m.g) derived from phytozome v7.0 (chr-ID scaffold_7; pos 18057647 to 18058330 reverse strand)
tcaacaacatcgttggctctgtcgtcaacaacatcgttggcaatacatttaatgttcacggttccaaacaggtaggaatttttcaatctgagaatgaggtccccaacctcatgataacagaacgtttttggggggttttttgggtcttcggtacactttcgagtttggtcatactctttagcgtacttctcttttattggtagcttctaatttaggagctggcgcagcttctgatccagggggtttagggcaagaatttttcctttattatattagtatccgattgctttgacttttgacttcttatatattaataggataatattaatgttgattttcatattcttatttaatattggttttcatgtttcccaaaaccaatataagagtccttcaacttcaatatacaactttgaacttcgtgtgcaaaaaatatttctcaccgcatttatcttttcatttttttgcaagcttcagccatcaaccactcaattctctctctctctcgatttctcagattttatttttcctatattttatatattattattatttttagttattatcacaaacttttgattatatagtttgattcttttttataattttttgttaaagactattttacctcttattgttttggcacaaggcccctaaaatctcgaagttgctgttaggtcgggg

SEQ ID NO: 72016 - DNA, 278 bp, Prunus persica
  Intron number 1 from transcript ppa022367m (locus ppa02236 7m.g) derived from phytozome v7.0 (chr-ID scaffold_1; pos 44340510 to 44340787 reverse strand)
ctgacagtgggtaattactaatttcttgttccttggattatcatctccttaaaatgttctgtcctttttgtttttgtttttgtttttccaatgttttaactatgcattatttctttttgactttcaactggtagttggtgtttgtttgtttggtttggttttaactatccattctttcttctttgatgttagaaaataatttgcttattctaaattattaagttagggattcaatttaaccttttagttttttctgcttctgtgtttaattgccaggc

SEQ ID NO: 72017 - DNA, 785 bp, Prunus persica
  Intron number 2 from transcript ppa010747m (locus ppa01074 7m.g) derived from phytozome v7.0 (chr-ID scaffold_1; pos 5219256 to 5220040 reverse strand)
tctacttgtgccgttccggatcggtatctctttccctctagtcctcttttttcttttcttttttaaatttattgtttttatttaatgctgttgttcttgtttatgatttcggttgtttgcatacatgtgtaaagttgtttttgttttctttcttgctaaagtattgtattgtatacttccgttttagtatactaacaaaatagctgaactacttcaattaatcatatacagaaagatgttaacttttcaattagctggatagttgaaaaaattctcacaacaaaaattctttgagtaagaaaaatcagcaagataaagtcatctcaatgtcctcagattttgggcatagaaaaggtcaggcttggtgtctggttagtattttaggctttagcttgccatagaaacaagaacaactcaatttgactcacccttaatccctatttgggtttggccacatggatccttatcagaatctaattccgattgactgcataaattttcttttgctgcttaatatatctaaagctaatgtcctcccatgaattttggcagatttatccttcttaaccacttttgcttatttcattcttaatctcccttttctcttgctttgttattttccttttggatcataattcctcaggagcattgtttaacagataagtaactttaaggattttgtcttttgggtgtgttggttgaagattttgtagttgctctacttctgttgttaatctatttaattttctattctcaggctgcagattctcaagttctatcagatt

SEQ ID NO: 72018 - DNA, 689 bp, Prunus persica
  Intron number 2 from transcript ppa022246m (locus ppa02224 6m.g) derived from phytozome v7.0 (chr-ID scaffold_4; pos 9744850 to 9745538)
gtagcaaaagtgacttcgatctcatcgctctacccgtacatacttactctctctctctctctctctctctctctctctctctctctctatatatatatatatatatcattgtgtttgtattagaactttgaattttgcagcttgtttggttgctgacaaaagtagacatgaaaatgaaaatttttgctaacattacttattacttatccacaaaacaagaaaacacaagaatattgtggaacaaacttgggatttttttagtttgtagttcgcgattgagagcagatgaaagtgagttcgtagttcgctaacttgtatttagttttgttgagtgtaggcttttggttgctcatgcccaatgaccatagatatatatgcataagattacatgtgttgcttaatggcactattttattttccaagcaatgtcccagtgcacccaaactgccaattaaagggatgttttcgtgtaacttcgatgtcatccataacatatcagggttggaggaactcttattatcttcgtttgcttgtattattccttctctccagcttctcttattgtgctttattgcttgcttattgcaatgtgctgactcctctttagtttagctccaactgaatttgactttatctatttttttggtgctacagggaggtgttctaggtgctgccaatcttaagaataa

SEQ ID NO: 72019 - DNA, 486 bp, Prunus persica
  Intron number 1 from transcript ppa012436m (locus ppa01243 6m.g) derived from phytozome v7.0 (chr-ID scaffold_1; pos 38365876 to 38366361)
ctcctccccccacaccaccggcgcttcctcttctggtgcgtctccattttctttgtctttcatagaattagaaatgaaaaaatagtcaactttttgtgttcaagttcaacttttgctattgttctgatcctgattgggttaatcacgtattactttttgttcttgtctgtttggttaccgggaaaatgtaggagaatcgaggcaaaattagttattgttggatttcgaaaatcaaatgtagaattgggtcttaagattatgattaagttattaatcaaaatctaaaatttcttgccgccggtccccctgttggctctgtggtacaatcacaggtcaacgggtcctggttctactggcccgttaacagaaaatttagaatttctaatattgaaaccctaatcttcagtgcgatctgaagagttggaagttttatacataatgtgttgattatgttgtgatatcaagctttgaagaagaaggttgagg

SEQ ID NO: 72020 - DNA, 701 bp, Prunus persica
  Intron number 1 from transcript ppa006500m (locus ppa00650 0m.g) derived from phytozome v7.0 (chr-ID scaffold_1; pos 11236240 to 11236940)
tggtatgcactgaaattttttatttgaatgcatgctttgtataatatatatgtatatatgtgtgtgtatgtattggattctggttgcaaatattgtgtttgaaattgaggaaattagtgttggattggttagtgaatataatatggtctgtctttgatatgcaatgttgtaggtttgttgagttaattaagtatgcttacaggatttaaaggctttttatctgtttaaccattctaagttttgcgtgccacaatcttaaagcaccataaaatttgtttaaatgtaaagctagtaatcagattataaatcttctttgtatagtgtggtctgtaacattcttgatttccaaaatggatattttctcccaaattatgcctggcaaattgataactgcttcatggccaggacactgtttacacagcgtaaaatctactctcacgtgaagtagatgctagcacaatattcttgtgtcttggcaaagccttcagtagcatttctaagtgagatcaatgcaaaaaattcttgttgggacttgggggcctggctttcttggagcaaatatattgtatttaccttgtcattatggtctatacgagactcacttattgcctatcattttgtggattgaaaacctaactgaataggttcaacttttggatgttgcaggggttataaacgttttttcaagagaactcaattag

SEQ ID NO: 72021 - DNA, 763 bp, Prunus persica
  Intron number 1 from transcript ppa002540m (locus ppa00254 0m.g) derived from phytozome v7.0 (chr-ID scaffold_5; pos 11959494 to 11960256 reverse strand)
ttttccggtacttttttttatatcctaatttcctgcttgggttccgagaaagcacaagaaaacgaaagaaactaaatgaggactgtttttagctttggcaatctgttgtttgatgcaaattttttaagttcaggaaaaaaaaaagagtaaaataagtcaactgagctgttttgctttgtttttatcggactctgaattgcgagtatttagaatttggttttacgaaagaatttcgtttttactagactatttttatgggtgattgagcatgattacgatctttctactgggttttagagaatgtgtcaaattgtggatgaatttgtttttggggttgtgaagtttgtggctttgactcgcacaaaaaaataagcgtctgagacaattctattgcgtgatcaatgcgaaaagaaatgcaataagttcagtcttggccaacctccgagtgctgcagtaaaaattatcaaagtaaaaaaaattgtttttgtcatactaaaatgcaaaatgattgctaagttacacatcacatgcactgttttcaatccggcagcttaagtgaagaaatatggttctgggccatgcttgttaaagagctctgcttggctctgggtatgggttggctcaattttactaagacagcttaataaactctgacctatccagaaatttgaatacaaagttattttatgtatgaatttttattgtttgtaagttttcttacttattttgcagtttgtcagtggagaaaaatcctggaaaccca

SEQ ID NO: 72022 - DNA, 756 bp, Prunus persica
  Intron number 1 from transcript ppa022006m (locus ppa02200 6m.g) derived from phytozome v7.0 (chr-ID scaffold_1; pos 36721106 to 36721861 reverse strand)
aggttgccctcaagagaagctctctgtttgagcaggtttttataatttgcttctcccccctttttttttttttttttttttttttctgtgtttcagaactatttttaggccatttacatcttgaaactgcatgtcgtctgctctgcacggatacttttcatgttttcacaaaatgtgtttggctggctttgatatttgcatttccactcataggattttctatattctctttttttaatacaacggggtttctcacacacacactactaaaagtgtcattggaatttgacacttttctattgagttagacccgtcggtagaattttctatctttttaaagattaagaaatggaattaaaccagcggtggtgttgcagaaaacaatccgggtaggtattgctctgttttagtatacaggtagggttagaaatcggtcagtataaaccaaggcccaacttttttttaatacaacaccgaggcccaaatttgaatgtacaacactggccacacgttacccatttagcccatttcaatgttatgtttttgaaaaatattagaaatgaataaaattggcgtaataattaagctgatgtatttggtattaattattttgacaaaaaggatagatagcagggctcttcgattttagtagttctgaaattgtgcaactacttcatcttctcaatgtgtttggttcaatgttgcagcagttcctcgattcacagcaattcgtacagctggaggatttggaagacg

SEQ ID NO: 72023 - DNA, 551 bp, Prunus persica
  Intron number 2 from transcript ppa022885m (locus ppa02288 5m.g) derived from phytozome v7.0 (chr-ID scaffold_1; pos 7251940 to 7252490)
cccgacgccggcaaaatcaagattagttatactcagtaagcacatattaacactctctaatgaaaatttttgtccttagtaaagtttatcatgtatatgaaactatgagttcaaatttaattttcctttttttttatggcgtgcagggtttgaagctctctaagaataaagtcattaggactaagaaggaagaggccacttgtaatggaataatgaaagcaacacacactgtatgaaactataattatgtttcacatgtgatgagctgatgttataactatatgattatatgattaaataaagagggtccttaagttactatttttcagtttaaaacatctcatggttcatcaattgaatcaaattttgatccttggatagtaacttgcaagccatataaatagatacatctacctggaagctaccaacggaggccatataaagacgaaaaaaaacttacttgtaacaagaatagcactgttttattatctctggtcaataaccatgacacgtgtaaaagttatatcacgtgtcattgtgttattgactga

SEQ ID NO: 72024 - DNA, 563 bp, Prunus persica
  Intron number 2 from transcript ppa016735m (locus ppa01673 5m.g) derived from phytozome v7.0 (chr-ID scaffold_3; pos 15854965 to 15855527)
aaaaccaaggtacaagttcaaggggcaaatcactagtacacccttcttaatacaataccctataaaatgtcaaatttacccttatatttgacgggcatttggatggaattgtaaaaaagctaacagcaggggtgaaattggcgaataaatttaatacaagggctaaattggctgaaaaattaattcagggtggagatttcgacaagcataataattcaggggggattcgaaagtttacccttaaaaaaagttaaaaatttgccctgaacatttgttatctactatcatctacattttttatgcacgacatattaatgattctttcttctttgtagatgtggattgggacaaaacaatgtgcccataaccttgcaatatgaatcttctttggatatttgtttaaccaaatttactaaattagcctctttatttaattatttctcttcccaaatatttagtacattgtaaatgttgtttgtgaatgcgagcgtatatcttgacatcttagtaactttttgagtatgctatcgattttaggctataaatattgcttggaaagaagc

SEQ ID NO: 72025 - DNA, 461 bp, Prunus persica
  Intron number 1 from transcript ppa011205m (locus ppa01120 5m.g) derived from phytozome v7.0 (chr-ID scaffold_2; pos 617059 to 617519)
ttgggaggtgtgtgtcgggctcgtacaatgttgtgtaagaaatccactattgtttatgggtctctagtttggttctcgtaatgaaactctcatttttaatctcagaagaatggaagatgttcattcactgatttttagaacactaaagaaatgaggattatttaatgttttttttttttttattcccatgtttggtttgtgtagtattaagaataaaataatgttctgttttcccttcttctttttttccacttcaaattgtcacccttcttgggtaagtaaaaaatttatttggcgcatgatgcagattggaaatgcagtgattaacgatgaaactgatttaagaggaatgtacgactacttagcaagccacgccctcatttcggatcaaactgcaaacaaaatcaacaaatattgtgatttttcacccaatgccacaaagcagcctaaggagtgcactg

SEQ ID NO: 72026 - DNA, 644 bp, Prunus persica
  Intron number 1 from transcript ppa008624m (locus ppa00862 4m.g) derived from phytozome v7.0 (chr-ID scaffold_1; pos 29599863 to 29600506)
ctctctctctctctctctctctacgaaatttacacgtatgtctctctctcttttagttttgtaaatttttatgcacaatgtatgctttcgttaagaattgttcattttgtttttttactctgcatgtatggaattcgatgtttatgtatgtgcattttattgtagtttattttttctttcgttttctgcgttttcccctaatgttgggtttaagcctacgtttaaattaaggaaaataaaagaaattggaaaaactcaaatcgaccaagccgaaatgttgagttacattatatttgttgttttcttttccctcttcttcacctctgcataaattttattgttttattcatttctatgtcgtatcaaaatattcttgtgcggatgaacctgaggccatgagattgagttttcccttgatttgaattgccaagtgagattaagagtacatgtttctgtgagtgggcacagttacaggatatctacataaatttgtacacttttctaatttgttactgtaatattgccgactccccctttccctctttttgttgttgttagtttgagtgtttttatgctccaatttgcagcatcatttccatcaacttacagtggttttattctttccttttccagttagtcaaaaa

SEQ ID NO: 72027 - DNA, 952 bp, Prunus persica
  Intron number 3 from transcript ppa006555m (locus ppa00655 5m.g) derived from phytozome v7.0 (chr-ID scaffold_1; pos 2844905 to 2845856)
ggcacagattacattgatttgatacaaattcattggtaagtttattgatcaaacttcacacattatacaaacttacatgctacattgtcacctggtttgtgatttttgtagtatcacacactatgtacccgttctgatatttaactcgaactttacatggactcacactctaactgcaaaattgttctttttttcctgacccacttgtggtatcacacaactcatcaaatgaacttaggactgggccaactttttagtctgttttttattagacatttcaagcgtcttttaactctacattttgcttgtatctatgaactgaagatcttttctatgaagcaaactcgagtcctttggtatttcatgctgttccatttttgttttgccctctcctaattgagcaatcaaaccaaccattctgttcgaaaacttttaagactctaaatggaaattggtcgcgtgacattcatatgaacacataacacaacattggacaagtttgtcaatttttatgtattaaatttacaagtaacttccatttccattgaagaaactaagctgaaataattatttctttttggaaaatcattaattgacgtaggttgggagtgcaagaaataatgataataataagtgggtaacagaaaatgtatatttctccattcatttggtctggaacccttccatagtgattcacatttccattcttagaataacttaaaagcaggggtaaaggcaaactaagcaataaaccagcactgttacttctttttgaatttgaaggcttccaatttgtctcatgatatattggaatgactagtgaagatgtttgctctttacttttcagaaaaagaatctggatgttaactcgtttaaggtggtgatttccggaaactaaagtattttgtttaatccaggccagatcgctacgcgccactatttggtgcgtatt

SEQ ID NO: 72028 - DNA, 1024 bp, Prunus persica
  Intron number 1 from transcript ppa019671m (locus ppa01967 1m.g) derived from phytozome v7.0 (chr-ID scaffold_4; pos 29808232 to 29809255)
tctcaacaaggtttcaacatcttgttattaatctataagcctaatgtgtttctttgttctttagaaaactagtctaacttttaatcacttaaaaaagtctcacttgaatagattatgtctttggtttttaattttaagaacggtggagtctataatgttgtttttttgttttttttgtttttttaatttactcagaaagtttttacgaaacttacatttatgaaactagagagtacatgtcgtaggctacaaatgataaaactggttaggtgccggggtataaagacatagatgatagattgtaaataatagggaatattcatgacctttttcatatggaggcccattataacatgatattttataaatataaaaaacacccttcaacttgaatactatagaaaaattccttattgtaccttgaagtgaaaaaattgtaacatattaataaaccaattagaaagtgaccaagtgactagttgagagttttttttccccctccaaaataggcactctgacagcttttctataaattatgtagtgtggtattttttttattttatttcatttatttacatgtattctgagtatttgtttggcatacttaacaggtgcgatacccagagaaatagggaacttaacaatgttgaaggggatataccttgactccaacaatttcaatggtatatatatttgttgcattgccttgatgtgatacaattatacatgactcggcttttgttgcagtgcattatatgtgcataaaacatgagtttaacatataaatgtgcatatatcattatgatttttcagaaattccaaaagagatcggccttttagatcaggtggagatattgtatgtgagcttaaatgccctaaaaggccctgttcctgtggctgttttcaacatgtcttctttgactatgttgactctatatggaaacagcttgagtggtggtcttctagacaatatatgtacatcttcctagtcttcaatacttgaatttgggtggcaaccagtttg

SEQ ID NO: 72029 - DNA, 999 bp, Prunus persica
  Intron number 2 from transcript ppa017829m (locus ppa01782 9m.g) derived from phytozome v7.0 (chr-ID scaffold_1; pos 33102718 to 33103716)
gtgttgtcactcattggcaggtgatggacatattttatattatatatttaacctcattcttagtatattttggttaatattttggaagaattttgatactttgaattatattttcaatataggactttcgactctctctggagcaaaacataatcaaattgaggaattttggagtaattccagttggaggacgttcttgagtcacttagcttgatcgtatcaaaatttcagatctttcttccaagcggttattttctggcaataaaataaatgagcagtgcgcggtgctggaatagtgacgtgttgggcttttattgcgtttttgaagcccaagatgacctcgaatgggttcgtggccttctagagaagtgttcagaacatttttatctttaaaacaagctatcttgggccagatttggaggagatttggggccaaaacgtggctgggcagattttaggcaaattctcctattccaatttggactttatttcctagtattattttactttaattagtttccttgtggggatagaaaagctgtacattggcagctaggttttaaggggtatttaagctctttctcacgaggaattgaaggactcccttttcacttttaaactttgcattgtggagagcaattgctagggttttgggttttcacaactttcaggtgttttcgttcttttcttcttaatgatattttcttggatttcaattatgagtatgcgtaactaaatttcttttgctagggtgaagccttgaaccttagcatgaatatgtgatttttatttaattgcttatgatgagtacatgcgtattttgaattgttaatcactgttttaaactatctaattgtcttaatgcctgatcaccattaggatctttagaaaagtaattggatgcaattttggtcggaaggttccctgaaattgatgctagcttcttgtgattaataattgtaatttcacttaagatgaacaccacgtcttaagggttgc

SEQ ID NO: 72030 - DNA, 442 bp, Prunus persica
  Intron number 2 from transcript ppa010442m (locus ppa01001 9m.g) derived from phytozome v7.0 (chr-ID scaffold_5; pos 9433937 to 9434378)
gtttgagttgcatcagtcctatttcagccttcaaagtaagtgaaaaaaaattctaatattttgctcaaattttagtgtttaacaacataattgcattagaaattgaagtttctctttggtgagcttcttgttttatggaaataacatgtccattaaaataaaaattatggatttggatcttggattgctttagagtatcaggtgaaagtgtttattttttatttttttaatgttggactgattcataataaatcaccatttacttgactgatgcaatgagaagaagtttatttactgaccagtgtttgattttgttctttctgaactaggattacaatttttgttgatcactagtttgattgaataggtttggataaatcagaagtaattggggattgtggcagcagaagcttctatcttcgaaaaaacagcagcaatcaca

SEQ ID NO: 72031 - DNA, 903 bp, Prunus persica
  Intron number 1 from transcript ppa003286m (locus ppa00328 6m.g) derived from phytozome v7.0 (chr-ID scaffold_4; pos 1754712 to 1755614)
tcggttcccaaagtgctcgtggtcgtcgccgtcaggtatactcactttctctgtctatcatctctttcatcttctacgcgtttgctttggtttcctatgcgtttgttcagttctacatatttttcttgtacaaatttttacttctaatattagtatttttttttgggcgatttctaatattatgtattgcggtagaatatggacagaattttaattttcttatatgtttaaatcgctcagtttggcgtatacttttattagaagctatattattgctgtattactccatttgattgcgtttccttgctcaaaaatatgttctctgttttacaccatgctgaaaaatatatgctctgttttattccgtaacgaaaaaaatacgtgctctgccttttttttttttcgttccgattttgttggcagtctctggagtcaatcagatctcttgcacttatttcatacatatagaaaattgtgtaggaaaggcgaaattttaggaaattggattgcattcacctaaccctaaggcatagagttgctatgagcagaatcaccatgcgcagattcatatcatttgcctatataatgatggcgaaactatgttagcataccaataaattatgtttgtgtagtgtaaattatgcccaaaagtagtgaagaaacaaagacgtggccatttcctattaagaaaaagaaattttgtactttcaatgcttatttgtagataaactgtaagatcaaaagtaaccaaaaaaaaaaaggctcgtgctgctaacccttcagaggtcgagaaactgcatttttgttattggtatgctcacatgattatatgatggttttgtctcatggctgttgccgcaaaatgcagtggttgcggccttgtggcttacgctgaggcaaacc

SEQ ID NO: 72032 - DNA, 516 bp, Prunus persica
  Intron number 2 from transcript ppa014836m (locus ppa01483 6m.g) derived from phytozome v7.0 (chr-ID scaffold_4; pos 3173612 to 3174127 reverse strand)
tgcgatttgcgccacctttttttaccttggtctaggtgattaaacagtgaattataatcaattttttatgcatctctagcaagtcattttggctatattaatctgtatgatgaatggcaactggctcattggattaattggtgctatgtatgaatctagcagtgcctcgacatggaggttctgtgaaagggcttgatagtgaggttttggaggtgacgctgtgtgcgctatagtgctggctagagaggaatataagattttttgtagggttagaaatttcagtggtagcatttgattctggtctttttttcaatggtcatgtaggaaggaagccagctaactcttttattgttgttcatttgattttcttgcaacttttcattttaaacattttttatgtgtacttcttgttggaatgttacacatgaatggctatgttgagaaggatgggaagaggtttctatggataccaaagagaagtcaacagaaacccacttatattatatatatccaggg

SEQ ID NO: 72033 - DNA, 675 bp, Prunus persica
  Intron number 1 from transcript ppa026163m (locus ppa02616 3m.g) derived from phytozome v7.0 (chr-ID scaffold_5; pos 16917882 to 16918556 reverse strand)
gacgccacttctcaacaagaagtttattccaccacgtgagtttttgtttaattggatatcaatgatttattggaccttttaatactcgtctaatgaaactttatataattcttgtaattgttttgcatttttccttcttgacttgttctttaatactcatccaataaatcatttcttgttttgcattgttctagttttgtattgctcctttctctctgcttgaaaatgttctatctttgcacataaactttagcttcaattatgcattcaaattcttcattacagtcttagttgtgttggtttgtttcatttttcctgtttgtctgttgaggaaaaagaaaaacaaggagaagtaagggttcttattgtgttggatcacaagaaatggaaaacattctacaactaagctgatggtagttttgttgcaatatagctgtgagtttggtttcttggggtcttgaatggataaatcacttttccaatacatttgtcatcaaccaaacagaaagagtaattgccacgaaaaaattgctgctaatgttgtttatctcagtagagctgaaactgtctcctttttgcgaatcattgtgtggtttccataaacattcactaacctggtgtaccccgtctaagttttcagtacggcagagcttgtggaagcagttctgcagggaa

SEQ ID NO: 72034 - DNA, 1005 bp, Prunus persica
  Intron number 3 from transcript ppa008297m (locus ppa00829 7m.g) derived from phytozome v7.0 (chr-ID scaffold_2; pos 22742985 to 22743989 reverse strand)
tggcgccatcattagtgggcacagcagcatctcaggtgagcaaagcttagcttctcattcttattgttactaatactatgattataaaataggagggagggaatgtgctaaatatttatgtgcttccgtaaaattcaaaatcactgttgttagctgagaaattaaagaaaaacagaaaatttggaatcttacagcttttaacagaacaggaactaatttaattatcttgtaaaggagtttggcatatatacagatgtcttttataatatctcagcgacaccttgatttgtattctacattggccaaaaccctgaaggaaaaaatgacagagagcggtggtcgctggttttttttctgttacgttttattggcacctttttgcattgatttgatacagttattctcttgattagtaacggctagtgactgcgatagtgatatcccaaaactatctgacctccattgttaggctgtctgcatgaagcaggcatggctggcttttgactcgtgtatcagatcacctaatcaaaatacgttgtgtgtattggcccagttatcttctattttgttagaatatgtaatttggatcgagtccatcaatcatgtgttttagttcagaattcagatcatctaagaagtcaatattcacaaatcaatgctttcgttacctacattgatctgtaccatcaatgaaaagtgaaacgaagtattttggtaatgtatatgcagccctttgaataaaaagtgaaacaaggatgccagctggaatgtgcttactcaatactatctacctaaactttaatgctctttatagtgccgtttgagccagaacttccatggtgttacatgatatagggcagcttacatccttttagctcagaactataaacctttttttgcataaatctgcatcatatttgttttaattggttgtttggtttcttacgtaattgctattttattggtacagggtgtttactattatttctatcaaatattcaggaa

SEQ ID NO: 72035 - DNA, 769 bp, Prunus persica
  Intron number 2 from transcript ppa010470m (locus ppa01047 0m.g) derived from phytozome v7.0 (chr-ID scaffold_3; pos 19218098 to 19218866 reverse strand)
tctgtacacaatccatttctaaggttaaggctgaggtgagaaattgggtacccatttcatgttaattacgatctagtccactttaagctttctttacctgcgtttcggtgggttttgatatgacattttccatgttcttagtttttgtgtaatcttaatcagtacacgaattaatgtgggttttatttggattaagtagttgctagtgccttgtggatctatggttttggaaacatgtgacatgcattgagaaaatataccaaaaccctgtcgtttgttctgtgattgaagttgattggagttttaatttgcaaagaattttcgggacttaaatgtttcttttacgtaccattttgtgcgtctacgatttctagttaaactttaaactggaaaattcttgttgctctgaaacatatgtgagtttttagattctaatcttaaaattgatcgtgccttctggtattgggttgataatctatagtttgagtgcatttgctatatttgtagtctcatgaagaactacagggatttgatattattatattttaaagtcttagtaggcggacaaaatgattctacagagcatttatgtgcttgtggttgcgaagtatctccgggttctcagattgtaatactattaaatctaacatttgttctcctatttggctgataaacaatagtgtgagtgcatgtatgctacatgttgacagtctcatgaattacagggatttgagattattgtatttttcaatctttctaggtggacaaa

SEQ ID NO: 72036 - DNA, 658 bp, Prunus persica
  Intron number 1 from transcript ppa026542m (locus ppa02654 2m.g) derived from phytozome v7.0 (chr-ID scaffold_6; pos 19097162 to 19097819)
gctggagcaaaacctccaaggtacctaatcatctagttttcaggatcttagtttgtttttattttttatttgttctaattaagaattactcttgatcttcatatctgctatctgactatgttctatcttgtatgaaccttcttatcttggaaatgtaatgtaaattgtattctaaatcattctttctggcagtcacatctctcttctaaaaaggtgtcaaacttcaaatcttccgaatatttcatctgataaaaaaaataatgataaaaattggatgttatgtcacagtttctttctcccctgtgcttggaggaattatcctttaaaaagagagttgtggttttctttctccaaggccatttgctcaatttatatctgcaatgtatttgaagttgtgattggagaaaaccttaaatgttgtttcattttgttgtgtaagaacgggaagtttcaatatgattgaaattttgtttgcattgtaaaccctggaaacatcaaaatcaaagttgaaaacaaaagtcttctgtgaatcaaatagttctgatcatacatttgagttgtggtgtcccctttaatactttattttgtttttcgcttacccgaagagaagttgtatatgtcttctggcacttgaacatagtatatgggaattgcagat

SEQ ID NO: 72037 - DNA, 825 bp, Prunus persica
  Intron number 2 from transcript ppa002775m (locus ppa00277 5m.g) derived from phytozome v7.0 (chr-ID scaffold_1; pos 9493268 to 9494092)
ggtttgtttgcctcaacgccgtgcaaggtcagttcttagcattcattttggtcgtctctgttttgggtatttgtggatttgtgtttttctggtacatttttagatgttggtatttgatgaaatttaatttggagtatacagatttcatttttatccgttaccctttttttatgtttagctgctagcagttcttttgacagcttatatattttcaggtttcaatcgtttgttttgaatgttcattatatataactgtattaaattgaatttgatgagagaatacccggtgtatgttggtgtggagatgaagggaaattacggttatatctgtcctcaaatatttggaatttgtttagagattatttgaacattttcttccaatttgcgttggaccgtatcagtctcattggtatattgacttgctttaagtcactaggaaaatttgttactcctagattcataactacaatggtgaatgtctagaaccacaaatcaagatgtcttccccattagtttttcgtttttggaagacaatggccttctatatctgcaaggaaaatttgttagtcttggtctacagaaaaaaatttgggtctagtttttgtttagcttttggttataatcagatcattgctttctatgtttccttcatattattagactgtcatttttatggcgtccttttctctatagaccaatttgttaataacaaccagatgtcaccgcgataacatacatttgacacaaagttgggttttcacttttactatccatgttaatgagcatactcttacgcttctctgattatgttcttcccagggacga

SEQ ID NO: 72038 - DNA, 727 bp, Prunus persica
  Intron number 1 from transcript ppa008429m (locus ppa00842 9m.g) derived from phytozome v7.0 (chr-ID scaffold_1; pos 31115191 to 31115917)
ggtatgttttatcacttcatctttagctttgtccttggactagaaagctttgtattctatttcggtatgttgtaaaaaaaatttctttcttttttcccctgtttcttcttaagtatatgatgtacttaactttatcatggaaatgttttcttcttccttcgagttaagatcttctgaattgggttttccgtttacataacaatggcattagtattgtaggatagtactaggtctgtagaattgcattttgagaattgggaaatcacatggtatttcattgttattcctttcctatagcgattggcaagcctcgtgtaaaatactaatggagtttgataattggaatgttgtaaagtttcaaaaagtctcctttctatttctttgataaaagtaatataggtggcgtaatatatctgttttcctttgttattaatattcattcttcatgtcagatggtggatttttattgcacacaagactacatggtgtgatttttattagttagttgacttcattttatatgcacagtatttactttggtcttgtgcaatctttatacttaaacccaccctaacatgtagttgcaagccaatatgcatgtcgtttttttcttttcacaagtcattttatatggtgtatttggcctctttactcatcgtattttaataaatggaggtttcttttatgccaatttcatctagttcaccaagggcaagattttcacaac

SEQ ID NO: 72039 - DNA, 540 bp, Prunus persica
  Intron number 1 from transcript ppa002003m (locus ppa00200 3m.g) derived from phytozome v7.0 (chr-ID scaffold_1; pos 9458739 to 9459278)
agaatattcagtctttttcctgggcattgaaggtaagcagcttattggcatattcctgatggaacttagcaccatattttttgggcacatttgagcctcgataatcttaggtttgcatcttaatttagcattgaggcacgacataaaaacttatgcttggcatctgcttctcaatctaaattttactttagatcagggagccaaataatacgtagaggtttataaaacaaataataaaaatgtttaaaaaaaaaaaattagaaaacagagagattctttcaggatttactctaaagtttttattcccattaatttggtgatatggggaccatgatgaggtttaattttataacagagctttctattctgtggccttgaccgagggtttggtcttagttcaaggtttactaagcagaattttttttctcgtatctttaaagttggtggttatttttattctcttcttactgagtttggtttttttatagtctttatttgttcctaatacctatgatgtttaaacagacatttttggggttc

SEQ ID NO: 72040 - DNA, 697 bp, Prunus persica
  Intron number 1 from transcript ppa007898m (locus ppa00789 8m.g) derived from phytozome v7.0 (chr-ID scaffold_3; pos 20864656 to 20865352)
ccaaagtgtacgaaggaaagtaagtcaacctcagtactactagtctctgtttgtgtctagattctcatctttcaagttcagctcagccattgattatctagtatatgaattttctttttggttcacatacacaaagtttagatcctgagcaaatataaaatgcaaaattgattggagttcaaaagttatatgatacctcatccaccaggtccaccatcaccactgagtgcaattgatcagcatgctcagattcataaacccaaatgtttctccaattcccaaagctcagttctacggttgtacctcttctcacttctgttttgtgggacgggggttggtgagtggggatagaacataattaaagatcaaaactttgcattctcatctttcttaatcccagctttagtgtcctgcaattacgggatatttgtcgtgttcgaaaaatcggcctaggcgctaggcgggaggaaaccgcgacgatttacccctaatcgttaggggtaggcgcctaggcgggtcaggtccttttttttatatagtttttttttttcctgggcgccggttaatgtattggatgtacagccgttttttagtgttgaattacagtgatgatgttttgttgtgatcttaatctgctggtttgttgttgttatttgttccagatataagaatcaaactgttgctgtaaaaattgttc

SEQ ID NO: 72041 - DNA, 569 bp, Prunus persica
  Intron number 1 from transcript ppa006903m (locus ppa00611 0m.g) derived from phytozome v7.0 (chr-ID scaffold_7; pos 13843519 to 13844087)
ggttcatatttggcacaacctcggcagcttatcaggtcagttccttcttgggctttaattaataactagcctctctctgattgtgtttcataaaaatagaattcattatttgccttttcttttattttaaatatttttttaatatgaaaaagtgtgaatttaccatattattctcatttaattagtaatttcaattcttaatgtttgcattatctaagggcatttttgatattttgaatgtttcaccattttctgccttttgctttatatatatagattaccatttaattggtgttttatatataattacttgggtttaatttcagtttaatgtcagatcaattagcttccagggcaattcattttattagtccctgaagttgaaggacgacaagaataattttgaaaattcagaaactcaaatgcaaatcgagtctaaattcaggaattaataaaatgaatgaccctaacttccacatgcatgaaggaatatttacatcttaattctgtatgtactatgcatgtccatttcagtacgaaggtgccgtaaaagaaggcggtagaggacc

SEQ ID NO: 72042 - DNA, 433 bp, Prunus persica
  Intron number 1 from transcript ppa017913m (locus ppa01791 3m.g) derived from phytozome v7.0 (chr-ID scaffold_4; pos 11054609 to 11055041)
aacactgttgggctgacttacgactcctcaaaagggtaagttccatgaacacacagagcatattccttctttatttttagggttcaacttgcagcagtgctaataagaaaatgctaaggagatcgcatttatagatcacattgtgtacgacttttctaataaaagtggagtccacttatataatgggtcacacatcaaacctctgttagaaagatagtacacaaggtggtctataactatatggtcttcccaacattacccgtgctaataatatttcatcaaataactgtcttttgagtatttggtttttaaggttgtaattattaatattcaaagacatgatatgactactacattttcatagaatttcctactgaatttcctgaattaattccgatcggtttttcttttgggttttgtaggaatttggcag

SEQ ID NO: 72043 - DNA, 326 bp, Prunus persica
  Intron number 1 from transcript ppa011513m (locus ppa01151 3m.g) derived from phytozome v7.0 (chr-ID scaffold_3; pos 4079924 to 4080249 reverse strand)
cttctgaaggtcattatcctcggcgacagcgggtaaacttcatcagtttcttaataattgtttgtttatttgcaaatcgaagaattaaaattctgaatctcgttgcttgcttatacaaattcaaattcgcaattttggtcaactacttatatgtattctgatttattggataaaacaagttgttttattcttttggttaatagttcaattttgcttgtaattaatgccaggatttagacatttatttgttcatgttgaaaatgtgtttctatgctaatctatgttttgtttactttttatttggcagggtggggaagacatcgctg

SEQ ID NO: 72044 - DNA, 558 bp, Prunus persica
  Intron number 2 from transcript ppa003568m (locus ppa00356 8m.g) derived from phytozome v7.0 (chr-ID scaffold_6; pos 7701854 to 7702411)
acgggcgttccccttggaccaagttggcattgaaggtactggtttcgttttttgacttaattggaccgttatcttgtggcatctaaacattagttttaaagttctgaaatttagagacatcaaattaagttaaaattttaaatttcatttcaattttgtaaggatgagctaaaacgttcaagccctcattttcgacaattaatttaatgctggcaatttgttcttcatactataaaatgtagctgaaattagtattttcctatctgagatgaggtgatagaaatgacatctttagcattccgttagctgggtacgtaggaccttatagcagaatgtttcttctcttttggagatcataaccctccttttttcttttcttgatgcaagattttgtaacgttttgtgttaactgttaactcttttcatttattgctttcatttgattttacaaatttcccaccttttctgttcaccatatgattcctccctaatatgttaaaatctgttcaatattactgtacagaacttgaatctttgacgttgcaatactgggctgct

SEQ ID NO: 72045 - DNA, 1016 bp, Prunus persica
  Intron number 1 from transcript ppa002560m (locus ppa00256 0m.g) derived from phytozome v7.0 (chr-ID scaffold_6; pos 1853918 to 1854933)
aggaccttcggagtttggatctctcttgtttgcgggtaggtttttctttgtctctgtctctctctgcatttttctgggagctattttcatttgcatttgatgatgtttatatttccattgagctagtgattgactaaaaattagttattattgaacagttcaaaaaaaaaaaagtcttgtgctttcctacattttccaagcattttgggatttatgtctgttgaatgctgattgaccagacttcagttgggtaaatttgattttaatattgtttttactacaatttttcactttcaactctggtcagtatgcctacccaaatgatatggcgttgaagctcaagtttgggatttagtgatctgaactgtgctgttcttctaggtgttgatgttaagttattgtttttctggtttggtgcattggttctgttcactatggtgtatttttttaatatttatttatagcttggtgggatgtaaagggttttgctttcttgtatcagcttgcactttcgttatcagattcataatatggtttcctgaaaagtcatctcagatgctttatgtaatataagaaacattatcccaacctacaatgtcactacaatttttatgtaggtctcatgacatatttcttccattccttgagattaactttatatgtttcttcaatgatattccacagagtgcatgattctttaaaggagtaaaattttcttgctggatcattaataacaaaaagttgctagtagtgaaaggccaacccattaacacaaaaacctactgtagatacttttcgtcaacattgttggctatgctgtctaattacttgaccactgtcttgttggtggatttgatttgttggtgtagggtgacatatttaacccatgtaagcatgaataaaactaggtagaaatgcatttcacatgttccaaacctctttccggttccattttacttttctttttttatcaacttgaaattaaatctatgcttttctctgtagatcacagaaaa

SEQ ID NO: 72046 - DNA, 563 bp, Prunus persica
  Intron number 1 from transcript ppa008768m (locus ppa00876 8m.g) derived from phytozome v7.0 (chr-ID scaffold_4; pos 8461184 to 8461746 reverse strand)
gccttgaacttgaagaatttagttgagcttccaaggtatttactttaatagtcttggtattttgtgcttggattgtgtgttctttatctgtttgtgctcttttgttgaattgatatgctatgctttaaatagtggtgcaaaattaatcaatttggatttggattttttttttctctgctgctatattgtgtgaggaagtttcatggattatgttcatgaagaaatggatgcgttatttgtgtaaaagctttagctgagttagtttaatttcatgagttgcgggattagtttaatttcatgagttgcgggatcgttagaatttgaaatttggttttggaacaagcaaaggtataatctttaaaaaatacttggtctacttgaatactatctttggcttgttcaatttgattctgtagaagttcattactgtcattgagtttttccgggtcaatttgatttgtcaatttcttgtattttctctttctgcctccactctgcatttctgatgtgtttttgtgataaaatcaggcgcacaagtgtccctgagcctcagattaaacaca

SEQ ID NO: 72047 - DNA, 339 bp, Prunus persica
  Intron number 1 from transcript ppa012383m (locus ppa01238 3m.g) derived from phytozome v7.0 (chr-ID scaffold_6; pos 8986237 to 8986575 reverse strand)
aagaaacaactaagcgcttggctgagattcaagaagtaagtgatgaactaaaattgccaaactatgctagaattcaaaggttcattttccaaattacaagtttctatctcttccacttaggatgttcaagagtttaatattttagtctttatcttgtctacaatgatgacctatgattgagaaaaagaaaaaagaagtgtacatagatttaatgtgatgaaaaaatatgtgttattatttatttgctcatctaaaacttgtcaatgatgagatatggaggatgcttcaagactatgtttctatgatatcttttaggagcttgaagcactgacagatcca

SEQ ID NO: 72048 - DNA, 997 bp, Prunus persica
  Intron number 4 from transcript ppa008648m (locus ppa00864 8m.g) derived from phytozome v7.0 (chr-ID scaffold_6; pos 1618877 to 1619873 reverse strand)
gtgacgctagtgcgccttcttgagggtattgttctctgcacatttgtgtttgaatatcttctaggattacacctggaagtagattgttgactccatccaattctcatatgtgcagtcttatttgaatactctattattgtgtaatgttctgtttcctgatagtttgccatgttatgttgccaaattgttgatcgaaatcatacattcagatcagacatagttttgcatttgattgacagtttgtttgataacataacatctctatagtaagagaacatttcccatttattatttgtggtaacatgagactaaggtgaccacgttcttattgaggctgtagttggtagatgaaccaggaatcaggtggacattagatattttctgaaaagacatttctgctaaagaaaggtttgtgtttggtgtttaaaatcttgaagtatttcttcatttataatacttgagtttgtttgaagttttttgcttagttaacccccaagtttggagaaggtgtattgcatgagaataagtgtgtgtggcaatagaggaatccttttgcacctctttgctagcaagcaaatacttggctcctttcctgcaaatcaccctttcacatgtgtgcagaatttatttttatttttctttctttcgagcgtttaatgagttatctttgcacacgtgtgaagctgtgattcgcaagtacataggactggcttcgtccagatacgaagccatgcagagtccctgctagcatatgtttctctttaagtttgatagtttatgtcattaaagggtcggtttttggtttccttaaattgtttatccatgtcgccttatctcctctcctggttagtggaggactggacagaagggtaatggccctagagacatcatggctgaagtaacaaggaaaatcgatcaaccttaaaaagaaaaagaattgacaatatccttgtcaatctttgctgcaggctgcactgaaacatacgagaacatcttt

SEQ ID NO: 72049 - DNA, 632 bp, Prunus persica
  Intron number 1 from transcript ppa001178m (locus ppa00117 8m.g) derived from phytozome v7.0 (chr-ID scaffold_8; pos 16658757 to 16659388)
ataactacctcgctttcattctcgcacgtgccgaggtaatcgtctcactccacttcccccaattctgtcttcatctctaatttcaatcagtagggtttctgttttgtctttttgattatgtgatttggttggataatgggtctgaatggattgcatacttagtcagaaattgataatcgttttttgagttgacgggggcttatgggtttgggttcgatggaggctatgggtgctgatgaagttgggattaaaatcgcttcacatggctgattgctctgattgtatttgttttctattctcttgactttgagagcggtttcaagcaggaggcaccagaaagccttaattacctagaatgtttgtccacaaatccttgtttatgtcaaaactatttgctgtggtggaaaggttggatacctaaatttgtaattggtaaactttgtcttgcttttgatgtactggggttgatcctgtggcatggtaacgtgtattgtgaagaaaatgatttattgtttttggctgttggtttacatagcataaccagttttcagcttctgggtgctgatggaacttcgaatttgggtaacttttggacagggtaaatcagtggagatacgacaagctgcgggatt

SEQ ID NO: 72050 - DNA, 658 bp, Prunus persica
  Intron number 1 from transcript ppa019198m (locus ppa01919 8m.g) derived from phytozome v7.0 (chr-ID scaffold_3; pos 16659537 to 16660194 reverse strand)
gctttggatcatcttcaggacttactcttggtcaggtcagtgtgcttaatttgagtttgttgtctaattggaatattaatttatatatccaattctttgcttttcaaggctaatttagatctaaattttcccaattatttcgctattttatccaaaacaagttatttctgaaccaagaaaatatttcaattagatttcagatccattttcctaattttaatttcttctccctcttcatctctctaaacggtacttaatttaacattttaatttgatcgcggttctcgggtttgacctcaggtagtccaaaattttctttttgtggcaaaatccgtctcgatattagaaaaaagtcgtaatgcttttctctacacacacagaggcacagagatctaagttcaacgcgtttttcttgtacaatttttttctttctttcaaatagtattttaatatggaccaactcatgggctagctccatatacattttctcgtacatttttgagtggtacattttgagatgtccatgtccatatataaatgtatgtgtatgcgttcttctttcttgttttttttttagattgagaaaccataagcttgctaagccttgggatcaaaatcaaaatcttaaagctctctggatatgttccagccaaacttg

SEQ ID NO: 72051 - DNA, 1009 bp, Prunus persica
  Intron number 1 from transcript ppa004340m (locus ppa00434 0m.g) derived from phytozome v7.0 (chr-ID scaffold_7; pos 21932510 to 21933518)
gaagacgaacgctctcgcagactggctcgagtcaagtgagtctttcactttatttctttttggcttttgcagttcgttttaatttctcgatcataggtttgttcaatttttataaaagcacagacctttgacgaagaatgttcttatattagttaatttgataatagaatccgttcattgtgaatcggttgttatatatctgtggttttctttttagctattggttcttccgaactatctatttcgtgtattttgtttcgggagcaaattctgtttgaatttaattcatcttgttattttttatggaaaacgaaaatcactatgattttggaaagggacaatatgattttggagctgaattgctaaagcacttttatgcgaaaactgaactgaaatatcagtgaacttctgaagattgtttccctcttggtgttttcatcttgtctttctttggttattgaggattctgtcaaaaagaaaatttgaatcaccattttgtgagtttatggtgtttggtagtcaaaaaggtataaattttatccaaaatcagcctccttcttcttcttcttcttctgcttcttcctattcaagctaatgagtccctcgcaaataccagcaactgtaaccactatgctttcggatcatgcgcttccatatttacccaattaaagattggatgcaccaatattatagagtttgtaaacagtgccttaactggggatatataggctgctttattcttgagaatgcaggtttggacctagtaaaatagtgaacatttttgagctttgattgagctagaggtagtgaaataccttccaataaggaggttattgacttagtgatcctctatcatctggcactgataatggtccccgattgttatatcagcggggcatagcacattttggcctatattattgatttgtttatgtctttgttccacttttaacttggttatgtacctattaccttaatagggcagctgccactgcattggccaagagac

SEQ ID NO: 72052 - DNA, 389 bp, Prunus persica
  Intron number 2 from transcript ppa008952m (locus ppa00895 2m.g) derived from phytozome v7.0 (chr-ID scaffold_3; pos 511165 to 511553 reverse strand)
ctctccacccgtgagtctttcaatatcatgaccacctttttgcatcattgataaaaccttcgttagctctcattctttcctttttttcttttctcaagacaagttttacattatgtaacagtctctaactggtaatttaagataccagatgtttctaaagaaaagcttcataaggaagaaatctaggatctaaaataaaatttagccatgaattagattggttgaagtactttgatgattctaggaaacaagttgaattcgatggtaaaagtgcataacatagaagtcaagagctgtgattagaaactaactacttgcatttatattattctttgttcatgaagagaattcgttctaattatcatgcgatatctttgattctggcagtt

SEQ ID NO: 72053 - DNA, 439 bp, Prunus persica
  Intron number 2 from transcript ppa011194m (locus ppa01101 0m.g) derived from phytozome v7.0 (chr-ID scaffold_6; pos 27233028 to 27233466 reverse strand)
attggctaccaggtcggccatcagctctccgagcggtacaccttcccgcactctatctcaaacccctttctacgccctgccctccatgattgctcttcaatttcattgtattcgaatagcctctgtttgatttcatagcaattggacttttagatctgaaatgcgtattttcaagtgtttaattttaagtttgatttcagaattttttctctttttcgtttataagagtttggtagggtgtttggttgttgagaaattgtaggaaagcagaccacctgtatgcatatgcggcccttgcctttttattttttgatcccaatcaaattataggaataggagcagtgagtgagagtatatgtatctgtttacttataataaaaatggaggcattttttagggtgcagccagtgatgattaagttttacttgttaggtacaca

SEQ ID NO: 72054 - DNA, 394 bp, Prunus persica
  Intron number 1 from transcript ppa011194m (locus ppa01101 0m.g) derived from phytozome v7.0 (chr-ID scaffold_6; pos 27233689 to 27234082 reverse strand)
aatcagaacggtatatatatagacaaattaaaaattattaagacatctaattatgacatataaaataaacgaatacggacggtgtttcaaaaaaaaaactagaatgaatgataaccattaattgagcaatcaaatggttttgaatttaaattactttgcagacatactttttcaataaatgcctagaagatagatggttgggatcatctgaaggtaaatactctataagcccaatgacctttttcttttgaaaggataaaaagttaacaaataagcccaatcacatatcatggcctatattacgttttgtattttcgaaaagaaaaaacaatttcgacttttttttttgttggtctcagacaatttcaattttttttgttggtctcggagaaac

SEQ ID NO: 72055 - DNA, 786 bp, Prunus persica
  Intron number 1 from transcript ppa012241m (locus ppa01220 8m.g) derived from phytozome v7.0 (chr-ID scaffold_6; pos 21892934 to 21893719)
tgttcttggggctgtttgcttggttggcttggcaggtcttgtgtacaagaagaaggataagaagtacactaaggcaaaagcagagtatgagtatgaattgactaagagagaggatgcttgagcttctggctagcttggtgctacatgcaacttccatagaggcttcaattatatagtctatagttgatcatcaagttttgtgattgaacacctcctcaactacttgtatttgcatgtattattatcaattcttacataatttaatttttaatctaaatcaaaggttttttttatatatatatattaagaatagtccatatactgttccaaacacttcataccgattattatttttcaaattccatcactattattctcatattctattccacacattaatatcattccagaagtcaaattgtgcctaattttttcgtcaaagttaagagtaataccgtcaaattagacaattttataatttttagttagcaagaacagatcttacttaccacaaattaatttttagtcacaataggtttggttctgttctttagataaaaaaaatttaaatttgtgcgtgacgccaaaaattggaactttttaattcgcatgagcttggacatggagattagatgatgaacacgtgtataatgtagataagttcagaagctcaattctattgggaattgggggtaaaaagacctaaaaaccgagaagggtatgtccaaacgacaccgtttaccgacctgagtcctggcccggtctggtacggtcatctccgtttat

SEQ ID NO: 72056 - DNA, 899 bp, Prunus persica
  Intron number 1 from transcript ppa014856m (locus ppa01485 6m.g) derived from phytozome v7.0 (chr-ID scaffold_1; pos 29859435 to 29860333 reverse strand)
attacactcagcgtcccaatttctacggctgctttgttggacattttcaaggggatcttattagctcattagcttgtgtaattatagtgacaactcttgtatgtgtgacaaattttatcaattcacatgcaatataaacaaaatttaatttaattattatttttttggtcgaaaatttaattattatttgttacattttgatatttggtcatttactttgtcttcaacgtgtttttccaacttaagattatggaggagctcctccttaaaattaatggagttttgacacttgtcaaattctagcaatattgacaaagtttcaataaagagcaaaaatgatattaaaataatttgacacgtgtaaaaatcacattgaatgcaaaaatgagcttcttctcaattttaaggagccaagctttttctttctagatgagcaaggttggctccttaagattaagtaatgaaattgaaagctttctctcaattatatattatatataatggttttctctaattaatcatttaatttatttcacaatattgacttctttctctgtcaccggtgaagagaggaggaggaggaggaggttgggagatatggatagttaactctcaaggtcaaccggaagaccttcgtttttattcttttataatttgaaacttagttaacttatatagcctacattatatacgatttataattagcatgagtgtaattatagagaaactcgcataattttctagaacatagtttgatttttgtagttgtttcataccaaaaaaataattagcaggagtgtaattattgctccggcctttgcgtctttctttttctaatcccgttcatgagcaagcaatcatcctgttaaagattaaaaaaattaatattattatttgga

SEQ ID NO: 72057 - DNA, 755 bp, Prunus persica
  Intron number 2 from transcript ppa015734m (locus ppa01573 4m.g) derived from phytozome v7.0 (chr-ID scaffold_3; pos 15382541 to 15383295)
gaagacggttcaagccactggcttttttgattcaggtgcaaggtctcaacgtttaaaacaggcaagtttctttttttcttttggtgtataaatatgttcagcttttgattatgcatgctgtattttgattattgttggaatatggctaaaatttatgtttgagtttataggattcttctttatttatttatttatttattgttgatggttttttttctggggtgcaaatgctaagtccatataaaagactgttggatgtatttaatagtgtgaatgattaatgtaagaggaacaagagtttggttggaagagtgaacaaaatttgactaaaaaagagagttgagagcctttggtgtacttgaactctggttgtgaggttgaaagttgtgcgaaattctggtagttctctggttggtagtgagcccatggatgtcgacaagtatatcgaacatcttaggcttttggcatctaacagtaactttgagtggtccatcttgtctttacatgttagttggatacttctgctatatggtttgggtgatttatgtgggttttttcatatgagctcgtctgtttgtttgtaggaaacaaagcttgccaggtcgacctcaagtcatttaaaaggtttgaactgatttgcttaagcttttccaaaatgctttttttttaataaatcttttacggtttttcaaaggcagagattattggaagtctaaacttgtgacctatctgtatatatttggaacaaacaggag

SEQ ID NO: 72058 - DNA, 497 bp, Prunus persica
  Intron number 1 from transcript ppa000144m (locus ppa00014 4m.g) derived from phytozome v7.0 (chr-ID scaffold_7; pos 21732920 to 21733416 reverse strand)
aagtcagacaaggacccgaggaaggtcgccagaaagtatgattggcttctctctccattacattgttaacttgattttgcttcttttttttcgctgttcctgcattttctttcatttatttttgtgcacattactttttctctgttctgctcctgtgaaatgtggaggaaaataaatgtgaacgtaggaaaatgtgagatattgagttttagttacggaaaagtaatgctcccattagacttatcactcgtgtttctgtaagatgtggttttttgttttttttgttgtgagaagttttctttaccaatgacataaaccaaatgcttcttatcagaaagcatgaatgaaatgctgggttttatgtttgattttgaacttgaatatcaaaacgctgttttctaggtttattattatgtttttttttttttttcccaaaatgtttttgtttctaattatagttcttctaaattttcattttaaaggtatcaattggagct

SEQ ID NO: 72059 - DNA, 1040 bp, Prunus persica
  Intron number 1 from transcript ppa025284m (locus ppa02528 4m.g) derived from phytozome v7.0 (chr-ID scaffold_3; pos 17907526 to 17908565)
ctaaacccagctcaaggtacgtagtcaaaacaagcatgcatgttttacacctaaatgactctgacattattccactctgcataaggctgagtaaaactatattgcatttttcgtccttgacaataggtagaatattcatattgtgggtgctttacgcatttgtaattgaatttttaagtgtttacttgtatgtgtatgattgctaacaaattttttcattgagtgtaggacatatgtggcataaatttctcgcaaatatataaaatgcatttttaaaaaaaaatttggaatggtccctgaatttatactcaagttccattttgattctctaactaaatttttcaatccattggttctccaactctctcttttgtgttaaattggtccctccatcaaatttgtcatcaaattaaggggtaaaattgtcaatttgtgttctaatctcctctaaaacgaccattccatctttgtaacgaacatttccctctataagacatttctcttatgggatagagtttcaatttggaggagagagtaatggctatggagggaaatgtttgttacaaagttaggttggccaatttaggagattagtgcccaaattgatggttttacccttcaatttgatgtcaaatttgataaaacttgattggtgggaccaatttgacactaaagagaaagttgaaggaccaatggtgtgaaaattttaattgactaaaatagaacttatgcataagtttagagaccatttcgatcaaaactccagtataaaattatggttgtatttccttcatcaatttatacctcgatgggccaaaatggaaataaaagcatgtggaccttaattaaaaactcaatggactccaacgaatataagcaaatggaccaaatccattaccaccttaaaaaggtttagagatgggacctagatgccaattgagtgtctatagaataactctgtttgtcttaattaattgatattttcttatcatgtgtgcgatgcagaggagttgtttccgttggtgccacgggaagacttg

SEQ ID NO: 72060 - DNA, 938 bp, Prunus persica
  Intron number 1 from transcript ppa003869m (locus ppa00386 9m.g) derived from phytozome v7.0 (chr-ID scaffold_5; pos 14941113 to 14942050 reverse strand)
ttcttctgggtctgcttctctgcttctctctcaaggtgacaccaccacccccacctttgtccttttgtactttttattttttttcaagtatgtttcatttagtcttctgtttagatttcatcatttcaggggttttcttcgttctctgccatggtgttcattaattgtcatgcactactttagcctctttgtctgtttttatatgctttcatggttttcattctttggatttctatgataagctcgtttagctgactgatatagtgctacatgaagctggattttgatctgatactttcttctacctttctctctttttgtttctttcaatcatataggaagtgattatcagattccaaaatttgatcttttgttaatcttgtttttctctggcaccaaaaatttgatcttttgtgcaattatacatttatatgactagcaactggaatctttataaaagttgaatcccccagaaatgaaaagtcaatgatataaaatcctcctgatgaaaaaaaagaagatgttattacacccaactggatatgcaactttaactgaaatcatataagttgttcaataaaaaaaatagaaaagaaagaagagatcatgtaaataaaattctgtcttttatttgctctctctctctctctctctctcgtgcttttttcatggatggctttcttcttatgttgtagtatggtggaaactgaatgacatgaaacgcttatcgtatgactcaacttacaatgtacagaatgcaaaatatatgattcatgggattatggaatttgatgcaagattgatattttcaaataccaccatatgcatatagccaaagatgcattaagtctttaattttcttttatttaatatgatgaaaactattcttcatatgatcttcagggagaagggtcaacagatttagcactgctgcagca

SEQ ID NO: 72061 - DNA, 759 bp, Prunus persica
  Intron number 1 from transcript ppa002077m (locus ppa00207 7m.g) derived from phytozome v7.0 (chr-ID scaffold_6; pos 23407663 to 23408421)
accccaatattattaccttgcacgatattatagaggttcgtgaatttcagtttgtttaattgtttatgtttttggttaaagttctgtttgattgccgagaaagctaaggaaagtggagggaaatagtaattgagctattttgtgttgtttttgtttaaacttctctggtttccaggttacagaaaattatgaattttaggtcagactttggttgcgtttgtgttgtttggaaaattcaaacattgaactctctgtgtcggaaaattccaagtgtttactaagcttcacattaaaatatatggaatcttcctatttcctttctgaagacaaagcattaaaatttccagggaatttgtactgtgcattgaaacaattgcattttcttgttgcatttaataagaaatgtgaatactttcaaccgaaaatggcttccccagggtactaacttctcttaattaaaaactaataagactttctgcattagttgaggaaagtgaatagggtaaagcttgcagaattggagaacagaataattctttttgcacataaatggaaatacacctttgtaattggcaaatagataaaattggtgctctgctttactttgttctcttttatgagtggggaaagaccaatctcactttttcggtcaattatcacctttgaatcacctctcattcctttttttctctcataaggcttgtttcacattcacttaaaataggttcctgggaagatcaatctggtattggagtattg

SEQ ID NO: 72062 - DNA, 754 bp, Prunus persica
  Intron number 1 from transcript ppa022818m (locus ppa02281 8m.g) derived from phytozome v7.0 (chr-ID scaffold_5; pos 17899515 to 17900268)
tggatcctcagctcggttctgctaaccagttcaaggttactttcttgcttccgtttttcttttcaagtacaaaactttgtttataatctatttacttatttgtttttcttttaagaaagttgcctgctttggtactaaatggatgtatgaacttgcagaagcattgacccatgatctctctctttgggttgttatagttagttgatttgtattgccctgatatttctgtagctagtaatttttgatcttttaccatgaagagcaaaaaaggaaaaaaagccaagatccaaactttccatgatatgtactgcttacagtatatttccttttgcatttagtcttcaaattggagctcgatatctggcatttcacctaggttggtgtcgtaaataagcttgttttatttgatcaattggggttttaccaacttttctgtttccaattctgggattgcagatcaccagatcacatgctcaatatgaaaaaagaaaaaatgcatgtgcgtacatcattatatccatcatgtgtatgtgccggtgttgaaatgctcctaattacttaccggaccaatttaaattgcaatttgagttgcttcttgatgctaactccagctaaagaagtacaaggttaccattcagtgccttagtgttgccccacaatgagtcataaagcaatagagatacaagcgcagcatttatcatgagcttcaccttattatcatctaatttttgacttcatataatatacaggagac

SEQ ID NO: 72063 - DNA, 745 bp, Prunus persica
  Intron number 3 from transcript ppa007464m (locus ppa00746 4m.g) derived from phytozome v7.0 (chr-ID scaffold_1; pos 40461706 to 40462450 reverse strand)
gcagtttttttcaggttaaaaaagtagataatcatattccagtatgcttagtaattattttagtgcgttaataaaaaggttagtgtatgcttaagagccaacacattggaaggcactaagggaaattggaatatactattccaatcacaccgtgccacgtcatcgttttgatttttttttgtttttttgtttcccttatttttttgatgaaatcatggtcgacatgatgccatcataatcagttcccacataacgtgaaagaaaaaacaattacaccttttgtttttttgtgtggaatcttcttgataatttttgtgacagatgatgtaagccttggccagtacacgtgttatttgctagaagaggaaaaagaaaaaaaaaaacccaaaataaaaagttgggattctctgcttatgtaatacactgcatgcttgaattatataaaaccatattatttatttaaaataattataatattgtgagtgcaagtatgttcctagaataaacaatcatatcacctagatatgttttaatatttgttcttattccttaaaaatgtcgttttcgtgcatatctatgtacgaataatttcacaagaatcatattaatatttgatctagtttttctaattgaattatgatatataatcattaataatgattagtttgcctaagtcgtatcctaattatgttattattttgattaatcaggttagagagtgtgaacgttaagaagctacatagcc

SEQ ID NO: 72064 - DNA, 419 bp, Prunus persica
  Intron number 1 from transcript ppa007464m (locus ppa00746 4m.g) derived from phytozome v7.0 (chr-ID scaffold_1; pos 40462688 to 40463106 reverse strand)
tgtgttattgcccccttcgcctttgttcttgaaaggttctctctctctctctctctctctctctctctctctctctctctctctctctctctctctctctctctctctctctctctaccaattatatatttgttttctatccctttacaaacaaccatgcatgcatgtataagcgctatgtcaccaaaactatatttcaaaagacttgaattatcattagtaccaagaaattgttaatttgtgtcacagattcaaacaaaatcttcgattcatatttacaatttgacaacatatcagattttatgccgaaataatatttgtatattaatgtgcgtacatgtttctatataatatatatatctcttattttgccctactaacttgaccacattctctcttacaggaaaataaggccaaga

SEQ ID NO: 72065 - DNA, 799 bp, Prunus persica
  Intron number 2 from transcript ppa024124m (locus ppa02412 4m.g) derived from phytozome v7.0 (chr-ID scaffold_3; pos 19818809 to 19819607 reverse strand)
tagttcttgggtacgatacaatcaaggaatacacggtgaatcttctcttttctttgaaacttttgccttctcttttgttttaagcattattggtaattctaagtgttctaaagcttcaagtttttgctacgagggatccacattgctctgtgtctctctaagggggacaattgtaattggattttcatttttggaaagaatctgactagctataactagtagtgattaaacataattctcccagataatttgattagctattgcctaaaagcttttagggtctctatcaattctagaacaccatgatatgtacatggtttaacggtcaaatggaaagttggaaacttgtgattaactctgctggagcattatctgtacaaaaatgtaattttgacagaaagcattatccttacactattggttagaaatcaatctgggggacatcggctaatggccggcctagttgcccaagttggccatttggaaagtgttgggaagagtatttttcttttcaagtaaatcatatggggagcgtttgattagcttcctgttcctgcatttctacttcatacagcaaaaaaaatttcaattaatatttctgtcaaataagacaaaaggatgatcttgcagaacaagttgaaggcgttgaaatctagttcctctgtgtatattaaaagacaagattccaaatggcatgtgaagtaaatttttttaatgttaaaaaaatacaaaaaaactgcatgactgactgtaaacacgtgaaattagaacttgatttgtaattcgaattttttgcaga

SEQ ID NO: 72066 - DNA, 953 bp, Prunus persica
  Intron number 1 from transcript ppa019332m (locus ppa01933 2m.g) derived from phytozome v7.0 (chr-ID scaffold_3; pos 20038065 to 20039017)
gacctgatcccattcataacaggtacatttcttttccttcatcaatatttaccagtatatttttctttagcataagtattgttgctgaaatatgatttggacacgcacactgagactgtcagatagaaaaccaatcaaaggaaaagacagatcacagtaagcagaaagagaatatattgtttccataaattgaattcatatattcgctctcagattttcagagacttgatagtgaatttttttacatacaagtggctctgccatcttcctggaacattggttttctttccttttcggttaaaaggaaatgcatctctgtttctttatttgtatgttagtatctttcatttttgattggatagtgggtacataacaagaagatgaagaatcaaacttggccaaggtgggttatattttatattatcagtcagcttcagtaaaagaaaccatcaagaccctaaaattgagattatatggaagttgatgactgtctgcctctttattaaaagcttctttatatatcaaactttctcttatttttataaggaacacctaaaggccttggagaaagaatttgacaacttttgttagcggagggaacatgtagagctaactcctcccttttgttttaattatttatgttaatttattgaaagttcatccactctttttgccccattaggtgtcgaatgtaatcccaattgatttttatccactaccccattgaacaaattatgttacagtgtaagcacaaaatagaaaaagggttgatatttctgctagttttgccataccatggatataaaagttattcatttcatccattaaggagaacagcatagaaaaaagaaaaagaaaaacagagaataaaatttctttgcctctcatctttttagtgcctcctactatgtatattcaggagagcagtgaagactagacaaccacctacctga

SEQ ID NO: 72067 - DNA, 489 bp, Prunus persica
  Intron number 1 from transcript ppa001131m (locus ppa00113 1m.g) derived from phytozome v7.0 (chr-ID scaffold_1; pos 38022745 to 38023233 reverse strand)
tctcagaccaactgggaagctgataaaatgtaagtttcttatgcagattggtcagtttctctctctctttttgtctctgttccctatctgggtttctgttttcttctcatttgctggccccctcttgttgtttcctggtcgatttgggttctgggtttctgggatttctgggttttgttacttgctgcagccgtttggattcaggttttgttctttatcctgtttccatatatttatatgttaatttcagtcagtgtgcgtattctagggtttgtttcttctgatggttttgagtttgggcagttgttgatttttaaaactaatttgcttcacttcttactgtagaatttgggtttctggacttagccttgtctagtgcattacttctcttcgaagggctctctataattctattactcgtactaatatttgggtttttattaaccagaatagtctttaacatctgtttctgattgactaacaggttag

SEQ ID NO: 72068 - DNA, 707 bp, Prunus persica
  Intron number 1 from transcript ppa006164m (locus ppa00616 4m.g) derived from phytozome v7.0 (chr-ID scaffold_4; pos 18649296 to 18650002)
aagaccattgttgaagttgttcaggttagatttggctgtactagtgtggtgttaatttggtttaaatttggatatggttttgaaattttataattatgttctacattagaattgttataaaagtgtcatatggtttgtgttatattatgatgttcttgtttaagggaaatgtgagatagagtacgttgttgctatataacatgttggttttgtttgtgatgcttcttcttcttatcatttacactatgaactttaaatggtaaattgagaaacaattggtgagttgattgttttcctccatcctcatattctctataagcacttagcagtgctgctatgtattttgttaattggtttgagtttctcgttgttgatgttgaaagtaactttactatgcgaacgatattggtgtctacattttgttttcattggcttatatttcgtttaggtgatatgccggttatttggacatttggataatataatatgctggaccatgttattactagaatataactagttcctgtgcactgaatatacttgtctctactataacataactagtttctgtgcatgttaaattaattatctgctgctgacacttctattgatcttcattgattttctgttgctggatgatgatgtccagccttctgtgatgttattgtgaaatactctggtttatatagttgcattttacattgcag

SEQ ID NO: 72069 - DNA, 901 bp, Prunus persica
  Intron number 2 from transcript ppa006767m (locus ppa00676 7m.g) derived from phytozome v7.0 (chr-ID scaffold_2; pos 26063875 to 26064775 reverse strand)
cacaaaaactcggtgagtgtttgtcatgttaaaacataccttttggtttacaggaattcatactgtcccttctcaattagaggatggtttttttgttccttttgtgcttctgtctgattcagtgcaatattttaattagttacttctggtgaattttatgagcttcatttactgagaaattgaccttagcaccctagcgttagaagcaaaattggacaggctgttatcaattggttagagttcaccgaggtgatgctatcaaaattttgtttggttaaaagtttacgcaagaagatgctttatagggtagaaccatttagattttctttggttttggggcatacaatattcctgacttctctattttcgtaatatctgtgttgcccttgtacgctagcgaaatcaacacaaataaaaaatgaccatgctagaagaattacaaactttctacttactaacctccacacttgttacaattgcttctcacaacctactcaactaattaatcaaggaaacaactattttatcatgtcattaggacttataatgatctgtagatatcctccatacttctctgcatgaacttctcccaacctactcaactgataaatcaaggaagccaattattttgatactcatgtcattgggaattgaaatgatatgcttagaagaaaactatgttctcatctaactagttgattgagacggctggccttttattttgaagtaatcctttcgtagacctttagccatacttgtttgttgcttttacctcaagagatcaaattatgcttgtgttggattttgaagttttcttactcttatatctactgtgcttagcatgttgtttaactattcttctgcagttgctgctgtgtttagcttggcttataaactccag

SEQ ID NO: 72070 - DNA, 508 bp, Prunus persica
  Intron number 1 from transcript ppa008882m (locus ppa00888 2m.g) derived from phytozome v7.0 (chr-ID scaffold_1; pos 41411326 to 41411833 reverse strand)
cgaagactgtgagcagctcaaaaaggccttcaaaggttccttctttattatttttttgatcttttactccctcgcatcatttcttgttctgatcataaaccaccccatattttgtaattggctttatgattgatgattgatcaatcccatccatttcaccgatccgattgttagtgttagatacaacgtaaatgaatgtgattgcttacttgtgtacaacggtgatgctttcactctgcatcaaagctctgtttgtatcagaagataataatgcatttgggataatttatctaaaaagaaaaaaacaatgatcggtacgtatagatttatagaaggtttgtaaaggacctgatttgacatgaaaatggtattttgacgtgaataaataattatataaaacagctaaaatagtttagaccagagtttatcttctttcttttatgtgacttttcatgattggggtgtttggtttcatgtaatcttgaatttttatcaatacaattgcagg

SEQ ID NO: 72071 - DNA, 336 bp, Prunus persica
  Intron number 2 from transcript ppa011176m (locus ppa01117 6m.g) derived from phytozome v7.0 (chr-ID scaffold_1; pos 11081081 to 11081416 reverse strand)
aggtaatcttcgtttttcacaattgcccatatgggttctttgctatgtaattattgattcaatgagaatttatttgacagtcaagtaatttacttttcaataatggattcttgggtatttgattggtgggcttgtttgatatgtgttggtagtttgtgagagggattttctactggaatttgacaatctgatgttttgtttttcagttttgagttgaagttaaacttcagtttgcaatcattaggcgtttgcaaataagccccattgggtgatacatttatatttttctgcttgttatttgtagggaacaggcctttctgccaaagaattggagat

SEQ ID NO: 72072 - DNA, 436 bp, Prunus persica
  Intron number 1 from transcript ppa004120m (locus ppa00412 0m.g) derived from phytozome v7.0 (chr-ID scaffold_2; pos 1011168 to 1011603 reverse strand)
tccaccagctggaagttgtcacaggtttgttaaactaaaacagaggggaggggggaaacgggtgggggcggtggggtggcgaaactattccgtggtgatatatatatgtatatatatatttgtatatattacaccacggaagaaaagaccaacgtcaatgatcagacgtggcaatgccatgggaaaattatagtattgtaacttgtattttgtcttgtctgaatttttaatttcaaactgaattgtgagtcgtcaggcttgctcattaagcatgtcattactttgacctttggtctcatgaaagatccactggatatagctcatgaaaaatttctaagtaattagtttattgcgtgcaaagcatcaattcttactactagatgaaccaaacatgcgtgcaggaaaaggggaagttataaattgttcagaggagcag

SEQ ID NO: 72073 - DNA, 621 bp, Prunus persica
  Intron number 2 from transcript ppa012405m (locus ppa01240 5m.g) derived from phytozome v7.0 (chr-ID scaffold_8; pos 8193747 to 8194367 reverse strand)
tttcaggcttcccggctgcctgttctagtaaaattgtaagattcgacatatgggtttgttttgcttcagttctaatttcagctgaaatgggaaatcggattgtgggcttgtttcagtgcagaattgatttgattgtgtatgcgtactttgtatctttgcatgtaactggatcaagtgatagcatgtgtgcgtgtatatttgtattgaattcatcaattccatgtctacagttttagctttgtttgaatgttcgtacttcatactcgccaaggatagcagttaaattcttttaattggtaataggtatttggatccttttaacaaaatggattgagatactcgacctctgtgcgtaattatcccaacacacatgacgattgtagacttgtgtcagtgcagaattgatttgattgtgtatgcatattctgtgtttttgcataaataactgggtcaagtgatagcatgtgtgtgtgcttgtgcgtttattagtattgaattcatgaattccatgtcttcagtgttcgcttgctttgttcaaatgtttatacttcgtactccccaaggatagcagttaaatgttttcttttaattggtagtaggtatctggatccttttatcaaa

SEQ ID NO: 72074 - DNA, 1027 bp, Prunus persica
  Intron number 3 from transcript ppa002259m (locus ppa00225 9m.g) derived from phytozome v7.0 (chr-ID scaffold_1; pos 42058830 to 42059856 reverse strand)
tctgatcagttaacttttaaagagaaaaggtataatgtttgttcaagatcagtcttattccttttttagttcctgtcaatctttctgagtagagaaactagttatctccattaaatatctattttaataattttcacacttctatgttgttgctctgctttgaaagttctgcttctgcttcagcgtttaaactcttgagctagcccttagtaggtttcaacttgcaagcttgaaaagcctatatgcatgtatgtataaaactcaccaagatcatgctcttattcttgtaaatgattgtacgacttataaataattgaggtatgtaaattcctgtttaaaaagttgacacatatgagatgaaacgtttggttaagtgcttctccctgccatatggtaggtgctgtaatagtttcattagtcaagcttttaaaatgtcgagcttcttgttgatcaatttgctttctttttctttttgggtttcaaaacagtcagtcagctatgtttttctgatgcctttttttacgggttctgatgtccattttaatgacagtaaacatacaattattgtaatctgaaactgtccatttgaatgaatgaagctcagattaaatcacttaatttttaagctccattcattcatgtaggtgtctaggcttttttagctgaaacatgtctctgtaaagttgctgtatatggctgagaatctcattttctaaggcaacattatctgctttactttcgataatgttgaaaacttgggataaactaacctgtaattctgtatatttcccttttttctttatgttgtttttgcacgacttgcttaatttgtagaagtattcatagtagactcgattgtccgaataaaattagtatatgagaaacttaaatccttcacgatttgcatgcaaacattgatgcttatgtgctatttttttcttcagttgaaagattggtttcattaacgatttaccttgtacttgaacttgcagttgtttgttcctggaaattttgggacttcgttttg

SEQ ID NO: 72075 - DNA, 722 bp, Prunus persica
  Intron number 1 from transcript ppa023213m (locus ppa02321 3m.g) derived from phytozome v7.0 (chr-ID scaffold_7; pos 14765175 to 14765896 reverse strand)
gcactttttaattgccgttgtttattctgggcatagttataatatgagaaaagatgaataatcatgggatagcttgcatgtttttttcttttttatattagtttgatttaggtatttatttcactcgtggaatcattttgctctattcattaacttgaatgaaaattagacaactttatagctgcatgtcgcatgacttgatataatcatgtcaatcaataacatcatagctttctagtattctcttgaattgtattttgaaacctataggataggggtaaatttgaagagagctaagtttttagaagtaattttacaaagggataaatttatttttaaaattttaaaaataaggtgaagggaaaaataagacaggtgagtggaaataacagtactctttctaattttccctttaaacatttgctcactcttgctttttatgtgtttttaataaattatttttatatatgtgtcaaaccgtgatataagaatctctccttctgagaagaagaaaaaaggaagtcctacaaaggcaagcagcgtcctacaaataaagtttgttaaaggggaaccttcctttcatgctttcttacttgcagtcttgcaaacaacaatattgaccctagagagcaagaacaacggttcgtttcttcaactcaatggagtggtgttcttggaattttctagtttattttctcatcttcttgttaccagctctgctc

SEQ ID NO: 72076 - DNA, 716 bp, Prunus persica
  Intron number 1 from transcript ppa022388m (locus ppa02238 8m.g) derived from phytozome v7.0 (chr-ID scaffold_8; pos 11152314 to 11153029 reverse strand)
ggctcaccagagacaatatcaaagctattatcgtaagtcttacatgaaaatataatgaggattcataatatctccatattattatcgtcagcaaaatataccgacatgttgttgttgcatttttataatatttatgtgcgtgtccattctttaaataatatatcctgcatagagaatttttgatatatataacagtccatacatagatatttattaataattattttttcaattttaagaaaacctcaacggaatgagggaaataattattcttttaataaacattttaatacattactataattttctttccaatattattaactaccaaacccccgttctactgatcacatcgttctccaatattgttgccctttatttgaggtgccaactcggtctaggggttttcctttttatttattttaattatctaaaattgaaattttttttatttatttaggtaacttcacaagcggattacattgtaattaatattttgtaataggtgggtcaatgcttttttccttttctaaatcaaaagaaacaaatctgatttcttgtgttttttactatatttactcagaatttatggtaaaataaagcacattctcatttctcactcagaagatcaatattatgtgttcaattttggtaatggaaattatgtgtttaattatcactctgtcacttctgatttaccactttgcattcatagg

SEQ ID NO: 72077 - DNA, 632 bp, Prunus persica
  Intron number 1 from transcript ppa005463m (locus ppa00546 3m.g) derived from phytozome v7.0 (chr-ID scaffold_2; pos 26049224 to 26049855 reverse strand)
ggtaaacccgctagatctcacctgaatatcatctctctcaatgtgaatatgtttatatacgtatctgtgcaaatgtctgtctctggatttgctgaattttgatccgatctgatggtgttagtaagttttcttagagttcttagagttcccaagtggaatctaaagtaaccatttgtgagatctgtgtattcagtctgttttctgatagttttgattgatttgtacatgttttagataagaattttggactttctttattgcttttctcaaagaaaaatgatggtggcgttgctttcattttagctattttctttttgaattggtgagtgggaagttggatctgggctgcatatggttgtaatggcttcacatattgagacattagtctatctattgcggcagctgaattcttgttacttaataaatgaaatatttgttgtcacagtcagtagatgatatgtgcatcatatcttgattgcgtttagtacttaaaaaaaattacataactttttcaatttgagtgaattttgccaattatgttcgaacttctctaattgaatgaaactatggtctaaattactgacaaattaatgtttatgtgccaatagccggggactggttgcagggtcctt

SEQ ID NO: 72078 - DNA, 807 bp, Prunus persica
  Intron number 1 from transcript ppa007673m (locus ppa00767 3m.g) derived from phytozome v7.0 (chr-ID scaffold_1; pos 36554022 to 36554828)
cctcacttgtggccaagagggtgagacttgccgaggtatggaatttatttcttgtgtttggaagatggagaaaattagtatacatagtacatagtatgtagactcaagtcataaaaataagttgatattcaaaggatgctatttgcctccttactggtaaggacatactcctcaattatgtgaattatagtttgacatatatacaaaaataattcatcaaaaacacacaaaataaaaatttgtgcacagatgtcatactgctattggtaggaatataagagctcctacttatctaataaggagggaaatattttccatattcaaatgtttgggggaaaaagattaaatcatttagtccaaatatactttctacacataccgaaaaagaatttatatgattttgaatcaaaatatcacacttatcgtaggaacacacaaagaaaaaataggtattacttgtacaaattttcttttggcttcttataaattaaaaaaaaaagttttaaataatgtgtggatatttgtttagaaagcacgtgccagatccctatataaatccctaacttggcctcttgtcaattggcagtgtccgtctctaagccaaaaaagaaaattgtcctcgtcaacaataccaatatggattcaagtgcctctgttgtcttgtcctctccatgcgcaaagcttccaaaccttgaaggaaaccatggcaatatcgaaaagggaggcgttgctccttttattgactcagctttccttcaaaaacaatcccaagtgcccactggtttcgtttggcctgaggcagacttg

SEQ ID NO: 72079 - DNA, 574 bp, Prunus persica
  Intron number 1 from transcript ppb022844m (locus ppb02284 4m.g) derived from phytozome v7.0 (chr-ID scaffold_8; pos 15905089 to 15905662 reverse strand)
cgaaaaaatcgagttgaccaaaaagtcaacaactggtcaaaaatcgaactgaaccgatttggaccggttttggatccggttccatgtcttcaaaaatcgaaccgaaccggtcaaattaaaaaaatatataatttcaatatatatttatatttaatgctatatttttaatttcactaagaaaaacctaatatttatccaagtttaatatcaaaatatctatcttttctaactttaatatttattttttatatgaaattgaataatttgttaattttcaagtaaaaaaaaaaatatttcagttgagaattgcattaaaaaacaatttaaaaaaataattttgttaatccggttcaaactgaaccgaaatcgaaatcggaccgaaaccggttcaaaccgaaccagatagtttttgaatttttttaattaaaacagaactgaaccaaaccggataaatagtaccggatcagttctaatttgaggcaaaaatcggtccaaaccgaacagtgcccacctctacccccactcgtgtgacgaattttcaagcctaacacgtggacaacacattttgggtgac

SEQ ID NO: 72080 - DNA, 466 bp, Prunus persica
  Intron number 1 from transcript ppa000021m (locus ppa00002 1m.g) derived from phytozome v7.0 (chr-ID scaffold_2; pos 19445180 to 19445645 reverse strand)
attcggccagttccaaaggtgcgtgagggttggaggttgttttagtttggttactgagaaatggggtgaaatgttaaaggttttgaattgacagcaagacttgagtgaatgtctagtaacagaaggtgtgtaactgtctgcagtaaaagttccatgtttcctgattggtagctaagaaaattgagatagaaaatgaggcgaaatgttgagattccgaattggcagctggaatttgcatgtatagtaaggaggataaatgttataattttcagtttggtttatgagaaaacgaatgaggagaaaacaaagtgaccttttgattacaactagttgaaattattatggttttctgcattccttaagtaatttatatgcagtgcatctggattctgttcttaatttggtttgtatgtcttaaatttcaaatctttttactcatattcaggttctttttgttggagccaga

SEQ ID NO: 72081 - DNA, 1022 bp, Prunus persica
  Intron number 2 from transcript ppa012413m (locus ppa01241 3m.g) derived from phytozome v7.0 (chr-ID scaffold_5; pos 4950393 to 4951414 reverse strand)
aagccacgcctgtcaatcttggcaaaaccattcaggttcctctgctcttcaccgtcgcattcctaacctccttgtcttcttaattataatccatctcgcaggctcctagttctctccagtcttcatgatgaggacatctttgtcaaccattagggtttacaaaccacagagatggaagagggaattattaattagtttcctaatttatttgttagttcctaggttctctaagttatccagattcattaggatttttagtttttccagatttgagtaggatttctaagtttgctattttatttggattaggatttctttcctaaaatatgtttactatgataaataccccttctatgtaattcattatgggagttgggatttgagtattgagtaaagtttattttccagagattgaaaattacttggtgtgaagccaaacccctggacagattccagacctatcccttttgttctattttctgttttcaattattttcgcttccgctaaactacataaattctcaattcacccatatcctacatcacttcatcatcaagtatcacttccaattaactgtaattacaactgctaatacaacaatagttgtagtgtaggtgtccaaagaacaaattacatttagaaattgtatacggttttatcttctctacaacattattcccatagggtcataaattttccatctcattctttccatcactccatttacagaccatctcctactggaaatataataatcatgttggcaccatccagactatctcgccaccatttcaaactagggaaatgtgaatgccaataacaaattatccaaagcaggaaacaactagggtgccaatgccctccacattggtttttttatatatttatttataaatctttcatcaatttatcatttcatttacttaatatattcaataaacagattatatcattcaaagttgttttgatttgacaattttgggcaggtttgggaggtgagactgtggaagattaatccttc

SEQ ID NO: 72082 - DNA, 538 bp, Prunus persica
  Intron number 1 from transcript ppa003231m (locus ppa00323 1m.g) derived from phytozome v7.0 (chr-ID scaffold_5; pos 17757426 to 17757963 reverse strand)
ccccttaccggcctcaccttcgccgtttctgacgtgtacgctctctaccacttcctttgttattcttctgtttgtctcctgataaagttaaaagccaataaaaggatattataagattgaagagtaaaaacaaaaatacggaacttttgaaaatatggtctttgcttttgctcagctttatgctggttgaagtaatgaaatggaagttgaggttactattattaaatagccaaaagaattagttgaattggcttggaacccagatggtgaaaaagcctgaaatttatgtcttatccttttattttctgtatgttgtttttcaacgtaggatgcactaataagatgggcagactggttttggttattcaaaactaacttattgaacttgagttatgttataggtttagtttcattgtactttattattttgatttccttatcaaatgcaagtaatttgtttcattgtgttatagaactatttgtttgccttaaagtggataaatttctatcatggttggcagatttgatattgagggac

SEQ ID NO: 72083 - DNA, 637 bp, Prunus persica
  Intron number 2 from transcript ppa016200m (locus ppa01620 0m.g) derived from phytozome v7.0 (chr-ID scaffold_4; pos 15840012 to 15840648)
ggataaagaaggactcggttttggcttaacaaaatgtaaaagccgttgatgaaattttgagatgcttgttaaattcaacttgtttcaaatatcaatgtaagatgcgattctgtttattctgtgttttttatgcctcccaaatgtcgtctgaattaaagaagtgcctgtagcttttacaaatctaaatagtttgaagtggtagcacaaggacgaaattggttgtatgcttttttatagtttaatacatggaggtgcctagtcatggttcaatactgtcttattctttgcaatccttccctctttgtttcatcattgtcatccaacatctgtgttaacccaccatgtctttttgttaagattggtgactgatgaacatctaatctgctgataggcgcattagctacaagacttggtaatctctaatggatggatcccttcgtaccattaaattttagggtctctttaagtctgttcatgacatagtcaataatgaggcacgcgcatgttggaaagtttgtagatttaatgtttatattggatggggcattgcttgatgcctttaagatgttgacatgatgatggaatgacttagtgactggttgactttctttgtttttcttttgttgagcagttgttg

SEQ ID NO: 72084 - DNA, 645 bp, Prunus persica
  Intron number 1 from transcript ppa018324m (locus ppa01832 4m.g) derived from phytozome v7.0 (chr-ID scaffold_6; pos 3099153 to 3099797)
caggagaagcaggtttgacaacacatgcattctgtgagctgcatcatcaccattatcattatatgattatatttcttttttgattggctctgttttgtaatgtactgtggttatggcttctctttaattttgtgttcttttaatgaatgaaaatatgaacactgttttctgggtatctgggttttcctttttgatatgtattgcttgtggagttgttgaagctgaacttggttcattctgtttgtgctgcaactacaatgttttttctgattgatttttgaaccaaaataatttggatagcttcaagtttttattacatataaataaatcaataaaagaggtattattgcctgaatgctttgatttgtttgatagtatacaagaaattgtttcttttctcagtccatgtgaatactgaaacaatctgcggggctcaccatagcacgatgctatttcttgatgttgtgttttcaattccgtaaagcaaattagttaaatagataaaagcaaggaaaatgtgtgtgtattaaacccttttggaaatcacaaaatgaaaattatcttttctacttcttcaagttcttgtagttctgatattcctaattatcaggtcgagcactggaagaactcagaggttctatctac

SEQ ID NO: 72085 - DNA, 325 bp, Prunus persica
  Intron number 3 from transcript ppa012416m (locus ppa01241 6m.g) derived from phytozome v7.0 (chr-ID scaffold_5; pos 10698195 to 10698519)
aactatatcaaaagtataaagatcaaggtttgcatttccaactaatattgttctctctttggaacaagcttatctgctgcttatttcattttcattttcttgttaatgtatatactcatttttttctcatatcaaacaggctaattttatgtgacaaaaaagaattcctgagtttgtaatggggaaatcttctcctcatcataaatttcatatagcagtttgaaagttcactgaaattacactttcctgttgtgcctttacttttttttccctttgtatgatataccgggggtgtcgatgcaggcttggagattctggcatttcc

SEQ ID NO: 72086 - DNA, 886 bp, Prunus persica
  Intron number 4 from transcript ppa006123m (locus ppa00612 2m.g) derived from phytozome v7.0 (chr-ID scaffold_1; pos 39138146 to 39139031 reverse strand)
tattgtggactccgggtttgagcatccgtctgaaggcaaacttttaaactcaatacttattgatatatatatatatatatatatattttgcgggtttttgtagccgaaaacaaacaatgttatcctgacccttagtttgtcagttaagcccatgatcttattttcatatatacaagtatatttttcattccagtttatgtcataaatgttcatcagactaattattttttagttaacgtgtggaaatttggatggtttcttcttatgacatttcaaacctgtgttctctttgtttcatttggaatttccttttagatacggagctgctttgatttagatttagtttactcactgcttatcagtttttccctttccaagtcaaatgacgataaaggatgaatttgccctttaagaaattaaatcctaagaaggatgaattcactcttagttatcttaaatcctaaaaatgattgttctgatgtatcatgtaaattcttttaaatgcacaaatacaattgaaaatggactttccacccttctctaatgggaagggtgcttcctggattgctatgccctaggtcagataatggtccttctctcctaagtagagtttgcacatgttttggaaattcgcttccattataaggattcagtagctttttttttcttgttctcttttaccttctacttgtttgttttttatgtgttcaattctaattcaatttgatgcatgtttgtgcaggtaatttgttctactatcataatcttgaattcagagaactagtatgcttttggtaaagactttcataaaaagattggagaggttatgttttacttaccaatggttccatcgatgcggttttctttggttcttcatcagtgcaac

SEQ ID NO: 72087 - DNA, 783 bp, Prunus persica
  Intron number 2 from transcript ppa011254m (locus ppa01125 4m.g) derived from phytozome v7.0 (chr-ID scaffold_5; pos 16145755 to 16146537 reverse strand)
tggtcgctgcagacattgatcaggatcttagtcgggtatggtttccttgatcaaattaaagttatatacatcatgaatttaagtgcatacgaaagataagacttgaaagtattatgttcccagtattgatgcagttggttattgattagactatctactaccatttatcatgattaacaatttaatttttgcattgcataccaacggagttgatggtttttgtatagcaggtgatcttgttcttacaggcattatctgtttgtgatatgcctattggtttctactgttggtcttgatttgtgttgataattccccatcgcaaaccccttgctcttccttctggagagagtttggtttgattcctatataggttttttgttttctttttctgtaatcctggtgtagatctttatctaatttggggatggcaagccttgtccatataagagtttatcaatttaactttttataagttacaatgaaatgatgatggaatgtatagtacaaacaagccactaatggcagtgatgataaatatagtgtatcctccagtactcttaattgtgaaaattgacatatcatactttctccaatagcctccttcactattctattctcttcagcaagaaacacgttttagttcttgagtcctctttcaacaactcctatggttttgttattgttgtttttggtattaatggtgatcttctttggtagaatgaacaatgtcattactttcttatttcagggtgaaaaacttttaggaagtcttgggggcatctt

SEQ ID NO: 72088 - DNA, 822 bp, Prunus persica
  Intron number 1 from transcript ppa011254m (locus ppa01125 4m.g) derived from phytozome v7.0 (chr-ID scaffold_5; pos 16147012 to 16147833 reverse strand)
caatttctcgggtatgcaaatctttttcttttaatggattttctttgattctggttctccttttttattattttctccttttccacttgggttttctgtagcttctcttgctttgttccttttttgttgttatctaacggtcaacttctctatttaatttcaagagcccatttctggctatctctacatgggtttctgattttctttattcatctactctgtttggttgctgagaaaagggaggaacacaaaaaggaaaacggaattttggattcttttctttgtgtagttggggttgttcagtaagaaggtcaagtcaaccaagtcaaattgtttagttttctgggataccatatgatgaattttttttctggaatttgattcttttccttgtttcttctgagcaaccaaattaagcaaatgggttggttgtgtgtttgtttgtgattaaatattatagttgtttttagtcttttgatctcgttttaaagttccaatttttcgaaagttcttgttgtaccgggagattgcacgacccaagtggtcgtgggcttttaaggaattggggcaaacttttcaatttgtgtatgttttctttacaagtttgtgttgcttgatttggtgttctcggttacttccttgaaatttgttcttgagctgtactgcccaattttcatttgattatgaaggttttgaacttctgctaagttggctcttctttgtttgagtgctgatgcttttggtgtgttgccaacatctcacatattgttcttgtttgctcttccaggactgctgttgatctttgtacagatttctaaagta

SEQ ID NO: 72089 - DNA, 695 bp, Prunus persica
  Intron number 1 from transcript ppb016001m (locus ppb01600 1m.g) derived from phytozome v7.0 (chr-ID scaffold_5; pos 2737600 to 2738294 reverse strand)
caacatcgactcatcttcttcgaatcttgacgcaggtaagtttttctggtctttccctttggatacctctcttattccttcttccatctctttgatttttgcaaatctcctcaacaattttgactgtgctctgagaatctctccttccttttctctgttattttcttattctcttctctaattttcatagaatctgtagtgacatatatatatatatacatgatgttaattggcaattaatttgcaattgggtatttcagaaaacctagaaattcaaaagtagagtagacttttggcatgaatcttgacccaggtagtgaaagtttgggtatagctgtttgtgtggttttgctttggttattgtcaaagctctggttgttgtcaaagtctgggtatagctctggttattgtcaaagctctggttattgttatcataaattctctctcttcacaaatcatgcgatcataacagaattaatggtttgaaattgttctgaatgatctggaatagtatgtttcttttaagccctctcgtgtcaagcatatggatttttgtcattcattttgttttctcatggtagagcacaaagttgcatttagtttcctacaattttcacatcagcactagctgaattattttttaattgtaaattgttccaggtggcggacaatttctatagacccaatttgaagaa

SEQ ID NO: 72090 - DNA, 726 bp, Prunus persica
  Intron number 1 from transcript ppa004894m (locus ppa00489 4m.g) derived from phytozome v7.0 (chr-ID scaffold_3; pos 6216001 to 6216726)
ccgacgtcgtttccacctcgtcctctcacctccccgtaagctcatttcctttcatttcatttcatttcatcttgactgcccgttccgttgtgtctttcgatgtgctaagtaatgtttcggccctaaacttagtaaaattaaagtgttaatatcaaatttaagggaatgtttagcattttctgttcaatgaaaaaaatgcatggaaattggtagaattgggcgtttactggatttgtgttcgtcaattatgaagcaaaatttgaggaaattttaacagtaaataaaatgtttctcagcatccagtaatgtggagatgatttgcgaagaaaatgataggaaaatagtttaagtagcacttatgttaaagtttctttaacaatacaaagcatattcttatcctgtgaactccatattttgatgactacaaagagcattaaaaagatccctttctagggaggttattattgaaagaaccaaacttgttcctttctaagaattggtttttttggctagtcaaagtctaaattgattttccaattgttcaagaggtgttgaacttccgtaacttcttccaacaaatttattgttccagagtctataaaaatgtcgaagtttgttagatgtaattgaagaacctggggtaaagcaaaaacgacaatgcaagattcatgtggatgtccactttatgtaggttggaaggaagccacttgtttgtgtgcttggagt

SEQ ID NO: 72091 - DNA, 448 bp, Prunus persica
  Intron number 2 from transcript ppa008696m (locus ppa00869 6m.g) derived from phytozome v7.0 (chr-ID scaffold_3; pos 2512422 to 2512869 reverse strand)
aagtttcaggtatgactatgtttctgcattcgtttccctattttcttgtctatttttccgagttgttgcaattgcagtttcctgatttagcatgtggaatggatgaacttttatttttattttttggtggaattgaggtgtcatttgttgcatatcgattccttttttggttagagcttataaattttggtacttgtgacgtggtttctatcattacgtagtttcaatgtgcaagaaatgattgtgcccggggcagcatttagcaattctattcgttgcctttatttcatgttacttaaattgacatgctacaaatatatgcctgcagagttttgatttgttttttctttctgcttttgcattttggttgtggacactgatagtaattggttttgtgacgttcttttactcagggactcccgtggattgtgtttcattagcattatct

SEQ ID NO: 72092 - DNA, 1022 bp, Prunus persica
  Intron number 1 from transcript ppa012125m (locus ppa01212 5m.g) derived from phytozome v7.0 (chr-ID scaffold_1; pos 44009772 to 44010793 reverse strand)
gatctcagccaggtgagttgactcggttccacatccaccccccttcaatttattgcttgctatatcagatgctggaattagagatagaattaatacactctttgatgcgttttgttttgctctgctatacttgtatgtttatatgtttttcatttgcatttgatgtatgctgggttaaatattgggattacgagggttattttgttaatgccggatctggattatgggttttggttattgagaggttttgagcttgcccatttgtttggttggtgagaaaataatgggaaagggctagaagttaactaacatttcatttggaaatttgccatgctatgtattgttgacagaaagacgaaagggagaattcttggaatttaatatacgatttgcactttttgtttttgcatttttcgtagattaagtatttccattgttacagttttggctgaatggtagatctgggatttcagattctctttaggtggatgttgttgaaatgttttgagcttagtcatttgtttagttgaggagaaatttgtccaaactaagaggaaattatctaatcgtcaattaaattgagcgagaatcattataatctatttgttgaaaatgaaaggttttataaaagaggaacaacaaataggataaattttatgctgtttagtcaccggtagaaagagttcaactgacttctaaattcttcattttcaaagggggaaagtatgtcataagagcattgtatttcttatcatggcttacattattttccttgagaaggacaaaacgtcatggtatatataatatggaagtttcttgtcagggagaaaacaatatgaatgttcagtatgatgcatgtaacctttcccgcttttcttttttccattgaacatgaacttcggggcttgttatgctgtagttgtttactaatttagtatggtaagccaggggtgcttttgaaaaaactcatgtcatgtaattaattctattctactctcatgtgcagccacaaggggaaaact

SEQ ID NO: 72093 - DNA, 549 bp, Prunus persica
  Intron number 1 from transcript ppa012756m (locus ppa01275 6m.g) derived from phytozome v7.0 (chr-ID scaffold_2; pos 22226565 to 22227113)
gagtgcaaaggggcttggagacaccgatttattcagtatattttctcttcctttccttctttcctttatgtctgtgctgttctatagttcaatagaatgtagtttgagcttgaaaatagttgaaggcattcataaaccttgatgggtttctgcaaaagttttgatttttgtgctccattctttaaatttaatcaactattttcctttccaccatttattagactttcaaacaaatagatccagtaaagttggtgagcttcattaatgctgcacttgtattttctctgcttctgttttgaatgtgcacttgttctcttattcatctttatcccattttatataagaatttttgaagcaatccaccatttctacaaggtttgttggattgcttcaaaaaaaattcaaggaaaatgttcatcaactattaaaaaggtggttttgttgctctcccatggatattttacatcaattgctgcatgatatattacttcttatttttatttatttaaagtctggcattttaacacagagtttgatttagcaggtcgt

SEQ ID NO: 72094 - DNA, 907 bp, Prunus persica
  Intron number 3 from transcript ppa005867m (locus ppa00586 7m.g) derived from phytozome v7.0 (chr-ID scaffold_6; pos 13307253 to 13308159)
acctttacagtcaaggcttgccgctatttggccaggtgtttgcatctgaattccgtttgtaaatttatttttgaattataagactgttgatggagttggttggtcatgaaagattgtggaggaaactccaaacatggacaactgtgttgcctggatattgtgattttatacactctgtatgcttaatctatacctatgtctgaccagtacatgtgccaattcaaatgtgtttgagcaactacatatgtgtatatattggaatttgacaggataacatagttataaattggaaactctgtgtatgttataaattggcatgtgtatgactaactagatattaattcattggttatgtggttctattaattaagaagctctgatatctacgtaattagctcactctatgctgtttgtaaatttatagagcttgtgttcttaatctaaatctgtgtttaattagtaactagcacatgtgctagtacaagtttgtgtgagcgcagcacttggaaacttggtatttcttataaatattctcattcattggtcacttttatctattaattaacatacccttatctgcagcatacataaatgatattgcttgtggatataaaatctttagtttggactcaatttaatcggattacttgtatgttttattaatttttttcaccataagtatgtatggatggctaatggattctaactttaatttcttcttaatatcaatgattttcatagttaaagtaccacttgtatttaatttttctagtgctttatgaattagcttaaacttgaggctacttgaccacgttcaaaatgttttgatgatacagtggaagatcctcaaccaaatattgtgacaaattctttttttcttttgttttgtgttttttttttgtacagg

SEQ ID NO: 72095 - DNA, 1008 bp, Prunus persica
  Intron number 2 from transcript ppa012508m (locus ppa01250 8m.g) derived from phytozome v7.0 (chr-ID scaffold_1; pos 40126424 to 40127431 reverse strand)
gccattgggatagtcggtgacgccggtgtccggtaacccttttactcttagctcttgattgcttgtggtttcgtagttttaactgagtttgctttgttgatcttttagtcgtgatcatatttgcttctgtaataagatgtcgtttttattggaccagtgaattagttccctattgattagcattgaatggaagaaattaatgttcgaaagtgccaacagcagtttcaaattacaaaaccgttttttttttttttccagcatttggatgatgaaataaacaaaatatttggactgctagatgaatacccaggaagcacttgggtttacaataaaagttttctacgaaaagcactattaacagagatgcattaccttacaagaaggggtggatctcttatatgccaatagtttgtcaaagttggtggttctttgtatgtctaatgtggaattccgagatgctttacttatgtagaaatgcatttcctattgggtattgggtttatgcttcaatacaacttggcttttatgttcggttccaaggaaataggtgaagctagtttgggctaaatatgagtattacctttgcgttttaattttgtgtgcttaagtgtaagactgtctggttaaagggtgttcatcttttaaaaactagatgtgttttctatatgattccaaactttgagttataatcgtaatgcatcaaaagactcaaaacaataacatggacagcagcacatgccgaaactacaataggttgagcagctttagcctgtttgttttcttgacaattttcttgttttcaataaaatgcttgtttagatctgtgttttcataagccggttcctttctagttaagttgattttacagttagatcgtagcttcttctttttttccctcttctcatgacatttattgtagctttattaccactgtctttttgctctataacacatgtcaagcaggatgatattttctccatattttgttttggattgttttcagggcta

SEQ ID NO: 72096 - DNA, 668 bp, Prunus persica
  Intron number 2 from transcript ppa012343m (locus ppa01234 3m.g) derived from phytozome v7.0 (chr-ID scaffold_6; pos 9922690 to 9923357 reverse strand)
cctagtgacccctacctaagggagcatttacactggtaaatcctctgttgagatatgatcaggaataggatttaaatgaggaaaagagacaagctaattatgccactaatttttatatacctagttccaattaaataacttgtgccctaattatggggtatatggttcacagggcacgatgacagggcatttatctgcatcgaaattgaaatacgaaaaataaaatccttctacccttgataagtactgttagtaattaagcattacgaattttataagacctcacgaattatgcagattcaaaaactatagatgctctccttgagtctaatattcttttggttttaagtttgtatgtttacataattgacttggtatatagtttttcttcctctgttaaatcatgatggagagagagagagagagagagagagagagagagagagagagagagagagagagttcccatttctccttgtaatttttgacaaaaaccaacatgagaagacaagatatagatgacttaattgcatacatatgcatttaaaatgctccttatgcttaaaatatgtactttgtgtttttatttttttggtcaattgaaaatggctaattctgccatcttgattacaggatagtaactgacatcccaggcacaactgataaca

SEQ ID NO: 72097 - DNA, 617 bp, Prunus persica
  Intron number 1 from transcript ppa022894m (locus ppa02289 4m.g) derived from phytozome v7.0 (chr-ID scaffold_8; pos 8751010 to 8751626)
tgatcagtcaggtgagagcttttgctgggatccaaatgtatgagtgttttttctttataaaagcattagaacattttcgcttctagagttaatggtagttgtatctgattgctctgtattttttcacttggaatataaaataacattaaaacatagtatgaaagaatgaaaatttcggttcgggatggtttacctcttctttgaaacaatgactccaaaagaacaaagcgctagatagagttaaagcaatcaaatgtattaacagatagctcattatctgttatcacgctgtgttaatatttataagtaaaacaaaaaagaagagaagaaactatctgttctttgatgagtttctttctgtttcaaatatccctttttgcatatgtcacctggataagattatatatgcatcgaaatgttttctttggagtgtcaatgtcttgaactaaaacctttgaccttgtcccagaaagaactctatggtttggcactgctgcttcacattcgtgtttttgtgttttattcgttctttgcttatctgttgcctgattttttgtctaaggatttactgataagtgttgacatccatgtgctttctattgttaatatattacagg

SEQ ID NO: 72098 - DNA, 473 bp, Prunus persica
  Intron number 2 from transcript ppa015896m (locus ppa01589 6m.g) derived from phytozome v7.0 (chr-ID scaffold_2; pos 20142686 to 20143158 reverse strand)
gaaagctggttagtttaagccctcttgcccctgctactaattaattatcctctttccttttctatattttcttcatttatttttaatcttttgactaataataattattattatttaagtttgattaatatattggcacatgcattagtcataattatattaaaattagtataatgggaaaaccaaaaaactactcgggaatgatcaaacttctgtgtaaggggacagactcactccgtagtccttaaaatgacataatattaaactcagtctcggaatcttggctagggaagtaactattaaaattatacatgttccacccaataatagaggaaaggccctatataattcaacttttattaagttccccaaatcaaagaaacaaaccacatagtttgtgctaattataatacaattagggtatctaactccaactttctacacataataaattcacaggtctcaactgaaag

SEQ ID NO: 72099 - DNA, 864 bp, Prunus persica
  Intron number 1 from transcript ppa003450m (locus ppa00345 0m.g) derived from phytozome v7.0 (chr-ID scaffold_2; pos 20567666 to 20568529)
gagtcgtggtcgtcccaaggcgatcatcaagtcaggttagagataccatcttttgggttccatggaaaagttttgattttcattgaaaatttgctggtttttgttttcacgtctgttgaacttttctttttgttgttgttcttataatagtacactctcccaattgtttgataattttggaagtttgttctctttttttaatcagtaaagttgtgttctttcgaaacggattgttgattacattgggagaagcgattgtgttatttttaatgtcattgtaaattttgtggttttcttgtagaagctgttttcctccaataattggtagaactgtgcctcctttagagaaaatttgctctttcagtctaatagtttacttgaaacctgcaaataagatcattctaaaacttaagaatcaatggaggagattcagaaatatgcaaggaaaaagaaaatattgcaacccgaaaatttgaaaaattatcaccttgccacggtcacccaccctaagtctttttctcaaattaacctataaacccacgaccatctcagaagcagagaagaactcaatttgggaatcctaacggttctatgcggtcctatctctaaattagtaatttttcttttctcaccattcttattccaccaggtgtttctacgtatcatatcatttgcatatcacattggctaagctcattctctatgtcatttggcttttattctgatacattagttgacattccacttgcgattttaaatatggttaatgctcattttcttgtggaatgttgcctctcctattgtatattttgctcaattatggaagttgtatggctgtggtttgcagctgtcttccttgtggtc

SEQ ID NO: 72100 - DNA, 959 bp, Prunus persica
  Intron number 2 from transcript ppa018744m (locus ppa01874 4m.g) derived from phytozome v7.0 (chr-ID scaffold_6; pos 16147576 to 16148534)
tattaaggcttcataagcttttaggaaacaggcaagttttatatatcaatccccttaatttccaacctagctaaagcacaccatatttattcctgcttactattgtggatggataacagttttgccattcttcatcttgagaattaatccctgatcatgcccgaccaagaactttctcctttaaccaagaactttcttttgccatgctaactgtcctagctagaacagtgtgttccaataaaggaagctaacccctaactctataaggtacacagaccatttgtagctaaacttggctacttttggttggatgagtttatttttgagattcaagtagcaggtagattaaatcgattttttatcaaatttagccaaaatttagcccccaaattcataaatgtcagttttttttttatttttaaaactttcaaatatagtcaaaaactcacttaaattgacctaaatgccctctaaattaaaaacctaaccaaaaggctaattgtcatgctcttccaagccatggcccttaatggattttctttgcagttagttcttaattagggtttggatacgtacatttcatggaacaattatcacaatatcatgttttatatgcacccacactagatatatttttgttttttcactctctttttgtttatttcattttattattacttttgttttataaaggtagaagggaaagcaaagctaatataggtaagtttgtgctatgggaagatagtctgtgaatagggagggccttgcaattttcttatacctgagggaaggcctggtttgcaagaaagtttaacccccacatcagatgcaaagcaacattatttaaaaattattatgtcaagaaactaactttaacttttttttattgtaaaaaactcccaaacccaccgattgaagccatagccgcactggcggatctacataggcgcaaggaggtg

SEQ ID NO: 72101 - DNA, 579 bp, Prunus persica
  Intron number 2 from transcript ppb024984m (locus ppb02498 4m.g) derived from phytozome v7.0 (chr-ID scaffold_8; pos 6309656 to 6310234 reverse strand)
cgagtaagctcaatttctctttgagaaagacatccaaattattgcctttgagacgtgagagactgagagaggaagaacttggaaccctaaatgtaaaccgaaaatgaatgaaagcgacaaatttatagaataaatttttaaaaccaacggcggacctcacgaaaaaaccgccgtttaaattgtaaaatcaacgtcggtatgatcgacgtatattacagaaatccacgtcggtacattaataaaaacgacgtgttaaataatgtaccatgacgcgagttattacttatgtactttaatttttgagtttactacgacggtacctacaacactactgtcgtatttatttaccacgtccgaagttaaatgtaccgtcgtattttgtaatttatacgtcgtagttatatgtaaccgccgtattatttttttgaaatggttttatatgtaagcaacttttcgtctatctgacatacacatgcgctgttttcaaacccgattaaaaatttcaatctcccagagaaaacttttagacttttttccttgtcagagcactgtcagagtatctcatcgtcttcctctcgt

SEQ ID NO: 72102 - DNA, 828 bp, Prunus persica
  Intron number 1 from transcript ppa006356m (locus ppa00635 6m.g) derived from phytozome v7.0 (chr-ID scaffold_3; pos 243383 to 244210)
gacggtgagattttcatctatttgctccgatctgattgtttccatggcctatatgcactaattgatcatttcgccgatccatttccatgcctatctgctcatctaactgtactgatcgcttctgattcgttagtcttctatgagcaacttcatagttctattcgatgactgctaagcttcatttctgccgcctccaaaatgtttgtttgcttttgtcctcccaaaaggtggtggcttttattttcatctttatttttaccatgttttattcagtaaaaagtttattaaaagaaaacccataaacctgtaatgatcttttacagtacctgaatcttttccccccataaaactactaattcggctacctgagatcatgatgacgaccctttaacttgtcattgaagatctgtacaaaataattagatctatatacagaggatttgtttgatgaagttttgatcttgtggattttataaataaaacgacattgtaattggaatttccggagactagtgaatctttatctttccctatgcagaccctttgtttgagcctctaaaactattgttgaacttgaatgaatgaaatgaaatgtgattcaagtgttttcctgaatttatgtgttgaatattccaaatttattgatgacatgtgcataacactaaattggttgcgtctcatatgtattttcccaatgtcctaaaatatgtcaatgttggttattcattcaaaattttatgaagataatatgttacaaattaccgtgtgtacatgggttgaagatatttcaccttcccctttctcattcaatgtcttttggtacaggag

SEQ ID NO: 72103 - DNA, 788 bp, Prunus persica
  Intron number 1 from transcript ppa008490m (locus ppa00849 0m.g) derived from phytozome v7.0 (chr-ID scaffold_4; pos 17692579 to 17693366)
tttacaagacattattcgggtactctctcttatttttctttgtccttttttccaatatgtgtgttctatgatgtagtgggttgcgatgatttggattggatattgggctatactgatattggattgtctggtgtggaaattagtagagatatagacatgtcttaggtaagtggtgtggctcatgggtgcttttgtctgtgagcaatggaaattggggtaatgattattttgttatttgcccgttagttttcgtggtggtatattgtagtgggtgtggggctatgtcgagtatgggaatttgatgatacttggaaatattgatttctggttgattttgtatcagttggttatcgacctctaccatatgaacaattgtaaaagtggataaaggttcagtaagctatttttctaatttcctatttaagggcggtcctaaacttttgattgtgtttgatttactttatgcggtataatgcattcttggtatcttatatggttgaagatgaagaataaattcaggattgttagtttgatgtgtaacccctatacaaaatgtcaggaaagtaatacttttctttgctattgggtttcatgtccctgttgtgtaggtcctcattcattctttcttgagctcgttgcataatcttaatatcagtagcatgtctttaatgagtttaattattttatttcattattactgtgaggattgttgttggctgaagtttgatcatgtactaatattttagtactatgcaacagtaattttaggataccggttgcctactgtg

SEQ ID NO: 72104 - DNA, 729 bp, Prunus persica
  Intron number 1 from transcript ppa009351m (locus ppa00935 1m.g) derived from phytozome v7.0 (chr-ID scaffold_6; pos 303386 to 304114)
tgaagaagaaggagaaggaggaagtgaagttcaaggttaagtctttttatgtcatttgctttatctttgaaactcgtttgatactctttaatttgggttgtttactttcgatgcagttgtagttccagtttttgaatttgtgaatgcattttgggtttgatttaaaatttggattgagcataagagctcttgtatgcattttcatacaattcatgtctatgctacttttatgtaattggggtcataagagtagattttttttttttttttttagggcaatgtgcatcacttggcatggtacatatgttagggatcctttagctcagttgtttatttattaagctcatatttgttgattcttctgagttggaacctctagttaagattcataatggacctctagttgattcttgcaagtgacttgtagctcaagtggttaaaagcagttgtaatactcgaagtcctgagttcgaatccactccccattttcgcttatgtaaaaagggctagtttgtattgaactttggctatcataaaaatggaagatttaatcaaacatttctcacattttttatattcaagcagccatacatgttatgttttgtgttacatgaaagttgctggcttttgcaactttatggagcaaagttgtgtataggatggtctttcattttgttgatctgttttctttaatttgggatgcaggagctgtgtcagaggagagttctg

SEQ ID NO: 72105 - DNA, 989 bp, Prunus persica
  Intron number 1 from transcript ppa013829m (locus ppa01382 9m.g) derived from phytozome v7.0 (chr-ID scaffold_1; pos 2977450 to 2978438)
aataccacagtcccagaaatctactccttgctgtaaataatcttcctcactacttctccctcaacatatatatatgtatatatatatatatatataaattctccgatgcggacttccagacgttattactatgcggacgtcatgtattttctactacccctccctgtttacaaactataacatccgcacagtaataatgtgcagacaccagatgagatgtttttgttaaccatggcactatgtctcttctatgtcatttttgcacaaaagggtcatgcaatcttctctatattgttccatttgttggatctctttgtagataaagacacattttcttttagacatgcatgaacggtctcttgttggtataagctacatgaattaccgttcatgaaagtccagactgagaattttaatgagcagtaaactgtagctgcaaacttggcagatctgccaaaactttgatggcagatttattaaagcaactattagtttgggctgcttgcacctgctgccatgttcatccacatatggctgctgctaaggttgtggtttaacagtttctgcaagatgaaactggttttgcaacttcagttttgtatcaaagctaaatggtgcttcaatgtgccacacactttggtgcaatattctttggcataataaacatttggtaggctaaggcatatggggggttacaaattacaacttacatgtgcgcccaagatttggaaaagctctttcatgtcatcttctttatgaaagcaacacttttaggaagatttgattgcatagaatcatacaaatccaaggcattcatgtatatgagtggatgaaaatatatacaaactaaaaataataataataataaattgatggttgatatacattgacaatatatacctcctcttattgattcttgatgatgccaaataatatatggtgatgtggtggtaggtgggagaggtaggagagctatcagaaatattcca

SEQ ID NO: 72106 - DNA, 342 bp, Prunus persica
  Intron number 1 from transcript ppa019898m (locus ppa01989 8m.g) derived from phytozome v7.0 (chr-ID scaffold_5; pos 2399059 to 2399400)
ttagtccctcgcaacaccaagcatcatcaagtaaggtaccattaaatagaacgactgcagattatacttttctttttctttttttctgttttcaaccatctgcagttcttggtttgtttttctaatgtgctgaaatggtggtatgaacttgaattctgacgcttcccttattgaaagaagaatcaaaaaaagaacaagagtattgtgtttgtgtttcaatagatggaaattgcagcttgtttcaatggcatttgaattatgcaattgctcaccttttgcttgcattttttttaaaaaaatcctgcagattagtattaagccttggactttctccatcaccaa

SEQ ID NO: 72107 - DNA, 609 bp, Prunus persica
  Intron number 1 from transcript ppa005546m (locus ppa00554 6m.g) derived from phytozome v7.0 (chr-ID scaffold_5; pos 8903889 to 8904497)
gcattatactgagcctcgtattgctgaaatcccaggtatgaatatcatttctggagaaagtttaaaaaaaattttggttgatgttgataattggattttgggatttttgggtttgcgttcatgctctggatttgaacatctaaagttctgaatctatattggttttgagattttgttcatgggaaattgaatcggtttgggtttgtgttgcttgggatgtatagaagaatctttgtctttaaattgagttatgcattgtgtgagtataaaccgtatgggaagtaaattacttttggtagactgcaattggagaagcttcaagaaaggagcttttgaggttgccaatttaaattgcagcattaactttttagagtgaaatggtgggaaagcttgtaaatacaggatggaaaagaaaatataatattagccctaatatctatacccaaattaaaagtaataattctaaagtactaatgaagctcatccagacttttttctttctgaattcatgcttatgtaatgcaatttgaaggcataacaaaagtaaagttggttctcactttttctccctccccttaatgccattacatacttttcaggtatcaatac

SEQ ID NO: 72108 - DNA, 630 bp, Prunus persica
  Intron number 1 from transcript ppa023683m (locus ppa02368 3m.g) derived from phytozome v7.0 (chr-ID scaffold_6; pos 4474992 to 4475621 reverse strand)
atccaggtagagcgggtcggttgactgggcccgattaaacctaaatcaaacaaaaaccccatattgaatcaaaatcaaacaaactccaaattttaaattttttatatattaaaaaaaaaaatagtgactgatgtggaattgattgcatgtgtggcccactaaaaagtggtctcacataaggaggagtgttgaagaatacacaagtcccacatcgaaaagttaacaaaatagaaagtctcatataataaatggttctactcctaataacatcgaggccttttgtataaaaccacacctgttaaacaggtggttaagttcgggacaatattgatgttgctagtggtgagccaagggtccgtccatttgaaaacttaacagatttgtccagcaaccacttccaaggttcaataccatcttcattctttgaacaagctaggacattactagtttcagtgttagaaacaataccttctcaggttctatcccatcctctatttgtcttcattcatctcccttcattaggctattggatttttctttcaataaattcggtggcaatatatctccttgactagggaactgtctcaaattgcaggtttttcgtgctggttacaataacagctcgggatt

SEQ ID NO: 72109 - DNA, 1002 bp, Prunus persica
  Intron number 1 from transcript ppa011737m (locus ppa01173 7m.g) derived from phytozome v7.0 (chr-ID scaffold_8; pos 16432994 to 16433995)
tgctcatctcctacaccagcaacactttccctacggtaaaggactcttctttcttttcttcttgttttgtttgattgcagagagaaagtttaagtctttgaggtttgtctttagttgggttgcttagctgagcctggtagggtagttaggttcttcaatgtggggttaatgcaagattcttgagcacaatttacttgcttttgtttggttttcaagaaaacgtgggatgaagaaagcaaagctttgtttttttctattctgtttcctcgtttgggtgttcagaagcaaaatcaggaaatcacatgaaacttgactcccatagaatccgaatttcggttttagcatgatcagggcttttatttgttgtaggtcattctttttaacattttcaattcaccctgtttggtatgtataatatagtgaagaaatcttaaaatttcgatcaagtttgagtctttatgtttgaattgagctgatcagagccctttatttttgttcactttgttgtggtgcagaatttattaagagggttttcttggttttgttcagtgacgttgaccctttctataatttgtcattcctgaacctgtgttgaatcatatctctggattaagcctagtaactaagttggatagtaagctcagaaaaatttcatgtctacaattttctcttactttttgtttatttttctttcttttgtagaggcttctgtagctatgcgtacatatttccttgattgatcagaatcacttagtaaaaacctttctgcattatacctgttcaatagactagaagactgttcggtgtaaggtgctttgtgtgatataaaaaagtatagcatgtatgtaactttgagaattttctcatctatattttgcattgcatgtgattattaagattcaaaattttgcttttcgcattttttttctgtatgagattgaattttctagaggatgattatgattttctgtttttgcttgcaatatgttggggagcaggatt

SEQ ID NO: 72110 - DNA, 592 bp, Prunus persica
  Intron number 2 from transcript ppa011075m (locus ppa01107 5m.g) derived from phytozome v7.0 (chr-ID scaffold_1; pos 30719837 to 30720428 reverse strand)
aaattcagaagcatcttgactgttctaaaattcaggtttcttccctactctctgtcttcaatcataaaactcttacaaattggatgtgatttcatttgcaggtacaaaataaaatggcatttgggttttctaaactgtgtttgttttgttgtttctagtcaagaacaattgttgtttgaatttcctctgttaatctagtagacaccagtataattaccaaagaagaacggctcatcaatttgactaatatatgattatttaagtcggctatctgattgttatatagttttgggatgtaaatttcaagttttgtgtttgtggtgtagtttgtaggcaagtcaaattgaatgcgctttaattggtgtacatattctgtcagtgttataagacaacaaaattcatcagttttatttctcatgtggtttaatcctgctggtagctggaatcctaggatggttgatttgattgatcactgttaactgttttcttggtgaggttgttggttccttgttgtgaatgttgtttatctcaaataacgacaacttgacgtcttacagacatataaaatcaacggcgagaaagctgtgcatct

SEQ ID NO: 72111 - DNA, 801 bp, Prunus persica
  Intron number 1 from transcript ppa026743m (locus ppa02674 3m.g) derived from phytozome v7.0 (chr-ID scaffold_1; pos 25095180 to 25095980)
gtccaaaggcaaataaaacagggagtagcaaccatgtatattcaaagcatttgattttaaaagttctgtatgtttagcattctgatatggattcatatgtgatgtttattggtcaggtaccatcacaaaggcaaaagaagagagcaccataaggcaacacacatcaactcagagagttacaagacaatcaaggcagaaactgttaagatgaaagaaattatacataaattctataaagaacaagcaattaggaagaaaatacagacagaaactgagagtgaatattctattgtatttcacttaatgaattattcaatacactaagtctcatattatacaattggagatctcttacatcttaagtaatcttgcttaacaacctaattgactactgagttaactaacagctctctaactacctcacgtgacacacacatgacttgctaacagcttatccttcaatctatttacacttggcagcacatcacccttgatactcttacatgcatcattttctacacaatcaaggcaaaaacaaccagtaagttgggtttcttttattttaagtaacattatggaactcttcatttgtttattttagtaaatgctcatgttaatctaactctgccacaattttcagatcatatcgaaggctaaaaaaaggttcaatcatcaccaagtatcttttcagtctaaccaagcttctcaaccatctcaccaaccagctcaaccatctcaagcttcttagtttgaacaaccatatcagtttgaacaaccatctcagtctcaagaactaaattg

SEQ ID NO: 72112 - DNA, 640 bp, Prunus persica
  Intron number 1 from transcript ppa010771m (locus ppa01077 1m.g) derived from phytozome v7.0 (chr-ID scaffold_5; pos 10691219 to 10691858)
atttcactgtcaaggttggtttttgaggaattttgattctgtttacttcagttttagacacgaattcaatattgaaggcaagtcggttcttttgattttcattttacatttggatttggggatctttgtttggttaatagcttgggttgtttcatctgtaattttgatgcagaaataggggattttactttgttcaccttattctttcttggatttgaataaaggacaagattgatgtcattaccccaaagaaaacataaatgatgcttataattcttaggtttgccctatatttttagagccataaagaagagaactttattttcaaaaaaatggtgacccatacggattattgatgggaaaggcccctactttaattcagttgcccttcattttcatgccagtatttgtgtttttaggtgttgctctgtgatgataattgggttttaattatctttcttagtattgaatatctcagtaggtttggattgtgcctttggagccaaccccttctctcaattgatgtgtcaactaactagtaatggggtttatttggaaattgatatctatgcaaatctcttccatgtttcatcgcttcactgagaatttgatgtgcataatatgtccttttacttgcagg

SEQ ID NO: 72113 - DNA, 960 bp, Prunus persica
  Intron number 1 from transcript ppa002006m (locus ppa00200 6m.g) derived from phytozome v7.0 (chr-ID scaffold_3; pos 15336333 to 15337292)
gcatccaaggattcgctggctttgaattcagagaggtgaatttttcggcaaacccacctttgtttttatgctattttcttgtggtgatgatcactgtgtgttatttgtgataggtggtgttttcttacaagacttgtttttaattttgtttcaaggttgatttttacttcttgatgaataacattttcatagtcttttatggatttggtggtaattggagtttctgtttgatgtttcacattcaaatttgttccttgtgttagcttatagtgtggtggctgttcatcttcatcatgtgcgacgagtgagtattttgatcgaacccaaaagttttgcagcatggggtttgtgttgtatttgcttttcagttttaagaatttcattttttgtgataactctctgactgatcctacctaacgattgaaatgttctgacatctgggtttcgattagtggtggggttgctctcagaagtttcaaattttttttggttgaaattagaagtatgatcatcgtctcgtcagatatttattttcccagaagtgttgttcgttaatgaagaatccatttatttccttagtttgatcatgaagaatacgttaagtttttatttttattttctacagaataagatgcgtttcaaagctggaagttgtttgaaatctgaattctgtttgatatttcgtaacctgaaagtcacagaattgtgatgacagttatcaattttcattgacgatgatgttatacttcacatgcgtgcgtttccttatttatttatttattttttcattttgcctgatttagtcatgtagtgtatgtgcatatgttagttctacacataactgtagttatactaaagattagacactgcgattgtttcgaacattaaaaatgatttccttatttaacagtgtcatctattttaggtaacaatttggtctattcagaaggaataaattca

SEQ ID NO: 72114 - DNA, 552 bp, Prunus persica
  Intron number 1 from transcript ppa003751m (locus ppa00375 1m.g) derived from phytozome v7.0 (chr-ID scaffold_1; pos 10286724 to 10287275 reverse strand)
tcgatcttcaaactgctcaggtttgcttcagttatttggagtatgcttttttgtttttcctaactattgtccggttgcttatttttatttatttttcctaactattgttcggttggctgctaaggaagtagataaaagaacagagagtgaaccttttagtttagcgttgtaagtttagaaaatatttggtttcgttgttcgtttgtttgctgagaaagtgaaggaaaataaaaacagagggaaaaaaaaatgtatctcgagcatcacgtaagtggagcaatatagttgatcgaagggaacggtttactctgtatgtggtgtgtgccttcgaagattcaagtgtacataaataaagatatatatagatatgtacatatttcatttttcttacttttttgtttcttagtgaccatgaacgcaatgtagacatctgcttcaatgatcggttaaattattcattttggagaaaactaagtttttttaatttgattttggtgtatgtttttgtgctcctcagctgttcaagttaggccccgtgcagtcagtttgcat

SEQ ID NO: 72115 - DNA, 491 bp, Prunus persica
  Intron number 2 from transcript ppa007153m (locus ppa00715 3m.g) derived from phytozome v7.0 (chr-ID scaffold_1; pos 28981087 to 28981577 reverse strand)
tctggagggttaacttctcgttctcaacaggtaatttgtcagtatggcatttggtatttggaagacccacttattatttcttgcctgccaggcatatgagatttattttgcatctttcattttcatgcatattaatgtcaccctttgaatatacgtaaaaagctttattgtttagtaatactggcactaccctgttctaatggcgaactctgtttgtttgtaggtactttaatatctgtttggatgaaacatttgttgaactcatgtctttgtttttaataatcttatgttagtttaatgccgtccttcaatcttcatgtgttttaggttgtgagataatgttacatggagaacttgcgtatttattttggtacaaattgattcttttcgtttgcatctagtacgactatgtaatccagtctctgatagcatttgatgttttgcttattctagtattcttttcaatgtctcaggttcttcacaacctagaa

SEQ ID NO: 72116 - DNA, 810 bp, Prunus persica
  Intron number 1 from transcript ppa020684m (locus ppa02068 4m.g) derived from phytozome v7.0 (chr-ID scaffold_2; pos 13944979 to 13945788)
cgagggtaatttaactcaagtatttttcacgcactctatggtgttcgatgaaatgcctgactgacttgtggtagcttttttttttcttctctcttaataggaaagttttatgtttaagatctgggttagtgagtttaggtgtttatgcagcctgtggatttggtttccaggttttactgacaagaaagcttcttttacctctgattttatactgatttgtcatgataactggtataaagtttacacttcattttaaacttcttgtaaaacttattcttatgtagagcaataatattttgtcaaaattatcattcaccattttgggtgtgcgtttcagctcaatgtattcatctttcttgcttttctttcacttctttcctaccgtaaataattagataggttcttaagtcacaatacttttgtcccgtttagagcaaaagaagtttgtatgccttatcaaaaagcgcgttagtttatgatggatgtggatggaggaagatatggattttcttactttttggaaacttatatcttgtaatggattttccattttcaaagtattctagcattcaagttggctcttcggagaaaaaaagaaaacaaaatgggcttgaaatattattcaaaaaaagaaaaaaacagattgcttgagatcttaaatggaaaagatatcatgagtggtttccgaaattctaattcaatagtaacaacttcatttcatatacttctgctttttatgttttatgatagagttgcacaaactattaatgattcatttattctacttttagattccattgtcatcagcgt

SEQ ID NO: 72117 - DNA, 807 bp, Prunus persica
  Intron number 1 from transcript ppa025763m (locus ppa02576 3m.g) derived from phytozome v7.0 (chr-ID scaffold_5; pos 3193840 to 3194646)
cagctcaagctcagtctcagagtcaatctcattgggtaagcccaactcctctctccctctctgtccctattttttttcttttccaatttgtgggtttttatgtttttatttttctcaaccgttaattaatttcatttactacctttcctaaaaacttttcattgggtctgatttttagtttgtttcaatttttttggcaaatctttgggtgtgattttgttgatgggcttttagatctattcctttttctcactccatttgtattagtattagacatcaaagtgaaagtgaataaggccgccgagttaatagttttcctagatgttagttcgtatcagtctttttcaaccttttttcccttttctaatattactttttctctttctataaagtaattggtttttattgttctacttggatggagacgcagctttactgttttttttcttggaatttagtgcctttctggctcttcagatatatatcattactctctcccttttctttttatctctttgttcaaaaggaattgctttttgttgagtatggttttctgtggtttttgcgttttgacgattctgtcttttcttctcaattataatgcacaatctatgacttctgcagattgattttttcacatttgtgaacccccatttcttgaactcttatttcttttcctttgaatttttatgatgggatttacttccatatttcactgatcgggtgcaatgtgattgatatgtaacttcacttgattggatttgaatctagtcctgattttgttatgcaggtacgactattctggat

SEQ ID NO: 72118 - DNA, 1019 bp, Prunus persica
  Intron number 2 from transcript ppa013509m (locus ppa01350 9m.g) derived from phytozome v7.0 (chr-ID scaffold_4; pos 29847765 to 29848783 reverse strand)
ttgctttcgctgtgtccacagctctcatccaggtactcccatgatctcaattttcctttctccatttttacatgtttatatattttttttatttactctgtttgggtgccctaaatttttgggcaattgtcgagatgcagaattgaaatgcctcattttgatttactcttaaaactaaaaaaacaaaagcagggagaagggaaagcatcgtggattcttggataggcttgcaatttgacctgcctttgcatttgaactccttactatttagttagatcaatgtgaatagctaggatcagtaaaatctttttcttttttgaatataaatgtatagttatctgagcctcaagtcttttctatcatgagtttgtatgccttccggtttgattatgtacatagttttgcattccacaaggcaccgttgtgcatgaatctagttggtgaatgttgttaacataatttttaatacatggtttatggaagctgcgttgactcaacagattgcctttaagaggtttctgaagcaccatttggtttaatataccaacggatttgaagaatctaacagggagaaatattaataattaggtgtttggaggttccgcagaaaaaaagaagaagaaaacttgtaaggacatatgtttgaggcttgatgttctagtgttgctgtctacatataattcctaaaaaaaaagagtccaataaaattcatcttatacaaccacaaaagggatgattttagatatgacatttaattgaatcgtgagaatatgataatctccttcataaattattggaaggaaaccaacctgtcggattcacatttgtggatcaattttgtcattttcccctcctagcccacttcaacatattcttccacctatttctaatgatgccatcatgcattaactactacaatcataacccatgaatggtggaagccacctttgttgcaatttgatatgatttctttaatctttgatttagttatctactttgttgatgaacaggtagtttac

SEQ ID NO: 72119 - DNA, 698 bp, Prunus persica
  Intron number 1 from transcript ppa007836m (locus ppa00783 6m.g) derived from phytozome v7.0 (chr-ID scaffold_6; pos 21038953 to 21039650)
gcattcaaggtctctgcacgagcaaagtagcttctaacttctcttctgcctttttttttggtgttgtgattttccagggtactatttgatttgattatgttcttatatatgcttattggtttctctgagtgtagctctctacatgtccagaaatagtactttgatttaagactttttatttggtgattgtcctatcacgcgataatcattgcaactttctgaagaattgtactttgtagcgttaactttgtttatcaaggcacatgatgaatgtggactaagcaaagtttacagaggggagagggaagaaaattatttttatgaaactgataagtcacaatacccaattgcattgttcatgtatcttagggataagtccctttaatgttcttcccctttcgattttttcttggactacttgcaagttccaactgttatgacattttatatcaagcagactaaacagggaacttattttccgaaaatgaaggaccttttcttagtgcaagagattcatctacagagtgtattcaggctcaagatgaataaacttttagttctgttaacttgtagaaattgagttgaatggcatcacactaagctttcacatccagaatgtagttttgtggacaataattatgattacttctgatgcttcactaagttgatagagaaaaccggtttacattgtgcaagga

SEQ ID NO: 72120 - DNA, 700 bp, Prunus persica
  Intron number 1 from transcript ppa001527m (locus ppa00152 7m.g) derived from phytozome v7.0 (chr-ID scaffold_5; pos 11574712 to 11575411 reverse strand)
cactaagacagcctcgtgttattgcagagattgtggtaagtacatagcatgtttgtattgtttttgtttgctttgtatactttggtggccctcaaaatgatagtcaattcatgtatgttgtaatcaaatttatgttaatttttcatttttttaatttccattggttgaatatattatttgcaaaccaatcccttaagagagggagagagctggaagaatagaactatcatgcaccctaaaagtgacttagagaggatctatgcatttcacaagaatatgtggaagtgctagtcagtttgctctcagaatgaacacatatcggtgcttactgttatacattttttgaacccattctcaatatgcattatgtctccagtagtttcctattactttgtatgcaatatgggacctggttttactaatgttgcactatttaatattttgaaaaaacaaaaagaaatttcccttgtctgaaaggcagatgtttttgtaagtaaaaccatatagttcaaacaattataagtcctctttttcataaacaagaaataaaaactaacaaaggtcttattttaatatgtggttccatttgcaattttgtttaagtggaaaaatatccacatcttcatgataagagagagtttaacttagtattgttttttctgcagggaggaatattacttggcccctcagctcttggtca

SEQ ID NO: 72121 - DNA, 991 bp, Prunus persica
  Intron number 3 from transcript ppa007478m (locus ppa00747 8m.g) derived from phytozome v7.0 (chr-ID scaffold_5; pos 12968006 to 12968996)
cttacagagtacgtgatatgttcttaattgctttatgcttttgcccatttttaattttggcttaaggtatatttccttttgggtaagcttcatatacactgaagtttttggaaactgaaggaatatgctcacttcacattggaggtaccagtaatatatttgactttaaatatgtgaagtaaagaatcagcgcttaggatcatgcctatagttatgaactaattagaatcattgaagactaaaaagataattcaaaacttatcctaaggtcgtttaaatacaaaaacttcacttattcaggccacttgatctcttgtttggatcatttttcagcgaaagcttctgtttttttttccttttccttctctttttatagccctttgcatgacacaactgacacctagaggttcaaactttctcctctgcacagacaagtgatctctatgaatttggaataagtgggatttattccttctttgaatttttcttttcttctttttagtctcttttcttaccaagctatcttgaattacgaaggtaggtgtaatgttccgatacaaatataaggcccttgagattgaattgactagtaattcttctagttgattgagcagatgcttccatcccagataaagtaggttagcttgtaaattctcatttttcgtgttagtgggtcatcctagtctttgggtccagcatgacaactcaacatatccccaacaggaagcatatctcataaatgttttatttcccccttattttaattattccgtttgattttcattaaaatctgatcccttctagtataatttacctatatagtatgctttccctcatgctgcttggttactgtttgttttgtatagttaccttgtccatcttctgttactacaaagaatgtcaagtgaaaatagcttgagcagctttacttacaatgatatattactttggagcaggatagaactgccctgctattccttctttttccagc

SEQ ID NO: 72122 - DNA, 799 bp, Prunus persica
  Intron number 1 from transcript ppb020741m (locus ppb02074 1m.g) derived from phytozome v7.0 (chr-ID scaffold_4; pos 15816544 to 15817342 reverse strand)
caagttttgcagtgagtcggttgttaaacaaattcaaataatagacgttggaagatattctgtaccgtgaagtttgacaaagactaggagactgaagcatatattaagggatatggtcccggagaaaagaaagaagaaggaattaattgtaatgtttatttagcttatattttattaaattttatgttgtgtctttgaatttacaatgagtcagtcaagtcgcatttaaaacaaatgattaaaacacagaccctgtgaaaatcgaatgtatatcgtattagcagtataatagcagtctagcaatagcagtggcacctcaactcaaccggtgcacattcatatatatttacaattcatgccaccgtacacttttatatgtattgagattaactgccgcaattgctccctcagaaaaggtcatggattcgagtcctagcattcgtatagtgtgtgtgaatttaatatattatcgtctctctcaataatgcctgatattatgaattaatgagaattatcaagtttcctactattaatcatctatgcttttttatgtcctacttcccattttttgctagtgagtattgtgtttgtgcaaacctacttcgccaatttataagcaaaaaaaattccataactcatgtttccatcccattatgtgtttgaatctcccttgcccaatatcatttgtataaattccataactcatattagtactagtatttccttccatgatgggttcttagcaaatctcaatttcccaatagcgaatattggaacaaaattgaagaacatcttacaa

SEQ ID NO: 72123 - DNA, 359 bp, Prunus persica
  Intron number 4 from transcript ppa008112m (locus ppa00811 2m.g) derived from phytozome v7.0 (chr-ID scaffold_1; pos 10996094 to 10996452 reverse strand)
gaacttatcttctaaaccacaagctcaagttggaggtttgctaagaaaattttattttataattttcaattttcataagtagattaattaatttttgtactaccgcgtcgtgacatgttatattgttagactataaatcaagacggctaataggctgaacatttctcattataagtagcgtgcgcagtagaatttttttgtttgttacttgttgaatgtgacctcatcttactatcttagcctttagcatatggttttgatttttcttttcggccaactgcttatgctctatgttttggtttctcacttaaaagccaatgcaaaataaaatcataacgtgatagtagtttcagaaggtg

SEQ ID NO: 72124 - DNA, 988 bp, Prunus persica
  Intron number 3 from transcript ppa015242m (locus ppa01524 2m.g) derived from phytozome v7.0 (chr-ID scaffold_4; pos 25698396 to 25699383)
gtattccaagcatttggataaggtgttttgcctttgttgcaagtttttattaagaactcaaaataaactcattagctaatgagcggtttaatgattgggtacaccttagtgtgagacttaaagaacacgaaacaagtggtgagcacatgattaacatgaacacttggattgatttgcaaataagattgcaaaaaaatgttacaattgataaacatgttcaatagcttattaataaagagaaagaacattgaaagggtgtattaataagaataatagttgctgtaacatatattggcaagtataacttggcattccgtggaaagaatgagaggattcatgaagatagcaatggaaattttttgggcttaattgaaatgatagcttaatgggatccaatcatgaaagaacacttgagacggattgatgaaaaagaaatttatcatcattatcttagtccaaggatccaaaatgagctgattgcaagattagcacatgaaaatcaaaagtgcaatcattcaaaaaattaaaaaagcaaagtatttttctgttttattcttgattgtacacctgatataagtcatcaagaacaaatgaccttgatattgaggtgtgtggatgtttctacatatctaataaaagtagaagaattctttttggaattcttacaagttgatgatacatcaggagaaggactctttgaagaattacaaaatgtattaaaaaatcttaaacttattattgatcatgtgagaggacaaggatatgataacggatccaatatgaaagggaaaaaccaaggtgtacaaagaagattgttagatataaatcctagagctttgtacacatcatgtgcttgtcattatcttaacttgatactttgtgatattgcggactcttgtaggaaagcataggattttttttggtgtgatacaatgtatttataccttgttttctcattccacaaagcgctgaaattttttaaaagata

SEQ ID NO: 72125 - DNA, 671 bp, Prunus persica
  Intron number 2 from transcript ppa010155m (locus ppa01015 5m.g) derived from phytozome v7.0 (chr-ID scaffold_1; pos 16614577 to 16615247 reverse strand)
tgttcaaggtacatctttattcaactatttgttttggcatgttgtaaaagcattgttttgtacatgcctttatggaagatcagttgcagtctgaaattgattattgattataaaaacaaaaaataaaataaaaacattgctagtggtctatctatggattgtaatctaatacacagctggtccttcatggctcagttgtttattagcattgttcttatgtatcaagaatttgatttatgaggtgttgccataatataatgttgaaataagatatttctttatgtgtaaagtgatctttacaacttttctatgtttcatggtctcttcgataagtctcttttgttttgttacgaaaatatcttttattttcccatgtgtcgtgctatttaaaaaaagaattatatgtttccttttaaactggaggtatatggatttgattaaatggcttttggcatgtagcgtgtattacctttgtggaaatattaatatcttgatcttgatggatttcagtgtcatgacagtttttttcatattggttgaaacagcataaccgacaactcatgagtgcagtttgcacttttattttttaaaaatatgttgataagcttgactgatgcctttctcaatctttaacagggaagagttagtgtttctgatatcatcggcttcaa

SEQ ID NO: 72126 - DNA, 732 bp, Prunus persica
  Intron number 1 from transcript ppa011943m (locus ppa01194 3m.g) derived from phytozome v7.0 (chr-ID scaffold_5; pos 17287618 to 17288349)
cgctctgagtctctgattctctggttctcctcgaggtaaaaccaaaccccatttcgctttctcgagtgcagctatgcatcttagatttgttatgttgtttgtgattgagatttgaagaagctaagccctttggttttacttagactgatgcgataagctaccctaggcctttacgttttctatcagtctctgatacagtgtagggttatgcttccctttgaaaagaagttttaaagatgttatctttgttaacttagtttccgagcggcaagtttttccaaagccagttaccttttgaagtcagaactaattgcttcaatagggtttgaattctgaaagccatttgttagttttctccacttttcatttcatttgcataaggattttgtttgaagataaaaactttgtcttctacctttttcttttttcaaactttaatctggatagattcttttgaatttccatgcatgcttcatttgatgcctgaacatcttacccacagattttaaatattagattattatggcaatgttggggtttcgagtttctattgaagaataaaatcctcacatctactctctgtttgtgtttcgttagtctctgctatatcaaactcaaatagagaattatggatcatattaacattttgcctggatttcatcagttttttcatgtccttgtaagccaaaaatgatattatgtttcgtgccttgtttagtcagatttgtcaat

SEQ ID NO: 72127 - DNA, 623 bp, Prunus persica
  Intron number 3 from transcript ppa013145m (locus ppa01314 5m.g) derived from phytozome v7.0 (chr-ID scaffold_8; pos 20285676 to 20286298 reverse strand)
agccaaagtacaggctgatcagggtaaatttatcttcttttcttccatcccagttctatgttacttgcaaattttggcatatacctatttaagctctatagtcattcaaaatgtgcattagtttacccatttccttctcgggtatgagtttgatacaaaaaccctgtggagttattcattaactgtagactaagggtatgttatgggagttgtgtgaatctatttaagtctgctgattagttaattttgattccctatcacggttttttgaatgggttcatatattttcacatgatttttttttactataatgtgtcatttcactttcctggtatgtttcttagtgttccttgatgaaagttactaatcttaacaactgcatgaaagttacaaacgcaggctttttcagttaattgatgagttaactaataattgattcatgtgtcagaggatgattaatatgttgtttctttcaattaaagaatcagtagttagtttggcatgaatacatgtggcttttttcttttctcttggatcgtgtaaatatagaaagctctttccctctctttttccctctctatttatctatctttctatctctcaaacttggctccttgtgcaga

SEQ ID NO: 72128 - DNA, 574 bp, Prunus persica
  Intron number 1 from transcript ppa016559m (locus ppa01655 9m.g) derived from phytozome v7.0 (chr-ID scaffold_8; pos 3923244 to 3923817 reverse strand)
acctccggcatctgcgcctctgtcgaccagacctggtaaatattctattacaactaaatgttttattatatatggattgatatgaacattttgtttttactacattgacttattattttactaataagtcttttttgtcaaaaaaattaataagggaagatgagaacataaatctacactaaaagctagttggctaaaaaagcataaatctgatcgaaggaaaaagagaaagacttgcaattgttagaggggaattaataaatgttttggcaatttttctttggcacttttcttcttgttcatacaggaccaagcaaagtcacattcataatcatcgctagtactcttggtcctgttgctttctgtgtgtttgttgtaattgtggccggatgcttctttcccaagagactgagaagagtcagagagaaataccaagccaaaaaacaacagaaaaaaggtaaaaactgaatcaaagattaagtctagtcttggaacccaagagatcattaattccttcgttttcttaagaccttttctagtacatctaatctcttggaaaactcatatttgctta

SEQ ID NO: 72129 - DNA, 498 bp, Prunus persica
  Intron number 2 from transcript ppa020178m (locus ppa02017 8m.g) derived from phytozome v7.0 (chr-ID scaffold_3; pos 2185039 to 2185536)
cattattagagccatccagactcaaaacgtcctcggtaacttcttagaccctgtttggttgatgggtagtatttgagattgtatttaaggttgatttatgtgttttgagcttacattatggatttacagcacataattagcttaaatttagtaactttgattttgattctagtgtttgtctctgttcaatgcttggttcagttgaagatgtgactttgagaaaacattgaaattaaatcattgtcccttactagtttgtttgttaattatgtggttcagaaagaaagatgtttactttaataatataatagattcaatttatacatggaaattgacattcttatattttcagagaaatttggagaaaagggatacttgcttaacttgtaacatgagatgaattttgtaacttgtgttgttaaattcgcattgcctgattacacttttttattgatgggtttaggtgagaagggaagaagaattagagaactgacatct

SEQ ID NO: 72130 - DNA, 537 bp, Prunus persica
  Intron number 3 from transcript ppa011085m (locus ppa01108 5m.g) derived from phytozome v7.0 (chr-ID scaffold_1; pos 9414668 to 9415204 reverse strand)
actgccagagaaattcaagcttctgctaaggtaatttactataattaggcagtatattttcacagtagtctctaattacaatggtaatactataattcatgataatcaatttgagattccaatttaaacagctactacaatcgttggtttcctatcaatgagttaccttttctacatgaaactttggttttttcaccttttcatccataagggtcaatacaaatgatgcttcgcagagggaaataaacattacatgaacaactttaatataccgagaggtacaggcttttgatataaactgtgaaaaactctagcaggttcactgctatgcctgtttccatgaagaataagggtggaacagttcaaattctgaacttgcactcttgtgttggatatctatggttaaaacatgttccttttattttccctctccaaagtgagaataaagattagtatatgggcttactgtgcatgtcagtatagtatcgttgtcattgttaatgtaagtagtgttctttgacagtctgcaggtcttcc

SEQ ID NO: 72131 - DNA, 399 bp, Prunus persica
  Intron number 2 from transcript ppa016461m (locus ppa01646 1m.g) derived from phytozome v7.0 (chr-ID scaffold_1; pos 35049777 to 35050175 reverse strand)
tcaacaagaaacgacgccgtcccaaccttttttatgtaattaatttcagttattatatctcttttttttatacaagcaatattatactttaatctaatcttctaaattatggggaggggattcaaactcacgtgcaaagtgggggagttcctccgctcaaacgaacttggctaagctcatgtttgcgtctatttttattcatgttcagttaattatttagtttaattgaatttttttttctttgctgcaagcaggttggtaaagatgaactctcagttcaactgatgaacaaaccaaacatttttagacctaataatattgaagcttcgagtgctataattccataccggtatgggtttgacagctgtcagctgtcttctcatcaactttagcagcaga

SEQ ID NO: 72132 - DNA, 520 bp, Prunus persica
  Intron number 2 from transcript ppa002726m (locus ppa00272 6m.g) derived from phytozome v7.0 (chr-ID scaffold_1; pos 414809 to 415328 reverse strand)
ttgaaacaacagaagcacaaattattcaaattaaggtatatcatgtcttctatttcttgagctttttgattactttttcacttattcatttttgtgttgtctcacaaatctggtagaagatcattatgatgcttttgattaaagtttataggttaataacaataaatggtaagcttgcatattcttttaaaaagtggctgcattttctggagtccttgctttatctggttgtaaacataataatactgtttttgaatatggtgcaaacgcttaacttatagtttcattggtggatttgtgttcaaattttatagccaaagttgttttttttttctttcgaaaattcagatgtacttgatttttaatttcttttttagctttaaaagtctgttttctttcctggatttgggttgcacattacaggcaacttgagtttgtttgttatcttggcctggtcatgtctaaaatgctgactttatccctttcacttagataaccagtgcaggattgtggtcgcaga

SEQ ID NO: 72133 - DNA, 433 bp, Prunus persica
  Intron number 1 from transcript ppa002726m (locus ppa00272 6m.g) derived from phytozome v7.0 (chr-ID scaffold_1; pos 415322 to 415754 reverse strand)
ccaattacgttcaacaggtttttcttccactttcttatcaatttatgatttttcgtgtttttttatagcatgtcacagtgggacttgagcgtggataaaacttgtattttgtgaatcaattccatgtaaactctctcccaccaaatacctattttgatgcttttacttgtggaggacatatatgcaattattgactatttatgctttccccttttcttagttatcataattttaaatttcatggaaatgcttagataattggtttcttttgatattgttggataatgttttcagtgtgctccacacacatgcatgctttatatttttcgccgttgattttttaccttccttgatatcttgcgatcccttgattaactttgattcccttgcactggaagcctggctgttcaagtgagctttctggggttgaaac

SEQ ID NO: 72134 - DNA, 692 bp, Prunus persica
  Intron number 2 from transcript ppa000311m (locus ppa00031 1m.g) derived from phytozome v7.0 (chr-ID scaffold_4; pos 21479449 to 21480140)
atagacgtgttcgctcatcggtcacagaaataagggtttgtatacagaaacttttgaattgtcttcttatctatataaattttggattattagatttgaccttgtggtttgattgcatacaagtttgttagtatcctctgtggtacgaatttgattactacattgcatgcatgcatacatatctgtgtgcattaacactataaacagttgcatacaaacatggatgtacatacacacttatgtgtgtatgtgcacatacaaagaaatgaacccacagacgcattttcatctgctgttaatattcaaatctgtagtttgtgcaagaaagatcaatgatcaaatttcgatatctttgtggttttttaatgagaaatgttagtcttacaaaagagaaaggaaatacaacctgggaagagaaatcagatcaaaatcacaaggcaaacataggtagtggcatatgaaacaataaaagactgaagggaaactttaaatgaaaaaattaactggtgccaaagatttactaaattctctgacagagtggtactgacctttcagatttagcattatcttcctaactttaaaatcccgacttgctgattcaatgagaatttcacatcaagttacctgtgttactgaataagatataatttgtgtggttaactttattctttcaggctgaaggcagaagtaat

SEQ ID NO: 72135 - DNA, 666 bp, Prunus persica
  Intron number 2 from transcript ppa012105m (locus ppa01154 0m.g) derived from phytozome v7.0 (chr-ID scaffold_3; pos 19142983 to 19143648)
aggcctacgccgctcatctgaagcgatctggcaaggtatcttcacttctgaaccccttctttagcttccgggaaaatgaaacagaaaaccttgttctttcgcctttgttgctttgttatcaatttttctgataaaaaaacaaagaaagcttgaaacttacacgagtttctggaaatcgtagatgatttatggtgagtatgctgtgccatggctaatacaatctcacccttttatgaagaatctaatttgccttgtttgccatatatgtttgattcaatcatgccttgtatataggtgttgattttactggttttgtaggatattttttactggacattgatatgatttgattgttacagttattaaactaataaaaattgaataatgtatcatgtctctgtgaagtaacaagtcatcgttgtagattatgcagtgctgtatgattttgttgaatattcttttaacagctgctctgataatttcgtggacaattgaagaattttgtttcacttatgttgcttttgggtttttcagattattgaagtgatataagtttatggctttatgccccttttgcgccatttccataccatctgttcttattttatttccttcctatggttttgagcagattgagcttcctccttggactgatattgtcaagac

SEQ ID NO: 72136 - DNA, 664 bp, Prunus persica
  Intron number 1 from transcript ppa000195m (locus ppa00019 6m.g) derived from phytozome v7.0 (chr-ID scaffold_1; pos 31508017 to 31508680 reverse strand)
ccaaggtcaagggcttcccctattggcctgccaaggtctgatttttaattcgctgtcgctttctctcttttacggattctgcttcttcatctacaactttgtgtctatatggtttccgcctcttcatttacgactttgtgtatatgtagtgtttctgctttacgcttatgtttttggttgtgtttgggcattagggttttccagtatatgcttttgtattgcttgttgatcggtgtgctctacttggatttgacttttcgtagaatgtgataactaacgaattttcataggcttttggacttgtgtgtttactgaatgggactgaacatagtgaggatttcagacattatggatatcttgtccttaggtctgtttatatgatggtcgtctaagtttttagaataaagtatttttctttttgtcatatctatttaatttattgtttaatctatattatgtctaggatttgttgcactgagctggtatatggaccatgaactttcagtaatttggcgtgtttagaattggttgttttatttatttgtggttaatagtaactccgttagatttttgggttataaccaatttgattggcatttgaactagattttgtgggtttgaattttcagattagcaggcctgaagattggaagaaggtccctga

SEQ ID NO: 72137 - DNA, 510 bp, Prunus persica
  Intron number 1 from transcript ppa025308m (locus ppa02530 8m.g) derived from phytozome v7.0 (chr-ID scaffold_8; pos 112331 to 112840)
ctgtggcttgggcttcggcgtcggcctcctcggcggtacttggttcttctttctctctcatcttctcacgttgaattgagttgagttttctgtttgtatatcctaatttagggttagactgccaatcaattagttgccactgccaggcctaggtttgtatagaatatagaattttgagtccatttaatttaattagggcaccggcgcacagcatattaattgtctggcgacttggaattttggtcgttaagctaaacagtccttgaattaccagtggcagtgagagtgaggtgatcatttatacagctagagcctagagctagctacccgacgcaattcttttctagctgcacctgcaccacacgattttatcaacacagtggcagtgatcatttgatcatttcatattcatctttatgtgtttgtgttatgtttaatgacaagtatggttttgcttttggaaaaccaactctaggcttaggatttggtcctgggattcctggcttacaa

SEQ ID NO: 72138 - DNA, 279 bp, Prunus persica
  Intron number 2 from transcript ppa017567m (locus ppa01756 7m.g) derived from phytozome v7.0 (chr-ID scaffold_3; pos 19726614 to 19726892 reverse strand)
cagctagctctggacctgtctctgtctagcgcaaggtaacagccaattaaaacgttcaaaaaacacgtcgttttagctttttataccttaaaaggtaaaagatgaccacttccccataaacactactgtagaaattgcctcatatagaaaatttgcttctgccttttcagttcgcttttgactatttcacatttttattaattgaagctcttttttttttgttatttttcttttctttacattaattttaattcattttcatcgccttgtgatttcagg

SEQ ID NO: 72139 - DNA, 767 bp, Prunus persica
  Intron number 2 from transcript ppa008856m (locus ppa00885 6m.g) derived from phytozome v7.0 (chr-ID scaffold_3; pos 18510302 to 18511068)
agaggcaagctcaaagcctaagcctttttttttttttcctctttgcattaaatcactccttcaatttttctttttcaattctgctttgtacgtgtttccagagctcgaaaattatagttagaataagtagagggaaattggttttgcgttggatatgttatagttgcagtaaaaggtctctgtgttttcattttcttttttcctttcatttttcagacaaaatggggccttaccaattgccacaatgtacctacaggaaaagttggcattatattttcgtagatgtcgtacttcagttgtgtgttttgttgaattttgtattaggaagagaaaaagaagagagttcagggtggtaaaggaggacttctaagctgtagaaaattctcttacaagtattaaaaactttaaaagttcaaaaatttacaaaatgtttgaccttgtgggtacacaatttcaagcctatttggctatccaaaattgaatttgtctattagtcatgcaggttagcaaatttgaggatcgaatgtttatttatttatttatttatattcaatgaaagcattatgtgttgacttttaattgtagtctttgatccttttcttttttggtattaagttagattgttggcgatatgaagattttatctttctgttactgttgtaactctgtttgctgctcttttatgctatgcgggtctttctttttaatagcatgggcataaactcttcactcacctgggcaatacatatttctgaggcagatttcag

SEQ ID NO: 72140 - DNA, 849 bp, Prunus persica
  Intron number 1 from transcript ppa004293m (locus ppa00429 3m.g) derived from phytozome v7.0 (chr-ID scaffold_1; pos 44983829 to 44984677 reverse strand)
ggccgattgtgctgatattgattgctctcttactggtatgctcaagttcagcgcaaaaaatataactgaagtacccaaatgtgttttgagtaaatactgacatatttagagtttcacaaatttcttttttatgtatgcatgtattgatggaaaacctatttggcttatgaagttaatgatcattaattacccttgctttagcttcttgataagaggtgaatggttgtctttgcttttgagttagtgggttaagctgcttttgttctttcttcaattgggattttcccattagataatgcatgagacccattattatatgtaacccaatttcaggcaacttatgaggaactttcatggtcaataataggactctagtgtactttttagtcagctcagttttcctgaattgtttctggatgatgcaaattttcacaaatcactacacattctgaaattagtacgaatttcggtctgtatttttcaagcatgtttatgcttctgctggttatttccaatagtttctggtataattcacggacttggaactgtattgatgctaattaaaacttgattccttaatttgtgactgtggcttgcttctttcagcaccaactacacacatgcagcctgcctgaacttagctgtagaatgattgtactatgaaatgtttacttctttctgtaattcatgtcactatcaatgtaccatatttaggattagttataatccaaactaatactgaagtacattgtttgtaatttttgtgtcacttagactttgctttcttattgatcctttttggttttatattttctgttatcagatcatttggataggacctccctaggt

SEQ ID NO: 72141 - DNA, 725 bp, Prunus persica
  Intron number 1 from transcript ppa002571m (locus ppa00257 1m.g) derived from phytozome v7.0 (chr-ID scaffold_5; pos 463587 to 464311)
cacatactgaaaggtcaataggaatcctaaaacataaggaaatagttcaatctcctatggtggaggtttgtaacttcaatggagactcaaagctaaattttgaacctaaaacttattccgatattaaaaaaaatatcactaaatatttaccaatatattacattggtcaaagactaaacaaacaataatacaaaagaacttacaaagaagatcatcgacgaatcttaaaatcaaaacagtaatcatgtttttatatctacgattctagaaggtagtattcctttgaaaaatacttttactctcaatatttccacatattgctttttttactttacagaatatttccacatattgctgtaagaatagtgagattccgctaattcatataatcaatttagaatttttaaaacatttattacgaggaacataagggttagggttagcattgaatggcattaggggaaatcagtgaatgaaaatagttggggcaaatcagtgaatgaaaaaaatataggggatgtgggtatgtcgtaataaaatggaaaaagaaggggcacttggaaataagagaagaaagagctgagagagcaggaggttttggttttggttggtagtatcgccaatggccgggcccgtttgcactctataaaacccgtcatttgaagacccgtcaccagacaccagacgcagcagcgcttttctactttacaccaaactcaataccc

SEQ ID NO: 72142 - DNA, 725 bp, Prunus persica
  Intron number 2 from transcript ppa002571m (locus ppa00257 1m.g) derived from phytozome v7.0 (chr-ID scaffold_5; pos 464436 to 465160)
cccaatatcaaccagagcttcctccttgtctgcaggtccctctctttactctttgcttcttcttttttctccttttatttatttatttattggttccgtagtttgagttgtttctcagtacttaaattctttatcgcgtttttacttgtctagttgcagatccagttatgattagatctaactgagtattagtacacagaagtagaagtttggtggatggaactcccttagattgaattgaattgaattgaattgaatatttattttgttactgaagtggtctgcttgttgctttgcctagtcgttaactgttgcagatttgctatttgaaggtttgaatttatagtgatatgatcttagagtttatatcaaacagatagtcttagatatgaagtacgaactaaacatgaaaggggacgggtttatggcttttatcatactagtcaagtctaaactcgggaacgagagatatatgtttgacttggtgtctgattgctgtgcaatcaataagaacagacatttaagtgtatttgctatgcaatctctgattgactagaggagtttttcgttttctcaacataattgttttgatttttaggatttatcaactatatttaaatggggtgaatcttttacccccggcggttgaaatttttactgagttcatgtttatacattgtcatttcgcagggagctactgtaagggttgaatttggtgatacaac

SEQ ID NO: 72143 - DNA, 903 bp, Prunus persica
  Intron number 2 from transcript ppa013148m (locus ppa01314 8m.g) derived from phytozome v7.0 (chr-ID scaffold_7; pos 10807375 to 10808277 reverse strand)
tggatttctctctgtttgggacctgaaaaatcaaagtgagtaacttcaacgagactaattatcgtgtttgggttgagttagtgcttcataatctggaaacatcttaagtcgtaagtttcaaattgaacatattttatgtaatctgtcttgcaaagttttagcagccaaacttgaaattactgatttggattgttgaaagtgaagccagaatggtgtttgatccaaaagtgattgccctttcttgtttatctgcaaattttaataataccttgttcaggttgaatatagtttacaaagggtatagctggtttgtgatacttcattaccgttttctagtgtttccatttattttcctttcaaactctctggactggcttgattaatgcttcatttagttaagtcagagccactagataatagaatctgttgggagcatcaaagatgcatttttgtttttgggtatttgaaatgataggggtgaagggttcgagcctgcatttttctttcttctcaattggatttctcataaaccaaagatagtgtaaggaattaaagaggcagtcatgattgactttaactttctgattttgtttgtactatgtagtacctttttgaggtaaggcttaggattttcctgttccttaaaggtctcagttttagctcaaatatatatatatataaactggtttcattaataattgtgtcattggaggctgatatggatttgctttaatcctcttctgcttgtggataccttaatactggtattctgtattataaactttgcatgttgattagcggagtttagtctgttactcattttgagttttgcttataaaattatttgtttgtatttgcagaaatttttctagtttggaattttcttcaccaggtttatttcct

SEQ ID NO: 72144 - DNA, 1005 bp, Prunus persica
  Intron number 1 from transcript ppa010194m (locus ppa01019 4m.g) derived from phytozome v7.0 (chr-ID scaffold_5; pos 3690008 to 3691012)
ctccctcgtagcctccaagagcttcaaatcctcaggtacttttcccaatttcctgtattttgttttagatatatcataaattgcccataaaagattcaattttcaatgttctggagcttagagaaaaggaacataattgatgggaaatttgtggttttctcatgcaattccaatctagggcttttttttcccgctgttttattggtataagcagttttctgcatcagagctctgttagttgtgtagtaaatcatggatttttagctttgagagctatttttctctttccaaagctaaaccaataagcgtgatctttttgtgaggatctatcttctagctaaataattgaagcattctattttgacaaatcacttttcaagagttgaaaataatacatagattgttgtttcctaataagataataggtctttattttagtacaactggtattggtctaagcaagtttagattcggacctttgattcttcttctgtgaaactttatgtgacatcatgttgctgtaatattagttatgagttgtggcacaaatgcctaatgtgaactaatgtgaattagtgcattagtgtgacctaaagatgctgtagtaggagggttgggagtgatttgtgtagactcaatgaggggaaataatgctaatgtcctttatttattgttataaccatttaaagccatttcacttggtagagaggtggaacgagattcttgtggtataattttaatttaggtttgataattttattgcttgagtattttgaaagacatagctgtaacatcattagcactatgaacttgctttgttatagcaaatctacttccctagtttgacgaatgatgtattgtgttttgtccctgctgtatgttcttcatttagagagagattgcggaatattagtttcatagtatttgtcagttttatttatttattgtttcattgtcttcttctgggtagagttcaccttgaggactacacaagtgactacactg

SEQ ID NO: 72145 - DNA, 1031 bp, Prunus persica
  Intron number 2 from transcript ppa021657m (locus ppa02165 7m.g) derived from phytozome v7.0 (chr-ID scaffold_8; pos 19829400 to 19830430 reverse strand)
ggacagaagccaatcaaaggttctcctcaccctaggtataatatatttctgcactttgaaatgggaacttgattgattgtggtgcataaaattttgtttcaatgttttatatctaatatgcagaattgcagtattttagttaatcttattgatagttatgggaatttagcttgaaatgcaaaataagttgatgagcatggttgaaaatttattttttgcgaatgtcagtgttgttaactcgttttattttacttcttcacatgcacagtagaggcatgcattcccccatttaaaaatcagatagtatgattgaccaattggattgtgatatctttggtaatcagcaagtcatcttgtgggttatctgttgttagtattctgcaaattgatgccacaggattgttttgttagatgtaatgtctagtaggctccattgggaatatggaatagccctggatttactgattttatcaaggatgctaattatgaccttcaatagaaaaacatctagtgtcaagtggtttgaagttactctcctggttcatttgttgctgagaagagatggtggccaaaaaagttcagtttcctagccatcctgcatgttgcaatatgcatgtttggttgtcagattctattttcttttgttcaaatttttatcaactctcacagttgaatgatggtcaagatttgttccaagaatcaattttgaggatgatatgtgattgatgttgtaatgtttgttgatgcacatcaactttattcaatactactacacttttgagtttgttcgatactagcatgcacttttgagtttattctatactttgcactttcaaatgtaggggtcaagatttgttcaaagaataaattttgaatatgactttaagtgatatttaataatgcttattgatgcacttttgagtttattcgatactactatgtttgtagaagatcatggactttaagtttaaaattcttaggtacttaattaactgttgaactccttttaacttttgcaggggatactataa

SEQ ID NO: 72146 - DNA, 334 bp, Prunus persica
  Intron number 2 from transcript ppa019576m (locus ppa01957 6m.g) derived from phytozome v7.0 (chr-ID scaffold_4; pos 11217155 to 11217488 reverse strand)
ctctgatcatccatacgacaagtgagttcctctatctcctcatcttcactttcattttttatatacacactctttgatttattttcatgtttctttctttaatcagaggcggagtttgaatagcttagtaggctattacataaatcttttgcaaattctttcatgaaatgctagaaaatgtctttaaattcacaaggaactacacataggttggagggcatgaccaccttagtcttgcacgtgactccgccgttggacatatgttaatatttctagacattatattgcactataattaaatgactttttttttttttccatgtttcagaataaa

SEQ ID NO: 72147 - DNA, 990 bp, Prunus persica
  Intron number 1 from transcript ppa017182m (locus ppa01718 2m.g) derived from phytozome v7.0 (chr-ID scaffold_7; pos 22514897 to 22515886 reverse strand)
tccaagatcgcattgttttctttgccactgacaaagtaagtaggaatcaatcacaattcacaatcaatattacttactattattaatttctaatatttctgtctctctctctctctctctctctctctcgctctctctaatacccattcctcctcaacagctaacgtggcttctttacaattacaaaacaacacgtgtttttttgtttttgttttttttaaactcctttaagtcaagtcttttgctggttttttttattaaaaaacttgggtaagttaaggaggaagagacgaaggcaggggaggttgacttgcaggtttttttattttttggaaattttattttcatggttgttgaagaaaggaaaaggagaaaacttacatgctaaatagaggtgaaatcaaaaaaaattgccggtgccgttctagccacaacaagttaggcaaaaatggaaagaaaaaaaaatggtcagagacagcatactaagccaggcaaaatggaaataaaatgaaggtctatcttctgttgatatgaggatcgtggaaaaaaaagaggaaaagaggtggtctttatttcaccaaaattcctaaattagaagaaggaaaaagaaagaaagaaaaaacagccggagggaggaagagagaagaaggggaaaagaaagaaagaggtgataaccagctgccggagagaggaagaagaacgttttaatatttttactattttaacctatgtattatatctatttcttataataatattacatgcagtagcctacccaagccttcgtctcttcctccttaaaactaacccaagttaaagaaaaccaacaaaagacttgagttaaaggagttgaaagaaaaacaaaaacagaaaagatacacacgtgagttgttgaggaggaatggctcctgatatatcaggagtcaaacattgtcctaataataatatatatacttctttttttaccccacgcacagccaatagttggat

SEQ ID NO: 72148 - DNA, 283 bp, Prunus persica
  Intron number 1 from transcript ppa019920m (locus ppa01992 0m.g) derived from phytozome v7.0 (chr-ID scaffold_3; pos 6538013 to 6538295)
aggctacattgtgaggggaaccttgagaaacccaggtcactccaaatcattatcttcttggcctctgagttgtttttttgtcttacattcgaagtgtcgacatgttatgttgcgggactttgaattaaaaccgaccattaatttatttcaattatacatgaatttgcggttttgattcctagtttgacataacacgtaacatatattttgagacataattcttccttgtattgatatgttttttttcctttttgatgcttttcttattttgggttgatcacag

SEQ ID NO: 72149 - DNA, 920 bp, Prunus persica
  Intron number 1 from transcript ppa002008m (locus ppa00200 8m.g) derived from phytozome v7.0 (chr-ID scaffold_10; pos 446026 to 446945 reverse strand)
tggttggtgagactggtagtggtaaaaccacccaggtttgtttctgcaaggctttttactttaatttggtctctatggtagcattgaaaacttttgcacttggtaatgaatatttattcgtaaaatgagctaagattacgtttcttctttggttgctgagaaactcgatgaaaaatgacccttaaacttaatggtagttgcattaccattgctgttagcttgaaaataatggtaaatattgtgttgtttaggaaggtaaactgagagaaaagaaagtggaatggaaattttgcacttggtaatgaatatttattcgtaaaatgagctaagattacgtttcatctttggttggtgagaaactcgatgaaaggtgacccttaaacttaatggtagttgcattactattgctgttagcttgaaaataatagtaaatattgtgttgtttaggaaggtaaactgagagaaaagaaagtggaatttttagaacttcttgtagtcgtccaccacgttgtgcattgcttttttaacgcccagttgtgaaacttatatgacatgcagtcgacttatgttttgcatggtaatgatttaattctataatgcaagtagcttttggtttcattccttcattttgtttggtttggtagaatttactgattcacccaacttgctgaaccaaatttgtcacccttggcagagggtgcccttttacccaaagaccagtggctgttgtgttatttgaatgtagaagtcttggttttccaaaggccctgttataaatagttctcttttttgctgaatgttataatgtgtaccactttcccaacacaactaagaatattacctactggaagttcactaaattcaatatgtgcttctctattgcagatccctcaatttgttttggaagctgttgattcgga

SEQ ID NO: 72150 - DNA, 904 bp, Prunus persica
  Intron number 2 from transcript ppb015658m (locus ppb01565 8m.g) derived from phytozome v7.0 (chr-ID scaffold_8; pos 7444661 to 7445564 reverse strand)
ttggcgtgtaagtgtgtgttcttcttgttattgacactgaacccatttttctaggaggccataaccatataaagtaggtataaattcggtcaaaatgtttctgtagaggatctgaataataaacaatattgctgtaaactgtattatctatgggctttgttaggtctggattcattatatatggtctacttagttttttattttttatttttgttaaatgaatgtattatcatatatttgtatttccttccttttaaatataatttccccttattaatttttctcttcctcttttttcatatatctggattcattatgtagacagatgcaatacaagctagcgtcaaagagatcgactatgattttgtagctccaaaaataaaagctggttccatttatgaaataacatatttccacactggtcgcaacaaaccatctcacaaagttgtaccacatgttgcacaattgttctttaatgcgagaacaactttcaaagaactaccaaccatccacccacacattccacgacatcgattttatttgtagattatactcaattgtccactcgcatagacaaaattgacatcctaacagttaatactctatatattattaaaaactatgcatatatatacaataagtatttatccaaaaaatttccacattttaatatccttatgatatttttttttcatcatattgcaagatatttttggacacattactggaatacaaccattggaacataaaatggtgggcaatgagaggcttgagaataaatgtgaagtctgcatcgaaaatatcatgtacaaatattcagaaaatgtttataattcaaattttaaactattatatctctttctaaatattttttttctccacatctaatcattcaggaaagaag

SEQ ID NO: 72151 - DNA, 819 bp, Prunus persica
  Intron number 2 from transcript ppa013017m (locus ppa01301 7m.g) derived from phytozome v7.0 (chr-ID scaffold_8; pos 12431458 to 12432276)
gcagattctctgaagattcagctcaataggtatgaaggttcttctaagctcgtattgaaaattttgtaaatgcattttttcgctaagaaaacatctgataccccttccaaatgattttgaatgcaagcttaagggagttgtgatttccttattgttgtgagcttgggttgtgtcccctttggcatttacttgagctcacttcaagtagatgccacactttttaatgtatggctggctgctacgacaatctatttctatatacacaatctgataattaatgtttctacatataatctgttgtgtgtgtgttttaaatttctttcatcaaaggtatgtgtcgtgtgtgcgttttaggacaggaatttgaacattttcacatatttgttggttttaaatttttatgatcatgaacttaattatttaaaaaataataatcatgaacttaatcagttcaaacctcatgtatacttatattgttctttcaatcacttttctttgtcatatatacatatgaaaatgattgaggaattcaaatacttccaaaactcggttaaaagtaaattccaaggcctatatttatgccatacattttgcttaaaaaatgttcgttcttattaagaggtttttcctggaagatgtgatctttacctgctattatttagccccatatgtgtgttaccacgtttagttgagttctactccagagaagaaggtgttgtattgtggttttttggttttgggcaatttagagtacaggagaactgatatatttaagctgtggcagaggatcgtcaggtctttgggcgcgggctatcaaca

SEQ ID NO: 72152 - DNA, 499 bp, Prunus persica
  Intron number 2 from transcript ppa003611m (locus ppa00361 1m.g) derived from phytozome v7.0 (chr-ID scaffold_6; pos 4830669 to 4831167)
caggaggaattttcctgggtttctgtgattattccgtacgtttccatcaagtcttctttatctatatgagttttttttttttttttttttttccatgctttgagtaaatgggtaatcgttttttagctttaattcttcatttcttttggagttggttaagtaatggggtatgattttctaagtgttgtacaagttgggtgctttcaatggaagtatgcttgcttacttttggtatggaagcaaattgagtgctttttgaattgtagccaacaatgccctgtgttgtcaaagatgaagaggtttatgttattcttttttttgaaacaaatgaaagaagcagggttagatgaatttacaaattgcaatttgcttaagtttacttttgaatatctctctactctgttggtatgtagatacttgacctcaactgtcataaattaattactaaattcttgggactctagcttcctgtttccagctttgggaggtttgctatttg

SEQ ID NO: 72153 - DNA, 729 bp, Prunus persica
  Intron number 1 from transcript ppa008156m (locus ppa00815 4m.g) derived from phytozome v7.0 (chr-ID scaffold_2; pos 22035832 to 22036560 reverse strand)
agaaagcaccaccagttttgtttattttctgtaaggtattaatatatatccatgtcgagcatcatttttaaaattttttaaattactcaatttgtttttcctttttcttcttgtttttgggttgaaaaaaattgttgggtttgtgtgagatttagatttcagatctgaaaataatagtggtgtggggttttagtttcgttgtagagaagcttctgatgactacctacttttcgtgattttgaagcatcgtacatctctctctctctctctctctctctctcttttagttggtagtttggtagtaccctaatttttttttcttggttgtttgattccgaaagtttatttattttttaaattcaatttgaccccatttacattctgtatataaatgctccctctcatatctcataccacacttgcactcattaacagcttggggaattggggattgctctcgacagacgggtgatctgaacttgatttgctgttcagttcataatctgaaaaagaaaaaagagctttgctttcttcatctgtttttcatagtttttatttgggttcttgtaaatttttctgctgaacgatgtgttttgagtgttaagtttggtctctatattttctgtcaactttgatttcattttggaatctgggattgtgggttggtagtgggtgtatttgatctaaaatgtagaagttttgattgtctggagtgcagaagtttaacaa

SEQ ID NO: 72154 - DNA, 695 bp, Prunus persica
  Intron number 4 from transcript ppa004887m (locus ppa00488 7m.g) derived from phytozome v7.0 (chr-ID scaffold_4; pos 3601450 to 3602144 reverse strand)
agaggtccaagaaagaaaggcgccagcttgtgaggcacactctcttgttctacactaaagaatcttagttatttgttattacttggcaaaatctaatatctcatgcattatagtattagattgtacttgtatgtagtattattatgtcctctcataggctgtttacagtagggaattcctggcttgctttgggctgaattataggtgaattttgtgatcttatggagatcggtcctaagccatatcatctatgagatttgtaattagattatttcagccttttcttcccactagctatccaaattaaagatgtggagacggcaagtgtttttttgttagattaggttttttttttgttggacaaattttattgaatatatgtgaatatacaatttgtacataagtaaatgattacatttcttatcactggattgctatgaggagatcaggtgggtgaacaaaaggcagaaagggagttacattcacgtcatatttggtagacaagtgatcattgagagcttattgaggctaaagttataatataacacttaaggcattgcacataacctttagcaaagctttctagtgcaggttactgtagttcattgtagaggtaaattaacatcccatcgttcccttataattaccatgctatttttttcctttagttattcatcttttgatacttttcagga

SEQ ID NO: 72155 - DNA, 269 bp, Prunus persica
  Intron number 1 from transcript ppa020383m (locus ppa02038 3m.g) derived from phytozome v7.0 (chr-ID scaffold_4; pos 3546602 to 3546870)
cgcagcccccgctatacaggccacacctatattgggtaccttccatcttccccagtttttttattttttattttttattttttcaaattctcaatttgttcagaataatcaggtcaatcttgatccatctgaaattctttaaattttgaggttttcttttagggcttggattaagaagagagcccactttgactgtgtcttggtttatgttttatttgggcggtgctgatacagattcacagggaacccacggcgtcgtataagacagc

SEQ ID NO: 72156 - DNA, 724 bp, Prunus persica
  Intron number 1 from transcript ppb023750m (locus ppb02375 0m.g) derived from phytozome v7.0 (chr-ID scaffold_7; pos 4186816 to 4187539)
cctcaaggcaaatagtagcaaaagtggattctagagtgagtaatggcttggtccgaaggatttcactacgaatgctattataaatatcatcaagcctagccaaaaacatgtagacacactcctctgtaatctcctgttctctggcaagaatcacatctgcttgggtaaaaggaataggcttcctataatccaactcttgctagagagcactcaaattagcataataggcagcaagtgattgttcggcttgtctcatctgcatagcctttcgagacgagacaagtcatacacaagagatctatcgacaccctcaaaataagtcttcgagactgcatcccagatacccttagcagtaggcagacggataaataaattcatcacatcaggttccaaggaagaaatcaaccatcctttaacaatagcattatccatcacccatttgtcataactggggtctccaaaaacgggttgtttagtattccctgttagataacaatattttccactgccagcaacaaacgcctccacaagctgagaccacagggagtaggtgatgccattaagcttgacatcaaaaggtatggcatcaggttaagatggaagattgactggtaaagtcaatggagatggtgtacacgtatttcgggatgcaccgctaaccacagattcgtcactcatgataactgtaggtgagagagaggagaaaaataggactgcaaaagag

SEQ ID NO: 72157 - DNA, 816 bp, Prunus persica
  Intron number 1 from transcript ppa024114m (locus ppa02411 4m.g) derived from phytozome v7.0 (chr-ID scaffold_6; pos 5668208 to 5669023)
caatgtgagttctaggatcttcttgtttttcagttaatgataatacttaggtttcaggaactaaaaggatttcaagttcagtttttttctttctgttgctatgagggttacagtgggaagataaatttagaataaaaaagaaacataaacgcagaagttgtgcttagttctgtaccacttttatcctctgcactgaatttaccacaattgctatagaatggtcttacaagccatgtccaagttgggaaaagaaatggtgtagattttatcaggaatctaaattacaaaatctgaggcccatcttggtgatcttatcttatacatccaaaccctttccaagacgttgtcaagaatattgttagaatttgtctactttttccatgagaaactgtatagaagaatattgttagaatttgtctactttttccatgagaaactgtatagaagaattatttgggcccagttataatatcttggcctcttgcctcttctttttctttcttcttgtaggtactatactttttaatacgattccagaattaaatttggttatgcatatttatttgaactttagccattgctacaattggtgtgcactgattaagtggtccaaactttgatacactcaaaagttaaaaaagttatagtatattggggatcttttgaatccataggcaggcaaataatgaaggagctaaatcataagtggatttcagaagtgtctctgatcaccatatagcagtccaaattgtagagaaaagcttggaatgtctaatatatgaagggaagatcctcattgacagtgtcaatctgcag

SEQ ID NO: 72158 - DNA, 633 bp, Prunus persica
  Intron number 1 from transcript ppa001396m (locus ppa00139 6m.g) derived from phytozome v7.0 (chr-ID scaffold_5; pos 2264684 to 2265316)
ccatcgtttgcttgaagcaattcacctgtacccaagtccaaaaccgcctgtatgtgatattatactattccatccttgtcaaaattcactccttttttgtttcttttctgaaattttcttgatgggtatttttgtttcgtttaggtttttttttttttgtgggttgggtcaagggaattgagggagaaagggttctcaaatttatggtttagttgattaagaattcaggaatctagtgattttggtttcagttagttcattatttgcagtcatggttaagcattgatgatggaagcaagaaggaaaatctgtaacatttctagaagaaattaatttaaatgcacccagtgattgaaaagtacatatatatatattattgttattgtgtgttcttcagcttgtattatttgttttcttctttttttgttatgttaattgaaagtagttctgctttaatgccatgccaagtctgctttttctcttcctcaaaaaatatgcggattctgtttactgcttgcaggatcatcattataattgaattggatttggtgcttgataaatgtgatctcattggagagcctgtagcaggacctaaatatctgaatgcacagtcctcaggggcattacctggaa

SEQ ID NO: 72159 - DNA, 756 bp, Prunus persica
  Intron number 1 from transcript ppa002334m (locus ppa00233 4m.g) derived from phytozome v7.0 (chr-ID scaffold_5; pos 8955195 to 8955950)
agtacgtggatttttttttttttctttctttttttctgttgaatggacaaaatgattgcttggttttttgttttttattttatttgtggttttaacttttggtccataaatgaaatgaaatggaccatcaaaacacgtgggtttgattgataaaggagaacctttctggttgacccaaaaaaaaaaacggagaacattagttattattttatttattttttctattcatttggttgcaaaaagtgattttccacttttgtttaaaattttatttttgaataaagtgattgtactttattgaagtacaattgaaatgaacttcacgcaaatatctatactaattaatatgatttttccagtcaattttcagaattagacaaaatagttattatgttactttttttgagtggttattatgttactttttaataatttaataacaactgataacttactgacactttaattttattttttttaaaatacaaacaataatttaaactataagaagaagagatttctctgatttaactcaacaagcttcaaatttaataaaatgaacttgatagaagtttttctttgcaagtaattgttgcgtgggtctatctaacacttcatcttcttatttattagaattaaattgcatgttaatattttattgattcatttttctttctttatggttggctttgactggtgactcttcttcgggctgcttcagatcccaacggtaagcaatctctaagtttctgttta

SEQ ID NO: 72160 - DNA, 865 bp, Prunus persica
  Intron number 1 from transcript ppa019223m (locus ppa01922 3m.g) derived from phytozome v7.0 (chr-ID scaffold_5; pos 3279168 to 3280032 reverse strand)
aaaatttctggtgattctaatataagtgaaggtatgcatgtcttcttaataaatatatcttccagaacatggttcatttaaagaagtagccatgaaataacaggattaacacttagaagctttgtttataagttctcctaaaaaaaaaagttagctatgaaagcaaaagtataatataattttcattagtcaatataagtgaaggtaataattttctcttgacctggtgagatagtcctatgccttggttatctaaattaactatttggatggccagaggcccagagttgttgatatatggtgtttgtaaaatctgtatttactcaccttctagataatttgattttatgttgttgatattattgctcttatgctgttacgctttacaaacacagacgcacacagacacacacccacacacaaaacataagtacatacttctatgttatggatatatcatctttgagccctgtacgttattgaagtagtattattgtatgattctcctaggacagaagattgtatattgaaaggctttagttttactggttggccatggctgtttaatcaatgatgcaaacatattgttctttgatttcaagcttaccattaccctacaaaagatagaagtcaagtctgatgaattaattatccactcaataaccttgtatgagttcacaatcactacaaatgaaccttggtttgggaagttgaagtgtgtttttgtttcagtccatgtcatggctgaacgatggtgctgtggtggctttataaatttcatgttgttttcggcaaatggaattatggaagtttatcctctctgattgtatcaattacttttttacataaattacagataaaaagg

SEQ ID NO: 72161 - DNA, 1054 bp, Prunus persica
  Intron number 3 from transcript ppa013071m (locus ppa01307 1m.g) derived from phytozome v7.0 (chr-ID scaffold_8; pos 14775802 to 14776855 reverse strand)
gtgttgaggtagcgacgggaaagggacttctggaggtatgaacacatgctataggtttttacatcccacccaagattgcctttttactttcaattgcattcatatttatgggaagtagtgttggtttccatacactgaacaaccttctgaaaccaaagatgatttaccaagtgcatcaaagatattgaaaatttatccttgatgttgctttaagtgtcgatttaattccgtaggaaacttaccaaacctcaaataagaaattagaagtagcatctatagattatttgtgagttcatttttaatacttgagagacttggagccgaactcagttgaaatcttgtcactttgacttggttcttcctacatacaccaagtcatagggttacaatgactatccattgaaattgtggtccctcacagagtgagcttcttctttcttgtctttaagcttttgttatctccgtgcttcttaaggagatgccttcagatctaaagctagcttctgatgaactatttcaactcttttggttggggtatggcattgcttatgcggatctttgttgccgccaactgttaaatgcattacagtttcaaagatttttttagttaaattcccagacgccagcttttcttcagtctaggaaattttggagcagggaggctctcatgtcacctgctcattatatcttttagatgatttgaaaacttaaatcttacctgaataagcactccctgttccatcccttggaatgttgtacttcatataaagtcaccttatgtactaatagacaaagacaactttcattttgccacataattctcaaagagatagagatttctatgagattgttccttgtgttcctttccttgtactactttgaattggaagcagccatgaaaacagaataacatcatagtcacaaaggatttccttacattcataaaagtgtcttttttctaagggaatatcattctcaacaactacaattaatgataagttttcattttgattgtgcagaattttgggctcacaagccccctgcctacagctgc

SEQ ID NO: 72162 - DNA, 507 bp, Prunus persica
  Intron number 2 from transcript ppa013071m (locus ppa01307 1m.g) derived from phytozome v7.0 (chr-ID scaffold_8; pos 14776962 to 14777468 reverse strand)
aattgggactgcctttgctactggttctccactcagtaagcctttgactcttacagcttttatcttctctgctaattgccttgactttctgtttagcaatccaccataacctgtactatcatgggtagcaagatttccaaaactatgggaaaagttgttttctttaaaatttatttcatttctggaatgagggtaatgcagctcaattgggttttatgaacatttaaagaagcgttgtgtgtaattattatttagtggaaagaaagtatgttgatattaggactgcaaaatccctctataagaatttttacagaagcttctagtttgcaagttcttgtatgcataagagcataaatggcacattaacttcttactcaccttgaccgctcatcttctgaagtgttaggtttcatttcactgggtttttgctctattttgtgggataagagctgatgtttgaatttgttttcagtcattagaactgtatatcatcaaaggaaggcagta

SEQ ID NO: 72163 - DNA, 843 bp, Prunus persica
  Intron number 1 from transcript ppa001749m (locus ppa00174 9m.g) derived from phytozome v7.0 (chr-ID scaffold_3; pos 2235254 to 2236096 reverse strand)
atttggtgaagagaaaaagagataaaaggaaggaggtatcctctaatgtaagttttggtttggctttgaattatcatttattttctttgtggatcattcttttcccacctttagctttacgtgacattatatcttaacatcatacatgtgaacaactggacagtagtttcttgttctgtatgaagatcttaagtcttttcaaaataagggtgtaatgagctttttagactaccgagacatgcatgggtggttttatacttttggtgttttggcttcctgaataatacaagtcatcagtcaatagtgacagagacacactactgtaccgctaatctactggtttttatttgacttattaaattcacagtcttcttggcataatgatccccagaaattcagtaactagcgtatgctcttatcaaggaatttatgttttgtggaatcaatggcccaccataaaaatgcaaccaattaatcgattgtgatatgatgagccttggtaatcaattaatgaactctggagtaattcaacaatgtgtgtttcaattcttcgagaaacttcttggtgctcctaactgagcttgttagtggacttcacttgaattttagataaattgtaaatgctttcgaatgatcacattgtgcaaaagttatcgttatatgatttctcatttgtagtttaattatttggagagagtcataaagttgtaggactccctaagttcttatttgcaattaatattattgtaacttttttaatgttaaatcattttaaattgttgcaaggggaacttattataaagcaaaagttttactgctttagtgtatttgtagcttcagagt

SEQ ID NO: 72164 - DNA, 707 bp, Prunus persica
  Intron number 2 from transcript ppa017956m (locus ppa01795 6m.g) derived from phytozome v7.0 (chr-ID scaffold_1; pos 609208 to 609914)
ttgtagcttcaaggctatccaaagattttgagtctgtgcattctcaacatgcacagattagggagaactcgagtacaatcatcgattgtctcgaaaaggatatgctggattggaggatcaattggaggaaaccatgcctggggtagaaattgatcgatctaccttatggaagagagctagacaggacaaacatggtaacatccctgatccaaaggtggcagagaaagcaaaattaattgtaagcctactatcactctgttttaaatttttattaaactgtgaattattcttattacgtcgtatgttatatttttcgtcgtgtgaatgatattaccacgtcgaaaagtttttaaaaacgtcgttaaaggtctaaataggaatcactactaattttctgtaattatagcataagacgtcggtggttcattttcgcgtcgtttgaatgatattaccacgtcgaaacttttttaaaaacgtcgttaacggtctaaataggaatcactactctgttttctttaattataacataagacgtcggttgtttattcatttcgtcgttttaaataaataaccacgtcggtataactaccgtcgtgataagttataataacgtcggtttatacgttattgcgtcgtgtgaaattatataatacgtcgtttgtacataaataaccgtcgtgtgtttttttgtttatctttgttttagg

SEQ ID NO: 72165 - DNA, 468 bp, Prunus persica
  Intron number 1 from transcript ppa006935m (locus ppa00693 5m.g) derived from phytozome v7.0 (chr-ID scaffold_8; pos 17557033 to 17557500)
tcccaagctgaagtgtcctataggtaattctccaattccattgttctgaatctgaatctgttgtcatttcatttcttcacccaatttgaatcctttgtcaaagtttcatgttaatcttctcactctagtaacttttgttttcaaaggtggggacttgggatgaacccaaaaagttacttgcattcatttgtgatgaagatgaaggtttgacctttcatcagtctaatctcattgggtcattgggtgtttcccaaaacttgattctagtactttatgaagtacctttaaatatttaaatgcaccgtgtttagtaaaattgaacattgcccaaatgcgcatgatctgctatctttaatttgttttaatgggtaccagaacttgattgttatactgaaattggttcttttgtttttgttttttgaatccattacagttgtgggtcttgtgcataccctctgaacttgtcat

SEQ ID NO: 72166 - DNA, 330 bp, Prunus persica
  Intron number 1 from transcript ppa006453m (locus ppa00645 3m.g) derived from phytozome v7.0 (chr-ID scaffold_7; pos 21657103 to 21657432)
aatacagggtaattgcttaattgggttcttcattttctcttcttagtttttttgggctttctttgattttggctttgtcattcatttctattgattttccttctgatagaatgcttttggtttgaaactgttgaactttaagtttttgccttttcttctttgaaatatctgcatacgtatgtaccatttaatgattaagttaatctttccaaaaccatattaatccaattcatacgaattccgaaatttaatcagaagtgttcttgtgctcctgtaaattccttatttgagaagttctttattcgaacatgtttcagatattcgtgaagg

SEQ ID NO: 72167 - DNA, 964 bp, Prunus persica
  Intron number 1 from transcript ppa009034m (locus ppa00903 4m.g) derived from phytozome v7.0 (chr-ID scaffold_2; pos 12419854 to 12420817)
tcgacaatctcacgcagcgaaaccttctccagcaggtcattttgctctcctattgatttttcttccaatctctaattaattgtttccattttgattttccatttctggtaccctgtggaatttttattctgttattggtcacagattgctactttgattgtgaatctgtgaaatgctgaaaatggaagttggacaaccccactgacactgttctgtttttctctgtttttactgaaaagttgagaagttaccgtattttactaaaggggtaacatttacttacccaaaaaaaaaaaaaaaaaatagctccatagttgcctacttaaaagaaaagaagccataatggcatatagtcctataactttttctcaaatttttgtcacataaaccaatcactatatttgtccaaaaaaaatatttgaccccaaaaaaaaaaaaaaaaaaaatcactatttggttcaaatcttatcaacaacaaatgttggataaaaaatatatttaaaaaaatggtgacgtaataggattttacttcttaaaaataactgaggtctaaagtaaatttgcagacgttcactaggccagttggacatcactgtgagcaaatgaaacataataaataacgtgtggtatttatcgtagcatgtggtgtttgatgaaaacttaccttaatgaggtgtatacctcccttgtgtctataacacttataatgtgctataagtgtttggtaagtgttataggcactaggaggtatacaccttggcatatgtgggttttactcgtcgtgttttggttagcattactctttaaaatgtgcacctatgtcatcagcatataaattgtaatatacgtaatgtgttacttttttatttgttaagtagcatgtgatgtttttcacatttcttctttgcttacacaataattgaatgcagagtttaagcagaaaattggtgcatatattgtctgg

SEQ ID NO: 72168 - DNA, 670 bp, Prunus persica
  Intron number 1 from transcript ppa014035m (locus ppa01403 5m.g) derived from phytozome v7.0 (chr-ID scaffold_4; pos 2631792 to 2632461 reverse strand)
tagttaacaagtcggctggttcttcatcgatttccgtaagtttttccttctatcttttgtaaacggtttctttggggattgattgatgcaatttctgcatgtttacacctgtttggttgccgagaaacgaagaggaaaaaggaaaagtagttcttatatacactttaggtaataaaaaaaattaaaatccgaaactttatgtgcttcttgttctggatgaagaaaacaagaaaaataacaaaatttgggaagtgatcgtatgaaattttcgcgtttcttttttcttctttgtgaaccataatctggtagtgtagggtttaaattttcagaagcaaagaaagcaaattttgccattggactgattatatttattaaaagtcatctgagtttacatgtggatttttttttttttttttttttcgtatgtttgtgctaattttgtgtcgaacgtaatcgtaacaaattttgcatttctttttatttatttattatttattatttattatttttatgttcaattatgggaatgagattatactgagccattataaaaggctgaaatacttggctgtggctgtgaattaaaggtggaattagcaacattcttgtttaagcactaactttcttccattaatgatgagatattgacattagagaaaggatttgagca

SEQ ID NO: 72169 - DNA, 1008 bp, Prunus persica
  Intron number 1 from transcript ppa003454m (locus ppa00345 4m.g) derived from phytozome v7.0 (chr-ID scaffold_6; pos 21138480 to 21139487 reverse strand)
ttagggtttatatacatctttctctgcttatcgaggtacgctactacatcccctctctctttttttgttttgttttttttattcattgctcactcattttgcatggctcttgcgcatgaacttcttgttgagacctaggtttgtgttctttctgagataaaagaaaaacgagtaatcaatcaacttgagacaaaattggttctaatgggttatgggtttatattttataccttggattgaatgcaaaatatgttttctttcaaattttattttgttgagcttggaattgtgtattcactttttgtattttaatataggtttggatgctatttgagttctgattataataaatgtgaagtatagtggtataggagagagatgaatgttagtaaatgtccttgatgtgaacatattgcaaacagaaacatctgtgtaatggcattgagaagaatgacagattccaaaatgagaagaatgaatcatgaatagaacagttttgttctttggctcgtctggtgtcctttttgttgtcttttttttttttttttttttttttttttctgttagtccatttttgtacttctttctgtttttaatgaaggtactggtttcttatcagaaaatgtgatatgtcaattaagtcaaatgcatgcaattttaagtccatttaataggaaattgtatacactaatgctatcacaaatcattgttatttcttgctcagcattgaatgaaagcatcataaactttgaacatgaagcataaactttttgcacattcaagttttttaattcaacatcgagaagtattgaataattgatacagtgacagttttccaaagtttacccatacttttttaataatcctagaatcctatcaaggaatatctgtggtttttagcattcgagccataggtgaacagttccatatctattgttctgctaacgagagtttattttcatgtttccattgtgtctcttgaaacagaagcctgcatttgcagtaacc

SEQ ID NO: 72170 - DNA, 482 bp, Prunus persica
  Intron number 1 from transcript ppa008622m (locus ppa00862 2m.g) derived from phytozome v7.0 (chr-ID scaffold_2; pos 15540186 to 15540667)
agcttggtggacctgaggtctctctctctctctctctctgtgtttccatacatatgcttttatgtttgaattggccggctgctgggttgtgctttttatttttatcagattatcaaaactcacttgtgtataattactggtcagtgattactagtctttatttttatgattgttaaagtatttgagattgctgaattcaattcacagtttgtgtatagtgtatcaagtgtcttcataaataatccttcacataagttggccagatcagaaaacaatatatagtttttgacactgattattcagtatccattacttttttttgggtaaggcagtatcagtttatgtctagttttgcttaaagaaaatttatctttgttgtaatttgtctttgacctcccatttttgtcagctaaatgccattattcctttattttcatcgtcaatttacttatttttgtcatgtgatggtgttaggtcttgaa

SEQ ID NO: 72171 - DNA, 521 bp, Prunus persica
  Intron number 1 from transcript ppa000353m (locus ppa00035 3m.g) derived from phytozome v7.0 (chr-ID scaffold_2; pos 16208894 to 16209414 reverse strand)
ccgatccctccgctccccacaagatccgatccattgtaactctctcttccatctctcttattgtttgctgcatttgcaagattggatttttggtatgaacccatttggaattgctattagataagaccattttctatcaactttgtgattagagacaattttaggtgaaggagatatgaattaagtttgcttatttaggtttgtgatcgacacccattttgtggcactgaaatgaattggttttgattttgcatttgtgggttgtactcaatttcttgtatttttaggatccacggcattaagagtagggttttgtgattggagttggactcatttggagcaattgggaggtggactgtggtaaaaccaatatatagtgattgtatataacttaggtttggtcatggagtttgtgatttacactaattcaagttggtttctaaatttgtctttcaaagcatgttcaacttgaaagaatgtttttgtattatgttaagaagttgctcattttgtgtatgtag

SEQ ID NO: 72172 - DNA, 533 bp, Prunus persica
  Intron number 2 from transcript ppa008337m (locus ppa00833 7m.g) derived from phytozome v7.0 (chr-ID scaffold_1; pos 25878783 to 25879315 reverse strand)
acttggatcggttcttgtactcccgccggttgccggtaaactcagtctccgttaacgcttggatgattatgtgatgaagctggataatgttgaagattaattatcttaattattggtgaaaacctttaattatgtattagtaattatatttgacttttcaaacgtatgtggaaatctgtacagtaggtgattgggcgtacgtactgtttcattataaagttcatgggatgacgaggcaattacgatcctctaagctcccaacatagtgattatctttaattggactttataataactacagtataaaagtacaattatactaattattacatgccttttatttatcataatttgcttttttcttgtcacgtgcattgcacgtgaaaaatacttgtagcataaaatctcgagtaataaactctatcacagagcaataatctaatgtgtttaattattatatatatgtgatgacgataaaagcttttgctaatagtattcgttttgtttgtttgtttgtttgtttcagcaagcaa

SEQ ID NO: 72173 - DNA, 695 bp, Prunus persica
  Intron number 1 from transcript ppa020507m (locus ppa02050 7m.g) derived from phytozome v7.0 (chr-ID scaffold_1; pos 43005952 to 43006646)
aaacctaagtattttggagggaggacaattgcgtgcttggaagatgtgatgtgttggcaatatttgggttgtttgggaggagagataggaattctttttagggtgttagggggaggatgtggatcatttgtggacaaatttcgtttctggacatctttatggacttcagtttcctatgattttaaggattggtccggtcatgaatttttgtttttgttttggttttgttctctttggtttttgctttgctgttttagttgcgtatagtttaggaaacaccgtgcccccattgttgtattttcctttttctattttatgaaatggggtagcagattatgttgttgtctatgcatgcaagcataatttaatatatattggcatgaggaaaaatttatattaaactctgattggtttataattagattggatatatcaaattcatattcaatttgacaagtggaacgatgaatgcagactcaaattgaatatatggatttgaactgccgtctcctgtttgtttaagtgaatttggttgggattcagattaaaatccaatctattgccagccttagttgtaaggaacaatggtttgcagttgcagcttccttttggaaagttgtgcagtttattattttgattctacttttactgtcattccaggtgtgcaagagaagaccaatcttcagtaacagtca

SEQ ID NO: 72174 - DNA, 1044 bp, Prunus persica
  Intron number 1 from transcript ppa008194m (locus ppa00819 4m.g) derived from phytozome v7.0 (chr-ID scaffold_6; pos 27931180 to 27932223)
tttgttagagcttgaagcacccataaagatttgtggtatttttcctttgccaaaatccttccttttctttcctccgttttatttcagtctttcatagtgggtttgtttcacttgattgaactttgaattatttgtgattaattggaaaacccgtttctttgatttgactaggtcatcagtatttcaaatatttcatgtgaacccattttctgtgttcgtatgtggcctcactcggttgtgttggttgtggatagctgtaaatgggggcatttttagttggtttattctgaaccccatgtttgttcttgtggaatagcccatgaaaatcgtgctgttatatgccaaccttacttatattttgttatcaggtttactgtctttgggcatggtagaattacttcatttagatgcctatacaaaataattaagagcttcattgaggaatttatgttaataaattattaagccaatgttggtacttcgatatacatcaagattatcatttgtgtggttcaagtcatctggttactgattttgagcatgaccttgtttgctgaacgatattgtagatagaagttgtcagaggaactattgagcttgactgcaggcgtttgctttatggtatagtatagatatgtttttagataaaaggtcattctttttaatctttcagatattagagggtgttgcgtaagatgttgatagggggggaacttagggtttatgggtctctaaatagtattaaaaacctaatctgaataatagctctggtatgctattttaatgatataaaatagagagcaggcacatgatctctttgtgaagctgcatgttttgtgctcagttcatcatttcttgtggaaagttgaagagaccaaataatttagaaaatttcagtcagattgctaagttaatcattcggatgcttatcttgatattttaattacttatctgcgttttcatataaataacattaattttcaaaggtttattaatgtcacggattcttaaaaatctactgtttatggttttcaggtgacatac

SEQ ID NO: 72175 - DNA, 840 bp, Prunus persica
  Intron number 1 from transcript ppa009899m (locus ppa00989 9m.g) derived from phytozome v7.0 (chr-ID scaffold_3; pos 16799670 to 16800509 reverse strand)
tgtctagtatcttcccgatctccctccacaacctggttcttacctctttttcaagctttttttcttatcttgtcaaaatttctgacggatctgaatgccatctgtcaattatcttgaattgcttaatgggtttatcattttatgttccaattttgtttgttcatttgatttgtgtgcaacttggttcttatctcaacgtgaatttatttaggatgttggtttttttgagaaaaattgatgcgtaaattatccataactggcaattagagaaatttgggatgaccatatttgatactttgtagcgtgggaaaaaagaagacatacttgcaaacattggccctttccgttcaatataacttagtgaagcctaatttccatgactttatctccaatttgtgaattgcgatgggtgctgcgaatctgctgcatgtttttagttagtacccagaaaccctgtgtcatgcatttcctgcattagtgtactttttgtacaatgactggctctcacctgatactcaaagctataagtaaaattgactcagggtcaagagatactcaagaggtaagtgaagctaatgcgaaccgtgtcaagtggtatattttaccttttttcttctgtttcaagatcaaatgcacggactaaaatgtatgttacaagaaaaatagaattctgtaagcctgatgggtttagtggatttcataggtatattagtatcatttttttttttttggggattatcccattctattacgtttcatctttggcttataagtatcaaagtaatgctgaaatagagatgtcaaagttgagttgtctcaagatttttcaatggtaccaga

SEQ ID NO: 72176 - DNA, 663 bp, Prunus persica
  Intron number 1 from transcript ppa003106m (locus ppa00310 6m.g) derived from phytozome v7.0 (chr-ID scaffold_6; pos 28500641 to 28501303)
tttgcttttccactaggcattggctggttagtttgtttgtcaattttatttcctgcccacttagttgttagattgtatgtgctactggatttcgtgaattatttcttagcttatttgcattacttttcatcgtcatttatattgctgtcattgaatcttaatccaattatgtgaaccatcctcaagtggccacctgtcaataatttattctatggggtggttcttgtgggtttggggcaatatatatatatatatatatatatatatatatatatatatgctttcgagaattcgattgagtgctcaaaatgtcctaggaacctagtaatcatggaataggaaaattatgattaattcaccagacgtaatatgtactgaaaatgttgctgcttggaacttaaaaggcagtataagatttttggtaggaggttttgcttccgctctgtgaatcttaacttgccaattgtagtggtgctatcttttgatatactctcttctgtaatttttttagtagataactgattgttaagaatcttttgtgtggctacttattgaagccactttgcgactacattcattagattatccttttggcagctttcttatccatcctgatatcaaattatgacaatggattttaactagcttcgtttgtggcatagg

SEQ ID NO: 72177 - DNA, 609 bp, Prunus persica
  Intron number 1 from transcript ppa002842m (locus ppa00284 2m.g) derived from phytozome v7.0 (chr-ID scaffold_2; pos 14437880 to 14438488)
gcctcgacattcttcacgacccctggttcaataaagtaacccaatcagccattttcctttctatttgtgttttgttttgcttattttgctttcttgaattttatttttgaagatccattagtggttgggtcttatttatgcgcaagtagttttgcaaattggcttctctgtcactggttaaggttaaataaagtgattagtggtggaaattgttgtaggttatgttaaactaaaccatgttggtaattatactatctcattgttggaagtcttgagtatagaaaagtagtgtgcccattttttggttttttaggaataaaattttcaaattagcttttgttttgttgatacacatctctttctttataatctaaactcaatgtgggagcgtttatcaactttgagtaagtgttcaattttggtgattaaccgtggctttctgtgttactatctattgcatttgaattgcaatggtgttttagcattttgtggttccaatgtttgcttaatttaatttacaaagagttgatctttgctcttttttttttcttcttttaaatgattgtcaaactaggggacatcattttccttcacagaacgagatcgtct

SEQ ID NO: 72178 - DNA, 415 bp, Prunus persica
  Intron number 2 from transcript ppa002752m (locus ppa00275 2m.g) derived from phytozome v7.0 (chr-ID scaffold_8; pos 14150648 to 14151062 reverse strand)
cgacgtgactgatacaggtaaatgaactgtttgtacataagactgatctacgaatgagttctagattctcggttttcttcttttcattaaatattctgtttttctccctaaaatgtgtttatttacaagttatacatactttacaaaagtcttatttttcaatgagtaaaaacatttggacatagaaaagaagaaaaaggcaaaagatttgtttctcaggcatgtttgatttgaaatatgtacatgtatctgcatttcatactcacaactagaaatttgaagaggcttggttctcattcattctatatgtgcagttttactaatttatggattagatggtacctttctgataattatgttattctttatgtgatggacaggtaatatagctgctgcgtttgagaaacatttagca

SEQ ID NO: 72179 - DNA, 590 bp, Prunus persica
  Intron number 3 from transcript ppa005304m (locus ppa00530 4m.g) derived from phytozome v7.0 (chr-ID scaffold_1; pos 3847349 to 3847938 reverse strand)
tctaagattgaagtaagttcttgttcctctcccaatttttcatactttcattgaatttttactcttaaatagtagatggaagttggtgtcatttcttgaaatcctgaaacaaatttagagcacagtaatgctcgagttctctaatatcatgtaccatacaccggatggggacatttgaagcgcttatatgaagtgcagtggaatgatcgaacttcaatttgcgttcaaaatataatttttttaatgatccattgccatgcatgatttccattttattcatcagtcttgattcttgaaattcaagttagaggtgctaccagaccaaatttttacttcaaccaatgttgtttctttgtggaactacaaccaatgttgtcattagatttctttattatcattactattagttttcttttcatatttaactaaatcatcatctagacttgtggaactacatagctttggatttttatactttatagtaacctagcgttgttggttaattcaataaaaactcaagttgtttctttgatattccagcattcatgtacccttttgttttcccattcagggcttggaacctgtagttc

SEQ ID NO: 72180 - DNA, 930 bp, Prunus persica
  Intron number 1 from transcript ppa025811m (locus ppa02581 1m.g) derived from phytozome v7.0 (chr-ID scaffold_7; pos 19210394 to 19211323 reverse strand)
gagagaccttcctcaaagagcaggtatgtaacgtatatataacaatttttaaaaaaataaggatcttatagcttaagttgttaagagcatattagtaagctgattggttgtgctgttagagagaacagaactctcattattccagttgaatgaaatatcatcttcttcttcctatatttgttcttcttagttaacaatgtatcaagagccattgtggccattggcgaatttccaaggcttcgatcttttactttgaatctttgcttccccttctctccttgttcctatttttaattcttctcaaagatatcactcaggaaattgaaattccgagaaatttgatagatgagcacaatgggaaactttattaactaaaccaacggggcagcttagatcaaacatatgaatttgacagtgaggtgacaagacggaagcttatatatattgataggtcacaagctcgtgctcaaattttactcagcataaaaagatctttttgtggacgtcttagccacagatctactgtgccttttgggtaaagaaacctttcaagacatttttgtgctaaatgaggttgaaaaaggcttgactcttcttacatgctatttgaattttgtcttttaggactcgtttatgagtgattttgaataggccaatactcacttatatggaggatttttccatataatcactttaagttggagaaacacatgagatgtgtttcttcccggagtcgctgaacaatgctaaaatgattatacggagaagcacgtgggagatgcttctccccataagggctagaatcacttccaaacttgcccttagaatagttttatgtagtagtgatacttgtcaagactatgagctacttcataatgtcatattaaaaattgaattgtagggctaaaacgttgtgggaggagttgcagg

SEQ ID NO: 72181 - DNA, 825 bp, Prunus persica
  Intron number 1 from transcript ppa011572m (locus ppa01157 2m.g) derived from phytozome v7.0 (chr-ID scaffold_2; pos 23930436 to 23931260 reverse strand)
acatgtaagccagccttctgctttagtttcttgaatttgggttctttttctttttctacttgcttgaaatgcttgatcttcttggtaggattttagttctgggttttgcatagttaagcaaatgggttccttcttctatgagtttcaagattcaagctttttaccgaacataagttgagttgaatttatactttcatggtctctttctctgtgtgattatataatttggtcatcttcttgttcagttcttgattgttttgattgaaaccaatctcttttttttttctttctgttctgatgaattgtgtcacatacgcacataaaacaagtgatggaagacttggaaaacaagttggttccatgttcttccaaaatgaggttcatatcctaattgttaatggcatcaccgtttggaagcaaccaccgccaaaaggagggaaagagatgaggcatgtgaaggcctccgtcttttactagacaaagcccacctaagatgtggtgtaaaattccatgcgagcatgacagataatctgtcattattgatgctaatgacagctcaatcaaaggccatgtggatttttagccaaaatatcaatcatttgccataacacacacactttgcttctcagctcactctctttgtttgcaatgccagcaagaaaagaacccatgtggtggtccaatatgacagcaatgatatgatagttgtatatttaacttgtgggtttaattaaattaattactttaattattcaagctctttggttagaaatataattaatcatttttatctacatgggtttgtttgttgcagatattacaaca

SEQ ID NO: 72182 - DNA, 599 bp, Prunus persica
  Intron number 1 from transcript ppa019977m (locus ppa01997 7m.g) derived from phytozome v7.0 (chr-ID scaffold_7; pos 10518012 to 10518610)
tgctgggcttttctccaactgctctgttcaaagtaatcttttttatgctctctttcattagcttatgattacatgtcattgtgtaatttgagttgtttaaagatttccattttattattaggttataggtattgaacttcgatttgggaagctcatttgcattttggttgagttgagagaagatattaacaaacgagaaacaaaaagagtaagagattggatataatttggaggagtgatattaacctctactaggcagagtgcattaggctcatcttgttaagatttcagagagaaagacctgcggactttacattctttaacacattttttgtgctgaaaatttagcatccctatggttaatcttatgggaaataatcggttgtgagttcaacttcgaagtgtgctaacggagttgaggaaattactttaatcataagatgtactattatggacaacactgatctaggatcctcatagtattgggaaaattagtcctaattaacagctgatagatcacaattagcaaggtacattaaataattgaatatcttaaaagaaaagttcaggctatgccaccattaaaggtacaggaaacg

SEQ ID NO: 72183 - DNA, 825 bp, Prunus persica
  Intron number 2 from transcript ppa024909m (locus ppa02490 9m.g) derived from phytozome v7.0 (chr-ID scaffold_1; pos 11423352 to 11424176)
tgtttagttgggttcaaattttggttcaattcaaaggtgatctttgctaactggagtctgttatgaaattttggttcagttcaaatgttgattttaattttagggttttttttagagtagtgggtattttatggtatttggtttgaatttatgaaaggaatgaagcttgtttgtaacctaaccctatttttgttttcatccacaattgtttagcatctctgttgttgagctttgaaagttgggaaaattttgcttaaattgaggtaaatatttgctgctaaccctattttgttttgttttgagttaataagtttgtattatgtaatctgtaatttgttttgttgattcagtgtgtgatttaaatctattttgactctgttaaaatctgatttttggatgatatatatattttaatctgtttatggatagggaagttatgttttgactctgtttaaatctgttttttggataatatatatgttttaatctgtttatagatagaaaagttctgttttgattgtttagatctgttaattggataatatatatgttttaaactgtttatggataagaaaactttgttttgactgtgtttaaatctggattttgaataggctatatgttttaatctgtttatggataggaaaactctgttttgattgtgtttaaatctggtttttggatatgatatatattttaatctattttatcgacaggaaaatctgttttgatggtttaaatttgttttttggataggatatatgttttaatctgtttatggataggaacttagtactgggaatgatgattttgtaccttgtagtg

SEQ ID NO: 72184 - DNA, 996 bp, Prunus persica
  Intron number 3 from transcript ppa006381m (locus ppa00638 1m.g) derived from phytozome v7.0 (chr-ID scaffold_7; pos 15486042 to 15487037 reverse strand)
acaccgtagcctctcaactcaaagtaagtttttttttttgttggtaattttcccctttcctattttctgttttctgtctcctgcatttttgtttttcacttttttaatatttgggttgctggaatttatatttatatttaattttttgggaatgtaaagttcttgcatgccacgggccaggggcaaggtggcgtggtcgaatctcagtattgatgtggtagtcacttttgaattgttgacccaacaaatgggatttttatatcttttactttttttgttttcttatttcttggttgacaaaaaaatttgtgtctgatgacgtggcattgccactccattgatgtggtcaagcaggctcatgttgaactttggtgtgtgttgtattgatctgtgttgcatttttttttttcaatttctttaaaattgatattcattagtagggatccttcatagcttgttcaactttccagcgtgcggctgtcacgaagcattgtagcttcagcgttgaaaactgatactattaagggagcctactaatgattatcaataggtttaaaaagcatgacaattttctcagggcaaaagggcaaattttttttaaaaagaaaggtttttttttttcttcttctaaagaataataaagttatcagattaagcatgtgggtgtgtaagtgatcattgaggcacatctctagctggcccttatttctctttgctaattacctgccccttttattaaaaaagaagaaatggagcctatttggctatatgtgttgattaaaagagaagcattcacctaatccacctgaaacacttcactctcctctctgtagttattctgacagtctactgcccacaacatatttttcttgttttggtgtacctaaattacggaaatgaattatttacttgtttttagtttcttctcttctcttctttttttggtcaaaattaaatatgcttttctatcattggcagaacggagttcgaggcctt

SEQ ID NO: 72185 - DNA, 461 bp, Prunus persica
  Intron number 1 from transcript ppa015096m (locus ppa01509 6m.g) derived from phytozome v7.0 (chr-ID scaffold_6; pos 8399058 to 8399518)
gcccctcaccacaaatcagtattgtatttcagtcagtatgaatataataacaaaatatattacatttatgaaagaaaaccacccatttcaatttagtgtttttgtaggtaataatttacccactcggctaaacaaaatatacaactaaactttttgtgtttaacgttttcgaccccttaaatataaaattctagccgaccctgtttcttgatatactgtagaaatacacagaagcttcgattctttcactctctctctcttcaattctctctgcttcctctgttatagttagcacacctctctctccctctcaacccttcgaggcctcgtcacctccacccttcatcatcatcaaaggctttggtgacgagcgactgtactgcaagggtttgctgagggaggaaacctttgatattttgggggtaggaaggtggtggtggttggagctggagttgccatct

SEQ ID NO: 72186 - DNA, 1011 bp, Prunus persica
  Intron number 2 from transcript ppa009238m (locus ppa00923 8m.g) derived from phytozome v7.0 (chr-ID scaffold_1; pos 4560902 to 4561912)
cgaagctgaaaagcctgatttcattgcttttacaggtgcagttttttatttatttttaatttcccgttttccctggaaatttacagattggtttggttttcttgtttttagttttcaagtgttgttatttgttaagatattttctagtttgtttttactcttttatttacttatggtggtggatgttaatcttttgaggggctagctatatttgcacattaggtaatctaaaaataaattatcatgctttgagctgtttaaaaatgaaaagatttaaaattttacctgtaagaatgcttgtactcagtcaggcttattgaaattaagaagtttgtgtatattagaactcaagttttaaaatcatatataagtcagtggtactggaacgcattccacattgttctcatcctatgtgccatatccttttcatggagttttcatattgagaagttaaacgtgtgaaatttcctggaaataatagaaattagtttgaaaaatgagaaactaaaccaccttgactggttaccaaacgtcattaaacatctagacccaagataatattcatatcaaggtgctgaagcttgatgctttaagctaaaacttcttcaagttctgtatcctatcttattaggtgcatgcagctgtagcctctaatcttcagctattagactctttccttctaattaaccggggccgaagttcttcatacggcatttaagaggtggggaaaagttaaaaatgggctcagttgattagtttgtgcatcctctgtatctggatggttccaacttccagtaaattctaagttatgtgagtgtttctgagtgaatgtaggcatcaattatctgaatataggttactttacatgtagtgtcatggcccaactatatctgacatagtaaagtaaaactaactaagttagtactgatccctctctctctctctctcccaagtattgattttgattctgtttgtaaacaggagataatatatttgggtcaagctctgttg

SEQ ID NO: 72187 - DNA, 499 bp, Prunus persica
  Intron number 1 from transcript ppa009003m (locus ppa00900 3m.g) derived from phytozome v7.0 (chr-ID scaffold_3; pos 20202949 to 20203447)
ccagggtcaccatcacccttggtcgctctggtcaggtactttgcttcctgcttttcatactttttctgtgttctttgccccaattaccggttgtttgcttgcgctgaatctgtgacaaacgggaaaaagggtttcttcttcttttttcttattggcttcaattttatataattttccacattattcagctgcgaaagggagctaagtttattttgttagtttcaattttattttttcttgttctgtttccgaaaagacatgagctcgaatttcctcgtattatttagctattttttgtgcattggaatgctccaattgtctttatggttgctttgataatttgatgaattttttgggttgtgggtcttctctgaatggatatatcttgggctgaaccgatttaaaggcgaatttgggtcgatttgtgtgtttttatttacttactagtggaaatgtttttgtaggttgtggagaggggaggatcggcatcagactctgt

SEQ ID NO: 72188 - DNA, 265 bp, Prunus persica
  Intron number 1 from transcript ppa017778m (locus ppa01777 8m.g) derived from phytozome v7.0 (chr-ID scaffold_1; pos 11331154 to 11331418)
cttgttcttgctctgctttcctccaggtctgtgtttctgtttctgttttccattttgaactttgtaaataattttttttcttttttggtatttgatgttcttggttttattccgattttctttgaattttgtattaggatgtatttagttgttgtttcatgtcagttcactgctgtgcaattttcttcttgttttttgttggatgaaaatgaaaattgttgcgttttcagggttattccaaatagacgtgtgcagccagcagcat

SEQ ID NO: 72189 - DNA, 543 bp, Prunus persica
  Intron number 1 from transcript ppa004197m (locus ppa00419 7m.g) derived from phytozome v7.0 (chr-ID scaffold_8; pos 15995603 to 15996145 reverse strand)
ttgttggttcggcacttgcttacactcttgggaaggtgacattctctaactcccttaggggctcatacctgtttctatattggtttgaatttgatacataacttgttgaggtttaaggttttatggaattcaatggttaaacttttatgtgttcaagatcaggatagtcattaagttcatgaaaagtatgtaataatagtttcatttttgtatgggattctatttctgcttgatttggaagaaataataagaactaaagaagactttgagatctgtttggggtctcccagatcaactgaatttggataatttggaaaatattttaataaaattttgttagcttgtatgtattaacatcaagattgagattgcaatttcactgttctaaatgatcatgtcttgtctttgttcctcaaattttcttggtttgggcctaatgataaatgggatacagatcttatatattacagtgttgcagaccaaaaaatataatgtaatgtttcgtttacaatgtctgcgtattgcaggaagggcgccgagtgc

SEQ ID NO: 72190 - DNA, 933 bp, Prunus persica
  Intron number 2 from transcript ppa007082m (locus ppa00708 2m.g) derived from phytozome v7.0 (chr-ID scaffold_2; pos 13976981 to 13977913 reverse strand)
ggccacggcaattgaacgcgcttaactttgaagtatcgtcctatgttgatgtactttactgctttagtttcttgaatacaaaggttatataccttaaatgccatgtaattaactaacttatgctattttgatttcttttttattgtctgagtatatgttattttcatttttgttaatgttttcttcttgtatctattctttgtgcttcatattttgcgttccttatcaatttggttcatatcttaactttcttgaacaaatgtttgtggattaaattatacatctcaaggataagcttcatttttcaagtgaagcaattactggcgttaacttgtttccattctgaactcacatttactctcaatcaaggatattatttcccccattaatttttgtcttgttattgaggtatctggagaatccttaacttacactagatagtcaagaaatttacaaaatcatcatgctgaaaaatttctgtttttgcccattgaaatactctcctgttccttcctttccaaactgtctagaaccggacggaattccatataggctttgtagaggttttcctgaactcttgtagcattttaatttggatgttatactgtattatgtggtgtttatagagcgagatgaatggtaggactttcgagggtcaatagactaccgccagtccagtggttgaagtttattgtccttcatctctttatcagtgggcattgatttgtccacctgttatgtgctcttctattgaagagtttctgatttcttaagattttacttgctagttttaggtaaactccttttggaaaaatttgcattgtactattgtccttagtaaatgtgctctgtggtactcattgtccttagttgttttaatttcctgtttctttcatttgtagatttctcgtctgttggaactttttctggctt

SEQ ID NO: 72191 - DNA, 822 bp, Prunus persica
  Intron number 2 from transcript ppa010464m (locus ppa01046 4m.g) derived from phytozome v7.0 (chr-ID scaffold_8; pos 3894750 to 3895571)
cttctcgaaattggtatgctgtacggttaaaatattggcaaatatgtttcctgaattatttatttatttatttttcaatttcacattctatgttgtgattaaaagttcacgtaaaatagttgagatattgacatggtatacatatctagtgcattcttagtttgtcgacaatatgaagtatttttctggttactttactagttagtacggaatagaaatttgttgatgaagccgcttatgctctaatgcacttttgatttccacatatgggaaaagctatgatttgggcaattatttggaaaggggctttttcccttctcccttttattttcttggtagtctttgttgaagtatgcaagttgttacagtaaagtaatgtgattccagtgatccatagattggtcttaaaagcaaaaatgggtttgatttccttcatcatgtgtctggaaattttttatttgaaatggattctacttatattttacagaaaaataactacatagaattagctctattaaggaggctttatagttaacttttaaaatgaagacttatagtgaaaggcaacaaatattacaaggttatagatgatgtccaggccgtgagcagaactggtgctagttattgtaagctgttttcactctcctgaccaaacaaagaaatgctgttttcacttttagtttttcccttatttatttccttgtgttattattatatgctttgaaaaggcttcttattcttttcattataacttctctacaccaatagcttcttagttgtgcatgattgttaatgtttgaatcttaatgtcacagggaaaat

SEQ ID NO: 72192 - DNA, 1047 bp, Prunus persica
  Intron number 2 from transcript ppa007018m (locus ppa00701 8m.g) derived from phytozome v7.0 (chr-ID scaffold_3; pos 2927003 to 2928049 reverse strand)
cgtcagtgtttcacaagagacaaatcccgagccaggtatcttaagtcatttcataattattactagtgctcctacatgctttttgacaattctctagaatgattcttaccctgattttcttaatggcattcctctcattgaatttgtttaatgcatttggtgtgcatcttgtgagatggtgccctatctgtggtttaataattaggggaagtgtaaacttgccaataatgaaaatgacttgatcaaaaaaatgtgtaaaattttgaatttattgatatgggggcatttcccctttcttattcaatagtaccagaataatttctccaatctctcagcagtcaaaatctgtcctttaggttgtacactgggttatgaagattgtatgctgatgttcatttgcattgtatgtttaaaaggaatacttttgaatttttcatttaaaaggtatttaaggatgagctcctgcaggccatgtatgatctagaaatctttatttgctgttcttatgttgtttcaattctgtaagcttttaactttcccaattttgagcaaataaaaataccttgtctgaatcatatgtcaattcttgccatgttttggtgttgtttaggagcattctctgaccatccctgtacagcgcacattttgcttccacatttaccaatgtttatgcacttcaatggagtttctagtaagagtaataagttcattgatcagtaaggaacatgttgtggttataaattttttcccctgttggttatttacagaaaagggcacctgattatcaaacattagatacctttatgtacacacagaaacatttctctgacatgcctctttcctacatttagcactttatattgacaacattagaacatttattttctaactcggtaaattttatggcagccaattctttgacaagattcaggcacctcaataattttctatggcatcttaagcatattttttggaacttacttgttctcttgtattaagacatgtgaccatttatattatatgattcaggtagcagagtggggagag

SEQ ID NO: 72193 - DNA, 520 bp, Prunus persica
  Intron number 1 from transcript ppa007018m (locus ppa00701 8m.g) derived from phytozome v7.0 (chr-ID scaffold_3; pos 2928534 to 2929053 reverse strand)
cagccacaaatagccctgtttgtgcaacgcacgtaataatagattcttccccgtttcgttttttccttttttgtctctctctgtcaccaagttgcatgtttgttcatatttgccaagaatatgggaatattagcttgtgatttgaattctgatccgaaactttcctgttcttgcctagagccttatgtttaacgaatctcatgtttggcgaaaggactaatgttcttgacttaatgatgtgatcttgatctggttgaatctgtgatgcattatgggcttccgttgttgcatatatttgaaaacccataccgcaaaaaccaatctttcttcattattcttattgtaaagtgctatttcagaatctggggcaagtcaaattcaaaaaaagggtgttgctgaatcagatgttttcagaccaaaaaaataaatcagatgttttgaaaattacataacgcagaacttgaatttgaattttttttttctttgcggacagttgggtttgattgagatttgaatcaag

SEQ ID NO: 72194 - DNA, 714 bp, Prunus persica
  Intron number 2 from transcript ppa010156m (locus ppa01015 6m.g) derived from phytozome v7.0 (chr-ID scaffold_5; pos 17777404 to 17778117)
ttcgcctcgctgttaacggatctgtcaacttgcaggttcgaattttcccctgtttagttcccgataaaatcaatgaaagacaaactcttcaatttttatatatattgtttttcttcttaaaaatcgtatcttttattactgaatgtttcagaatgaagcgaaaactgagatcaattacagaactaaacaaaactggtttgataaattgcattttttaagtagccgaataggtggcaaggtccttttctgtttctggttcatgattactattattgttttctacaggttcgtggaggatcggcgggagttatcgagactttggttggtgttgccaagcctatttccattgtgtgagtgcgattttcatagctcttggacactgttcgctggttcttggatttcaattttcaattttcttgccttgtaaaatattgtaattggcagaaattgaacttcgtaacttttatgctgcatttgattttggtaggtttgtgtaattgcagtcccatttattaaccttgaggtacactattgcaattgtggtaaaaataatccaatatcttgtttctaattacgaagggattggggcaaatgaactcaaattttgattctttcttatgtcctctttgcctaggatggggttttccacaactgatttgttttacttacttggaaacaggaataaaattgttgaggttagaccttctggaaaga

SEQ ID NO: 72195 - DNA, 214 bp, Prunus persica
  Intron number 3 from transcript ppa006248m (locus ppa00624 8m.g) derived from phytozome v7.0 (chr-ID scaffold_1; pos 37356651 to 37356864 reverse strand)
ccacagtgtgtaagtgctgtatggattttttgtttttctctatttctggagtcttttgtcttcctttgcattcatctttatgttagtcggggtgaaatttttttagcctaagtggacttcgtgactttgagaagttcaaattatttaaatttaaagtggacattattcatttgaattaatgctgataaattctgatggcatgatggtttcaggt

SEQ ID NO: 72196 - DNA, 543 bp, Prunus persica
  Intron number 1 from transcript ppa015414m (locus ppa01541 4m.g) derived from phytozome v7.0 (chr-ID scaffold_3; pos 13167239 to 13167781)
gctttactttcgatgtatggatttttggtatttaatgtgcaagcaatttctgtggcttttctttgatatgagtatgtttgattctttcacaattttcaaaggaccactggtttcggcgctttctgtagttgtgttaaagatttgaagttcttagtcagccagttgacttagttcagtttatagaaagatgtagtgttgtttgaaatcaggaatttgagagtctattcaaagtgaaggattgaattctgcttggttgcctggaaaatccaagatttaaaaatatttaatttctggaaagtgaagctcatttcaaccatgccgaatagatttattagttctcgctgactaattttcagtttttaaggttcaaaagaataaagtttctgatagtccaagcttgtagtttctttcttttcctgcattgtcttagaactgaaccaaatttttttttccttgaacttgcaactattttaaaattgataactcgaaaataatttcatttgtttccttgctacagtttcatctttctttttcttgaaaatt

SEQ ID NO: 72197 - DNA, 782 bp, Prunus persica
  Intron number 3 from transcript ppa009599m (locus ppa00959 9m.g) derived from phytozome v7.0 (chr-ID scaffold_4; pos 1381207 to 1381988)
tggagcctacgttgtcccgaggccacgatcatctggtatgggtgcactctttcctgaaacaaattttgattgatatgcttaccttcataactagatattgtctgaagagttgtgaatggaacttttagattttgttgttgggaagaaactgaatgagaaaattgccactcctctttcttttgtcccgctgttatggaaagggtcactctttttctgcaaagaactagcatggtacaactgtcgaaggtaaaaggagaaaaaaaaaaggggactttaacttatgtgaagaaatgtagaatctatgaggaaatggatgaaaccccaaataatcaaatttgtctggtgtatgtaatgttagtatctgttttcactttgatgtccaggcagcataataccaagaaaatgagttgaccattactaatattactgaatagggcactatagtctatatagaaactatttggattcaaacgctactacataaacttttcaaattgtaaaaggaagaaccgttttggatcctatatctatgattacccttctgcccacaagtttgtgtttgatgatattatttggcttgtctgaagtttgctgcagtcatgttttcagagtgatgattgttcattcttccattcatcttcctgatattgttttttgactgtgatgttaacattttctctgaacatatgatcagaaaggagaggtagtagaatcatctctatggttgttggttatgacttaaagcatgaccattgtctctgtttgcacagaatttgttgaag

SEQ ID NO: 72198 - DNA, 963 bp, Prunus persica
  Intron number 1 from transcript ppa015482m (locus ppa01548 2m.g) derived from phytozome v7.0 (chr-ID scaffold_8; pos 7366865 to 7367827 reverse strand)
ccacaggtacagtcattgctctataatgaatcttccacatagcttagcaatttgataggacgtaccaaaatgttgaaatgcataataaaattgcctatcaggctgcctattcaaaaggttatcatcctaatttaggcttcatccaattatcaaagataaagccacaaaacctattgacattgaagaagaggtaaagaaaataggtttttcttttttcttctttttaagaaacagaacaaacaattagcattacttaaggaaatacactagcagtgcacaagaagtccattcaagctatcactaacttcaagcccccaatctgcataaaagaaaaaaatgaaatgtcactaaactctttagaaactaaagtccacaatgacgccaaataatgcattctatcccacaagaaatctaccccccttctacatttttacttcaaaaatcctaacattccttttcaacacccaaaaatggcgatgacagagcatctccataacactttcagaatcctagagacacagattgaagaataacttctttttttcacatataagactgcctagaatggtatttaatcttttacttctcataattcacataacagtcaaacagcatattagaaaataatgcattctatcccacaagaaatctaccccccttctacatttttacttcaaaaatcctaacattccttttcaacacccaaaaatggcgatgacagagcatctccataacactttcagaatcctagagacacagattgaagaataacttctttttttcacatataagactgcctagaatggtatttaatcttttacttctcataattcacataacagtcaaacagcatattagaaaatacttcgaaattgaagatctgtatctatggcttggaaactagtcattggagatcaaatgaaagattggctggatgtttctgtataaacttgcaggcagtta

SEQ ID NO: 72199 - DNA, 816 bp, Prunus persica
  Intron number 1 from transcript ppa018132m (locus ppa01813 2m.g) derived from phytozome v7.0 (chr-ID scaffold_3; pos 4451845 to 4452660 reverse strand)
acctccaaaccatccatactcaactcaagtccgtggtacctactctcgctttatctccgtcctcatttctcacccactttcttcttatacttttcaaaattggaatttgagtttaattttgttcctgcttactgtgagtttccagtcagattgttttctctctctctctctctctctctctctctctctctctctaaatttctgatctataaagtgcaggatgggttgttactgtgtagttatgaatcttctagttttattttttgaggtagagggttcaatttctagttgattgagcttaatgtaactattttgatctgggttcttaaatgaaggctataatcctgtttggttgctgagacaacgaatgaaaagcagataaatgcatataatgctaaacttttgacacctcgtttggcacttggaatttgggaaagctgaagtaatccttcgatttttcctttcaaattttggggatactaattttggaaagctcataataccattttttattattattttgtttatgatttgatttgatttgttaaaattcaacaagcaggccgagaaccaaggggtttgtcattactgaacttatagcttattgtctcgcatgcagtgcggaactgactctataagtgtaacatatgttttttgctttcaagttttgtctcaaataaagtcattctatgttctgccgttgagtcaatgacatggtacactgtagttcaatcactgggtgggaagcaaacatggttaattatttattctgctttttcaggccttacaacagagtccaactaaacttaaagatca

SEQ ID NO: 72200 - DNA, 786 bp, Prunus persica
  Intron number 1 from transcript ppa009907m (locus ppa00990 7m.g) derived from phytozome v7.0 (chr-ID scaffold_6; pos 5264938 to 5265723 reverse strand)
taagtggctaaccaacaaggaaagcaaaccaccatgtcctctttgtcgtgcttctgttcaaagcatacaaaccgaacaagagaatcaagtagacagtactgcctagtcaatattaaatttcaaagacagaagaaaaataataataatgtttttaatgttgtggtttcttcttcaaaattacttgttaattgggaatttgttgttgttgtaagtttgtgcattgtattgttaccatcattaacttcggggaataacttttctatttgcggtgtgtgtagatatgtaattcaaaacagtaaacattacagccaagtgatcagagaggacaggaccacttgaaaaacaagaccaaaacaagagaaagacgaagctatagccaattccaaacctagcaaaatatccttccctttacgtaaacccaaacctttacgggggacaagggatatccttccctttacgtaaacccaaaccttgatcgtcatggtattgtcagtaaattcgtgccccgacgggaagtttttccattaagtagttttgcaaggggaaaccagtcaatttacaatagtggtggattctttgctaccacaacacccaaaacctccagtcaatttttagattgtccttcattgaccattgcccttaaaaatttaggctcctaatggaaaagtatattgtatataaaaaaaacagtacatggtacctaacactggatctcactctctcatacacaactagtagctcaccatggtagccgtggctcggactcttctacctcctccaccatcg

SEQ ID NO: 72201 - DNA, 485 bp, Prunus persica
  Intron number 1 from transcript ppa008030m (locus ppa00803 0m.g) derived from phytozome v7.0 (chr-ID scaffold_4; pos 4552647 to 4553131)
gattttattcagaacaagccacgtctcattttgaggtaaagctctgatttttctcatcttcaagtgaaactggtatggtagatgcttttacctttgaagatgaagatcccagaaaaagaagtgtttgatgtaaaattgaaagtttttgatataagttgaaaaactgaaaccccactaattcaggctgctttgagttgtgttatattaattctcaactgggtccctgagaaaattaatgaaacaaaattctgttctttaaattaaatttacatttgcaagcctgtttacaccaattctcagttgggtttttgaaaattttatggactagttcattgcttttgtttctgatgtcaggttatcacttgttttagaacacagaaacattttgcagatatctactgttatagtggatttttgtgagtcctgtacattaatattgtctgaatgatgaattgcagagtgttgggtttgtaggactgggaaat

SEQ ID NO: 72202 - DNA, 668 bp, Prunus persica
  Intron number 1 from transcript ppa014864m (locus ppa01486 4m.g) derived from phytozome v7.0 (chr-ID scaffold_3; pos 3477793 to 3478460)
cgtaagaattcatctattcagggaaaaaaacttctttttcttaagtacaatatatgtgtttctgcatattaagtatttgaaaattatacttgattttttatgtttcatttgaaacaattcttcgttggtatgtggcatgagtatattccctgtttattataaaagtaagtttagcatataaagcaatggcttcatttaatatacattacgcaaatcttttctgtttttacgcaaatcttttctgttttgcattagctctcctagaccatttttctggggggaaaggtaaattataaacgacagacagatccataacttgtgattgtagttctaatgcagtgcaatcaaactcaggttcagaagaaaattgccaaacctgattatgcttgaactggaagaaaaatgaactgacctaatttacttgttaggaaatcagccaaagtagttatgttttttgcatttcgaatagtttattttcgtggattaaagtatggaaactcctttattctctaatatattttgtcactataaattaactcaagatgttttgggaattaaataattgcagaaaaaatagaaattcaatgtgaaaatttgtacattgtttattatcatttcaattcaaattgcactaaagtcatagcttaacatttctttggtttccaggt

SEQ ID NO: 72203 - DNA, 946 bp, Prunus persica
  Intron number 1 from transcript ppa026230m (locus ppa02623 0m.g) derived from phytozome v7.0 (chr-ID scaffold_7; pos 11291086 to 11292031)
gtttctggtgggatttgttggtgaagtgcaacagccaaaaaagaaaagaaattaattttctattgcatttatatgttaagtaaggttgatgaagtgggtgttgtaggcgaacatgaccttccactagatttcctcaaaaaaggtttgcattgtttattatctttatctatcttcaaatataggtgttttcatatgtattctctacttcttttttttttttttttttatataagcaataatctaaattaaattaatctaaactatacatttccaagtacatgctttttctgttggctctaatatttttttatcttgcattttctgttggctctagtatttttttttatcttactaggtacaacaaataatgtggtcttttttaaaatgttcaattattgctatttagataataaactttggtctggccggtgtacttaaatatattttagtcaagccattcatatgtggatgggtaagtttcaactttttttaattgtccaaattgatattacatattatttattttggctgcttgtgaatgtaaacaaaacttatagtcaaagaccgtcaactatgaccaaataaaaaagaattcaactttcaacattcctttgaattattgtttcttgtctttcctctctctctctctctctctctctctctctctctctctctctcgtatatgtatgtatgtgtgggtgctcctgcctctgtactgaagtaccaatccgcggtcagttggcactggactgcaatggcgaacagacgtggtatgttttgtcctcacaatttgttctccataaaatcatgacatgcattttgtcttttgatttccaatagagtaaaatattaaataagttgtttgaaactctaaattaaacatgtttggtttcactgaagctttctgccataattttcttgtgctttttgtaaagatattgaagcg

SEQ ID NO: 72204 - DNA, 659 bp, Prunus persica
  Intron number 1 from transcript ppa026425m (locus ppa02642 5m.g) derived from phytozome v7.0 (chr-ID scaffold_6; pos 1666950 to 1667608)
aaaacagaagggccacttccctgctgacttgtcaggtacgtcgattgttaggtttacatcgggacatgacaattgattgttattatggcatatgctcgtatactacagtctacatgcatgtgggtgtacgtcaactttgggaccccacgtgcattaattgttgaaagtcgactctcatgccaaccctattttcaccttacaaagttacactgcttgactgcttacatgtaagaagtcattcttcagatacatcgcatttatatgcaaaactaactcaagacagaaaagttaatgcattcgtatcacgatattcgtgatatgaatgcatttcgtattactaccgttttttattagtatgccttgactctttcaaattgaggaggagcttctcttcacaacaaatgagagtttaacgcctgtcaaattccaagaaaagaaaaagttaaagaaatttaacaagtgtccatttgttttaaggatgaactgctccttaattttgaattacgaagtctgaatgcaatcaaaaaccttttttttcttttatttctcactttatcagataatgttttctcaataatgcaattttatttattgaaattgctctttttatatgtttctctgtgtctatttgccaaatttgtaaatgaaagagcgtggag

SEQ ID NO: 72205 - DNA, 715 bp, Prunus persica
  Intron number 2 from transcript ppa004849m (locus ppa00484 9m.g) derived from phytozome v7.0 (chr-ID scaffold_8; pos 16646992 to 16647706 reverse strand)
ttggtcctgccagtcttctatctcattcttctcaggtatttttcttagattttctcatggaactatgccttaagttctttggctccttgtttgagttcatgcttcatgcatatagaacttcatattttgttttgtgttgttggctcagtcccaaagcccaatacttgaattagtcttagctgattggtgcacctttgtccaaaaattgaagagcattgaaaaatctttatttcaaagtgattgtcttttgtattcatacacatcttataaaaaaaaaaacagtgcatttttaggttttttttgcatagcatagataataaagctagtgatatccagtgtattcattatgattttttttttccaattaaaacttattagagtcagggtgacataattcaagaaagcctgtaagagcaaaagattttactagagatacatgagcaaatgctgcaaatattattggtttcagctttcttgtgatagttgtcttgtcattatcaaataatttcccaatgattgtaaggaagggaatcttgtaaataattttggtaacgctttgcaataggtgcccctgtctaaatgttgatgccagtgcaattaatattgtcagtgtgtgtgcttgatgaaataggttctgctatttaatttcccgtatatgaatatatgtgttctcagtgatttaaaataatatcagtcttctacttgaactacagct

SEQ ID NO: 72206 - DNA, 704 bp, Prunus persica
  Intron number 1 from transcript ppa007339m (locus ppa00733 9m.g) derived from phytozome v7.0 (chr-ID scaffold_1; pos 46757384 to 46758087 reverse strand)
acttcaaggttagtgttaatactagtcatcgtacattctatctctacttgattgattctaaatttcacaagacaaggtttctctcatacttcaatattgttgtaataatgtaaaattttattaatttttaattacggcaaagagcctagcctcgtatatagccaaaaggtacaaagttataaagtgacttttagaagtttagaactgcgagaggagataagctttttgatttttttggtaatatagggggcaaagtccaaaccaaagagcttacacagaaacgaatctaggcctcaagagacgattcttatcatcatctaaaatagactgcgagaggagataagctttggctagctagcttgcaggtttaagtgaaacaaaaacccacaagttctccttttggccttttccttggagtatatcgcaaaaggtaaaaaatagaatgttgtaatggatgatgataataataatgatagaaacaaaaaataaataaaattgaaaaaaatagattgcttcagaatcaaataaatctaaaattataagtaccaactgatgaataccatttattttgaacaaattgtcatgtcatctgtcccattataatagagaaaattttctaatgcctagtatattttctaataaatggtcttatatattgattgtttttaggttattctaagagaagcaagaaatttcgggcttgg

SEQ ID NO: 72207 - DNA, 570 bp, Prunus persica
  Intron number 1 from transcript ppa021161m (locus ppa02116 1m.g) derived from phytozome v7.0 (chr-ID scaffold_13; pos 374929 to 375498 reverse strand)
cctggggtagaaattgatcgatctaccttatggaagagagctagacaggacaaacatggtaacatccctgatccaaaggtggcagagaaagcaaaattaattgtaagcctactatcactctgttttaaatttttattaaactgtgaattattcttattacgtcgtatgttatatttttcgtcgtgtgaatgatattaccacgtcgagaagtttttaaaaacgtcgttaaaggtctaaataggaatcactactaattttctgtaattatagcataagacgtcggtggttcattttcgcgtcgtttgaatgatattaccacgtcgaaacttttttaaaaacgtcgttaacggtctaaataggaatcactactctgttttctttaattatagcataagacgtcggttgtttattcatttcgtcgttttaaataaataaccacgtcggtataactaccgtcgtgataagttataataacgtcggtttatacgttattgcgtcgtgtgaaattatataatacgtcgtttgtacataaataaccgtcgtgtgtttttttgtttatctttttttagg

SEQ ID NO: 72208 - DNA, 968 bp, Prunus persica
  Intron number 2 from transcript ppb017326m (locus ppb01732 6m.g) derived from phytozome v7.0 (chr-ID scaffold_4; pos 19267015 to 19267982 reverse strand)
gattccacgaccattgaaaaaccgaatacacgacggtgatttaccgtcgtctttttacttttttgtagtagtgtcttcctcctctttgcaactctagttgaagttcaaactgatttcttcgtggtcttcaaagtcatctcactactacaaaaagtgaaaaagacgaccagaaaacaacgacggtctaagtgaaaaccgtcgtggtttttaaaaagacgacggttctaaaaacaccgtcgtgtaataccaccttagacaactaaaaaaaggagattcaaatggctgttcaaaaacaacgacgtacctaattaaacaaccgacgtctatttgaaacagatttccgcagtgtaaaatcaaagccaacaaagaacggcagaagttatgaatcgaccaacgtagaaagtaaagacgacgatttcaataaaagccgccgtttttactcataaaataacacgacgaggttttcgtataagacgccgtataattacaaacaaatccacgactttaaaatacaaaatatcgccgtattaaattaatgtacaatgacggaaaatataaatatatcgacgtcattctcgtatagttctacgacgttatctttaaatcgtactataaaatttaacgtcgtatttattcattttatacgtcgtacctttaatttaaaccttcgtcctgcctgaagatactacacaatttgcaggcatggaagagataggagctactgtggttgctgtatatatgaggtttgtcattctaaaataatacgtcgttggtttatttattgcgtcgtcttaactaactaaccacgtcgttagtatgtaccgtcgtgataaatatattataacgtcgttgtctatttcagtacgtcgtgtgaaattttataatacgtcgttttgttatacataaccgtcgtgtgtttttttgtgctgacttgtttatattattttatatatttaggtacttacacg

SEQ ID NO: 72209 - DNA, 983 bp, Prunus persica
  Intron number 3 from transcript ppa021564m (locus ppa02156 4m.g) derived from phytozome v7.0 (chr-ID scaffold_4; pos 11519290 to 11520272 reverse strand)
gaactggaaacaatatccatttcgcttttggttgggtaatgttctgtttgccagccttgtgtgtttgaatctacgttaatctcttgttggtcattcattgtttgattttcacactcctgtttggttttattctttcgttgttgatctcacttgccttgatcatgtagtcagagcactctgtagtatatgaactactgtatttaatggtgcaggttcctgcatattcttaatatttagctattttagttttggcattggaagaagttacatctttgcatttgaaaagtatctagtgaaaagtctataaccatgccatctatttggtattgtgaggtattttctagtaaattaaagctgcattcattgtatcactaatgtacacatgatatatgtaagcagcattctttttaggcaagaccattgtgaagttttcataagctattgttgcaaaaaagctgagatttagaaatcaaacaagaaacctgtcccctcataaaaggaaactctgtgcattccaatggaaacctggcctgtagcctccaccaaaacacatggtcattcacaccatccccaaataatcttctcgtctctgccagaactgcctactccatcctattcccaaaggacctgaactgcctcataaatcattcagaatcttgcctctcctatcgcacagttttaaatagaactttaatatgtggctagatataaattttgctttggttgacaatagtttgaattaagttgggatgttttggtgttaaatcatggcatacgtgtattactaagaaggaatttttttttaatttatgcacagggcctcatatatctcagaggcagccttgaataaactagtatatgctaagtgtttttgtggtaaacatttggcttcttgcattgactcaacttacagtagatttgttagctgatcagagttttaatccacagggaaagaaaaatcctttcatcgaccgtcaatctgt

SEQ ID NO: 72210 - DNA, 684 bp, Prunus persica
  Intron number 3 from transcript ppa023601m (locus ppa02360 1m.g) derived from phytozome v7.0 (chr-ID scaffold_6; pos 18302182 to 18302865)
ggaaacctttacggtacgatgcctgatcaaatagtttatgccagtagttttctgttgattgttaacttataaatagatcttgagtcttgtccgattaaaagtatccattaatcccttttgctcacttcctaagcccttatgctcagtttttccccagaaataggagggacagactagaaccataatgatttgaaagaactgaaaaacattcatgcaaaaactatctttcctctcaatccccttttcagaaatctgaagcggttgttaggtaaaggggccactggtttcatgaaagagctagcaacccttatcctaacttggtagagtttgctacatgattagcataaggtaaaacctttggcatatcaaataccttacatttagctctttatagataaagacttttcagcgttagtagtatgagatttttgagttggtaatgaaaataaaaatccgtttattacatagttacagttcaaaatagcttctctctctctctctctctctctctctctctctctctctctctctctcttctttctggtttctgtattataaggcaggggagttaactatatatactataaatatatgcttattggactctagaaaattgaggtcctcagtttattttggttcatgttactcatgcttatgctatgtgttttctgttctcttgcagtt

SEQ ID NO: 72211 - DNA, 902 bp, Prunus persica
  Intron number 1 from transcript ppa021914m (locus ppa02191 4m.g) derived from phytozome v7.0 (chr-ID scaffold_2; pos 16033835 to 16034736)
gttgtgaagactctgttagagaaggctggtcttgctccttttcggggggttcctctttttcaagcttgtgcaaaaattaaagcaactagattggccttcctctcctggaagaacgggaagttcaattccacaaaaatgaaattgcaaaagtccgtgatcaactgggtctgttattcaacaaaccgggtaatgcgcaaattcaaaatgagagaatctctctgatggagaggttggatgtgctcctctctattgaagagacttactggcgtcaatgttcccttgctttatggttcaaagacggtgaccataacacccgtttttttcaccaatgctccactagaaccgtaggcgcaaaaatactatcaaggggcttttgattctgcgggcgtttggcaagacgcccttgctgggattgaagctactattctcaattacttaggtgatattttcctttcccatggcattctccctagtgctctatagaaaaccttatctgttatttccccttgtgtcccagtagagatgaacttatctctgatgcagccatactcccaagaagaaattcgtgaggccttattccaaatgcacccatccaaatcccctcgcctcgatagttgtccccactcttcttccaacaatactgtcgtattgtgggtctagatgtgacctctgcggtcatctcttttctctcctcgggtcgtttattgaatgaggtcaattttgactttgaatcccaaggtcaagaattcggtgaacttgtcccagatgcgccttattagattatgtaatgtcatttacaaaattggcaaacaagtcttggctaatcgtttaaagccatggttgtaaaaaataatctcccttttttagagtgcttttgttcctggtcgtctcatttctaacaa

SEQ ID NO: 72212 - DNA, 687 bp, Prunus persica
  Intron number 1 from transcript ppa001028m (locus ppa00102 8m.g) derived from phytozome v7.0 (chr-ID scaffold_2; pos 19027679 to 19028365)
ttatcagtgtggtggttgtggtgctgttctaggaggtatgcttcttcttcttctttctttgcctttttgtttttagtttcattctttgcttcctgttttgcacaatgtgaggattatttggtatggttggtgataaatttgaggaaaaagagagaaactttacgttttgaatcatatgattcatgttggctggaaactctttacctccaagtttctgatcaaaatgtcaatttctgtgatttcttggtaaccaacggctaccttactgtttgtttcaaatctttacggttatagtcgtgatttttgtttttgtttttgtaattctgtttaagtttctgcttgattcatgtatgagaaaccttagaaaattgaatgaaatcacgatttccagccttgaaatttttgtgtggtatagtcccaatgcaaaaccaaattccacactaacacaaacacacaatcatttgtatttgagaggttaagttttttaaacctggaaaaccagatatcgaacttaatagtagcattaccatcaacacatttcctactcaaggatactaatatgaacgtcattacataaagcaaatttcttttgtttgagtttattttgtctctctaaaattgaggatcaaatattcacatctctcgtttacagctaacaagaaaaggcaagagggggatactttgtcc

SEQ ID NO: 72213 - DNA, 782 bp, Prunus persica
  Intron number 4 from transcript ppa011665m (locus ppa01166 5m.g) derived from phytozome v7.0 (chr-ID scaffold_1; pos 22991915 to 22992696 reverse strand)
agctttatcagaagtccttagaagtcacatctaaggtatttctaatgttatttcccttggaaagctattctgttagtgatatggtattgtattatgaatttttttgtagattcgacgcaggagttctcttggcaatcttagctattgactagaactgagtgtttttaatgtggttgattggaatgttcgaattaacttaagttcagaggcctaggatgtaatacagtgggatgaggaagttcataagtaataaagttaaaaggtgaagcaatttcagaactggtattgcctgggctgtggcaaccttcagatcgaagggtacagatcctaaattgctgccacacattattatatagttgggtataggtattggtgggctcaagaggttttcttttatgacatgatttttggtaccatggggacaaaggcttaaagaccaaacaaagcacaaacagcccggggtctgtggacccaagttacctcatctcatatgaggtggataataggtcgggaaggattgaagtcctaactgtggtgaaggtaagagggcaagtattgaagggcattatcatttataggaccatggcatgtagctgttgtttgtaataagaagcaatcttattctgtaaaggctaggccttcctattgtccaccttaggactgaaaaatttgctaactttggagttggtttaatatttatgtaattatattagtttgattttacattacaagtgcaacataggtaattgctgttcatgtcttcctaggcaccagaattacat

SEQ ID NO: 72214 - DNA, 485 bp, Prunus persica
  Intron number 3 from transcript ppa008893m (locus ppa00879 7m.g) derived from phytozome v7.0 (chr-ID scaffold_1; pos 7496460 to 7496944)
gagtgatcaggatttttgcaggaaattgaaggtttgggcctctatcttcatatttatttctttgtctggctagacatcactttggttttgattgtttatttatttatattaatggtggagaggaattcgaatatagatttctttcagtattgagaagagaaatatcattggataatagccagttcggttaccttttagtttttgtaaggaaaatggctgggtggctataatcatatatacaataggttaggatttttggtattttggaaatatttgaaggattgttatgaccaatatgttattattattatttttaaatgagtgctaaaagtatgtagattgggtgaacaacatttctccctctaacgaaaaaacaattaattaccaaattatacaagttttctcagaattatattttactgacattgtgtattttctttttgtttgtagttgtggtacgccctggcaaagacactctcagaaca

SEQ ID NO: 72215 - DNA, 740 bp, Prunus persica
  Intron number 3 from transcript ppa023653m (locus ppa02365 3m.g) derived from phytozome v7.0 (chr-ID scaffold_6; pos 6340186 to 6340925 reverse strand)
ccgtgatatcaatagaagtggctcaaaacgcagtggttgccctcgacctttggcctcctcttcatatccttttgattaatttttctgtatgtcggagttttggtgagtctttttttatgttaatgagtttttgggagagtttgccttgacttatgtgaactctgaaaaggcctgcgaatgtgaatacaatgaaatcaccgattaaagaaccaagaatttctacattaccggttcgaaaacctgatccctgtctgctgtctaggacttccaagaatgtgatggttggtgcaaatgatttaaagaggaatcagattgctcaccctggtaaatatttagatattgactgcatttattagtgagatttattttttaaaattaattttagaattaaaaaagataatggtagttgtgttccataaatttaggatccattatctgatttttcttttcattttaatttttttaatatgaaaaagtgtgaatttaccatattatcctcatttaattaataatttcaatttttaatgtttgcattaaccaagggcattttctggtattttgaatgttttaccattctttgccttttgctttatatatatagtttgctttatatatatagatatagataaagaaataagattttcacatttgaatcaaatggaaattatttgtttattttctgttaactacttctctcacatgcagcagggaaattgaacaacaaaaaaactgggccaaat

SEQ ID NO: 72216 - DNA, 873 bp, Prunus persica
  Intron number 1 from transcript ppa003256m (locus ppa00325 6m.g) derived from phytozome v7.0 (chr-ID scaffold_5; pos 15510134 to 15511006)
gtagatttggggtttagaaggtccacatttgtgaggtatgtttcagatctggtttagctcaacctgttatgtttaccaacttattgagttctaagatcttgtgggttctggagtttctagttagatttgctcttggcttggctgttggctccctgaatttaactgaatatgctgtgattgcttggtttctttctagatatgttactagattttggaagggtaattgtaattgctttgaagttcttgtcttgtttaatatttttaatggagatttacatttcttgacatcttaattgactcttaagctgattgtatttcatactattaatggagttgactataacgtttgatacgttaattgtaatgctcaatggatcaaatgcgtattatgtttccatgcatgggacttgttttagaagagtttgatggttttgattttggaacttaggcatgtcggttaggatcaaaagtaaattgttttaaggttttctctctctctctctctctctctccctctctctctctctctgtgtcggtgtgtaatttgatccatttagttcttatagatatctcatcaattcccactgaatcaaattgagctaaaatgaaaaggtcttttaaaaagaagaaaaaaatcatgtttgatttcattatctcataagtgatgtaacagtgagttgttgttaccataggcatccatagacagatattaaaaacatgttttattccggaaatttgcagaattgcattgctttgtatttattttctttctttttttttcccttcaattgcatggtattaatttagggttgtaatgtgatcatatgtaacgatgcagcaagtgggcttcttcagcatattgtggctattggc

SEQ ID NO: 72217 - DNA, 610 bp, Prunus persica
  Intron number 1 from transcript ppa008135m (locus ppa00813 5m.g) derived from phytozome v7.0 (chr-ID scaffold_1; pos 1511497 to 1512106 reverse strand)
tcccaagagttcaactgggcagccagggattggaggtgatgttttattttttatttccttctctcacattgatctgtatgagaagtcaactacattatgctatcaacttggacctatctgaaacattaaagaacataatctgtcactgtagtaatttttatttccggtttcagttcactgtagtaatttgattgaaaaacagtttaggaatatgtgatgtgtttaaggtttatagattcgatcagaaaactttgagaacagtctaattttcaatttttcatctattgggtacaaaaactgagtttcagactttcagcatctttggtgggttatgacaatcatctgccacagatgggtacaggatgatcactcactgattgatttatcttcaagctcaaaagaaaaaaggtccaatctttttagtgttttttgacaaataagtcttgcagttgtggataatttagacacaatttttttgtttgatttggtttggtatatacttcattggaaattggtatttagctcatggggtaattacttctcaagaacttgctattcttttctcttcatggattttctctggactgtaggtttctagattgggttttgg

SEQ ID NO: 72218 - DNA, 806 bp, Prunus persica
  Intron number 1 from transcript ppa004151m (locus ppa00415 1m.g) derived from phytozome v7.0 (chr-ID scaffold_5; pos 10792075 to 10792880 reverse strand)
agatttgaattgcgattgtattcgcagcttaccaggtaaccctccaatgaatttacttcgtcgtataatttcgtattggattcatcttacactgcctacagtaaccagagttttgatcttttgagtcctaattttttagtatggttgttttaattacattggaaggttgcattcacgctttctgggttttgaatgacttagttcaatgaacatttcatcgtcaaatgtttaattttcagttttagcatgctatgataatacagttgttacctatgatattagctatgttattgtttttatgtatttgtttataaatgttcgtttgttgggccattcaataatgcagttttatacttttattttgggggacatgatgaagtggttgtgattgaatataataattggtcagtggggttacaaagatagatttttcaagagaaagaaaaagtggaaaagtatatatgaaaagagaattgacattatgaacaaacaaattttaatggccatatgccatcactgtatttgatgtgtaagggatgcaagtccaattggatttcttcaactagttgtgctgtgtgcgcgtgctctttcgcactgataaccagttaaggctcaccgaggttttgcatgattctcggtgtaagaaagtatatcattttatataggccttagctaggaaaacagtagatctttgggatggttccaataaagatatttgatttcaattttttttttttcatctgatgcccataaatttgtcaaggtagttaattgagaggctgtataccaattttccaggtgcgtcc

SEQ ID NO: 72219 - DNA, 716 bp, Prunus persica
  Intron number 1 from transcript ppa004713m (locus ppa00471 3m.g) derived from phytozome v7.0 (chr-ID scaffold_1; pos 35119702 to 35120417)
gatactggaattacaggcatcaggtcttaattttacacgatatcatctttcttaattcagaaatattcttttttgttatcaaacttcagttgttaatggaatttgagttataattttggatgttaatttcaattttttttcccttcatgttttttgaattgtttgatatctgaatttgggtaacctcatattggaaagtttatgcttgtataatctcgtttaaatttgactttcagcttatccaatttctgattcttttaccttgttgctttcgaatttgtcaaactaaattttggaagcttagagtttgttttggaactaatatgaatttagctcaagcttgtgtctttcttatcttccttgatctcatctcattttgactaagacagagttttaaatttacatgtggcttgagtttgttttggaactcatatgcatttagttcaagttcgttttattaattattatattccttgatctcatctcagtttgaaactttgacatggagtacatgatctcaacgttaaccatatttgtataggagctggatttctgtgtcaggggtgaaattgatacttttgttgtgtctatatcttcatatgaatgtcaataaatatcttattggtttcacatatttgaaagctaagccaccctcatttcttgattgatgtttaacacggacctttttatcttgtttgtttaggctgatatttgcc

SEQ ID NO: 72220 - DNA, 889 bp, Prunus persica
  Intron number 1 from transcript ppa016332m (locus ppa01633 2m.g) derived from phytozome v7.0 (chr-ID scaffold_5; pos 5699496 to 5700384)
aggtaaaactgaaggaatcggaatttcacgttggttgcttttgaattattttttgagagattcactattatacccaatataggaacccaaattattaaaaaaaactgtatatgaaatgaatttcagaaacacacataaagctcatttacaacataacaaaaagacttttaacttcttttaaattacaaaattgtcattgatttcttaaaacaaacacaatcccaaaacctcataaaaagcccaaaacactcaatagggcatgaaactaatttaataatcaaaattaaattcaatagggccaactgtcttttttttggggggggggggggaggggagggggggtttgtttatagaaattaaatggtgtagagtttatatatattattagtgctaagaatggatatatgactaaatatctcttttttatttattatttattatttttaaagagagcagagagaataagacaggagcataaagtagagagatgtagaggaatggggagggggaggagagaattctggataaatatttgaattaatagttaaagggtattttaggaataatggtgggtggaaataggattgtatttacatagtgggtgaaaagatatgatggatgaagaaataagacaagggttgaaatatcaccactcattctatatgtataaagtgaaacattcaataaccttcaaaatgctcttggtgaagtaaaatattaaaatatatgtaacttgaaattatttatgtatcattttattattgtgctttactctttttatgttttgtcacttgttagagcaagaacaacgtggtggactgcatcaatgagatgccccgttaaattcttgatagtatattgtctctctcgccactaaaggaagtagtag

SEQ ID NO: 72221 - DNA, 481 bp, Prunus persica
  Intron number 1 from transcript ppb018272m (locus ppb01827 2m.g) derived from phytozome v7.0 (chr-ID scaffold_4; pos 7285096 to 7285576 reverse strand)
ggaaatagggtttggcagagaaatcttcaaggaacgtaattcgtaatttgaatagcctcaggaagacttggaatctcactgaaatctgttgtaatctctcaagaaacctatgaagaaatttgagtaatgtgtgaaaaagtttgtgttcttgcacaagctttgatccctctttatatactgcatatcgatcgtaccactttcctatttcaatttgagtgagtgaatcaaatcctatttcaatttcctgttttgaactccttgcgggactaggattgcattgggccactttcctgtttaagaacactttccctatctatctatttaaaaaagaaagtcacaaactaggctgccataaattcaagaccaaacaagaagacgaaacaagaactcatggcaacctttgaaagctcatcattttgctgatattccttctctgaacacgtatcttaagaaaattaatgatcattttttctaatcagct

SEQ ID NO: 72222 - DNA, 787 bp, Prunus persica
  Intron number 1 from transcript ppa011565m (locus ppa01156 5m.g) derived from phytozome v7.0 (chr-ID scaffold_1; pos 29779480 to 29780266 reverse strand)
aatctcatacgagtgcttgactcccctcaaagacggtaatcttatcaaacccatgcttcttcaatttaattttgtttagtctgaatcagatggattttggtttgcttgaggttaagctagggtacttaaaataagttgcttcaaccgttcaatttgatttatatcgggatttctaaacttcggcttttttatttaacaaaaataggatttaaaattagggcttttcacatataagtccttgataacttacattgtagagaaaaatgaaaacttggacctgattttttgaggagttaaaagttaggatgttacataaggtgaacaagatgctacataaatggaagaccctcgtggttcctattgatttcttgatgggggtgcttcaaagcataataaaatagaggaaaacccccatttctaatctttaggatagttttattgatggcttaactagtttttaggcaaattttatacttacagagcacggtgttgcatcctatattggtaggaatgtgtggttctaaagtgacgattgaaagaggataaatgtatgttatttgttgtaaccccactggctgagaactttattgtgaggtggttttgttttttcaagttaatggccaactgccacagtttgctggtttatgaattatatccgccttatcttaaataacagggccagcatgtgtgcataggatggtaggaaacttcctgtgaaattggagtaaatgaaactgtgatctctttgtttgacatgttatactattcaatttattacagacttgga

SEQ ID NO: 72223 - DNA, 723 bp, Prunus persica
  Intron number 1 from transcript ppa011709m (locus ppa01170 9m.g) derived from phytozome v7.0 (chr-ID scaffold_3; pos 4206185 to 4206907 reverse strand)
ccaggcctggcaacaagatcatacaagccaaactggtgggtatgtcttaccctttcttatttccaattcattactttgagtattctgtttaattttatttattcttttcaatcccttaataatctgtgcaataactcttttagcacatttgctactataggttggtgctataatccatcgacttctctaattccaattgcttaagagaagaaccttattgtgtgtattgcctagaattcaaaatttgatgtaaattgtagatatccattttctttttttcaactgcatgctggaaaaattaaaccccacagaagtgctgatttgaggctccaccattttgaaatgccccaattcatgatttgcaccccaaaaaaagaaaaagaaataagtacaaagcagtgtggcaattcaaacagcagatttatatcagcatacaccggcatttgtaggtgtgccattcttactctagactgtccagtagtttctgtaggagctgatctcttacctgtattttgagaagcatagactctcaggttgaattaatagcatattaggagaaccttttggtttttgttgcattacttccttgatgagagcagtgcttacaagttacgagaatgtagtacaatgacaattttcatttgtagttagttgaattgtcccataaagacagctcatttctaaatttcttgaatgattcttattcaggtgcttctaggggac

SEQ ID NO: 72224 - DNA, 293 bp, Prunus persica
  Intron number 1 from transcript ppa010612m (locus ppa01061 2m.g) derived from phytozome v7.0 (chr-ID scaffold_1; pos 36390827 to 36391119 reverse strand)
gtcaaggacctcttttctggtactccctcttatccattcgacctcaatttctttttccaaatacatatgtttctttttcttcatacaagcagaagcgtacttttgaaattcagatagatttaatgtaaaattgaaatgggttattatttgaatctcattatcagcaccataaatgcatatttgaatccgtttgatataaaaatatttgggttttgtgtcatattgaagtgggtgcttggcacaatttgttttttgttgtttaaatcccatgttggcatgttgcaaatccgcag

SEQ ID NO: 72225 - DNA, 765 bp, Prunus persica
  Intron number 1 from transcript ppa002216m (locus ppa00221 6m.g) derived from phytozome v7.0 (chr-ID scaffold_4; pos 10879789 to 10880553)
tccagctttggatttaaccaaggaaacccattaaggtaagattcctaaccataccttttcattttttggcaaaattttgtttcgcctgtgttttttaaggtaagaatcgccgtctctctaatgggttccttttttagctcacaaatacgtggtattacgaatgagcatttgtttctgtttttggttgttggtatttttccatgtacacactttgacttgtctgttagaataaaatcaggacaaaaattaccttcttatttgggtttggtgtttctgaattgggtttgcttttggtactaacatctttgttgtgtcttcagttttcctttttctaatcaacataatattacattctgttttattttcaactatgtggttgcttgagaaattttagtaagaagctgaaaatgagatattgagtttatggagaaaataataatctattgtcattcagcttttcgaaacctgaaatgctatgttgttcctgtgcattttgtactggaaggttttttttgttgttggtcttttatcctaaaacaacatcagtgcatcttacttggggaagctggtctgcgttctgtttggttttcgtttagttttgtacagtaactttgtttatgtttggctacattgtatattttctgtgtgcttgctctattttgctacataatggttacatttctttcgcatagttgaataacttgaattctctttactttattcaataattctcatgaatagtgatgtggttcatcaggctcactt

SEQ ID NO: 72226 - DNA, 818 bp, Prunus persica
  Intron number 3 from transcript ppa007983m (locus ppa00798 3m.g) derived from phytozome v7.0 (chr-ID scaffold_3; pos 2558476 to 2559293)
ctggaaagtaagttatatatagtttccatacatgtagtatctatgttactttttagaatgcctgttgacttctctgcgttgcaatagctccattctgcggttggttaatggcttaaaatattcaatctgcagttgtgtagcaatggtttcttggaaagtaacatgtatcaaaatactcggcagtttaaattgaagatttgcaatatgtaagacttttgtcaacctaacgaacttgctgagttcattggtaggcggggaagataatccacataactatctgcttctcatatgtagtaaatgcataatagaatatgtaagagttcagtataagacggcacatgggtgtgtcatccaagaatcatgttttctggataattcagtaccgcaggccttgtggctcagtggtactagctgcctccccatggggcaaagatccatcaatcaaatagaatctcacttgcagccatatgggttggtttgatggcggctttttttattttatatatatgtataagcagaacttaggcataaattactttaaataataattctgctaatgattgttataactatagtcaaggcaatcttcttatattaaataatatgccataagtgatagagatggattcagttatttctttgttgttttatcttgttactgcaaccttacttattccagaagcaaaaagggaaaatataaagaaaagacagttaatatgaatgagattttgttcctcaatgataaaatgccacactgtgttggctaaagttgcatttctgtctctgttgtgcaggtttttctaccacagtgctctaaa

SEQ ID NO: 72227 - DNA, 786 bp, Prunus persica
  Intron number 1 from transcript ppa011494m (locus ppa01149 4m.g) derived from phytozome v7.0 (chr-ID scaffold_2; pos 17136221 to 17137006)
agctgttgttggattccttcgttgcccatctgcaggtaagattcagattccgtagtttttgaaattttgggatcaagcatggaaattttactgagttcttgtaattatgtgcaaattactggtgtgttttgatgcctgggatttagagaattgtagttctgattttcttttgctgggttattgttcttgttgtgaatcaatggtggctgcccatcttatgagttggaagaatttgcttgtaatccagttttttttttttaagtcttgtcctttaatattaatattatgcagggaaacatcctacaattgtttctggtttttttttttttaaataaaaaaattgtatgattttcttgatttttaactagatgggcttgatttcgacctgaccaacagtataattgtgctttctcaacaaacaaaaaaaaccatcatttgtgattcaaatcctggccagtcgaagagaagttttaatcctatctgatctagcctaagctttatgccatttcaaggtactggcatgactttaaaatcttactgtaggacagtttgagcatgcaatgtgtgtaacatgatggtgagcagcaatgacaaaacccgagatctctcccatttttagatttgtatacacgaaatgaagtcattttatatgtaaacttggaagaaattgacaatggcagacaaaatctctatgatttctttaaatatttgatataattttgtgggaaatttcattaacttgaaattagttggtacagaactagtaaccgaaacaacatcagaaca

SEQ ID NO: 72228 - DNA, 757 bp, Prunus persica
  Intron number 2 from transcript ppa008557m (locus ppa00855 7m.g) derived from phytozome v7.0 (chr-ID scaffold_1; pos 12656969 to 12657725 reverse strand)
atatcaagtaagtttaatcgtctcttcaaatgctttgttagcatggttgcattccttttttcttttttttttatcggattattgttgaatgtatttctaaatgcagcccttctttttgtctctctccgccaatcaaataataaagaaaattattataaatttctcttaactacagttttttatgctgcctttttttttttttggttagacaatttttcttttgcgtacaatgccaggccacatctgccatagcacaaccatgacagatagccaaggcatcatgacgatggcacagatggcacctgtggtgtctgccattgtctagcacgaattaccatggtttttttgttcaaggattatagtgagtgtggagagaggaaaaaaagattttttgtatgcagagttatggatcactggtccgcaatgggcagttggattacatgtgattgttttcttttcttaaatagagggattcgatcttagaaacttcttatatatatagcttttatctcacttattatccttatgtatgagttttcataagcattttaaaatgcaacttcagtctaagagtcatcatccaatgtattgtacctgtgtatgaactgcaagtctagggttttttctagcataattactcaaattaggtgcctagagctatgtttggaatttctatttctcttttgctcttagttttgtgctgatcttgttttcttttgtagtgattgttggggagatagctaattttgctgcttat

SEQ ID NO: 72229 - DNA, 372 bp, Prunus persica
  Intron number 1 from transcript ppa015681m (locus ppa01568 1m.g) derived from phytozome v7.0 (chr-ID scaffold_7; pos 17433402 to 17433773 reverse strand)
accccctactgcttcaaactctcaaaaatcatcaggtagctattgaattagttatgtgttgatttgtttcgaacttcgaataatttgttttattgagttagggtttagcctctgaagttatgactgctgctgcatatagaaaatgaaatttggtacttagtgaaattaagaacagtacaggtactggagtgtagatatttataccttttattaccaattaagttgaagatgttgtgaataagtcagttttgaatcgctatgcttgatatattttattgatggcatggtgtttattagttattgacattttttttttaaacctgtgggttactcgtagttgaggaggctgaggcatcagctggtactgccaag

SEQ ID NO: 72230 - DNA, 996 bp, Prunus persica
  Intron number 1 from transcript ppa008254m (locus ppa00825 4m.g) derived from phytozome v7.0 (chr-ID scaffold_4; pos 2090272 to 2091267)
gcggcggtaagattcggatctgattccttttggttacttagttacttgttttgtgagttgctttagatctgtgaaattcagcatctttaggaaaattttatgtatttgtttttggatgttgggctagttataggtgttctctattggaatatgattagatctgtgatttcctttagttctgatctcgggaagaggtaaatgtttgttttttaattgaactttttggaaagagattgatcaacttaagcttcggaggttaaccattataccttgaaaaagatctacttccttacaatacaatccatgagggattgttaagttcttactgtatgtaaacatatagatcagtggttcattgtgtgtttgcatagatcagtggttcattcttactgattgtcataaggaaaatgccttgcactgggcatcttaaagaacatgatggttgtaccggacatgatatgcaaaattaattttcagatagtcattgtgaggttaatcaaaattcatctgagttttcatcaactcaagggaaaaaaaaggggtggttcattaaaggctgcccttacgcagtttgttccaaccatcctgtcattaggagaaagacttaggtataacagtttaactgcaacaaaccaataatgaagtaacacgtaatcattgttgttgggactcgtatcatttattagggaaatccgtatcatttatgtcatgtaacaacatgttaaatttaaatactctggttccgatcatttcactattgttttgtgaaaacgctgtagcatgatgatgtggtagaattgttgtacttaagaatttcttaggttggttcaacttcaaaatgacaacggtaagatgatcatagttatttgatcatgctttttgtttactaattttaacacactttggctgatctgcaccagcaaactgcaagtgaagtggtgttagatttcccactggaaaattaatgtcttatttgactttgctggtacagtctaa

SEQ ID NO: 72231 - DNA, 1042 bp, Prunus persica
  Intron number 1 from transcript ppa006267m (locus ppa00626 7m.g) derived from phytozome v7.0 (chr-ID scaffold_7; pos 20011131 to 20012172 reverse strand)
tgcaagttcagtgcggaccgtaactcgagatttcggtgagtttttctggctttatggcgcactatagtcttgaattatgcacttcagctaacgtgagctgatagtgctgttttaactgtaagtaaatgtacgagttcttttgtttttgtttttttttggtctctttctgtctttgcttttttgggtgaattacttttttctgtgtcgattttcatgatatgggttttgagttgcacatttttggattgggttagctggctggtgtcctacaatcacatgccaaagttggttcagtttagaattttacgtttctttcatgctagagtctttctgagtatcttcatgtgtttctttctttcatgggtcatcgctaatcaaagttgcaaatcagaccaacaaaatcacttgtggacaatccacttttcatttcttgctattgacagcaaggccttttgtcacatgaaaaaaatagcatcagtctctatccatagtttggcttggtttggaagatttcacatgcaaaaattttcggggcaagtttagattcttttacttgttcagtccacatttatgccttttctgatgatacatttgtgtttaatttgtgagctgttttgggtcctctgcatatgtcaaagattactgatataatttaaaaccctgcctccaccgaccctgaaatatataattctatgaatgatttagttgttgctgagagttgcatttggaagcacaaaaccttaaacagtcaggtggtctggtaatctggtatggtagttgcatatctgacttaatcaaacagacaatgtcaactccccaaactgtatctttggatggttggataattggattccctcccatgtgcaagtatatttggtctcaattctcacatgttctgtttttgattatattcctgtttgacaacccctctctcttatttaatcttgtcctaatactactacacaaaataaattatgatgatcataatggggttttgatcttgtgtggaatctgcagatctctccaatccgattttaccagc

SEQ ID NO: 72232 - DNA, 842 bp, Prunus persica
  Intron number 3 from transcript ppa010020m (locus ppa01002 0m.g) derived from phytozome v7.0 (chr-ID scaffold_6; pos 6439020 to 6439861 reverse strand)
ggccactactcttccaaaatttaccgtctacaaaggtaaatcaatacacataatatgtggtcagtttaagtttctgcgaaattggcaagtgaaaggcgttcccctagttttagaacccgttattgtttagtgaacagtgaacaaaagattatcttagactgaagatgtgttgttttataggagtacggagaaacctgaaaggaaccataatcacctagagacttttggtctacgtgggtttatgttctgtgatctagttaacagcgagtcttgttttcttaggcttctataggttttggatagataagttcagattaatatattgatgaaggttttcaggccaaaaaaaagaggtcatatcttgatgaaggcatttatgtatcaattactttctcttgaaatatggagattgaaattggcaccagttgattcacgaaagggctgcggatcaaaatctgtactattatcttgtttccttccttttgtttttgctttctctgttctttttgtggtgcattgcatttgcgggactgtaatgatttttggtaactcctgtacagctacatttaaatagtttatttatgtcgagatttatttcttcagttgaaaggataatttaatatattagtttgatcctgatttcaccacatcattgataccacttaagttcctacatatacgatggccttactatttccttcctctttatttttgtgaagtagaacgattgttaatactgtttcatgcagacatttaatttatgaattccaaggttacattatcttattcatacattttattatccagcaaagctcctacttggctcaccacttttgcaccgg

SEQ ID NO: 72233 - DNA, 935 bp, Prunus persica
  Intron number 1 from transcript ppa001555m (locus ppa00155 5m.g) derived from phytozome v7.0 (chr-ID scaffold_2; pos 268200 to 269134 reverse strand)
tagacagtttcgacttcaagattttcagcaaagtaccatcctttttctcttttatttatttatttttcaatcgtttaacattggattctggttttgactttctgttctgttttataactgcttcatttcaattgggcatttctataatttacattaccagctttatattcaagattgtcaccaaggtaagtcatatattttgtgttttaatttttgatcaaatttggtctgtacttcattttctgcttaattactgcttctttccgactggattttcttcaattatgacgttttatctatattttctgtttgcttatccagtttcttttcaaatattctagactggttggatgttccttgatcacatttcccatttctctggcctttccttgtgatactctgtttggttgctgagaaaaggcagcaaacgaaaacaagaagtagaacgtttaactttagatgtttcgttaaagggggctaaacatagtcttcaaaaagttagtatgtgtatcagtgtatgcattgttcagtttatgatccatctctatatggcggtactatatctttgcttgttgagaaaagatagaaaaatatgaaattataaactagagttttcatcattcatggttgaaatgactactgtagatataataatttcatcatttatacgtgtttgaggttgtttacttctatatagctacttgccctcctttagactgctttatgttctgatgcttgattgcccgcaacttctgcttggaaatgcagtcttgcatatatatatatatatatatatttttaattatttcttttttggtcttcattccttttattcatcgttgacttcagtaaaatgtttgatctaataaacattctgactgtttgaaatttgtatatcaggaggcttgtggtggacagagttgctttttgttaaa

SEQ ID NO: 72234 - DNA, 623 bp, Prunus persica
  Intron number 1 from transcript ppa023592m (locus ppa02359 2m.g) derived from phytozome v7.0 (chr-ID scaffold_8; pos 14979835 to 14980457 reverse strand)
cgtcttctatatatagccatcttctttcattggaggtatgaattctcctgtagagatttgaaattcgatgtttggattggtgaatcttgatttgcatttgtgtttagcttttggggatttcttagttggttctggagttatggaatggggtctaggccaatgacattgattgcgttattgaatacatgatcaggtttacatttcttttggttttggatgtgtgtttaagattttccctttagtttttggttcatgagttcgatttctaaagttggcttgctaattgtccttttcctgagttcttcaccttgtttggttaccatcataatcttaagattttttatattttgttgacaaatttgggaaatgatacttgataattcaatttcagatttagaagttccaagtggcagttttttcgtttatgattaacaatagtttggttgtgcttatggtccatttaaatttttgagaagcttaattcaaataagccaaatagttaaattagtatgattttttgttattttctgtgtcgtcctacatttttgcatcaccaaacacacttgtatgctatagattgatacggtaatggtatctatgtctgatggtagtgtatgattcag

SEQ ID NO: 72235 - DNA, 303 bp, Prunus persica
  Intron number 1 from transcript ppa004149m (locus ppa00414 9m.g) derived from phytozome v7.0 (chr-ID scaffold_2; pos 14957431 to 14957733)
aatgtaataaacctagttttgtttgtcaacttaatttcataatttattttgtattttgagttctaaaatgtgaaaataactgaaaaacaaacaacatgcaaagtttccagtctaggttgggcctgaggaagattaatttgcttacagtctctctcctctagaaatcatagatgcataaccaaacacattaattttagataaattaattgaaaaaaaaaagacagagggggatgatttttctttttctttttattttttggctgtcttcctaattagtatttgttggtggcagggccaatcttc

SEQ ID NO: 72236 - DNA, 935 bp, Prunus persica
  Intron number 1 from transcript ppa016779m (locus ppa01677 9m.g) derived from phytozome v7.0 (chr-ID scaffold_3; pos 14684125 to 14685059 reverse strand)
catgtgttcagatctctcaagaaataaaaataaaaacttgctttaagcgactgcaatagtattgctcaatttgggaagatatatgattagaaagaaagaaagcatattgacgaaaagtaagggttttctttgcattgcctgtgaaatcaatcatcaatcacgattccacaaattaatataaaaaccttttcatgacagcaatgtcattcatgatcgagtaactcttaatcccatgatatttctctttttcatattaaaaaaaaaacgtttttattagaatatagaatcacgccaagatattcttattcaaaatacaaatatttcctgaaaaaacactttaaactgctttctcttcataaatgacttgttgtatgacccataaatattttcaagttttttttgccaaatgctttgaaaaaatagataactataaagaaacccatttctagctatagaatcatagaaataccctacatgaaattgacttcataaacacaccctaccttacattaaacagattttataaacacaccctactattgccagctgatttttttttaatagatttcctgatttaccctttagtgagaaattcatacaaaaaactcaaaattggattattactcatcggttgtttctctctctctctctctctctctctctctctctctctctctctctctctctctctctctctctctctctctctctctctctctctctcttgcaaatgcaaacacatttcattgaaaagcacaaagcaacacagtgctagaagtagtagcctcgatctaatgagttgttgcagacgacaatggatttctcggtaaaaattaaaatgtgcgaatttcatttcctcttgtttatgcttaatttttgattttccgattaattaagcagggggttgagcagagatcgagttctttatcattggg

SEQ ID NO: 72237 - DNA, 582 bp, Prunus persica
  Intron number 2 from transcript ppa002065m (locus ppa00206 5m.g) derived from phytozome v7.0 (chr-ID scaffold_4; pos 2602628 to 2603209 reverse strand)
cgcaggtttcacttgttcctgaaagtgaggtgggctttgttgtggttttgattctctggttggtttgtgagaaaatgcttgaaaatagattttttttttttttttggttgttgtttcaaattccttatggtggtactattatttgtgattttggaacttaaagctcagtttaattgtcaaaagtcattcagaaatgtgagccttccatacagtagactctagtgcatttcatctctcagcaaacaaaataatttaaaaccgaaattttgtaaatttcaccttctccctggctttctttcccgctttagcattttcaaagattatatgttagtatctgtctgtctccttctatcccattttggcaattggcattcttagcagacaacacaagatagtcattccatgacattttgaagcagctacttattatgcattcaatttcatttgggggtcaatttttttcgttttctttacttttcttggagattatctgatgttgtgtctattgaagattggggtgacttcatttttgcattaatctgattaggaaattgaacacaaactgcgggaaggggaaactga

SEQ ID NO: 72238 - DNA, 783 bp, Prunus persica
  Intron number 1 from transcript ppa012721m (locus ppa01272 1m.g) derived from phytozome v7.0 (chr-ID scaffold_7; pos 18369656 to 18370438 reverse strand)
ttcagttcaaaatcccaaaacccacttcttagctggtaatcatttcatcctctttgtttttattttccttctctcttgtgttttatccattcaaaaattgtaatttagttgctgtgatgtgttggtttatgtagttaatcggatcacttcctgaaattgtagatttctcagcctttgttgatctagcaaattagtctacgagctcttttatgggtttgtttgtttaatgcaagctaaggctccatctgtgagggattagaaactgaaatgtaagagatacccattttctagttctctgatttttgtgggtctatgtgaatttgctgattgcctttttcattggaagagtcctatgattcaatcccaccttctgttacttttctgtcaataaaccaattgtctgtacatgctaccttacttcagttaagcagttgaacattaatttaaagggtattattagattaatttattgggcagataacgcttgcaagttgttaagtgtgaattagaggtgcattggttggaaatttggatgcaccagctggtatttctgagcttcatggtccatctttttcctttttctcgggcatgttagttgggtatttaattcattctctttcatcttggattgaactcaatacttttcatgagactctgtctaccatgtctaaacattgcatgttgaagtttttacatttgaatttcacatttcacattttttatttttttatttttttgttaattattgcctaatgtttgatgctaggttcttcttcgaagcca

SEQ ID NO: 72239 - DNA, 655 bp, Prunus persica
  Intron number 1 from transcript ppa003677m (locus ppa00367 7m.g) derived from phytozome v7.0 (chr-ID scaffold_6; pos 27010530 to 27011184)
ggcttgttgttggtgacaagtctgttcaggtcagtggtactgctcagctaactgtttgtttggtttcagctgatgaaaacggaaaaaattgaaaattgaaggtttaattttctttcttaattttcgtttttgtggtctgagaagtctgtagttacttgaaaaatgaaacacttgattcagcgtatgattgttgaagattagattgagatttcctgagaatcaaattcaatttttgtttttcatttgctttgcttttctcccagtttttttgacaaccaatggtagaaacatgtttattttctaagaatacgaagttgtcgggtttgcctttctgatcatatgtataaataaataaaagtgattcgagagaacatcttacctcggtattaatttttacatggcacccaagtgcttgttccgggttggcgaaaaaagaagtgcttgctccggaattgttttcttaaagctatagttcatctttgtaattgtacgtgaaaacaaaagctctacttttaaataaatgagcagacttttggttaccagaagcttttggaaattatactctacgatgatttgtcagtgtataacttaaaatctgaaatttgatgttggatgctgtaaattacagagatcaggaaaagtacctggtgtaggc

SEQ ID NO: 72240 - DNA, 757 bp, Prunus persica
  Intron number 2 from transcript ppa000188m (locus ppa00018 8m.g) derived from phytozome v7.0 (chr-ID scaffold_1; pos 34564822 to 34565578 reverse strand)
atatatatgtgagtggatttttccgtataagcggaataaatggagtgctattgttagtttaatgaaagggctttcttaatttgattgtggattgtagttaactgtggactaacttatggtttctgggcttcccacttggcggagttccgaatcttatggaataagtgccacattatgccatgtcatcatggattgatgatgatatgctactcttgtgatcgtctttaagatgcttaagggatttggatgcttacagaattttccaaatcaactattaattgtctcattgatggcttacacttggcgagctactggatttaccttaaccccgatatggctaagcagtcgataagtttagggtttaggcgagttgacttattctggaaatgttaaagacaatcaaaataaatgctttactacaacctttgagttgagttgacttaaattgaccgctattaaatgtataggaaagtgctcgtattgattgtctaatggacttgggtaattcacatgccttgttcgatttctttttttttttgagttcagattacaataaatcaatgtcgaaaatgccatatatgcaatgttcattgttttatatgagatacaataaaacttttcctttttttaatttatttcattttactgagatgggtttatgcaatcttctttttggaatagcagtgaccccaatgtaaattgttttcttttgtctttggtagacatatacagggagcattttgattgcagttaaccc

SEQ ID NO: 72241 - DNA, 789 bp, Prunus persica
  Intron number 1 from transcript ppa002568m (locus ppa00256 8m.g) derived from phytozome v7.0 (chr-ID scaffold_8; pos 13138200 to 13138988)
gcagtttctcaggtaaatctctcatcccattttggaattacttgctgttgttgcatgtgttgtgcgttatatgtgttacggggttagtaatttacgttaatttgagagtcacgtttttgttgtgaaggcttgtagactgaaagcttgaatgtttgtttggatcctgagtaaatggacaaaaactttcccggaaaatttggaatgtttatatgatgtagaaacaaattgcattttgtcttgttttaaattttctcactttgatactcgggagaaaaagagaaggtagaaccaaaaggaggtaattgtgtttaagcagatcgatctagcttgacagtttgttctgggataaaaattaaccaaaaaagaagaaaatggcccatgcaggtctcgaacctgcgaccttcgcgttattagcacgacgctctaaccagctgagctaataggccgtttgataatttgactgttctttttgctactatactaaaatgggaaagaaaacggcatgtcgtgcagatcgaaaagaaaggtttttctggttgtggtcagccaaaagaaaggttacagaagctgaagcagaaagcaaagaaaaagaagcttgcttttctaccaatccacgctctgcaactcgaatagcacaaaccctgttcttagttttctaaaacgcttaaaatcactggaaaattgcaatcaattcaaaacatactgtaattcaaattcgtagcctgagttcatggctgaaactctgcttttactggcagcgactctgcgaaaaagtatccaaacaatcca

SEQ ID NO: 72242 - DNA, 962 bp, Prunus persica
  Intron number 1 from transcript ppa000422m (locus ppa00042 2m.g) derived from phytozome v7.0 (chr-ID scaffold_1; pos 39149552 to 39150513)
cgctccgatatcgaattttagcttcaagaggtcagtgtggcttttctctttcctgactctaatttctgttaatctgtgattgtttcccgagaaaatgtgggaataaagtgtttattttttgtttaattttgtgagaatatgatcagtttctgttcagtttggctctttatgagcaaaatgaatagcggatgatgagtttgagaaaaaaattcctttgttaacattacatgttttgaattctatgccaaataattttatcaatcctctgcattttgtcatgatgtattgaattatgggaaggggctaggagctcccataatgtggaagccctttttcccaaaccagatacatcgatcccaatctgggttaggtgtggcagggctatgagttgatcttttgtaaaataggtgcagggggtcttggaccttttagttgtggagaccactgttcttgttttgctttacacccttttatgcttcaaaattcattgaatttcttgccgtctttgtatttgagtggaaaacaaaagacaaaactttttgttttgtacttggtgtgctattcttcaatccagattcatttagtggtagattagaacctcaatccttgggcctgtgtacaacatcctttttctgataagcaaggacgtttaggaacaagtctttgtacaatatttgcattatagttcttcagtttttgttaagaagaaaacacagagatgagattcaacttttcccatcctcagtggtcatggttatcaaaaggttcttttttttttttttttggttcctgggctattactttggtggttgaattcttttgtgaatgctaatctatgttaccctatttgctcacgcacatgtttttcatttgtatccattcaactgatgaggttatttcattttctttttctcttttgttctcaagctttgaagtggcagtggatatttcttacagaaaat

SEQ ID NO: 72243 - DNA, 695 bp, Prunus persica
  Intron number 2 from transcript ppb018041m (locus ppb01804 1m.g) derived from phytozome v7.0 (chr-ID scaffold_3; pos 16398805 to 16399499)
acgctgagacgaattttcaaaaggtaagctgtgccttttgatggtatgatatataaagggtttgtttttaagtattgttcgtcgtttgtggatatttcggattagttttggaacttgaaggtgtggccaaaagttcattcattcaattgaatatgctatgttcaattaaatatgtatcacttttctacctgtgcaggcaagctgcactcttgaagctggagtcaaaatttactcattaagggtggattcagtacactctgaggcatataaggtccttggtggaatgaatagagcaggccaagaagacgaacaaggtttggttcactatactttgttctttcgtttcttgttcaagtcaaattcttggctgaaacaatttaattgttaacggtttgtaggagtgattactatgttgtatagttatctttaatcagctcatctatagtttgaaatttaactgtcaatttgtaaagttgtatagttctcttgatgctgtgttgtaatgttagatactagtccggatgatgccgctgttgacaatggacaagatgtggcgcattccaagaaagagatggagaaaaaggttgatagttctctggctcactcgaatgatttaataaactctgtatgccaagtactgacgtaaatccataaatgcagtcacctttatcaacgctggagtcgtcttttgaggc

SEQ ID NO: 72244 - DNA, 539 bp, Prunus persica
  Intron number 2 from transcript ppa021144m (locus ppa02114 4m.g) derived from phytozome v7.0 (chr-ID scaffold_7; pos 14140616 to 14141154 reverse strand)
gagtccagtatgtgctctgtcccattctctctgtcaaatatcatcttctattttatccaaattgagtgggatacaattatttctaccgatcaattgaaaatgtgttgtaccatctctctaataatgttccaacgcacatgtgtgagtcccgttttaatggagtttgtctgtattagaaagatgatacaatatattttcttgagttatacaaaaaaatcctaaatagtatcctaaataaatgttaatgatcatttaatttagtagcactcagaaacgtaccaaaataagtgtttggttggctgagaaattttgagcctaaattaaggttgtgttgcaaagtctggagggtatatattaaggcagcccagtaattaaaggtcatatgtgacacaatccttataatttgaggggagattttagccaggccttggaaaaacaaagtagtctttaaaacttataagaaaagcagcaaaaagcttataggcatttcctgaactgctacagatttccagctgagcttcatctacttcaccaggcat

SEQ ID NO: 72245 - DNA, 1003 bp, Prunus persica
  Intron number 1 from transcript ppa000369m (locus ppa00036 9m.g) derived from phytozome v7.0 (chr-ID scaffold_2; pos 14165792 to 14166794 reverse strand)
cttgattttcagactgctataagtaagttttatcagttttcttcttcttctctttgtttttgtcgttctttttgccagttttcttggtgtaatcgtcgtcaccatcaccaaactaatggagaataagagtttaatgggttattcttaaaataaataaataaaccaaaattttagaacggaaatgactttttgctatttggttaagaaccctttgtagctttgcctccctatttttataaagttcattatagctgaccatgtatatagctaacaataccccgatatatttgccaagtagtgttcacaagctcttcattaatttgtgttgtagacttgactggaccttttggtttgtggttatagtagtagttttgaattttgattaattaatcacacttttcaagtcctggctggttattgtcttttttggccaaagatatagagaacggatagggctaggtttttttgtaatgcagtgttgtggtactctttttctttggcccgattttcttctttggtgtttttttatggcaaggttttaacgatgccacattttcattctgcacatggatccggtatttctagttgtatgttttcttcgtccttggtggatgagatacgtccattttatacacattcatcataatttttatcgacttagcgcactcttacacatactaaagatgaatcaaactatgtggcgatgtagagataatgatatagatgaaacttcaagttcttatgaagggaattttcaaataaagtatgagggttagaagcagtgaaatcatacagcatatcagaagacatgactatagattttcaacaaaatagtagcagacacatactgtacagattacagaactgcttaaaagacagtactaaggaaaaaaaaattgatttgtataaattacgacgatcacttgcactacattggacggaaacaggcgtgaccagatttgttttgtgtggcagattttaggcttcttcaatttcagtcaga

SEQ ID NO: 72246 - DNA, 376 bp, Prunus persica
  Intron number 1 from transcript ppa026532m (locus ppa02653 2m.g) derived from phytozome v7.0 (chr-ID scaffold_2; pos 10875540 to 10875915)
caaattcaaagatgtaaattcaattttcttgtattaattcgttttttgtgtcaaattttttttatgttaatatttttgtgtgttaggtttaattattttttctaaacaaatcgacgtaaaatttttaaaattccaataagatataatttcattcaatatgatgtaaatgaaattacatctgaaccgtgggctttgatatgaatttattcttcatcattggtcagtgtaattgttagtttcatatttcaatttgaatgaaatatggccgtatattagagagttgttggagaagaactttgtacatttgcatcattttaataacttccccatcttttaggcagctttcctctctcctctctcttggcttttctgttat

SEQ ID NO: 72247 - DNA, 372 bp, Prunus persica
  Intron number 1 from transcript ppa001260m (locus ppa00126 0m.g) derived from phytozome v7.0 (chr-ID scaffold_7; pos 18728301 to 18728672)
cagaaattcaggctttacgaaactcgatcggtaatttcattcagctctatttgtttcatataatgaagatctatttatattcaacctattgcaatttgttatattccataaaggattcttcaatattttggtgggctgatattgttttcattgtttaatggcaaagttggaatcggcaatgtgttttcttttgcttatatgaaccattttctttcggggaggtttttgattgaatctaaaattttgtaaatttatgatatgtttgcttatttttgcatttttattagttcagatggtttattgtgctttgtgcgaattggattataagagtgtaccaacttatacattttcttttccccgcagaacttttac

SEQ ID NO: 72248 - DNA, 560 bp, Prunus persica
  Intron number 3 from transcript ppa001260m (locus ppa00126 0m.g) derived from phytozome v7.0 (chr-ID scaffold_7; pos 18729111 to 18729670)
aaaacaggtcgttagtccattccggttgtacgtgtatttagtctgcagaaacaatgaccattgtttggaaaagtactgtattttgagaaatattttttcttatgtgacattcttctggcttgctttatttgaacctttttcgaaattaaaaactttatcttattcttagaacagtttaacttgttatatgtacaattttaagcataatgtcataatattctatgaaggcttctagattaggattagtatatctgtacaattttgattattgaggctcatttttttggttgaattgtggaaagggaagctggagaggaggtttttaagtgaaatcacacaaatatgagcacaaagttctgagaatttagttattacttttggtgaaacattgtgtaaccaaggttcatcgtgtaaaatcttttcttatcctttgttagagttcacgattacatctgctttttgctattctttttactaaatgttttaatctaaattttgtctggttttagttgttaatacgttctctatttcattgatggccttagatacaagaagctctt

SEQ ID NO: 72249 - DNA, 387 bp, Prunus persica
  Intron number 1 from transcript ppa014737m (locus ppa01473 7m.g) derived from phytozome v7.0 (chr-ID scaffold_1; pos 8867574 to 8867960)
gaagccccttcctcaggttcctcactctgattcttgtaattattgcaactgttaatatgtctcattttggaccacctgtataagtggaatttatttttttaacctgtctgattttccaatgaatttgatttttcttctgtgtaatcacaactgtaatgacaatgaactctttaaatcgtttgtagtccaatgatggctattttggtttcacaagttactttatagaaagaaatacccccatttttagaaggaattgtatgtgacttgttccgtttttcatgtttccaaaatatggatgccttgtcattttacttttcacccagatgagagcttgtttagtaatattgttgatgcaggatgatgtaggtggaggtcccttctgttctg

SEQ ID NO: 72250 - DNA, 810 bp, Prunus persica
  Intron number 1 from transcript ppa006768m (locus ppa00676 8m.g) derived from phytozome v7.0 (chr-ID scaffold_2; pos 26540799 to 26541608 reverse strand)
tctgttcccattccagaattctcaagagacaacaggtaatttcttaacttttttcttcatcaaaatttgaccaatattgggtttatttttcattcatcacacacaaccattccaagtctgatcatcgattccctttttatttttacttgattggttgctcagaaagcagaagaaaagtcatcatagtaaaaaagaaaacagcaaactgatttatgattgttgacctgaactaggcatatgagacgggtactactaccgtttttctcagtaaccaaaaagtttcatcagggttccatcttctgctttctttagggtttttggaaatttagttatatacctgctagatatcttttgaaataatcttcttatattgtcatctctttcagttcgttgttaagaaaattgaggggcggaaaagggagggatatcggggaagaaaagttctcagcttttgccaattaaggtcgatttttacctacagttttatgctttcactttcatcttttttagcagttgtgatcttggtacttctttagttatggttcttttcggtgttttgatttcgacaacctggtttgagtttctgaagaaagataaagaggaaaaaaagaaatcagaattatgttaagattgcttaatcttcaggcttgtcccgaaaagtaattttctttgggtttcaaaataagaaattcttacatctgctcaactagtaaacataattatgtatcttttccatctttgatgacaactaattagcattatggtaaatttgcaggaaaacttttaggaggtttctgttttagagttagc

SEQ ID NO: 72251 - DNA, 699 bp, Prunus persica
  Intron number 1 from transcript ppb022436m (locus ppb02243 6m.g) derived from phytozome v7.0 (chr-ID scaffold_8; pos 19021939 to 19022637)
cgctgatccaggtctgtacacgtgtttccttaaatatttcaggtttccattttccacaattactgttttattctcaatagcatgtggtatcctcgggtttagaaggtaattcggttctcttgacgagtgatgagagagatagatacatagttgtatataaaaagaataaataagtagaaactgtatggagtatgtgcatataaaatcaattttcttttttcaatgaggatgggcgaaatccggtcattataaaattaatcttaataaaagaaacaaagtagaaacatatcattttgtgatttattacggggatcaacaaatgaagttgaaaatcaatagcctgaacaaaacatgtcgtatgtgtaggtatacgagcaaaatgattctgtagcagtagtgggttgtgggcttggtggaggctcactggtgaacgcaggagttatgatgccaacgccagttcgggccagacgacatccaaaatggccaaacgactgggagaagaactgggatcactgtgaggcgtctgctgcagccatgctcaaaatacaaagtattcctgtgaagttttctgttgggcaggccttggaagatatcgccataaaagaagaggtcggagaaacttctgagacttctgtgaagctgactgtgaattttgactttgaagatcaacgtccaggaagcactgaaacttcgaaactt

SEQ ID NO: 72252 - DNA, 928 bp, Prunus persica
  Intron number 1 from transcript ppa001051m (locus ppa00105 1m.g) derived from phytozome v7.0 (chr-ID scaffold_5; pos 800682 to 801609)
ttctttctaccccctcatcgctctcctatttgcaggtacttatttcgatacccagtcagtttttcttcattcttccttttttctgtttgtttctcgagaaaatggaaggcctttctatctaaaaagtggaactgtttttccatattgatttttcatgttaccattctggaatgatggaattatttaatttgtcctgaagattcatatcgtgctcaaagatttttgttttttatttaaaattttcaaaattggtatactgatgagtgaaagcacagcagaaaatgggacctaagtattggaattgtttccaaattccaaaggctattggtgaccttttcttatttttctaattttagttttgatatggtttttttcgttaattacttattagttttttatttcttatgtatgcaagcgcgtgcgtattagatagcattgagtttcctcaatgactatgtatttgctctttgcttggtgtttttcaagctgtcatttttcttttgatattcatgctttctgttttgactagttaggaattttatcacggatcataactaacatgatccaggtaggcacttccaagttccaaccttcaagaattttatcacggatcataactatcatgtttttattaagctcttagcgtaagtttgtgctcttagaaccgatgtttaattttccgtcacaatttttgcattttactctcagaaatttactttttattgtacaattaaacagtcatgttttattattcacctttttcacttcaaaatttagtgttgtaagtttatttgactagtgaaaaaaaagaataaaaaatgctttactaatgccaaccacatatgaactcattgttccatgtaatcaatacttcagattaacttaaattacttagtaatttacgaggaggtttgttgtcttttccaga

SEQ ID NO: 72253 - DNA, 391 bp, Prunus persica
  Intron number 1 from transcript ppa004781m (locus ppa00478 1m.g) derived from phytozome v7.0 (chr-ID scaffold_4; pos 1716045 to 1716435 reverse strand)
gtgccagaagctccgcgaacacattgattctctgggtaatcatcatatgctctatttggcttctgtcctgtttggttgataggaaaatgcaggaacggaaatgaatgcttgggaagttttgacttttgacttttgactttgggttgtttgaccgttgcgcgattttgaatttccgttgtttttgtttcaattttgttcacttaagctactgaagctctttttagtctaaattccacttaagtttttttttttttttaaagcctaattattgaaaagaaattcagtttttggttttttatattacttctcgcatttattgtgataacatagatggtaacttattctctttgtaacagggcggccaaagaggctcttcgtttttgtgaatcca

SEQ ID NO: 72254 - DNA, 1017 bp, Prunus persica
  Intron number 1 from transcript ppa001246m (locus ppa00124 6m.g) derived from phytozome v7.0 (chr-ID scaffold_3; pos 15328133 to 15329149 reverse strand)
tcccaacgagacggctcagaagcttctcttccagggtacctacaactgctcctttgtttgttccttttattttggttgactcggcttggttaccttgttttcctttcggtgattcgacgtgatccgcgtgttaaagttcttgttttttgttctggttatttgctgtttcatgtgggttgttttgattttgattatgtgggaattgagttgggtttttgatttgctatgatgggttttcactgttcgtgactttgtgtggcttagttggattctgatatcatcttaggaattgagtttgtactttgttggttcatagcaatcatgttcagacatttcagagtgactatgccaatagtgagataaatttgtgtaaaattagaagatttagattaattttataattaggttttaattctagcataaacttgtggttatttttggggtccagaagtatgctctagcttgccttaaaagaaaaaaggtttattgaagttaatgtgcttgtttttggaattaatcctccatctggtaagttcggaataaaggtgaaaaggaaaataactttagaattcagtgttgttttattttaatatttttgaaagcaacatcgttgttgaaatattttttcagtgagcacagtgaagtggtcttttcctggaaaaatgaaaattaaagactattcaggaggtggaggatctctggaatagggttggattttcagctttgttgtgggcatctgtatcagtagggtttagggattcaatttttttcctctactattctgttagattggagggcctgctatacactaactggtttttagtctagtcttgtcttggagatgcacatgttccaaatgaggttatgtaggtctatgatgtatgtttgcggtggacttcttgtccaaggttttgtaccatctaaattccaactatatatggacttattgctccgtctatttgttctttttctttaagtgaaataatactcatatgtatcgatctgcagatccatttc

SEQ ID NO: 72255 - DNA, 494 bp, Prunus persica
  Intron number 2 from transcript ppa008338m (locus ppa00833 8m.g) derived from phytozome v7.0 (chr-ID scaffold_6; pos 9973420 to 9973913)
agtttcctggcaccccaagtatctctcttttcccaaccatcttcttattttgctctgaagctttagcaaattacgttgtattcaaatccaagttcaacatagataataattttaagggaaatgagggatgtttttgagaaatgatgtaaactaggaatctgcagtcatatgagaaccttgtaaagggaatatctgaattttgaaaaatctgttgtgaaacagttttctgaattgaaacatttataaatctgaaagaaactgctgaaaaacctgcaaaagcaacttttatcatacactcagaaatttatgcgtgtaaagtggttttcttttgtttgtttaggagctatatcaattcaaatttacacttggtttataagaaaaatcccaattcaaattatataacatggctaaggaagtagtactaaagcatcagttcagagaaaaatgtcaaaataaggtgaactcacagtgcttcagtttccaggaattaatag

SEQ ID NO: 72256 - DNA, 894 bp, Prunus persica
  Intron number 1 from transcript ppa007955m (locus ppa00795 5m.g) derived from phytozome v7.0 (chr-ID scaffold_1; pos 35068702 to 35069595 reverse strand)
gagggggtttctcttggtggaaaggtacccacatttctagaaattgtattgtattgtgtttgtttatgattttgcttttaacaacacttttgctctgtttggttaccaagaaaataatgtttgaaaaaaattaaaccatgtaagcattgaacctctcaggttattgttaatgacatgggtctcatttgaaatttgtttaatgcaaatattgcgttgattctgctattgtgaaatgccccactgtttgattacaaggaatatgccaagcattagtttttcttaaatgcaggttgtataggaatggtttgtctgtaaattatgtgtaacattgctggtttaataatttagctaagactggcaaattcagattatctattttttttgctttttttttgttttttgaattcttgttttgcttgaaacagcgcaagtttctcatttggaagcgtgcatataagtcaaatttcaagttaattagttagcagtttgatttctctgctttgggaaatataatggtttttgtttcgtaattgtatgtagatgttcttggagtcgaggaataaaaacttctaacattctgtatttgacgaatgccaatttgcctttatgagcagaagtggttaactttctactttgaattaaggctaccactacttttcttcttgatgatatactttgtttccttggagaaaattaccccaaaaggcggttaaactttttaatgtctagttcttctcttgaatgctcatttcagtcataacagtgctttgtcactattctgtgtttgtaacttatattatgttttctcaatttactttcctggaatgttgccggaattgtattcttattatggaatctctctgcaggagcatcttgtaaaaacctgtcttggct

SEQ ID NO: 72257 - DNA, 722 bp, Prunus persica
  Intron number 1 from transcript ppa020238m (locus ppa02023 8m.g) derived from phytozome v7.0 (chr-ID scaffold_2; pos 20854478 to 20855199 reverse strand)
atcattaaaactgttatcgcactgacttgcagcaggtattccagttgcttatttgattgatgtctggaatgccatcgatgtataaatctttttcctcttaatatattttattggtgcttccactttatgcaggatcttttctgtatgagtctttatctataaccctgtatgagataggaagttcagggttctaatcaaatacctgtatatttacttggtttaactgtccttggtctgagctatagtatggaaatgacataagtacattttatattttgagactagcagttacggcccatctgaaaacacaggttgtgtttgataaaaaaatccctctcttccgttagatcaggtcaagacatatgggttgttgcaaatagtgagcaaatgtttcactgttgaaaacgtgccattttcctaggtgagatgcctatcagctttagatgttaaatcaggaaaggggagaaagttaagatgaaaaaataccaggacctagcaagagctcctgttaaacttctacttttgcattcacctctcctggcaatctatatcttctaacaactaagactggttctatgttttattgcttctaagcaggttaatggaaatatcgactatattatttccatctgtcttttctttaaggtatgctatttcctttgattaaagattgtgtttatgttgaaggtgtgaagatccagcggccgagtgcatcttctcca

SEQ ID NO: 72258 - DNA, 558 bp, Prunus persica
  Intron number 1 from transcript ppa021873m (locus ppa02187 3m.g) derived from phytozome v7.0 (chr-ID scaffold_3; pos 470012 to 470569)
ctacaggtaacaattaattaggatgcactgtcaaaaaacatctttcttttgaaagcaaatatactcagaaatgttttgttttctatctacatttgtatatcctagttggtaaggtaactgcttaagtattgttcatcatttggctacacacaactcaaacgaaactaacatttttttttttatacaaatgatagtctaaactactttaaactaatctaatatacggaaagggggatttgaacttgggtgcatgaaggcgagctcattgccttggccagctcgcctaactcacgtctgcaatccaaaccaactttggaagcattacaaatggccactaataatgtagatgttttttttttatccctatgaattttttttttgttactactttaaccccaaatgtttttatttttttatttttataaatacataaataaataaaaacaaagagaaatagttgaaagccttgtttgtgtttgaagatattatggaatttactgaatctgctaatgatttttaatcatgtaattatatgtgaattgcagcaacttccagtcc

SEQ ID NO: 72259 - DNA, 619 bp, Prunus persica
  Intron number 1 from transcript ppa001368m (locus ppa00136 8m.g) derived from phytozome v7.0 (chr-ID scaffold_4; pos 7740096 to 7740714)
tttcgcctgccgcctcgcttgctgcttgtcacctggttcgctctctctctctctctctctctctctctctctctctactatatttagatctgaagcttctaagctgaagcttgctttgaagtaattagcttgcttgcttatttcaattaaatgattctcgtacctgttttacgatttttctggcttaagatctgtaattagacggtcaaagtagtataatcttttgtactatatgatttgaaatggattagattgaattttcttttgcttagttgctgctcatataatttagccgacttttttattcattcttttttagctttttttttcaaataacccatatcaaatttaaacgaagatcgtatagatatggatgcatacacacataccagatttaaacaagtatcttatatatttacttgcataaacacatatgtatgtatcaaaatacctgcaaaattactttcttactatgcttttggatttcctttaattggtggggaattttgtaactgttatggctcttgttactttgttcttgttcatttatctaattatgatggttttactatttttgtggacagatactaattatatttttggaggtgacatttgaaga

SEQ ID NO: 72260 - DNA, 644 bp, Prunus persica
  Intron number 1 from transcript ppa008570m (locus ppa00857 0m.g) derived from phytozome v7.0 (chr-ID scaffold_1; pos 24160858 to 24161501 reverse strand)
atcgttattgagttcataaaaaacgacgactacaagtgagttttactgtccagttaattaattgcttttgatagtaactggaattggttttggacgtgcttatgtgatttgacaatgtgcatgctccggtagctgggagaattagtgttgaagggaaaggaaggggaatttgtggagttttctggtttttgctgagaaacccgaatccgaaaagtgtgttttagatgttgaattctttcagatgcgggatgagatattttgggtggtttggatatatggtagtatgaaagaaatagtattgttttgctttatgtaaaaaatgtaggagatatatctgatattctttgttgtgttaagtggaggtaatggaaggatacgggaaataatagggtcttgttgtttatatgatatgaagaggaaattggtgatttctgtttgtgaatttttgttcaggaaggtcgaaacagaaagggttgggataatagtggaagttggtttggtcgggtggagattgtttttgttatgttctggttgaagtagctttatgattcttaacgcttaatatatttatttttcatatttaatgtggacatggagcattttcgcatatccaaaaattaacatttattatttgggtttcagat

SEQ ID NO: 72261 - DNA, 929 bp, Prunus persica
  Intron number 1 from transcript ppa005948m (locus ppa00594 8m.g) derived from phytozome v7.0 (chr-ID scaffold_6; pos 12147926 to 12148854 reverse strand)
ggttttgactaatttgacccattgatagatcaaaggtatctaccacttttctcccattattcacacagcttactctttctttactggtctctctctacttgtgtgtgttgaagtttccgccttgcaggtgaattgggcttcgtaagctcgtgataggtggatctgcatggtttaattgcacaattctttgtatgtttttgttcttttatcagtagtacatttcaagctttgttccttttttgggattttttgtttttgtttcgagggttttgttcaaattcgttagaaaagttggaatatgggtccttagaaattgagggactgaacttgggttttagtggggtgcttagtaggtcttcaaaatggctttggttgatcccaatttgggttggtaaggttttatgcagttagggcgttgaactatcaattggtttgcagtaaagatgttagtttgatgaaaatgattggctatctgtgatatcgtgagcgtttttgagcttcttgcgttttaattgaattctctgaagttcttctactcttcctatataattcatggaggaagtaatagttaagcaatttggttcagaaattgtgaattttgttaacaagtacatttagtcttggactcttggctgtggaagttacaggatctgtatatgtgatgtaactgtgttaagttccattatcattttctatagtgtaatattgcttgcatatgggtctaaggatatttcacatcgccatagttgggcttaacttccattttcagaaccttttatgtttatggaccgatgataaaaattgttcttgttgtccactttgattcgtgtcatatgtgtggttacctggctccgcattggtttgaagtttctatctttttttaatcattttttttttatagatatttgatcttttgaagtgtccacaag

SEQ ID NO: 72262 - DNA, 604 bp, Prunus persica
  Intron number 1 from transcript ppa017451m (locus ppa01745 1m.g) derived from phytozome v7.0 (chr-ID scaffold_3; pos 16539050 to 16539653)
gcttctcaggtgaattttgttccattctctttggtttttttttttttccctcttgtgtgtgtgttctatctatctattctttgtggaatatttttttttccttcttctttttccttgtcccttggactatacctttttatgtgatttttctctgccattttgattctgactgtgaccgcagttgctttcatttcctctttcttggtcttcttggactatctgtctcgatcaatttacatggttttcattattttttacatactcatatgattatgaaattgcaaaaatcctttctttttttccgtcaataaatttgtaaaaagttttgctagctcatacctttttatcaattttctttcgattaataaagaatccagttgttcttattttatctgacgctgatctcattttctgaccagattccccaacccccccttcccttaattttcttttggacctacctagctatttttcgatttttttaaaaaaaaaattatttgacctgctctttctttcttttgttgatactcatgtatgtctgtttcttttttttctttttttcttttggatgattttgatcatcagttacccggaaggactgaca

SEQ ID NO: 72263 - DNA, 742 bp, Prunus persica
  Intron number 1 from transcript ppa000551m (locus ppa00055 1m.g) derived from phytozome v7.0 (chr-ID scaffold_7; pos 11648485 to 11649226)
ggtaattcattcctacgtactccgttagttttctttgacgcattaaaatacttttgaaatagctaaaacagttttttttttttaatcgaagattctgctgatgggtaaatcaatccctagctctctcaaccttttttttaatattgattactaagatgttttattgatcaaagggagttttcgcttttctgaaattaattgttttaaatatcctccatttttaatataagtgatctcgattttaaatggtttctatttgaacataagagatcaaattcgttcatcagttggtctgttgttatccccaagagctatgcactacgcctagccttcggggggaaggaaagggggtattttagactgtagcctagaaagcactgcgctccactgtgttacatctcagtacaaactggagcctctacctaagaaagcattctcttttgatgaactgtttcgttgagttttaacttcagacgcttaattcaaccgcatcatctagacccagattgatcttcagttagcttttacacccagtcagttgatcccattcacaacgtccatatactaccggttaaatttgatagattctgtacgattaattaaatttctttctttcatgcacacatctcttacaccttagaactttctgatcttagaaatttccatggaattttataattcaattatatgaaaatcacacatgtttgaattctctttcattttgactgcaactgttttaggt

SEQ ID NO: 72264 - DNA, 701 bp, Prunus persica
  Intron number 1 from transcript ppa006783m (locus ppa00678 3m.g) derived from phytozome v7.0 (chr-ID scaffold_4; pos 26173731 to 26174431)
tcatcccaactcttgtctctcgctaccaattaaaggtttctgctttctccctttccttatcttcttgtattgtttttgtctgtatttattgaaacacagttctggtttcatatttagttattttctgctcttggatggatattgggtttctagttttaatttggttgataaggtttgtggatgatgaattgagcctttttaaagttctgggtatcttgagtttgatgtcatatcaggaaattgccaaactttcttattaactagcatgtatttcttggattctgatttgattctcagaaaaactaagaatttattcatgactaatgtataaccgtttagtatttctcaacttttgaaataagtaggggtgcttaaataactgaggttggatttgggatggagatgatgtctagaaaaacttgttctataaatctgaatgccataattttcttactttgagctattgttctataaaccagaactacccattcagttagtaatagctggtcagctttgctgcatttaactacacaagaaaataagtcatacaaaatatcttttgttaaagaatttgtcaattctaagaacactaatttacaatatgcgtgtgtgtgcgcacaccggtcaagtattaacttttctccacatactctaccttttctgtttccctttttgacacagggaacatttacctcccaaat

SEQ ID NO: 72265 - DNA, 726 bp, Prunus persica
  Intron number 2 from transcript ppa006783m (locus ppa00678 3m.g) derived from phytozome v7.0 (chr-ID scaffold_4; pos 26174547 to 26175272)
catacatagccgacaattttaactctttggatcaggttttaagcactggaattaaatttgttatttattgatatattagaagatttgcctacaaagaaattttttttttctccatgctacatatcagcataactttgttttatgtatgaagtccctatcgagtacttgaacagcacaaaccattaaaagattgcaatatataggcaatcaactcaagaatgattctcattcattgttcattttgacatcaaaccatgttgagatgttcatattgagtaattatattattctacttcccagtcaaccaattaagttttcagcatcacaaggtcttttcaaaattttatgttttgaaatattcagtggttacttttcacttttatcaaaccagtctaagcttagtttgcacttttcactatattaagaagaatgatagaacatttatcaaattggcatttatacaaaaactaaaaaaatatacatgttattaaactgacaaaagatgtatggccatacatttcaaccaccttttacaagtgtcatgaaggtcacatatcggtagacaagatttatttatgttttctatcccttgataagcttgctgggttttaggtgtatgtggtaataagcattttcattatctgacatgaatggagaatgcttgtaaccagaaccatcactatattgccaggttatttcatcattgagagaagccggccttgaatc

SEQ ID NO: 72266 - DNA, 510 bp, Prunus persica
  Intron number 1 from transcript ppa019146m (locus ppa01914 6m.g) derived from phytozome v7.0 (chr-ID scaffold_8; pos 5452784 to 5453293)
ttaattgtggtgggcagaagcctacgtgtgaggcctcacctcccttgtatgtctcatcactccatgttctttatatcattatctcattcataagttacacaataataattcattattttgaatattatcactttcatttttcttccttggcatttcagtaaaccttcaagcagaagtcattaccggtaacagagtcaaagttcgaatgcaccttgaggtttgtttctcgcaatattcttgttagtttcaatattacaagagtgtatcaaataattatctagtctttactttgttggaggaacaacttgtcacaatatgttaaaagatataacggcattgtttcgataaaatgtccttacaaatgtttttaagacaccaagtcattttagctgaactaaagtctttttgcaaagaaaaaaaaaaaaggccttaatatatggttgtttaatctgtttggttttttcttcttcatgtatatatatataggaaggagcaaataaagaagagaac

SEQ ID NO: 72267 - DNA, 571 bp, Prunus persica
  Intron number 1 from transcript ppa024418m (locus ppa02441 8m.g) derived from phytozome v7.0 (chr-ID scaffold_5; pos 10156965 to 10157535 reverse strand)
cctggggtagaaattgatcgatctaccctatggaagagagctagacaggacaaacatggtaacatccctgatccaaaggtggcagagaaagcaaaattaattgtaagcctactatcactctgttttaaatttttattaaactttgaattattcttattacgtcgtatgttatatttttcgtcgtgtgaatgatattaccacgtcgaaaagtttttaaaaacgtcgttaaaggtctaaataggaatcactactatgttttctgtaattatagcataagacgtcggtggttcattttcgcgtcgtgtgaatgatattaccacgtcgaaacttttttaaaaacgtcgttaatggtctaaataggaatcactactctgttatctttaattatagcataagacgtcggttgtttattcatttcgtcgttttaaataaataaccacgtcggtataactaccgtcgtgataagttataataacgtcggtttatacgttattgcgtcgtgtgaaattatataatacgtcgtttgtacataaataaccgtcgtgtgtttttttgtttatctttttttagg

SEQ ID NO: 72268 - DNA, 943 bp, Prunus persica
  Intron number 1 from transcript ppa002264m (locus ppa00220 2m.g) derived from phytozome v7.0 (chr-ID scaffold_3; pos 8551225 to 8552167)
attctttccctcgcaaaaatcctctcttttgcaaggtacaaacttcttctactgttacttagcttgaattagcttgtatctgtgatgggtttgttttcaattgttcagtttcagtgcattttagtccataacttgccttgtacccatatgggtttgtgtatttctatgcctatgtcttgatattggtactttggaaacaaaaaatctggagaggggtttggtgggcttggcctgaatgtgaactcttttaattttttgttgctgtcaatgggatgggatgcttctttcttgaggtagctaaatattattcataattaagctttattttgcatgtatttgtgggtttattgaatcagaaagaccatctttgttaccagtccttcaatttgtctcgtaatggcttctttcattttctcctcgtccacataaaagttatgctgttgtgtttgcttttgattaaattcattttcttctgaagaaaaaaaaaagtaactgaaaaaaatcatgcgttgggtaaaactacattaaagggttagttgaacttgaatgtgttgctattgggttatccgttttaaaagtttatcttgtggctattccctctttccatttatgagaaattgcttaaatattgtgatatgggtgaagatcttggaattcattcatgttgttctataaaatgttgaattgctctaatttctactccagtaatgtttattcatgtcaccttttgtcttaaggtcattattataatgctatgtcttgaaataaagctgatttcatctgccccttactgtgatattttttgtcttgcatggctgttgaactacttgatttaatttccataatctgacagtcattcttgacattgcaatactcatgcatttgtttttggatttttcattaattcattaacttacaagcacctttcttgttgtacacacag

SEQ ID NO: 72269 - DNA, 450 bp, Prunus persica
  Intron number 1 from transcript ppa026031m (locus ppa02603 1m.g) derived from phytozome v7.0 (chr-ID scaffold_2; pos 20123465 to 20123914)
gagttgcacgtttagcattgggaaggcgtaaggaggtgttgcaaggcatggccaagctgagctaggcgtgccagatctggacacttctgaacctaaagaaattttgcgagtatgcaaattggctgcgactctgcgaggaagacgaatcatgtgttttctttttagatttattttaatgaaatgacgtcatttcgattgcagcgttttaaaaaaattctaaatgaaacgatgtcgtttcacttcgagtgttttgataaataaaaaaattatatatattaaaaaacaaaaaacaaaaaaaacaagtttctattttgatttttttttatttaaaaaaaacgcaaattctaaatgaaacgacggcgacactgaagctagactcgcctacatgaaagcgaaagcgtcagtggatcttgatttttttatttttttatttttgtaagttcagtgtag

SEQ ID NO: 72270 - DNA, 407 bp, Prunus persica
  Intron number 1 from transcript ppa016770m (locus ppa01677 0m.g) derived from phytozome v7.0 (chr-ID scaffold_4; pos 8757239 to 8757645)
gctaaagagcatagtataccgactctgatggttgagagatttgtttgagttgatggtgtaatgcatgacttgcattattaaatgaaattgagtttttctctaaagttgataactacactatctccttgttttgggtattcttagaatcaacaaggcttgaaaatctacactcttcttgttctatatattcttagaatcaaacagagcttggaaattgatttcaacgtgtatcttttcgtcttgctcaaaagtgtcgttgcaccacactctctctctctctctctctctcacacacacacacacacacacacacacacacacacacacacacacacacacacacaaatggaagtatcagttgtggccagtgttgcactacgtgttttttgggtgagcatagtaattac

SEQ ID NO: 72271 - DNA, 936 bp, Prunus persica
  Intron number 2 from transcript ppa016770m (locus ppa01677 0m.g) derived from phytozome v7.0 (chr-ID scaffold_4; pos 8757835 to 8758770)
ccttccttttcttcatcagtctgtgaccacttgtatgccaagtatcttttgacatttcgtttaccatggttaaattagaaataatcaatttttgtgtgtctgttttacattcttgaagcttttttattatttattttaattttattaatgttacactttttttattttgatatttggttgcttcggtgtatttcttatttccttttcaattgattatgaacatcaatataggtctgccaaataggtaagttttcttcacattgacgtccctatcaattttctttctctcttttttttctcctcctttttcatttgggtagtgctaggcttaccacatttttatatcacattgtgtactacctaccacctctttaataaggatggagcccacctctattagagaggtgatacacaatatggtataaaaatgtggtaagtctagcattttccttttcgtttatcttcttcttctttacttctcttgttcgtcttgcttctttgtatagagttgtttttggtcgaatggttctttttatagatagttgtttatggggacaagaatttttctaggtcatttgtggggtttatattcactacctattaaattggtttgagtgccgagatactctacctaacaaagggcactaatttgtatgagatgggtcacatgacaataatctcttgaaggggaaaaaagctacaaaaattaaatacaataatctcttcaacatttttagtatgagatgggtctataataaatgacctctggttgttcatcagtaattctaaaatctctggatgattcgtgatcaatgtaaataacttattttattattttcggaaatacatgtgtaattagtttcttataagttacaacatttttgtgaaaacaaaaatgcaggtaagaatttttttatttggattgggcccacacca

SEQ ID NO: 72272 - DNA, 680 bp, Prunus persica
  Intron number 1 from transcript ppa008204m (locus ppa00820 4m.g) derived from phytozome v7.0 (chr-ID scaffold_8; pos 20169477 to 20170156)
catcctcacttcccctcacctcattcgaacggtaccctcatctctctctctcttgtaaatgcagcatcggtaatgaaatggctttgttttgtagtctgatgacagcgatgagtgtaggcgtatgcataagtgatttgtgttcgaaaatcagcctaggcggcgctaggcggcctgggcgggtcgggtcttttttttcgtgactttaaagaaaacctcctcacgctgcctctctctatcccctgagtgacggggatgttgagtttgagttttttccaaatataatagcattctattttaatatggattatgagtgttcattaatgaatttggaccactgttgtcagattttcagatttgtctggaacagagggaaactcgttctgaccaagattaacatgagaaaacttcttgctctaatttgattatttttgtctagtgaataatgacttctataagctaattacaactttgatgtgtataaaaagaaaagaaaggagattgatttaagtaataatgtctttactcttctttttggtcctgttcttgtaattattttgtagacttgattaactaataggtcgacctgcctcttcgtttgatttttggtgtgaaaataaccctttgttttatttcttaatggagcaggttcaccttgattaccttgaagctggtgcagatat

SEQ ID NO: 72273 - DNA, 161 bp, Prunus persica
  Intron number 2 from transcript ppa004908m (locus ppa00490 8m.g) derived from phytozome v7.0 (chr-ID scaffold_1; pos 29434830 to 29434990)
ggggaaattggtagcgtcgcatccaaatttaccaggtttgcatttatttgtttttcttcacgtacattaaactcatcaggaaattcaaaatggaataaatatgttatattagtgagatatatgcgacttatataaacgtacacacgtgcagagtcgtgtaa

SEQ ID NO: 72274 - DNA, 189 bp, Prunus persica
  Intron number 2 from transcript ppa025559m (locus ppa02555 9m.g) derived from phytozome v7.0 (chr-ID scaffold_4; pos 814722 to 814910)
ccacggtgaggggagctagctatttagtattatatatactttttttttacaagcggcagtctaaactactcaaagaatgaattcaaattattataatatacaagaagaatatatatataaatatatcttatgttactgtttttcttgtgtgaaaaaacaaaaacaaaaaaaacagggtgaggtttgggt

SEQ ID NO: 72275 - DNA, 415 bp, Prunus persica
  Intron number 1 from transcript ppa005115m (locus ppa00511 5m.g) derived from phytozome v7.0 (chr-ID scaffold_8; pos 782074 to 782488 reverse strand)
tacgcgaagatcgtgctcttttgtaagtataatctccatctctaggcctttatatttaatttttaatttggttttatcactcttgatctattcgtttgaatgcttgaatttgcatactattgcagccaaaagggttttcataactgtttcaaaatacgggcttgaaatctggaaacattaaaaatggtgttttcagttttgggttattatagagccatttttgtactgccttctaaaattatacatgttaattgtgatcacttgtctctagttaacttattttgtttggaaatttctgttgttcagttcttttctaaggtaatatttagtattctctttcgtttgcaacttgcaacttgcttatgcatcttgctatttgtattctacgtgatgatttccgtttttcgtcccagga

SEQ ID NO: 72276 - DNA, 576 bp, Prunus persica
  Intron number 3 from transcript ppa002193m (locus ppa00219 3m.g) derived from phytozome v7.0 (chr-ID scaffold_2; pos 1677467 to 1678042)
gggggagaactgggtggttggctttccttgtacaggtaaattaatattccacccaaatagttaatgttgtttgtttcatgattagattttcttgaccaaaaaagaagaagattttcttggtggaatatgccaactgccagaaagttgtatctaattaaagagtcttgttacgcatgctgttgcacttggacatgtttcctctagatagataacctctatataaattgatgatctggaattgctgtcatcatcagcttctccattggcaggtgatgtagaagaagctaaatttctttgacattttcctaactttgaatcaatgaaatttccttagggtgttggtcaaggaaatgttctcttgtcagacagtctgacatgttatgttactagacttcagtctgagctatttttcaggtggttagtaggatgtggttcaaattgacatatctggatgtaacactgtctgactaatatacttggttgttttttacccctcatattgtctgaaatatctatgtagcaagtttctctatatgagaatgtaatagagattgcttctacttctcagtgcagctg

SEQ ID NO: 72277 - DNA, 697 bp, Prunus persica
  Intron number 1 from transcript ppa011855m (locus ppa01186 0m.g) derived from phytozome v7.0 (chr-ID scaffold_5; pos 14745871 to 14746567 reverse strand)
tggcggtggtttttgctcgcatttataaagctacggtgagtttgttccttatgggtttttgttaaatcttttacatgctttggagtttccctgttttatattatttaatattgagatgcttcggagtttcttcaacgggttttgagttttatgagaaacccagaaccaccgtaagagtttgtagtcaaaaggggtcagttcagtgtcagaagcgcttacaatgagatttctcagctaatgggatagtttaatattgggttagtttggaaaatttgatagttgagttttcttttctggggaatttatttgttttctttgagtcattgttattgcatcctgtttctcacaccacatgtttgtggaaatgcccatttgaattctctataaaatttacttttttcttattgtttttctgttacatctgtaagtttacatatagaattactctaaagttatagacttgaccagtctgcagatgttgcattcataaaatttatgatgaaacattagttatgttgtcagtggctacaaaaaaagagaggcaatgttcttccctttgctaattgaagtttcttctttttttttttcttttttttaccccaggcaagagagttctcaaaagtttaaacaggaagctctcttttattctgctatcttaagttgtatgaggcactttttccactgaccgaaaagaacc

SEQ ID NO: 72278 - DNA, 984 bp, Prunus persica
  Intron number 2 from transcript ppa013482m (locus ppa01347 1m.g) derived from phytozome v7.0 (chr-ID scaffold_7; pos 19883108 to 19884091)
gctggtaatatattatgtagctatttttattataaacgtttgattgtggctgcttgttttgctcatcatattgtttggctagcctcatattggtctgttctgagttttatttagaattgagcttcatatatggttatgggtttctggattgtcagagagcgcctttgcttctatgaaatcagtagcgagtaatttcaacttacacccaagcgggatttatttgtttagctttaatggccaacgtatatctgtcaagttatttgactagaaagatttaattgtgtcaaaagagaaatcaggaacagagaaaaggtataatgcggatcttagttaacaaaattggcgggctggttcttcttgcaaggtcgcaacatcttgcaggcactttgattgggatcagggaaatgggcgatggctgttattgttcaatgtgattatagattgggtattattaaaattagagttttcaggtggagatggtcaggttttggtgggtgtatggattagggtgccttttttatggtgagactactagagggtggctggggtgcgctttcgtatggattgtagggctgttctatggagttagtataagttgttgcagaggtggatgactattgaggtcataggaggatcactgtctcagatgtggatggcatttaaaggtctggggagacaggaagtttcacataagtttttatttccttgaatgttgctttgtttgttaccttgtacatggtaattgaaccagatatagctttccacataataccttcaatttactgctgcctttgcacctacaaacgttgttgtgaaatttttgcagtgtccgtgtttgttgtaaagtttgtaatacttgcacaacatgtaaatacttgaactacaatatcaattgaattctgtaatagctttggaaaagcacgcaagtaactctcttatgcactgtcattctacataacagcacattcaagaagaaggctccta

SEQ ID NO: 72279 - DNA, 1018 bp, Prunus persica
  Intron number 1 from transcript ppa024286m (locus ppa02428 6m.g) derived from phytozome v7.0 (chr-ID scaffold_1; pos 36359780 to 36360797 reverse strand)
atacaggatccagcaggtaagttacatctgcgataaggctcacaaattaatgttgattaagtatatatatttatatattggagagggggaaatttgcacttaaaaaatgagtggcggtggttgataaatatgttaatgatggtgatgatatcatgtttgatgctggtgttggggggttgccagtgctaagtggcgatgatggtggtggggcggtgatggcagcgagggctagtggtggccctgataaggtggtagtagaagaggttgtgggtccagggtgatggtggtagaggcagtggtgttgacggtcatgataaggtggttgtagtagatgtggtggttgtgatgtccatggaaaggtctgggtaggctggtagctattagagggggctgcgatagtggtggaggtggggtggtgatggccatgtcaaggtgatggtggtggtgatatagtcatgacaaggtgatggtgtgctgaggtggttcatgaattctttttctcttaaaactttcattctcttaaattttagaaatgacaattatttaaaaggaatttgaagttggaaattagtatcgccaaattccaagtttccacctgtttatctttgtttatgaaacaaaacaaggaaattggtgtgtgtgaacttaaaaatcatgattcatgaaatgtgttcacttatatagtctaaaaaattctacattaatctaaggtgaggggattcaaacttgagtataaagagaacaagcttatattaccgtggctaaatggcctaacccacatctagacatttgtccaacttctaagtttttttttctctcagtctaaaagcaatcaaataagcacattccttaagaaagagttgtccaatcttttttttttttttttttggctggaatctcttcattaatgattatgttactgctaatcactagtagattcaatatatttgacttaattttttaatgaaaaactgacgaaacatctgtccaaattaaagtaggtatccaaccgatattc

SEQ ID NO: 72280 - DNA, 782 bp, Prunus persica
  Intron number 1 from transcript ppa007981m (locus ppa00678 3m.g) derived from phytozome v7.0 (chr-ID scaffold_4; pos 26173731 to 26174512)
tcatcccaactcttgtctctcgctaccaattaaaggtttctgctttctccctttccttatcttcttgtattgtttttgtctgtatttattgaaacacagttctggtttcatatttagttattttctgctcttggatggatattgggtttctagttttaatttggttgataaggtttgtggatgatgaattgagcctttttaaagttctgggtatcttgagtttgatgtcatatcaggaaattgccaaactttcttattaactagcatgtatttcttggattctgatttgattctcagaaaaactaagaatttattcatgactaatgtataaccgtttagtatttctcaacttttgaaataagtaggggtgcttaaataactgaggttggatttgggatggagatgatgtctagaaaaacttgttctataaatctgaatgccataattttcttactttgagctattgttctataaaccagaactacccattcagttagtaatagctggtcagctttgctgcatttaactacacaagaaaataagtcatacaaaatatcttttgttaaagaatttgtcaattctaagaacactaatttacaatatgcgtgtgtgtgcgcacaccggtcaagtattaacttttctccacatactctaccttttctgtttccctttttgacacagggaacatttacctcccaaatatggggaatggggaatctacatatactgatggttcttatgatgattctcttcgtgaactaccttcccatgcagggacttca

SEQ ID NO: 72281 - DNA, 743 bp, Prunus persica
  Intron number 1 from transcript ppa005494m (locus ppa00549 4m.g) derived from phytozome v7.0 (chr-ID scaffold_6; pos 19195922 to 19196664 reverse strand)
tgagcttgctgctgccactggcaatttcaaaccaggtatgaattttaaacctttttctttttctttttcttcttttgttgttgcatttgggaattaaatttgagcttttgagtccagccaccattgaattgatgtcgtttttagccgacccttttgacaaaagtttgtttggacgggagcaggaaagcaattgtgggacctgggttgctgcttgagtcttcttgaccactagtgtagtcccttagattcagttaactaggcttagggttgttgctgctaattgaccttgtctttggatagattctgattttgctgctaaaaacgattttgttggacccaatttttaacttttctaatttctgcttttatgaccactgttttgacatcaacaagcgttttttttttgtatctattttatttctgggggttttagctgtggaagtttgatctgatgactgtagctttaaagtcggttggtgactcgttggtgaaacttttagttccaatgttgggtctttgtttgccacagggtataggctccatcacatgtatgaatatgatcagctgtagtcaaaatcccagtcccaacttctttataggatgcaaaatgcagccactgacagattaatgtttgcatccaattgtttgatcatcaattagtattttcttggtttactttttaagttatgattgcataatacttggcagagaacttagttgggaaaggtggccaagcagaagtt

SEQ ID NO: 72282 - DNA, 1046 bp, Prunus persica
  Intron number 1 from transcript ppa001209m (locus ppa00120 9m.g) derived from phytozome v7.0 (chr-ID scaffold_1; pos 42793357 to 42794402 reverse strand)
ctggggaacttaaacgtcatttgttactagttgtggtaagccatttgattcattttcagaatttgcatcaattttcgtactctctaacttcactcagctgagctcaactactagattttctgatttctgttgaaacgaatgtaggcttttgtaaattctacgataccgtttttcaacttcctctagattctaggaaacaacgttttttatgttctcctatactactatttttaggtcaaagctcttttttttaagggaaaacaatgcatatccacaattctagactaatttatgttgaattttacgtatgtgtaaggttttcaatcggttgaatgagctacttaaaataacataatgcgaatttatttatgacccaagtccttccaacaaaaaagagagagaaaaaaaaaaaaaaaaaactttagtccttgcaatcacactgttcccatttatgctgcagttgtatgttggtttcgtctgctgtttacggaaagatgctgtttctgtattaaagttaccgaaaatgctaaaatactatgaggagaagtgatgtgcctatgtctacgtcttataataagatgtactaccattgtcttattcttgagttgtttagctgctcactgattacgggaattttctggatttttaagaagtaaatagtaaatgatgttaatttatcagcacctcttttgcctttctttgtgcaaaatctatatcaaccagaaattgcttctgatgctgtacttttgtattgttgaaattacgagtttaataattttgtataaacttcttctgttgcagcttactttcacttgtatattatctataacttatgtattttatctgcggcagagagttgcacaacttgaggtatgtttcatggcttcaaccctattttggttcttggtttgacattctctatagtagtctccctaataatcaattacgctgctttcaggaatggtgtaccgaaaaagatatcgattcaaatagcagctttagtctttttctggctgagaagaatcccttttttttccattttgcta

SEQ ID NO: 72283 - DNA, 862 bp, Prunus persica
  Intron number 1 from transcript ppa002690m (locus ppa00269 0m.g) derived from phytozome v7.0 (chr-ID scaffold_3; pos 19882565 to 19883426)
tcaacaatatctctcttggaggccgtggaggcactgtgagtctctctccttctactcagtctgatgactctttttggggattcgtttttcgatttatatttattttgagttctctcaatgctgtttgaaacctgggttctccatgtatatatttttttaatgtctggtttcggtctctttagttcggtcaaaatttggtgtagaaatgcgaatttgggggttctgatagctgtgtattctttcggttggtcgccttgaaaccctaatttgttctttcctggagttgtctgtgatttttttgtagtttggttgcagagaaaattgtgatttttcaattttgatcagagcgaaaatgatcgggttggggatagggaaatggggttattttcttcggtgtaaaaccctagttccattgtgttcgatagaagtttcttactttatattaagagtttcccatgttgaagttttgaattcgttgcagacagtgaaacctggaacgtaatgacataggctactctctctttgtccatcttaaaaatctctaattcgtttaagaagatgttttccagtatctttagttattttatgataaattttcactttttctttttgttcatatttcttgatgtctttttaattgcgggaggaaaggagtgacaggatgaatgtgtcaattctgtggcttaagaaaccctaagtcgttgcatttcatggaagtacacattgctaatagtcgcaaaaggttttacgaatatgtaaagctataagcctacgttatcatttcattgcaaagttttgatatatgcattatcatatgtggaatgcagaatccggggcagctaaaaatatattctggagggat

SEQ ID NO: 72284 - DNA, 674 bp, Prunus persica
  Intron number 3 from transcript ppa014100m (locus ppa01410 0m.g) derived from phytozome v7.0 (chr-ID scaffold_6; pos 8189911 to 8190584 reverse strand)
ctaaactgctcccaaaaaatcggcttctctctgaagtaagtgcttagggtttttctctttccgttttttcaattttttttccctaagattcgttgggttctctgtgttttgttatttggagccatagttctgtttgattgccgaagaaattaaagaaatggaattcaaactctgaatctccgttatgcaaatgtgtgaaaaccctagaatctagttgggattttttcattgtctggtgtaattgggttaatgtttcaatcatggaacccaaattaattgcaatatattatattggtttatacggttcttctttattgcttttcagttcattgaatctcaaattattaggatcttttaatttaatttaatttgaaaaggcattgaattcctaatttttgtttctcggtgatatgtagaggttctttaacgagcgtttttgtttttgggttcttatgtctatgtaaaaaatcattgtgctatttggtttttgagaacctgaaggaaagggaaaagagaggattgagatttttgaaatatatggttttgctaagttgtaaaatcagaagcattcgctcacttccgtggaagtgaaagatgatctctgtagataagaaaacccgtggtatcggaaattaaataaccccgtttgtttccctttgcattttgatttcaga

SEQ ID NO: 72285 - DNA, 321 bp, Prunus persica
  Intron number 1 from transcript ppa015532m (locus ppa01553 2m.g) derived from phytozome v7.0 (chr-ID scaffold_2; pos 17623189 to 17623509 reverse strand)
ccaaaggccgattccctaggaaatccctcggccaggtttttcacttcctcctcgctctctctctctctctcgtttcgactttcttctcccacttaataaattttcctttttttctctttgttttttatttttcaaattccgtgttcttgtttagttgcttagacaatgtgggtttggttccaattattttttataaagatttttccaaaatttagtatgtattgtatgctagaaatggtaagcagcctcggatttattttctgaaagatttggttttgaattttcttagtttgtttaatttgtgtgtatttccagcattat

SEQ ID NO: 72286 - DNA, 380 bp, Prunus persica
  Intron number 1 from transcript ppa003030m (locus ppa00303 0m.g) derived from phytozome v7.0 (chr-ID scaffold_7; pos 5976913 to 5977292)
agttgagctcaaccgcctcgagaacgatctccgaggtctcttcttctttccttctccgctctccattttcccggcaaaatttggagctcacattttctttgtacatagggagagatgatattcttatttcatcaaattgaccaattcgtcgtattttctggaaaccaatttcttctaaattcagagccgcattttcttactaaggaaagaaacgatgtttcatatttgttagagctttgattttttctttttcctaaaaagaaatttcttatttataattatatttcgtgtaccttataatttataaggtcaaatttgactgatacatacggtttttaatttatgaaatgaaataacagataaagatagggaattgggag

SEQ ID NO: 72287 - DNA, 682 bp, Prunus persica
  Intron number 1 from transcript ppa005038m (locus ppa00503 8m.g) derived from phytozome v7.0 (chr-ID scaffold_5; pos 13259481 to 13260162 reverse strand)
cttagatccgttgttccaaagatcagcaaagtaaggatttattttacattacaccattttctcgtgaatttgagtacgcactgatggtatgttttaggtgattaggtcctcaagatacataagaattttgtttttaggcttttgttgaaagaattgcaccttttaccgggttccaaaatgcttcagttcaattgaagatggtattaatttctctcacatggactctggtagcatgcccttaaattttctacatttcaaaatactaccttgttgttcatcaaacagttagtgcagactaaaacactttttttcaaaggatttttgtttctttaacaggtgagttcaaaattgaatttcatttctcactacaattgacatcaaagttacaggaaatatttagttggaagttggaaagaaataaccaccactctcagttattgtttatgtccaattgctttgaagttcatttagtgaagttatagtaactcaagtaatatttactgttatttgctatttgaattttgaagtgcaataagtacttgttcaaaacttttaaccaactgaaatgaaagataagtcagtaagtcaccattgggaggagctacaaaagagctcttaaagctttgttttgtgcttcatgaatatcatatgattcaaatgacattccgttttgtgatatcag

SEQ ID NO: 72288 - DNA, 363 bp, Prunus persica
  Intron number 2 from transcript ppa011774m (locus ppa01177 4m.g) derived from phytozome v7.0 (chr-ID scaffold_1; pos 43693426 to 43693788)
attcatcttctcggtcacatttacgctggtgatatgtatgtttttttttgtttcaattttctttatttttacattttggatttactcttttttaattattcttgctcccaaaccctatacctctattttagcttaatctgcaatatatatatatatatatatttctgataatggtttgaagagtaaaatattgccttgccattacgggttttgattgcatgttgtattgcaattttgcattttattgttaatgttgtttggctatttggggtatcctgtgttaaacttaaatctgattttgttatttttgttctacatttatttagaatttgatctgtcgggtggtgaatatgcagtaatagc

SEQ ID NO: 72289 - DNA, 672 bp, Prunus persica
  Intron number 3 from transcript ppa000109m (locus ppa00010 9m.g) derived from phytozome v7.0 (chr-ID scaffold_6; pos 1883038 to 1883709 reverse strand)
aacaatcttgttactgctgttgggtttgaactcttttgcgtacttttaccttttgtttttttcctgccttttggttctgtataaaacatgccttttggaaatctatgaagttaaagaagaattatgtgttgtgctttacatcttgttggttatatcttggaaaatccactgcattggtttgcttatgtattggttgattgtaagcattctttagcttgatggataagctcctattgaggtcaggagtggtttcgaaaacagcagaataatttgattaatccgcacactgtgattagttttataaacgcaaattttgttcacataactacattgtgaccatattcataattgtacattgctctctctctctctctctctctctctctctctctctctctctctctccctccctctctgcccatattcctcccctctttattgcattctcaaattgtctccacatcgaactatttgtcaagttattacgcccctttgttttggatttcctttaatgtttatgcatagtggttgcttgttaagctcatcgtatactgactatgagcttccacatagttgtctagagcgttggttatcctgatttttcataaatgcactgagacaataatggttgtttgttttaggagagacttagctccacagctgaagtctctg

SEQ ID NO: 72290 - DNA, 819 bp, Prunus persica
  Intron number 1 from transcript ppa000661m (locus ppa00066 1m.g) derived from phytozome v7.0 (chr-ID scaffold_2; pos 23775184 to 23776002)
tcactcactcgcactggcagatctctcaggctaaggtaaacattacctcttttgagtttgcagcatcttctcgctcactcacttgctcgattttgctcttttatttattttctggttacgaacttactattctaattctaaacttgttgcttttggttttcaaatcatcaagcaattttattcaatctttgtgaaattattattattatctattagcttctttttaaattttgttttattttgagatttgtttttgtgcttgaccattgaaagttggatgatttgtttgctactttgctgcgtgttgagcatgtcattggctgattcggttctcaattttctatttcgatgctgagacagggctttcattttctagatctgcattcatttttatgtttcagctgaatttcgaccaagaagatcttttagctgaatctgaattttcaatgactaatttttctgtatcttttcttgagcaacgatcttatatttttgtagagttgatatgaataagcaatgcagcaagcaactgtgcttgcatttgtgagaaagagggaacgatgctctcatggtctttttgtttttctgttctttttttggttaaatttttttaaattcagctgtcggtgcgcctatgagaatagtataaattctttactttatagaagcctgggcagtgggcacactctttttctctgtacttagtcaaaggtcactgattgttactatcttttttgtttttcgttttctccctaaattatttttcccctttttttttcccattcaggttgctttgcttctgttgttagcgctttgaaa

SEQ ID NO: 72291 - DNA, 694 bp, Prunus persica
  Intron number 1 from transcript ppa003622m (locus ppa00362 2m.g) derived from phytozome v7.0 (chr-ID scaffold_1; pos 30097724 to 30098417)
cggtgcgtttcgtctagtcattacttccctttttgttgcccgattttctctttgggatcttgtccaataattgttttccagcattacataatttcgaatttcaatcaatctgtttttttgtttttgtttttcatttgacataatttcaggacgaaaatcaatcatggcaaagttattctgatttagactacataggattgcttggcgtgcctaccttgtttagtaattagtactatatcggccatcctcctgcttatgctttaacctggagatttgaaatctttgcgtaaacgaactatgaatgtgaacaatcaatcttctaatttgcagataatcaacctattgtctcttaatcaatcctatcattattacttggacgtactcattttctttctttgtgcagaaatttgacttattgctatttgtacaacaaataagtaattcatcattgagataaaatgacaggaagaagattaaaaaaaactgtgggatactgagctattacatgggaagcattacatacaagtggcatttgaaaaaattgtttcttttttttctttttgaatcttcccttgtttctctccctagttaggctactcttagagatcttggaatttctcgatgtagttatggctcctatgcatccaatccaacttgctgacaatctatcaaattctatgcagatctcaactgt

SEQ ID NO: 72292 - DNA, 412 bp, Prunus persica
  Intron number 2 from transcript ppa008793m (locus ppa00718 0m.g) derived from phytozome v7.0 (chr-ID scaffold_4; pos 7430257 to 7430668 reverse strand)
ctaaccttaaggagcctgatctgaaggtaccttgtgttggcttgtttgtactgtaaattttcccttcatccccccttttcttccactggagtgtatgtcgtgaaataagttgaaattcttaccatttaatgcttgatgctcagtgttctttcaccttcatggtatggaatttgttttttgatctgatcatgaaatctgttgctatctaaaaaatgatgtgttgtcatcctcatcgtcaatactttttctttctctatgtttgtactaactatattcaatgtttgttttgttcttattatatagaattgtcttttttacttggagacatttctcttttctcttctttattatatgcatccttttggtcctacatgttggtaatatttatttagttatctacttcaggtgttgg

SEQ ID NO: 72293 - DNA, 719 bp, Prunus persica
  Intron number 1 from transcript ppa008793m (locus ppa00718 0m.g) derived from phytozome v7.0 (chr-ID scaffold_4; pos 7430797 to 7431515 reverse strand)
aagggatttcttgtttgatcactcagtgatttgtggtaatattttaatttactattgtgaaggtgtttagtgtaattattatgtacatggtctcagttcctgactctaaaggcgtcactaagagtgtagcagctctgttggactccagtagccatgaaataaaaaatagagaaaatttgttggagtctgcttgtttattttctagattcctgttttgattgtcgttatgaattaaattattggtcttgtatcttaatcaaaattatgtaaatgcagagttcttgcggtgagttattagctgtgtgtttaattgaaaatcatatagagtttttaaatattggttgatgtacccgtctttgtcttactttacaagataacttcgatcagaccattgaaaattctgtatttttttaggaaagggcttccttaaagatattttttctggactaagtgtttgcagtgaaattattgtcttcctagggtgaaaagattactgcataatagggttcctcactgataacatcagtatggttttgcatatcgtagtctatttgatgaagttgttaacttgataattaggttcatttattcattttaaaacgcactagtcagtttgagctacttattgaatcttatcttgtttctcatgctaagatctacatgatgtcttttctgtcaattcagaggggaatagaacacttacgagctgaccctgccta

SEQ ID NO: 72294 - DNA, 411 bp, Prunus persica
  Intron number 1 from transcript ppa027096m (locus ppa02709 6m.g) derived from phytozome v7.0 (chr-ID scaffold_5; pos 15467479 to 15467889 reverse strand)
gccacgaagacaaagccttcaacagggtaaaaccccgtgatggaattcattcattacccttttgtcaaatcaagatccccatgacatctcctctgttttcttcttttttcaattactcgtgaattctgttatggggttagttcaaattttgctgatatggaatctgggtttcccccgagcacgttttggtgataaagtttagaggttaaaagttttacccagaaataaatggatgatgccaagtacttatctgtaatttttagaattgttttgatctgttttttctcactaatttctctagtttttgtttttgtgcttttcatactaaacccataatttattttcggtctcagttttgtgcttaatcttgacttcatttttgttttgttcaggttggacagataatcaaag

SEQ ID NO: 72295 - DNA, 916 bp, Prunus persica
  Intron number 1 from transcript ppa009921m (locus ppa00992 1m.g) derived from phytozome v7.0 (chr-ID scaffold_3; pos 20963390 to 20964305 reverse strand)
gcggatcaacctttcggcatcccaaacgcctaccagtaagcaaaatttcaaatttagctaattagaggtcttttccccaattttcttttaaatatcaattagagctattttaaatttcctgtgttatttagcttgcgttatagtatgacatgaagaagatctgattctgcgaggtcttctttggtactggaatgttgcttgaacgggaggtttcttgaaaaaaaattattgtacttgtgattttgattgcaatttgtttgattaaatgcgtaagagtaactattttgttttagtttgtttataaatcgtatagatgaagtggaatatttttggtttgattcttattttgggttagccataggatacggttctgaaaattttgggttttgtactcttatgagttgttggtcatttttgtgtgctgctccttttgttacataaatttggttttcaatagtttacaaaacgggatcatgggacatctgtctgtacttaatgcatgagattttgttgaatcagttatgttttgcattatttttattgccgtgttctagagtccaaccattgtattagatatctttcagtcacttttagctggtgttttctgtcttaatttgcatcttcctgtctcaatattcttgatctctccctgtcatggttccaacttagatatattaacttaggcaagtaatctgctggtgctgttttcccaatccgtgttcatacattctccatagtttttgttcatttttccattgcagacaaagcaatttgcatgcattgtatttcggtctcacttttttccataaaatagtttttgactagctttagggtttggaacgtttgaacatttctctattaaacttctatgtgttaatcgttttgcaggtttaacttcaaacttaaagaaaaaaag

SEQ ID NO: 72296 - DNA, 941 bp, Prunus persica
  Intron number 1 from transcript ppa017894m (locus ppa01789 4m.g) derived from phytozome v7.0 (chr-ID scaffold_1; pos 10871882 to 10872822)
atcaaaaccggcttctgtgtgagaactctccttttcactcctttccatctttacccaaatgcttctttctcctgattactattgctttgctgcctattatttcttcttccttttttttttggggggggtgcaagtgtctatctacccctgatatttataactggagtttgcaattaactgtttggtagaggattaagttcatcttaaatttagatttttttccccttcttagaattgattagattgtgattgtatggtgcaaattcatgtaatttgataaatattacagggttgttcataactgttataatgtatgaaagcaaaacatcagacttgtattagggaattttgaaattggctgagatggcattatatgtgcatttctatattcaatgttagatataaataatattggtggttgaactgaacttagatgaggtttcacattgacacggtttttattgattttttggaccctttgtattggcacttttgttggtgctggttattcccacttggagttcgaacttggggaacaacagtttccactaaatatttcctttgatctgtgttgctccccatttgagcccttgttgcagtgcacttggactatggttgggccctctaagttgtccttggccacctctaccctcttctcacctcaagtgtctcctgtcctaaccatttgtttttctttcagcaaaagaacaaacacaaaaaaaaaaatatccactctcttttggcccatctttacaagaaactagttacctttacatgttaatgttgtttctaacaaatgtccacttttgttgcttggcttcatctagtcgaattgttctgtgccacatttaccaaaagggtgcctattgcattctctcttatcattttgattttgttgttgcacaatctaattcttagccacactctttctatgcgggcag

SEQ ID NO: 72297 - DNA, 903 bp, Prunus persica
  Intron number 3 from transcript ppa024581m (locus ppa02458 1m.g) derived from phytozome v7.0 (chr-ID scaffold_6; pos 8957336 to 8958238 reverse strand)
gtactagtactactgctcctcgctactgttcagaggtgcttttccccctttttctttttattgattatacatattgccaatatcccatttgcaactaaaagtggttgcttttcaatttagttatgaatttatgattagtttcatggatggatcaaggtgatattggtaccattaaacaaacattgatcttagcagcagccactagtgcattgtatgatttgtgtgcaaaaaatgaaatcttctcatcacccctttctcttaaaattaccataaaatgatcaactgccatagagggcggttcagcaggtatcacctgacgtttggaagaagattagctagttgcctgggaaagtttaggtattgcaatagggaggtttcaagaaattttcacctgaggatattccttacaagagaacttggagatttttatgtcattttctttaatcaattcctgaaacttttagtttttgttaacaatccttttgaaccgtccacatttttgggcagagagaaacttcagagtaacttggcatgatttattttcttttcaaattcattggtttgataaaagaaagagaaaaagaaaaaaagaaaatgggagtagatgcctgcctaaagaaagcctttaattataaattgttagggtaattttcctgtgtgtgtttgtctgtgcttgcttgctctcaaataatgttggcatttgattgcgtcaccaagtagtacatatccaatcatgttaatttacgtcttaaatggcttatagatgccccttgcttcattcttgcactggacatatcatgctatcaaagggtgatcacacacctaagaaataggaaatctgatatattatccttttatccaatttattttccaggggaaggtcccattgttatccgccgttgc

SEQ ID NO: 72298 - DNA, 524 bp, Prunus persica
  Intron number 1 from transcript ppa012660m (locus ppa01266 0m.g) derived from phytozome v7.0 (chr-ID scaffold_12; pos 660273 to 660796)
aggaagaaactaggcgtttggcacagatttgggaagtaagttcaacaaacttttgttggaatatttttttcttttcacaattcgcttatcaatttatattggactctcaagctattcaaataggatcaagcatgtgtccaaaaaacattactttggtaattaagggcaaaatgttgagtgttatagcgtgagcttgttactaagcagggctaaaaacatttatttctaacttggaaggttagaagggtaccctacccactatggatatccactaaaaaataaaataggaagcctagaacgatgtgattttagacataacaaaatatatggatcctattttgaatttatttcgaccttgttggattttttttttgttcttgattaggagggcttggtaacatggttcactagtaatttgaacccaaatgacttgcctataggacctattcttcttggtcggccacataaattacttcataatgaaattatatcatacattaacaatctagtaggagctcgaagtg

SEQ ID NO: 72299 - DNA, 474 bp, Prunus persica
  Intron number 1 from transcript ppa008871m (locus ppa00887 1m.g) derived from phytozome v7.0 (chr-ID scaffold_7; pos 19733256 to 19733729)
ctgcaaggctcaagagcggtccttcttttgaagaggtacgatttcagtctattcttggagctaaattcttgttctttgcttagtttattgatttggtttctgggttttctccaattttggattttgattttgtagaggtgctgtgttgaatctaaagttttgacttttataggcaaattcacattcttatgtgggattcttcaagggttatggatgattgagtaatttgtctagcttgtaagctgaaacagtagaagccttaaagtaccgggcttggttgaattggttcacaaaccctgttctgcaaacaaacagagctattagattgttgctgggccacttctgtatctaaaaatattatgaattcttcaaatttaatctattgcttgatgtgcttcatgttgtgaatttttggaattcggtttggtttgcctaatccccttacgttttgtgtcaaattaaagatattgaaga

SEQ ID NO: 72300 - DNA, 597 bp, Prunus persica
  Intron number 1 from transcript ppa002627m (locus ppa00262 7m.g) derived from phytozome v7.0 (chr-ID scaffold_1; pos 33389146 to 33389742)
actcaggttagtgccggcgattgttttacctttctctcttcgctttctagagttagtttaatatttccttcaagtcggtgctgtttaatttttaccgttattcctcaatgcactgttggttcctgagaaaaatggcggaatgagttagaaattataagaaattaaacttgaaatcttacgatcaacggttatagttcgacatcaaatgacgtttaaaacgtttttttatttcacttgtaatcacccggaaattgaattttttcttctttttatatttttggtttttgcttctaatcgtgtagggccttttgcatttgcgttactgttttactttttgcttagacgatccacaatggttatttacttgaaagctgttagaaacttccaattttgttttgtagggtttaccatttgatttttctgattggatacagattacagagtgcctttaagttgattttaccttcaaattgagtaaatacctttgaatgtagagatgcttatgtaattatttcatatgaactgatttgctttattctttgaatgttgatacacctaccagggaatcctcaggacgtcagtgtgccaccagttgaa

SEQ ID NO: 72301 - DNA, 597 bp, Prunus persica
  Intron number 2 from transcript ppa005389m (locus ppa00538 9m.g) derived from phytozome v7.0 (chr-ID scaffold_2; pos 25282114 to 25282710 reverse strand)
cggggctcttctcttggccttcttgcttggatccggtaatattgagttcatggcttttctgtttctgtaattatttcgttctgattttttattgtttgagaaattgttaataattgaacttaataaagtaaggaagttaattctaatcttaaggcaccctgttctatcaaattttgtaaacacaagttcatgatttactttcgataactaatgttgtataatccttggatttattgtgtttggtttcttcagcttatatttttcttggattattacatgccatggaagtttcatgctgtaaaaagttctgacctttttaaggcgtcatgcatttttgaggaagtttatatttcattgccatgatcgtgatcatgaaaactgcttccctgtaggtatgatgttctttattggggcagattaatgaattaaatgaatatttatggatagtcatgatacttctgcggtcaactttatatgggctttttggtttcgatcttcgcctcctcttcattataacctctcgagtcttgatatttgtcttttcccttttgttacaatatagttgcaacaacagttggaacagtggtggcatatctt

SEQ ID NO: 72302 - DNA, 771 bp, Prunus persica
  Intron number 1 from transcript ppa001347m (locus ppa00134 7m.g) derived from phytozome v7.0 (chr-ID scaffold_6; pos 7130677 to 7131447)
tttggaagctcactgctctctctgcctcctcgcctgtaactctatctttctcaatctctttcattttaaaacctagtatgagcttcttattttgaaatttactggtcttctgtttgatcaatttgctgcttattcagaagtttaattgctaaatattttagtttatgtttcatctctagctgaggggcgtttaatttttttgtcttattgcaatttacttttgactgatcggacttagctgtattagttttcgaagttgaatgaacaactggttttagtaagcagtattttccaggatttgttttgtactttacaagtgacgtcttttattaatctaattgtgattaaagtaggtgagcttaaattttctaaatttgggatatgtggttgccctcttcttggttgctgagagaacttaaggatatgtgattaccctctgtttggttgctgagaaaaattaagcatatgtgattaccctctggttggttgctgagaaaacttaaggatatgtggttaccctctatttggctgctgctcactgtagcagcttctagttcctatgtgattacgaggggtactgccttttaatatttggccagctataaacatgagtaacagtgttcgactgttgtagtttcaagtaacacaggtttcttagcttactactgcaggatttttattcttatgcccgctaattgttatcgttgttttctcttctgttttttctcctttacaggtggagtcggtgctagacaaggagaattttacact

SEQ ID NO: 72303 - DNA, 849 bp, Prunus persica
  Intron number 2 from transcript ppa000602m (locus ppa00060 2m.g) derived from phytozome v7.0 (chr-ID scaffold_5; pos 13714069 to 13714917)
gattggttgggagtcttttctccagcaaaattcaagtaaagtccacttttgtaactctgaaatgaagttctttttggaaaaatactatgatatgaagttcatagctgctttccctgttgcgtatatagtgtgctgtgctgagtcaacttacagaggcttagtttcagccgttggatacttagtactttatgtggttgagattaaaatgtcattatagttcaatagtccagtcagaccagaaaaaaacaaaaaaaaaaaggttcaatagaccagtattatgaaccgttggatgaaacataactcatttcttatatttgggtttgctgggtttgtagatctgggcctctgtttgagtatttctacttttgtttatgcttttgggcctcgctggctatgcatcaagtaaagtttccgctcttgttacacaaaaaagaaaagataaaaacgacacccttcaccgaaactcaagattatcttctacgtgaattgaatttgagtgcactttggggaaggaggagagtttgtcccacggcggtgccacatctctcaccctttgacatagaaaacaaatgttgatgcttttccactttctattcttttggccttttaattccataccttttttctttcttttggtttgtttaatgtttcgttggtccatttcgtaacaagaagcatttggatccaatatgtgattctctaatagacttttcaaatcattaaagttgcagtaattttatttattttcggttttgtttcctatccatttcaaagaaaagcttatagattaattaaagaagtgaatctgttgtggcagcgcatcgacctgcccatacactgaagactatt

SEQ ID NO: 72304 - DNA, 344 bp, Prunus persica
  Intron number 1 from transcript ppa007636m (locus ppa00763 6m.g) derived from phytozome v7.0 (chr-ID scaffold_7; pos 17533413 to 17533756)
aaaagggtggtttcatcgtctccagccatttacaggtaacccaaaatagaattcacgaatcacaactccgagtctcttgctttgattgataccataatagaaaaaaaaaaaaaatatatatatatatatatatatatatatagacggaagattaatttttattttaaacacgtagtttattactgtttttgaaaacttaagccattgaattatgattttaggttttaataagatttttgaaagctgaagctgttagaacatgaacgggtcattgttttatattgtaacacatttggactataattttagggagaagctgtgcaagattggcgcgaaattgtgac

SEQ ID NO: 72305 - DNA, 603 bp, Prunus persica
  Intron number 1 from transcript ppa012665m (locus ppa01266 5m.g) derived from phytozome v7.0 (chr-ID scaffold_7; pos 22063529 to 22064131)
gttcctccgctctactccttcctccacggttataggttagtaaaccttcgttataacattctttttctgtttagcttaccttgtttttgtttggattaaaaaaacaccaaaaaaaactcaaatcagatgtagatgcaaacacagtaaagaaatccatcagaaaattaaacaaattcatacccatccagaaaattaaaaaagtaaaactcattcatccacaccttatgaattccagtcctgatttaagcaaagaaaagaaggcttttattccaaaacgacatgaaaacccatctctcttttaccaacaaaacaaaaccccaaaattttgacagcaaattaatcaaactttcctgagaaactctccccatcttggacgtcgacggtcgacccatcgacccatcagtttttacttgtcaaacccaagacgagccattcattctcgcacctttcacttctgcttctggtatgatatgatttcttcgactgaattgaatgtgtgggttttgctctctatgaattttgagaatatatgggtttttttttttaaaaaaaaacttaataatttatatgtagtgtaagggacgagagaaagagagaagaaga

SEQ ID NO: 72306 - DNA, 924 bp, Prunus persica
  Intron number 1 from transcript ppa004422m (locus ppa00442 2m.g) derived from phytozome v7.0 (chr-ID scaffold_8; pos 20407376 to 20408299)
ttcgcaagctcaagcgatacaaacacgcactcgaggttggtttgtttaacaaaaacccttgtgtttatgctctgttcaagttaaagttttaatctttggtttgctcttgatgcttttgcttagttgtagaaagtcagaagtacttttaggattgatggtgttggggggttttttatgcatggttgagtttgcgtaaatggtatgagttgataggtttaaatgagtgtatattgttacagagcatatagcattttgttacccagtcaaatttgctttaaacatttgaaggtgcaaggtatttgaattctgttgaagttgaattggtgaagtaaacattggaatgcgtttggtctggttgataatgttggtcttacagaagtacttttccaagtgtccagcttttagtatttttgtttaggaattataatgaaggtgtgctgttgagtattccaactctcaagaatgcgcgccaggggataattgaatgtgcatatggagtgattgtaaaatttgttcaagaaaaccttcaagttaatgtggctgtcgagagggctattgttttcctgtcttctgttttcattcatgagcagtgatataagtttcagctaacttttgtaaagttgaacatgatctataagtttgtattaaaaaaggggttgtgtaaatatggaattgatatgtattctctcgcggttgcagtctgctagaatattcaatttggtgaccctaggcctttctgctaactttttcccttccattttccttttcaatttcttatatgttggcttcttggttatagctaccttagttattgggatgccagataaatctagttcgatgtttcataacttattgagctttccgggaaattgtttccttttcaactggcctcctattttaattttgaacattgtttatgcagat

SEQ ID NO: 72307 - DNA, 870 bp, Prunus persica
  Intron number 1 from transcript ppa018215m (locus ppa01821 5m.g) derived from phytozome v7.0 (chr-ID scaffold_8; pos 20192855 to 20193724 reverse strand)
ttgagcttgctggatatcaatacattggtggaccagtaagtatgagtctgaaatcatataagtttaagtacatgatgctgttacttgtactttttctattttatatcctagtctgtgaaatcaaatgacatgttattcatttggctaacaagagcattgcacaaaacttggtgtcattatttcctttgcatttgtatcttcagtttcattttaaatttaggataaagcttaacaggttacctgtagtttaaaagatcttcaggtataaatagcaaattgttgcttgagagacataacgaggtctacatcttctttggatgtaaaagcaaatatttggaaactgaaagttcccctggtaattatttagtatgaatgttgatgtagtggatgaagtaaaggaggatcatcactgcctgcccctctcccgggaacatgcagtttgctccagaaaatctattttttttctctccccccaccaaacaataattttttgaaaacatcatctttttgtgtgtgcatgcatctgttttagattcttcttgcctcagaaattattagggcttcggtttaatatttaaactttaatgtctgaaggtttggattgaaaaatagatgccacataactgccacaattcactatatttttttctttatttttctatggctgtacttgtgctcaaattcaggcatatatgcaaacattgtgttacaaagtattaaatggaaggtaatatacatgttactataccaagtgccaacaccatataaacgttatggtcttattatatatgcagtgcacttgttacatgtattgcatttggtcttctctggtggcagttgtcattaatcaatgtttatgtgatggaaagt

SEQ ID NO: 72308 - DNA, 490 bp, Prunus persica
  Intron number 1 from transcript ppa021515m (locus ppa02151 5m.g) derived from phytozome v7.0 (chr-ID scaffold_6; pos 19638166 to 19638655 reverse strand)
cttattttggtgctcttatcaaccaccagttcgtttcaataatcttcaatcatttatattttatttttttcctgttagttaggcttttcaattaaagtatttacaatctcctatatatggtcaaacagatgtcaatgcatgcaagctattagggtttttttttttctttttcctttttggttgatcgtatcaatgtatgagtggataaaaaattcaaattggatcaattttaattacttttaatctaagaatctagagtttgttcaagtgcgtaaactcatgtttacacttgtttttcccgtaaatattttgtaatataattttatatattgcagcgtttgttcaagaggctttttgttttttaatttttggttcatttcataataagactataaattttttggagaattaattaattgtctcttttttttttctttttttttttataatttcagtttggaagattgcaactgttgaagggtctaagtgt

SEQ ID NO: 72309 - DNA, 487 bp, Prunus persica
  Intron number 1 from transcript ppa006295m (locus ppa00629 5m.g) derived from phytozome v7.0 (chr-ID scaffold_6; pos 3423647 to 3424133)
aatattggtatgttctattttagtcttctattgcagatttccttgttgtctatttagtcctttgttgtatagatgaatctcagatggaaaaagtactaacacaagtgacttcaattattttgaggcagatttctttcctttccgttttagcatgcttaatgttttcaccatatgcagaataaaattggctttctgtaatttgaattaattaattttgtatagcaaagtaatgaactttgtatatcattctgataaatcagttggatatagagtggcttagtgataaataaataaaatacagccagtctgcagttcattttcatatatcatagcttaagaactttaatctatgcaaattttttggaaagaatcaataaacatattggttcttggctttgtttgttttcagtcatagttaattaaaagaagaaaagatggtatcaatttgtgaatgatgctgatgcttagcatttggcagtgacaggct

SEQ ID NO: 72310 - DNA, 682 bp, Prunus persica
  Intron number 1 from transcript ppa013835m (locus ppa01383 5m.g) derived from phytozome v7.0 (chr-ID scaffold_4; pos 13985101 to 13985782)
gtgtctggtcatacatcaaggacaacaatttacaggttccttaaatttgtttttcttaagataagcaacctgtatgtccttctaaattaaagaacaatcagttgtattcagtgatatggtactgtatttatctttctgtgttgtcttgtcttagttatagtgcttcatgttttctgttaggttgtaataagaataagtttcttagtatttgtttaattatcaaaattgttaggagcctaaatttacgtaagctccgtccactaatcacagcaaggttgttaacagtcaattagcagagtcagcaagattgttagttccgctgtgttgttgcattgagaggagaagcctagtttgtgaaccagtcatataaaactggttttgtgcttatgcaggttgtttgtgaaatttatttctcaataaagttccattcttgtcaacccactatttgccatctctgtcaatgtagaaggtaggggctctagtataaatgtgcttgggcttcttgttgctgatgtttcttgcgagtttaagaagcaaacgggagagagtatattatctttcaccttgcatacctacttttattgattctaactgtgcaactcagtttcattgctttcatatatgaacctattttaatactgatcagaaaaatgtgtgcttgcataggatccaaacaacaaga

SEQ ID NO: 72311 - DNA, 1005 bp, Prunus persica
  Intron number 2 from transcript ppa007455m (locus ppa00745 5m.g) derived from phytozome v7.0 (chr-ID scaffold_5; pos 8064335 to 8065339)
agccattgtgtacaacagtagctcactgcaaagaggtccgtcgatcagaagtactgttgattctacttgcatttcatcttttttagatataacccattgcattacctttgatacataaagtcgaaatagtgcctttgaacataatctctccctaatgcactactttaagaaattgaactgattcgaatgatagtttttgagcctttatttcttgttaactgtgactaaattggggcatggacttttgacacagtgtagggaatgaatgtgttaaagttataatgaaactcaaatatcagctgagaatatttctgagggattcatattgttctacgttgttgtagattagtgctagatttatccgtgtcttacttagtgtgacatctagttgttatttgatttagagcatattttccacattgtagtagctttctatgttcaatcgtgcgggatttagccgcatcttgacatctattgtgttatctgatctagaacacataatatttgacagtatgatgtctgatgtctgacccagtctggttctatcttgctatgttcaataaataatgagtgatcgtttcttattgagctgcaagtcaagtttctagagttgttattttatcactcaatgattaaatgaagatgaactgctcctaagtagcaggaagaatgcattgacaagaaaagtcaagacaatgtgtacagaaatggattagttcttttttctgtgagttggtgtccaacccaatgcaagcatcctttgaagtatgaacatcgtttcttttgtgttcatcttaatattcagtgcttacacaaacacacacacagatgcacatgtacatattggtgaatatacacagatgtcacgaaatgtgttaatgctttatctcatgcattttacagcatatgtcactattttctttttcctttggggagggtttttttttttgtccataaataagtgattgatctgcatcatatagtgtgtgtggaattaggttgtaa

SEQ ID NO: 72312 - DNA, 715 bp, Prunus persica
  Intron number 1 from transcript ppa019787m (locus ppa01978 7m.g) derived from phytozome v7.0 (chr-ID scaffold_1; pos 34881094 to 34881808 reverse strand)
gccctattttcaggtgatgtacctatttatccattttacatttgcaaccatcttcttttattatgttttctagttgtaggcttgcctatttcattaccccctctctttatgtatctccatgtctgataggtgataagaggagggagatacagggagcggggcagtgaaacgggaatggagatgtttttttgttttttttttcctaaggtagatgatgcaaatttgcctgtttttcttttgacttttctcaaagaaatttgacaaggagggtgaaaggcctggtcttgcccaactaattaacacacacaactgatgctaacgggtctaacccagtataaaaaggtcttgacttatagaccagaggtatgaggttcgaacctcctgacataagttgtatgtgtatgtgagaaatacccccttatagtttagactattgcttgtactaattttttttataaaaaaaatcccactttttccccttgccacttggcttcaaagcaaaatctttgcccctagagggtttttcttttcaaattcatggtctcaagggatcaagtgctattcattatttggtctacactgtttctctggattatctatctgcatggttgctagatgtggaggctgttagcattttagtcatgccacttgaatatgtatatgctaatttgattattttgattgtacatatatgatcctggcaagcaggtttcat

SEQ ID NO: 72313 - DNA, 955 bp, Prunus persica
  Intron number 1 from transcript ppa019505m (locus ppa01950 5m.g) derived from phytozome v7.0 (chr-ID scaffold_6; pos 2861589 to 2862543)
ggtgcctgctcttcaagtgcaactaaattatccatgtgtggtgccttttggctctaagttttgctaactcactatttgtttctttctggtttggtttttctattttggaatttgatatatttttgctaaacaatggaacaggtaaacgtcagcactcttctcaaatggtgcagtctcaaatggcgtatgaaagttttgataatgaatctgtttgaggaatgtgaaactttatttgctttttatggagaatgtaatattctaagaatactctgatcttttacctagttttttcattaaattgactttggtatatcacttttcattcttatgactgagtgcttgaatggtcaccttgaacttaaacctatattatatagaaacaaattgattgtgtgacatacaaacatggctttaaattacatgattacatatataaatgcacttacccctggcaattgtagcttcttgttttcgtgtttgtttagctgtggagttttattttaggctttgtttatacacaaaattgaagcaattttctttaaaacagtatagcatctccagagctggaaggtcagattgatcatctttcgggggatgcaggctttgaactcatggaagagttaaatactcatcaagtgcaaaatatgttatgatgctgagaaagtggcaataaaattacttgcaaccaggttagaacttccataacttcagagaactgcttggcgtagtgcttctagaatgtctaagggcagggattcttctgaggtacatgattttgccaagatacctttggatagcagtttgagggattgggcatctgtattcctggagttaagatgctatagaagtttcaaaataaggatgtttgcctgtgaatgaagaagaaaaaaaattgtttaagaagctatttctctttgtagggctttcacagcagttgaactgagaaagaaattac

SEQ ID NO: 72314 - DNA, 720 bp, Prunus persica
  Intron number 1 from transcript ppa021707m (locus ppa02170 7m.g) derived from phytozome v7.0 (chr-ID scaffold_3; pos 6400138 to 6400857)
aactcgatcgctctactcctaatcaggtgcccacttaatccactccccctctctcttgtttttccctttaaattttaaaactttcaatttatgatgagaaaatgggttaggctttgtttggttactgagaaattgagggaaaggggaaagaatttggaaatgtatatgagccttagggtttgtttcgagaatggggttgttggggattttttttttcttttgactttcgagggggagttgttcagaaaaatgacatattattaaaaagtctatatctttttctttcgaatgggtttctagataatgaaaggtgcattggagtccatttgattgggttctagtaaaatcttatgcaacctaataagaagtatttcattgtttaagatccatctgtaaacaagctaacttgtgtgcctgacatactttttggcctgcctatgaattgcaatcttcaaggctaggtaataggttgtatgcacgatgttctcgtcccttcctgagttgtctcagccatctgtcataggattaaaaccgtattaagtcatcgtcagtggttagttttttgcgttaaaagtgcttttatataatctctagaaaacctttccgtagaaaaagctttccttaatgaatagggagttaattgattttcgggttgtaatgatgaattccttttttttcttttcagccagtcacaaaattcaaatcatttacagttaacga

SEQ ID NO: 72315 - DNA, 824 bp, Prunus persica
  Intron number 1 from transcript ppb016078m (locus ppb01607 8m.g) derived from phytozome v7.0 (chr-ID scaffold_4; pos 23098269 to 23099092)
ctgacgaccaacagaagaagattacctcggcgtctgtaggtgagtcttattctatggctatgcaggtcatggtgacgggagctatgtctattgaagaacagctagcccatatgagctaagcggtcacaaaactgactaagatggtcgaagagaaagatgcgcagattgcttctctcattaacaagtgggaagcgcatcaggataaggagcctggtcaagacgcacacaagaaaggaccacatcatgaggctgaatccagcgagaaaggattgggtcatgaaacagagtcaggtgagaagtcgcacggaaaagttgacgccgcctcggtgggttctttgtcaatccaacaacttcaggacatgatcgcgaacaccatcagggttcaatacagagcgccttcccgagacacactcatgtattctaagccatacaccaggaggatagacaacttgcgaatgccaacaggatatcaacctcccaaattccaacaattcgatggaaagggcaacccaaaacaacatgttgcatacttcgtcgaaacatgcaacaatgccgggatagagggtgaccatctggtgaaacaatttgttcgttccttgaaaggaaatgcatttgattgatatatagacttggagtccgaatcccttgacagttgggatatgatggagcgagaattcttgaatagattatatagcactcgtcacactgtgagtatgatgaactcacaaataccaagcaatggaaagatgaacctgtcgtcgattacatcaatcagtggcgctcgttaagcttggattgcaaagataggcttttggagttatcgg

SEQ ID NO: 72316 - DNA, 792 bp, Prunus persica
  Intron number 1 from transcript ppa018100m (locus ppa01810 0m.g) derived from phytozome v7.0 (chr-ID scaffold_2; pos 25717639 to 25718430 reverse strand)
tcaaaagttcttctaaggactcaccggacaaaaaggttaattatttcttaatctcactcttttttcttagttcacaaatgaagcaatcaactttgtgtaaagtctgcagtacttatcacgtatactcattagttactcttttaacttaagtacaaattgttaaaggggatatatatatatatatatatatatgctttgcaaaatttaacgtccaaaatgatttagaaatcgtatggtaataattaagcttaattatttagatacaacatatagatcaatcaagatcgtgacctctgtttgttggaaggtgatgaaaagcacaagtggaatcacatgaaagaaagatgaaccagagctacccttaaggtactggcatttttaggaccacgaacgcagaaaagaaagatgctcatcccatcccatcctatggtcccctatcaacatcaccatacacatattgatataccaaaccaaagctaagctaatctttctagctagctatgcacactaaggcacatgaaggagacatgacttattattgtcatgccacctaagctatcacatcagggaccatattattggcatttttttgaattatatatatatatatatatatatatacacacaaataatagtttaaattactctaaattaatctattatacggaaaaaaagaagatttgaacttggatgaaaggtgatgaacacactgtcatgtcttaatttagtgtaaattctaatttctaatagtattgacatgatttaatttcagaaggaattaactggggagaa

SEQ ID NO: 72317 - DNA, 875 bp, Prunus persica
  Intron number 1 from transcript ppa012189m (locus ppa01218 9m.g) derived from phytozome v7.0 (chr-ID scaffold_8; pos 18210134 to 18211008)
ggtatattccttctcattttttcttagttgctttgagtgcttgcttactattcagtttgtgaacttcaacagttggattcttatttagggtttctttttttatttgggaaaagagtaggccagcaagaaatgagttttgtttcctgtaaacaagattttaaggtcttaaggctatcaccctaaggattgttagaaggattcaccctaaggctttatgattttaccattcaatggttctgcatgtattgaaagaatcttttggctgcgtgtttaatatttattgtgtgtggcttctttagagtgtgtgttcaaatatggacatgaaaaactggttctttgaatcagtagaatctgattaaaaggtatagaagttggcctagaaatcagtgtttttaagaactgtttctttcccttctcttttttatggttaaatgatgcaatcccagcttactggttgaacaatcagtgtattatatatttccatgtaaagtttggcaatagtaaacttggtctacaaactcttcattccttctgattgctgctagtggccagcctctctggttttgtgcatttagcaattacagtatcacttattgggttccggaagaagttgcatttagtttactgaaaaagggaatacttaagttgattttatggtcttctcgagcaagtcacagaagtgcttcatgtatggtgtcggctctgtgattgatctctgaccagttgagagtagctagactgacagctaactatatatgctttacatttatatctaacaacttttgtttctatccagtgaatgatccttcttatccctgatacacttgatctcacttacaggttttaccctgtttcttggcttcataatcgatcgg

SEQ ID NO: 72318 - DNA, 576 bp, Prunus persica
  Intron number 1 from transcript ppa013416m (locus ppa01341 6m.g) derived from phytozome v7.0 (chr-ID scaffold_4; pos 2220112 to 2220687 reverse strand)
catcgctgctgcccaaccaccaccctccccttccggtcagtctcttcccattgtatgaccgcataataacaaacaacatcgactttaatatcaatcagagactctgttatgttttattctcgagtgctatgtgttttgttttatttggagtttctcttatacttagaaaggcgttgtgttgttaattttattttttgtttaaggttgcccacttgacaactcacttgtcttgctttgttgcttgtctcaaaattttccaactttctatgttggcaactttatcatcaaacgatttatagattaggggctgagcaggaataggaatgaatcatggataatttgggttctgatgcattgctaatttgctaccataccagcataaataattattggttccaaaacatcagatcagatcccatggctaccttattggaaccgctgaattactaaatgttgatctttagattcctcagaagaatgttccatagagcctttcatctcagcttttacacatagtgaaagtttttttttttttaatctgatgagctagctaattgtgatgcagaaatagctcaa

SEQ ID NO: 72319 - DNA, 625 bp, Prunus persica
  Intron number 1 from transcript ppa009783m (locus ppa00978 3m.g) derived from phytozome v7.0 (chr-ID scaffold_7; pos 15600573 to 15601197)
ccctccacatcagatccggcctcgcctcctcccctgtaatttttctcaatccctctgtttcttcttgttctttttttcacaaacaaaatcatgggtgatgcatataattaattacttgtgctacttaacaatgtgtggttatttggtgctaacttggacacttcattaagtgaaaatgtggataagtaatggtttgatgcaaactgggttttaaatgggtgattagcttatgagagtaaattgggttgatttctttcatttatggatcattttggggggggggggggggggggggctgaaattggataattactttgcattcaaagtcttgtgttcgaatccaccttcttcaatatcagttgcataaaaatatactgactaaatatcgacgatgtaacaagtactgcatattagtagcgggtacgaaacaatcttttgcctaactccatatgccaaaaaaataaaataaaacttagtacatataccttagactttgctcttgaagttcgtagataaactttttgattcttacatatacatggtctagggatgaataattttatacctcttaattgacatttatgtttcaggttgatttcatattaggaagttggctgcactgtga

SEQ ID NO: 72320 - DNA, 837 bp, Prunus persica
  Intron number 2 from transcript ppa012187m (locus ppa01218 7m.g) derived from phytozome v7.0 (chr-ID scaffold_8; pos 1121052 to 1121888)
aggctgcgccgcgcatttatattggtgtgtatttcgtgaactcttttattcgtctctctattatgtttctgttgtctgtaatggtttagatatactagggtgttttacgaaaatagaaatctaagtacattgtcatgaagataactgggaacttagtcttatcttctttgtttgggaattttattttattttattattttatatttcagttacaaactgtgtcatgtcttactcagaaaatgctcagttttcctgttaaagcttaccatagagaggactttgtttgtttcactataataattcagaaattgctcgttctttacaatctatttagatggggtagttggatgaggaatccttgatacagtagaatgaattgggcaattcaacgctataaaaatcagtaacacatacttgaattatattcagtgatgcaaatattcatatatttgagatgattttgcttgaaaaaataaatcaaaattgtccaaatctcctgtccctttgtcttggatgatacagttctctagctggtcttataatttattttcggttagctggttacttggtttgcatagattataacggtagtgaatataggatattgtgccaaggcatatgcaatagtcttacacggtttggaatcgttttggcctggaacaatccttaggttgggatggaatttaattcctcctcctgcttgcctaaaatacaattttttaatttgaacttcagtccttattgaaatcccttttgtagatatgcttttcctctaatatggactactttcgaggttgtgcagtcagaaaagaagaaaagaaaggctctagtgcagga

SEQ ID NO: 72321 - DNA, 967 bp, Prunus persica
  Intron number 1 from transcript ppa013626m (locus ppa01362 6m.g) derived from phytozome v7.0 (chr-ID scaffold_1; pos 45321818 to 45322784)
ccacactgtcgataaaggcgccggtcacaagcagggtaatcttgtcatctatccctcgcaaaatctcagatttcgtttatttttttggtgattgattttaataattagattgtgccttgtttggatctgacaattataagcctttttttgtacgcgttgccctgatcatagattttcgctttagtttctattttttctgtggattgtttgatctctgtgtataattttagatctgatcggcttctttatcaagttattcgtcgttttgtttttatttataattttcctgtttggttgctgagaaagcgtgagaaaactaacgagattttcgtgtttgtcttagaatatgaatggttctttatgattttccatcttagtgagaaatgaaagctatattaaactaaacagctatgtatattatgcaacacctgatggtgattatctctttggttgctactgtagtttattgttatgtataaggttatttctgtaaattaatttttacaaagttttagggctagtggcctgttaagaaactagatacgccggattgatgaaaattggttgcaccattgattctttgcttaatgctcagctgactttcaattttgaattactgtcttagcaactgtatacagtttggcaacctatagatgttatgttggattgatggatgagctttgttttcaacttctacaacatttggatgaaatttggtgcaccattgatacttccttctatgactttaagttttaagtggctgtcttagtgactgtatacaaatgtgttgcatccggtatcctggattgtctataaacttgcatttataatttgacatgtatgctgacgcacttgattgttcagtttctctatcaatggggaatttgtactccgacagttttgctcgttctcagttcaattaaagatgtctaattaagattattaatactttcaggacccaatctga

SEQ ID NO: 72322 - DNA, 656 bp, Prunus persica
  Intron number 2 from transcript ppa023506m (locus ppa02350 6m.g) derived from phytozome v7.0 (chr-ID scaffold_6; pos 11140608 to 11141263)
gttttgagattcatagaagttccagtttaactgaggtaaataaccaatgcacattaatcagagcatatcagattaggtaaaaagagagatgtttgtgtcgtttgtggaatttaattttccctttagtgtcaaaggggcacaaaattatttttaaaaaaatgacaagatgttgacagtgattgtagaaattggtccccattagatttgtctgataataacccatctatcataaatatcaaaaatagtttcctgccttgtcattttcattgaatagtacatttttcttttcaaaagttcattatcaatttcatcactttcatgcttaagaaatgagctcttgaagaacctattttgtgacttgctcctgatagtattattgtaatgcatttgtttgcatgatcaactagaatgtttgtgacttgaactttttgagcagagaaattttgaatctctgagaatgtgttaagattaacctgcatatggctccctggggtttctagggtgaatttcatggatgataaactttaacacatgttgattgcatatcattatttgtaggtcaaagatcaatcttgtggaaaacctgatcgaaaatgtgtaaatggatttacctgtttgaaggaggttagtaagggcctttctacatccaaggagct

SEQ ID NO: 72323 - DNA, 708 bp, Prunus persica
  Intron number 2 from transcript ppa012934m (locus ppa01293 4m.g) derived from phytozome v7.0 (chr-ID scaffold_6; pos 2651745 to 2652452 reverse strand)
ccttcagaaagacccacccgcatcctgcagtgctggtattttttctattctctcataattttcaaatctttattttgttatgtatattttccagtcagttggtatcttgtacatgtgaagttccacatttaccagttatagtttcagtgttccatcttttcccagctagaatttttgttgtgtccttgcatttgattcatggaggttatatgaagagagtgctctcattcattattggcatagagaggacagctgattatatgaagagagtgttctcattcattattgtgcattgcttggtatcttgggctgctggttaaatgagacttttaatgctctctccctcttgccttaggtaaatgtgtttgttgtggtatcaaaaaatattgtcttcagcagtttattttattgtaaagtcctgatagttccttcgggaaggacccagtgcgactggttagtttaatcagagatgtatgcaactggttagtgttaccttgcattcttctggttgggtggatatattggttgttttgaaatattgtatgtaattaattatttaaccacgtttttttttttggggtaagaactggggtttaatgcagaagagaaaagaggcatcaaggtttcactattgaagtttcttacaaaatattactgtttcagtgtggtttacaattaagttttccgtttttacaggtcctgttgctg

SEQ ID NO: 72324 - DNA, 784 bp, Prunus persica
  Intron number 1 from transcript ppa012934m (locus ppa01293 4m.g) derived from phytozome v7.0 (chr-ID scaffold_6; pos 2652488 to 2653271 reverse strand)
caaacccaaaacgaaaaccctaacccgattcaccggtgagccaagccctaccatcttctcttcgattcactaatttgttatgctttcttttcttctttaccgttttgattgttgatttgtggaacaattatcggagcaaatttagatttttaggttcttaattttcgtttgattgttgtgtttgtttcgattttttgctcatttatttttgaaacgatgaattttttttatagttatttttatgaattaatttaattaaagtgatgactctcaataattaggcttttcgtatctgaatagatcgtcacgatgccttggttagttgtgagtttatcaattttgtaatgctaaaattttcaagttttagaattatgaaccctagggttggttcagtaatagtactgagatggatagataagggtttcgatgtgatattgtgagtttgtgtaatttaagaaatcctcccgttttatttttttaaattaggaacccaatttgttttaggagaatggagcatctgtagtgttaaaatttgtatgtatctggtgatgggtgcgttattttgctccttatgcaagctatactttagtgtctcatctggatggtgtaggctaatgggcttgtactgtttaatgaacttttcacttttcatcacagaattgaatttaacacagaattttcctgttttctttttttggttgaggaacctcagtcagatgtatagagtaatttgtcttaacgttattgtgtttgaccttgcagcaaactattctagtattgcatc

SEQ ID NO: 72325 - DNA, 990 bp, Prunus persica
  Intron number 1 from transcript ppa025334m (locus ppa02533 4m.g) derived from phytozome v7.0 (chr-ID scaffold_8; pos 16904917 to 16905906 reverse strand)
cttttactgcctcttgcatttgccactcttgggtaagtaatattaacttatctagatttaaaaattttacttttttacccaacctagcctgtactgaggaaaggggtccatcagcatttgtgtttttgatggtttaaaaccattaaaaccaggaggtggtgttgttgatcctgatggaatttatgctcccaagattaaccatacttctttgataagaaacaaacagaaacaaaaacaaaagagaaaaagaagaagagattcctggaaggacctaggtgtacttccaagtcaacttttttttatgttttatttttttccttcttattttgcttgacaactttctttttctcaaattgatttcttaattagatggtttgaaatacatggcataagtctcataactcgtccctcaaataagcttatttgagagatattcttcgatagaatataaactttaatttatgtacccattaattcacaattccacatggactctatatactatatattgtttcctcaagaaatgggcaaaaatataattcagtactaattgcacatgaaacatctctgctctgtttcttgatttcttcttgaactaaggtagctagttactgctccatgcgaaacctgtctgcccctaaaatctgggaacaagtttaggctgatgatcctaaaatggtctgaaaactcacctcacctggtcttttaaaagcatatgcaatgattttatatcaaatatcctcacatatggtcaactcctgatatgaacttctcatgcactaattttgagcaatacaatattccaagtgccaaccaattttggcaggctaaatctggacgattgattttgtacaattaacaattaatcacaacacatgtttgaatacaactatagaccaataggagctaaactagcaaatatgtttataactcaaaaatattcctggtccttgttctaatttgcataacaactttcaatggttgcagggc

SEQ ID NO: 72326 - DNA, 571 bp, Prunus persica
  Intron number 1 from transcript ppa026047m (locus ppa02604 7m.g) derived from phytozome v7.0 (chr-ID scaffold_2; pos 10812258 to 10812828 reverse strand)
cctggggtagaaattgatcgatctaccttatggaagagagctagacaggacaaacatggtaacatccctgatccaaaggtggcagagaaagcaaaattaattgtaagcctactatcactctgttttaaatttttattaaactgtgaattattcttattacgttgtatgttatatttttcgtcgtgtgaatgatattaccacgtcgaaaagtttttaaaaacgtcgttaaaggtctaaataggaatcactactatgttttctgtaattatagcataagacgtcggtggttcattttggcgtcgtttgaatgatattaccacgtcgaaacttttttaacaacgtcgttaacggtctaaataggaatcactactctgttttctttaattatagcataagacgtcggttgtttattcatttcgtcgttttaaataaataaccacgtcggtataactaccgtcgtgataagttataataacgtcggtttatacgttattgcgtcgtgtgaaattatataatacgtcgtttgtacataaataaccgtcgtgtgtttttttgtttatctttttttagg

SEQ ID NO: 72327 - DNA, 960 bp, Prunus persica
  Intron number 1 from transcript ppa010672m (locus ppa01067 2m.g) derived from phytozome v7.0 (chr-ID scaffold_5; pos 17461747 to 17462706 reverse strand)
actgtcagttcccatctctctctctctctctctagacacatcctgttctgttcaattggtgtttgaatcctttagctagctagtggatatttgaatttttccttttcgatggttagtgagtgtggtcatgaaagtagaattacatccaagttccaaccatatgaccaaaaaagaaaacagaaagaattggctaagtaaatccctttacaattttgctgtattccatgtcctttcttggtaggtaggaagtaggtaccctttacaattactaatactgatcctttctctgtaaagagttttgctttaggtttaagagtaagggggctggaaactgggaaatagttcttcatgttggatcatgtaagatgagagtctatgggcgcatggaaagctgttgtctttaagacttttcagcatcgtttaaaggttttggaaactaactagctactcatttacaactctactgtatatgctatacaaagaagcaagcttcatctcacatttctttcttcatgctagaattttcaagatccaaaatttaattaggaggcttaaagttaaacattactaattggcttcttttggctaccagtcccatgaattggagattaactagtaggattcattcatgtaccttgattaggctgatctttggacaagaccatttggtggagtcatgatagtatatctaaggtgtatttcttgcttgacttcttctgttgctttccatcaccaacaacaagctaagatgatcttttatgatttttataggttaatcctgttttctgggattattcattggtatctttcaaagtttcaatcccctaattttattgaaacctcaaactattatctaacttttcaagaagaaacaatagaatttgagggttggtccatcgtatatataattaaagagtcaactcctttcctttaattatattgatcaggaccccttgaaga

SEQ ID NO: 72328 - DNA, 922 bp, Prunus persica
  Intron number 1 from transcript ppa001769m (locus ppa00176 9m.g) derived from phytozome v7.0 (chr-ID scaffold_1; pos 34118087 to 34119008 reverse strand)
ccggcctcgctcctgccttcaaggtccctcctaaccctagctccaaacgtatacagatatgtatatttgtatgtatgtatgtatgattgcataagcttattaatgaatgtatttgcttgttctacagatctggttctctggaggtttagttagttcaaaacaatatttttctcttttttttttcttccttgagtggatatcgagtttttattattatgtatatatatttgtttggaatggcttcggtgttgtattataaggttgttgcctggacatattgagcgtaattgctaaagagttttactttttctgataaatgaacgttatcattatacaaattggatcttcattcacattattccttgaaatcctcaaaaaccaaaactttgagattcctagaaaaagatttgatcgtccaaatatggtgaatttgatattggtagatttaaacgtcctaattcttggcagggctctcaagaatgtgtaccagctgtaaatatggacgaagagttatatgttggatttaggtgggcatgcaatgagtccgcaatgcccataaagaaccgacattacatgttaagcttcttaaatataattttggcttctgtctgttgattgtgattttctaattgatacgtgtgttctaatttgatatgtcttcacttttcaacacatatgatctattatggttgtatttgtgtctttgctttctaggttcaagctctaattgtggtatggtcggtcatgtatgccatcctcactcttcgttaataacacatctccttttttgtgcgggcttgcttatttatgttgtaagatatatagttaatttactgatgattacaacttataatgtttttactctttcaaatgtgttcttgtaatagactggtgacttgcggtttgaaggtcgtgagcgtgt

SEQ ID NO: 72329 - DNA, 859 bp, Prunus persica
  Intron number 1 from transcript ppa013701m (locus ppa01370 1m.g) derived from phytozome v7.0 (chr-ID scaffold_6; pos 19178085 to 19178943)
aagtaaattttcatcagagtcaggctggtagctaaggcctgccttgagccagtgacatttctgccattcttataccggtcactgggcctgagttcattcatggtgtgcttggaagttgcaagaaatattcaagaacaggttatgattatccaccaaatttcaaagcagtctaaaacccaatcgcaatatacatgttgtaaaagcacttgtacgcctggatttgcctgccaagcctgccataactataaattctgaggatgggaatgcgatcaatttttgtcaaggatgtttaattctcttccaagtccagaaagttagctgagaccgtatatgaatcagaaaattaagatcattctgtattcattaattcttccaactcctttctccattaggcataactctttttggttttctaagttctaaacgtcttttatgtatacagaattaatgaatacaatttcttttaatatcattattgaagaaagatgagcaactagtataaaaattgggctatgacgtcgggaattaggcgagtatcttctcttcatttatatatgttatcttttaacatatgtgtgccgccaaaaaaaaaaaattgtttattgaaaatagacatgtctaaattaacaagttaatatgtcaatttagaacacacatatgtttaagtaagtatccacattattaatcactcatattcaaagtatgacaattttaaattcgttatcaattaatttaaacacataaagaaaactatcaaacagacaaacaaacctctctcgtttcttctcgactcttcttctcctcccaacccaaagccaacacagatctgcatttcccttggaacaaccctctttggtta

SEQ ID NO: 72330 - DNA, 910 bp, Prunus persica
  Intron number 1 from transcript ppa019084m (locus ppa01908 4m.g) derived from phytozome v7.0 (chr-ID scaffold_16; pos 13470 to 14379)
caaggacggtttctgtaactggaagcataattaaagtacgacagtaacaatttatcaatgtgagggacgaaaagtaaagttggagtatagtccaaggacaattgctacaattttacctaactcatttcatctgctcaagttatgaagaatttaaatcaaaataatttgtttggctttgaagtaagcttatttatggatactataataattatttttaattatagagaaatagtaccaataaggtcaccaaatttagaaaagatacacaactttccaagtgttccaacaaaatggttgaatttcagaaatgtttatagaatggaaaattcctcgaatggaaatagtattaatgatgtcaccacaatttaaatggaatgaattatattatgggattcagaacctctgcatttagaatgtacattttttcctccatttcacttaattttagtcatggtaataatctacgcattttcgcgagcccctttttctaagctgtaaaacctaacctattgctttgcatcatgctcatatatatacataagactgccagtttcttccacccacaatatcacttcatatcatatagttttttatttttcaacacatccgaaatctctgcttttaaatggagaagcaaacagccatagcctcttcttgtctcttccttttatacatcgccacgtttacaggttagtgctacaaaaacagatatacatgttcttgataatcatatattaattgtagccacaaattattatttagacaaagaaaaatgtatttatattgtcaaatttactctttgtccctttttgcatttgatatatagcggcagaagttcttgaagcacatcatcaccatcatcgtcataatcatcatggttctgtgaagtttttcgttttcgaggagtcat

SEQ ID NO: 72331 - DNA, 777 bp, Prunus persica
  Intron number 2 from transcript ppa003825m (locus ppa00382 5m.g) derived from phytozome v7.0 (chr-ID scaffold_7; pos 10671536 to 10672312 reverse strand)
taccacccatcatcttcatcaggacacccaacgacgtaagcacctctgtcgtttcatttctccttctatctctctctctctcgcactctaccctttgattcagagagaaagagagaatcacaaagagaataatatattttgcttcttttcttggcctgcgtcctgctctcagtcctcagtccttttgagattttacttggaaaatattgttttgggtcacagcaaaagcatgttcaacaaaattatctgccacctctctctctctctctgcccggtactttgtttgaccagatcctagctaccagagaaaaaaggcataaacacaaggaaattcagaaatttccatgaaataccacctgtctctccttttctttttgattttttgtttcttcttctttggagttgcttggaccctgacaaacatgtaacaaaccccctctgcctgatcatgacttccttgctacaaatcccacatgtactgaaaaaacaaaaagggtactggctagataggaccattgtgtgtatgggttttccattttccttaaataaaaaaaaaagaaaaagaaataataggaccatattaattcaaatttccaaactcattttggtcctcctttaatcattactatagagacctctctctctctctgggtccttcctctctctctctctctctctctctctagctatttctcttatgtacatatttagatcaatattaatgtctacaatttggaatatttttgtgcagatcatcaaaataactccttatctgga

SEQ ID NO: 72332 - DNA, 846 bp, Prunus persica
  Intron number 2 from transcript ppa002994m (locus ppa00299 4m.g) derived from phytozome v7.0 (chr-ID scaffold_8; pos 19939907 to 19940752 reverse strand)
ttgaaagaataacaactccaattgcagctgttgccgtaagacttagattcgttctccttagcttaattagtactcacaattgatctttctcttcgagaagtttcaacggatatgcttgtttatattacataatacaagcgttggatgatttacattgctgaactgcttttcagtgatagtcatagatatttatatataggtggatatagttgaaatgttttgttgatcaagcagtaagagaaggctacatgttatggagtagccttccacgtcccaaacccaccacctgttgtttaacgacctcacctttgtagtagtatcatgtaggctacagggcagtgatttgcagtgagaaggttggctaatatggactgaaacaaggagacctgcatctgattggatctcaaattcttttggttccacatttgtgcttgatcattgtggtcagataatacatttctttgggattggtcatatattggaaactgaacctggactaaaaaaaaggttttagacatgttgcaataatatactttctgtccagaatattggagatagctgcaaaaataatatttacagtctccgaattttgaatatgtatttcaatgcaagtttacatctggaacaaaatgttttcagtctccgtagatacactcatgatggaagattacaagaacaagttattgtccttaagagtttcatgacattcatgtgcataatgttttcaccagtcttgcttttctatagataaagtatacttgctttgtttttttggtccatcttgattctatttaaatgcttgtctgcttaggttattgggccatatcgctctggaaaatcattttt

SEQ ID NO: 72333 - DNA, 707 bp, Prunus persica
  Intron number 1 from transcript ppa009784m (locus ppa00978 4m.g) derived from phytozome v7.0 (chr-ID scaffold_3; pos 2732363 to 2733069)
ggttttcatcgttcagaatttcgatcaaacagaaggtgcggattctagtttgccttttatgcttttgttttcagaaaaaacagttgttgtttatggatgtttaattctaaagaatgaaagagaattgaaattaggatcttatttgaattgcttttaattaattctgtgattaattatcgtcagaaaggagaggaactgagaaaattaccttttgttttgccttgagaagtcgaattattattaatatatcggtatgcatgttggtatttctgggtctgaagtaatgagaagcttgaagttttcaaaacgttgttttgtctccaatttccttcactttctgggaatccaaactgacgcataaggattaatcagacatgagtggcttaattagttgaagaaaagttggtttgtatatggttcacattgactgaccaattgtgtgattatctagaaaagaataaagaaaataagaagcaccgccaaagttgtataattgatttaatttcagcttgtacaagcacttccatgttgtttaatttgttttttaggaaaaaaactaaaacattttgcacaagcttccaattgctagggataatgttactttagagcattatttaaggtaaattacagatttatcgctaacatactcattctctatccccctttctgtagaggttatctttcctacagttttgtgggtggttttc

SEQ ID NO: 72334 - DNA, 956 bp, Prunus persica
  Intron number 2 from transcript ppa015906m (locus ppa01590 6m.g) derived from phytozome v7.0 (chr-ID scaffold_1; pos 1527127 to 1528082)
ttactttcaagtatttttttagtgatatagactgcgtaagtagtgagattgtacctactgtgatatttgcccttaaaagcttacatctttagtattccaaaattagcccacatgaaggctcgttagtgagctaaatcagtgaagcttaagcagcttcaaggatcattgcaagttaggcttgatgagggagtaggatgacttaatgattgcattagtgtttatgccttgatgtttcttgagtttttcttaagagataatttaaaattttcttaatgaactttttgtgtgagtgatgttctaacattctgaaatgtctgtgtctgtcttaatacatgtatgcttatggtcatatcattcagtttccatgaactctacgatacacaaacactcaaaaagtaacagaaagaagataaatcattacttacaggatgttaaattgggaccttaaaattggggaaagaacggcgatgcacatcctaatgtgtagtataggtgctgccgtgcaagtttactatactgggaacatgaaatctttaagaacatttgttgcttttatgatatattatggatcttgaggaaaagaaacatgaaacgtgtcaaaggtaattgtgtattatttgaaaaatgttcttatcaattaatggtggtctgcaatttagtgatcgataatgctgttgttaattatctctatttggtttgctattgagtgaaattcttgtttttattatgatataaccattaatttgggttagcaatgtttgtatatttagccgattgccctccattacatcatgactattggtttcctcattttggtatcatgtaaaaaatagttacctttagcttgatccattttatggtgtgtttcctgcagatacctccctccagaaattggctgcgtataaaatttggaatatctagatctttcattcaacaagatcaagagtttgccagct

SEQ ID NO: 72335 - DNA, 475 bp, Prunus persica
  Intron number 1 from transcript ppa011359m (locus ppa01135 9m.g) derived from phytozome v7.0 (chr-ID scaffold_2; pos 21999315 to 21999789 reverse strand)
aactaaggtacttactcttcccttagacatatattgcatgtgtttgtgtatttggttttgagttttgaagaaatcgctctgccagtgaatttaagagtatgctttgttttctcttcctttttgttcttgggaatacagcagacagagatgaaattaagaaaacaaagagctctttttatggtgctgtgattagagttgttttttttttttagtttttttattttatattattaatattttttttaatggcttcaggtaaactttcgaatttgaaggtgttggtatattgtaaaatgaagtttgaaggttgagattcatacgcttgttagtttgagtataaaccctattggtcagaacttagaattttgttagaatccagattggaatgattgtgaatggtcctggtttcttgtagttattttttgtggttgtattagcagtttggagattcgttgggcagggggttgctgctttc

SEQ ID NO: 72336 - DNA, 515 bp, Prunus persica
  Intron number 2 from transcript ppa001895m (locus ppa00189 5m.g) derived from phytozome v7.0 (chr-ID scaffold_1; pos 31161967 to 31162481)
aaactccaaattttgattgttcacagcttcaggtctaatttatcctcctcttcttctttttgaaatttgaggggaaaattgtatattctcagaaatctgtttccaacccataatgctctatcgtctatcggaagtatgattttgaatatgctgatgagggttatcagatttactttctaattctgctatttcttggtctgattaactttgtcacatacatttgccaataattccagattttcagcttcttctttttttcatagaaggtgttttcttgattattaattcttatttttctgcatgcataccaacagtctttccccgttgtacaatattattgttcgacctagaagtttgttatgcctgtttcttctttatgcattcaagccatttcctgctgacctagaagtcttatccagtgtatatatatctatatctaaacacacatatgttctgtctattttcctgctgatttgggtggactttcccggtcagggaacaggttttggtccttg

SEQ ID NO: 72337 - DNA, 663 bp, Prunus persica
  Intron number 2 from transcript ppa020744m (locus ppa02074 4m.g) derived from phytozome v7.0 (chr-ID scaffold_1; pos 13480694 to 13481356 reverse strand)
cccaacgtgatattcattttgacaaagtgaatgacaacccaaatgcaatggagatggagggtgatgcacaagaagaatatcatattactcaagggtctggagcacaagaactagaaacattaaggaacaagattgctgaaagtttagtgcatgcatcttcttagacagtttctttatttccatttatttaagcccagtttcaatgtttttttattgctacaatttaaaccttattaggacaaaggatttgtcaaaaaaatatatttattacttattcaatatgaaggatggcatatgaacctactaccgtggtgatctctttatctttgttggaatttattcaatacataattatctttgttggaatttattcaatttgaatttttcttttctttaagcaaagactaatataattttcagggagaaaagtataaaagcactttacagttttatttttttaccaaacagattagtaaaaagcactttcagcataatgtccattttagtcattataaatagttacagcacttttacagtaaaatttaccaaacgctctgacactacttttcatactcatagcacttttaaaattacagtttaccaaacgtttaactgctttactttacagctgattctttttaaagcacagcagaagcatctctt

SEQ ID NO: 72338 - DNA, 1030 bp, Prunus persica
  Intron number 2 from transcript ppa007439m (locus ppa00743 9m.g) derived from phytozome v7.0 (chr-ID scaffold_2; pos 2396608 to 2397637)
tggtcgttgatcctcttcctgcaggtcttgatcgggttaggcttcttgcactataaccttttggtgactatattccatgtctttgtatgtttcattcatttgttctttcttttcaaccttttagttgtgaattcttacttcttccctcagggagtaacttcattatatcagttggatgtgattatgtctgtttgcacaattctatgtctaatctaaagtcaaaataagggggcttggcaatattagatatgttttagaatttgctgaaaataaaggagagtaaaggaaaagagccataaagaaaaagctaagattatgccttttttattcttttctggagctcaagctaagactgatgttgagtatgggagaagcaatgaatcattagaagaatagcatgtattttgattttcacggttcaagctgatccaggttatttcaacgatttgctactcactggatgacatgtgaaacttattaatttaagttccgcatctaattattatatcctttacgcaaagatatttagggtactgttatgaaatacttgcagaaatgcagccattttaacttcttggatctttccttaatgatgacgtatatggtatttcttatgaataaatgggtttaactgtaacttgattgatgtgtaaatcttagaccttgtaactctgtagttgaagatttttgctaatcctgtgtaaactgttttgattgaagcctttttcagagtcagagtatatatctctacctatctcctatcacaatctgtccatatgatgttgttgattgggttctgtttccttatctatcaatcaaatatgtttaagagtagcaccccccttaggtgatttttcactaacttttatatgattatcaaataagtttaataaattttatacaattataaaggaagtttaagtagttattatcattctgataatttgtactatgtacattttatcgagatatatatttcctgacataattgaaaattttttatacagggatatattgtcttaaacagacc

SEQ ID NO: 72339 - DNA, 633 bp, Prunus persica
  Intron number 1 from transcript ppa021117m (locus ppa02111 7m.g) derived from phytozome v7.0 (chr-ID scaffold_1; pos 35338970 to 35339602)
atagtttggtcagggtgtctcgggttccctatcatagagacagaacactttagactttgttcatttccaattagtatgtggatttggccctagctagggctagggataacgatcttcatggtgatcatttttaagaaaatgatgttgcaatatttggtttggaattttatcatgttttcatgagtttggtctatcggaaagtacttataatctctagtatgttcatgaaaaaagatattcacagaaggaaattagtcgaactcatgacctcatcatgagtaagaataaatactttaatcacttagagctacaatgagaacttgccgaaaaggagacaaaccattaatttgtgatataatgagattacggttattattgatgaatttgcagaatcctcaacaaggactttggttcataataaataaacttgatattgaaaacaccagcttttgacccccctttgaatgagtgatttgctttgtcgtataattgacatttgaagcttagttaatatggtaaattttgaattttattttctgaattaagcaacaaaagatatttagaaaaaaacatttacacacactttggtaggtaaagttcaaattgaagtaccttaaataaaaaggggaaatc

SEQ ID NO: 72340 - DNA, 500 bp, Prunus persica
  Intron number 2 from transcript ppa020499m (locus ppa02049 9m.g) derived from phytozome v7.0 (chr-ID scaffold_7; pos 10060483 to 10060982)
ggaaagttcgtggtgggcttttatctgcctgatctcttcccttcgctttagctcctccgttatgtcactggtttgaagcctgcctcggagaaaatacaccgaaagatggacaggattctagaggaagtcatcaatgaccttagaaagaaaagaaaggccgcctttgcattattaaccaacaaaaataacaaagaatcatgccatcaggaagaagaagaagatctagttgatgtgcttttacaactccaggagtctggtgaactccaaattgatctcacaaacaccataatcaaagctgtcacgctggtacgtatgtgcataacgttacctctatgagtgttataatctacttcttttgtttcttgactaattaatttctgttctgtcaaggtcatcaggacatgacattataattagttggtatgaaaatgatattaagtgaataaagtacttttatttttataggacttgtattttgctggaagtgagactgcagcggc

SEQ ID NO: 72341 - DNA, 772 bp, Prunus persica
  Intron number 1 from transcript ppa003104m (locus ppa00310 4m.g) derived from phytozome v7.0 (chr-ID scaffold_6; pos 24753703 to 24754474)
atagatatctgtgattccgtcaattctcatcattggtaatatatgtgcttcaaagctttttgctttatcttggttttgtttttttctttttgttttggttttttgagttgacttttgattttccgtcagcttagggtttctgattgactggaaatttatttgcttttgacaattatcagcttgatattatctgcctaataccagtatcagttgtcgttgtttttttttccttttgtttttcggttggatttgtatgtatgcatgtgtgtatgcctgagagagagaagagtgagtgaagtaaatgattttctaatgatatacatatattattgttgaattcttttatatggcttctttatacaatttgaaatttctggagcatgtattggattgaaatatctcgagtatgtcaactttttggattgattaattaattccagaaacagatgaggatttagaagtagcggataacactctttcaaaacgagaatatttctatagatatgtagatttctggtggaaagattaaattaacactttgccctgttctaatttcctcccctgtttctggatttttccccttttggtacctgaaacgtaggcagatttatgtattaatttttctttctgttcttaagagctgtgttatgtggtattttgttgtattacagttatagtgtgttttgcgctgtccttttcttttcattctaaaagaatttgtttgtgattgttcattgatgtggacgtgttaaatttatcaggcaggcaaaag

SEQ ID NO: 72342 - DNA, 843 bp, Prunus persica
  Intron number 2 from transcript ppa012190m (locus ppa01219 0m.g) derived from phytozome v7.0 (chr-ID scaffold_6; pos 1475760 to 1476602 reverse strand)
tcttcttcatctgatactcaggtatttattcatttacattcaaaggaacgccctttgttccttttttataattttggctttgtggtttctgacccagaagaaggtggtggattttgaagttttgttttgggtctgtatgagaatggcttggtgatttttgtgggttttaaattgttatgtcttgaagtgcattgatatggatcttatcaacatatagacggtttaacaaccttatttaaggactgattatgtttagttatagttgatgcaccagttcaagtcattaatcaaatttatatgttcttgacatcactagctatagtgtttgatagccaagtagtttgtactagcaaattgttcattgtagattgtggacatggtcctgaggcatcatgtgcttggtttggtgatcactgcttttgggtaaagagcaaatgcccgtgatccaagggttgtgttctgtagttaccaaagcagaacaatggaagaaaatatgaatttgcttatcttaatgggagcaaatggtggatttaacatttctaatatatgttttacataagggatgttcaaaggtcaatccctttggcattatcataagttgctacttcaatgcactataaggcttttctgttcatcgtggaatggttcttgtgtatgtgaaggctaggatatggataattcagtgttattcttggtcttgtgtaatgtaattcagaagataaaaatttgaatatttcatctgtgcatgtaaaaatcagctgacaatatagttctcatagttcctttctcttctggcttgtggttgcagattacgtcacatatttttggggatctccttgattc

SEQ ID NO: 72343 - DNA, 452 bp, Prunus persica
  Intron number 1 from transcript ppa006296m (locus ppa00629 6m.g) derived from phytozome v7.0 (chr-ID scaffold_5; pos 17406989 to 17407440 reverse strand)
tgcccccgttgaagtccaggacatcaataacaaaggtgatttcaagttttcaattaccttcaagcttgaccctctgtctgtttgagtactgagagaatgacctctgtttgagtgctgggagaatgaaaggagatataaaataaacttgaaattttaatattttcgaattttgggtttccggtccgtaatgttcataaaggaaatgagactatttgaatgttttggctaataagatttcaggtttggtgtgagggggggacaaagttgttaaatttcaagtgatatttgggatttttcttcttcttcttctattgcgtcctaattattttcagtttattatttccctttcaaatttgtagagataacaacgatttcagttttgctattttctttctaattttccttttggtttaatagagctgaaagtgcggatagagaaatacttcaagggt

SEQ ID NO: 72344 - DNA, 821 bp, Prunus persica
  Intron number 1 from transcript ppa013274m (locus ppa01327 4m.g) derived from phytozome v7.0 (chr-ID scaffold_1; pos 31923493 to 31924313 reverse strand)
actgtcagctcgagaacatcacctacaccgccaaggtatcacttactcaatctaatctttcttttgttcctttattttcaatgtgttgttaattttcaagtcctgcattctccgctgccacgttaaaccctagatttcacgggcttgctgttagaccgcacctttaatgtgaatctgacctatcacttgcaagattagcgaatttgttttagtccctagagtggttgaatatcgatgcatagtagtgttccaaaaccctgggcttttagcgatgtagccctaaaatccggtgaaaaaggtcgattgaattgtaaaggatctgaagttctactctgtgtgaggcgatttacctagataaagctgaatgattgtttcaattttttttaggttcaaaaagggtggtgcagaatcttaagagatggtctaattgcccaatttcaaaatgtggaatagaatgagccagtaaggtttaaactcgctaatatcgaaaatcttttcctttgatgtacagattaaaattggatcaaacgattttagtttaactggattttggtctccttggcttaaaccaagcacttaaataccttttcttctttacgaaaaaaactgacaccttaattcctttgtctgtcacatgcattcctcttctctgatcttcttccatgtcctgatgatgattctcaattttgaaaagaatatgctattgtgttgttcttattttcaaagcttgaacaattggtttatccttttttttcttctttcatttagtttctgatcttgttacactcctcttcaggacggaaaggtttcacaacttgagc

SEQ ID NO: 72345 - DNA, 513 bp, Prunus persica
  Intron number 1 from transcript ppa001475m (locus ppa00147 5m.g) derived from phytozome v7.0 (chr-ID scaffold_6; pos 5333514 to 5334026 reverse strand)
tgttcatcagccttctcagctcattccgacactctgtaagtctctctgtgtttctgtaaagggctctgaattattctttttttttttggtgggaaggctctaaatttctttgatttctattaagttcttattgaaattctctaattatatattttctgaggaatatgcttacattggtctttaggtttttctttgaattaagaaagtgtttgaaaacattttaaaatgtggaaaaaaaattgaccctttaaccacgtgttgtggatattgtcaattattttctgtttgttgttctatttggcatccgagaaataagagggttcttaagacaacgaacaatcgaggaaaaatctattcaattatgctgtgttaccgggtccacttttcggttcttatttcccaggagtttgctaagcaatctgagatcttctctgttctactttgatttgtttgaaattgtgtttcattcatgattacattgtgcagtaggaaagctaccagcaagtcaagcaa

SEQ ID NO: 72346 - DNA, 842 bp, Prunus persica
  Intron number 2 from transcript ppa000001m (locus ppa00000 1m.g) derived from phytozome v7.0 (chr-ID scaffold_3; pos 2311066 to 2311907 reverse strand)
tgtcgcgcccttgagttggcaccttttttttgggggtaggttaatttctttatgtgaatagggtgatatataaatttccatgtatataatatgtgtatgtatatgtcttgtatgtattcatatatatatgtattatatattcgagttgtgtgtaattgtgtatgagagagcctaatgaaccaatgtttaaatgtgtatttgtattactttattttcctcattaattttgtttctccctttatgagtgttctggtgacttactagagacagacaaagttgagggtattttggagactttgcattccagagtagttttgttatcgtgtttacttgcttttgaggtttttgcgttcttatcttttctgtttcgtaagtaatttgtttgcagttttttgttttagtcatggaagacaactaaagtatactaactcagatattataaatatcaaatgaatcctaggatcaagtgaagtgagattatttcactagttattttctttgatactcaagctttataaatgaagcacgcagcagttggcaatataaaaagttctgattgttcatttggcaatatgccctctgtcagcagtctaagatgaagctgatgatagtgataatataaaaagtcgaccctgttctccaaaacactctcccttcctgtgtgattaaaaaaaaattcatttttcctctgtaaggattcacctagttgagatactgttagatgcgctatgtggttgataattggaaatttaattgtagaagctgtatcattgttcgtttttgactttccttttccccttttggcaggtctatagtaggttactttgaatttgctccacctc

SEQ ID NO: 72347 - DNA, 362 bp, Prunus persica
  Intron number 2 from transcript ppb024194m (locus ppb02419 4m.g) derived from phytozome v7.0 (chr-ID scaffold_6; pos 4370385 to 4370746 reverse strand)
ggacttcaaaaaggaaagcaagaaaaggagaacatgtttgtcaagaatgtccttaccgatttttcatttatttttatttaactagctttattttaaggtatttatttttttaatcaatgtaatcttcccttcaaactcaattttgatattcggaaatcgaaggatcatcgttgcaattctctttttgctttgaggaaataaataaataataataaaaagcgagctacatttgggccctctatctgaaaagcccattatttgaccccgaaaaatctaaaaagcccattgttttttttccaattcttctaccttcgcagttgaggtaagaagaaaaaagagagtaaacgcatagacacaagtga

SEQ ID NO: 72348 - DNA, 895 bp, Prunus persica
  Intron number 2 from transcript ppa025083m (locus ppa02508 3m.g) derived from phytozome v7.0 (chr-ID scaffold_4; pos 12251770 to 12252664)
ctattgacagagttagcatcaaggctatcatcttggtaattaactctctctctctctctctctctctctttctgttacatgcatagtggtgttgggttgtcttatctttctcaccatagtaatgctagaattactcagtttgttcgaagaatgatgttacaatatgcttgttatgtgatcatatctaaagaaataaataagttttaaccaaaattgaaccatatctgaaattttttattgtcaaactcgtgctagccagccaagaaacagaaagaaaaagatgtgttgtgtgacaagagactagtaatattaaaaagaaaacattttgtaaaaaactaatataagtcaaacattttggactaatttgatatttttaaggcttatttattgatatgcctcttatgttgtaccgaaaatctcaatttgtccctacaatttcaactaagtcaatgtgccccctatgctttcatttcgtgtttgacattcactcattccgtcaatttctttggtaacaccgttaatttgttgacttgacatgggtattttagtaattttagctatttaaaaattcaacttatattagattgtggtgttctaatatttctttgaagagcacatatgggcttagccaagttggctagagcggatgtgctcccactctgcacccgagttcgaatctccctccctataatttagagttgaacatctcttgtataaaaataaaaaaaattctttgaagcaggagtattttcagggtttttgaatgtttcaagccttctacctttttatatgtatagatatatagatagataacatcctaaccccaattctttggggtttatatataattttccattaacttttaatcgatttttaccattaaaattcttgtagg

SEQ ID NO: 72349 - DNA, 566 bp, Prunus persica
  Intron number 1 from transcript ppa014914m (locus ppa01491 4m.g) derived from phytozome v7.0 (chr-ID scaffold_1; pos 16295887 to 16296452)
ccaaggtaaacctcttgctaccattatccaaactttacgcaaatccatgaatatcattgatcatacctttgatataattttattttttattttttattatactgatttcttaatactttcgccactttttgtatatattcaagaatattaatgtcttcaagcacaatttgcatggcaaccctttgagttgaattgtataaaattaacttataattcattattattattattatatgtttcataccatctattgaaacctttactttccatttgtcaaataaatatcagacatcaatgaatgtgaggatccagaccaccccaacagatgtggttctggcatttgtataaattatcctgggaagtttttctgtcaattgcctgatcggcgatcatcacgagttaatctagccattataggtatgtccctgcactaatcctttgattattgatgacttaaattttaaaaaaaaattgatgaaacaacatcttcttgacaaagttatgtatgctttcttgttttattgagctatacagttcccagcagtgttcttggactcttgtttcta

SEQ ID NO: 72350 - DNA, 189 bp, Prunus persica
  Intron number 1 from transcript ppa020907m (locus ppa02090 7m.g) derived from phytozome v7.0 (chr-ID scaffold_108; po s 4007 to 4195 reverse strand)
tcctacaaagggaaaactgtgttggtatgccattaacacaaatgcattatctttttttgagtattgaatctagagttattgttctttactctaattttgtttttctcttctttcttgcttttgtgattttgggtcaccttccaatgaatgatagtttgattgtggaattcaccccgcatattcgggcat

SEQ ID NO: 72351 - DNA, 812 bp, Prunus persica
  Intron number 1 from transcript ppa024477m (locus ppa02447 7m.g) derived from phytozome v7.0 (chr-ID scaffold_6; pos 22806526 to 22807337)
aaccccattaacaccgtattcggtaagatccgagttccttgctccgttttctttcagtaacttatagatctgtattgttgtttatattagtttatggatctgtatttatgtttacagtagtttttggatccgtatttttgcttgtaatagcttatagatcttgtttacagtgactggtatgctatagatctgtttaagctagatttcttttgttatttgactgtttgattggtaaatttattaggtagttacttgtgtagatctgtgtttacatgcttcgtgttgttgtatctggttattggcttaaaattagatcttcagttaggccttcgaatattggatttgaaaaaaacgaaatttgattaatagatctataaaattgtatatttgatttgggcttcagtttaatatagttataattaaatagttgatgaacaacttgatcactgaggttccctagtttttatagataaaatgttatcagttttggtaattatgatttgcatacaaaattattttataaagtacgaattgtaaaaataaacagagaacctttacgtttataatttattgtatgcagaaaatgatttgtttttagctcgaattgaatatgttgatagtatataaattcatcatgattggatattgagttgtttcatactagttcaggtggtgaaggtaataaaataaatttgataaataattattttgcttggatgatttcaattatatgttttgttttgacaagtgtgttgtatgattttggataagtataccatgataggctaatcattgatttgttaccattgcag

SEQ ID NO: 72352 - DNA, 1010 bp, Prunus persica
  Intron number 2 from transcript ppa007132m (locus ppa00713 2m.g) derived from phytozome v7.0 (chr-ID scaffold_2; pos 9254413 to 9255422 reverse strand)
acgagcttggtataaaacccattcccagtaaacgggttagtatgttttttccttatcaattgtataattttcggaacttgtatggatagcgaaagcattttttcaatcacacaactaagtctgaggacatttttactaatcaagtaacttaagaaagttcagctgataatagcctagagaatttaaaaggccggtacagagttgaaggttcttctttattcttttgttttgttttgaaatgttcaaatacgcttgttatttccttctctgctacagaaatatactgaagatttgcatgaattttatctggtgattggtacgtaacataatcgtctattggcatttagccagctctctcttttggaaaaattgatgttgattgttttcttttgtttaaaaattataaccagaaagaaatgccctttgtattgtgttgatgtatgttggactacattagtggtaagacttatctgtgcttaacactcttgctcagcggtctaagtagatattttcgtgaactctaatgtaggctctataatgatgaagcatgagaatggaggatgaggttaaatgtagtaagcattagataaatttagtatatgtttgtctcactgagagtgtcctttctccttgtgaaggctctattcttctagtttctcttccgttttgcatcacttattgacatggattttttctccaatcccaagtagttgaaatcccttaatccgagtatttcgttctacttaatgatataaaacacagattattactgatgattgttcacaccttttttggagcctatgttaacaagacactacaatggacgttcaaatcatatgtaactttcaattgtggtgatactacaacacagatgcagaacttgcatgtcttttgaactagtgtacattagtgtagtaatggagctggctttgattttctggtaaaactgctatgctctgtctacttattgtcttggaactttgcttctttcagtgtctctcgttactttt

SEQ ID NO: 72353 - DNA, 522 bp, Prunus persica
  Intron number 2 from transcript ppa012152m (locus ppa01215 2m.g) derived from phytozome v7.0 (chr-ID scaffold_2; pos 21072051 to 21072572 reverse strand)
gggcactagtgactgggatactctgtgaagataaggtaacatccttgtgaagtactgctgaagtgtgagctactatgattaatgtcagtttgtgcatgtataaggtttatatctcaaagaaagcattcatatctactgtttccataccttatttgactttagaaaattctctaagtggtctttagggcaaagtcttcaggtaggactcaaccaatggtagcttataataacttgcaaatctatttattagcttctaatgccattttttttcctgtcttgtccattgcagcccaccaatcttagcatcctatgtttattagtattcgttgcaatttgacttctagttgtctctagtctcaatttaaattgatggtttcttgggaccagcggtcttcctttttgtttattttttggctctcttcttcaaggatatttactccaactatacatgcaaatagattgtgtgattgatgtgaaattactataggtaattgtcaaacagccaattggagtggtgcgata

SEQ ID NO: 72354 - DNA, 842 bp, Prunus persica
  Intron number 2 from transcript ppa012225m (locus ppa01222 5m.g) derived from phytozome v7.0 (chr-ID scaffold_6; pos 7120127 to 7120968 reverse strand)
gggtaataatcaagattagttgtaattcgatatgatttttagcagatttcattgttttcaaccatttgggaatgtgggtcttgcttttttttgtttcgtttctactgtctacattcagaatgaagcattttctagtgttcatcaagatctcattgtcaaatttacttataaatggccaaaaagttatagccctctttacaagatgttagcctttttttataatcagtaatattgaatctaattgatgctgtccaattcattgctaaccactgataatgcaaaagcataatggatctgattctgagtctaactggagtggctgacaactttgcatttgttttgggaacaaaactggtttcactctatccttagttcaagccgcgtgtttatggtaacctgggtggtaggaagtgctttgcctaattagcatggtcctgctttgatttgtggacattaacttcctattcctatgtcactataggatgttttttttgcaaactaaggaaaataatccttatatattaattatggaagcattgtaaccaaagttagaagccccaacatacttggtagggaaagctttcccttctaaggaaaatcctctttatcaagttcattcctgtagtgataccatgcataataaatgctgaaatttatttaatgcaatcccctaactcgctctagatcttccagttattggtgttgttttcaacactttccctcccttttgcttgcattctgcacagtttatatttgagcatgtagttgtgagctgtggctgaaacgatctaccattttctgctgcagatcacatccactctaacgtttgctgcagcttgtgc

SEQ ID NO: 72355 - DNA, 990 bp, Prunus persica
  Intron number 1 from transcript ppa008485m (locus ppa00848 5m.g) derived from phytozome v7.0 (chr-ID scaffold_1; pos 31575410 to 31576399)
caaaaacaaagaggcgaaaattcccccttccgctggtaagaacaaactccagtcaattacttgaatcctctcatacatgccactcttagatccttcttagaaaaaagaaactgagctgttattgcctccataaatccctatatggagcttcttacttgattttttgtttaattatacttgttgctggaattcgaaagctcacccacttgacggaggccggagctaaacaacaccagggtaattcagaatgcaaaaagaataatttcaatcaatcgacatcaggtaatctttgttcaaagatgatctttttctttttggtaattgacaataatcctctgtttggttgctgaggaaatcaaaaaatttgaaatttgaaatttgattgatccactgtatgacttttttgtatttcgctgaggggaggtgatttgtcagagttgatgcatttgtaattgaaaagaaaaggttttctggttggttgcttgataatattgaaaaagaagagaaatttgaaaaactgcattaggttttcttgttattctgaaattgaaaataaaatgacgaaaaaaatgcttcattcaacttaaagcccaaattttattcccttatcagatttattgaaggtggttgcaacttcaaatgttagatcataaatcattgtgatgcatacagtattggttgttgtctacactctacacacaagtgtttagaagactactaaatatgtaaaaaaatgctactcaattattggaaggaaggggttgaagcaattcttggtttaatagggttagggcttttaggacttacatgggacaaaaacccaatgttgagcagttccttggatcctttacatttttcttgcatttcttgttttgttcaaaatatgcatgtatgatttcatagttgattgaaagagcttctataagatctttagcatcctggtaatttcatgaagtctctgaacttttcttaaccgttttaatcttcttc

SEQ ID NO: 72356 - DNA, 571 bp, Prunus persica
  Intron number 1 from transcript ppa024977m (locus ppa02497 7m.g) derived from phytozome v7.0 (chr-ID scaffold_7; pos 8469930 to 8470500 reverse strand)
cctggggtagaaattgatcgatctaccttatggaagagagctagacaggacaaacatggtaacatccctgatccaaaggtggcagagaaagcaaaattaattgtaagcctactatcactctgttttaaatttttattaaaatgtgaattattcttattacgtcgtatgttatatttttcgtcgtgtgaatgatattaccacgtcgaaaagtttttaaaaacgtcgttaaaggtctaaataggaatcactactaattttctgtaattatagcataagacgtcggtggttcattttcgcgtcgtttgaatgatattaccacgtcgaaacttttttaaaaacgtcgttaacggtctaaataggaatcactactctgttttctttaattatagcataagacgtcggttgtttattcatttcgtcgttttaaataaataaccacgtcggtataactaccgtcgtgataagttataataacgtcggtttatacgttattgcgtcgtgtgaaattatataatacgtcgtttatacataaataaccgtcgtgtgtttttttgtttatctttgttttagg

SEQ ID NO: 72357 - DNA, 1022 bp, Prunus persica
  Intron number 1 from transcript ppa020159m (locus ppa02015 9m.g) derived from phytozome v7.0 (chr-ID scaffold_1; pos 7077459 to 7078480 reverse strand)
gttacatattgcaacgtcggattcatctattagtttaatttggacttgattgcaaactaaatcaagttacgagacaaaaattgaaatgataggactaaagtgaaaattagtacaaaaaaattgtaatttggcgaaattaaaaacatactgaacttcaaggaatgtttgtctcttttaccccggtatgtgctgagttacagaacggctgtgaactgactttctctctccctctctctcgctctcaaagtaagtcaaagccatcactcaaatttatttattttattttcatgccatggaaaatgcgttaggtactctacatacaaattggtttgaggaacttgtgtatttcatgaggcattagattaagattagatgagaaaaatgttgaaatcagtgggaagcattgtgttggtcctgttgctccctttgtttctgtttttgatcttttcaatcttcaatgtctgtgatctgaatgatccattatctagatttggaagcagtttcacattcaattccattctcacatataatgcccaccacctgcttcacccttttcacgtttttcccaccaggtgctctatgaccctgtaaactctctccttttttctttttcttttttggttggaaaatttgaaattatttgttgggattaattgggtttatttgggtttcttttgtttatttcatgttggtttctttgttgctgttttttttttttttttttttctggtcatgttatttgatgatgctttacttggccattacattgattcttacaaagatgaccaagcttttgcttcatgttagactcattggtatctataaaatatgtccatcaaatataaagatgattaagctagacctttcccaattatgttgttccagaaatttttattaacacgagaatgtagtgctgaaaaattatgcaggaagttagatagaatatttgctgaaaccacgttgtctgcttccccaattatgaggaaggacagtattcttgaggggcctgtgttagaggaata

SEQ ID NO: 72358 - DNA, 247 bp, Prunus persica
  Intron number 2 from transcript ppa002825m (locus ppa00282 5m.g) derived from phytozome v7.0 (chr-ID scaffold_2; pos 24691724 to 24691970 reverse strand)
gccagaaaactggaaccagtggtctccgaaagaaggttagttctttaatcttttcgttattctcttttgtttatttgaatggacttaatatcatcaaaaggaaatcaaaattgaatacttttcttcctacattgtctttgcaatgaaacaaaagagcactttggcaactgaatgaggcctgattctcttcccgcacaatgtttggtttataggtgaaagtttttcagcaagacaattatcttgcaaa

SEQ ID NO: 72359 - DNA, 487 bp, Prunus persica
  Intron number 1 from transcript ppa010720m (locus ppa01072 0m.g) derived from phytozome v7.0 (chr-ID scaffold_2; pos 16098399 to 16098885 reverse strand)
tcttagcattcagcccacagagctcaaattcccatgtaagtctgttgctttcgtctttctttaaatttaaatttccttcgtttgtatgtcagatgattttccgtttggttggtgagaaaattaaagaaaaatatccattttgaatgccatgttgggttttactggactacgatgacacattttaattatgcaaataagtatggggctgggtagagttggattgaatttcttctgtcaattatggttctaaactttgaatgcttgcgctaaagcgttctgtttgaaaatgaattacctttctttcattgcctttaaatttttgtagttaggtacattatgaatttgtgtgtggtccagtatgattaaatggtatggtaatattgattttgccattgagaaaattgtccaagtgtttgatttaatttttgggttcattttttgtggtggaaaagttgaagtgaagaagcagagctcgtgttccttgcaa

SEQ ID NO: 72360 - DNA, 848 bp, Prunus persica
  Intron number 1 from transcript ppa024492m (locus ppa02449 2m.g) derived from phytozome v7.0 (chr-ID scaffold_3; pos 14569531 to 14570378 reverse strand)
attgttacagttgatccaagtatgtccaaattttgccccttcttatatagttttaaatataacactcatgctataagatatgatctgacaaactaaatgttttttttttccttcttctttttcttcaaacgacaaactaaattgggtagaaaatatcgtgtctttgctgaaggtatcaagaatttggtgttgttaatcaattaattgattgattatgatataaacaatgggcagatatagggaacagggttgttggaaaaaagataatcaaggtactttacctattattttatatagagcaattattcaaccaaatcttctgcatacagctgcatattgcttttatatataagcaatgttttacttagatctaatctaaatcataaggaggggaatttgaaatcgaatgcaaagtgagaatagcacattcactttaaccaacttgactaagtccgtgtttgtcggcacgttgcattttgatttggacctacaaagtcattttcatttttttttataaagttagacctcaggattggagataatttttatatgaagtgaggttaatatgctaagctgtaagctcacatcgaaataataagaatccacagatacgtttatgcattcacaccgaaaaatactattaatctttcttacttgatgtagtgagcaataataattagtgttaaattagatttggttaaagatttggagacaaagtagtctcagcctgaccctacatatattacatcggctttatcgccctttaaattcatatgtcgctttgcacaagtgacttcatataattgtaacaagtggatttgcatggattttaatggtggcaggttttg

SEQ ID NO: 72361 - DNA, 459 bp, Prunus persica
  Intron number 2 from transcript ppa003960m (locus ppa00396 0m.g) derived from phytozome v7.0 (chr-ID scaffold_8; pos 7454311 to 7454769)
ctgccgagccgtcttccaagcagggtagccctccggtaatcaatcttagactggcttagctcctgtttgtttcctaggaaaaatgaactctttctcgggaaaatgatgtatcattcgcacacatgtagcttgtagttttgactatgtattttttattttgacgagtacatgatttgtttgtattcaagtgggttcatggttactgttactgagtagactccggttatcatgatttgtttggctgttgagaaaatagtctaaaaacgaaaagatgaagagaaatgaaatggaagcagctgttgggattttatttattttcttttcaggggttcaacttttgatttaactaccaatttcaagtggaggaaagttcagattggagaattctcatttaatctaattttaagtggttttgttgtatcagagcgttcccaatctaattggaggtagttttgttaa

SEQ ID NO: 72362 - DNA, 497 bp, Prunus persica
  Intron number 1 from transcript ppa018325m (locus ppa01832 5m.g) derived from phytozome v7.0 (chr-ID scaffold_9; pos 484203 to 484699)
tcccccatatcagccctcgattctcctccatcgtgtttttttcctctctattcttttctaccgtaaaccctaatatacatccacacacaaatataatttcaaattagccgttaaaagacaaactgtcaattacaaaagcatcttatccatacaaaatcgattttaagaaaggattcccatatatatacatacatatggttaaagttcttaattagactattatggtgcgtatgaatatatacttcaatctatattagaagaaaaaaaaaacacatgcattttgtgcatttgtacttattttggataattacaagtagatatcatatttgttttcggttaaaattttggatgtagctttgttctaatactttgtactttgttttaatactttctgcggtcaatttaaaaattattgatgagcattttatcatatgattaaagcgaaactaggaaaaaatattgaaaaacgtgcaggttgacgttaacggagagaagca

SEQ ID NO: 72363 - DNA, 463 bp, Prunus persica
  Intron number 1 from transcript ppa000719m (locus ppa00071 9m.g) derived from phytozome v7.0 (chr-ID scaffold_3; pos 18474603 to 18475065 reverse strand)
ctgcttgcacgataggtgaagccattgagcaggaggtttgaactttgctttactcatattcttcatggacattttgattcggtttcatctacttggttaatagtccatgctcttccattcatgagtagaattgcggtcatttacttatttatttatccgtttagtttaatttgtctttgctggaatccatttaatggtgatgccgtagtgaaattcctttttttgcctttgtttcaaagcatgtcaagtttgtgtggacgttggcttgaggcacgttctaaaactctaaaccttagtgcattgctctttgtttcttattgttctctagctggactaagtaaagcagtattcctaaggcttggttttcttactctacacagtgtcatcccgcccatctctcctagatgagcactgatgtgtcactgcttcaatgcatcaggttagaatacacaagttcttggaa

SEQ ID NO: 72364 - DNA, 876 bp, Prunus persica
  Intron number 1 from transcript ppa026120m (locus ppa02612 0m.g) derived from phytozome v7.0 (chr-ID scaffold_4; pos 27745447 to 27746322)
tactttggctgcaaatctaaagccttctgaaaaaggtataatcatactggattttatgtattctttttcatgcatggtggtgttaaggttgaaagataattttttttaaaaatagtaaattgagcttagacccataaaattcatctttaatcacctacaacccttttctttatttttctatttaaaatactcaatttttttaaataaaacctgatgactgggatccaagtaagcaagttacctaatctagcttaaaatctaatttattctattttcgaattccaaaactacccctatttacaagttaacgtgttatgtgggggtgtaactaataacacacattgaatttggaaagatcttcaaattgttgtaatggatgtaggaattaatttagaaacttatttggaattaaatattaaattcaacattaatgtattagtaacattttgatttatttaataaatttttttgtttgttttccttttatgaattatagtactggtaatctattttattatagttttatgaataatagtgtacattctaattatgttgaaaaatattttgataatctatttattgtttgttttatgaaaaacattttttttaaatgaacctattttttctctaaataatgtacctattttttttttttctataaataatgtacccttaacgaccccttagagtttaaatctgggcattaatttactggggtggtgttttttcatttattcttgtcaagtttatttcttgttgtatgtgggagaaattattgagtaatacagatataccacaggtacggaagtaaagtccagctgtgatgaaagtgataccataggtacggaagtagagtccagcagtgaaagaggacat

SEQ ID NO: 72365 - DNA, 783 bp, Prunus persica
  Intron number 2 from transcript ppa007759m (locus ppa00775 9m.g) derived from phytozome v7.0 (chr-ID scaffold_3; pos 21202227 to 21203009)
aatttgtgctactgctccaaaaggccctgacccaggtttcctttctctctttttctgctaaagctgcaaactttgaattgttttttggttaatattggccggtgatatttgtaaattctttattttgtgctgctgtgagtgattcagctatgactagcatttagatgaacaagccaaagtagatgcttttatgtgaacttcatgacgttggtgattctgatcaattatgaataagttggccctagtcatgttgccacaccacatctgaattataacatagttttttcatttgaccgcagttaatatctggcatttcgttggagctataattaaaacactttatatgtatcaaaataatctcaggtttgtttcttcttataatttatgtgctgcctccgaaatccaaacttaattttataattatgtggcttataccttgttatatctttgatggtgttgttgtggggagggggataatctacaaaatcaaaaaagaaaaaaaaaagagactacaaggctttacaacttacatttatcagtagctaagctgtatttcaaagtttcattaggtattgttacaaggcgtccaatttatgcaagtgcatacaatttcattaacccctctgtgattttcttcatttgtgcaactgcgcaagttttaattccatgtaggaattctttttcctccatgcaaaatatcttatatgacttaaggatgatgtgcttttgtattcatgatttgtatattgtttttgtacagacgtggttgcaattgcagaaagg

SEQ ID NO: 72366 - DNA, 575 bp, Prunus persica
  Intron number 1 from transcript ppa003111m (locus ppa00311 1m.g) derived from phytozome v7.0 (chr-ID scaffold_7; pos 15787871 to 15788445 reverse strand)
aacaggccgctgtcaaagtcatccccaaagccaaggtttgcaatttctcagtttgactgagtttactaatcaattgacttctgaattagtgggttttgcggattctggggatgatcagttgtctttgtgattgatatggatccttaaaacgtttcgttggcattgtttgaattggatctgttggcggacgcatgatttacaggaaacacagaaacgattttggtttttgtaattgttttactttccagaaagaagagatgcatattttatctgcgaaaataatttttgtgatatggcgaagttgacatttagtcctgataatttccttggcggtctaactatgaagtggtgatacgatttactttgtctgtagatttgctagttttatcttcttctggaaacaggttatgttctagtcagattgctgcagcctgtctcattttgttgttttgacagttggctttattctagtacctttctacgctttgttttctgctatttgtctgggtttttaaaattcgtattgtattggtgttgtcttatttggtgattttgttttatgtttttgacgttag

SEQ ID NO: 72367 - DNA, 898 bp, Prunus persica
  Intron number 1 from transcript ppa006537m (locus ppa00653 7m.g) derived from phytozome v7.0 (chr-ID scaffold_8; pos 7774970 to 7775867 reverse strand)
caccgaaaccgcttgatattgtttcggtgagtttaggctgttttctttgaaacccggaagatataattgtctttgtttataatgtgctttggtatttagtgatttataatgtttgatagtcatagtaagttagggaagaaactatgtagttggttggaatgtttgttttgttcatgtttggggaattgattgttgtaatgcagtatatatgcatactctcagtagagttcttggactgattgcaatgtagatataatttcagtgaatgtgattcaaattgcttgagttgaaattaactccttttgagtttaagtagcttaaactagataattactgtcctcaaacatgtatgagaagagataagagataagagataatttttcaaccaaatcgggctttaactgttcattgaattgagggaaaaaaaaatgcaattaatgtttaaaatctcttgtgcttgacccctttagaagataggcctgaaatatgctgtgtgtgcttcattgaacccagatcatagaatttttttttatcttctctttgttacaaactcaagatgattcaactacctatatctgataacctatggcatgggtatttcaattcaaataatgtttttagaataacacctatggctttcaaatgaactgcctaagccagaccaaaaataaaacataaaaaagaaatgctctaggatcaaatctcttctccatcaaggttttgcggatttcccatctttggggtagggtgttaagggttaactaaaagaaaaaattcaaataaactgcagggaatatagcactgatcatctctccctttgtaagtattcacattgggttgtcatcatgaataaagaaagaacatttctgattaactgacctttcttgtttattataga

SEQ ID NO: 72368 - DNA, 212 bp, Prunus persica
  Intron number 1 from transcript ppb021827m (locus ppb02182 7m.g) derived from phytozome v7.0 (chr-ID scaffold_6; pos 19585373 to 19585584 reverse strand)
tctggtgttctttctcccttccacttcaccaggaggtatttgagttacttgttcttccctttccacaccattttgctaaatcttacgtgacaatttttcgttcatttaaatatcggttcactctggacctcattttgaattattaatgcttaagatataggcttcaccaaacttgtgtggtttttttattttttggggtacttgcagagtta

SEQ ID NO: 72369 - DNA, 750 bp, Prunus persica
  Intron number 1 from transcript ppa004136m (locus ppa00413 6m.g) derived from phytozome v7.0 (chr-ID scaffold_4; pos 14967832 to 14968581 reverse strand)
gtcaaaaacccaactgggttttcaccaaattccttgtgagtcttattttcaatctttttgtgttcttcaagttggatttttttactataatgtttgctgcacttgcatatgtttcttcagattttgtacggatgaatgcattttgtggataacttggtggtaaattttgtagctttgaattagttatttaaagcatggtttttttgttctggggtagtaatttatgggtttttaaaaggtggtttgtggcttggcgtttgagttgtgaatttttcttgtctgtttgttcgaattaagatatggtgacagctgatagcttcagaattccaagtgaaagccttgttgtgtgttttaaagtttctctgtttcctaaatcttgaatgctaaagttaaattccaaggtctagattttttgttcaaaatagaaaacgaatttcaactcagaggggataagtaccctcacgattcagagaagaaagtcataaagagctggaatcatcaaaagagatatctataagattctcctccttttccactttacttgtttgaaaaggatgaatatttgtggtatgaaagcagttctatacttggtatcgcagatagaaattttgttcacaaaatgtaggtagaatgtgctgctatgatctcacatgggttttgcttcaatatttttcactacgagtgttaaaatattcttttctttttccatcttaataacactagttgtcttgttacctttctctgcagaac

SEQ ID NO: 72370 - DNA, 986 bp, Prunus persica
  Intron number 2 from transcript ppa003792m (locus ppa00379 2m.g) derived from phytozome v7.0 (chr-ID scaffold_7; pos 21873901 to 21874886)
accattactgggctgtgagttctctcaacccttgattaattttcatatcctggctgttttctttgtgctttttatgatttgggtttctctgagtttatgaatataatcatgttgtttgggctgtcttgctacttggatggactgttaaatggtgcttaagagttaagaccacaattggaatataaaaatcatttgaaataccacaaagtaaaagcagcacccagaaagaaaaaattggacttgctaaacacatgccattctatatcagatgggatatagatttccggagctgaatagtccactgctgcacccaaactcatctttttcccgttaagcaccaaacccccctttgcacccatatatgaattctagcatattttcctccaaataaattgacctttcagtacgataaaaaagcgaagaaattatatatgctacaaaccaatcgtgcagaaggaaggctctgttttttgttttgtaatttttatattaaattgtttgccatggcaggcactttgagtgcagtgccgtcatggatgggcagcctcctctgttttttctggacaacttgaaaccactagtaaaacttttagggggcaagatggttcattttgaaaatttgctgctttccttactgacattgtggttgtttaaaactaatttttgtctctaattgtctttccctggattttgaagcatttcaagaaagaacagttctttctacttataaatgcaggccttgaactctgccaagaatgttattcataaattaataatttattttgtattttgctgatgtcatgtgttttctttgtttctcaaatcctgtttttatctttttgaaattgtttttagaccctttttgttgttgagattgtctggagattggaatgtttgtttaatgtctctcaacaaatatacatttacattgattattgatgtatgatgtagtctgttggattcactgcggctcccttctttgtcat

SEQ ID NO: 72371 - DNA, 392 bp, Prunus persica
  Intron number 1 from transcript ppa004309m (locus ppa00430 9m.g) derived from phytozome v7.0 (chr-ID scaffold_7; pos 16720089 to 16720480)
ttcttcagctcaaactggttcgtccttagggtttcttcctcttacttgtttaggtttagtgtttctattcgtgaggctaagtttttgtttttatccttctcaaattacttgattaatataggattttcatgttttagataaaccctagctaaatatgtagctgatctttgtagttttcttataatttattgaattttgttgcatgtcaattgatagtactcagaatttgaacatactttgctttttgctttttgcttttgactgggcgttctgtattggttgctttgtaaacttagttaaagtctggatttattttgtaaggaatatcgatctgtaatttttgtgtttgcgctgcagattggtcagagtcaccccactggtttaacaactaa

SEQ ID NO: 72372 - DNA, 760 bp, Prunus persica
  Intron number 2 from transcript ppa003857m (locus ppa00385 7m.g) derived from phytozome v7.0 (chr-ID scaffold_4; pos 3700742 to 3701501)
gtggacgctggcccagttacgcctggacaggtagtttaatttgaatgaatgccagggtattcattttttacgtaatttgctcttctgctaagactgtttcatttgcttagatagttgcgtaattttgataaagatctgtgagtgtccatgaactactggtttctaatttttgttaaacaataagaaatttctttggtttttaagttcttgatctaaagaaagattgctttattttgtattgccattgccttttgtagtggttagtgggattattgcatttaggtattatagcggatcattttaagttagctctgtttatgaattcatcctgacgtgcctcatcttagtatcaattgggtagtaatgtttaaattaatgagtttttgctgtctcaaagtctcaccgaagatgtttaaagcaccaaagatgtgaattttctttatgttgaactccaaaacttgagaccggttaaggtttcttgagaagaaatgcttttgaagttaattttcccaatttaagagctaattacatatggttaatttattgtttccctcattttatctacaaatcatatcctctgtgctaattgaagaacaccaatgtagttcagtgctgcatcccctccctccttttttaagttccttttctatttgctcattcattcatttttttttttcatgaatcgtcctaacaaatttactgaagctttccatgtcatgcttcaggtgtcttttttgcttggaatcatcccagtatttgt

SEQ ID NO: 72373 - DNA, 459 bp, Prunus persica
  Intron number 2 from transcript ppa004841m (locus ppa00484 1m.g) derived from phytozome v7.0 (chr-ID scaffold_3; pos 21725530 to 21725988 reverse strand)
tggcgatcccagtctgtctaggaaggtgtttgatgggatgtctcaaaaggacttggtttcttggaactccatgatcgcaacctatgcacaaagtggattatcttctgaggcattgcaagtcttcaatggcatggtagaggatggtgacttccactacaatgcggtgacgttgtcagctctcttaatagcttgtgcacattctgggcctctgctggttgggaagtctatacatgatcaggtatttgaattactgtcacgcccataattttacattctgtacatagggtattactgtaagctctcaactaatcattctgtgtgttacaattgaaaagaaaaagtttagtgactctgccatcttcggtcttttttgtataggttctaaaaatgggcttggaagagaatgtgatagtgtctacctctattatcgacatgtattgcaaatgtggaaaagttgac

SEQ ID NO: 72374 - DNA, 750 bp, Prunus persica
  Intron number 1 from transcript ppa004841m (locus ppa00484 1m.g) derived from phytozome v7.0 (chr-ID scaffold_3; pos 21726560 to 21727309 reverse strand)
gataggataggatttcagaagcagatcaagggcttgtaataataatttgcacctgctgtgcgttgacttgcgatgattttggtttcttttctaagttatccacaaactactttctccagttcagttcagcagcctcatctgaggttattaattatttaatagggagactttggaaaagcccaaaggagagagaaaaaatttaaaagaagtcaaaatggacaaaattatccttatttattttttgatttcctaaggaatcctttacatttgcatgtctttggtttgaaagttgagaggtttttctgtcttttttgaaaaagctttggctttttccaaaagtgaaagtttttttatgggtaaaacctaaatttacttatttattaatacgtggcttatgaaacttgaatttcttgataagtcgattcaagacaaaatttagaatatcaaatgaaatatgagtttacgcactcttcttcacatgtagatatagtcatataatacgcttttgaaacttaccaacttaagccaagagaatgaaaggatagagatttgcttggcaaacaacatcccacattcaacttgtttgcttgcctagcgggaatcaaaagcaccaacaaaaatgaatgcatatgaatgaatgaatgaagatttcaaaatcgagtttttgtctcatcaacagacggccgtattcagtttcagtagtcaaccccaacctcactacctggttcagcaaatacgtggacaaaaacg

SEQ ID NO: 72375 - DNA, 566 bp, Prunus persica
  Intron number 1 from transcript ppa002020m (locus ppa00202 0m.g) derived from phytozome v7.0 (chr-ID scaffold_3; pos 9321117 to 9321682)
gagagagtctcagagaaacggtattgggtttgttttttgtttaaattaatcaatttatttgttagtaatctttgactacttttagcttagtgtgctaaagtttgatagttaagcgaatttgatggatacccatgttagttttgatgaagtttcatcgtttttcttggttattatctatgtttttgtttctcaccttgatattatcgctttgtttttataatgcttgtttgggaatatcttgacttttttcttttttattcttaaaagaaaattgtggaagaaactatcttgtgtaccaacttgctctttcgtttaaattttcaattctcattcgtctttctgtttagtcctgctgcattttggaagactcaaaagttcactcctttagcgctggtagtgttgatggcgttttggtttaataatgatttagattttaacatatgaaatttcattcaaaaggttctgcattttagataactggggcacttcttacatgagattatgtgatgataaacgagtaatttattgactgttgtaatttaatttggactaggtgcaagattgtt

SEQ ID NO: 72376 - DNA, 639 bp, Prunus persica
  Intron number 3 from transcript ppa007910m (locus ppa00791 0m.g) derived from phytozome v7.0 (chr-ID scaffold_1; pos 31985271 to 31985909 reverse strand)
cgaccagcgcatcttctctactgtttattctacaggtaatttcttctccatttttctttttttattatttatttatttgtttgtcccaccttttgtgttgctgcaatatgattggcgctcaacctgatgcttatgcgttgccatattgtgaatgatttcttagtgatgcctgaagctggatcatgttttgtggttctgtggtccataaagtcaaaattgggaatttgattgcttcataatttggtatttgaactcattaggataagcttgtcaattgcatagctgaaatccaaatataaacaacgacggctggttgagtgttggagtcgtatttcccctgatatcatttaacctttcaataaagctttttggtctttttttctttttctttttcttttttgagtgagtatatccaccaaaatactttgattacatatttccactattagttggatggtttactcttttatttttcttattgctctatatgtttatgctaataatgttaactagaaatcatcatctgttaatttattttttctgtatatattttttctttcaattctctgcaaatctggtatgtcggacattgggattgttttctttatataaaattccatgtacttgaaggtgagtcat

SEQ ID NO: 72377 - DNA, 740 bp, Prunus persica
  Intron number 1 from transcript ppa010172m (locus ppa01017 2m.g) derived from phytozome v7.0 (chr-ID scaffold_1; pos 19070522 to 19071261 reverse strand)
gttatcagccacaaccctgataacgatacctccaggtctctctctctctctatcatccttctgttttcgtttgataattatatcctaagaacattaattaataattacatcgtatttgatgaaatgtagtttgctttcaataatgaagcatgaaatatgacatttttattgaaaattcccacttgggtatgttcatttacagacttgcagtcttaagtagctagtgttttgtttcttggattttgttgaattagtggtgtggctatgaaccaatataattagtagtaagagttttgacttgggttggattatatttgaattttagtagttttgggtctcaaccaacgtttcattttattgcaagtgtgtgttatgtgctttttcttatattgagattatgattgctttatattcttgtcttcactttctacctgtgcaggctttggtttatactaatccgatttgatcattcgatttttgacatccattactgaatgtacttttcagtttagcttgtcattagcttctctgttttcttggtcaaggtcttttacttgaaatgttatgcattgattatcttaaggttttatgttagttgtgtttgtacaaataatggatggtattggtgtgacatgcttgctgcgttacttttaaataacacggtgagggactaactcattctgtctgtttacatgttcttaacaggatcaagcttccttctggtgcgaagaagattgtgc

SEQ ID NO: 72378 - DNA, 1001 bp, Prunus persica
  Intron number 2 from transcript ppa003653m (locus ppa00365 3m.g) derived from phytozome v7.0 (chr-ID scaffold_5; pos 13364800 to 13365800)
ccgcttcctcgggagtcaagttcactgagcctcaggtacattttggttttagtttctatcagtgattgaagctttatcttgctaattttcatttgggttgggttgttgtttaatggtagactgtcagatttctatgaattgtagcttggttcatggtagttgagctagattttgctgtctgctttccaaagattgtttttatgcgtttggatgtgttgtctacttcgcctttgtttggccacgctggttcttgaattcatgtggccctggttgtcttttttgttttgcttgtttttagcttttgatgttacctgggaccttcctttctaggctggattgggtcccatacctggtagtttgagcttccagatttttaatttatatgcaaagggcaagtcatatgatggggtaggtaaattcagcaaaattttggtttgctcacatcactctattaaacgtagataaaaaggtgggattgcttcgaagctgatgggaagaaaggaatttctttagctttttattgttttgattacatgggaagaaagaagttgaatttaaaattccattatctgcagcttaagttaactcgaaactcgagtgagatcaacattgctcaaatacttggtttagtcaagctctttttttcatttatttccttttatctgaaggaaaggaaaatagattaaacaaacacctgtgaggtagttatgtcaaaattttgttcacaaaagattaactatttcacttatgttacaaaacaattgataaccattttagataatatatgggattaaatgggcacttgaaaaaattaatgaatgggcttagaattgcatcttacagaaagtaagctagcatctttattggtaggcttgtagtaggtgacttcctgcaccatttgaatctgatttgtccagctcttcattgcaaatacatagaattttgacattgaaaggctgatttgtttctcaagatattctctatggcaggtcaagtgctat

SEQ ID NO: 72379 - DNA, 646 bp, Prunus persica
  Intron number 1 from transcript ppa002649m (locus ppa00264 9m.g) derived from phytozome v7.0 (chr-ID scaffold_5; pos 13220829 to 13221474)
gccatttttattcccagttaaataaaggttactatctatctatatattattttatatatatataaagcaaaaaacacagaatgatgaaacattcaaaatgccagaaaatgtcattggttaatgtaaacattaagaattgaaattattgattaaataaggataatgtggtatattcgcattttttatattaaaaaattaaaattaaaaacaaaattagatattatgtcctacttttatggaacataactactcatgttatattttcttaattctaaaaataaataaaaaaatcaacgcatgtgccaaggggctagtgaaaagaaaaagagaatgtaataaggggtaaaatggtatttttgaattttgaattttttttaaaaaaaataaggagtccattttggaaattcaaataaaattataattgaattacccattttagaattgaaatggaattacaatttaaagttgaatcacccattctttttttatggtcgtaaagttgaattacccattatagaattacaattacaaattatgccccttcacgtgtgcacgtgccgtaacagcgccaaaggcaagagaccatacacaaactagtacgagccacagagagagagagatcactgcgaggcagccgccggagaaa

SEQ ID NO: 72380 - DNA, 572 bp, Prunus persica
  Intron number 1 from transcript ppa003773m (locus ppa00377 3m.g) derived from phytozome v7.0 (chr-ID scaffold_6; pos 8438813 to 8439384)
ccactgtctggcttgcttgggacactcggaactcggtacgttatctgtgttttgatgtgaagctagttgtttagttagtgagaaactgagggaaaataaaagagtagaggaactgagaggaaaggttgtggaacgtatatttcatttttgttcggttctttggaggagttgggtttaggaaattaaaagagaggtagagatttgtgaataaatgcaataaatctacaaaacagtttgtttgattacgaaacgaaaagaaaagaatagtaagaaaatgtctgtgcactatgaaaattcaagagaagagtaaaagaaaaaacaaatcttgggtatgacgcaagtcctcaactttgtattatatttctcgttttcggaataaagcaatgaaatttttttattcattgcactaatagctcttagtaatttgaactagtttctttatctgaattgttttacctagcatttaaattgagattctctgtcttgtcatgtatgaaaactaaatgagaacttacctacagtttcattgttcaaatctttgacaacatgagaaattcattgtttgtagcgtt

SEQ ID NO: 72381 - DNA, 581 bp, Prunus persica
  Intron number 1 from transcript ppa003402m (locus ppa00340 2m.g) derived from phytozome v7.0 (chr-ID scaffold_6; pos 4328015 to 4328595)
gttcaaggtatatttgaatttccacacactattcaatcttgataacttttggaaagaagcttacttgagtcctggtctaaagtatatttccatatcactagtcccatgggtcattacaaaataatgttgttttgatatgtcacactttgatgaacatttatcaactgttgataaatataagacaattcgataaacgtcaatcgttgatgtatatataagacaatttgatgacctagagagtgtccttggcaaaccaaaagccccaataaaaattgaaaaacgtattgtcctctacctacagaggaaataaataaaaaagtagtacaagaaaacctcacgttggaattggattaaggttgtaatagttttctattcttgatttccaaacggtcgggcttactcttgatagaccaaagcccaaagcccaaaatccaaccaccggtacacaaaatacggggtttacctcccctgctaaaacccggaaccctaaaccctcaaccatctctctgcctttgaatcccaaaaacgaagaaatgctattgttagctcgaaaccactctctctcaaagctaaaacccctc

SEQ ID NO: 72382 - DNA, 964 bp, Prunus persica
  Intron number 2 from transcript ppa022484m (locus ppa02248 4m.g) derived from phytozome v7.0 (chr-ID scaffold_1; pos 25920752 to 25921715)
cattgcccttttcaagtaagagttcacttgcaaccctctgcaattcgttttccgatttcgatttcaaaaaggcaaattttttactgtgtgcccatttggaattaaactcctaattagacttccaatggaacagtgagatttaggcttccaatttcaatttcaaaagtccccatttgaaattgaactcctaattatgcttccaatggaccagtgagatttatcatttatggcatagcagttgattgtgcttgtatcttgtattatattttatttttagtaattgtcagctcctttgcatgttctggagtaagataaaaaatgtactatgcgcaacagagacacttttaactttgaggttgaagaatgtaataattagtctgagctcaagcttttttggacaggtgtttttgaattaatttgagttgcttctccatgcatctcgtactcattatctataggttgggagtataatttatttcgttttcacttcaggatccagcatctttgcaaggtggagcatctgtcatggatgcactcaaaaagagatcccatgaagtgccaacatcagataatttggtgagttcataatcatggctatctctgaaataccctcattggagaaaatgaagaacaattgttgtattcttatttttgactatctaccagtaaaatttgttgtattcttgagcgtttctatttctttatagacaataaagatacattatctcgtgtgtttctgggcattttctattttgtttcttgtttttccctattcaaatgttcagcttcttctgtattgttaattgttttggtttgcgtataatatgatataacaacaacttaaagacgttgtaggttgattttgttctgtgccttgtgcgtcagatgcattttgattttgctgctttagtttctacttgtttcaatgctttgcaggaagtaattggttcaccttccatagcag

SEQ ID NO: 72383 - DNA, 961 bp, Prunus persica
  Intron number 1 from transcript ppa005334m (locus ppa00533 4m.g) derived from phytozome v7.0 (chr-ID scaffold_7; pos 17158517 to 17159477 reverse strand)
cgtgctgttagtctcgcacgagctctctctttctggtgctgtctctgtctccattattttattgctaatttaatgcattgttgatgtttcattgtgcttcaagttattgattgcaatttcagctattagtggtgtgattagttatgttgagcttttgatgacttagattatacgtacacagaaagttagctacttaagatggcgaagacactcatatgtaataaatttttgagctactgggtttccaaatatgggatggatttttaaaacccattcaacaataagttcttgtgccttctctccaccagtcacccttagctttggctttttaatctgggtgagaaccaaaaaaattttaaaaaaattctggaatttctcagcaatgtgtaactgctcgacatgaaatttctgtcgtcttttgaatatttgcctatttattgggatacacttgtttttgtgtcttcgacactaacttactgcatttaatgtaatatcacgtaaatgaggaatatttccaaaaattttgtagtacacagaccaacattcagtaatgttcatattggatgaatattctgacaggcgtcaacagaccaacattcagtaatgtgcatatgttccttctgttataattactttattcgttggcatactgaaataacatggaatcgtatgtacattggttttttctaggctagcataactcatgaaagcttatcgccttccttaaccaaatatttggctgaagatatattttatccaatcaatttatgctctttgtttctctctattttggatcatattttcataaacccctttctcctaattattattttttctttttttaaatgaaaagagctgtcttgtttttcttttcattttaaatttttctttacatatatcttacaaactctactggtggtatgacatattgaacattcttccaggtggacctttgttgttg

SEQ ID NO: 72384 - DNA, 499 bp, Prunus persica
  Intron number 1 from transcript ppa017619m (locus ppa01761 9m.g) derived from phytozome v7.0 (chr-ID scaffold_6; pos 4594503 to 4595001 reverse strand)
aatttacaagacttcacattaaggctctaattacggtaatgatatctatctataattcttaatttacgtgtggggagatttaagacaaaaacttatttatttcattcaagttttttctttcatcgcatataacacaagaagaaactatatgggaaaacgtatatatagaacctatcgctatgagtttgaactttggaggttttatatgttgaagaaaaaaagaagattgataattaaatcttttgagaatacttatagagataatcaattccagtcgttgattcttcataatgatttacaactttgcctctcaatattcttggtgtatgtagaaatgtattctgtgaagtcaaagtgcagatattgcattggtatatgagttactttgccttaacatgttgccttgacaatgtattctagatctaggatgatgttttactttactaaaatcaacataaatattcttttcaggatttattcacggctggaactgacacaa

SEQ ID NO: 72385 - DNA, 947 bp, Prunus persica
  Intron number 1 from transcript ppa004833m (locus ppa00483 3m.g) derived from phytozome v7.0 (chr-ID scaffold_4; pos 10117121 to 10118067 reverse strand)
ctcattctcggtcagtctctttataacttttctgtttggttgcctagaaagtgaaggaaaacgaagaataaaaatgaacaattttcatttatttcggatggaactattatacgtctttaaatgataacttaacggtgagtgccgtccatattataatagtgtctttgcatactccgtttttgtgactcttaattttttttaaaataaaaattatacctttgaaacgtttccaaatctcgtagttcctgaaccttctacgagtttatgatttttctttttgtatttaaagaaaataaaacaaaattctttactttttctgtacacaactttttcctttggatctcagtggacataataaatcttgtattgtgatacacagtggatggagagttgtatagctttataaaacgaccccacttgtccttgttactctctgtttgctcctacacctcgtccttataaccaacttttgctggaatatgtaatctagaatctttggactgtgtttgagttaataatcttagttcagaaggaaatttattatggaaaaaaccaaaaagaaattatttaaaaacaagaacaccaaagggacgattcctgtagtgttaattatgcagaattagccgttttcatatgtaaagttggaacttttatgttatgtgatggatccatttcttcagtaccttaaaccttcacatcagtcttagcaacccgtgttgggttgttgttgttggggatctgagcaattatctacaaaaaggataggatactctaatttttaccctttgtttctttttacccctattttgatggtttacttaagaattaacttaatccgtaattggaatcaaaataaggagttgaattcctattgcggatggcttctgatatgctttatcatattattttcagtatctggactttccgggactacagaaactgctcaa

SEQ ID NO: 72386 - DNA, 517 bp, Prunus persica
  Intron number 3 from transcript ppa005360m (locus ppa00536 0m.g) derived from phytozome v7.0 (chr-ID scaffold_1; pos 22032050 to 22032566 reverse strand)
accacatcacaggcacgcctcaccaatttgattattctgttaattgaaattttatttacattcactatatttgaaatttctaattttattagcaagtagaggtcttgctagataagaaagaaaaaccctttcgcaaatagtttaaaaacagcagaagaaacacaatttgttttactgaatttcaagtcaacttgtcttcctatcattttcctttgttctttttcccaaaaagaaagagaagaaaatattcttttttttcttctccaaagttccatttgaaatcttttcatttctttttgccaaagattcaaaataatattgcatgatgaccttgcactataatttttcttagttcactcactttaccgatatgccatgtgtgatgcgtactgttgatggtttgtatttttccttctgagttgacaaaagttcacctttacaggccatctatgatttctgaactttgtccttgttatctacagccagggacaatctgctgttcttgcaaaattggtta

SEQ ID NO: 72387 - DNA, 625 bp, Prunus persica; identical to SEQ ID NO: 71851
  Intron number 1 from transcript ppa013146m (locus ppa01314 6m.g) derived from phytozome v7.0 (chr-ID scaffold_8; pos 19956870 to 19957494)

SEQ ID NO: 72388 - DNA, 732 bp, Prunus persica
  Intron number 1 from transcript ppa000531m (locus ppa00053 1m.g) derived from phytozome v7.0 (chr-ID scaffold_3; pos 12471243 to 12471974)
ttgtcaagcctggtatttttgtggttctcagatttctttttcgtttggttcctgaggaagtgtgagagaaagaaacagaaactaatgattttgaatgtttaagttaattggagttcagaaagtttccttctttaagtttcttcaagttcaagtgcttggtaatgattgtctagtctgttaattttctgcctatttgatagctgaaaaatgtgcgaagtgaaaataaagggattttctctttgggacaggagtaaaagagtaaatcttgtctttcttggatttgaagaatttttagttacggaaagtattgctactgtacggtcaatatttaccttgtgagaaattggattgttgcttgtccatggttattatgtttactgagaaaatgggagtttgatagttgtatttcgttttctaatattaaatttgaaaatatcgatggaaatgatttccacaatcgatactggtgcagaacttgggtttttaattcaacaaactaatctggagtctctgtaatttatttatttatttttaaaatcagataaaaaaaatgtaagaaaaaatgtcaaaacttcaactttcaattgtgtaataattgtctggacagaacaacatttagttccttttcttttcctgtcttttcaactgaacctgatataaggatcttcaactgctttgctatccttctaattctgtttctttggtactgtaggacctgtagttgcagaagcc

SEQ ID NO: 72389 - DNA, 621 bp, Prunus persica
  Intron number 1 from transcript ppa001696m (locus ppa00169 6m.g) derived from phytozome v7.0 (chr-ID scaffold_5; pos 842088 to 842708)
catctcctggtacgatctcttatttctcactcccttatgttttgcaaatggaggattcacttatttgtttatttaattttcaaacaaactttactgggataccaaatgactggtaattagggcagatttagtgctatgcgaagaatttgatgtttgtagctctgttagagacagatggtttggaagattttttatgtttgtagctaatatttgtagagttaaaaagaggtattacttgcgattaagaagcagaggtctagtgctgagctgggaacatgggcaaaggaaagaagctgtttttttttcttatagcacaaatggaaatgggcatttggtttagaatcaggctagtggactttatatgaacacagatgtcatacagtaatctactcctttctcagataacatgattgcatactttgatccatttatttgatggaatgtatgatagataattaattatatgagataccatgagttatgatattcgtaatttcaatgatcataatagattaaattttcttattgaagatgaggcagaaatttgaactttgaatcataattatcagttgtatgaactatgcaggtacacaagtcaaacttggaagggcttctacagaa

SEQ ID NO: 72390 - DNA, 768 bp, Prunus persica
  Intron number 2 from transcript ppa018621m (locus ppa01862 1m.g) derived from phytozome v7.0 (chr-ID scaffold_8; pos 947248 to 948015)
ccaccattcgcgaccgtacttgtttctcattttgcttcgtgaatggttctctttactctgctatgaagatgtcaaagaatgactggatgttagggtcatttcctgctttaacaaggtgatttgcttaatattaagttgacacttgatcagacgttgtgggaatttaggtagagctacaaattttgattttcggggtcaataacaaaaatataattttatggagggtattctttagtagaaattaggatagaggcctgcatttaaaccaaagtcaattatcttagcagattcttcataacccttttagctcagggccaatttttttaatctattatgaataggctaggcacccatataactttctccttgatcaacacaaaagcctcttggctgcttccgttcacatacataaaccttctgcctttcatccatggagatgccatctttgaacacgatatactgtatgtaaaaaagaagcatctagaaaatgctgcgcgcaactttccctctgcaaaactaagagcacttaatgtacgacatcttataagtacaatataagagaacaaacaatctccaatctcctttgaaacctatggttttctaacatatatctgaaaagcttatagtcttgttgatttcctaagagtgtaagtttacttaaaatttctacttatgctgataccaatgaatttgtttctatactagcagcaatgcatataatgttttcctatgctatgtttgtgtcctgcaggagtcttctatctttat

SEQ ID NO: 72391 - DNA, 1040 bp, Prunus persica
  Intron number 1 from transcript ppb013468m (locus ppb01346 8m.g) derived from phytozome v7.0 (chr-ID scaffold_7; pos 3099989 to 3101028 reverse strand)
tttgagcttgaagacaacaaggttaggacaatggaaaaatcaacacgggacttgacttggggacttgggttgcaacatatatatatatagatgtatgtatataaataaccagattgccctagcaggttttgttcttgagattttggaactgtaccaaactatacaatgagtaaatctacgaacaatgatggttgggtaatcaaaaagcatctaggacagccatgtttcagagaaacaaaaacagagagagaagtatctgacccaaaggccaattgaaaaccccagaccaagctagggagaaaacaaaaccttgccaaaaagcaggaagagacaaacccaatacaaatctaggagcaaaactctctccgtctctctgtctctcccgtgtcttcctcctaaagccccaagaacacaaagcccccaatctcatagaaaccaaaaaactaatttcataacatatataaacccaaaaatcataaatgtaatgaaaagatgaactcactgatgagtagctgattgctgttagcaattaacttccttgattgagacaggaattttgaaatgcagggggaggaagaagaaaagtgagaagagcagtctgactttgagagtgaaggtcacgatatctattttgtgagagggtcaaacgttgtcattttgtaaaatatttaggggcattaaggaataccgaagcccattccaaaaagaggatattagtgaaaaaaacatgtgcgccgggggcaaagccgcgtattttgtaaagggtaaactaccaaaaactctcctagactatattgactatcgaaatgtaccccttggattattttttcagccaattcagccttcgaattaaagaaatcctcaatttcacccatgccgttagtttttccctaattccatctaaatacccgtaaaaaacaccacgtgaaaggcacgtgagccgtctgatgagggtaatatcaccattctataccctcagccccctttgactgaatcgttcgtaaggtcaatttccaaatcagagttagggttttcgaaaa

SEQ ID NO: 72392 - DNA, 869 bp, Prunus persica
  Intron number 3 from transcript ppa002492m (locus ppa00249 0m.g) derived from phytozome v7.0 (chr-ID scaffold_1; pos 45604576 to 45605444 reverse strand)
gtttacccacatcctctacaatctctctcctgctggtaattttttaattacatgccattcatcacagtaatttactattttcttctaatatttataaagtattctagactggtaagaataaaaggaaaaaaactgatccatcaatttgaaatttaaaacaatttgataaaaggaggataaaaagtgacccaaattttttgtaaaaaggaaaacaattgactcaacatctatgcaaaattgatgacaaacaatatattaaacaaattcagcacaataaataagacaatcaaaatacaacaaaacctataaagcataccaaattaggggtattttaagaatttgaaaaataaaataacatttaagcataagcatgtttacttacggagtcatgaatcggataacttaagaatttggaaataaggaactgaaatcgaatcaactactctccctagttgatttgatttcttgtttgaagggtatttaattacgaattttaccatggaactacccataatttttttatttcgcacgtgtaagtaagtgcatggaaaatcattataatactcattactaataagtaaacataccataagcttacttaggtattttcttagttgaatcatagtcatcgaaatttgccaagaaaaaaataatactagggactataagtaagaataaagtagtttgaaacgactataggtcataataattgatgacagaaatatagagtagtggatgaaagataatttgacaaaacctctgtttttatttgaattaatggaattgggtttaaatatatccaaaatttgattaataaatagagttattttacagaattgtacgagcaagctatcaagtacgagaaaggt

SEQ ID NO: 72393 - DNA, 679 bp, Prunus persica
  Intron number 4 from transcript ppa005459m (locus ppa00545 9m.g) derived from phytozome v7.0 (chr-ID scaffold_2; pos 20335006 to 20335684 reverse strand)
cttcaagcttgcgcgaacgaacaaccgtggaggtatatttctatctttaatcgatcccttaatgtcagttttaacacattggacttatctgacatctttcaattttagttaaatctcattatctcattatttcataggtaaaattcgtgattgtgttcatattcgtatgttaatcccaactttaatattagaaagatgctgaataacttgaaagttctgacaaaatttttacatttttctgcacacatttagtttaatgtgatggattcaacatccatgtttcatgcatctgcgagctttttcacaacactttccgtttggattgggtttttctttcatatgttttttccccagcactattttccccatacccctctattttgtcagaagtcaaagatataggagttattctgccattggttcgctataaatatcagctggattttatccttagcctagcaattccaaagtagttgtgccttacttgcagacttgtcttcaagtttagtatcagttatatgggtttctaatattactgttatcaaatttgtttatagctcagaaataatgtcatgattgaaatgaacgttttaaagtactacttgttgttctgtggcttgacttattgtatcttctctatacaggtttgctcactgctgtgcgaagagactgctttagg

SEQ ID NO: 72394 - DNA, 726 bp, Prunus persica
  Intron number 1 from transcript ppa002375m (locus ppa00237 5m.g) derived from phytozome v7.0 (chr-ID scaffold_1; pos 41570135 to 41570860)
tggtgccactcagctcttcttcaaccacttatgtcagttcttatctgttacaccaattttcttaattcttatctgttacaatagtttttaagatgtcttctttttcaatgatctggtttttgtgtcttgaatatagggatgattctgatttctataggcgttttgattttctctcctcttctgggtttggggctagttcaataaatttattgggttggcatgtaaatctgtagtattggttgaaaagtaattcaatttgttttcgtatcaaattcaaaaaggttggtgctttggtgtctggctgaattgtttgagtatttgattaattacctaccatgttcctgtttgggtgatttactattcagtagctgttgacagtgttgaggtttcttgattggggcaaaaatgctatttgattgtttgtattttagtggtcctttctcaccaacagtgggaacagattcagttatgatttattcattaagcctaattgaattttttaaagtataaaaagaagaattttttaactatcaacatttttagttacaaggaacagaatttgtgtgttctgtctaaggatccttctgttcttcatttagttaattcttgtatttccattacacggttgaggaaatcaaagtaacaaatcagcttttgcaatttaatgcttagtgctatctttatatttcagatcctatatcactggttagggatcaccgggccaag

SEQ ID NO: 72395 - DNA, 219 bp, Prunus persica
  Intron number 2 from transcript ppa005779m (locus ppa00577 9m.g) derived from phytozome v7.0 (chr-ID scaffold_7; pos 14713475 to 14713693 reverse strand)
ggctagagctgctgttccaagtggtgcatccactggtatatttctctgatctgattttcttttggttcttcgaaatcgaaaggctatgattttgattcaattgtaaaatcggaatttagggcctagcagtcgattggttagtatgcttattgtcaaacactcattatttattgttttttaatcaacttataggagtttacgaggcccttgagttgcgtg

SEQ ID NO: 72396 - DNA, 463 bp, Prunus persica
  Intron number 1 from transcript ppa001857m (locus ppa00185 7m.g) derived from phytozome v7.0 (chr-ID scaffold_6; pos 4445916 to 4446378 reverse strand)
cttccgtgagaaagggaagagccttagcttatcaggtattgtttggattgtttgcaagtgctgttcttgtcgtctttcttgcgatgctatattattttcatagtgctatgatcaaaatatgttcctgatttatgtacccttttcctactttaccttttttatgtttgtacaatgtcaaacttctctaattgcctcttcccgtcctaatatatttaagactttcaaatttatggtttggaggctcttgttgccccagttgtgggaggattaaatattgctcttctagtggcaattcatggtttcccttttccattgggtaataaaatgctggtccgtgtcttctgtgtgaatggttcacatggaaacctcccattccaggtgccactaagtgatattactgcctgtttggtggtacaaattttgagcagactcgggtggatcaaattacacaacagctgaaatc

SEQ ID NO: 72397 - DNA, 892 bp, Prunus persica
  Intron number 2 from transcript ppa012976m (locus ppa01297 6m.g) derived from phytozome v7.0 (chr-ID scaffold_3; pos 16250614 to 16251505)
aagctgcccacatcaacctcaaagtgaaaggccaggtccttatttcttatctgaacttcacccatctgtgttctttggttgttttttctttttaattttttttaattttttttttccttgtgttgattgtaattttggcctctcatgagttcttcaagttttgaattttaagaattatttgaagttaatatgttgcatgttcttttggccttttaggggtttttttggcaaaatgcctgcttatgtttttctttcctttttttattcataaagactatcagtttaattttaatatgattcagattgtatgatttctgagaaagctgaccgcgggaaagaaaatgcataagagggttgttgtttttcaattccgacagcctagtttttgtttggcttaaggtatttagattgatataatgattaggctgtgtttggttgcggttttatgcttatatccgtggtctataatctcttgtaattccggctgtacttcatttacccttttattattttgtaatactattgtttttattcttgcccattatgatgattttgcttcctaagtaattgaattgtgtgtgttcttatctccttgaagtatgtttgtcattgttctatattgtcttttgtcatgataataagatagtgggtgatttgtttgttgagttgcatttagttccatttatttatgtctccatcccataactttaccgtctcgtgttcatttaattccatttttgcaatagagtttgagattttcttcttggtaattccaaaagtattgcatcataatctacgaatttgtttgtgagtgttatgctctgaagatagagattttgtcgtgaaaactttggtgagcagatgaatgatgattttgtatttcatttgcagg

SEQ ID NO: 72398 - DNA, 357 bp, Prunus persica
  Intron number 1 from transcript ppa009611m (locus ppa00961 1m.g) derived from phytozome v7.0 (chr-ID scaffold_8; pos 18726264 to 18726620)
ttgggattgaattcatttaagcttcccgcgccttggtaatttcaaatttcctaattttatttatatacatacaactctgtgtcatgtttgattttggatcaagtttggttttttttattttttattctttgagctgggtaccttaaggaagttgctttcagggttttgattttgattcagtaattatgaatttggggattcttttgggctgtgggcaattggggtcttgaattttcgttgattagataacattaaatgctcatgtatcacgtttggttgaagacaagtttctagagggactcctcagattgttattcatttgatgcttttcttgatggcaggtttatctactctttt

SEQ ID NO: 72399 - DNA, 1010 bp, Prunus persica
  Intron number 1 from transcript ppa010978m (locus ppa01097 8m.g) derived from phytozome v7.0 (chr-ID scaffold_1; pos 12377775 to 12378784)
ttcttgattctctcgctccgggtctgactctaaaggtacgttgtttttgcctttttgacgtatgttcttgtgttgaatcttgttcttcttgatggataacttctgggatttggattttcttcatcgtttgattcgtgggtatttgtttgccagttgcatctttgcttacatagaacgtacacgtagttggagattatatcattattgtttgatcgattaagaaggaccccaattgattagattaatgaaataataaggggttaattttattttttggtggcattcggggcctattattgacttttagattgtgactatgagattttgtttgcgtagaagagttctgttgggttgtttaggtgtctttcaaaaatttgtgtttgatttggatcaaattcgacttggtagcaactttgaatacctttttgaaaccatagggggatgatcacttaataggtttatgtttccccatatataaaggaaaacattacgcatattagaacatttttactctatcgttttacttcatgaggtggctgcttacatgactcgtcaaacgttttgttcacacccatcagtgtatgtgtacgccgctgcgtggggctctgatgtcatggcatagggctgctgtgccactgagtaaaacatttaggaaaaaaagtttaataatgaactgcttatgtgctatatatttgttttgtgctacttgagttttttcttatttccaaacaaaaggaaaagagttctcctttggaattatcctttttttcttccaagttgccaactaaatgaccctgcagatcttgtatattattttgtttattggagatgctgcagatcttgtagttgtttggtatacttgtcatgcctgcattttggtttatttgatcaatgcttttggtttttaaagattttaagttctttaaagtagagcatgtagatttcctttgttaacaaccagtattcttcttctttctggatgtgtaggattttgaccttttcacggtagc

SEQ ID NO: 72400 - DNA, 1043 bp, Prunus persica
  Intron number 1 from transcript ppa012077m (locus ppa01207 7m.g) derived from phytozome v7.0 (chr-ID scaffold_6; pos 20733428 to 20734470 reverse strand)
ggtttgtgggaagcttttctcaactggctccgtaggttagctcctccatctctttcttcaattctcaatctttttgggttgttatgtgatccagttttcatacatttgtctcgggaatttgggactttgctctagcttatccttgtgctttgggtttaaaagtagcaattttgaatgaaactttgatttcaagttgttaatttattttgcttgaatgcttattggctttggtttttgtaaagagatgatgggaaaggaaacccaaaagaaagaagctgaaaattggctccttttgctcctttttagtttttaccaagccttttgttttttcccccctggaattctgtcaatgtctttttgtttgataaccaaacggatattttaaaagtttttacttgcgggtttgcttcccttttgctatttctgcccagaattttcccttttgatactgtagattctggattgtgtcttttggctaggagcctaggaatgattgctgtttatttgtgtatatatatatatatatatatattttttttttgctttggtttgaattacagagatgaattaggcaccaagttttgtagatatatgcttgaagcatcgtgatggttgttgtagaggctgttaatgtgctttatgctgctttttggcattgaggcaattatagtttccagaatttgagacagatgcttgaatttagctgctaaaggattggtagagggaaacgacagttggatttctgatgttgcagaatgatagaaattagagcttttttggatttagcaatatcatgtgctttgaataatatcactttatacctaccaaatgcttgataagtataaaactctctctctctctctctctctctctctctctctctctctccatatatatacccttttgtgctattatggataaatttcgggcaacattgtgtgttctatatttaaatttgtttgtcttacctcaatgtatcagtgattcacactgcctacacttacgttattgcatgtgattacagcctctttttcaagcaggaa

SEQ ID NO: 72401 - DNA, 935 bp, Prunus persica
  Intron number 1 from transcript ppa007691m (locus ppa00768 4m.g) derived from phytozome v7.0 (chr-ID scaffold_6; pos 27960398 to 27961332)
gtgggttaggtaggtaaggtctgtttttggaattttcttccatagtttagtgggttcttcttggccttacatcatatataaaggttccattttcaatcattcaacaagttttctgaatataattaagctgtctgtctcggattgcaactcaactttttcttgtaagctccttttgcatgaagccttttcttgtaaatcccatgtcaaattttctgtgctgtatatgtatatgttgatgatgattagttatttttgtgggttttgtaagtaatttgcactaactgcggctttctagtttcttaaactctgcagtgccacaatttaaggaataaggggatttctttctttcggcttagtttgttggagagggaacttcgcttgcatatctctctctttacatgtaagcttagatgccttgaatttcctgaagactagttcaaagttgattggaatggtcgtcttgtgacttagaaatggattgaagtttggaaatttttaattgggtcctctgttttgaccataaaaaaactctcccattagagtagttagattgaatttcgcttgaatttagggtcaacataaatgaaagtttttcgcatcagagtttttctattttgttttattttgctatgttgatgaagggattcgttttgcatcggaattttgtttttttgttgcttccaaaaccacacttctgtttgccataatttttcaaacaacagagttctgttctttttcccccaaattcattcatactactaattgatcattttcgtaaagtacctaacaatggtagccgaaaacaatttctgtaagtattagtttatatgtctgcatttaggaatttgattatgtatttctgtccgggcaatagattatgaactgattctgtgtctctccttttgttcaattggggcttagtttcttcagcaaaa

SEQ ID NO: 72402 - DNA, 613 bp, Prunus persica
  Intron number 2 from transcript ppa007691m (locus ppa00768 4m.g) derived from phytozome v7.0 (chr-ID scaffold_6; pos 27961772 to 27962384)
caaagtaaggattatcttattacaaaaaataaaataaaaaattaacacacatttagctatcttgcttgttgcagattacgatttgctaaccacttcattagtttgagtcattttatataatatctggtagactcctactttgtgttccatgactagggggtcattttattttattttatttatgttattggcctgagaaatgttggggtgggagggatatccttaatttcttttctcagtcccacttgcatatatgtagccaaagttggctcctgtcttttctgaagaatcttttatcaaccatgtgtttgtttgttaatgcccccacacccacgtgttttggggcctgacttgacttccctgtatttggataattaggaagagattatcatcctgcttacatataacctgcaactttttccctaataaatttaggttagtttatttctctcagatattataaaactaattgaaaccaacctatcaaagttgaagttggttatgattatttctcctaaatcagttatattttgttgcttagcctttgctctattctttatcatttgtaaagccttgtaagtggtataattgccaaatgcagctgcggtggtag

SEQ ID NO: 72403 - DNA, 872 bp, Prunus persica
  Intron number 1 from transcript ppa006306m (locus ppa00630 6m.g) derived from phytozome v7.0 (chr-ID scaffold_6; pos 18315911 to 18316782 reverse strand)
atttgtctccttatcagtccattttgccatttgaggtatttcaatctaagcgcatccttttccctctttgaatcgatttgaagtctttttttttggagttttggtgaacgtttctgagaaaaatggtgaatgaggtctgagctagacttgataatgcttgatgcggagttataaagctcttgcaatttactttttggtgaaaattgagcttatagataattttctattttgtgttttaattgtatataacttaaaaggatgcaatggctgcatataagtttctttttgtttctctcgattcagttgtctgtataatgcatcttatttataattcaagtttggcttaaattagccagaaattcaagtttggttgagaagtaattttctgtgaactaatatttgattttagcatctgcaatgcataattaatattagtcagaaatttttgaaaaatttgagctggagtagcctgttcttaataaacctggattgagtgccaaagaatctcatgcttgcataatatattttcttttctgcttcaatgtacctgatcttgattaatcttaaatgttatttaaacaagtaaaagttaggtctttgtcccggtggggatctttctctgctattgtcgatggtattttcaaaaattagtatttatgcagtctgctaaagaaacggttagtctggactttctttttgtttcttctgattccggtgaatatgtatacataattggttccattatgatggttgtgtaggttgaattagacatctctcaataactatttcaattcgtaaatttctggccaactagtgactaagtttctttggctacaggttttgtcggcccaacttggaaggaagcctgagga

SEQ ID NO: 72404 - DNA, 721 bp, Prunus persica
  Intron number 2 from transcript ppa008328m (locus ppa00832 8m.g) derived from phytozome v7.0 (chr-ID scaffold_1; pos 527989 to 528709)
acacagacgatcatcttcaataaaacaagctgattgtgagtatgagagtcttaagaacttttatgattttggtgctttgattctgcttcagattttctaatattcgtatcattatctaggattggatcatgtattatgcctcagaaattaatattgttttaatgatcctctatcttcaaaacttgccttgcctgagctatataactggaaaagaaattgtaaaatatcttctttgagattcagaattcagattgaacatcattcatgtccactattttctcctaaaactaaacctctgattgtatcagttcaaagatttgaatttcttggttatacagccatctcacttattccttctctattgtattctaaaactaaaccctattgtttgtgccatttttcctttttctccagttcttcctctgctatctttgaatatctttgattgtaatattaggatctgatttttccttaattacttcaggctttgttcactgtagtttgtatcgaagtcataacccacttctttggcttttcttatgttgtacttcagttatgcgagacataattagtcatactgcagatattttggttttgtactactgatgtttccagtacttttttttcttattctatttttaatgcatttcttattttagttgtttttcgctgtcttgtttctggtgctcatatgagattaacttgatttcacattcagtgc

SEQ ID NO: 72405 - DNA, 691 bp, Prunus persica
  Intron number 3 from transcript ppa010905m (locus ppa01090 5m.g) derived from phytozome v7.0 (chr-ID scaffold_2; pos 16132084 to 16132774 reverse strand)
ggagatacctaagcctcctgctgctgtcaatagacgtgagtctttttcttttgtactataagcacaccacaacccagctgaggaaatggctttcttggtttacactacttttttcatgtttgctttagtttatatctcttttggcgtagtggattcttttttttttttctttctgaatccgttcactttatttggcctttttggtaaacagcagtctctttgccaatccagaaaaaagtttgaaaagagaagccatgctaacttttgaatatttgagcttactcttgaacagttcccaaggtttctagctatagcttggtgtttataagatcgagagagagagacaataatctttagcacacatttatttcatgtgcagctttcttctttcatgttcttccagatttagttctcagtctaatggcaagaattcaagcccactttagatctacaaccatacatttctcttctttccgctattcttcaacagtagtattcaaatcatggttctgatcaagaaaagatatactaattaagaacattgccacacagacacattaatatttttgacaagaaaaaaaaaatccagcgaattgattataatgtatatctgtctgtttttgtctgtctgtgaaatgtctatgtccgatggccagctccggagaagagacagagagtgccatctgcctac

SEQ ID NO: 72406 - DNA, 340 bp, Prunus persica
  Intron number 1 from transcript ppa026636m (locus ppa02663 6m.g) derived from phytozome v7.0 (chr-ID scaffold_8; pos 13425719 to 13426058)
ctctcctaactatcaacagcagcaccttcagcccggtacgatattgaagcacacttagcttatttggatggaattaagattcttctgtcccttgtcccttatctatcagctcatgctttttaatttgttcctgatttggtagatttagttgggtttctgaatttgaatatttaaactgatcaaaggtgtgaaaagactcaaaacccaatgtacttataatagcttctaatgtcaaatggtagtttttatctcctactatatttacacatacattacaagattaagagtaaaagttggtgatcatatctcatgaatttttcagattaacgctggtggctat

SEQ ID NO: 72407 - DNA, 442 bp, Prunus persica
  Intron number 2 from transcript ppa009610m (locus ppa00961 0m.g) derived from phytozome v7.0 (chr-ID scaffold_1; pos 4914837 to 4915278)
acctactccatcttgtggaaccctcaaagcatcatgtaattaaactaagctctctctctctctctctctctctctctctctctctcattttgacttgataaaattatttgtatcatatttactgataacatatctcactaaataagacctcgatgagatttagttatgtagttagtaaatgaatttcatctttgcaagacatgtaattagtgatataattagtaaatatggtatttataacataggaaatattttcttcaaaacataagatgattattttgatagtaaatttgaacctttgatcttgttgattttttgtatgaatatttacggtccatttttagtctggcattagcccatttagaattactcaatatttgtttgtatgtatcctaatacacttctatgctttgttcttcttgattaattagattctctgtgg

SEQ ID NO: 72408 - DNA, 578 bp, Prunus persica
  Intron number 2 from transcript ppa023502m (locus ppa02350 2m.g) derived from phytozome v7.0 (chr-ID scaffold_3; pos 3614916 to 3615493)
actttgctcttgcaactatttttccgtcgtctaaggtttgaatggcaactgggttacttttttttcaccctttatttgatttggcaattgtgacaaatggtttttctaagaacaaaaaaaaggctcagcagatgaattactatgcaataaaacataaaacatgtggcattagcgtgcgtctaaactctaaacagtaaatacgcattctccagtactgggtgactactaatatcccaaaggatgttccatatatgaacttgtttttgtaaaaggaagaggtcctaacttcacttctttactgtttgaactgtattgttgaatattgaaatggcatcctgtgatcagatcaaaaaatctaattattgaattcgttgtgtgcaatttgttatggaaacctttgttgattaaataaatacgttttttttaattgccttaggcacttcggagtttggatttccaatggttgattcatttgaataaattattgcgttacaacatctggggtctgcattttatttatttttattcatgtctttatctcaggttataaagaacggagtgcgattgtcttcacatct

SEQ ID NO: 72409 - DNA, 553 bp, Prunus persica
  Intron number 4 from transcript ppa006087m (locus ppa00608 7m.g) derived from phytozome v7.0 (chr-ID scaffold_4; pos 7289566 to 7290118 reverse strand)
agggagtggtgggaagacaaaggttgggatcagtaagttgatttaagttgtgctttctcttgcttgtcagtgggcatggatgatgtttttctttgtttagtttaagcttgttttcttaaatgttaagttgtttgtctattatgtcagtattactgctattcttcccatgaccccctttcattgtttttggatgctcgttaactaaataactgctactcttagtactgcttgatatatcaatgcccaactctctattttgaatcttaagtttatttgtctatgatttcaatattactgctgttcttcctattagcccctttcattgtttttggatgcttgaaaatcgtatagctcttactctttgtatattgctcgatatagcagtacctgactttttatattttactaatgcttagcttgtctttttgaaaggatgattttctgatgacttattcgctttagaaaatgaatttatagttggtatatgatgacaacatataagtactgaattcatgcaggttttggtcggattggaaggttggttctccgagta

SEQ ID NO: 72410 - DNA, 532 bp, Prunus persica
  Intron number 1 from transcript ppa006087m (locus ppa00608 7m.g) derived from phytozome v7.0 (chr-ID scaffold_4; pos 7290431 to 7290962 reverse strand)
ctgagctcgcggcctcgtcctccgcttctttcaaggtctgttttttacttgactctgctcccatggctgatcacccaactttttcgaaacggtctcgtagtcttccaaacatttgggaatttggttgtgttttgaaaacagaggaatgaaaaatgaggtcttgaataaattatgttttgttttttttaagcttacatttctttggctttttgtttatgattactgttgatttgtaccagtttcttttgcaaattttaaggctttaaatttcggctcgtagttcattttctgtatgctagaattgtttcttttatgtaaagaacagtttttgatattttatttagtgatttagttgagttttcttagctttaaaaaggtttgaattttttttttcagtttttttatgagtggaaaataccacaactcactaaaacaatgaataacaaatacacttttgtttcgctttttttgttaattctcttttatctgttattcaggtgtcaagcgttggatttggtcgcaatctgaactg

SEQ ID NO: 72411 - DNA, 1009 bp, Prunus persica
  Intron number 1 from transcript ppa017321m (locus ppa01732 1m.g) derived from phytozome v7.0 (chr-ID scaffold_3; pos 19028422 to 19029430)
gaggttagcaaccacattctatctttgctatttatatacatgtcgtccgcaagataataacgtctggacgtccacataggagaatttctatgcaaaatcagaatatttgtgtttgttgggtttacattgttcttgaagggggtttgaaaagttaatatttactcactgttatattgcttcaagtgaaatgtatttgcagcatatttactcttttggtaggttatctatgctttaaatgtccatggacagggaatatggttgccgacatgatgagaaaattatatgtgtgtatgtagaaaatttatgaacatgcttagttacaggtaaatactgtttatgcattctggcatccatgtacccttttatttttcatttagtttcagtttcttcttttctgttctgattctgaagcaaaacccaggtccctttaggtgtgccttcaatttttatacacagaaccgaacaaaaagaaggaaatttgaaacagggagagcccaccatcagggcctacccaatgccaagaaatgatgatctaactaccaatattatatgtaagctagagatatttaaaagtacacaactttacttccaatagctccaataacagatgaagagaaaaaaaaaggaaacccataattctctctttctccctctctctcctctctctctgaaattgaattgcatgtagcatacagacaaaggagccattaatgctttgagagcaaccaaaaacaaacttcaattattagccgtagccatttgcaccaattgtcagtatctaccatccatggcatcattcatgaccagtggttaagtttagcagaagaaaagctggagagctaggcatgcctggcatggcttaaagacaaaccccaattggccccatatacttttttcaactttaaatttctatattttattttattttgttttaatattgcaatatgtttaattaggtctaattaaaatgtttattttttatcaggccctggttgctcctctgtggcat

SEQ ID NO: 72412 - DNA, 571 bp, Prunus persica
  Intron number 1 from transcript ppa024640m (locus ppa02464 0m.g) derived from phytozome v7.0 (chr-ID scaffold_4; pos 20783017 to 20783587 reverse strand)
cctggggtagaaattgatcgatctaccttatggaagagagctagacaggacaaacatggtaacatccctgatccaaaggtggcagagaaagcaaaattaattgtaagcctactatcactctgttttaaatttttattaaactgtgaattattcttattacgtcgtatgttatattttgcgtcgtgtgaatgatattaccacgtcgaaaagtttttaaaaacgttgttaaaggtctaaataggaatcactactatgttttctgtaattatagcataagacgtcggtggttcattttcgcgtcgtgtgaatgatattaccacgtcgaaacttttttaaaaacgtcgttaacggtctaaataggaatcactactctgttatctttaattatagcataagacgtcggttgtttattcatttcgtcgttttaaataaataaccacgtcggtataactaccgtcgtgataagttataataacgtcggtttatacgttattgcgtcgtgtgaaattatataatacgtcgtttgtacataaataaccgtcgtgtgtttttttgtttatctttttttagg

SEQ ID NO: 72413 - DNA, 527 bp, Prunus persica
  Intron number 1 from transcript ppa002436m (locus ppa00243 6m.g) derived from phytozome v7.0 (chr-ID scaffold_6; pos 26813723 to 26814249 reverse strand)
atcttggttctggagagcttcttgctgttaaacaggtccatattatctattcgttttctgcttttttcagccttatttttgggttttggagttttcttttgttcttcacggctgttcattccttctggattttgtttaagtttggtctttgagtgtcaatttgacttatttggcttgttattttattttttctgggtttcaatttcatttgtttttatgttgattatatggatttgatctggagttggtgctggagctgtttcttgttagctctcaaaatttgggttttcctccaattttagttttggagttgattttcttaattatcgcaggttttggttaaatttttgtactgagtttgaattttgaatcatgttggagtatcaactctatctggattttccttgatttcattttacgatttccatagctagttcagtctgggatttggttcagaatataattttgatatgtgtgctggttctttcacaggttcttattgcagcaaatagtgcttcaaaggaaaa

SEQ ID NO: 72414 - DNA, 700 bp, Prunus persica
  Intron number 1 from transcript ppa006205m (locus ppa00620 5m.g) derived from phytozome v7.0 (chr-ID scaffold_2; pos 14128612 to 14129311)
gcaaggtaaggcttgattttgtggtcttaagttgttgatttttcggatagggtggaatataagcagttcatactgatgtgctaaagatttcgaatttgggtattttggaatgctggcctgtttggttgtaaagatagtgctggaaaatacaagaaattttgaattttatttatttttatacatttttatcaatttattagaaataagaagtactggcacttcaatcacattgtagaaacttgaaagaaagtgggaaatttttgttttttgtttttgttttggtcattctaagaatttgatttataacaaaacatgttctgtgataagcacatagcttgaattgaagaaagaatgaaatagaagggatatttggtgtctccaatatggagaaaacacaccagctttttcaattgtgtcccaatttgacccgatgagggaggaatgcacttacttgaagtagaaagtactaacagctacctagaatcactgaaactaacaacaataatgtaatgaggcaattggtttatgctctggtttggattcatgagctgtatcgctgacagtatggcactttaataactgaagtaaaacactgacccttgccgtatgctgtagttgtttctatcattctatgtctaaacgggctcaagtatatggtcttaaattttcttgcaggtgcaaataatccagcaaataaatc

SEQ ID NO: 72415 - DNA, 887 bp, Prunus persica
  Intron number 1 from transcript ppa007264m (locus ppa00726 4m.g) derived from phytozome v7.0 (chr-ID scaffold_6; pos 27669408 to 27670294 reverse strand)
tcaagtttcagaggaccaaactttgctcttttaaggtaaaaatctcaactgggttttccgggaatctctcacctactctgttctccgtgctctttcatgttcgttccagtattcatttcctcatacttatattcaggatttagtttgtaacatttgatgggtttgttttgaattacgtgtataacggccgttgtgaatgtgcttgattgataatctggtagtttgtatagcagggttttatcgggttgtgtgctaaaatttcgttccgttttatacactgagatgggtgcttgattttagcattcttgaagatttatttgtttatctgtgtaactttgttatatcttccattgggcgtatgtagtttaaatttttgtgataaattataatttcatgtttgttatactttctttacatgttaatttagatgttttggtggtaatttcctcctgcctattaaaagagctttacgtactgtgttaaattactctactctttttccagtttttctatacttctctttcaggggtaaaatttttcatcatttttaaagttctgtgcaatatctagtcagtggatgtgggttttaatttgatgattttgagtgtgacataaatgcaagcgttgtgattaagtagcagttctgtcggttagtgatcccaatctgtaaatttgggttttgatgttttcctggaggatgtacgttacttgagttgggttccttttcctttaatcattgttagtttagtagtgataacttttttgagctttgtatagcaaagctagtaaactgatccgtatttgattgtaaattgtaatactaaagtcttcattttttccattgaatctaatctcttcattttttccattgaatctaatcttgcaga

SEQ ID NO: 72416 - DNA, 345 bp, Prunus persica
  Intron number 3 from transcript ppa009036m (locus ppa00903 6m.g) derived from phytozome v7.0 (chr-ID scaffold_2; pos 22072534 to 22072878)
tggtaagctcatatcatagtgtttagagtgattagtttttccttctgacataaattcataaagtttgaactttaattgcttgctggttagctgtctttggcggtggtttaaattgtttgttagaagtttaagtgttaacacgccaagtcataattttttaaaaggaattttgagcagttatcagatagttttttttgttaatatcttcacttaattatttgacggatatcctagggaaaaaaatgattttattgtctagtgacaggtgtgccttgtgcactggggctgcaattttagtcattggagctgttatcctcttatttatttttcttcttctcatgcaga

SEQ ID NO: 72417 - DNA, 871 bp, Prunus persica
  Intron number 1 from transcript ppa013140m (locus ppa01314 0m.g) derived from phytozome v7.0 (chr-ID scaffold_1; pos 10795801 to 10796671)
ctactgctctttcaacctccttcaagcccaccttggtattactttccccgtctcctgttgtcatttctctgttgttaattacaatctaattttcaagatttatgattttcatcatcatgtttgtttgttttgttttcacgatttgaggttttgctattagatttggatcttcggtttgttgaattaatgaatctgggtaaattgttgagcttgttagtgattctttgtggtctactgtcaatcttgcagcttgcttccgtttcttattgattgaaatgggtgatttggattttattaggttaagtctgagcttcctttgctaatcattaagtttgagtttttaatgagacgagagagtaagcttgagttgaacattcttgctcaaattgacttttttatatactattttgaagtttgggagctgcaccatgtctgcatgttattaggttagagttagacattacatgaaccagagttgtcatcaagacccattacacggtgggtcccatttggtgttttgagtccacttggtctgtgattgattttgtgatgtagactgttgaactttataattctgttttagttcaagaaaatgatggaacaaaattgctctaaatttcatactacttcctctcttgtaactgctcaataacactttatcaagttaaaggaagctgtagaagttgtaagatatttgctaggtaggagattgaatgtttagaaggcatatattgatgttatctttttcatgatgtcaatttttggataacagaacaatattgacttagaaaatttagcttccttacatgttgctctatggttgaatgttgaagcaggcagtcagcagcaggagctctggtctgaagtcagt

SEQ ID NO: 72418 - DNA, 714 bp, Prunus persica
  Intron number 1 from transcript ppa001728m (locus ppa00172 8m.g) derived from phytozome v7.0 (chr-ID scaffold_4; pos 767241 to 767954)
aagcaattccaacactccctaatccgtaatcccaggtttgcttttctttctctctctccttccatctttgttttaattccagggttttctgtaggccaaattgtgaagttagctctcaggtttctcaactattttattgagcttcaaatctcatgttctttttgttaaaaaagaaaagaaatttgtttgtttaactttgtgccttggtgtgtctgttggtaatcatattgaaattacgtgaggttgaactggtttttaattgtatctgtgtgtgattttgtggaaagaagatggttttcccgggaattataatttcctagaaacaagtatggtgtaaagcttcaggtaccatgtatcatcgaatgattatttgatcattttgtgtctaacttatttgtgattgtttaagactttagaattcattacttttctgtgaacaaaggggaaattttataagctgccagtcgtcgaatacatttgtgttaccatattgagattgtattgttttgcaatttcatcaaatgccaatggttccaaggtcgtaaaaaaattgcgtttgattggaagtaaaaccagtgtttgtagtttcctttgttagatattgttagaaacccattacaagtgtttgcataatgtggatattattccgctaatgtagatgttcattctcattttacaggctattgcatttttgtttctggaagtggaagatat

SEQ ID NO: 72419 - DNA, 1022 bp, Prunus persica
  Intron number 1 from transcript ppa012329m (locus ppa01232 9m.g) derived from phytozome v7.0 (chr-ID scaffold_1; pos 45988935 to 45989956)
cagaaattggatttgaccaccaaaacaaaactaaagtaatggaattttggacaggaaatataaatatcttatgcagttccgggttgaacacgttttgtgagctgtgcacagtcacaaggtacgtggcagctaaacggcacatccacgtttaggttcgcagagactagaaaagtggtgcttgcttggtgaaatgagaattgatgggctgggttgagtttgcatgggtgttaggcttttctatttgttgtgggcttgaggctaagagcatctctaatttacatgtttttttgttctaatgagggatgaaaacttggagatgtaaatttatattttcatgtattaatttgttttcgttctaatttattttgtgttagctttagtttttttcccaaacaaattctaaaagatttaaagttcaatatgacgtatgaaataaagggataaattgattatgtgctatttcaaaattttcggttcgcacgacgactttttgttgtaatattcactcttatttgcttaagttcttgaggagtgtgcaacatatgttcaatttactgtcaatgatactgaatacatccagagatactatcttgttgatgagatatatccaagatgggtaaatatcatccaaattattctcaacctcatgatatgctaaattttttatttaatgtatgacattattttagtaatatttgagattgtttttagtactattttccttgataaatatgttgatagtgggtgtgattgcccaaaaatgaatacaaatatttgactcaaaaaaaaagagaggaagaattcaattcaatgtgcaaatagaagttccttcctctttttattatttttattttaattttaagaacaaaagaaaccgagagaagggtatatcagtaatttgcgccagtccccattccgtcgcgactatatatacccctgagctacaaaagctaggtataaaaagccccaaatttctgcgctgacaaggctcgcgaagaaccaacgttcacagagcgaacctt

SEQ ID NO: 72420 - DNA, 929 bp, Prunus persica
  Intron number 1 from transcript ppa009673m (locus ppa00967 3m.g) derived from phytozome v7.0 (chr-ID scaffold_8; pos 21311814 to 21312742)
tactcgtctgttgttttggggtgatcaatttggaggtacattttgaacaaacgttgtttcatttgaagcacgatgaagcattgcagattttgtgcaaatttttagtttcattctagtaaaagttgtatagttgcagattggtgaattatattacatatctttagttctctgcagtgtttctagtttcgatattcaagtttgcttggtagatagaatctgaacataaactttggcagcaggatcttagttggaactttgaatataaattgataaagtaggtggcataagcaatgatgcatttgaacatggtaggcagtaatcagaaaagtattaacaagcaaagccatagttttattttctagtccggattgaagtgaatttgactgactttccttcatgaactttggtgatagtttcataacaccgtagttctttactctatcagaatgattgctggcactagtttagtctctgtgcatacgggtgtgaatttatggggtttaccattgttctttcatttttcgaatatgtgtatcaccactggacaacagcattatgatctaagttgaaaaccctcaacagatattcatgttgcacattctttgtcttaactcgtagaccattggttttgctgttatcggcttgtttatataatttattattctttatcagttatcaactctattaattatcaattttattcctggcaacataggcaaatggtgccgctatggatatgagaaaaaggaataagggaccagtagaacaagaagaatagcataaagtagtttaggagattacagaatcttctactttgtttacgtcttttggttatgttatatacatgcattcatgagattttgaattttggttttccaagtcgtttgattcaactggagatatgctgatgggtccttttcttgctccag

SEQ ID NO: 72421 - DNA, 1033 bp, Prunus persica
  Intron number 3 from transcript ppa012148m (locus ppa01070 1m.g) derived from phytozome v7.0 (chr-ID scaffold_3; pos 9069693 to 9070725)
gcttgattttcctggtcctgccgatccatcagaaggtgtgcttttccacagtatctctcatctactatataaatgttagttaatgttttgtttgcttgacgtaatatctcctttgcatgcttcaaaaattaaacagcatcctgtttgtgaatgtttgtatctgtatgcgggaagtgttttgattcttacgacaaggaaattacctgtgggattgtgtttcccaaatcctgtgagctctgtcatcattctagcatgttcttatttcacattttgaacttcttttaacagtttttggttgttaattgcggcgggattagttatatgtttgtcttgacactaatacgttgatatatgagctgagataagtatgaatatgtttttcaattatttaaatatataaattaagcatgccatgaaaacaaccagcttagaaacatcaacagctttccattttacctttgtgctttgctttgaatgcttgctatatatatgttttcagttacggttcgaccaaagatttaaggaacagttttagccccttttgaatgaaattcatttggctaattaccttcagttttttgtgtgtatggttttcttggggattcgtgttggatgactttcgcgagacaaggtggatattttgtgggataaagtagcctttggacacccctttgggcgtcagtttcttcagaattccaggaaataccttttaattcaatttttacagattggagggctgctgttatttttccagtaatgtaatttaggctttataagatttgttagctgctagatcttgtcctctgccactggttgtgtatgtgcttgttatttaataaatttttgtttctcacggaaaaaaaaaaaacgcaaaaaagaattttggtatagtctttagctcgctgaataagtaactcttcgcatggccatagttgtgaagggggctatcataatttcattatttttttaaaactagaaaccgtatttggtgatttttgcagctaaacctgcaaagctggtcaaagatactgag

SEQ ID NO: 72422 - DNA, 995 bp, Prunus persica
  Intron number 1 from transcript ppa023185m (locus ppa02318 5m.g) derived from phytozome v7.0 (chr-ID scaffold_2; pos 24814667 to 24815661)
gagttaccaaggtatatagattcgtgcatgtcctttttagatctcgtgtgtatggttaggattatgacaagactttctatgcatttacgtttgttgctcaattccacgacaagtttcatttttattagtcaatttctttgcattacaagagtggaattacatggagttttttctaagactttttgcatgtctttttcactataagtgagaatttaagttgcgcttgttttcttattccttacataaattgaagtctcagttatgtttttttaattttgttatttgttttttaaatccaaccttttccctttcagtagatctagatctcatcctgtactaggtaaattagatcaggttttcttttgtttcgatggatccaagagaattctttggactttttctgcagcttttttctgtaagaatggttgatgagaaaactaaatatatgtgatatgcgattaaggtttttgtgtgtgtaactttcccgactcaaacaaaaggggatgaatgtgcatccaattagacaattttattatatcttgtatatggtgatgattattgatttccttggcaaataagcgtagctttatttctgaatttcttttataataagaaacggcccttataagtcacaattttactcctttgttgggtatattggtttccctatttgaaatcaaagggtagcaaatttttttattttttttatttccactccttcattaggtatatattatatataaggtcttagagtaaatccttgattcatgcatatatgtgtgtgtgtgtttgtgagggtccaaatgtgatttcattaatccatgttatatatatatatatatatatatatgtatacatataagaacgttaaatgttttactacatcgttcattaattttccaagatttaattaattcctttattcaactacatatatactacactaattacattcggttgttgattttcagttgtctcggttagaaaccctatcg

SEQ ID NO: 72423 - DNA, 815 bp, Prunus persica
  Intron number 1 from transcript ppa025090m (locus ppa02509 0m.g) derived from phytozome v7.0 (chr-ID scaffold_6; pos 23284951 to 23285765)
ccacagtatgtctcttttgttttttttaatattttttatcatgcttattgttggagatagttttgtttcaattccagaatccaatttcagattttgttttaggttcagaaatcacagttttctttgaacaagatttgaattttggagagaaaactttgccagcaaacatttattggatcctcctcatgcggtggtttttattagtgtcaggggctcctgaataataataaattgactatatttttttactcaaattgaagtgcaaacaagtagtgtagtactgacactgtgatctgagatcttccgtgatttcgaagcaaattttaatattctgtaatatatattatatatttgactcgtttacagaatatttatatgttatatagtgatcaaaggaaatgaattctctgacaaatacaacggctgtttatgcattttttgtacttgtagtaataaaaagaaaaccataaactatagtccttgaaagttgaacttgtgatatacaacttaaactgaaaattaatcaatatcaagacaagcatcaaattcagatgcctcattagcagaatatatgcatttacaagctctttacatgctctcaagctaatacaaaaactgtctttttgtgtagacatcaagtgtccaaattggagacgctgcaaacgtcgaaagaaactagctccactcattggaggtatgccttggtcacagaagaaatttatactgtttttattttttttatggttaaatgattgggatgaatgattatttttctaatttcttcttaattaggcctggtctttgctgcggttgca

SEQ ID NO: 72424 - DNA, 968 bp, Prunus persica
  Intron number 1 from transcript ppb022841m (locus ppb02284 1m.g) derived from phytozome v7.0 (chr-ID scaffold_2; pos 17287676 to 17288643)
gacaagttgaacttcttcaaagaatttacagtaagttatttatgtttataactgaaattattaattaaatgaggataatacttttttttatattaaaaaatttaaaattaaaaccaattagcacacacaagagactagtaataatatgtgatcaatgttatcctctcattgatttttgaaaaaattaaaatacaatccatcatacgggtaattatattcaaggctaacgacattttaacctccgaaggtttggagttattcacattcatttcatccttccttttacatactatcaaatttcctacattctttttatgtgtccttttacatgccgacaagtggatgtcacaaatgctatccgaaaatactagggtctaagtagtactttaattgaattaaccaatatatttaaagaatatatacttaaaattaataaaatattaagagaactatgatttatggagacggtaaactataatccaacacaatatttttttaaaaaactatgaattgtggattaaattttatgagagggctatgtttagcccccactactgctgttggagatggcctaagtataattttgtgctctagaatcactttttctatttatttatgaaaatttataataaaaaaggtatatgaataagcactgtcctcaatgctgcttcttgtcctcaatgcatttatccagtcgaatctgttgatcatttatttaacggtttgtagttcttcctttttaatttggaattagtttggcagttggttggaggaatccaatttttcttatcctaattttgatgattggctctttcataatttgcatttcaagagatcttttatgacaggtttggcttggaatttggtgtttgttgttagcctttggttcatctggaaatggcgatgtaagcttattttttagcaaggttttttgcttccctctgagccgtagtaggtgattctgcagt

SEQ ID NO: 72425 - DNA, 537 bp, Prunus persica
  Intron number 1 from transcript ppa012819m (locus ppa01281 9m.g) derived from phytozome v7.0 (chr-ID scaffold_1; pos 15899413 to 15899949 reverse strand)
tcaatttcacccttcaggtatatatatttgatgagcatgtaatcgttatgtttttttattggttttcgatggattttattataaaagtgtcctttgtatgttatggattcgacgttactactccattatcagctgtctggtaacaccaaaaagatggttatgtttttgttattgagctgcgtttggttgctgagaaaacgtagtaggaaaattgatagattcagtttgcaatttgattactgatgctagaggaaacagaaaatcattcaaatttgcggtctggggcttccttttattcttcttcttttcattttatttgattttatcagtctttgttgtatccaaatatcaaaaagctgaaccaaagaaacccaatatttgattcttagtttataatatactaagcattaatatggtttcctgattttctgctaagacttgggatgcgaacttggtgatacattgcctctgtgatcactggtaatatttttccactcacattttagttgatgaatttttgcagcaagcctacttcaa

SEQ ID NO: 72426 - DNA, 315 bp, Prunus persica
  Intron number 1 from transcript ppa011284m (locus ppa01128 4m.g) derived from phytozome v7.0 (chr-ID scaffold_6; pos 10049791 to 10050105)
ccagaaaccctaacgagggcttcctctactctcaggtatttcgtctctctcgctagctctatgtcatatctcatttctgaattcgccttcagcctttttcttatttagatcttccggttgaattcgtagatcttcaattctctgtttgtttcccgagaaaagcacaaaatttgcaatttttattttgttcgatttggttcaaaattaatttttattttggtgttttcattatttatgtttgtttggtttgttcaattaatcattgaggcttcatttgcagattcgttgtttggtcagacagcttaagattcaacc

SEQ ID NO: 72427 - DNA, 584 bp, Prunus persica
  Intron number 2 from transcript ppa011284m (locus ppa01128 4m.g) derived from phytozome v7.0 (chr-ID scaffold_6; pos 10050109 to 10050692)
aggtatgctgtaattaactgattggtgtcatatagctctttgaaagattgtgtttttttttatttagcttctccgatgttgagaagattaattgtttcctgtattgtttatacctacttggggtgttgttctaaagttgctggaatctgtgtagtttattgtatgattgaaaactttattctggagtctaaattagacaaggattagttgttttcattgatttttaatttggctgtggatcggggtttgtaggctacagtattttttccttttttcgagttttctagatacaagtcaatgcatagatcttaaatgtatttcacgtgttttaagtgattgttcagtgaaaagttatggttctatgggtgtacattcctgtagttagaactcgttgactgtgatttgagtattactatttacaaaagccataactgatctagtgtctgacagtgcctattgattagaatcaatgcagttatgtatgacatgccaaatggatgttattgggtgttaccatttcatcatttctgactttttctgtctccacagtaaacttcagagtgatactctcagagagggtattt

SEQ ID NO: 72428 - DNA, 442 bp, Prunus persica
  Intron number 2 from transcript ppa000534m (locus ppa00053 4m.g) derived from phytozome v7.0 (chr-ID scaffold_5; pos 10313625 to 10314066)
aatcttcttaccctctagtgagcatgaacactctgacactcttttagctatttcttgagcatacatacataggcacagatagttgtgaaattttgattcttgttatggtttgaagttttggttttggtggtggttctgcttttgttcaagaactgggccaaatgtgagtgttttgaaaatgctatgtttaagagagattaaacatcttcagaagattttcagaagctgtttggctgacataaaagtgtgataagaagtaaagcaaactgacccaaaactcatagaagcttgaaatgaatctccaagtttttatttttctttactgctgctagctcaagtaggttatgtttcttctgaaaaaaccatagaattcattttcgtttcataatgctctaacttttcgacagattcattcccaattaggcaattccttttttctact

SEQ ID NO: 72429 - DNA, 234 bp, Prunus persica
  Intron number 3 from transcript ppa010848m (locus ppa01084 8m.g) derived from phytozome v7.0 (chr-ID scaffold_7; pos 14910473 to 14910706)
tggctgaagctgttagcacaagtaggagagctgtgagtatcaaaatatttttttgctttttgttcttttatcttcgagattatactttggtgattatttctgctacgaaattaaattttaagaagaaaaaaacaagaaatattattttttaaaatagtctttgcattcaaaaattgtgacattcatttattttctgcagctaagaggagcgaaaatacctgagagtgaatttac

SEQ ID NO: 72430 - DNA, 500 bp, Prunus persica
  Intron number 1 from transcript ppa002575m (locus ppa00257 5m.g) derived from phytozome v7.0 (chr-ID scaffold_3; pos 21642118 to 21642617)
agctcgctcaggctgctcaggtactctttttctttttcttgtcaattaatttcaagttttgcactgtgctcgaactttgcttgttatgtctaaggtgttgtcttaggaactttgactaagctgaatactcctcgagcttcaaaagcgaatttggacctttctatgtttatttgagaaaaataacttcatatagttttcattccggaattgaaaaaaaatcgatgctttgaactttattagggctcttgaaaaatactggatcttcgcctcagtaaacagacagataattaatttgactgtgaattgaactacttggcacgccggatatgattttgaaggacttatggatccggaaactttatatttttaacttaactaaagagttcaaaaagaacgtttgtaactttgttgtagttggtaaacagtactgttaattacgggattcttatcaatttagttgataaggtattactcttttgatttgtacatttttgcaggac

SEQ ID NO: 72431 - DNA, 568 bp, Prunus persica
  Intron number 2 from transcript ppa002575m (locus ppa00257 5m.g) derived from phytozome v7.0 (chr-ID scaffold_3; pos 21642656 to 21643223)
ttctgcagctgctgctacagcgaacagcgcatgtaactactctgcttaatttcatttgtacattagtttttaatcttttagttagatatcacatttttttcaataaaggaaatttggtgtgtccaagtttgttgacttcatctgcaaattgtgtttcacaataacaaaaagttatatcttcgtacatgacacaccacttttgacatattatcactcccacatgaaagcttgataagaagaaaattcatgccttactcgtccaagaacgcactaatagggtcagcttcttagctaatatcatattcaactaccaatcgttgcaaatttgagagcttattctaaaatggttggatattctctgaggagatgaaaacaaaaatggctagtgctgaattcttgggtgtatttgcaaatcatatgaacttattggaattccaaatgataactttatgagatttaactttaagatgatcaattggatgccatatactcttgagtccgtataaatacagattgcttccatttgacttgatctgcactttcagagttctcagagtcactgcgtgaa

SEQ ID NO: 72432 - DNA, 814 bp, Prunus persica
  Intron number 1 from transcript ppa022191m (locus ppa02219 1m.g) derived from phytozome v7.0 (chr-ID scaffold_2; pos 3751477 to 3752290)
cgccagattctccacaaaatcaaacccatacctaggtaagtaaagattttgattttaggctttaatacgcaattattgatccttccacttgtctttggttcccaagaaaatgatagaaaataagatttctgggtttcatgaatttgtgatttccttttcttcaaaattagaagatacactttttatttggttaagtagctatgtggcagtggaggttgtgtttggatgctttaaaaatgaaagaagatgaaaaaaatgggaacataaagtttgggttttgttaatgctctatatttaggtttcgatagaaatgagaaactttgttggtcacttcaccaaaaacaataaagaagaatggcccaagaagtgttgttatgcttctgttggctcaccactcagttgctgaaaaagttggggatacaaaagggaggcaggtgaaatcttgggttttgtaaggtcatgtttcttgtttatttaactgtcaatttaatgagtaatttttttctattattgaacatcacacttggcttctgttttgttcttttcgtttcaattaaaaaaagttgtgctaagagattgagaacattgaagggcatggaaggtgaatcattttgtgtaaagcttagcttatagttatatgttgtaggcttaaatgcgcagtccaagtgtcagaataacaaacttttcttgacgttttattagaaatttaggagataaattttcgaaaattgggtttaattcaatggaaaaccttcaaattggggttgtgtggttgtttttcttgcagtgaaagttggaataccagagtttttga

SEQ ID NO: 72433 - DNA, 772 bp, Prunus persica
  Intron number 1 from transcript ppa011346m (locus ppa01134 6m.g) derived from phytozome v7.0 (chr-ID scaffold_7; pos 16956527 to 16957298)
tttgctgtgcatttctggtgctttctaataagactgtaagttcttcttatcccttcttcaatggtttcagagatttttggtttccttttttgctctttttcatggcgtagtctatggattgtgtgcttggtgttctgctaaatagaaaaattaagcggaacccatttgattaaattcttccaatactgcatctggatggaaattcttggttatctgtttgatttgctttgattgggtttgttgcgtttgtatttgaaatcttaatcgtttgcattctctgggtctgttttgagtatgctatgcatgaagatttcaattttgtggttctttgatattgttgaatcagtgttcattttcgttttgtcttgattctatctctttcattgctgaggttttctgaggtgttaatctattacatgcaatcagtatagcattggggattgttatatctatttgtgttgtgaattatacaatttgacgtggtttctgagacttccaatattttgagtgaaaatctagcagtcttttcttgttcttgtttttcatattttgtattttgtcccttgatcactttgttaataacagaaatacactatgccatgatttcctgccctcttaagtccttattagtcctctgccatgatttttactcactgaaattcactatgcatgtgtaattactcaatgggtaaaatatgatttattcaagaagattgtgtggtaaggtttctttttgttttcttttttccaaggctttctgtaagggttgaat

SEQ ID NO: 72434 - DNA, 997 bp, Prunus persica
  Intron number 1 from transcript ppa013345m (locus ppa01334 5m.g) derived from phytozome v7.0 (chr-ID scaffold_2; pos 26727606 to 26728602)
tcacacgcttctctagacctcaaaggtccatctctcttcttggtttgtattttttagggtttcttttcttttgtctgaatattcgttagggttttcagtacagcattttcttgcgatgtattgtacccattccgttgccaaattccttcttattctccgtttaattgggcgtctcaacatttaggcgagttttcatctgaggactaaaacaatagaatttgggggatgattcattagttttatataatttgatacagatccacaaattacacctattgttggttttactccgcatattattgtttgtctttatttgaattgaaggtttgaaaccccaatagttcagagttatcggctatatcaatttacctaacgaaaagagttgattggttgcattttcttactggggttaacgggatctgtcctaccaacccaataggtatgctgttaaatttgttgtatacctagtccatgcttccggttgagatttggtatgtgttagatttgatttttgtttttgtttttgttgtattagtacattgttattatatacataacggaacggtacaatttatatgtatcaattaaagagggttcatatttatatactttctacagaagtggaatttccagtgtgaaatataacacaaggcgggatttgatttcgggtgtattgaatgaagtcagtttacataagggggaggtgtgaattcttgtttcgaattccaaaacggtttcttttttaggcatagaaaaattcacttttcaatgtttcttttgaactaataaatcttgttaagatgtcttgtatttgttaataaactgttttcttttgttttgtttttgtatatattctcaaagtttctccactgttgaatcaagggttaaggaaaccacatctaattgcatcactaaactggatacggttcgagtagtgacagatttttctatgcagttttatttttgggtttgacgctttttcttttttggttgatag

SEQ ID NO: 72435 - DNA, 848 bp, Prunus persica
  Intron number 1 from transcript ppa012335m (locus ppa01233 5m.g) derived from phytozome v7.0 (chr-ID scaffold_3; pos 12245285 to 12246132 reverse strand)
cgttcttccttcttcctacggaggattctcttcaggtatctctctctctctctctgcaaaaatcatagtagctttgcttctgtttgttttagatctattgctttgaatatttggatgttattaatttcctatttttagtctatttcccggaaactgttgtgtaacagatccgagtcaaatgttcgtcgttgtaatttatttattcattttctatattacctttcgtaatttttgtgaaggctaagttttgtggtcaaattttgttgtgtaaaatcagtttgagctgtatttactatttgctaaaaccaatttaaaacccccacttcttctgcgattttgggcgacttccaaatggtgtcgaagccgtctcagcttaggttttgatgtgaaccattacggctttttgggtggtgttgttttgaagttggtgtatgtgacggaggaaagctccgatttttcgaaggtgtgacttagatctgttgtgaaatcgaccgcatcttctgtctttctgtttgattggctagaaaatagaagaataaatcaaaccaataggggataaagtttacgggttttgtttttgtgcgtgtttctttccaagttattttggtttcatgaaattctatgctcatttgtatagaacatgttgcgtgtctgactcggattcattattttggtcatttttattttgcaactaaatggagatcaactctgtgaaacaatattttaagattttctatggatttggaatatttctggggaagtttatctgctttttgttttcttttctgatggtgttgtctgtaatatggacaggcgttcttttgtggaacagaaacggtttcgaaaat

SEQ ID NO: 72436 - DNA, 572 bp, Prunus persica
  Intron number 1 from transcript ppa016149m (locus ppa01614 9m.g) derived from phytozome v7.0 (chr-ID scaffold_7; pos 12738927 to 12739498)
cggaaataataataataataataataataatcaaggttaaattagttggccatggatgctaggttaagaaagttgctttgcttctgagttttaggtcttgctctttcttctaagtgtgttttcttgtttgatcagccatgaagaagatcacttcagtgagaaccaacagaagctcaacatagattacttcttgcatatatatatatatatatatatgtgtgtgtgtatacactatagcttttgactttgatggatatatataccatcttttttatattatttatatgttttcgtattatgaatttgctttaattcatcaggttgattcttgtttgaatgtttttcgagctctcggtgtattttgaaaaccgtttcttccttccaatccagcccagaatatttggaatgccatacacttaaagaccatattctattacagcatgcaatgcaagtaatcccaccatgcacctttaaattaggccagattgagccaaatgttgaataaacaacagactaacacatggtgtatgtatttagcattactcaactactccccaaataattacaaaacc

SEQ ID NO: 72437 - DNA, 707 bp, Prunus persica
  Intron number 1 from transcript ppa003274m (locus ppa00327 4m.g) derived from phytozome v7.0 (chr-ID scaffold_1; pos 23838733 to 23839439 reverse strand)
ttttgcatacagcctctggcagagggcaggttgaggtgaggctcttgtgttatatgcttgttagatgcttcatgtatacagctattcaaacatgctagttgcttcagaacaatcttttcattgcttagatttcagttactctcttatcgtttcttagaatattgatgcaattgaaggtattgcagatctgatactcagtcattcatgaattgtggggggcttaattaagaaagattcttagaagatggaagatttcttgctcacttattttttattacttgaattatgtgagtgcctgtttgttttgagttatagtactgacatattttggttgctcttttcatttgaaagcgcatatagaagggagtgagcactgattgacctaaattctagataaacggttatgtggttagttgcttgcttggccttaacgtccactcgtaaatagttggctttatgatgttgatggctgctcactaaatttaatggcctcacaggcactgcaacttgactgaaatactcgttctcttgcttggttaaatttgaacctaagatatatcattcttctgttgatgatcaagcagataattgttgatatccgtaattttcaaattatccttttgaacattgaactactacttataatgttaagttcgatcattctttatgcaggtggttgagtatctaatagcattctttgatatcat

SEQ ID NO: 72438 - DNA, 569 bp, Prunus persica
  Intron number 1 from transcript ppa024071m (locus ppa02407 1m.g) derived from phytozome v7.0 (chr-ID scaffold_3; pos 6766187 to 6766755 reverse strand)
caatacattggtggccagaaagagaaatttgtcaggtatataatgtacattgtatctgttactccttgcattttgctttccatattttccttttttttcttctaaagaccgattgtcaacatataggccttatctgagactttgggtcgactaaaaaactcaaaagctttgcttaatgaaaccatatttatgtaatgtagaacactagatttcgccacttttgagcttggaattgacaaattttctagtagtttgcagctgatagccttaaaatgttatcttttttccaacagatacattgactaatgttctttgtttcccatgagatacatctttctagaggtcgtgattgaactatactatattcaattaccctgtttttgcttgatttggctgcgttgggtggttatggtaatccctgaaaacatacaagtacacaattaggacactaacctgtgtcatacatatatcatatctcaaatagaaaaatggatatggattcttgttattacaatgatgtattgttattctctagtatgacttggcatatgttggtacctgtagattgg

SEQ ID NO: 72439 - DNA, 1015 bp, Prunus persica
  Intron number 1 from transcript ppa013208m (locus ppa01320 8m.g) derived from phytozome v7.0 (chr-ID scaffold_1; pos 12800901 to 12801915)
gctccgcttcttcttcatcctcatttctctctgaggtaaacccctttcctaaaccctaccgctctctctctctctctctctctctctctctctgaatgcatgttatcagattgtatcagtttccatgttttatttgacctgttttgttactgatttttcttatttgttgttcttctgggaatgtaaatataggtgtattctgggttttggatttttttttataagtaggaagatgtatgactccgtgtttttgggtattgtatgttatttgtttagctaccgatcagcttgaggaaaatggtagtaacagagagagaatgtaggtttgaagaataaatagactagaggaaatggaaaagagagcgttttctatccgtttgcattttagaaagtagatcaaagcagccaggtgtgcgaagcagtgggggaacaaggctgttttaatttcctgtctgacccaaatagtttttgtttggggtgtattaggaggtgcaagactcttcatattctaggtgggagattcagagtctctggcatgtacttattgaagaaatatacccagtgtcgtcaaatatttttgccaaatttctttttggttctgtaaataaacttttgtttaccgaagagtttttttttaaaaaaaaaaatttggtgctttgtaatggggaaagtaatttcaatctttgatgacttgtttcttgtcaatacactcgaagtcttcctgctactggttgtgttgtttgaatttaaataatgaaaattacttttgtgtaatgacattggtttattttaaatatgttggctgtagtatagagcaagttgttttttattggaagtggtttctaacaattttttgcatatttgctttggaatatatgtgttcattttgagtaactcttgtagtttctagcaatctattcgtgatgtttttgttgctgctgttgtttttgttgtgatggtgagaattgttgctggtgcaggttcttggaacacctgagaacagtgaacattggaa

SEQ ID NO: 72440 - DNA, 857 bp, Prunus persica
  Intron number 3 from transcript ppa013208m (locus ppa01320 8m.g) derived from phytozome v7.0 (chr-ID scaffold_1; pos 12802189 to 12803045)
tgactgagggtaagttttaaatgtggtgttttgttattgtaggcttgctgaaaagcttaacttcttgccataaagtatatatacctgcaatttcttcatcgtaccaaaactttgtttaggcagagcattacacttgcatattgcatcatgtgctatataatatacttcacagtatggagttaggcgaaatgaatatttggtaaccaagaccaaaaatcttggttttcaattgttgctattattactgcttctgctcagccttcaattacgcatctgttaatgatttccatctgatgctttctctgtatctagggaacagcctcaaattctcgaatggttttaaactttgggtttacttgaaaagtattgagtaatgtatttattttgtaagtttttgtagttcaataactcactttgtatcttcctgctatttgggttgtctccagcctcttaatctaggttttttctattgcacctctgtaggagaaatctattgggatccgtgggtccgcttctttttctagttgtctttgttttcttttgcatgcaggatcttgtgtttgtttccaaaaaaaactaaaaagagttggaggtttctgcttctttttttcttcacagtgacattgagtaatttgaactggcattcgaatgctgaataaaataacttattgcatcaagatgctgatatcgccttatatatttactttctccttcctcccttagtaatgttattatcataagaaatttccttgggattttgtaagcttaatgaggtgatgtctttagggtctgttgttggtctctttcctatgtactggtattaacagttgatttttttgtgtgcagcaagggttatt

SEQ ID NO: 72441 - DNA, 901 bp, Prunus persica
  Intron number 1 from transcript ppa022623m (locus ppa02262 3m.g) derived from phytozome v7.0 (chr-ID scaffold_4; pos 10172088 to 10172988)
ctctcaaggggaccccctgcaggcggctcttgcaggtacattattgttttctcctccctgttaagctgtgttttgggcagaaatttgtgtatataatatgacaactgtctcacaaaacatgtttcaatgatgaaaccttcatgtttctttctgaaacaaaagcagacatctagaaccataacttaaataacaagatcatgtaaggacatccatttttcttggttgaaaatataaaactgaagaggatcacacaacatagattttttttacacactgtattgttctatgacaaagacaagtcttggggcatgccaaagttgacaatcatcaaattcttttgatcagtttataaatttaaaaaattacaattttaaataaaatattatggtttgtaaatggtattgcatcctaattcagtttcaccacttcttgcactggccgggaggacctgtgcaactctccctgctgctgcattagccagagctttgacaggtgaagctgctaatccatctaatttatctaagagagcttactgtttcttggttttcaaattccccactatccaaatgccattgcactgcttctgtgacacaacaagtcttctgatgtactactatttatttcagactcaggatatcccgtacaacgaaaacgcataaattcaattttgacacatttttgtatgacatatttggaacttaatggtatcttcttagtttaaccattctgctgctaacaatctttaccaagtagcaagaaatactgatactccccagagtactattgctattaccaattcctggaagttgtgtgtgcaaaagcaagaaatataaaatttaaatgccattacattgatcaaattgcagccagaagtcttatcaatacggatcaagtgcaagca

SEQ ID NO: 72442 - DNA, 830 bp, Prunus persica
  Intron number 1 from transcript ppa024471m (locus ppa02447 1m.g) derived from phytozome v7.0 (chr-ID scaffold_7; pos 14748050 to 14748879 reverse strand)
tggatccggcaactggcaggttcttgcttctttaggtaagttatcagagggaaggaaggactgataacaaagtttgagattttgagtgctgggtacttcaatggggtgtgtgtgtgtgtgtgtgtgtgtgttttggtgtttcttgttttctctgtgtttgattttttgccaagaaaatgcagcaaaaaggaaagatcttttgatttggttaagataatgtggttggtacttggtttggttgcttgtcttttgtgttttccccagtttttgatgtgtaaagctcaacttacccacctaaaagaagaagaaaataaactttctttttcccttaaaataggtaaattgaaagggtagccataatgaccacaactctcattcttttttctttttccttcttgtttttcttccatttttcccatcaaccaaacaggttctttgtggttgaatacctcatttgggtactaggaaaatcagtctcacttatggctagtaaaagatctgaattttccgcttgagaataaaacaaacaataaagctttgtggggctattgggatttctctctccttttcaatagggacaatttattgaggttcatagcagaagaaaacaaaaaagtggggacagatttggtcaagttgcatgtgtagattttggtctataattccaactttgatggtgtgagcaacattaacatagtaatttgttgagttttcccacttaaaaagagtcataaacaagctttacaattatcttaaattgggcaatttataatctttgcaatctgattttggcaggtgagttgtttgcaaacacagctggtggggacttc

SEQ ID NO: 72443 - DNA, 532 bp, Prunus persica
  Intron number 1 from transcript ppa022539m (locus ppa02253 9m.g) derived from phytozome v7.0 (chr-ID scaffold_8; pos 10478865 to 10479396)
agcggttcttggtacgcctttctttggttctcattacacaagttgtgggctttgcagttgatcaaattcatacccaattgatttatttatctaattcatgattattttgaagtaataataagtagagcttgattgattgttcatatactttatgaagtaaaagaaacaagtccccgcgtactctggattgcttctggtgaaagcagtactgataaaagtgttattgatcaaaagcgtttatttaaaaatgtgggttgggttcaatttttagaatgctttgacattcaaggtgctgtgtgtcaaagtttatattttgtttctgaccatctgagctggtgaaatatttggctattgtttcttttattcttcttttaggtttagatagagtttttgttttgttttcatttggatatgaacttgtttcaatgcttggaatatgttaaagctcataatgtgtggtattgacatgaaggatggtaatttataccttcttgtattggctgtcaggtgttgaaggaggcttctaggctgt

SEQ ID NO: 72444 - DNA, 881 bp, Prunus persica
  Intron number 1 from transcript ppa011972m (locus ppa01198 2m.g) derived from phytozome v7.0 (chr-ID scaffold_1; pos 37938717 to 37939597)
cttctttggatttcaagatcgcctcctcgctctcggtgagctctcattgaccttcgttggttcatgctgttaactttttttttctttgatcttgatcgtaattaggtttcatattacgatgatccgagttttggaatttcttttttgcgatgagattcgagttgattatctgaggtttgagattttgttgatccgtacgtgtattttgttcttgtttactttgtggaaaacgggattttatacttgattgattacttgaagtctaatgagaaaagcaataatcaaatatggattttgttaaagtgaatcttgatctagagtttgtttacttatatcatttttttcttttcgtgaggaaattggatagtgatctgatgtagtgtatcttcttgtgtggatattggatagtgatctgatgtagtgtatcttcttatgtggatatgagatatgaaattgagttcttgacaagttgaggcactaactttgactggtttggtttctgaaggattagtggattgaataatttgtttggtttagttgtttgtgaaggatttgtaatcttatgtgattaaattgcacacgagtttgaatggtgttttcaaaatcagtcctcttttcatctaatcaaaggtcatagatatgatatgttttgggtttgtcagttacactctcaccatcaactgaaattttttggtacaacaattagcttatgctttgagtaaattcaaagtaaagtaagacccaggattttatctctttattagtggaatcccagcttattttgacatgaaagctttatatttttgtttcatccatgattacattattaatattgtctgataatatccggttttgcatttctttcaaagtagcagattttt

SEQ ID NO: 72445 - DNA, 893 bp, Prunus persica
  Intron number 3 from transcript ppa010992m (locus ppa01099 2m.g) derived from phytozome v7.0 (chr-ID scaffold_5; pos 12807744 to 12808636)
cccacctgcttcggttttgctgcttaaggccgcaggtatatgctttttttctgttctttcattttgctctctaagtgtttgttgttggttctctgaatattgcttaaacaatggcatttgattgtattggaagatgtcttaccatgttaatttgctaattggtgctcatccaatccaatggatatcttacccaatattcttgtgctaggcttagtttgtatttttgtactcacaaattgatttcaggtcatattttatcaactgacagaatttaaaaaaataaaaggaaattgtttcaagttaaaaagatttaaggtggcgtgaatgaatgatatgcatgggtgacccacttcacattatttattaatgcgaggtctgtatagtctgccatcatgaattggccattgagttttcatctgcgaattagtttggcatagtatctcctgccattgagccatagacttgagtagttaccataattgctggagtgaatcgtagatgaggttttaaaacgatttccagaatgctgcagatctaaggataaaactcaggaaaattggaatgcttacttttatgcacaatatgatagttatttacttcaatcagtatgataattggttttgattacatctgtcacatatgctcctcatggagtcttggccactgttttgagaattatcacaatctggaaaggctgaaatagtttggatggttgttatagtttgtcattttagatatgttcataataggagcaaccacataacaatctttttgttgattaattaaatgctattccttgccagtatttgattagcataatagtagaatatttgtttatctgtgctgggtggtatgtaggagtggagaaaggttcaaaagacccacagctggag

SEQ ID NO: 72446 - DNA, 525 bp, Prunus persica
  Intron number 1 from transcript ppa009504m (locus ppa00950 4m.g) derived from phytozome v7.0 (chr-ID scaffold_3; pos 13794978 to 13795502 reverse strand)
gctccattctgaggctgagagcgccagaggcaaaggtatataaatataactacacaatacacctgttttgatgtcttccatagtattgggcatacccttttgcctttatgaatgaaaaaacacatttttatcctcaatccattgcaagttattgtcttgtgtttgttttcttttgttattggaagttattttttctagagaatttgtatgaagcctcttgtgaatcaataatatgattagattttctgcttagtgcagaaatttggttatgtttatagctatatgcttttgattaggttatgaagttgctttctatccaatatttgatgggttgtttgttcattgttgatgattggatagtgtattgttggcctagtgattttgccgagttacaattttctttcttggtcctctatttacttaatctttttctgttccaatgtgcttttagtgtaaggttgaattccctgttggttaattgctgcaccttatgatagttattcttggttgttggcttagcaaaca

SEQ ID NO: 72447 - DNA, 869 bp, Prunus persica
  Intron number 1 from transcript ppa000237m (locus ppa00023 7m.g) derived from phytozome v7.0 (chr-ID scaffold_3; pos 3458177 to 3459045 reverse strand)
aagttcttgaaaaagttcagaactagaattgataagtaagttctaccatgattaaacttaagtgcaaccggtatattcctttttttctgtctctctcatctcgttttttgttgatatttagtagaaagccattttcaataactcatattaaaacatttactctcacatctctcacaaaagtgaaactcacttgcagtctcacttatgctagtgaagagacataatattaagaaaaaaaaagtttagtaagttattatcacttctctcaataggaaatgtcctaaaaaaataaatttttttgaatgaaacagacgcaatgcggatgcatctcgcattaatggatgcggaactcactaatatttgtgagttatgtaacatttcagggtagaggtgttcggcctttagaatttgttacatgagagattgatgatgcatcaactatgtcatccatgtatcattacttagatatggttaagttttatttaattaattaattgcatggtcgctttcatacataatttaccattgatcgctttcgtttatcgtttctttgaccttgattagaggccaaatggaacatgaagatgtgaaaaacaaaaactagcttaagtcgctgtcttggtgagcatagtagaaggcttgtgatgcaagctgaatactaatttatgagttccatgttgcttaatattgtgtatctttcattaatttcttaagggacaaacaaattaggtcaagaaaagaactttcagctcttttattgtaaagggaatcaaattggagcatattaattatggttaaataattaagttgctcatgtgttgtaattgatttcagggttgggattagacttccaacagtggaagttaggt

SEQ ID NO: 72448 - DNA, 1015 bp, Prunus persica
  Intron number 3 from transcript ppa004194m (locus ppa00419 4m.g) derived from phytozome v7.0 (chr-ID scaffold_1; pos 42432193 to 42433207)
gttgttgcctcatcgcctcaatgtatgttccttctctcctcacctttcgtcttcttcctttctcattcaatttcatttttttttctttttctagattgtatttcctttcaaaaataacgtaggagatagtcaagaaagatatcatagcgtgtcagttgaatgaatattttatttcctttcatttgttctattttccatttccaagtatctatatatatactttctaaagtaatttatgggctgtaaattaatgaccggaacggttcagtttttaggttcttcatcagctcaattggaaattgttcaattatccacattttcgtttcagttttatttatggaactgagatgttgtaatttttaatttttcacattttagatgactaaaagactgtgttttgattattcttttgcaagggtagctgaacagatgaggctcatttttatttttttttcatcatatataagttctttagttttgattccaagtagggcatgattaattattttaggttgtagagctgggttttagggattaaagtttagctcttaggttcttagctggctaaaccacgactttaatccgaagggccagaggtgccattacagttgcatggtatctgaagatatatttgtatatgtacgggtgtatatatgtaaatttgactctttcttaattatcatagaaaagcatgatttggaaaggcattcttggattggagctaattaacggttggcaaggtgggatgttaagtggattgaggagaaattctactgataacattcttacactccctaactttacgagttcaacaattattttcctgcattaccttctttggcttgtaataggttggcaatttcattattagatagaccttttctggatatgattcttgttcatgtgttggattatttcagtatcactgtgtgcataatatgaatgcactgaatgctcacagaattataaaatctttatttatctgatataccccctttctttttttctacttagg

SEQ ID NO: 72449 - DNA, 564 bp, Prunus persica
  Intron number 2 from transcript ppa009283m (locus ppa00928 3m.g) derived from phytozome v7.0 (chr-ID scaffold_5; pos 15215162 to 15215725)
gcagatctagcctcttcgatatcacaacagatacggtaataattcagttccctctgatttcagagcaactcaatccaattcatgtatttgatctgacaagtagttttgcagtcatttaaagtgtatggatctagcagtttgttttttaagtagttgtttatatgaatctggcaagtaggttttttggagctgaagatataaggtcttttatcgtttgaactttatatccctatccaattttcttggcaatcagtcttcagagagcataagattgtttacttggtgatctgttcaagtttgggattacttttatttgctcaggaaattttggaacataaaacgaaatttgatgaagaatgctatgtgttttaatggttttggcttcttataaactgaaaaaaaagaagtcaaattgttgattcgtaatttctttgaagtggatggtattgttttgtttgtctaattagtcagttcgtgcaatttttcacaaccaccaaaagcaaaagtaagctttatcttatcgtgataactcctttttgtgtgtgttaggtcactgcaactcca

SEQ ID NO: 72450 - DNA, 411 bp, Prunus persica
  Intron number 6 from transcript ppa011765m (locus ppa01176 5m.g) derived from phytozome v7.0 (chr-ID scaffold_4; pos 949250 to 949660)
gcaaggagtgatattgctgagattgacgcgaagaagttagttgccaattcaattcccttgtactttaagtatatcttgatttgatttattgttatcataccatggaatagaaatgttctctttttgtttgtgctttggacatatatatatatatatatgtttataaattgttcaggaaaaacagaagatgtatgtattctgttgtgtttttgttgttgcaaataaagttgtgcatgcaatttatgcttatatagattatagatacgatgtcttcatgtgttaaatttgtgcatttagacgtacttactttattactacaaagtcaaactctaagttcaatttgtgttggtaattaactttatctcaattgaagattttgtttatctgaccgcaggtaccttctccccaagg

SEQ ID NO: 72451 - DNA, 344 bp, Prunus persica
  Intron number 1 from transcript ppa005897m (locus ppa00589 7m.g) derived from phytozome v7.0 (chr-ID scaffold_3; pos 19162822 to 19163165)
gtgctccccagaaatttcaaatttcaggtatcaaatagttggatggtcattaataagttggttctcaagttgtgcatataatgatttgtctggatctttggaaggtgtaaaggcataaaacctgcaccatggatctggaaatgttatttagagctgtgtatgttaatccggaccaataagttaatctgaccttctaaaagaaataatggcatcagttttttcttttaccctgatgtaagttagtatgatgtttaatgcatggttgtttataaacttagtataatatgtagaattcagtttgatcttatagctgatttaattacaatatgaagatggtgaaggtg

SEQ ID NO: 72452 - DNA, 827 bp, Prunus persica
  Intron number 1 from transcript ppa008947m (locus ppa00894 7m.g) derived from phytozome v7.0 (chr-ID scaffold_5; pos 16641909 to 16642735 reverse strand)
ttattcgatattttcctactcaggtacttcatttactttcaagtctcccattgaatttgaaatctttctttcttttacaaaccttaagctgattttttactgtatttggatttatgtaatgaaattatcgatttattaattattagtctgtctgctggaatgagatactatttcaaacactattcttgcttgtgccttgtttgtattggtttagtatttctctcaaagcaagtgaatatcaggatgtatcttaacttttgaaggcgtttcttcccttgtcaaattgctacttctttgagtgaaatggttgattcggatatcagctcagttgaggagaagaaggaacaattggaattgctcattaaatttcataatgtttctaactctccatgttctcaacagttagcaatttggttctccatcttaacaatagatcacaaattggttctctgtataccttagaattgtcttgtgaatatatactctggatttttcttcacttacgagctaaaaaaacaggatgttatacacatttatcttagcaattcatgtgttggatggaaagcccactaattcatcaaaatttgctttaccatcttaattatggagaactccccccattttcttaattgcatccctaggagtcacttaacataatggagatttgatcattctacattgtctcttgaaacttgaaattgtttgtatgctatcaactgcatgtcatgttttgatttgcattttgcagtcctaccaaatgttatcaccaaacatattttggaatatatgtaggccttcaactttgcatttaaaggttacttcaaaag

SEQ ID NO: 72453 - DNA, 905 bp, Prunus persica
  Intron number 1 from transcript ppa006949m (locus ppa00693 3m.g) derived from phytozome v7.0 (chr-ID scaffold_7; pos 22167464 to 22168368)
gaacctccctttctttctttctctgagcacctgaggtgattttctctactgggtctttttcaatcttctgaatgattttttctgttaccttttgatttcttgaagttgggtttgcctgaataagtctctaatttacgtagatgatgttttttctttgttaaacctttcataactctcctgttcacctgtttgttttgcttttgcattttggttaaaccttagttctgttgaagttgacatctttttagtaaactcgttagatttgggagtctgaaatcaattcctaaatatttggatggaaatgtcacataacccctagtggaagtcgacggagaattatacagtgatactgtactgccacttggcagaaacagctggtagtagggaacaattacaaaacgacacctggcgtagcagctactaaggaaagaaacttttgttcacttcactcccacacgttaacttaccaccgcgtgatctcctcgaacttgtgaactttatttgattcccccaatttcaatttttattcgcctttctggtgtcttttagcgttggaagaacgaacgaacccaacaacagagcaaagctagctttctctatcttttggaggatcaaatatttgagccggaatgtggttgggtgtttccgttttccactaagccctagacactacttgggtcctctgcgagatctcatccttagtcttctttccatttcgtaagcttttctcttcagttttcctggtggaagtaaactcacaacccacctctttgtcgctcctgtgtgctcttcctttttaaaaaataatttttggcttcttttctattttgcattttcggtttaattcttttgtgggttttctttttgcaggttccaatttctggggtatcggtttagcaccttgc

SEQ ID NO: 72454 - DNA, 737 bp, Prunus persica
  Intron number 2 from transcript ppa006949m (locus ppa00693 3m.g) derived from phytozome v7.0 (chr-ID scaffold_7; pos 22168341 to 22169077)
tttctggggtatcggtttagcaccttgctgcctttgtattaccctttctctattatttatttctagtaattttttggtttaagtttctttaatttttaacgaatctgaatcttactgcaattttttgttttatctttttggcatggattgctccaattttgggggtttttggttttgttaaattaaaaaaaaaaaatatggatgggtgttttgagttctgagatggaatgggtttgatttaggtttgtttcttttagcattccctgtaggttgcaaaatgatctggtagtatacagttactattggggttttatttttcttgcattttcttcatgcaattgatacatgtggttttatttttttccttttcttataactaattgttttggaagcttagattgtggtatttgctctgaacatgtaagaacttctaaccttggacaactgatagtctgaaactaaattataataaaagggcaaatctctctttacgtgtttgctaactgtccatattaatcttgattgcttaagtgatcataagtttcattggtcttctgatgttcaattattcaatatttcagtattataatgattcattcgcatgatgttcttccaatcatcgtgtacaagttggcaagcatgtgttcaatgatgggttttattcaggtgcttgtattgagttatttcagttcaattggttagcaggttgtactgaggcttatttggatcttcttcga

SEQ ID NO: 72455 - DNA, 584 bp, Prunus persica
  Intron number 3 from transcript ppa006949m (locus ppa00693 3m.g) derived from phytozome v7.0 (chr-ID scaffold_7; pos 22169243 to 22169826)
ccgtaagtttcttattcttttatcttttattaattatgagagccagagtaactttattatcttattacgttctgttctctcagggtttaattggttggtaagatcattgttttattagtgtacatgtgcatgagcatgtctatttttgaatttttgtgctgaaggtctgtatgattagtttgtgttgggtaaaatcttgaattaggttatttggtagcctacatctgatacatttatgttaagaaaacatccaaatgggtgggatttgtagattgcatgtctagttctagatagaactacttattgtaaagttacaatgccaagacgccaagaacttgtctgtttatcgcaaatgcagctattagctaaggagattggttaagtatgcgcttattgttattttgaatttacaagaatgaagagttttagtacttttcttgagatttgtttatgtctcgcctttataacttgcttatgatttaacagtgctggtttagggttatttttcctgctgtttactaactttctctttttctttggtctatgtgcacgtttgggtttctgcgttctttttcaggcccaat

SEQ ID NO: 72456 - DNA, 902 bp, Prunus persica
  Intron number 1 from transcript ppa006117m (locus ppa00611 7m.g) derived from phytozome v7.0 (chr-ID scaffold_1; pos 46235879 to 46236780)
ctgatcttggtttctctcctttggtctttttacaggtaatttatagcttagcttttcaagtaaaaatagacaaaggaaagaggaatctgccaaaatcccaaatctagaaactgaagcaaaccatatctcatgaaaatttcttcataagtttaccaatcggggaagtggaaagtttgctttgactcaagatttgctcttcctatattctagctcaaccacttatttttggtatttactatctatttgttaaatttataatttgctattacttttcaattaaattgtatatattcttaaaaaaaattaaatcattacttctacatatcttttgtgtttctattaattctatatctcttttaattttgtcggtgcctatatagatggggagacttcaatgatatgagttatatcatctcctcacaattatttcattgtctaagtaacatgtgatgagtagctacgaggaagggatgattaccatttctcttgcgttgcggccttcattgcaaaagttctgataaatagtgaaaaaaagaggtgcaatgaattagaaaatagaaaaggggtttagagtagggcaactgttatttatgttctcatatacgggcacagttagaattataatgttcgaggccgaaaatttagaatattagtataaactactacacaaattacatgtgaaagcaaaatgtttttaagtcattcatgtattgtttgttagaggggaaatttacctaaactaagaagttttctctttagaaatagaagaaaacaaactctcttttttctttttcttgtttaaaattacatggttcttccctctaatgtcactgctcttttcttcttcttcttttttctctttttgatgtcgtgatttcttctaagcagttcacttggttcaa

SEQ ID NO: 72457 - DNA, 445 bp, Prunus persica
  Intron number 1 from transcript ppa007373m (locus ppa00737 3m.g) derived from phytozome v7.0 (chr-ID scaffold_2; pos 14977655 to 14978099)
atccacagtcgagcagaataggtactgaagtgcactgattggatacttcttcagtttgatttttaggtttggtctcaaagtattttcgtacctaagaatgtatagttaatggaactgggtattgtttttagttatattttcgtatgttcggtttgaatttgggtttattggggtcacttgtttcatagggttctttttggctgcttgtttgctaatttcttaagaaatttagattggtccatctcagtttcttgtggatatgtttggaagggaaagaggtggaaatgaaggtgtatggttcagattttgttttgctcttcacaatgttaaattgaaagtaatctgataatctaatgtactttttcttttcccatgaatcatgttcttattggcttcttgtatcattgcaggtaaaggtttcgtccataccagaaggactctacta

SEQ ID NO: 72458 - DNA, 815 bp, Prunus persica
  Intron number 1 from transcript ppa010880m (locus ppa01088 0m.g) derived from phytozome v7.0 (chr-ID scaffold_1; pos 35982029 to 35982843)
actgtggcacaagtactgcaccaggctggtccgaatagtggagatagagtggatgattaggactctcccaccttgaacgcgaagtcatgcctgaggaggttgacttcatgtctgcgctatcaaccatggctatgtttgctaggttgttttgggtgtttgtgtgtttgcttttattttcccagatatctattgctctgataccatgatgagaagcatagaatgggattataatgttcgatatattattccacaactaggtttacagcttttatacaatgattcagtcattagtatcctaaactatcacctataaccaaggcttgatcagagactaaataaggaagcaaataactacagtatcaatttacaatattgcctaattaatggagatatcttccttaacactatcaacttataaattcaattgatgaaggtaggtgggcatgaatgcagtacataactgtgtttcgtaatgggcttgtaatctgagtggtttagaatgtccttggtgcatccgaaatcatgtgttcaattcccatcctgcaccgtgtttaattccattctttccctgatatcgctgatattatatataattaaaaaagaaaaatttaaagaaagaaaactgatctacatgattgttgaaaaatgtgtactggactggaagctgttatatgggtcatccagcgaaagaagcccaaaatgtaaagaggcctggaaaagaatgagctgaactgaagcccataacatcaaaacatcaatcactgagacatggcgatgaagcctaccgtaacgtgaagaatttgctagaatcgtcc

SEQ ID NO: 72459 - DNA, 781 bp, Prunus persica
  Intron number 2 from transcript ppa006004m (locus ppa00600 4m.g) derived from phytozome v7.0 (chr-ID scaffold_6; pos 6979071 to 6979851)
attgagatccgataccgattgtacgcactttccgggtacgaacacatttccttcattttcgtcttcattccttaaagatgttgtctttcttggcttcttttgggcgagatccgaataactacctgacccagatcatatcggcattggatttggatcggccctggccctgtgtattgttttatcgagtttgttgcttcttgttgatgttgtgtgctttttctttttcttttccttgtcaggcaaaatttgtgtctttgattttgaatttgcctttaattttatgaatatgcagattttcctgtttggatatatgtaaatcatacgagaaaggtttccgggaatcctcgatcgtctggtgaaataagtagacttgtgaaccattttatcagccattttcctttgtttaatcagctcgatcgtctggcgatggctatgaaattgttcaaatttcgtttttgatatagaaattgagcatattatcttttgcatagtcgggatttttggagtatgaaacttggaattttgactattatactatattggttaatggaaaggaataaatcgattgcctgcaaagatcggaattgtctttccgggtttttgagggttgattgattcgagattggcgtaatagggcttttctggaacctctttatgaagattgttttttgtttgggagttttggttggggtatactgaacttttgataacatgagaaacatggctgctcctgaagaggaagtaaatactatttctaatgtcagtttgcagggaagagtga

SEQ ID NO: 72460 - DNA, 367 bp, Prunus persica
  Intron number 2 from transcript ppa009293m (locus ppa00929 3m.g) derived from phytozome v7.0 (chr-ID scaffold_1; pos 32270214 to 32270580)
ctacttatccttttttgaacacccacccacggtatgtatgtatcctgaatcattcagatccaaccatacctctattcccctccctctctttccctcgtcgtctcttctctcgatttttgcttcaccgcctactttttgtttcctttttaattattttccttccgttttctcgagctcttttcaatatttgttttcttctttttcgtgttgtgtttttctctttggaaatcggttcagcagtgagtttgcagttcgttattcttcctttcgttttcgttttccgtggattttatattgcatgatgtatgtatgcctgcttttgactaaaataattttgctgtttttaaaaactgcagcgcggaaaaag

SEQ ID NO: 72461 - DNA, 626 bp, Prunus persica
  Intron number 2 from transcript ppa001822m (locus ppa00182 2m.g) derived from phytozome v7.0 (chr-ID scaffold_6; pos 19362518 to 19363143 reverse strand)
cgggctgtttgcaggtacttaagcatactgaggttatatgtctgatagtgctagtcctgaaaaacgcttgacaagaatgccaaattggcatggattttaaaatagtcatgattttgtgagtttgctactggactgtaaccaatacagctccatatgaatcatgtatatcgtcattcaaaccattagtaagaaaatattcatgacacaatattttatgcgagaaagagaggaggggtgttgtccatttatccaatgtactagtacctggtagtggacgttttgaagtacttcaacataattgagtgacaaagacaaaggaacaaaatgggtcgtcacagactcactatattagctccagtccctttttatcgtatcaccttttcagtcacttttttctttattttgacttttctttgacgtcttaaataaatttgcatctcttttttccctttgcttcccctaacattatcatcttttttaatagcaatttttacttgaaaatagacctttatctttgatatatgtttgtacttgttaatgtggcatcaatttttgtgaagttgacaataattatgtttgcaccgtttacagtccacaattggtgagtttgcttcaatagcagatac

SEQ ID NO: 72462 - DNA, 738 bp, Prunus persica
  Intron number 1 from transcript ppa003881m (locus ppa00388 1m.g) derived from phytozome v7.0 (chr-ID scaffold_2; pos 20838069 to 20838806)
tccttttcatctattcagagcctgaggaagtgaaggtaacctcttatctttgtttataattcttgtttcatctttctttgtaaggattctttgaagcatttcgttactgggttttcaaggctttaattgggtattttagattgaaaaatttcttcaacttgccggtcttgcatggataacaaactgtgaatctcaaattgtaatttttgtgttagtttttagcttgtgtcttctgttatttgagaggacagtttaagttggactgttgtatcagatgcgtttagaatattgggttgcttatttgtttcagagaatctcccgttttactggagattcaaatcagagaaagtggtctatttttacactgcaaagtaagccgggggcatttgctattggcatgtctatctgcttaagcgttgaatagtgaaatccgctatccaattcatggttttaattcaaccaccgtagtcctatattttgaagcttcacgaggacgcttttttgtttgttttgtttctggggaatatttaagtaggatcacttgaagttttcatttttcatttaacttcacctcccctgcttttcccccctcttgaatccttgattgtaactaagaggttggttttgaatctataaaaatcaaagaaacacttctaaaaaaaatgactgtgaagcgtgtttagtctgtaaagtgttcaacatacttaatgttgcaggatccagtcgtcaggccactgc

SEQ ID NO: 72463 - DNA, 923 bp, Prunus persica
  Intron number 1 from transcript ppa001821m (locus ppa00182 1m.g) derived from phytozome v7.0 (chr-ID scaffold_8; pos 21691484 to 21692406)
tggggaacttagcatattccattcctaaaatccaggtgcgcacacaacattccccttccccttcccattcccaatttgttttgtataagattcacgggagagataggggcttttcttttgggtgaacatttaagaccaacttacaatttctggtttgatttgatttgatttccattgttatgatgtggatctttcatgtggctttcttttttatttggctttatgaaatgattcctactttcaaactgaacaatttcacagggtaaagaatgtttgcttttccgcgagaatccagcaattttcttcttgtttcagatttgatcgcctgaccaatcagtcaaattaggctaccctttttgaaattctacttttgtttctctgtttttatagaatgtatttgtcatctttagtctctccaaaatttgccaatcctgctcttctttctcgtaagccaaatgggttcattcataagattttgtcatctgaattctggacattcatttagaattcgcgtgaaggttttagtttacataagaactttcttttcataaaagcagcgacccaatattggtgcataaaagcagcgacccaatattggtgcatcaaagcttaatcatgtgaataaaatagaatcacagaaattttgtgttctgttgatttttgattggggatggtggtttgcattctttcctcgcttgaacacgttattgcattcttgataacctcaggttcatgatctgtatcctatgatattgttgtattttactttaaattggagaattactcttgaatatcatctgtttttgttgataaaccatctcatgtatctaattcaccattcaagcttttaaattcccatataaagtttcatgcataagaatttaatttctctattttcaaattcagccaggaaatctcctaag

SEQ ID NO: 72464 - DNA, 633 bp, Prunus persica
  Intron number 1 from transcript ppa026292m (locus ppa02629 2m.g) derived from phytozome v7.0 (chr-ID scaffold_2; pos 25682514 to 25683146)
gagtaagttagaaaattaagtataaaggaaaagaaataatataaaagtgaagtgaaaaaataaataaatatagagtaagggtaaaataggaaaaagaaggaacaaaattgattaaaaagtattcaaaagcaaaaactgatgtaagtggagaaaaagagaatgggaaaatcggctccattatttgcatcaaaacattatctccgggagtttcactaacgttacaattttcaacccagagtgagagtgtgaaccagtaaattggttgacttgttcagtctccttcttcttgactggaggattgaaaaattataaatgtaaggacttggaagataccccgtggacttgttcgatagagctccactttttagagtggcgctttgatttttatgaaatctttcggcaatttcagctttttgcttctttctaatggaagttcaaattccacggtaagtgaaattttgtattttgtatttataaattttatgtaattcatgatatgaagcattgatcatattgtctatgaactccataagcttgcttgagctagaacagttagcagtagagttgtaagctcattcttgtttgttaaattacatgttccattcagggtacagggttgcgatttagaagaaa

SEQ ID NO: 72465 - DNA, 935 bp, Prunus persica
  Intron number 2 from transcript ppb021772m (locus ppb02177 2m.g) derived from phytozome v7.0 (chr-ID scaffold_5; pos 3830985 to 3831919)
aaaaaagactgagtaagcgaaatgaaagtccagtataaaatgccttcaaatcgaaattaaatttaaggtctcagaagtctaaagatgacgaaaaaactagagaagtagaaaatgaacccaacaataattgggaaaataaaagagaaactgtggaaaggaaagactatcctccatgtcgagtatgcaataatcttctttcttccttctcttcctcttctctgcctgactctcattcttctctcatctggaggtgtctatgcaaaggcatgataatgccttatttataggcagattggtggaggtagccaacccacgtgaatgtgcactaagggaaagttgcagacaaactttacccaaagtctccaaatgaatagttagtgggctccacacaaaaacctttacaacactcccccttggagaccacaaatgatatgtcggttgcatcattaaagatttgcttggagaaaacctagtgaggtagaaaactaatggaaggaagaaagaagattacaacaatcaatatagcatacactactacaaaaaagcaaaaagacgacggtaaatcaccgtcgtgtatttggtttttcaatggtcgtggaatccaccgtcatcttttccctcataaaccacgacgctaaataaccgtcgttgttaaacaatacaacgtcatcaaaaaatacaaaacgacgtctttgtactgcaaaaagatctaaaaaaagcaatcgaggatgataatagacgaccaattctctaaaaacaccgtcgttaaaaagggaaaatatgacacatattaagagaacaaagccgcaagatagacatacaacgacgacaataaaaatacgccgacgttaaatataattttcacgacaataaaaaatatgacgtctttaaatacattagaagacgacgttattgatacctactacgtcgcacat

SEQ ID NO: 72466 - DNA, 300 bp, Prunus persica
  Intron number 2 from transcript ppa014112m (locus ppa01411 2m.g) derived from phytozome v7.0 (chr-ID scaffold_1; pos 30248782 to 30249081)
gtcaccctataaggtaataataggatacagtaaattcttctgatttgttctttttcattactgtgtgtttgattaggcataatgacttaacatgagtttagactgttgtatgtggtctatttatgtcaattgcctgtgggtcaatccatgttcccatgttacctctttagtttcatggatatcttgtatttgccctgagtattttttttccttaatagcttttactggtggttgacttgatttccacggttaatgattacctttgttttttacacaggttagagcatacttacagcgtca

SEQ ID NO: 72467 - DNA, 578 bp, Prunus persica
  Intron number 1 from transcript ppa008631m (locus ppa00863 1m.g) derived from phytozome v7.0 (chr-ID scaffold_8; pos 16045604 to 16046181)
tttcgtcgtggcatcaacttcttcgacacctctccgtatgtaatttcttttttattcacgcaacacgcaagttctcaatttttgtgagcaatgcttgttctatccagttgctgagaaattgtgaataattaaaagaaatttcgtgaaattgaacttattttcacatgattagatataaaagcaaactaaaacttataatgcagccagaaagtctgaaactttgtagagaattttcgagaatttctcttagcatgtgattttgatctgtgtggctctgtttggttttagagaaaaatgtggcaatataagataacgaagagttggggtttttcatttatgagattgcagatcaaaaagaatttttgatactttagagttaccaattatttgtgacccagaaaacccatttggttgtatttgttctgaccttgtaaatgaaattccttcactaatctatgacacaaatcacataactttttgtattgaagtcaccttctttccatcttatttctgctgtttttttgggtgtcatacttaagtgttcagtttccctttctgcttcccaattgttaggtact

SEQ ID NO: 72468 - DNA, 531 bp, Prunus persica
  Intron number 2 from transcript ppa012587m (locus ppa01258 7m.g) derived from phytozome v7.0 (chr-ID scaffold_4; pos 7522398 to 7522928 reverse strand)
gtcacataagcactcgaaacaccattctgataaaggtatatcaattccatatgagcatgaggctcgtacttcatcatttgaaattatatgactttttgggtttagattttgttatcagtttgaacaatgtgaaaattgttgtatcagtttatattcttcactagtttaggatggattttcaattggttactggtctaacataatatcacttcgtgatactcattgaatcaaacttatcgggtctaagagtaaattcattttgatttgacctcaagctgtcatcatatacctactggttgaataatgataaattatatatcaataaccaaaaaactaggaggttaactagaaaaaattatattatttgacttaccatttagtaatgtcttctattggattatgatccaagaaacttccgtggttactaatttgcctatcgaggatgaggctctttataggaaattacttatcatgttgacatactattgtgcctcagaaaagaagacaaaggataagcacaaaagtaaacat

SEQ ID NO: 72469 - DNA, 465 bp, Prunus persica
  Intron number 1 from transcript ppa012587m (locus ppa01258 7m.g) derived from phytozome v7.0 (chr-ID scaffold_4; pos 7523023 to 7523487 reverse strand)
gagtaggaaaaggagcacttcttcagattctgaaggtactcaaaatctctcttcccttttttgtttttcctttctctccggttggttgctgagaaatcaagcgaaaatcgagataggtaaagaaacagttgaagaaaacattctctttttcatagcttttgttgttatggtttaatctcacgtctcagtggagccaaatagatagctttcagacgtgggttacttgcagactttgttgaaaattttgatttttttattattttcctaatatgttgtcattaatcaaacaaatttttgtgggtttccactaaatttgtgtaatttattgctcatggagtatactggaatgtgggtttggttccatttgattattcattgtttcatttgtttcctttttgcaaccaaaagagtatatggttgcttgttcttatggtttctttgttttttcctaatgtggaagtacag

SEQ ID NO: 72470 - DNA, 604 bp, Prunus persica
  Intron number 2 from transcript ppa015103m (locus ppa01510 3m.g) derived from phytozome v7.0 (chr-ID scaffold_8; pos 19620142 to 19620745 reverse strand)
gatcgcaattcaagacgttctaagggagttgggtaagtttttcttatgtcttggtgacaaaagctttggatggttgttaacagaaggttcactttaacaattacccattatgcaatggtagcgtttaagatgatgtgagagtcttaaattatcctgttgttaatgaaaaaagtttatgtggttgtgttgacaagaaaccaaagatttcattctaaggttcaaataagactatccttttaatgtcgcttggtcattttggaatggttggcagttcctgcttccttcttgatggctgcatcttccttgttccaacgttttcttgtgcagtacgaagaatcatcacatcatttacaatgttcaaaatttgcaccatcattttagaacgttttctttgtactaaaagcagtacatatagtatatactataggttattctagttggtcaagatgatcagatatatcatataggacatttttctttccccgttttgaactatgagtggagactccagtaaacttcgctattatatgcatctgtatgtggcaattggtttttgattatccaagagtctaatgttgtctagtttgtaggtatattgagtttt

SEQ ID NO: 72471 - DNA, 222 bp, Prunus persica
  Intron number 1 from transcript ppa004539m (locus ppa00453 9m.g) derived from phytozome v7.0 (chr-ID scaffold_1; pos 33402947 to 33403168)
gagaaagtcaaggtaaccacaaactcaaatacccctctagtcaatctaatagaagtgaaattccgaaaatgggtattaatttctgatagtgtaagttgtactaggtgtaatatagtcaaatttgatatgcataataccaagtgctttctatttgatgttgttgttgggttatttttcttttctttaatgcagggttgggtgccagagattgtggctagtacc

SEQ ID NO: 72472 - DNA, 469 bp, Prunus persica
  Intron number 1 from transcript ppa014473m (locus ppa01447 3m.g) derived from phytozome v7.0 (chr-ID scaffold_6; pos 19955713 to 19956181 reverse strand)
gttatccctacgctgctcaaggtcaaggaggtattattaatctctaattaaaattaattaacttatagctatgtgtggtatttttctctgggtttttcttgttcttaatttgtagccgatcatcatcagtaaagtattttagtttgagaacatggattaattatctgattaataaattattttagtttgaagatattaagcttccgtatataatatatgttactgtgtgctcataggattcttggttgagaactcaaagttgtctcaccaataaaccaagtcccttttcattattacttttcccgttttggatgatgagaagaagtacctattacttaaccttttttatttttatttttataataaataaaaaaaatatttttgttttatattttttggtttattttgtaatttaattttaaattatttgttggccaatcttgtaggttattaccaaggccctccagta

SEQ ID NO: 72473 - DNA, 1007 bp, Prunus persica
  Intron number 1 from transcript ppa005489m (locus ppa00548 9m.g) derived from phytozome v7.0 (chr-ID scaffold_4; pos 10629145 to 10630151)
ttcaagggtaccaatccagttccttgcgtatatatgatttttgttaatttctcatttcttattgatatttgcttgtgattttcctcagatttgaaaacccattcaggaaaagtttctatctttccaatcaactattaaactgtcactaattagaatgccgtttctcactcgttaatggctccaattcattacattgaggatttgacttggtcctaacacgtaaagtatagcttttgatttttcaaattgtgagagttggttgagaaaaggattatgggattttttggtttcgatatattagatcagaatcagtgagaaaagtagtgtgatttgggagatctctgttcttaaattggataaattcattcatgctccgttctttttggttggtgggaaaatgtggcaacacagaagcaatcagaccattttaatttagagtgaatatgtgattcatagttctgatctgttgcttctgcttagtttactcggccaccgattttgtaagattgacctcaaattgatgtcacataccggaaaattggtggggattacattctgacttttactggatttattttcttgattcaagcatttgctaatttgtcttagattcgtagtgtaaaatagtttggttcattatatgtaataatcataagtatggtgaaaattctggtatattattgccattaatattatccaaatctggcaaattgtagatataattgcatttggtattaaaatgcccttgttgtgcttatcaaattgataagaacattgcattagattttctaagccttctaagttataaaaacatgactcctttccattgtttcattatataattttctatctgatatctctagtgtctggaatcctagcagtttgtgatgaaagctaaatgttgttctaaacaaatcaaacgtattgtttgtcaaattagttcaatatcttattatttatgttttgattatatttttctgatatctaggttgctcaaaggtcgtagt

SEQ ID NO: 72474 - DNA, 576 bp, Prunus persica
  Intron number 1 from transcript ppa004815m (locus ppa00481 5m.g) derived from phytozome v7.0 (chr-ID scaffold_6; pos 24936381 to 24936956)
atcaactgtgagagaatttctactcgaatttcaaggtaaagttcaaatcttttcttcaattctagctggttcttattgctcctataaaactatgaaattttgtttattatcagtttttgtttctcaatattttcttgtttggttcccttgaaaattgaatctgggaaatttatatgagtttaagcaatggaaggcaggtggtttccaatttcctgatggtattatgaagtcctgtttctcttctaaaatcaggaagaaaaaaaaaaaaattgacccgcccaggccacctagcgcctaggcgccgcctaggccgatttttctaacactgtttttaagatgtagaaatacttgctgaagttcatagcttgccaatagaatgatgcataaactgacaatattgtgaaatgttaaagtttgcttgacagaattgttattatttattgcgaataatatgcattctttttcaaattcttttgtgaatcacgcaccaagtttaggcatgtgaaggctcaaagatcatttctttcctttattctctcaggtcaaaatctgatatatttattggggagttggaaa

SEQ ID NO: 72475 - DNA, 364 bp, Prunus persica
  Intron number 1 from transcript ppa003312m (locus ppa00331 2m.g) derived from phytozome v7.0 (chr-ID scaffold_2; pos 24069238 to 24069601 reverse strand)
ggttgtcttggaaattggttgagccactggataatgtaattttactttctcttctcttcttttatcttaaaaatgatttctttgatacttaaggttcgtctttatcaactctagattgaaatatgttcttaattgtgtatattagatcagattgaattatttatttatttatttgtttatttctgatagaagtttatgatttttttttttgtctgatagtagtttatgatcacttttgttattttctttatttgggatactgcatcataggtaaaaaaagcatttataattgttaaatgatgagttggtaataaggttgaagtatgaacatttgaatttttttctctttgtctaatatatcagc

SEQ ID NO: 72476 - DNA, 475 bp, Prunus persica
  Intron number 2 from transcript ppa004065m (locus ppa00406 5m.g) derived from phytozome v7.0 (chr-ID scaffold_10; pos 311274 to 311748 reverse strand)
ggtggctgtcaataatctccaagtgaatcaaggtaacaatctgacctttcttagttttccatttaatttttgagtgatgttctcagtggagtaattattatctggttttggtgattgatattagtattattcatacattttaaccactcaacatggaaaactattctgtatgcaagttcgattgaagatgccacagcaaaataaatatacgagtataaatttatgaggctcagtcagttcaacttggatccagaatagtttatggtaattgtatgagtttataatcatgtaattcattgtgtttctcttcagttaaatttcgaagagttttccttattgagtggtttaaatgtgtataaacaacttaagaatgttgtccctaataattttttgttttcttggaatatctcttctcattttcccctctttttgtaatttaggttgtgctcgcttcttcaattataagcaagtctgg

SEQ ID NO: 72477 - DNA, 714 bp, Prunus persica
  Intron number 1 from transcript ppa006811m (locus ppa00681 1m.g) derived from phytozome v7.0 (chr-ID scaffold_6; pos 3158633 to 3159346)
ctcccattcatgtacagattttctaccccttttttcacttttcaccttattttctttctttttttgtttttggaattcgtttatagtcttgagaaaaactgtttatttttttggttggttgggttgattgatgctcatgtttgttttttgctttttcaaaatttaaagatatccattattggtttatggctgcttttgtgttcgattaggtgcttttgggttctcttgggtttttttaaccgctgagtcaaaatttgggttctgtggttggttagttttgttgatggtcatgcttagttgctaaggaaaggtaggaaagtcaagttttttttttgtcctttggagttgttatctaattgagttaccagaaaacataagctcgattcatgttgatgcatagatgtgttgcatgtatttgttgctgggtactattattcatgcttcaaagtgtaaattttaaaatgaataaaatctagttttgcggattaaggtttttttgttcggaaaaattacgtggaaatggagaaccaaagacagaaatctgcctaagtggcatagccctgcatacagcaatattagttatcactctctttcatttttctcaatatttaggaaatgcattcatgcagtttcatctcttcgtatatttcttacatgtcttaaattttggtgtttgcagactgatacctttcagtattctggtgcttattcatc

SEQ ID NO: 72478 - DNA, 1008 bp, Prunus persica
  Intron number 1 from transcript ppa004267m (locus ppa00426 7m.g) derived from phytozome v7.0 (chr-ID scaffold_7; pos 19369669 to 19370676 reverse strand)
aagcacatccaagatcgtaaacaaaggtatgaaaatcatttccttttgtttatactatttccaaggatctctctctcgccttgcccagttttggtttcaatctctagctttccagtccttgcaatcccagctggtgtatttgtgattttcgtgatcaaatttggctttttgtttctgggtatttaatgtttttttggtttaggaaagaaagcttcgaattttgtagggaaatgagggtgcttggacatgcattccttgaaagagttggaatttatttggtgtatgggaaatggggttcataaggatattctaaatcagtgtgctcttggttttatgaggtaaaggggagtgcattgtcgtaaggagaagagaccattatagtttgttaaggagtgggatagattttcctttttttaaaactcatttcggattttggtctttcggaatgcgcatgcttgcatgaactgaaagtattatggtttaatttatgtttatcgccaagtcgaactgtgtttagattttctaaagttggtcctgatgtcgagaaaatataaaccttctaagaaatatcaaccataataaatttttgaatgctgaatgacattttcaaattagtaaagaattgcctagtgatggttatgagttatgaagcttcttagatatattatccgcaaatcttagttggaaaagtatgtggttatttgtttgttaatattttaaccaccttagaagtaatgaatggggtgcaactgtgaacaaagcgagaaagtcattaagtgtacatatatgaggcagttttgaattttgaatatgtttcttgtttttttctattttttaagagttcaatagttgctcatagttgtgatgtgccttcacaactggtaattaaagtaaaattggcaatgattagatcataaaggcttttgatcttgatatgcgccctcacatgctcacatgtttttactgtttccaggcgctcagtgctggaaaagaagttggcatctgaac

SEQ ID NO: 72479 - DNA, 446 bp, Prunus persica
  Intron number 2 from transcript ppa023445m (locus ppa02344 5m.g) derived from phytozome v7.0 (chr-ID scaffold_3; pos 12295603 to 12296048)
ccagttctcgaatgtaagtacaaattaattgtttgctttatatacactcggggttcatttcctaatagcttaagcttttaaactttctaaaggagtatcaaacttttctttgcaccttacttttttgttggtcgatagggtggagggtaggcctattccctaacagttcaagcttttgagactagtttttgtctgtcacatacatgtgacatgtcatccgactttcgtcaacaattatgctagggtttcatcacctaatcttttttttccactaggagatttcattatggatatcatgagtatcagaaaatttggtggatgtagcaatagatattttattatgatcgttcagatactctatttttttcaacggtcttgaaatctgtttactaactttcaatatgtttgttttttttgttgcaggtcctcctcctgtgctttatctt

SEQ ID NO: 72480 - DNA, 846 bp, Prunus persica
  Intron number 1 from transcript ppa024556m (locus ppa02455 6m.g) derived from phytozome v7.0 (chr-ID scaffold_4; pos 21881897 to 21882742 reverse strand)
atctgacaaccgatcaaatcaaagccgtcattgtaccatctctacactctagcactaactgttttaattgggtagtgggcttgtacctcgattcgataatagaaattattgtgcatttgagtttttgcgttcgaatccctctccaacatctcttgtatttctatactcctaagttgcctaaaacatactaaatcatctaatacactcacacaagctctaatgagcctaaaaattattaaacaagaacaagatgtctagagatggtgttcttagtggttgttttttttttcttggcttattgtgttctctgttggatgttctcactatcttgtggccgtgcaaaagattatgatttcatagcaggactcttttgacagttggattgtgttgtagtattctcgttggaggtctttgcatcgaaggtttatgcgtcagcttgctgttttattttatcttgctctaacattgatcctacgtgattgtttcagactctcttattaatctatgacatctgtggtactctttcccattataataatgaagcaatctaacatccaaattaagacaatctgaggctctttcactaacgatcacacatgatcgaagaaactctggcataggcatccaaactaagagtgcaaactcaaaaagaaaaaagaaaaaaagattaagcttgaaaaaaccaaaccataacaatacaaattaaactctaacaatacaaaagccttaaagttaccttttaatatatactaacgaaacctaatattactgtacaagcatataattcattgcaacttcacaatgatttcaggatatattttcagcaggaagtgagacttcagcaac

SEQ ID NO: 72481 - DNA, 393 bp, Prunus persica
  Intron number 1 from transcript ppa012879m (locus ppa01287 9m.g) derived from phytozome v7.0 (chr-ID scaffold_3; pos 20427961 to 20428353 reverse strand)
accaaggtagtgcttttattagccattgatctttatcttgtcttgattttccacggtttgcttttttctgttacattattatcatgcatcatgcatacataaatttctacacaagtcttctttccaagttacttgcttgttaattaattcttttcccttctcttttttcctgcattttaatgttctacctcacaactcatgtttacttgcttaaactcaaacaaacaactgttgtttgttttactctttttgtaccaagaattgcggtagctatttcgagaggagtccttgaggaacagtactgctgaataaattgttgatacttggttgcaaagatatgagatgagtttttatcttacacagtcttgaactttatcatggacagttgatttg

SEQ ID NO: 72482 - DNA, 991 bp, Prunus persica
  Intron number 1 from transcript ppa001923m (locus ppa00192 3m.g) derived from phytozome v7.0 (chr-ID scaffold_1; pos 31191752 to 31192742 reverse strand)
tctactttctggcctcgcctctcacctgtaaaaaggttcggcctttgtttgaattcaaattgttctgggtatccttactttcagttttagggttttagagtttcgtttttgtttcgtttctggtgggatcttgggctggttggaagttgtggtggaatttctggccataagctttcagatttgaatgtttcacgattgttataattgattattttctccgtatttggatgtcaattgatgggattgaattgggtttatgatggatctttctaggttactatttgttcctttgggtaattctgattttcctattctcttaaaaaaaataattaaccctaggtttaaatatatctgtatataacgaggactaattttattgaattgctgctagaagtatgagggctatggtttcttgaataattatgcgataaggtttctctgtcaaaatcactaatgggttccagtccttggaatcttgatgagctttcttttaggggcttattcagttgatctatgagaaaccttatcccaagcaaatttatgttagaatatagtgcctgcaggtgaaaattaaatcttttttcacaattgatgtatgctaaggttttttggtagccttcgggatagtctctgttacttttgctgctgagctgggaaaagttaatttgttacagaatttgggttctactttaggctatttctagatatgggtttgtgttcttgaccatgtatgccttagtaggtactgaaattgtgtgaatggtatatataaagcatgtccacggcccttttttttttcctctgtcaccatgacttgatatacttagcaatgtatttgacttgttacctttggcattttcttttcctctattacatagtagtgtctcaatgtaaagggaaaacacatattttatctatactaatacaccataaataatggttggattatctcaatgttaaccatattgatactctgttgacagggaagtga

SEQ ID NO: 72483 - DNA, 582 bp, Prunus persica
  Intron number 1 from transcript ppa021270m (locus ppa02127 0m.g) derived from phytozome v7.0 (chr-ID scaffold_1; pos 9784633 to 9785214 reverse strand)
ccttgggtagaaattgatcgatctaccttatggaagagagctagataggacaaacatggtaacatcccggatccaaaggtggcagagaaagcaaaattaattgtaagcctactcactctgttttaaatttttattaaactgtgaataattcttattacgtcttatgttatattttgcgtcgtgtgaatgatattaccccatcgaaattttttaaaaaacgtcgttaaaggtctaaataggaatcactactctgttttctgtaattatagcataagatgtcggtggttcattttcgcgtcgtttgtattgaattactacgtcgaaatgttttaaacaaggtcgttaaaggtgtgaatattgaatcatccctctgttatctgtaaataaagcataagacgtcgatggtttattcatttcgtcgttttaaaaactaaccacgtcggtataactaccgtcgtgataaattataataacgtcgatttatatgttattgcgtcgtgtgaaattatataatacgtcgtttgtatataaataaccgtcgtgtgtttttgttcttacttttttatatatctttgttttagg

SEQ ID NO: 72484 - DNA, 522 bp, Prunus persica
  Intron number 2 from transcript ppa011364m (locus ppa01136 4m.g) derived from phytozome v7.0 (chr-ID scaffold_8; pos 18433158 to 18433679 reverse strand)
aagctgagcaacaaaagcaagtagaagagttccaggtaagcattgccaggattgaaatcattgctgaagacttcctttaaatttgttttctaactttataagtttgtcaaacatgtgttttggtcttgtccttttccataaaataatttgctttttagtgcctaaataagctaaggcctcttttttcattccagttctgctttgcaaatttgttgtctcccttctttctctgatcatgttcaagaattgatggattgaagctaaaagcgaaatcaaatttagatcattttcatcctatacttgatgtgtaggcacaacgtaatttctaaatcactttagtttagaatagatcattatgcaaagacaccagattagtgttgtgtaggatcatcgactacatagttctcttattggttgctctagattgggtgtggactgtgtagtcgctatatatggaccgttacctttcgtctgttagttcttgaaaagcgtatgcttaatttgttgattatacacaggaag

SEQ ID NO: 72485 - DNA, 555 bp, Prunus persica
  Intron number 1 from transcript ppa011364m (locus ppa01136 4m.g) derived from phytozome v7.0 (chr-ID scaffold_8; pos 18433797 to 18434351 reverse strand)
agtgcagtgcagtagtagcagcggacctggctctggtattgttcttatctctctgtgtcctcaaacttcaactttttatatatgaattctgtgtttgcggtgtccttgttgaattatatgaggtgggttcttcttcaaatgaagaaagaacaaatttttgggttgctttgttaattccttgatgtgctaatttggtttattttgtgttaagatttcattgatgaataataattttttggttatggattggttaatctaacctgcgtatcaattgacttcattttcttcttctattccggaatgaattttatttgagagaaaaaccataaattttagtctctgttgtttaaaggtgttaactttcataagcgtaaatggaacgtttatggagaaattaggttgcagagactgtatcttgcagttaattctgttttaagaaagataaaaagataaaaagttttcttcacccttttctggaattgtcaagttttactggagaaattgaagttttggcttggcaattgcaaacaattgaggaactgaatgttgcaggtg

SEQ ID NO: 72486 - DNA, 314 bp, Prunus persica
  Intron number 1 from transcript ppa009620m (locus ppa00962 0m.g) derived from phytozome v7.0 (chr-ID scaffold_6; pos 22014019 to 22014332)
actcatcagattcaccagaaaccgctactccacaggtagttttaaaaacaaaaaagaagtcaaaattcatttttggaactgggatttcaatttggtccatgttttcaatttgaccaaattaaaaacacagttgctgaaatttaaatctgagcaaaaccccaagtactaaaatttatgtctaataactttaattcgaacaaagtactgtaaaatattttgatctctaattttaggcacacacttgtcctagctgatgtttcttctatttctaaacttctcccatgtctcatgcatatgctgcaataatgattagg

SEQ ID NO: 72487 - DNA, 938 bp, Prunus persica
  Intron number 1 from transcript ppa018341m (locus ppa01834 1m.g) derived from phytozome v7.0 (chr-ID scaffold_6; pos 15273940 to 15274877 reverse strand)
ttttgtttttattttattatattattgatatccatattttttttaacaatgtttaaaaatttattataatatttgtatattccataatgtaggtagaacccaaatatgcaaaatttcaatttgagggtattagtcatgagatggaggagaagttagataggatgtttttgaacgtcacagccacaggtaagcattcttgggcaccctcatctattgtacttccagttgaaagtgatgatgatgttgatccacttgaagttaacggtggatcgaatgagtctatgccaattgaaaccactcacactacaaacaatgtgccgaaaaagagaactaatcaatcacttgaagataataataagaagaaaggtaaagaaggggggaaaatgggaggtgctgcaaaattatcacagcaaattgaacgtcttgttgatgtggttgagagtaggagtactggaacatcaatggctaatacagtttcacaaggaactagtattgctaaagtgatgaaagatgttgcaactttacctgggcatagcgtggtagcaagttgtggtgatttgtaactaaactgttttgtactcaagagaagagagagatgtttgttgtcatggaagatcctaacctcaagcttcaatttcttaatcatgagttagctgaaggataaaatttgctagtttggtgactttaatttatgttttgtttttgtgttggatgatcttttatttgaatttgtgagtgatattttaattcttgtcattatattttatgttatataaacatgcatgcacagtgaaaatgacttttgaaggaaataaacatatttacaggctattttagaacatgtccattccagaagatgaggatgagatcaaccaaattatatgtgtcactgcccgtcttattgaaatttattacatgaaatatattcataagacccc

SEQ ID NO: 72488 - DNA, 693 bp, Prunus persica
  Intron number 1 from transcript ppa011809m (locus ppa01180 9m.g) derived from phytozome v7.0 (chr-ID scaffold_5; pos 14175816 to 14176508 reverse strand)
atccaacgacgctcaatcgccaggtaatcttgtttggttttctggactgttgattttgtaacccagcccagcccagtccagccttttttgattcacttttggacttaattttgtgctgagcgttttcttttgaattttgatgtactgtcaaataaaattgattctacaaatttcttttcttttttatttttgggtttgtcaggctgtctcagtaattgctgaatttcagctaattctgtatttctggcaccaaaaagttatatgatgggacagtgacatgtggaaagaatatcaatcaagattgtttcaatatattttgtacaactcatgccctgtagttttttttttttggttatgtaatttgggaattttgtactttgttaattgattttctcaatagatttttgtttgtttgaatgtatgaatgtttttatttctgaaggcgttaaattttagtttaaaagaactgaagaaggaaaattacaaaactaaatacatgagtgatcattattttgtcctaaatgtgctaaattatcggttaccatatttgcttctcgataaacatgatatagactgtaatgtatgagtgtatggttcaaattgataaccaatgaaagagaatattaccttgaaattagatgattttctgattgattaaataataaatttatgtgtttatgtatcagggtggtg

SEQ ID NO: 72489 - DNA, 250 bp, Prunus persica
  Intron number 1 from transcript ppa007399m (locus ppa00739 9m.g) derived from phytozome v7.0 (chr-ID scaffold_2; pos 25893717 to 25893966)
ttcttctggtatgtcgcttttttccccctttgttgtagaacaaaactatggtctcattgtctggattaatcttattgtataacatagatgctttaagctggtgcaacttgagtgcgtttatgcttgtgtgaaaagtcgtttttgattctcaaagatgttttttttctctttggtgtgtggatattttcttttcccttatgaatatctattgattgttagagactggagacggagaagaaaaagataatat

SEQ ID NO: 72490 - DNA, 674 bp, Prunus persica
  Intron number 1 from transcript ppa006357m (locus ppa00635 7m.g) derived from phytozome v7.0 (chr-ID scaffold_8; pos 16024747 to 16025420 reverse strand)
ggcatgtaagtgccccactgcctatgcgatttgggtttttcaagttattgtgttttgagttttttttcttttccatcttgttcctttagagtgtgaattcttcatatattaagatttcaaattccaaatctttaagaactgggatttgcaaatcatctcaaagtaataggatttacattttgtaaatgagctatgctattgtaaagtgtgccttcttcttgttattgtagcttgatggtttgccctcttgagacttgttgtatgttttaaaactttgttgaaactgtcaactggcaaggtctgttggtggaggtacctcgtattggttaaggttttcatgtgaggtccaacactgattcatgctcactctgaccctcttgttctcctatgctgacttaacacctacatgttccaggtgaaaaggaaaaaaagaaactttaatttttcttctcatttctgggcctacccaaatttccttgtctgttttatcgaatgaataaaatgttccatagtaagaatatgtggctacatattagatgggtgttgtttaaagaagatgtagtgtactaattttatattgtatttctgaaagttccatgttggctggtgattttgatactaattttttgtttaaaatgttatgaattttatcctgcagcctgtagtctttcttc

SEQ ID NO: 72491 - DNA, 469 bp, Prunus persica
  Intron number 1 from transcript ppa003426m (locus ppa00342 6m.g) derived from phytozome v7.0 (chr-ID scaffold_2; pos 22827893 to 22828361)
ctgctctctctcgaaccagtccttaggttatttgacctttctctgctttatttccaccgtttggttgcttagaaaatgcgggaaatagagaacaaaagctaaaaaaagacttcctattttttgtttgttttaatttacttacgttttttgggtgcagaagagacgggaaagaaacgaaatttatactacttaagttaatgttaccaatttcaaatgtctttcttttatgtgtatatttgatttgaaacaaaagaagaaaagaattaacatcaagaacaaattattttctaattgctccactgttttgagggaggcttaatggaattgcgaaggaagagtttagaaaatggaaagaaagcaacctcttgtcatatatgttttgagtctaattatgtagagctttggttctgagggactttaagttttgttttattctggttgtttactgttgattttcatttgtcagcta

SEQ ID NO: 72492 - DNA, 400 bp, Prunus persica
  Intron number 1 from transcript ppb021125m (locus ppb02112 5m.g) derived from phytozome v7.0 (chr-ID scaffold_5; pos 3514060 to 3514459 reverse strand)
caaggtgggtcctacaagagtgtccctcatataagtttatttgagcgatctctcaattgaagctccatctatacatattttgcagggataattgttagaattgtaaatattgcaaggaagcaattgtgaaaggctattccttatgagaacttattagctacaatgcattacttccatctatcctttacttctgcaggaaaggtgtatcgtttcccttgagtcttttaaactcatcaattttaatgaattttctttagggaagttttgtaaaaatagaagtacaaaggaagagaaaagtttgctgattatgagtaatttctttgtacatatgttgatgcttgatatttgattggcataaatgttttcatgaatgttttgctgtggtgcagggtcacggagc

SEQ ID NO: 72493 - DNA, 716 bp, Prunus persica
  Intron number 2 from transcript ppa011741m (locus ppa01174 1m.g) derived from phytozome v7.0 (chr-ID scaffold_2; pos 2384344 to 2385059 reverse strand)
ctttgcctcccctgaatacaattactctgtctcaggtatttttctgaatttccttttttattttacaattatattttcaacttgaggttcaagtttcattgttttctattgcatctggtcactttacgtctatttctagataatatcaaaatccaaaattttcttttaacgttaatttctagagtttttgctctcattagtaaaggattagagcaatgactgctttctaaaaaggctatgtatatgcgaccggtcagaatcacttttagaaagaatcatctttcgtatgcttgaaagtgattttaaatgattatgagttgagcacataggaggtggacattatcaactaattctttatcggagtattcggttgagattggattggcgcaaaatacaataaataaataattggcgcaccaaattaaatcggttggttcgccattggtttattaagtttcaccacattgctttgggttctccaaatcatggtttattccccatagctttagctaaagtaacaccatcatggtttttatttttctttggcacaaactcaattcttatcgtgttgtacaacaacaaaaaaataaataaataaataaaagagtttcttcgcatgcttgtttccattttccatggactagaaaacttgttgacttgtagtttctgttatttgctgaccaatttgaccccctctaatgcagcacctctaaaga

SEQ ID NO: 72494 - DNA, 882 bp, Prunus persica
  Intron number 1 from transcript ppa004860m (locus ppa00486 0m.g) derived from phytozome v7.0 (chr-ID scaffold_3; pos 18385393 to 18386274 reverse strand)
aatccagttctttcgttagagaagaaaacgttcaggtttgtatcctttcgatttctgggttttgatcaaaatggtcgcttactctgctatacttggttggttgctgaaaactcgttgtaaatgcaattgaatcgttatcttcaattacagcagttaaagccactagcttttctaaattttcaattggttttctctgatcaagcagagcgtttgttttttattgtcccattgctgatctctgtttgttttactattgtgttatcgatttgctcatgatcttaactctgaatatgatttcgtattgatctgtggcttttgggacttttcagatttgttagatcatgctttttaggtcgtccactcattttggttgatgggttctagaatttgaagattctgtccttctcatttgcttgtttgtctttatcaataagtaaagaataagtgggtctcgtttaacttggttagctttactggatatactctagtgtaaaagtttggcctttttttttgtctgttgactcgatcgtaacaattgtactgtataagtgagtgtttactggattgttactggagtatcatctttgttcattagatttgttattttagcataatccatctgagcttcatatgttttatgtttaatatcgttgatcttatatataatgctaggaatgcatgattactccttatcagtgaattaatccagatacatattgattccctgtgaaattatgtttaagatctattcgtggtttgtggatttcatcaaatcatcctgacattttgttttccggactaaggtttcttagatctgtatttcatatttttctgtctcgtctgacactaagtaacaattccaaatgtcagacagaggaaaag

SEQ ID NO: 72495 - DNA, 663 bp, Prunus persica
  Intron number 3 from transcript ppa008963m (locus ppa00896 3m.g) derived from phytozome v7.0 (chr-ID scaffold_7; pos 7731997 to 7732659)
atcgaggcaaacttttatcatcatataaacacgtactcatcttcttcttttaccatcttattttcttttcttgttttattagaatttacacatctttattttctttttcttttttgggaaaaattagattggatgaggaactagaaacatttttcatcttagtttattatgtcttcaaattgtcaagtgcttaactcctggcaggaggaaaatattctgttcttattttagagtgggacttacatcatgtgaccacattttcaaagaatacagtaagtctggttctggtgttggacttgttcacaacctcagactataacaaactagaatctagctactacttgacaatatgacttcttattgtttatataatcagtgagttgtattatctaatctaaaggtagacagcacatagtgcttgttttgactcaaacattgaggctattaattttagaatgacacattggtacatcaaatattctttcaggatcatgtcaaaatgattcagataagcactttggacctaaaagttactgaataataagtttggtttgacttttctggtgattatcatctttatgacatagagttgcatattaaataataagcaaggatctttatgacgtagcattgttttatctccaggtctcagttgtaattcac

SEQ ID NO: 72496 - DNA, 679 bp, Prunus persica
  Intron number 1 from transcript ppa026912m (locus ppa02691 2m.g) derived from phytozome v7.0 (chr-ID scaffold_1; pos 31675356 to 31676034)
gtgggctgagttgtgagtttgtgtcgtgtgtgagttcagttcagttcagttcagttcagttccaacgacattggattgttactttacttttgccctttctttctttccgttgtctactttcgaagaagaaaaaccgacctgttcctatccatgatgccatgccatgcaagcgtgggttgatggggccgggtatgaaatgaaagaatgatgaacatcctaaagcccagcccaacccaacccaatgcatgaatgtcagcatcaagcagcatataatatgtgcgagaaaagaactctaagaataggcccaacccaactatctcatcaaaaccagggagagacaaatcgttaaatctacaccgtcagtcaatacacactaatagcaattggggaaacggacggtagagacatacacaagtcatcgatccgcgccaactgaagatggcggggttctaataattgttttggcggcaaccaattttccctcttcggttttcgtcgaatttcaaactgaaacaaatcaaaatatatatttgctttgggttcacttcaccctttgatattcagacagcgttcatactttcgtagaagaagaagaagaagaagaagaaatgggaggtgggtcaatgaaatcgaacccaaccaaggcgaggaagagggtggaggccactgaggagtcaag

SEQ ID NO: 72497 - DNA, 697 bp, Prunus persica
  Intron number 2 from transcript ppa025267m (locus ppa02526 7m.g) derived from phytozome v7.0 (chr-ID scaffold_1; pos 39324592 to 39325288)
gaaaacttctcccaagccagtattatccatcttgggtagtcttcacgcagcgccagaagttgagttttatttcacaaaccccccaacttccctgttttatcttcttcatgttttgccctttgtgtgtttgctttatgtcacatgcaccaaatgtctcacattcagaaagtacaatttgttactctaaggtaaaaatataagctgggtttgtagaggtaagtttcgcgcttattagtttcaccgtgcgattgtgtcagattcaatattagggaatgcgcaaaatattgcaatgtcgcgcacagaaaatactggatgtctcccaactagagttctgatatcatattaaacagttactagtactcaaaagcttaatagtgtcaaatgtcccacatcgaaaaaaatttgatatcatgaaacagtatatgagctgagctcttccacacccttttctatgtatatgtatatgtgtatatatctaacaagcatatctttatgaattacagttgaattggcttaaccaccatcttcaaaagatgtggccttacgttaatgaagtaatgcttgttctctccctcctttcttttttcttttctcactcttttagtttcacctcttcaatagtcaatcttctggttttttgttgtttcttttgggtgcgttgtgatggattaggcagcatcagagctgataaagagca

SEQ ID NO: 72498 - DNA, 704 bp, Prunus persica
  Intron number 1 from transcript ppa002887m (locus ppa00288 7m.g) derived from phytozome v7.0 (chr-ID scaffold_4; pos 4056493 to 4057196)
gactttgacaattttcttgttagtatttgttattaaataagaataattcctgcatgtttcagttttgcttttgattttggtcataaaaacatttaggaatatggcttttacaattttggtgttgcttttgaaagtaggcatttccattcgaatgttggttgtcgatacagtacctctttagttctgggccatattcgttgtttcttgccttggatatggctcttttcccgaatcgtgatcattttttcttcttttgttcatgaaatacatttattggataccggagaatgaacagtctatagtgtgcatagaatgaacagcctctagggactctacagcatgtagagaaattgtgtagtttgaacattttactttgaagatccttaatagttgtgttaaatggaccttctttgtgcatagaatgtaatagatgtgagattgtgaaggtgacaatgtctcgcattggaaagctgagaaacctagcaagggcttataaggtgttggctactccccccattgccaattggttttggggtggaacctcaactttcaaatgtgggacattgtcaccttcacattctcacaatagattcgttattttatacttgtcaaatttctctagaggtttcactttcctgtttagttaacttcttatttggtaatgtttttgtgttaagagttcctttccctttgtaaacagataa

SEQ ID NO: 72499 - DNA, 910 bp, Prunus persica
  Intron number 1 from transcript ppa003476m (locus ppa00347 6m.g) derived from phytozome v7.0 (chr-ID scaffold_5; pos 15945576 to 15946485 reverse strand)
aaaagctcgagttcttgaagtggaacacagaaaaggtaacatatttaagcttaatttttagtatagttggatttggttaattttaatttcactgtgatttttgtaccaatttttagtctttagtttaattgggtttgagagattgtttattggatcatatgctgaaagaattgcaatttgattgacattctcgaagcttttgcatgagctgcattatagttcttgagagcaagttgaacttaaggacttgaggaacttttactgcttgcggttgtgctaactttttggccttctctacttcacctttttgttctcgtagtgcctttaggttggatcaaatcctgcacttcatcagcttcattgtctgattttcatcctttggttcttgtggagtcgataccagtatgtcttctaaaatggaagaagtgctgttggttgttaatgtactgctctgtttccatttctgactactttgttatcatatttagttgtctgctatgtttccatttccaactactttgtttaacatttgtgttatcacatttagtttctttgtttcaatctccttttgtgttttgctttgtgttgtcaatttttttcttttgctttcaaatgcagtcactgcccactttcttaggttattctcttagtgccagaaaattcatatgcaatccatgtaaaaatcctggtctgcctacttgtgagtcacatgatgcagctatgatggtgatataaatcccttcataggttgttctagtattcgtaggttctgataatctacttctgagtgatgcatatatgtaaagttcctggtctgtctacttctgtcaagcttctaatatttcatcgttcttttttcattttgcaattcatagattcagaagatcaattttcacggtctcttgaggtg

SEQ ID NO: 72500 - DNA, 881 bp, Prunus persica
  Intron number 1 from transcript ppa006410m (locus ppa00641 0m.g) derived from phytozome v7.0 (chr-ID scaffold_6; pos 743576 to 744456 reverse strand)
tcagaaaatcaattccaaacactcggatttccaaggtacacccatccaatcctttgccaattgcttgggattccttcatttgaagaaagataacttctttatttggtatctgagaaaacccaggaaaagttatgaagaaggattgaaaaaacccttctatattcagctgcactgttgctttttggcactggcgctaataatttctttgcgtttttcgaatttaaagacaaagatggttgaaagccatgattttattattatgattttgccctgctctttaagtaattcaccccttctgtcagacgtgtactcatcatttcaaaactttcaactagcatattttattttcttacgaagctgaatcatatatttttttttttggtcgaatctgaatcatatatatatatatgcgcgtttgtctgtctgtgtgtgtgtgtgtgtgtgtgagagagagagagagagagagattaatcataggataataattaactcaaagctggtttcattttggttgtatcaaatccattacaaatctaagtttgaattattgaatgcctgtgaaattttaaagtaattaacttttgtcaaatatgtacctatatttggtttttcaaataatcaaatgacattggaggagagggaatacaaacttggtacctcggatggatgtaggtttgtaagctacttgctcccactatggacaggtttcatgaatacaagtggcaagtttcatgtatgtaggcataaatgttgtaaatttctcaccagtgtggccggctaactgcatacatcgtttgttttctatatgtttccacattagattctattaatttttcaataagctaaaagttctccctttttatctttagatttaaagggct

SEQ ID NO: 72501 - DNA, 665 bp, Prunus persica
  Intron number 1 from transcript ppa006625m (locus ppa00662 5m.g) derived from phytozome v7.0 (chr-ID scaffold_4; pos 14716606 to 14717270)
aggttagttgggttttgttagtttctatttttggatttggcagttgattgtaattatgagaggttttaatccatttgttgtgagggttgatgtgattttggtttatagggtttcaaattgctgagttttctttaaggaactgctgtttttttgggggttttgttatatgtgagtttagtgataggttttggtttcctgggtttgatttgcattatggtaatgtattctacgttttgggagtttccaagattggagatttgctatatgggtctgttaaaaatgatttttgatggtttcgatttttcaaatctgtggaattgaatgcatatggtgctggaagaaaatttaatggcctaattacttggaagtaatgtaatgcaattgtgaatgcaacttttgttaattaccgaataatggggagtttccttatctaaagtggatgcagattaattgtctgctaaaatttggtgttgaaataatttatataaagaaagaaaaaaaactgcaactttgagagaatggttataactcagctcttctttttcttcttgtaattgtagttaatgttctataatgattatagtattattttcttctttctaaatctggtataaaagtctgtacttgcagtggattgaggagccaacacttctggtgacacgctt

SEQ ID NO: 72502 - DNA, 856 bp, Prunus persica
  Intron number 1 from transcript ppa004347m (locus ppa00434 7m.g) derived from phytozome v7.0 (chr-ID scaffold_3; pos 19463564 to 19464419)
cgtatcagcgacttcaatttcggagttaatttcatgtaactttctctctctcattctctgtattatctgtttctgttgaattgcatgcttgtgtgggtgttttgtttaattgtcaattatgtgaatttatttatagtttctgggatctgttgcagctaggtttattggaatctctggaattagacaagtattggaaaaattggggaaaaaagctattaagtttggaaatttgggaaatttttcttctggttgaagctactgactgatttatatgaattgggttcctatttctgatttggaagtgggtttttcgacttctctttttaccctttaatgtatttccctcttattgttatcttcctcaaagatgcaattttttttttttttacatgagtgatgtatggaaattggggatgggagttctgtctgaggtgttgctatgactgagttttggcccttacgcacccatagcgggttctcttacttttactttgtagttgcaattgtagtataattagctttttgctctttcggtgtctgatggagtaagggcagaagcatttcgatattgttcacaatataaatttgctccacaaataatcaaacgtctatgttctttatgtttatctgaaattacagttccaatcgaagtcgcttattttttattattgttttgagtatacacttgagtgtacatttgcatgcttggaatgacaagtctgctgatctagattaaatagtaaacattcctggtgcaattgtaaatctcgtcttccaaaatgtatcggtgtttgcactctcttgcatgtttatctgagtttttatttatttataatcatgcctttagattaggaaa

SEQ ID NO: 72503 - DNA, 316 bp, Prunus persica
  Intron number 1 from transcript ppa002895m (locus ppa00289 5m.g) derived from phytozome v7.0 (chr-ID scaffold_1; pos 25193067 to 25193382)
ctggttgctacttgaggtattcgactcagaagttttatagtaacaatacgagcactgatgctgcaggaaatggaggttagtttggttttcttggcttttactttttgtctgtgttattttgatacaaagaactggaagtggattgagatttcgactgtaaatcaatttcgaagcttcatgtattgaattgtaaagacttttgaaatttggtttctgttgtgaatgctccaaatctgttcctgagtaataatgttcaatgttggcatgcaaatgtttgttaggacaccgcggcttggccataattttggctgtaaca

SEQ ID NO: 72504 - DNA, 849 bp, Prunus persica
  Intron number 2 from transcript ppa021908m (locus ppa02190 8m.g) derived from phytozome v7.0 (chr-ID scaffold_5; pos 14928362 to 14929210 reverse strand)
ccatctttataatctactctccgggctcaaaacgcgtaagtattattaattagtgatatttttctttttaaggtgttggaaagatacttggctaacctcctttaaattcaattttcgttgcctgcaactcttcactttttgttcctataaacgatacccaattgttattagtaaaaacccatgactaggatccaactcatcaagttaccttatcaagctccagatatgatttattataatttttagattcccaaaatacccctatttaaaattcaatatgttatgtgatggtgttttaattttaaatccccaatttattgtggtgattccctccaaaattttatctataaatcaatcatcattaactatcggtttataatggggttgatttgcatattttattataggttttgattgtgagtttaaccgtttgggtcatgctggcaaaaagaagaaacctttggatcatattcatatattcttttattcaatgtacctattttttaatatagaaataatgaaaaataggcatgttaatttttaaatctgtttttaatttataaaaagtgtacaaaattttctattacaaagtaacatacctattttcttacataataggtaccaaaaaattcatttatccgagctatgtatttttttaccttttttttttgtaaatatttttttaatttataaatagtgtacgaatttttttttataacctatttttgtaaatatgtttcacttaaacattgtataatttgtggatttgtaaggacttattttagtatgacccttttttcttttcttctttcagaaaaagatcttcattgcacttgtgactgaagttat

SEQ ID NO: 72505 - DNA, 750 bp, Prunus persica
  Intron number 1 from transcript ppa004750m (locus ppa00475 0m.g) derived from phytozome v7.0 (chr-ID scaffold_8; pos 15975967 to 15976716)
gggtttgctcaacccagtgctcaaagggccaaaaggttcttccttttcattgtctaatcttccaatttctctgctgaaagtttggtgttaatttattattgctcatgtatttgcagtggtgatgtttagggtttatctattcgattgagagattcattggtatggctaataattgcagaaatttttattgtaaagcaaactaaccagccaactttatcccactcagctctgttcgttagcgcgaagtttttagaattaattagcaaaatgttaagtcgtgattgatgagttggttgcttactaaaatgtagtttgtgtataacaaaatgtagtatgtgtataacaaaattagtttttgtactacgagtacgaaatttttgctttttgtttcattcttgttgtcctttttgttgttgttgtaattcgggtcttggtaaatttaccagtctggctaactgtaatgattcataatgcaaattgaatgttgtattgttaactgtttatcatactaaatgttagtcttctctcacccccaacaaaaagataggggattgcaattttgttatgttttcttcttgtttagagcaatatatgtagttcttgtgttctactgatctgttctcggcctaataatggtagttagcattttttgttttatagtatgggtgttttctccaattgctcaaaaacagtcttttaagtttgaatggtcattgattaaacattttctttctcattcagcggttcacc

SEQ ID NO: 72506 - DNA, 587 bp, Prunus persica
  Intron number 3 from transcript ppa011288m (locus ppa01128 8m.g) derived from phytozome v7.0 (chr-ID scaffold_4; pos 722218 to 722804)
gtgcagtgcgaggggtgcaaagactggtgattttttcaagttcttttatttcttagtatattgcgcgttttttagatttgagttgtttggatgtgttgtgttgtcttacttgaatattgtccccaaagaaacatcaaataaagtatctttaatggctctaacaattgcagtcttgatcacttgtttagtatgtatgcagacaacatataagttttggaagaagcaatttaaacatggaaaggtggaaaagaaaaggaatgagcttttgacaataatttcctgtgtctcctggtggctttaaattatatttctactttaaccaacttaaaaattgcgctgtatgaaggttaatttccatgtctgttgcttagaagtttattgctcatattcatgcttgagagtggttcctgaagtccatgatgggcttaatactatgaatatttaattattgaatcttgtttggaagaaatttgggtcattgttgcaacattattgaatctcctctagtacatcttaaataccctcatagatgtttttttttttttttttcactatggacttacaggtaccatcctgcttgcgtgggc

SEQ ID NO: 72507 - DNA, 441 bp, Prunus persica
  Intron number 1 from transcript ppa017468m (locus ppa01746 8m.g) derived from phytozome v7.0 (chr-ID scaffold_7; pos 16104514 to 16104954 reverse strand)
caaatccttcatccaactgtatatcaaagaggtatgtcttctttatctttgaaactaggagtttttttgtctatgtttatacgcaacgtgatataagcaaaataggcaatctattcacccagacccaaaaagagaaaaattgccatattttgttttgtctatctgaacgcatcatcttattcaacaatttcacatactaaaattgcagttctgtattctgcatttgtcgtaattttttgtgtgtgcagttttttagactcatgtcctcatttcttggcttgtttttgaaccgtaggatgatgtcttattcaaagtgcttttgcaactgctttgtgtaccttgttgtgcagaagaacagtaaggaatcaatatcctagttttccattgttttaaaagttatcgtcatggattccttttaacaagatttttgggtttatatag

SEQ ID NO: 72508 - DNA, 937 bp, Prunus persica
  Intron number 1 from transcript ppa012294m (locus ppa01229 4m.g) derived from phytozome v7.0 (chr-ID scaffold_3; pos 20546436 to 20547372)
tccaagtccctgacgaagacggtcctctctctccttctgtttttctttttttgttcccattcaatacttatgtttgtactatgcttgattgcaaagaaaatggaggaaatagaagcaaaaattgaaaggatagggaaatcagaaccgaacctatagttttctaatggaaaatgttaaaagaatcgcagattatgtgtgagtgaaaaattggctttgcgatcagtaagttgctgtcgtttggttttgtaaattgaaattagtcggtgatgatcattgatgtgatataatcttcatcgtaattaagaaatcgttagtaagttttggtaccgaacgggaagcattgagtatgaaggtgcttgataactttttaagctttctgccacttctttcaattttatagtcaatttgctagttcgtttaagtggtgagtttttgtaatttgagttcaatatcgagtttgatcggttacaagatctgaccactttttgtacaatttccctttggttatatgattgtttctcaaagttggcttgttatggcgacttcattttaaatcatgtagtttcttgtcattccaaaatgagttatgtgacccaagtatcatcatcatcatcatcataactgttgttattgtggtcatcaagcattgaccatgatcataacttagagaaattatgaccctgaattgatttgagttcattgttatatgaaaaatgtgaatgaatatgcatatagtccatttatattgtatctagttgagcttttgtatattcttgtgtttgagcatgcttaacacttcattttccattactcagaaactttcttatcctttttccttattattatgatgtgatcctgccgcttgtttcaactttgaaccattgttcctaaccatacttgtaataatatgtgtgccctctttcgataataggttttg

SEQ ID NO: 72509 - DNA, 556 bp, Prunus persica
  Intron number 2 from transcript ppa023571m (locus ppa02357 1m.g) derived from phytozome v7.0 (chr-ID scaffold_7; pos 13311799 to 13312354)
gcgcggtatttataccatttgtagcaatcatagatgttgatttttgctgtgactgattgcttcagcgaccgtcctcgcccaaccaaatgctgtttcgatttcggcaatatgtctgtccttgctaatgaaaccagatgtatgaaatttttttattttttaaaatattcagatgattaagaaaactatatatatgcagaacttcgaattgtgaattatttacttttgctttgggaattttggaagaaaaaaaaagaaaaaaagaaagaaatgattagttaatgagaattttgaatgatgtttgtgctgtttacttgcatgaaatcatgatgcagttactgttaatgagctagaggcattgtatgagctgtttaaaagtcgagtagttcaattatcgacgacggatcaatttctaaggtcagccaaatttctttgaatcattcaaattcaattatgaaaaaatgtgttgtttctttctagtttcatgcattgtagtaattatttggatgatgattatgttgcagaaagagtttcaactagcactattcagaactccttg

SEQ ID NO: 72510 - DNA, 993 bp, Prunus persica
  Intron number 1 from transcript ppa003014m (locus ppa00301 4m.g) derived from phytozome v7.0 (chr-ID scaffold_8; pos 14663191 to 14664183)
ctcggggcttctaaattctcgggcttttcatctcggtaagattggatcctattcgtagatctctaaaattgctttaattagtcacttagctcgcgttttcttgttcatagtgagtgttttcatttaatttcgttttatgcggatcttgtggttatttcaatttgacttcatcagaataatctgatttttttgatagttttcttcaattgaattcattgtatatgtatatgcataggtttttatgtgtagaaatgtaacttgaagaatggtgcttgaattgacaaaattgttgtgagttggagataagctgaagttttgtttctatttggttaagcatgccaagggctatgtgttagactgactgtacccagaaatggaccattctttttatttaaagaagataggctttagttttgacggttggcttggagagagcaagaactattggaaatgcggaaactaagaattccatgtttctactctcgggattggccgggaaagcttggaaacagttggttagatttggggaaacctgtttataaaaccatttgtttcattattgaagttttaagcttggatgtctcctatgttttattttcattttgacgtagatttataaaaggattttttttacacgggtagagcaattaggtcatggtgctttttctttttctggtctctcttgtcatttgaatttgtggagggatagttgcctggttgatcatcggtgtaatagtattaatcgtaagtgcttcagttttatgctacattaactgatggacgttgtccataattgcacatttctgtttgtctttttctcttctgttttagcccacggagagaataagaatgattagaaagtgagaaagaaaacagaggaagattggaatattttggttttttcttatatatttttggctgaaaataaaaagcccatggtttttgtcttaaaattattgttctgcgtgtgcttttcagctacagaaagttcgt

SEQ ID NO: 72511 - DNA, 904 bp, Prunus persica
  Intron number 1 from transcript ppa014848m (locus ppa01484 8m.g) derived from phytozome v7.0 (chr-ID scaffold_7; pos 7421887 to 7422790 reverse strand)
ctcaatcaaaattggtgtgacccagatattattcctccataggctttgaataggggcacatgtgtagctcttttggagaagcagggggagcccaacttccaagcccatattgacccctccctcctagtcaataagccttgtattaaggtggtggctgacatggaggaatctggcccgtttgaggatgaccaagtttatcaggaaattgtgagaaaaggaaaaaagaaactcatgggtgaaggaagacccacttcatcagttaaaaaggccaagttaaatttgagccctagtcttggtgtatctctagaggatggtacattgctcatcagaaaaataaaggaggaaaagttagagagcgaggaggaaatgtcggccaacaccaaatgtgtgccacaagtgaaacaagtctgcgagatgtggttgttaactcctccaaagagatggaagaagctgaaagacgatgaagcaagttgaattctgaggagcgaaatagggttcaaggtcgtggtggctggccttcaacagtcacacggaatcaatgatacaactagtctggaactgtcaaggtttggggaaccccaggatagtcctgtacttaaaagagttgattcactccaaaaaccctactatctattccttatgggaacaaggatgaatagacacagattgaatcaaattaggaggtagtgtggattttgtaaaagttttgttgttgacccaataaggactgctggtgggctttgtttgtggtggaaaccttaggtggaagtggaaatactagactagagcaaaaattggattgatacttgtgtaaaatctgatacagatcatacctttggaagattcacttggttgtatggcactctgtataatacggagaagactgctttctaggagtgtatct

SEQ ID NO: 72512 - DNA, 537 bp, Prunus persica
  Intron number 2 from transcript ppa027130m (locus ppa02713 0m.g) derived from phytozome v7.0 (chr-ID scaffold_5; pos 6462189 to 6462725)
tgagaagaaatgtatgctttttcatttctaaatgaatgtcatattagaagtttcttagggggcgtttggtatcctattcaaatagcgaactcaaaaactttgatttttcttaaaaacaaggagttcttaaatctatttttatgattcaaaaatttgtttggtatgcaacttgaatactgttttcaaatctttaaaatttgagaacttgtgggttgttagaaaaaaaaaattgaaaaaacagatattttttgtttttaataattgagatgttttttagttgttcttgagtttgaattttttaaaaaatagggctaccaaataggttttctttgttttggactcaaattctgtttttgagttaaaaaagttggattcaagttgaataccaaacaggcccttagcttttggatatttgctctaatttgaatctttcaaaatagggacaaaatttgtagcatgttagaagaaatgtattgctaaaaaaacagtaacctttgtgtagttcattggagttgccctgcgccaaacgaaatcgat

SEQ ID NO: 72513 - DNA, 419 bp, Prunus persica
  Intron number 1 from transcript ppa013775m (locus ppa01377 5m.g) derived from phytozome v7.0 (chr-ID scaffold_8; pos 19838461 to 19838879 reverse strand)
gatccgtacagcttttccgtgccgatcccgaatctgtacgtaactttctttttcatattttctgtttgtcttcccagaaaatcaaagaaaaattagtagaattgcatagtttttaaatatgtgtttaacaagcgctctctacaagcaagagcgagtaaaaattttcgttaggcacagtgctctagtggactggatgatttattttcttttttggttccagtcttccagtgcatgaaaatcctaatcttcaatagtcttgttgattttgtgttcttatgttttcgcaacaaagaattaattgttttaaataccttccaaacaaaggattaattggtctgaattatttttttatttatttgactgggatttaccgatttctaatcattctgatggatctattttgttgatgtagacgcgat

SEQ ID NO: 72514 - DNA, 737 bp, Prunus persica
  Intron number 1 from transcript ppa019179m (locus ppa01917 9m.g) derived from phytozome v7.0 (chr-ID scaffold_2; pos 11304625 to 11305361)
ggtattaggcccaacgttaaacccaaggtaagaattaggctcaacaagtgatatttgagtgggtttggcaataatacagtcgtttattcgaacttagccagtccaagagaggaagactaattgttcgttcgggtttagccatgaacccctcacgacatcataggctcaatccgaaaaaattcaaatcaaaatcaaattatttttcactccacccgtgaagtctgtagagaaaaaaagaagggcactacaggaaccaaagcctgcgtagcatgatttagccctgtagggaccaaatcccacgtagcatgacctaacccgtacgccatgattaaaagacgtggagcggtcgagcttccctcccaccaaagaagtgcaaagcgtggaagacatagcccaatcatcccatgatcggggagtggagaatggtatgcgcaaagctagggaagtggagttaaacccaaagggctcggagcgatctaaaatcctaaccatacctccaacaaaggtacgagaaattcaaatgagcactaagaattcactgcacaaacaccgacttgagcgtcggagtggcttttgcgggtactgaccccatttcctcgttcattctcggaaacgcgatccggagtttttttcaaccaagtgcgcggaatgtcaagaacctgtggaggtatttcttcatgaaagaaattttactccaacaagaggattacaaatcagttcgcagacaagttaggcga

SEQ ID NO: 72515 - DNA, 832 bp, Prunus persica
  Intron number 1 from transcript ppa010214m (locus ppa01021 4m.g) derived from phytozome v7.0 (chr-ID scaffold_3; pos 791752 to 792583 reverse strand)
ccgatcttcctgaattgctaaattgcaggtcagccccttaattgatctcaaaaagattcaatctttgctcgaaatttactagtttgttgattaaattccgaagctttcgatgtgattattgtactttgttcatcacatttttggattttgatttgcataaaatatatttattgcattttctgtttttttcttggggaagaaatgaagcttctttgtatggacagttgtataattagggaacttgaaagctggagttgaagttgatgctctctacagattagtaaagttggaaatttttgctaattttacataattgtcatggccaaactgagaaagggattatctccttaagaaattcaaagcaaagaacatgtttttatcataagctggtaattagactcatgttacatgttaggctggtttcaagagtttgtatcctacctatgaacgtaatcaatatcaattgtttgctatgcttctgcttagagacatattcattttttgctaagaacttctgtttgttcttgattgatacttggtatcttcatccttagccttctactttcgaatcatcaaaatttctgcagatgttttgatacattaatcttgattggagtagaggttgggtgttgaacttgaaagaccatatagtttatacttgtccatgtggatgttttatggaaagttcttagagcagtttagaatgttagattattatttttagtactggaattgattttaatttccatatctaacaagtaacaacaccttgacatgtaatgcagattttggttcctaactggtgtactttttgtctattttataggtttcc

SEQ ID NO: 72516 - DNA, 306 bp, Prunus persica
  Intron number 1 from transcript ppa022904m (locus ppa02290 4m.g) derived from phytozome v7.0 (chr-ID scaffold_3; pos 18911574 to 18911879)
ggctggttttggctataaatgtaattagtgaaggaaagaaagctttggataatgggcttttgaatggggcatgaaaggttttgatttaacacgagctataaagtatttagcagacgacacgggaataattttcagcggcctcacatcacagctcttaatgcaatttaaacaaaaagtaatcttcgtccaaaaaaaaaaacaaaaagtaatgtaattctaaatatataatgttctcaagcttctaacttccatttctatttggcaatggcagacccaacaagctcagttaaagtcgttgaagtttgt

SEQ ID NO: 72517 - DNA, 480 bp, Prunus persica
  Intron number 1 from transcript ppa002286m (locus ppa00228 6m.g) derived from phytozome v7.0 (chr-ID scaffold_5; pos 11315144 to 11315623)
cagctcatttctcagcgataaaggtggtttcttggcgtttgattttgtttttgtttttttgtgaattatttaattacttaccttgtctaggactggcttgcttgttagtattatttgaccggtaaattggggtttgatcttttctccaggcgtagatttgtatttccccaaattttgaggttgtgatatgtttttgtaggaactgaaagcaaaagagaggaaaaggaaagaaatatttgcttaatatgttttccaattcaagcatttttctctgatttccctcatttattaattactggtttaggtagttcaatatttataattttagttacccagatttcttaatttggatgtgtatctgggtaccctcttaacttcataatttatgattccttggttgtaagtgcatgctcatttttgttactgaaatttcttaaatttttgttctggggaatttggttatgttctcagaggtaacaa

SEQ ID NO: 72518 - DNA, 1024 bp, Prunus persica
  Intron number 1 from transcript ppa010730m (locus ppa01073 0m.g) derived from phytozome v7.0 (chr-ID scaffold_4; pos 1353813 to 1354836 reverse strand)
ccgtctcattcatttgtcgctccggccgctccgaggtaccacaatccatttactttcttcaaccaatttaatcattttgctgcaattgggttttccttgctgttgaatgtgaattgggtgtctgtttttttggagggtaaatgttgtttttattagtactttattcgaagtctcaatttcaaatttgttttcgttatttattaattctggaggtttttctttgacgaatgaggtaatataataatattgctggcctgaagtataattattttctagcctatatgaaatacagtaaaaagttggatgctttatgataatcatgaactgcaagtcggctaagcaagcattgcatgtgcagggtacatgctcagagagtattgtgaatataatattgttattagcagcttagttgtatcaaaatgataaaaagtggatctgtggctgttctctaatttaacacgatgtcgctaagttcattaaaatgctggccgctttggttatagacttgagcatatgctatgtccatttaagctgaatttactttaaaaagtgattatattaagtttaaatccttgaggattttcaaggttggctaattattcgtaattggttttatcatcaccttcattgagtctgtggctatgaggatgccatttttgcagggtttatgatgtcctcctgcagttcattgagttcttttttttgtttgcgcaaattcaagtatggcatttttgtttacatgtgtgtgttttaagcagtctgttatgttaatctttaatgggttatgaggatatttggtaaaaagagtattttggagtgcaagtaagatgctgctggtataagggaactaactaaaacttatctgcatttttctctttctctgagtactaaattatcattttttcatttttttcccattctgcttaattaacaacctggctatactatgttgacgaagatcaacttttctttgttctaacgacaaactcatttgtttgctgctattttctcagcgtggactttg

SEQ ID NO: 72519 - DNA, 630 bp, Prunus persica
  Intron number 1 from transcript ppa002998m (locus ppa00299 8m.g) derived from phytozome v7.0 (chr-ID scaffold_1; pos 37017360 to 37017989)
gtgcacaagctttcgatctcgacatcgcaagcgaggtaatttttatgcaatttcagttgaacttttgaactaagctttatgtcgttgttgttgtggtaggaaaattgtactaaataggtatggtgtgtttgaatggcaaatgtggttgcttagggagtgtgtattttacatttatgagccaatatgctaattttcagatatactggtattattcatgcacattaataacttaaccgaaaaaaggagtgaaaatcaactatcttaatcatagagaagtgacagcaatgcttttgacattttatttgatgttcttattaggcctgtatgatttaatgcccaagcttgtctatctttttctaataagcatatgttcaagccggcacggattttgtatcaataatgtccggcatttgtgttgataatctttgataacacgtcgatatattttgctattgacatgttttctattgtgttatcaacaccatattgacagtccagacgtcctgcagagagaagaactgtgtttaacccctagattatgatatctgttgtattatgttcttcttgacctttgtatgcatgtgtttctcctcagtaaacaagagtctcctatatcacggcaacgtggcg

SEQ ID NO: 72520 - DNA, 770 bp, Prunus persica
  Intron number 2 from transcript ppa006442m (locus ppa00644 2m.g) derived from phytozome v7.0 (chr-ID scaffold_2; pos 23860218 to 23860987)
aagggagggatcagatatcatcctgaggtgatgtgtttcgttttgtttccgttgcgtttttgtcttttgctttgttctttttcatgatctgtttattttgtgttctgcataatgtcatttgggttttggggggtttttggattttctgtgtagatccaatgatttgattgctttctgagataaagctgaaagatcatcatactttacaaaaaggtcaggagggaagagtaataattgaagataaaaactttgagtcctaacttttggccactaatcgaattggtataatttgccaaaataaataaaaaattttacacgaagaaatatatagtttaagaccaaataacaataaattacgcttttgggtacctgtattttgttttggcttacaaaagtcagctaattggtttggctaaacagttcatgtgtaaagtaatcattcaaggttctgtctttgcacaggtcccttaagtagttatgttttcaacaaatgtcattttacttgtttatttgtcacttagcctttcttcttttcttatgagaactgagaacccagatcccagatcatttcccctgtttcgcgccaacaatatgcaatgtttcacatttctctagtccagtccacatttctaggagatgatttcacatagaacctctgcctggcctttaaaaaagttcgaaaccagcagcataaattagagaaatgtatatgcttttttgtgaattctatattgaaagttttcttattttgtttttaaaggttgacccgg

SEQ ID NO: 72521 - DNA, 890 bp, Prunus persica
  Intron number 1 from transcript ppa009535m (locus ppa00839 7m.g) derived from phytozome v7.0 (chr-ID scaffold_5; pos 17761241 to 17762130 reverse strand)
aagcctgccctttctgcaacaaagttaaaggtgaaaaatgttctctttctctcatggttctttacttctccttgcttcttgaattgcttttgaggttcggtgtttttgctgcctttgaatatttcgcgaatttttcacctaatatcagaaattggactagatttcatgtcgaaatattggattttagtgtggatgaaacattcatttgaataatatccagttggttcagcatttctctgcagtctcgcagcctgtcatggttaaatgacaggaatagaacaaacttttacttgtagttcgcattctatttggaattttctggtaagatttgaacataattttgaacaaatagtgcactgggtttgctggtagcatgataggaaatagccatatgaacagtcaataaatttgcaaccttgtcaatcatttggtgttttggtgttctttcggttattctcgagcacattcaattttttttttcctattatgtcccttttcttttgttatgattctattaaacaacggtaattttatgttcttttccatttatcatgctgtttacaaattggggacactttattgttgtctcagcattcttggactaccacgatataccctacaaaattgtggaggtcaacccacttagtaagaaagagatcaaatggtctgattataagaaggttcctatattgatggtggatggggaacagctggttgactcatcaggtatctgtccttgtggttgttcttagattgctgagttttctggttggatttctaattacaatattatggtgtatgcattgttgaatatatatataggtactagaattacatatctcaattgaaattgagcatgtatctgtttgcagctataattgataagttga

SEQ ID NO: 72522 - DNA, 598 bp, Prunus persica
  Intron number 2 from transcript ppa021355m (locus ppa02135 5m.g) derived from phytozome v7.0 (chr-ID scaffold_9; pos 618406 to 619003)
tctgaactagtttcttcagctcagactgtaagtgagcctttcttctttgatttctaaactttttcaatcttaaggcttaagtcgtgaaacttgggttgttcacttgtttcttgctctccttacttgctttacagacgtatttcagctagccttgtttgatggacatgttctgtgctttgttatgttgcaaaacctgttaacttttaatgtggcttatatatcatgtacgccctttgtatagatttaagacagactaaatgaatcaacacataggcaattgatatgtattacattttctgttttattgccctaaatgttttataattttggttgaagtgttgcatagttgcaaaatacctatgtagtatgtaagacaattgatcaattttcatttctgtggtgcagagtggcaatgatgaatcgattccatttgggatcctcattaacccatggtccagctccactatgaaagtcttatgaaatatgatgtgagatggtttccctgttatagttgcataatctcttttgtagtctgattaagagttagcttatttagtttttgcttttcacacgtctcagggatactggtgtactacta

SEQ ID NO: 72523 - DNA, 955 bp, Prunus persica
  Intron number 3 from transcript ppa003844m (locus ppa00384 4m.g) derived from phytozome v7.0 (chr-ID scaffold_1; pos 33398958 to 33399912)
tgtggtgtctccggctttgtccattcagagctcaggtaacaataaataaagtaaataattgtggtctatatgatcatatgccacatcgccgcctttaatatcgtatgtacgtcaatgctaagcttggtagtctttggtacgtaaaatgagttttgggtgcattaatttttttcaacaacattcttagttcttgaacatcaccagattaattatgaacgttgaagtttcagttcagatcatgttttgaaatgctttgcctagtgattcaattcaagtttcaactgcggcatttttaagccactttattatattatcttgtatgtggctcgttttcacagaaaaacaattgttgtagtttaagaaataatgaaggccgagcttgtattttatggctgtgttttgtctcttctttgatgtcgttctcgcgtggctgagtaggcttggaaaaatgcaactttcacattaggtatggatgtagggatagagagaagagagagagtagttgtcccacggcgacaggcaatggatggatgcacgattgataagggagctctagaatcgagggttaaaaacattaaaaaaagagaaaaaagttgagggaaaggacgctattattgcctgagcctctcctttcttatttctccttttacttataaagcagggagttttagctttcaagtttgaagttgtttccaatgaggacttggcaaaaaatttaaatgaattatgcggccctattcatgtctgcgccttgctttcactttgccttttatatttggattgcaacattgcccgtgtatctttccatgcctgctttgtacaattaagttttgtttagtttttcttcactatatatatatatatatatatatatgtattttatattcataattatttaattatcttctgtttgttgacagaattgccggaaaacccaataggcctctcgccgcca

SEQ ID NO: 72524 - DNA, 642 bp, Prunus persica
  Intron number 1 from transcript ppa002798m (locus ppa00279 8m.g) derived from phytozome v7.0 (chr-ID scaffold_3; pos 5720158 to 5720799)
acagagtctccctttctctctagtctctgctactggtatgtttgtgtatgtttggttgctgagaaactattggaaaataaaaagaaaataactgtgtgtttggattaaacaacagaagaaagataaaaggagtgattctacttttcaattttaattttgttctcatttccttccttttcgcatcaggcaaatgggtttggctggttttgtacaattatcgttgttaattccatgtgtttttgtttccatttgggctgtgtggatggatgcatagatataaacatacaagtcatcggaagagaaatttttgccgctaaatagagtttcatatgtatcagaatgattaatatggaatttggtggagttttagatctaatctattaaaacgcactttgatttatgaactgaattagaaaattttctacgtttttgtgataattgtgaacttttatttagaaaatttggtggttcaagctttatctgaaggattctatacctgatgaccttgtgaaatcacctgttaatgttattttctctttctatagtgaggaccttgatgatttactgtgagatagacatattaaggatgcacaaattgttgacttgtagctttatttttcatccagatacttagctgattaa

SEQ ID NO: 72525 - DNA, 916 bp, Prunus persica
  Intron number 1 from transcript ppa018513m (locus ppa01851 3m.g) derived from phytozome v7.0 (chr-ID scaffold_3; pos 1626942 to 1627857 reverse strand)
gactctgattggtgggatagtttcttcaacccaaggtttttctttcactaagcacaatctccaattactctgcttcctgctttttagcggaatgcattcagattacttgtagtttgaactaaattatctttatattttgcttattttggaaaatctatgatgcacagaaatctagaacaggtggtggattttgttatgtaatgttaaattcggtaatgatgttcataattagagctgaaaacctatcaactgtgcttttgttcagtttggttgttggaaaaatcggcctaggcgctaggcggcatcctaggcgggtctaggcgggtgcttttatttatttatttattttacaattttttttttctgactttagctcaattatgaaatcgcttcaattttttatggccgctatatgaaaactggcttttgattatgtgttttggatcctgaaaagagaaagatgtgggagcaatagagattttggtctgtaaaagtagtatataattgttaggaatctggtttggcctaagttggatgagtagttggaaatcctcattgaatcagacttggggaatatacaggcacagaaacacatagtcgggctttgctgcttgttatatggaagcaagtttttctgtcttcctatttccctttttgtagattttttttacttttttcgggttgatttctgttttgaagtttccatgataactcaactttattctgttttggtgatgtaattcatctgtgcagattcttcactatccaatgatgaggagaaggttttttctttagggtctcaaagaagacttttgaccatatctgttcccttgtaagagaaggccttgtgttgaggcccctgtcaggtctcatcaacatagaaggcttcttagtgttgagaaacaggttgcaatca

SEQ ID NO: 72526 - DNA, 868 bp, Prunus persica
  Intron number 2 from transcript ppa010640m (locus ppa01064 0m.g) derived from phytozome v7.0 (chr-ID scaffold_1; pos 36201576 to 36202443)
tcgaattagagagagcaaagcgtataaaggcaatcattttccttcaagtttcgtatgattctttctataagttttcttcagcattggtttgctcacttttctacttgctgacagataatctattgtattgcaatggctcacaagtgatcttttctgatctggataattttgaaattgaattacctgagtcttacaagtgtgaccgtatgtgacaccaagtgtttggcgttgcccatgcgtggtagacattagattttaatggggagtgtgaggattttctttggattagtttaaggagtttgggttgggttttatgttgctaaaacacttaggggcttggtgacattgtgcatttggcagtgttgggttttagagaatgaagaccatgtacctactgaaggtgcacacttgaagtttttaagttgagcactaacgtggcatgtaaatggatattgtgcttaggagtgacatagcatgtatcagcgtttgtatgctttttgggatagaaaattttgatggaagtcttcctaaaagttactttttactttcggttataccttgataaataagaacaataataggttgctggtggtggtggtgttaaagattaacttcggtactgtctcttttgtgagtcattgggtggcctaattttgattttcactagtatcttgtatcatttattgatgttatttttctaactatacatttatttgaaaatggttcttactgatttattagcatgaatttgtttctttacattgttattattgtttttggttttgttttctgattcctatttatgacaatctttttttcttgtttaattctagaccactgtgtcaaatagttcccttttcgatcatct

SEQ ID NO: 72527 - DNA, 820 bp, Prunus persica
  Intron number 1 from transcript ppa018949m (locus ppa01894 9m.g) derived from phytozome v7.0 (chr-ID scaffold_4; pos 14684322 to 14685141 reverse strand)
ctccatccttcttcacccctggtgccaccgcaatcatctctatctcaatctccgttgaccgatgacacgcctccaattacttctccagcaccgtcaaatccgagcgacgtcaaccatagcaatctcagacagagacggagctaagaactcctctggaggaatgagcttggcaaagaaggcagagatcgtacttagaataatcgttggataacatttgtcaatcttaatacggatacgccatcaggagagagattctctgaaaaactactcatagtctctcatacgcaaaagcacttagaggatatcgtgaaaattttaatttctcgtagtttttgttgttgttaatttctgtgtttgcttagtgtatgattgaattgaggttttgacaatggtgatatggtgattcaatttgattcttcattctttggcgcaccggaagtgctagagttggtcgtagttagaattttgggatgagctcttggcgtaaaatacgtcaatatgagccattgatgtattgctttttctattttagaatgatataataattggaactagtgacttagaagtcattatgcttgtttttctcactgttgttgacttgtttagctctatctgtttatgatatctaatgtttctgagaaaattgccgtctaagtgcagttttgtgtaacctgattctgtaggcttatggggcagatttctgcaactcttgatgcatcacatgccatttcttgtcctgaaaaaaaaaattgtaatatttgtttaaggcaatgctcattttgcagctacctgattgcttcagtgggtctgcaaatcatct

SEQ ID NO: 72528 - DNA, 750 bp, Prunus persica
  Intron number 1 from transcript ppa000695m (locus ppa00069 5m.g) derived from phytozome v7.0 (chr-ID scaffold_3; pos 404595 to 405344 reverse strand)
ctcataggttccgagcctgccagattgtttcttcggtaggtttttaatttggttactgaaccaagtgttggaaattggggtttggggtttggggttttagggctttcctatttttggtattttgaatggttgtttcttggttggttgctgagaaaatgaagtcggagaaagaaggggatattattcatgggatttgatgtgttgataggggtgataggagacgatttctggttttgggtgctggataggaactcttaacgactctatttttcaattttaaactttagcttcttttgtttgaacccacaagtagagacgtatgacttttggttgctctatatgtagcttatgaattatttctcaaaactttacaattgatgaacttgaaaggtgcataaattcttagagctattttcatcacgatggttttattggaaaagaggggtttctataaggttttacttttgagctaccgacacctaaaatcgagatctgtaagtagcatttgatttatctactctggatgttgcacttcgtttgaacttatatggtgaggtttcgttagctttattcattcttggcgggagctttcactgtaatactgttacccttacccccgatttttcatgaagtttttatttttatttttgaagttcataggttgtatgaatttcatactttgcaatagttttccctttttcctggcttgatggaaatttgtactcttgtagatcatcctgcaattaccag

SEQ ID NO: 72529 - DNA, 859 bp, Prunus persica
  Intron number 1 from transcript ppa001052m (locus ppa00105 2m.g) derived from phytozome v7.0 (chr-ID scaffold_8; pos 496286 to 497144 reverse strand)
tggctaaggtgcctaaggagcttaaaggagtaggtagctctagtgggcttcaattgttttttgtgaatgtcggatttgagtttggataatgtaatgtataaatgcatgtttggactattctgggccttctgattattgtaaggtagtttaaatctgtgaaatgctcgctaggatttaatttctttaatgtggatcagtagattacccacttgaattctaatgtagctgtgtggttttgagaatgatacatctgattagtgttaataagatgcccgtttcaatttgaatggtcctatacaaaagaaattgtagaacaagagttgtctgtatgctgtgaaaactgcagcttccgcagaactgataacacaccaataatagataaatttgtttaatatgcatattttaatagaactgattctccaacttgataaatttgtttgcatagcttcacattgatgtttaatatgcatatactcttttttgactgagagatctaagaccttatgagcaacttcaatactattgggcttattatattgaaatcagtaaaagtaaaattacaagatgaggacatgacaaatttttacccagaacagaatcattgtttggaaaatatatgtttgtactattatcgattaatttgttggtggtgaaataattttgttttatagctatatttgcatctgatttgtaaattttgtggtggctcgatattttccatctgtccaaaggaagtatgttgtcgaaaatattcttctatggaaactggacttttttatttgatttcctatctgtcgtgcactgtgagttgatcctgtggtatcatagcttgctcaaaaggatttttgcttgccaggaa

SEQ ID NO: 72530 - DNA, 612 bp, Prunus persica
  Intron number 1 from transcript ppa011892m (locus ppa01189 2m.g) derived from phytozome v7.0 (chr-ID scaffold_1; pos 16563746 to 16564357 reverse strand)
aagtccaattgccaattggaagatctctagtcctggtgagtgatctgggtttttgtcaattttttaatttgtttgcatgaaagttttagaattttcatttttgttggtggacattatggcttgaacattgtaattcatctgatcaaagtgtttttctttttaaatgataagaggggggtttggggggggggggtttaatttttacaaacaaaatgtgatatttttagctagctagtgtttgtagatgaaatgatcatccagttcattgtgatttcatttgtaatgcagatgaaatgtaaattttggttgtctgacttttgaattaaatttgaaatgatgaactgggtcctcaagttttcaaagtgttagccttggtagttggtggtagtttcagaaaaattcctgtaccgtttttgtgactagcaactctacaacttttgtgttttttccttactttgagatgtgtatgcaaaccaagtgaagttactcttgagttgatttggttcccgattgatctctttatttttgttttaatgtctcttcaatacatataaatcttcaaacatctgacctcttggcaactttttgtttgtccaggtgaccatcctgagg

SEQ ID NO: 72531 - DNA, 544 bp, Prunus persica
  Intron number 1 from transcript ppa011245m (locus ppa01124 5m.g) derived from phytozome v7.0 (chr-ID scaffold_1; pos 32660553 to 32661096 reverse strand)
accagcttgctgctatccaacttggcaaacaactggtactgttgcttcttactctttctaaagcttatagctttattgttgtttcccctttcacatattgaatgaagctcataacttcataagcagaacccgtaatctgtaagaataattgatatttatgtgtcatttttgaagttaatcgaagattcaggtacccagaaggcattttcaattgggtctgagggggttttgaactttgagccattgatttggctttgaattcaatctttctagtccgaattcataaaaagtagtaatctttctagtatcttctgattgggttgttttgtgttgggttgggttggaacagtgcatgatgaattattgagaaaagtgatgactggatatttcctcaaggaattaaggaataaacaatcataaagtgatatatgaatgatggcgtaaatgttgggtctcttgtaattatatatgtttgaactgaggcacgtctgtttactaatataaaaagaaacattgcaggttgaaagaaacattgacttggttt

SEQ ID NO: 72532 - DNA, 644 bp, Prunus persica
  Intron number 1 from transcript ppa004655m (locus ppa00465 5m.g) derived from phytozome v7.0 (chr-ID scaffold_7; pos 9062524 to 9063167)
tgagtttttctctctcaaagacaaggcctttccttttttttttcttttttttttgtggttcctctttacctgcttattaataactggaacttttggtttttatagattcgacaatggtagaaaatgaaggccttgctgctgaaatggacgtaaacattcccttgtgttcttcaatcgctaatggttaatactctgcctctctctttctctttagattgtttgtgttattagttttctcaagctgtattgatatactgctaaagagggtcgcttttgtccatgtggttcgtgaagagagaaacagttacaggaaaaagaaaaagggggaagaatagaaagtatattgaaaacgcagaaaaatataatactatgattgaagtaaataataccatattgcctgaaatttgaatatccttttcttccctatgttcttcaattttctcagcagccaagttgtggatttgatcaaaactctctctcatatgttttgagtttgatcaaacagtataatcccatcataatcttcaattgctttttgattatttgtgttttctttttttaatagaaattaattgtaatttctttctgtggctgcaggaactatatgttgtgatagaagcagtattcgttcagatatttgtgtc

SEQ ID NO: 72533 - DNA, 490 bp, Prunus persica
  Intron number 1 from transcript ppa008710m (locus ppa00871 0m.g) derived from phytozome v7.0 (chr-ID scaffold_7; pos 603100 to 603589 reverse strand)
ctctttccgtttgggatcccttgccaaacctaaaggtaacgtaaagtaagccaacaagcctctgtcttctccttcttctgcttcgtttttctttttggtatttcatcgtttatttttccattgtctctgaattggcatatgacacaaacccctgttgtatttcgaactaaatcccagttatttcagtcttagggtttatgggtttgaaatatttggatgtatcacagtaacttggacattttgtgcattagttaagtagtgcgaattttagttgttttaagtatgtactaatactaagttaagtggtatatgaatatgggttatacgtttatgggtatgatttggctttgaatttggtggcaagctgttgctttaatggaaatgtggagagattctgtcattgggttgtttgcaagaatacttgaggatactgcatttggctcataacaatgctcttgatgaaattatttctttgaaaattcaggctgat

SEQ ID NO: 72534 - DNA, 397 bp, Prunus persica
  Intron number 2 from transcript ppa003201m (locus ppa00320 1m.g) derived from phytozome v7.0 (chr-ID scaffold_7; pos 21536817 to 21537213 reverse strand)
tctgctttagaggtaagacgttgtctgcacctttttataaaattgttattagcacattcaaaattgctgtgtcttaaactgaatagttcacacagcatttggtttatgatcattcaataacttgttgaaaagaaaaatctgctcaggaaaatgtatttttttcttcattcgtgtgctgttatgctcagcctaaatccctatttgttggatgcgacctttgttattcatttgacaagggtgattcaccgtcgacagcattaataatcaaagagttgcacaatttttctgtcaacctaacctatgctatattggttgtgttctattttttctaattttgtttttcaagtacttgtgtggtctgtatttaacacttgatgtttgtgttccttattagata

SEQ ID NO: 72535 - DNA, 713 bp, Prunus persica
  Intron number 1 from transcript ppa003201m (locus ppa00320 1m.g) derived from phytozome v7.0 (chr-ID scaffold_7; pos 21537261 to 21537973 reverse strand)
tgacgtgtcaccccttctcgacgccgcctgcaaaggtcagtggttttccccttgttgccctatgcttcaatttcaacttctcagcgactctgttcggtttccgagaaactgaaagaaaatgaaagcagggaaaggggatgagaatctattgctttttatgttttcatatgacaaatgttattggacatcggaattccgtgtaaacaaataaacagattaaggaagcgagcctagtagtttaataacatattctatatctatacaaaacatacacaccatatccgttcttcttgtaagtgcctctggctaatcaaaagcagtggttattctccattagttgaaaacgttgaacgatgctctgttcgtttgctgacaaatgttgaaatattttactgttggaatggttctgtattgctaggttgtttggatgactaaggcttgagttgttggtttttgttggaagtgaactgtggactttgtaattccctattgcttcattttataattgctgagattggtacaaatgaaacctatcaaatatgtttagcaaactctgcatagtatacagtaaatataacatcaaaatcaatataagctgtgtgtgtattataatgctgtttgggtttagcacgtgattgccattctatcctattcttggcttctcattcttcatttatttttcttttgatgacctttggtcacagatcttcaag

SEQ ID NO: 72536 - DNA, 583 bp, Prunus persica
  Intron number 1 from transcript ppa012301m (locus ppa01130 0m.g) derived from phytozome v7.0 (chr-ID scaffold_2; pos 17576880 to 17577462)
attttctcggtaactctctctctctctctccctctgtgcctgtgttaaggatcttcgatctcccagccgatcatttactgtatgatttgtagaaacatttatacaagagaaataatttatgggttgcttcctgcttcacccttttgtggatctaaactccttgctagctttgtcttatctgagtcaatgcttttgcctgatttttctaggcttgatgaccctgttttctcatgtgtctataaatatgtatgattatgtgggtcaaaagttgaatctttgatgcactaactaaccaaaaacaaaagaatccatgaaagttctgagtcacttttgcatagatccatagtaagtttaagttaaggacaaaggatctatctacttctgacaatgggggtgcttggatttacttatgactatgctaagttgaatcaggaaattgttttttggggcaacagaattgatatttggatccacaaagaatttgatataaatctgttctactttttaatctttctgctttaagtttctgaatttgctaattatgtatgtgtgacatgggttgaatgctttatgagcagctgac

SEQ ID NO: 72537 - DNA, 544 bp, Prunus persica
  Intron number 1 from transcript ppa010400m (locus ppa01040 0m.g) derived from phytozome v7.0 (chr-ID scaffold_4; pos 589154 to 589697)
caattgtaagtttacatttacagtcataatttccggatacttgtaattttatatgtaattttgagttagctttttttattttttatgatattacttttgtatgtttatgtaattgagggttatcttatgatcttctggagaattcaattaccgttgctattagttgcgttttgaaggattgttatagatagcttttgaattacatgaagttcgaaaaatctgcctaggcggcctgggctggtcgggtcctttttttcccgactttaaagaaaacctcacgcagcacgctaggttgtcccttgttatcaaacgcattatgagtctatgatgcattcaatcttgattttcaatacgtaacttatattgcttttagaattggggtctcaaattaaagtggagactgcggtcattgttgaaagtgcaggaatctcttcttttttttgtgagggaaagatgtctttgtgctgataaatacatagaaagagcataacttgatctagagctattcagtatactgatctaaggcataactttgttcttgtag

SEQ ID NO: 72538 - DNA, 354 bp, Prunus persica
  Intron number 1 from transcript ppa009086m (locus ppa00908 6m.g) derived from phytozome v7.0 (chr-ID scaffold_4; pos 574972 to 575325)
ctggtgagtaaagttttctttttttgattcctctccacagttcttgaaagaaataagatttatttgaccgaaaatctgtcttttagttctgaaaatttgaaaaactaccattcattccttcttgtcctttctgttgaaagactgcaaatttaaaaagtaaaaactagttcaattggttaaaactttgtgaaagtttcttgatgcatttgaaaaatcccaattgggttttcagtttcttaagatgcactctataaacccaattgaaaatggctgagattgagattaattactaattatgttgtgcttcccaattttacaggactgtgcaaatcaaagtgggtgaaatccagccgg

SEQ ID NO: 72539 - DNA, 754 bp, Prunus persica
  Intron number 2 from transcript ppb018664m (locus ppb01866 4m.g) derived from phytozome v7.0 (chr-ID scaffold_5; pos 17877401 to 17878154 reverse strand)
atttcgacgttctgagaggttaagaggcaaatccggtaatcaattcaatcctttttctctgtttggtagctgagaaatccttacaagttcttttatttggaagttctaaattgtttttcgtgaagggagtttaactggcggagaaagtgaagagaggaggcctgcaaatgcgcctttggtggatgtaaggaaatcggaactccagctttcttccgagtctgcggcccagcgttgcaatagcaagggccgtggcagtgtctatcacccggttttcgggattcattgccatttatgcaggttttatgccttaaccttttggttacaattttttgtcttctttgagttgtatagcaagatagaatgaagtttgatactaagatattagatagctagttggacatggccatcttgttgcttttggtttgattgttagattttggacagtaaacttcagttataactcatctggattttgattggttctattgattgattattggtgtggacagtctgtttgcctagcctgcttttaatgaactaaaatgtacggattttgtcctctctttttctcctggtttgtggaggggctgtgagtaactaactagtttgcttcacaatgttgccatatttgaatcaattgcataacactaacaggcggtaaagatcaaataagtatcaaaacctgtgaattaataatgttcttttaacttttactaaaactattcaattatattgttactagtctaagattctg

SEQ ID NO: 72540 - DNA, 403 bp, Prunus persica
  Intron number 1 from transcript ppa009689m (locus ppa00968 9m.g) derived from phytozome v7.0 (chr-ID scaffold_6; pos 7054215 to 7054617 reverse strand)
ctttgtccttgtttactgcaccgccggtatttctggtacgtttttcttttctgacaacgtttggcagaaataaaccaaagtgcttttgaaaaaaacatttcaaaaatacttgaaatcactttcttgattagtaagacttgaaagtaattcttgaagaagcatataagtgcttgaaagaaaacccaagttttagaagaatttgaatttgaacgttttttttaataaaagcgctactaaataaaaagtactttgttcaaaagcactcccaaacacactcgaagctagctagtttccgtttgggtgctgagaaaaatgaaagaacacagaatttgagtcttattattatttttttcatatgacaattgcaggtggacacataaacccagctgtgacctttggacta

SEQ ID NO: 72541 - DNA, 556 bp, Prunus persica
  Intron number 2 from transcript ppa010384m (locus ppa01038 4m.g) derived from phytozome v7.0 (chr-ID scaffold_6; pos 6956470 to 6957025 reverse strand)
gctaagctcgctgagtaccacaatctggtctctctctctctatctccctctatctctctgcgcttttgttgatttattagtgcttttttgctttgtttcttgttggtttaatatgaaaatgacttctatagaacttcagtaaaaaatggtatagttttgtttttgagtggtgtaatttgtatatttttgttgggagattcggttaaatgtgaattagagaaaaggtggtctttactataaaccatgtttgaactattttggcttgcttctttgtgctaaaaaaagcaaacgaaaggaaaacaaagaaatatactatagccttttttgaatttgattaacaagcaatgaacgtggctaaatgtacccaccaatttttattttctatttctgaaaaagaggaattttgctaattttttgtatatgctctacttgtttatattctctaatgtattttgacttgccaaatttaggaattctgacattttcttcagtgtcatatttgattgtgacgtatttagtttattgacagtttcctgctttgcgtgagtttgtcaaa

SEQ ID NO: 72542 - DNA, 342 bp, Prunus persica
  Intron number 2 from transcript ppa001118m (locus ppa00111 8m.g) derived from phytozome v7.0 (chr-ID scaffold_1; pos 5340761 to 5341102)
cagtgcgcaaagctcagtctggtccttgttggtaagttactaatcattaacaatactttagtgttgggaattcatgttaactcgtagtgttctatacaatttgtgaattagctcggagttgtaactttagttttgattttggggtgcaaagtcagcaatttcaatgtttcaggagcaggatgatgttgtcttgacgagttttctttttagtttctcttcgtccaaataaaattctactgcattctttcggaattttatgcggtgtatttatatgaacttttaaaaataaaaataaaaatttatgcaggtccacaattgccgaagaagattcgagctcttgct

SEQ ID NO: 72543 - DNA, 507 bp, Prunus persica
  Intron number 3 from transcript ppa001118m (locus ppa00111 8m.g) derived from phytozome v7.0 (chr-ID scaffold_1; pos 5341140 to 5341646)
atatagccgtttttaagcgagctcatcaggttggtgtgcagtgttgtgtccatagatttgtttaaaaggaatgaaatttgtcccccttcccttgtcttaaatcccaagctatagtttgtgggtttcagagttcttgcttgtccttctgtttgatgcttttgtatgctagcttagttaagagtgacttcctgtattgatcttgtacaaaaattgttggcacagaagaagcaaccaaaataaagttgagtaaaggaggaaaaatttgattaaactaacggaagtgaatgagtaatgcaatctaatggaagtcgtggttttgcaaaccaatggtcaatgttgtaactctacaattccttatgacggagatggtatcctaatttcatacctcttagatagaatattataaataatgtggtgctgggaagccatctgcatctattatcagaagcatctgatggactgaacttcatgtttgactatagttttaattctttaacaggtagcaac

SEQ ID NO: 72544 - DNA, 755 bp, Prunus persica
  Intron number 3 from transcript ppa003025m (locus ppa00302 5m.g) derived from phytozome v7.0 (chr-ID scaffold_9; pos 1665947 to 1666701)
aggtgtggctcctttctcgttttggttcttaaatctctctgttcttttatcgactcccttatcatattgtgttgtatggatgtatatgcttagtagtactaccattgtaaccacagtgcaataatttgtagaaaagggtccttgatcaactataatgctcagtcaaaacacaaatacacacagagtctctctgtttctgtctgtctgtctgcctctctctctctctctctctctctctctctctctctctctctctctctctctgtggtagtttggagttggtttgaatggctgaacaagaggtagactacttgtaagatgcatagggtagttgcatgacgtgctgtatttcgtgatggttacctgttcaccaatatcaaaattttgttttgactaaaattttttaggccttagaaagagctccagcaagatattagggatgcatgatggatgtatatgttcttagtactggtaatttggaagaaaatccttaagcatccaaaattcttgtcaggaatttttcttgatatgtgcattcagtgcttaatatcttcaagccaacagagaaattaagtgtttgtgattcattggccatacgaaaattgtacttcatatacagatatatatatttctctcaaaattttaggggaatgcttaagctaattttttttttttttgccttctgtttctatgcgtcacatgtactgctacatattcagaatcattgtcttttatttatttattaaggcttgtga

SEQ ID NO: 72545 - DNA, 834 bp, Prunus persica
  Intron number 1 from transcript ppa000094m (locus ppa00009 4m.g) derived from phytozome v7.0 (chr-ID scaffold_3; pos 2173378 to 2174211 reverse strand)
gctctcgaacgcctcgtgacggctaggttctatcttttgttcaaaatctggttttgtgtgcattttcattattttataatggtttttgtatataagcatgtcggaatacgtatgtgtaaaattggtgattcgattgtgtatatgtgattgttttggtggttttgatttattgtgtatatgtatgtatgtatgtatgtatgtctgtgagctatcaactgcgtcgtcatggctaggttctcttggttcagaatctaattttgcatgcattcacagttttctattgcttttaaatataagcatgccagatatgcatgtgtaaaattgggaatgtgatagtgtatgtatgtttttatatggcggttttggtcaattgtgtatatatctgaataattggtgcttttgattgattgtgtaacttgtgtatatatgtatctatatgggagtgttaaattgttaatttgtttgtgttttctcagtttcacttttcggtgttggattggtttagtgagccatgaatggagttggtttaaatttgtaatctttaatgtacactttagttcattgtattgtgggtcgagaactgttaatagtccagctagaaattttttatatatacatgagaggaatatgttgttagactaagatggaaggtcaaatgatggtataaaggcggaagcagtggttatgtggtttttggggttcttatctccctctctcttttagaaaaatgttgagtgattgcaagtaaactttgggagtcatggggagagaagagttttgtcggttcatttggtgagtaatggctcattaacaaattgggttatcacaggacaa

SEQ ID NO: 72546 - DNA, 498 bp, Prunus persica
  Intron number 4 from transcript ppa001703m (locus ppa00170 3m.g) derived from phytozome v7.0 (chr-ID scaffold_4; pos 1732920 to 1733417 reverse strand)
aataaagtatgtcgttatcgatctaattgtaggccatgcaccaatttgggtttagtgggtgaaaatcactttgtttttatttacttgaacttttttgtgtgtgttaaatttcagccagaaatatatctcttcttacaaaacttttgcctggatgtttaaccatgctcttgcttccatatttacttgctaacttttttgaacttctgatgtttcattatactttagaaatttgagattagagttaatttaccaaaatatatatatcgaaatttatgacataacaatattaatctgactctatttctgatataatttttatagaagctttcaggaatcatctttgttagtatttttcctctaaattggggggggggggggggggatggggttggtgttgggttgggggagaagaaggggggaaaggaggggagatgagtttgttttttagcggcaatgtatggtctcatttcaatccatttcttgaaaactaatttcagg

SEQ ID NO: 72547 - DNA, 484 bp, Prunus persica
  Intron number 1 from transcript ppa013223m (locus ppa01322 3m.g) derived from phytozome v7.0 (chr-ID scaffold_8; pos 19296104 to 19296587 reverse strand)
tcctcgaccaaaacagggtatgttgttgcgtttatttacgcaaatgcctttcttctcaatccatttaggttcaaagttttctactttaccatttaaacttgtgattaaaataaagggtatgcgtttgttgtttgttcaatgctggtttactttgaaatagatgggttgtggaatatttacaagcagcacaacatagcacacatgcatttaccattgaatacttacaaagtgtaatgctttttcacaaaataaaataagttaaaaaaatcggcctaggcgctaggcgggaggacaccaccgcgatttcaccctaatcgttaggggtaagcgccagggagctaggcggctcctgggcggttctggggtctgggcgggtcggttaagcgtgtgtcatttgatacttaatagtgtcgtttgatactgaatatttaagtttgatgtaagaacttagcagacctgcattttattttgcaggctcttgttg

SEQ ID NO: 72548 - DNA, 919 bp, Prunus persica
  Intron number 1 from transcript ppa011935m (locus ppa01193 5m.g) derived from phytozome v7.0 (chr-ID scaffold_3; pos 4620779 to 4621697)
ggcattggagaagctatttggttgttttggcatcggtgagtagtaatattctgcacaattgaatttaaattggtctttactgtttaaagttttaaatgttaagctcttatagcatgaaactaaacttatacatatagaaattttatgggaaaacattaaggggtgtttggtatcctattcaaatagggaattcaaaaactttgatttttctttaaaataaggagttcttaaatctatttttaagattcaaaaacttgtttcgtatgcaacttgaaaactgttttcaaatcttaaaaatttgagaacttgtgggttgttaaaaaaaactgaaaaaacagatattttttgtttttaataattgtggtgttttttagttgttcttgagtttgagtttttgaaaatagggctaccaaacaggttttctttgttttggactcaaattctgtttttgagtttaaaaagttgaattcaagttgaataccaaacaggctctaagatatttatatgaagaacactattttatttttatttttataccacacttttgtatatatataattagatatgtcaaatgagttgtgctctgaaaaaataaacatggtaaaagaagctgatttcttcaattttaagaagaaaaaaaaatatagacaatacttccctccttaccttctattgtggctcaaccacaaagtgacatgtgtcctctattttttaattgtaaaaaaaattccgttttgacaattcaaaaaagaagacacatgtcactttatgattgagtcacaatagaaggtaaggaggaaagtattgtccaaaaaatattgcacgaacacataaagcatcacaaaattcaaaaagaaaaacaactaaagaaaatggtattaaaattttgtgtatgcgttgacaggcgaggtgttgaagg

SEQ ID NO: 72549 - DNA, 379 bp, Prunus persica
  Intron number 1 from transcript ppa009449m (locus ppa00944 9m.g) derived from phytozome v7.0 (chr-ID scaffold_2; pos 22695416 to 22695794 reverse strand)
atactctgctcacagtctttcaagtagaggttctggtatgtgataccgtgctgcagattgcaggattttccaacttaattaggctgtcctaaactactggtggtggtgtggatttgttgagaaatatttaaaaccttatctgtgatcagaaaatggaaagctagtattagcgtttctgtacaatacttgtgttatttgcttcaaaataaacctcttgctaaaattatgcatattgtctttaaacatgttgctcttgagctcttctgcatgttcttgcgtgttatacctttaggccatataatcaaagcatgttgagcttaattaatcagctgttgatcttgttccattttcttggacacagggaggaggcaaagcagtt

SEQ ID NO: 72550 - DNA, 781 bp, Prunus persica
  Intron number 1 from transcript ppa002173m (locus ppa00217 3m.g) derived from phytozome v7.0 (chr-ID scaffold_6; pos 26755903 to 26756683)
ctcaccaggttaaatttccagttttttgaaatgttgtattgttctttacgtttcgtttgaggttctagtggtctgtgagggtttgctggctgtaggatttaattgtgttttgttggtttgaactattctactgaggattatgagcttttattcgaattttgcttcctttttttttttttgggttgagattgtgcgtgggttgtagaaaacaactggttttgcttattttgagagttatcggtttttgtctatcttttgtgaaaatttgatcatttccacgtgtttatgatttagcatggtgatggtgtgtcggttgtaagatacacttgaatttgtctagtttgagatactgtcttgaaagtaacgagctttgcttttagttttatttatttataatcataattttagtttgtggtatgcgatagtgcgctgaacaattcatctgggttttactgtttgaagcatttagattgtaaaactaagagttcgttgaagtttttcgttttgtttattagttttgaagttatgagtaaatggaaagaaaatgctgaaattcttttcattattaggtttatctaaacagctttgacattattcctttttcgtttcacttctttatgtatcacaaggaccaaacagtcttaactattaggttctatgtttattttgcatatagctcaggtgttgtagcgtttctgcattggattctagtattccatgttgcctgtagtaaattgtaagtgcccttttcattttggcttcagagtgagttcattgctga

SEQ ID NO: 72551 - DNA, 910 bp, Prunus persica
  Intron number 1 from transcript ppa018667m (locus ppa01866 7m.g) derived from phytozome v7.0 (chr-ID scaffold_1; pos 46397090 to 46397999 reverse strand)
gctactggcaagctttttgattattcaagctcaaggtaccagcaacacttctttgacttttccttccttgaaaaaaataaccagttaggtatgatcatgaatcatgatgtctctgtactctgacttgacttctctctgtgtaagtgagagagggagagaagggtggaggagaagagtgtctttatggaaatattggttctttcctgaaattccatggtttgtttttttggtcgaaaatccatgtaaagaaaaatacaatgcagaatccgaaagcttctaaaaaggggggagagagagagagagagagagagagagagagagctagatagttgtactgtatttcaaaggaactagttcgacgattactacctaccatatacttaaggaaagtaaagtctacttttgattaagacaacttctatgaaacattattttattagttttccatgttttcatccttgctgcttcaatctcatcatattaggtggggcttatacagtgaaaaatatccttgtccccgtccaaggagttaaaactaatggtttccctgtgagagacacagtacgatagattatcaattcaatcatacacttaaataaaaatattagacacagtatgttagattatcaattcaattatacactcaaataagaatgttagacacagtattcccacaaacggcaaactttatactagattcatagtcacaccatataaaatgatatataatattccttcaaacttaagatagagggggggtcgtgtttgaaaaggcgtcctttctgtctcctcacctaaatgtggttacaaacattgaattatatgatttgtagttttcttactaggaataagttgatatgatgataactggggaattcatcataaagccttgaagactttcagcaggaat

SEQ ID NO: 72552 - DNA, 824 bp, Prunus persica
  Intron number 1 from transcript ppa001062m (locus ppa00106 2m.g) derived from phytozome v7.0 (chr-ID scaffold_5; pos 13267157 to 13267980)
tttaattgaaagtttatccaaataaggggttttaggtgagctttcatttcaatttgtcacccttttgatttggttgcttctgcgtacaaaagttagggtttttacttttgcttctgcctttttggattctgggttttcccctttctaatcggttgttcttacctttatcgaatggaatttgttattgattcgcaagtttcgaatttgttgatgttattgtgatgattgctgggtttataaaattgatatgttattttgactttgagcttgcgtttaactctttgctccctataatctgggtatctaatgttaaaggttgtgtctttgagctttgttggtctggtttaatctatgtttttggtggtctatatagggcttgtagtttatttgatatttaatggttgctttgtttctgaactttttctaagttacctagtttgccaatataagctcttcgataactacttctaactgttgttggattgatttttgtgcttgcttaatcacttctatgctggttttgggaggcaaaaaacacaatttatgttttcttgatagcgagagataagagtgggaaaggatttcacatttttataattattattgaggaagtttgtattgtatgttctatgttgatgggagtcatacacttgttgctggctgaatattgatgtatacatttgagtaccatgatgtttgtattgaaactaactgctaagttattggtgaattttttttcttgattttttatcactctgaatattcgaattggcaactaaatctaagtttgattgttgctgaatgcagactgctaagttgatatc

SEQ ID NO: 72553 - DNA, 570 bp, Prunus persica
  Intron number 2 from transcript ppa001062m (locus ppa00106 2m.g) derived from phytozome v7.0 (chr-ID scaffold_5; pos 13268508 to 13269077)
tttggagctgtcactggaggaagctcgccaacttggtaactttctttctccttctcttgttctctaaatgccttgagaacattgatagaaactaataagaaacgtctattttctcgttgaaaggcatcttatttttatgtactgggtttgtggggtaactctgacgtgtataccttagtagatgtagcaatgtatatggactgtttggtattaaacattaatatccttgtggagttaaccaatatttaaagggtccatgcatgaaattgaagacaaatgtagtgttattgaaagaaacattgcaagatatgaatacatttgaatattagtagcatggacttggttgactggatgaatccaagcaaccccttttgaattcattgtgcgtttaggctcttttctttctttcctatgtattccctgtttcttggtcaccctttttgatctctatgcaaattgataagtgtttacttctctgtaacggtttacattcatttttttgttaactaaagggacaataaatgataaatttcaggccataactatattggatccgagcacttgcttctg

SEQ ID NO: 72554 - DNA, 664 bp, Prunus persica
  Intron number 1 from transcript ppa001479m (locus ppa00148 0m.g) derived from phytozome v7.0 (chr-ID scaffold_6; pos 6918537 to 6919200)
ctggctccattcactaccctcgaagcactcccgaggtactttttctctttctctgttttttttttttttttttttttttttttttttttttgaatttttaaaattttctctctgaattgctctgtgtgtatatagatgtggccggaccttattcagaaatccaaggacggaggcttggatgtcattgagacctacgtcttctggaactttcacgaaccagttcgtggccaggtctctctctctctgtaatcacattaatggttcttggttcttggttcttgcctttcatgagttcttcaaatccaatacggcggcgtttagttgcctgagaaaatgttggaacaatgttaataccaattactacactactgtttttagtcatgttgaagtttgttcttttcttgttaattgtcaggaaagaaaaaagctaaagaactcatcatgataccgggaattttattgttaattttaatatttatacttttagcttttctagcaaccaaaccaaacagttcttctctctctctctctctctctctctctctctctctctctctctctctctctctctctctctctctctcacgggttatcgatgtttattcttgaatgcgctgcattttgtctctgttatgatggttactgacaaaatccattttgcagt

SEQ ID NO: 72555 - DNA, 340 bp, Prunus persica
  Intron number 3 from transcript ppa009185m (locus ppa00918 5m.g) derived from phytozome v7.0 (chr-ID scaffold_1; pos 39780460 to 39780799 reverse strand)
atccattgtataagtctgagcgggacgttttaaaggtattgattgaattgaactatgaatttgatttcattttgtgcaactgtgtaatgggtaggacggtaggacagtagaatggaaacaattgcaatttgattgcgcaaaaatggttctagtgtagcagttaacattacaacaacaggataggataattggtggtcaatgttgcactgaacttctttaagataggtgggtttttttcccaatggatggtgttcctgtttttagtcttctttgataaatgggtgtctctttttagcagtagcaatcattcaccaggctactttttttgtttcaggtttac

SEQ ID NO: 72556 - DNA, 243 bp, Prunus persica
  Intron number 3 from transcript ppa008362m (locus ppa00836 2m.g) derived from phytozome v7.0 (chr-ID scaffold_6; pos 16754509 to 16754751 reverse strand)
gaaatatcattccaagaactcaaggtaattatgaggctcttatatttgttttcacaaacaggaacaaacttcttgcaccaacgatctcttgatttgtggtattatctttttcctcttctgatgttggaagaggttccagtttcaaatccccctcctcagttaataaagagaaaacaaacttccatcaaatttgtgattttttagttgttgtttggcatttccaggaggccgatattggaaggc

SEQ ID NO: 72557 - DNA, 627 bp, Prunus persica
  Intron number 1 from transcript ppa008362m (locus ppa00836 2m.g) derived from phytozome v7.0 (chr-ID scaffold_6; pos 16755694 to 16756320 reverse strand)
cctcctccgtgcatcctcttcgctcgttctctcaggtatgtcttcttctctttcttcggtgagatctgattgcctctctgtttaatcgggcttctgcctaattctttgattttcttcttatcttctctgacttttcgcataaacttctattattttccctctcatcaatctattgtttgttttaaatttctctgaatgcaggattagggttttaatccttttgttgttctaaattaggggtttgttctaatttaggcgttttctcaataatttaattatgtttaaacattgttcaaggtcactgatggattgtttagagtattgtttatttgtgtgttgccataattttttttaaaaagaatttggaaggttttaggatttgtcatattgttctctattaattggatgatttattcttttggcttgctcattagttcagtaagctttttttttttgggctgcctgcctgcacctttttctatagcactacatgaactaggatcctctgtaaaaatggattttctggtttatgaatttatctcattctggggctaaaatctagtcttgtttgttttttctttttttttttcagcagtttgtgaacgaggtaaagtgtaagaactttgg

SEQ ID NO: 72558 - DNA, 637 bp, Prunus persica
  Intron number 1 from transcript ppa018867m (locus ppa01886 7m.g) derived from phytozome v7.0 (chr-ID scaffold_1; pos 35904604 to 35905240)
tggatctgcaatctccggctctcccaataatccaggtaccattaattaattacttaatttaattcactccttttcttatctaaaaattctgttacttgggtttttagtttcaatcttggatcaaaaagcttcatatcacatgccatttggtacttcaatcaaaatttacataatttattaattttatatgcttctttcttatgtccgcagtaggtaaggtatatttaatttggaccatacctatgaaacctagtacaacttggtattcttaatttgggccatttatatttgagggacattcttgtacagcccataatgcattgtattttaatgatctaaaccgtctaattttcatgtataattttagtagttatttaaaatcaaagcatttccaagcagaattgaaatggacagaaagaattgatcatatcataggctaggcaagcattggttttacgaaacaaaatattcagttacattcattaaaaatattcagttacaagttatgggtatctgcatgcatgcaacctagctagcaagcattggttttatgaaaccaaataaatcaaataatgtcgttcatttttgtgacacatttgtaggtggctctagcatctggggaagaagcagctttcat

SEQ ID NO: 72559 - DNA, 473 bp, Prunus persica
  Intron number 2 from transcript ppa010864m (locus ppa01086 4m.g) derived from phytozome v7.0 (chr-ID scaffold_3; pos 17747618 to 17748090 reverse strand)
gtgactactctttgagtcctcttcaggtataagttgaagcgagtagtggtttttgtttccagtgttttgctaacatttgcttatgatgttgagtttgtcaatgaatgcaagcttgcatctcttacttcccatctacttagactacttaactatatgagaaactgccatagtgtctgaatagtataacgtgttgattctggacattcatgtggtttatgcaagttggtatttttttcagtgttaattatcgtcttgatgtcatcatatacaatatttctgatagatgataccagacttagtatttaggaacgttcttggaattactgaagactcaaacatgcacttctagctttggttgatttttaaagttcctgaaatgattttcttcactgttatccgtttgacagacttccaatataattttcaatttctaaacaggaacagagacttttgaggcttcaagcacgattaca

SEQ ID NO: 72560 - DNA, 663 bp, Prunus persica
  Intron number 1 from transcript ppa002202m (locus ppa00220 2m.g) derived from phytozome v7.0 (chr-ID scaffold_3; pos 8551505 to 8552167)
cttctttcttgaggtagctaaatattattcataattaagctttattttgcatgtatttgtgggtttattgaatcagaaagaccatctttgttaccagtccttcaatttgtctcgtaatggcttctttcattttctcctcgtccacataaaagttatgctgttgtgtttgcttttgattaaattcattttcttctgaagaaaaaaaaaagtaactgaaaaaaatcatgcgttgggtaaaactacattaaagggttagttgaacttgaatgtgttgctattgggttatccgttttaaaagtttatcttgtggctattccctctttccatttatgagaaattgcttaaatattgtgatatgggtgaagatcttggaattcattcatgttgttctataaaatgttgaattgctctaatttctactccagtaatgtttattcatgtcaccttttgtcttaaggtcattattataatgctatgtcttgaaataaagctgatttcatctgccccttactgtgatattttttgtcttgcatggctgttgaactacttgatttaatttccataatctgacagtcattcttgacattgcaatactcatgcatttgtttttggatttttcattaattcattaacttacaagcacctttcttgttgtacacacag

SEQ ID NO: 72561 - DNA, 436 bp, Prunus persica
  Intron number 1 from transcript ppa026701m (locus ppa02670 1m.g) derived from phytozome v7.0 (chr-ID scaffold_4; pos 16168315 to 16168750)
ccaacctccatctcaccgcatcagatctcaatcaggttcttcttcttcttcatcatctaatttagttacatcttttactttgatttttaaatggaatattgatttcttcttcgtctcggaatttcggttttgcagatcctcggcatgcacgggtacaggaaaatccacggactcaacaaggtgagaaaattcattcattcttagcttctgtttggttccagagaaattttttttgatgaaatgttcattgattacatatcatgatgatttccatttcttctctagcttagtttgttgtttcttatttcgttaaaatttgcttatatcttcctcgatttttctcgcactttctcgaaaacgctaatccatcacattttcctctgcttttcccttttcttcaactttctagcaacgtctgatcgacgccgtgagctca

SEQ ID NO: 72562 - DNA, 580 bp, Prunus persica
  Intron number 1 from transcript ppa004441m (locus ppa00444 1m.g) derived from phytozome v7.0 (chr-ID scaffold_1; pos 8408642 to 8409221)
gcacgtgcctcaacgttggctgcataccctccaaggtctctctcttttacactctttacttcacttggacagtctcgtactagcctgctagggttcttaatctgtccctaaatttcgtggattgtttggttgatttaccacctgtcagatctaattttttggttcgctggtgttatttaattgaatttccgttgattgattttgtttttgtgtttgataatattcatttggattgaatttagttaatactaaattttttaatataatcgcatttttttaagccaaattgtggaaatttgtttcactctgtgctaaaagggcttcctcaaaagtatataaaagaacaatcttcagtggataagcattttcatttgaaaattctataatttaccacagtttagtaattactggttgtgtgaattacatattcagatattctctttttggttgttcttggtatgattagatgtgtttcttttcccttggaaatggaattaaatatattggtattagttgcatgtgaaatttatctctaatgtcatctgctttttgtgtccaggcgcttcttcattcctctcac

SEQ ID NO: 72563 - DNA, 973 bp, Prunus persica
  Intron number 1 from transcript ppa000297m (locus ppa00029 7m.g) derived from phytozome v7.0 (chr-ID scaffold_7; pos 15739270 to 15740242)
ttgagcctcaggtgcctcctcaacactctcttccaccattgttttgctttcgatgtttacaataacatgtttccaaaaatcttttttctatttttgcttcactttctcatcatcggctctgtcttttccttctttatcttttgattgttcaaaaaatttcagctttttgccatttctggagctctgattactttctcgtttccatttcagacgttgtttggttcccttttttttttttttttttttttttcattcttgtttgtgttaggtgattcgatgaagttttttttgtttttgtttttgtattctgagttaaggtgtagtctgggatgagtttgattaaaaaatttatctaagtgattttagagccagaatagtttacattttttcccatgcgttttggtattatggtagttttagctattaatggtggagataataattttccaaacttgttggaactaataagtttgctgctaaatgtactaaccccatgcttttgttcattcaatgtatatcactagcgcaaggcatgactaatgattgtttggagctttaaaaggatgaattttagttttattatctacaaaattggacgtaatttttatttatttaaaaaaggaatttctgttcttgttttggtattttgttttgagaaagagagtaatttggcccaacatatttgtatgactttgactctgtttggctgctcggaaaatgtctgtaatgaatgaaaagaaagaagaaagaaagtaaactatgattgcttggcccaaccacttttcctaattttcttgttgtcttagttatctcgttttattttctgcaatgaaagtttaagcagttaatggtcttgttgcataccaatttatcaagtttagtaaacctttctgacatgttaaaatgtagtgttgtaatgttattttccttgcgcaattgttcaggggattgtcacatccaatcaaagcactcc

SEQ ID NO: 72564 - DNA, 548 bp, Prunus persica
  Intron number 1 from transcript ppa006684m (locus ppa00668 4m.g) derived from phytozome v7.0 (chr-ID scaffold_4; pos 7241370 to 7241917)
cttttctctgtcatttgagctgtcttttattacaggcaatgcctctatcgactctgtgtccatttaaggttttgttgattcactttttaattttgtatttgtgttatgatttctgtcagttttgattttgatttgggtttttagattaagtcatgtttgttatgattgattggctggatggatatgttactggttagcttggagctataagcctctacttatctgcttgtgttttctagttctttaaattgaggtttctctgctattgcatgatactttatctgggagttttgtgcatttagttttcattggtatgcttcatcagattttggttactgggcgttttttttaataacaaaatttgggttcttcatttttattattcttattttgacttttctttcttcttctgtcaagtccatacaaatactatctgtcaaattgtttgttttacattttattggaattcaatacttgaacaaaaagtatcattcaactttcatgtacaatcaggttttaggtgaattaaggtctattcaaagttgaga

SEQ ID NO: 72565 - DNA, 778 bp, Prunus persica
  Intron number 1 from transcript ppa006131m (locus ppa00613 1m.g) derived from phytozome v7.0 (chr-ID scaffold_1; pos 10868943 to 10869720 reverse strand)
gagctgcagaagctcctcctgctcaggtttatctcttaatttccctacctctcactatatttgtgtgttacaatgtttgcatttactacttgtggagctgtgtgcaagcagcttatgctttgttgtttgttcttgaaagatttgggcttgaattcttggggttttccccccttcttcattttataaaaaaaaagatttgggcttgaatctccattgatatagctcaagaaaccaactgggttcactgggcatcccttttcttctttctttccatttttgcaaatactatctgtttggtttgctgctgtatttaaattagagctggatcatagttatttttgtctttggtggttggttttcaggtgatgaatcattatctgatagcattaagaatgaagtttatgggtgtccagtttctcatttcactggtttaattttagtttttatttatttattggaactgatttcaaactgttatattcttctttgccttccttaactagtttttgcagatcttgattgtgttatgtaactgctttatagttacctttgttattattgcagatctgtattgttttaaaatcagtatggtctttatagccatttggctgaattgtgcaatgggcacaccctcccacccactgttgaaatatgggttgtttttccttttgtataaaaaatttgagtttgttggagtgatataagaaatcttatgaaagcttataggccaaatgacaagtagtgttagataattgttttatgcaggctggtcccgaaa

SEQ ID NO: 72566 - DNA, 555 bp, Prunus persica
  Intron number 1 from transcript ppa010701m (locus ppa01070 1m.g) derived from phytozome v7.0 (chr-ID scaffold_3; pos 9064051 to 9064605)
tgttccacaattttcgtctatctctccgaacccaggtactttagcttcaaatcccatctcaatccatattctctcttccttattggatctcatttatggctttttccagtttggatccaacgtgggtctttcttgttcttcttataatcattgtaaagttcaaattctcatcattctgttggtattgatatataattccctgatttcgtttgatagattttgatcttattcgcttttaactacttgataaatggtgtatttttttattttgattttattttattggagtatatgtataatgttctgcatgtttttcactttaccttttattggggtgcttagaattggttgaaagaatgataaaaaagataactttagaattgaatgaaacaaatcgctttgattagttgcatatgtgtcataaaaagtacgagatgcaaattcataatcttttcttttcgtgcatgctcttaatgaaaattttattaacactgccttaatatgtattcttgttgagtaggtgctcatagataagattagcagagagggatcgaa

SEQ ID NO: 72567 - DNA, 898 bp, Prunus persica
  Intron number 1 from transcript ppa008881m (locus ppa00888 1m.g) derived from phytozome v7.0 (chr-ID scaffold_6; pos 17637134 to 17638031 reverse strand)
ctgaacaactccgcaaagcttttgaaggtcttttactgatcgcatcttcttagactcagactaaattaattttactgatcacatctttttggtgttttctttggagcaaatgaaatttgatcatttggtgtttgacatgactttgttgctgatgtggttgatcttctaaagactaaagttggtttgatccatctgcttccatattgttctactttgtaaatatgtgttttatgggttcttatgttaatgtgataatgatcgggatgtgtttctttctctgtgatcttttctttccattagtaagttagcatcagttttgttgaaccaatctttagatctagatctttttaatgattatcttgttgagccagtttgaggtttactattgactagcaagtatttgatgtctttcttataatctgatatggttgatcatctaaagtttgatctgctttcatgttctcttactttgtatctgttttctgggttctttgtaagtatttgtttctctctctttgattttaaatttcttgggataatttttgttgggtcagagtattagatctacaacttttttaaaattctttaaccaatatttttgtttattttaatcttgactagttcatgctttcttttatatgggatttgcataaaactccatttacttgaaagggatcatcaatgaaaacagagttgggagaatagaagatgatgaagaaaactgatgcttgatgtcatagaccaatttgaatacttggcatctagctgcacattgaggcatttaaacaaaactgctcatattaattagggatagaggttgaagatttgttgaattatcaaggcacttttatggttgtattctgaatcatcaacttgattttcgttatctgtgtgcagg

SEQ ID NO: 72568 - DNA, 603 bp, Prunus persica
  Intron number 1 from transcript ppa007324m (locus ppa00732 4m.g) derived from phytozome v7.0 (chr-ID scaffold_1; pos 45069471 to 45070073)
aaataggtctctctctctctctctctctctctctctctctctctctctctctctctctctactagatcctcttctttgattttgtagtgtaatatgttttgctgtgagatcagtatttcagtgtattatgattgaatttaagtcacaaagtttatgtatatattttaatctttttatgtgtgggagcaagaaacatcttgggttggtaaattggttctttattttttaaaattgggtctttaattaaacataaattaagtgatctgaaagccatccttaatttgtagatatattatgggttaccctttggtaatgttggtatgctctgtacgagaaagatagaatttgtctctctgctatggcatggacccacctgtcctaccatttttacatataaagggggccttttcattcccaatttggatataaatcatggcaatatttcaacattggtgtttttttatttataaaaaatataatttttttaaaaagaaatttgtttctcttgggttttccaagtgattttgatgtatattattttaacataaatataatattcaatatgcagctgaactgctaggacttcccttgattcctcctttt

SEQ ID NO: 72569 - DNA, 581 bp, Prunus persica
  Intron number 1 from transcript ppa006195m (locus ppa00619 5m.g) derived from phytozome v7.0 (chr-ID scaffold_1; pos 726325 to 726905 reverse strand)
actctgtttggatatcttggatcacaggtctctctctctttctcattgaagctccagtacttgagcttccgttgcgttttattttcttttgcatattaacacttccaagttttatgctgattgagtttttgaaatctaacaatgagttttgtatttggttgtcttttcacatgtaagcttaaaatgaaattgttttagttcaatgatatctgatttcttggtcaaagaagaagaaaatatatatatatatatatatatatatttttaatcatttttgttcaaaatttacctacctgtttcctatttgggtcattattggatgtttgattgcactgaaaccaggaattgagttatcataattactgtcacaactcaattgaatgaggccaattttattgaatggaaatgttacttcttttggactgaggatgaggaaagtacttttttttgttttggtcttgagaatggaactgttacaaaatagaaaatattgagttatgaagttgtatgaactaaagactatctctctcatgattgaatttccaggggagtttcaaattggggacaatatagaaccattg

SEQ ID NO: 72570 - DNA, 653 bp, Prunus persica
  Intron number 2 from transcript ppa001941m (locus ppa00194 1m.g) derived from phytozome v7.0 (chr-ID scaffold_6; pos 3205286 to 3205938)
atcataaccaggctgctgatttggctggcattaaggtactatttaatttccttatctatatatgtatatatctatatatataaagaaaaagacagaaaatggtaaaacattcaaaatactagaaaacgtattttggatggcgacgtggattgggttgtggtgttctcgttcgaaatgtgaattactgataacctgaattgggtttttcattggggcatacagccagccaatacctctcaatggagaaaaacttccctataacggaatgtacacatgatcgtgtacagctggttacacttaagattttcttccctcatttgttaacaaaaaaacagtgaatctcatacgcattcttacgaaagaagtgtacacaattaagttttcataattttgagtgctgcaagctgagatttggagactcataactttgccaatgttcttcttttggaaagtaacactgcacatgttgctggaggttcatggacatagaggaggaacatacaaatatgataagtagtgacaataggcttattaattttttttattataaattaaatcactaaaatggtaaaatcaataaaacagattgcatgattgattaatctagtgatagctgccttctcaatttgtccacgtagaaattatacaaagac

SEQ ID NO: 72571 - DNA, 799 bp, Prunus persica
  Intron number 1 from transcript ppa013727m (locus ppa01372 7m.g) derived from phytozome v7.0 (chr-ID scaffold_3; pos 5547652 to 5548450)
atataaggatttgacggaaataagggtacacctaggtgatagttttcaactgttttcaaatgtatagttatatacatgcattgacttcagaaataaagaaaataagctagtttgtataactgtttttacagtggggttagtatgttcatatggtattttttaaactttggttttgggttcactcatcctttttgttgttttgcgcccccaggtagtagacgtgcacaggaatccaccaccgggccacttcccatcttccgtgcctttcttctgatgtaggattttgttttgtaaaaagattcactcttttgtaaatttagtagacgctctgatgttttgtcctagattaagatttgaactgttggaatgtatatatacatatgttggcagctggttgtatatatgtatacttgtttggcaggtgaaaatgttttggtattaagccagttacaagggaaactctgccggttttttggtagaagtcaaccttgttattttatcgtgttttgtatagaagggcaaataggtcatttgtgcccgacatttgccagatgtcggacacgcacagggtctgactcggattccaaagcggaatttggaacgggtcctgtcagatttctctatttttggttattaatttaagattgctgactttgtacattgctgtttagtggtaacaacattggtttctctactcatggcctgactaaacttaaaatcttgtcttatgttcattttaagcagtgatgagtattaatttaaaggatttaccagtggagaacagttaaaggatcaggat

SEQ ID NO: 72572 - DNA, 463 bp, Prunus persica
  Intron number 2 from transcript ppa013727m (locus ppa01372 7m.g) derived from phytozome v7.0 (chr-ID scaffold_3; pos 5548542 to 5549004)
aagaggtacgaatctctttggtttatttcattatttcacatttgactattttggtttgatcttcatcaagatcttgctaccttcatttccatagtatctatcatgacactttgccacagttttttaagggccttaatatcacaacatggcataaaaaattcttcacaacaagcatttcaaacatattatggtgcaacagcaaacccttcaatccgagcaacctgtaagagttatgtggcctagcttaagatagttatagttttactttactatctttctttctgggtctagagggagagggttagatgttgattttacaccttatatgtatgctttatttatgttggacagagcttctaatttattttgttgctaatgatatttgtttctttatttcaatagtggaatactggttttgattgtaattaatgcattttcgtgatacttttagtcactttgccaa

SEQ ID NO: 72573 - DNA, 963 bp, Prunus persica
  Intron number 2 from transcript ppa000480m (locus ppa00048 0m.g) derived from phytozome v7.0 (chr-ID scaffold_1; pos 2309118 to 2310080 reverse strand)
acgacgacgacggtggtataatttttattcactatatgctaaatgccttgttttgtgtgttccttttttttttttctcaatcaaataccaggtttgtggaactcaatgcataaaaagaatgatatgtacttggatttggattgtgtgaaatgtagctgccaatgttttatggtttctttacaagtgattttgctattttctttcaaatacatttgccttggtcatatttaagtttttatgcacatgttgcatcatcaaaagaggatatgtctaaccatttttcttgaagtttattaaccttgtgtgaaaatgttgtagaagttctcttgggtgtttatccaaatcacctcaagtgggaggtcaatttggctgtcctagagagacaatgagagagagagagagagagagagagagagtgtgtgtgtgtgtgtgtgtgtgcttatttaattgatttacttacctcttaactacatttgccaatgctttgcttggtttgacaaaaaaagggctggagaatttgttccatatgaatttttaaatatttgaaatttcaatattttcataagtacacctgttccgctttatgttttcttttctacttgaaacacgttgtgaggtgtgttattttgaaaatagagcgggattcagttcagaaaatgcttttgagtgctcatctctgcatggaattagtttcatactatgttatatttccccaaattactgattctatatgttgctttcatttttcctttggtgtattgcatttctgacttgcctatcacacccacatggagtgagaatttaatcttcatttaatccattacaagaaataatttttactgtatattttccatatcatctatactagggagtgcttctgctctcaaattttattatgattattttgctaaatgttcacaaacctatcttacttctttatagggcccaaaccgtctgagttat

SEQ ID NO: 72574 - DNA, 908 bp, Prunus persica
  Intron number 1 from transcript ppa000480m (locus ppa00048 0m.g) derived from phytozome v7.0 (chr-ID scaffold_1; pos 2310255 to 2311162 reverse strand)
tggccattgtgaataagctctggtcttcgttgcaggttcgtattactattcgatctatatgatgtcctttacgagattccgttttgtatttcttctttaatttttattttcgcctctgtgtttcaatagggtttctatttgatcgcgtttaaaggtgattgattatccgcgatcttagttctattggttcagattattgtgggtttatattgggcttgagtctcctgcaattgggttcatcaaaatggttctgactttttagggtttttgattaaagaattttttgctttcaatctttttggttttaattcagcttggtttcttcaagtatttgaagttccgttttagggtttattgatatttggtttttctgatgtgggtttttggtttagggaatggtaactgataagctgtttggttccagagaaaatcatggaaaaaaaagttgaaattaagtttcttatttcttgcgttctatgtcgttttgattcttgattgctgtagaactgtcatcatcttagctaattagtcagtggagttgagaaatttgttcagtcaggtcccaattaaataatttattattattataaattttaaggtcttctccttgcatttactagcaaccagtccggacagaagggtttttcaatttgtcaattttaacttgttacaatttacccttgaaatcaaaaagttgtgatgcatgtatctttgggatgtaatcgacattttattattgggtttttagcattatggtgtgattgggtaccaggaaaatggcttgtagtgtgcacatttcttttttcatgtgattggggtttgaaatcctaatgttgataaattttttgttggcgggttgtttttcttatctagtgagcaaggttgaaggagtgtgaggacaggaatct

SEQ ID NO: 72575 - DNA, 835 bp, Prunus persica
  Intron number 1 from transcript ppa012922m (locus ppa01292 2m.g) derived from phytozome v7.0 (chr-ID scaffold_5; pos 18042416 to 18043250)
gcggtatttctacccattcttatatttcatgtctagatttcttgggtttatttacttctgttggttatgaattatgattttgatactgtcttcttcctctagcaaaatcaagtaaaggattgctctttgtgaccattatttagttcttcttgcttctttgtttcctttaacgttgattttttaggttcattaggtccctaaaacatttgaagaatatttactgaactgaagaataggatatatattattttttttaatcgggagaataggagagaaaattttaaatcaatatccacttgacttggtattggatttcattgcatatgcgatatccatatgcataagaaatgctctatacaactaaattccaaaggatacgaaaataaaataaaaagtagttagattagaagtttttgaattacacaatctctggacctaaaattcttttgtggttttctgtttttcattgtagaatattctttatggactttgccctcttgtcttgtaaaacccacgaatgatttctaacctcttctactactaggctaccagttctacattcatagcataaaactggggttggtaatgcataggtttaagttgtcagcgtacaacatagccttttcatccattgggccacatttccttgagatgagttctggaaatgttgatgtctctgtgtgatcaacttattatgggttctgtcttgttcactctgctgctacttctgatttttcaggcagaagaccacataagttttgcacaaagagacttacttataattcatgtttgtttgcacataggttgcatcactaccaaagagttggggactgtg

SEQ ID NO: 72576 - DNA, 854 bp, Prunus persica
  Intron number 2 from transcript ppa010838m (locus ppa01083 8m.g) derived from phytozome v7.0 (chr-ID scaffold_7; pos 10657156 to 10658009 reverse strand)
taagcagctcccatctgggttgcttcttgttactggtgagcttgcacttccatttctcttttaaacattttctgttgtgtttatggtttggtttgttttgggttttactttaataggttagtaatagcatatttcttcattctctcaatgatgagtttgataaaatcaatcctgatttctgccaaatgccaacaaccatgttgtatagcagtaccagtaaatttggcgcaacaaagatggttccttttgttgtaagttattgcaaaccatccccctccaatgcacactgagcttgtgccctctcttgttgaatcggatattttgtaggttgggggctttgagtggggtatgttcaaatagggtagtggataaggtgatgctaattttgtgcttatgaatttgatactatgtcggaagatgaaattcttcttgggaaataatgatcgattacatgaaaggggaatatttttggggaaagagaaaggcacgaacattaaaggaatttcccttctgtaacagcgtagagagatgtgagtgtataaattttttaattgtcatctaatatctaagttacatggtacttttatgcttttaactgttataaacataggtttggcattggtttatccagtgatttgttaattttttcttatcaaaagatttgttcattgttgtgtttaagttgagtgcttttgtggatttgctcatttttaaaccattattttccttttaattgcagtggtggggaatgggtttctagtttctggtgcttgcctgctccttgacagaacatgtttaagtgtatttctaacttgatagctggttttatgccattgcagggcccttcaaaatta

SEQ ID NO: 72577 - DNA, 217 bp, Prunus persica
  Intron number 2 from transcript ppa003126m (locus ppa00312 6m.g) derived from phytozome v7.0 (chr-ID scaffold_6; pos 21159237 to 21159453 reverse strand)
aacctgtaaacttttcttcattcctaatttctccacttttctttgtttcttttttttgttgtagagaaaatcgaacttgagatctgctccacttgtcacctgaactaagactcgcttttatttttcacaaagtgattagttcctttattttgggttcattaattaatgcgatttactactttctgatgagtttgaattttgttttaatgtgacagtt

SEQ ID NO: 72578 - DNA, 599 bp, Prunus persica
  Intron number 2 from transcript ppa006223m (locus ppa00622 3m.g) derived from phytozome v7.0 (chr-ID scaffold_6; pos 28526873 to 28527471 reverse strand)
aattctttgctgaggcaggttgatcctgcgacaaggtttgctgcttttcaatcttattactttatatggtcatgctatgaatttccattgatcttagatcaagtttggtaccctactttttagtagtgttgtttccacgattattgatcatggtgttttgtgattagattctgattagctttcactttaaactgtcttttttaccccttccattcgtacattcatactactgctgcaaccattccattcttgaaatagttttttattttgtttggaattggcttgaaaccgttatttttatctagcctgatgactaattaagattcaaattctggtatcaatcaaaccaggaaatgggaaatatgaagtttaaagaaatcagttttatatgcatccatttcttagatgtctttaaccgagatggcgtttcctttatgaagaaaaattatccccagtacatgagttactagttgtgaagttctatagaattgctttacgtttcggatatgcattgattaatgaaagaaaaaacgaaatggttccttaaaagtaatgtgttatttctttctttcaaatttctctttctgcaaggttgatag

SEQ ID NO: 72579 - DNA, 488 bp, Prunus persica
  Intron number 1 from transcript ppa008632m (locus ppa00863 2m.g) derived from phytozome v7.0 (chr-ID scaffold_2; pos 17707541 to 17708028)
tcatcaaaacccagcttgggaaactcgatatcttggtaagatcaaagctcacttcctgaaaagtttctgtcttttcaatttaattcgttaaatccaatttccctttgaatataagcatagatgagttgatgttgagactgcaaaatcgagtggttggcacaaacccatcttcttattgtcaccactttcaattgtgagagttgaattttgttcgttaatcggtctttgagttcttctcccatatctgatttgatccctctgttcaatttataagttaccccagaaagattagtggctagcattaatgggtttggcacactagcatatttggccttcaaagctaagccgtttaagggccttgaacttggttgttagttataagaagaaagaccaccatagtaatcaaaggatctctcaactttcttttttctttgtattttctagatttgtttttttttttataaagttagattatctacaggtgaaca

SEQ ID NO: 72580 - DNA, 696 bp, Prunus persica
  Intron number 2 from transcript ppa008632m (locus ppa00863 2m.g) derived from phytozome v7.0 (chr-ID scaffold_2; pos 17708065 to 17708760)
cttttaaagcttcagaaaattctggtagtggggtaagtcttacatttctttttttgttgttccaccacacagtgaaggtgatgtttgaggagggaagcttctaatgtcggctatatatgttgctgtttgattctggttagacttcatcttgatattattaacacaacaccttatcaatagctatatcaaaaagttactcttcaatgtgctaatgtgcaaaattaactttgtctgtcgtttgtccaagggtctgtttgcgatgttggggttaatgccttgcctttcccttgccttttttccaaggggaaaatgatctgtgttgtgccattccagaattccttaagatacttcaatagtctaatgcacatatatctgagattctgatgcttcctagaacagatatgaatcaagttagagttaacaaatacgttgcttatcttaaatggattcacttttcttgcctggtaaaagtttccacattcagaaactttgatagcttttttatctgaaagaaaatctagatataagttctccttttactcctttgatctgaatagtattttcactgtgatgcgcatgtgtaacttttaatcaccatactttcttgtttgaggtgggtttataagaacagggccaaagaataattttctgcgtaatgcaggaaggagcaaacattgattggactaaatttctgac

SEQ ID NO: 72581 - DNA, 752 bp, Prunus persica
  Intron number 3 from transcript ppa007690m (locus ppa00769 0m.g) derived from phytozome v7.0 (chr-ID scaffold_2; pos 20419190 to 20419941)
atactgctgatttttttgagcttgacccttgcgtcagactctctttctttactctgcattgtttgtctttgttgtttttgcttcctttatttgaagatttagaatcaggtggctttattctagcatgaattgggtgtcttcgttggtgttcaatttcgttatttgtctaataactgttgtagtggaggccttcagaggaattggtttgaatgaaaggataacgattttgggacctggtgatataaggtatcatttctatagctataaagcaattgacctcatgagccatatggttgagcaactcactttggcggacaatttaaccaatgtaactccatgaattctttagcagtgcctttaagaagtttccatgaaatgtgaaagtaaagattttgttgtcgtttgaaacccaaaattgtcactagccagatacgaagtgtgctgacttaaattttgatttctctcctttgcttctgtagttactcttgatttcgcacatagactgtttttccataaactaacaattgaaattttgtcgtagttggtactgtgcaatttcagtcacaagtttcaactgtatctgatgactgttgttcgttgacatttatccaggactcaactgatatgaaattagctctagatgataaatttatatatatgggttgaaaattttggctgctttaagttgctttggataattttctgtctttttagtcctgcattatttgacagtggattgctttgataggaag

SEQ ID NO: 72582 - DNA, 770 bp, Prunus persica
  Intron number 4 from transcript ppb021903m (locus ppb02190 3m.g) derived from phytozome v7.0 (chr-ID scaffold_2; pos 26044275 to 26045044)
cgactttcagcaagaactgccggaaaacggttctagtaccggcctaaacattttattgcactcactagatactgtcataagagatcagaagctgcaggaattaagtacacgcatactaaatatgcaaagcagatacatatatacgtgtacagatttgtacaagaacatacaaacacacacacacacccacatgtacattatacgtgctgaggccatctctgaatgataacattggaaacaaaagatgttttttacatttgtgctgcattaccatatttgcctttttcagacctgtctgatatacctataagtaattagtttttatcatccaaaagaaaaagggaaaaaaatggatgaaacatattgcaaatagttacaaagggcaccgatgcccaatgtccattctgacgtcacttattgaagacgtgaatgcactcatagcttttcagcagatgagttgttgtgtgggaatgtcgtgtagcctctacggatattaaatatgtgaactattagacgattatttctatgatatgtgtggtacctttagttagattatcaatagattattaacaattttgatatattttctttttgtcgaagaataataaaagaaacgagagtgcttgttgatcatccagaaggcacacttttctgtgatgtgtccacacatgcttcagtaaactctcgttttgtcaccgattaattgtagatgatgtatcatgcttacctttccatttatctctaacattttagttggtacagttttggaa

SEQ ID NO: 72583 - DNA, 771 bp, Prunus persica
  Intron number 1 from transcript ppa008377m (locus ppa00837 7m.g) derived from phytozome v7.0 (chr-ID scaffold_1; pos 46131895 to 46132665 reverse strand)
tcttccctgctgttacacctgagaaggtctccctctctctcctttttttttttttttcaagtatatttattgtaataagaacctttttttcttcttcccaaatattcattttatgcctgtgcggctgtactgtgcttctgtactatattatcttttgcgagctttaagtcactgggttttgtatttgtccttgtaattgcaaagagttgatatggggttctgaaatatgggcgtttactgcatactatttgctgtccaacgaaaaattgaaaatgaagggacttgaagtattgttgtttatgataaaatttcatttgattatggttcagttcccccacttattaatattttcttttgagattaaatatataactcatcctttggaagaagagtaaaagtatattgtatgatgttcaaatatgtaaagcaatatggggacaataattattggcaggacattatagtttgaattgtaggtctgcaataagacatcttttcaaattaaaattttcattcgatttttatgaactttctttccgtcacttgcttcattataactaactattggattatgataatccctttaactagttgaagccaagccaatctttatctgtttctgttttctcaaagttggcctttacatctgtttactaaatttactataacatgtctttgctggtttgcattttgcttagtttaaaagaaggctcagactttggattctatataacaggtgcaagcagtactattgctattgggaggacgtga

SEQ ID NO: 72584 - DNA, 640 bp, Prunus persica
  Intron number 1 from transcript ppa012455m (locus ppa01245 5m.g) derived from phytozome v7.0 (chr-ID scaffold_7; pos 2556484 to 2557123 reverse strand)
gggttagcttctgtctcttgcccttctcttttcgtgcatattcttttattttcctggaatttctgttttgagttgttgattcattggagaaagtaggagtgtattggttgctcatcgaattggcatccctaggagtttctttaatttctctcacttttgcatttttgtgggttgaccttttttttttctttttttttttggttgagcaaataaccttttatttttgttggattttactgttgataaagatttacagaacctgaagatcaaagataatgaatttagaaggagcaatataaccaatcaaagtacacatgggcatgtgcttaacgcaagtatctgttgattttctggttctttttggtttttaattccttcttgttgacattcagtatgaattaatttagttcttcaaattgctaatgctatctagagttccatttctcagtgtgtgcatgattgtgcatgcagctgtgtgtccttatgtacacattgaggatagattgaagacttatttatttttgtaactaattgagatttgaagtatcctgtaatcatacattcttccgtaaaagtatatgatgagtctaaatctctttcaacatttatttggtgctataggctgagtgctcggctgggg

SEQ ID NO: 72585 - DNA, 958 bp, Prunus persica
  Intron number 1 from transcript ppa013706m (locus ppa01370 6m.g) derived from phytozome v7.0 (chr-ID scaffold_1; pos 42382903 to 42383860 reverse strand)
tctgggactcgttcgtcataagtgattcttctgtggtcagtgtctccttcgtccccagtgcttctctttcatcgtcaagatcttgcgttttgttttgattaacatgtgacttttaatgcttgaattttgctggatttttcattttctccaaaacatatttgatcatgcactattgaatttattgtgggtttctcttctacatttcatgggtctttctttgcagtgtttcaatgcctgtacgagtgtgtgtctgtcctgtgactgcaattgggtacatcgtttgaagtcctagttttgtcttttgactgattcaatgatttctgatgttcatttaagcaattaaacagtaatttgacgcgaaatcattatctcaatcatgcatttgattgtttagatacatgaaagttgaattcttgttgtgcaaatgaaatttttgatgtggttgttttgttcttctcagagtaaaacggcattaacccaattgctgggagaaaaggaaaaaatgaaaagagattttgaaataggaaaactccttctcacagtgagtttcattaagtcatatgttttcgcatacttgggttggggtcatctctgggagtgaagaatttctggcatagctagtatggccaactggtttctagttaaaacaccctgagattagctagctcctcaattgaaaattttgtttgttagccgattcgtgtctgaaatagcatgtttttaacattatccagtgtctttgtcccacgtaacaccaatcataggataggattaaagatattaaatatgatccagtataatccaatactaggtaataatcctatgatatccaatcctgcatggcaaacgaggcctatgttcagattttacccatacttgccccctggcaatgtatcttgtcattgttgaatggtctttttcttcttctgactttacagagtttctaagcggctgtgat

SEQ ID NO: 72586 - DNA, 349 bp, Prunus persica
  Intron number 3 from transcript ppa004511m (locus ppa00451 1m.g) derived from phytozome v7.0 (chr-ID scaffold_2; pos 247455 to 247803)
ggtggcgacgtcaccaaagccgccgaatcgtcttcgtatgtctccttctctctttcattataatgtctcgatcgctttgtcttcttcttattactattttgaatttagttttatttccctgtttggttttttttattttttattgttgggttttttccgcgaaatttacctttgtggaatgtgttggttttgtagatattcgtaattattttattttacttttgaggaatttgggttttgattatgtttttttcttctaattatagtcacggtttgtgtgtgtgtgtgttttttttaataattttgttttctagtacgccaaaaacgccgatagagctggctattgatt

SEQ ID NO: 72587 - DNA, 537 bp, Prunus persica
  Intron number 1 from transcript ppa001991m (locus ppa00199 1m.g) derived from phytozome v7.0 (chr-ID scaffold_1; pos 26950437 to 26950973)
ctagtggcctcagcttcgaagagctttataggttcgttccctccctccctcgctttttttcttcttctttctgttctctaatttctctgtatttcacgtttttgtttcttcttcttcgtttatgaatatttttaatttgacttgcttctgttgcgtgcttatgtagactgcttagaatagtaagaggcttgatgcgatggtttgccttttgttttaaattcatcgtttctatggctcgcagagtctttacaaaaaatatatatggaaatatcagatgatgatgtgatatagttcttagaattaggaaatggtgaaggaagaagtaaattattttccaagtattttagatgtcaaatttgttcgaatgcaaacaaatttggctacacatgaaccaatatgcctgtagaatgagttataattgggaggaatatgttcatgtgagtgaaccattacactagctaaattacgtttaggattttgtgagaatggcttctcacattactaatgctctagtgttgttgttttatggatttagaa

SEQ ID NO: 72588 - DNA, 714 bp, Prunus persica
  Intron number 1 from transcript ppa003483m (locus ppa00348 3m.g) derived from phytozome v7.0 (chr-ID scaffold_8; pos 16131536 to 16132249 reverse strand)
atcaggtagagaccttctgtccttgttcgtcctattagatgtacatattcttggaattttgcatctgtaataatagagagaacctaaaacttcattgtttgtacatctccattttgtttttgttttcagtcttttggttatagtatcaccctacaaatactcacacacatgaggaacatttatgatgctttgcaacgaaggcaagatgtactgcgatacatccatatagtaaacaaatttcaaaggcattgtgttatccttcttatcaatcccttagtcgtattggggagccacatgttccgtttctgatgaccaccatgtttatatgcatacatgtcttaggacttttgatacatgcatacaaacaggcttttggcacattgtctgcccgggggcagggcacccgagtttccaagctttacaattaagttgctgatttaatgttccaatactatgtttcaatctgtgggatatgtgctgtctaaagtgctgcgctgccttgaatattctttatgcaggacgtatttttgtatatgttgaacaaactatatagattcaacttatccatttctccatttgtgcttttctttaactcagttttactagacagagttctgttccatgaagttggcaatcacaaattttatccttttttttttcttcttatgaatctgtgaaggtgtttgtcagagactttgtccccagtggattggc

SEQ ID NO: 72589 - DNA, 873 bp, Prunus persica
  Intron number 3 from transcript ppa012469m (locus ppa01246 9m.g) derived from phytozome v7.0 (chr-ID scaffold_1; pos 44255149 to 44256021 reverse strand)
cagcactttcttgtctcaggtcagtgtgtgttgaagttaatacttaatggtagtgttttatgttttgaatatatttttggattattagcagccatgatggttgttggctaaagcaaagctgtagcctctcctttgatttgtaagtaccttgtgtgacacactagagcaaggaaaaagttatcctaccactctattgaagtggttggtgagagagacgtgcggtagtgtgtagtgttagagaacaggagtctataaaactcttaagtgcaaaatgtgtaaaatgagaagtttggagagagtaaaagattcctcatattgaagagaaatagaactcaaagattatttgctttgtgccttttcatttgagtgctaggcttaatccaaattccaacagtgtgttcatctaatatttcttggaagattacaactgtgattaggaaatatattcattgaatttttagtaggatggtttggattgaagtgaaggtctaatcttatgattagaataaaaaaccctgttcggttttcatacaaaatgtttttgctggatgtttaaaatcttgaatatttttggttctagagaattgagagtttcttgtagccttgcagtgataccctttatagcattgtttagaagagtcgacaaaaaagcttgttttgacaggcttaaatggagaatcttggtgctatttctgagtgcaatggatgagctgtggcactgttaattaattccaagttgttctttctatttctcttgtttatcttctttttggctaaatacctcaaatagtaaactgtttattactttgtattgacatgagcttgatttgttgtttttgtccacttttacagcagcaaaggaccttcatacag

SEQ ID NO: 72590 - DNA, 509 bp, Prunus persica
  Intron number 2 from transcript ppa002918m (locus ppa00291 8m.g) derived from phytozome v7.0 (chr-ID scaffold_7; pos 17014199 to 17014707)
ggtttataaaggtaatgtcttttttatcggaaatttattcatttgtgtttattgaaatgtacaagttcagtgttagaagttgtttgagtagaactttagggatgaacatataaaaatgtgaacttggtcaagtttgtatttttgagaaccgtttgcagagtaggggaacagggcactggttgatagtttgattgttgaagcttgagatatgacgtatttctcatttttgtatgtaaattcttgaatagatgtgctcattgccaagcttaggctaaggatggatatcagtttaagtttatattctttcttgataaagtttacttattagagacctttacattacatgcattgctctgtctctcactgtttgttagatctttagtattgtgttaatcttactgtggggctttcatttgttttcttttgtttctttctattcttcatgttcactcctttccttatggttttacatagggtgttttggatatcacaacaacagaggttgcaga

SEQ ID NO: 72591 - DNA, 652 bp, Prunus persica
  Intron number 1 from transcript ppa006632m (locus ppa00663 2m.g) derived from phytozome v7.0 (chr-ID scaffold_5; pos 9348172 to 9348823 reverse strand)
agctcttgagcaccttgaagaagtgagttatttgcccatcacattctctctagctttccttctcttaatggcgctaactttgatgttggttttgtttgaaaacgccttttcttttcactgttgggttttgtataagttttcaagttttcatctttttgggggttaggaaattaaaattttgattgaaatgtgctattaatggatcatttcttttgtcttcaaccttgcttctgtaactaaggaaactctgtcaagagggtttaccaccagttgtggtttcttcattatcaagtttttgtagtctcttgctacatgctctatatgtgaacattagtaactgattaagtaacaaataagcaatgccatttgtgcatctcatgctatgtagggacgctgctgttgcttagtcttgcttaaatggtttagaaataagattcaagccattggtttaatgtctctgtatttttaccctcccatgtctgccttttttcagaaattagactgaccaagtcttcaagattgctttgagaagcaaatgtctcctttcctttgtgttactctgaattttgtaatacgggttggcttctgtttccttattattattattttttccttggcagatatcgtttgaggtctaaggttgatatcgaga

SEQ ID NO: 72592 - DNA, 533 bp, Prunus persica
  Intron number 1 from transcript ppa013083m (locus ppa01308 3m.g) derived from phytozome v7.0 (chr-ID scaffold_8; pos 12143583 to 12144115 reverse strand)
cacgacgaagcctagcttggcattccaacaaccaggtttcacttctcacataataatataaagtcttattctttgattaagtttttgcaattttaccgtgttttggtttctgggcattgtttgtctgtgacattctctgtaactttgattttcccctttcgaatccatgatctctgaatgatgttaaaaatggtaattagataaaatgtatctccatctttgactggttttcattggttgtctgttgggcactttaaatttttgttggaggtaaaacaattgggttcgattcttttcatgctgggaaagcattaactttttgtttagtttgatctgcgttgttttatttttgttaactttgaatttcattttagaaatttaatttaacccatcctatatctccatgtgcaatttatgcataaatagattttagttgagagttctcactggtgaactgaactaatttggttttcaaagcatgagtttgatgtggtgattttcttttaggtttttctcatcatatagaaaacaca

SEQ ID NO: 72593 - DNA, 482 bp, Prunus persica
  Intron number 6 from transcript ppa006141m (locus ppa00614 1m.g) derived from phytozome v7.0 (chr-ID scaffold_3; pos 16807736 to 16808217 reverse strand)
gaaggtaccagtgcgttaagtcagtcatcttgagtcattagcgtaagagttattttctggtgctgttgtcatccaggactttaatggttatgctatacaaacataaggcttgtaatgcatagtttgtattttcacgtttcttatggaattatatttttcatctgttttgactgtgtatagtggcatttttgttaacaattctttaatttaaaggtaggaagtcataacatgtagctttcaatgcgtttttttttaatgtattaaaaaacatatcttcaattgtgctgttggaagaaaaataattgtgaggagcatactgcattttagttatttctgttaataggaggttgcatgttttctttatggaattctgatggtcaactacttttggcatatctgccattgatttttttctccttctttttacctcctgtttcattgattcactcttaccattcaatatgctatttgcagtgtgccac

SEQ ID NO: 72594 - DNA, 879 bp, Prunus persica
  Intron number 1 from transcript ppa006141m (locus ppa00614 1m.g) derived from phytozome v7.0 (chr-ID scaffold_3; pos 16809349 to 16810227 reverse strand)
atccagcgaacccgtaaaaaggttcgcattgcaaggtaattttgtttaatcaaaacccttcaattttttttttctttttaaaaagtctgttggatctgatccatgctcaacgtttccaattataatacctctctgcatttgctcgttctggtgttttctttctttttgctgaattttggggaactgggtatccattggtgtttctgggattttaggattttttgtgggaatttggatttgggttttgagaagctatgttcatgaagtgctttagcgaatttgttagacaattttgataaggtggtttgcttaattcgcattgttatagttttttgatgccacgggattggtcgggttttgttgatacatctaatcatatgttgaattaagtgatggtttttcataaagacaagagtctttagttagcccttcaatgctggatgttggagggagcctaattttaataaagtgttttttttttttttggacgaattttttttaattaagtgttaagttcttaatgttgtggttagttcttctgttgtggctcagatgcatcgctctgatttgtttttgtttttgttttttttctcaagctgcattagttattgtatcacatcagagctatggaataatgaacttggttatagatgccgtccaggatttcaaaacatttagctccatttatgttttccttctagtaacttttgtatctgtaaatcactattttgttctacttctatttgacatcccaacctcccaaactttaaggcaattggttccaaattcttttggtcgctttggaagcatattttatatttccctgtgatttcattttctgcaggttcttggctggctacgtggcggaaaaatttccta

SEQ ID NO: 72595 - DNA, 783 bp, Prunus persica
  Intron number 1 from transcript ppa023253m (locus ppa02325 3m.g) derived from phytozome v7.0 (chr-ID scaffold_2; pos 4854831 to 4855613)
gccaaatatccgattggactaaagaaaaaggagtcgttcttttattcaaactgggtgaaataatgagctttccttgtctttccgtgtcggctaccacaatctatgatttgtttacatggccggctacggaatttactttcatcaacactcttttctcattctcgacgcaagtttcacttatttttttctttttgttttgtttttgtttttgttattttgtacttgttttaggttacctcttagaaactggcttctcaataattatgcttaaaaaaactttaatatgtgaagtagctttctggacccgtggtgatttattttgcaaaacataacaattttgttgttcccaaatttttcaacaaacactaaagtactttattaaatgagcaagaaagaccaagtacagcaaacactagctgaaaactaacgcctagacaaaaggccagagaagcaagcgacaatgcccagactggaagcgtcaatctctaagcctggcaactgaaactaaacatttggggaacaaggcaggccatccagtctcgtccattccaaattgggatcgacttttggggctaggattctcaaaaaaaatcttattgggcatctggttcttccttgcttgcatctggttcaaggcaaatgaatccacctacaaatgtgcaaagaagaaagcttcctataagttttgtcatttattttgcattattttttcctcaacttgtatgtgtgattgatgtaagtccttgtgtgtggctatgcgaatcaggagaacttcctgtgtca

SEQ ID NO: 72596 - DNA, 757 bp, Prunus persica
  Intron number 3 from transcript ppa003389m (locus ppa00338 9m.g) derived from phytozome v7.0 (chr-ID scaffold_6; pos 25231755 to 25232511 reverse strand)
actggtaaaatatgtttcatattcatttcttccactggatcatgacccagaaaacatttttgtgagatttgattatgcatgggatgattttaattaattttactttaaatcccttttcattttgtggtaattttcatgttggattcagaataattccttgctttgatttgctgatatagaatcagcaagtgagatgttcttttggtgactcttaattaacaccaaagacagagatcatatctgaatgtgcctgttttgattaggacaaggcaaagaaagcatcactctacaatcaaacattaagttaatcaaatcttgtggaattttatgtccatcttgcaacttcagaattagagttttcctgaagctaagtccatcagagaatcagtgtctgttttttttttttttttttttttgagtctcctgaagtatttgactttgagacagactacaccaacatcctcttgttttgacaaacaggttgcatgaaaagttcctctgcttagtgtaaacttaaagttaacaaatgggtttgtatgagcctaaactcaaagtcaacaaggtattgcgtaaatggttcatgcttgaattgttagattgaatagttcatctttagggttattgtttgtttgaatggttacattattacttcatgaaattagattagtaagattacgtgaaattacttctgtctgatttttatcacctttctttgtcatcaggcttctcactcctcctgaaactccactttttcctt

SEQ ID NO: 72597 - DNA, 704 bp, Prunus persica
  Intron number 2 from transcript ppa024505m (locus ppa02450 5m.g) derived from phytozome v7.0 (chr-ID scaffold_4; pos 5978555 to 5979258)
aggctcagctccattttaagcacctatctttctaagtaagttacactatggtttaaatatgtgagttcaaaattccaaaaatgaacagggagtggttgtaactatctatgttcatgattttcataaaaattaaattatgaagggagggggatttggtggaacatctaagtagaagaagcaaaactatgtttcctttcttttttcctttagcaagcattgtactttgcaccaattttgttttgtttaatcttgttctttaagaaaaaaacttatgaaggattgttcatcatttgtttcattgtaaaaaaaggagatttggaaaaccaaataccagttaagcatagggtatgtcaattttatgtttctaaaatgaatcatatgcaattagagcccatacatctactattaccatagagtcatagtggttttacattgtctgttggattgaccacttattcaaataggttcaattcactctttcacacgctacgtgctatgtgcattgttttttgcctaaccactaaaacgagcaagtacgtagtgtttccttgtgatcagattcttaaatgtgtatgtgtctgcttatttgtgtgtgtgctttctatgcattactgaagtttttattgtttgtgtgtttatgggcttgtattgtttctagttatcactttatttgtatgtcttgatcctgcttgtgcatcatagat

SEQ ID NO: 72598 - DNA, 669 bp, Prunus persica
  Intron number 2 from transcript ppb020680m (locus ppb02068 0m.g) derived from phytozome v7.0 (chr-ID scaffold_1; pos 43864205 to 43864873)
ccgatatagaaaatcaaagtcaaggttacccatcaccctctcaactttttggaaattatataagcttcaacttttttaatttgtaaattttccctaccaaaatggtaggatgtcaataccttacaacttatcttttctaatctcaacgaataaaaaattattccactataccttcatttcttacttcaacataccttaaagctatctaatgtaatccaatcctatgcagaaaaaaaaaaaactgcgagatcattaaaatacaatctaaaagttaaaacattgacacgtgtatacgagtgcaaagtagataaaaagacaaaaaaaactttgtcacgcgactttaactagcaccactatattaaaactcaaataaatcttaacagagaaaatctgagtaaaggattggggtccttacaaaatataatagcaaagtgtttgttggtcttgaagtttatatgtacatgggaaatgttatcttgtggctgaaaaatgaaagtattacatatatctcatcaaacagtttagcattttataatgtaagaccttgaatttgggccattggttaggtgaactatagtctcaaatctatggtccaaatttgctagagaaggtttccatatactcttctgtattggaaaataaaataggtattttccaaatttgcaggtg

SEQ ID NO: 72599 - DNA, 971 bp, Prunus persica
  Intron number 3 from transcript ppa007989m (locus ppa00798 9m.g) derived from phytozome v7.0 (chr-ID scaffold_1; pos 6996999 to 6997969 reverse strand)
cttctctaccaggtacttgggtgggcggcgtttggtattccaaattagagatcctttgtttctcattccttgactgcatttttatgtcacacatttatcaaaatgataagtatataatttattgcacccagagtaattaggtgagtgaggaatagccagatcagatcactagaagtgtttactcttcatgattttgttgaagaaatctgatgatactcaaggacttaaaatataaagatcagactgactgactggataaagatatccaaagaatgttactttccaaatcgagaaatgagttaattggaatcatttttattttcttctgagttttgtaaaatttttgcaaatgctctgccattgatgcttttgtacatgtttatgtgtagcaaaatcaaattatggtgaaaactgtcaatagtgcttagcaaaatcaaattacatgtttctatgtcttcccataaatttttttaaaacattcatattgatagccaatagtctttgggtttagtggcacctttctccctctagaaaataagggttgaggttgagttcaggggttcaatccccagtgggtatgtgggatcattcctgtcatttgccaaagaaaaaggaatcgtatagataaattaaatattgaagcttagttttatcatagagttagagtgatatgccgcagttctatacccaaacgtgcagtttatattggtgcatgaatagcatactaggcaacctttattttgcagttgcacctcatgcttgtgcatgcttagttttgcagggttttagttctcctagtttaccagtgtcatctccgattccctgagatttgtttcttcctttgttaacataaaaggaattcaaaaagtgcatgtttgatctcgccaagacaaactttgcatatttgttgtgcatgcaaatttgtctctttgaagtcccattgatgactttcacttcttaattgtgcagga

SEQ ID NO: 72600 - DNA, 530 bp, Prunus persica
  Intron number 2 from transcript ppa007989m (locus ppa00798 9m.g) derived from phytozome v7.0 (chr-ID scaffold_1; pos 6998024 to 6998553 reverse strand)
ctgctgaaaggcaaggccgaattcgggctcagcaggtacccttttcttcccacctcctcccccaccaaaaaaaaaaatcaaaagatactgacccttttgcctctttaacaagctgactgttagtaatggccttattttgcctctttgaagaagaaaaaaaaagaatcttacttgaaaataattatctttgcactttctcagagatctaactgagagtagaaggcagtgtttctgtatttaattgaattggtttattgaatatatacctatgtaactggaaatttgattgcttggtatccaagtcccctaattatttgtctatattcatttcgtaaatgcttaggcattgcctagatcataattgtgttcatttcatattatatgaggatctcagtgtcaatgagctgaaactttattgattcttatcattggcccttaatatgtcatcacacatttctattctacttgctaagatattttcattttgtattggaggctttgaggaaagcactaacgcaaccaaagttgga

SEQ ID NO: 72601 - DNA, 443 bp, Prunus persica
  Intron number 2 from transcript ppa017298m (locus ppa01729 8m.g) derived from phytozome v7.0 (chr-ID scaffold_6; pos 197180 to 197622)
agcaagtaaggtctccattatctgattgattttagttttctgtgaacagcacgttaatttttgcaatgtttcttcatatttgggttctgatgattgagaaatttattgtgtataagtaataatggagcttgattgttgcttgttgcaatgtaatggagtatggattctttttgggaggtgtggttgtggggggattttgaatttgtttccagtatgttaatttagtatagtatgtttctgattttattttattttattttatttttttaacatgcttgaagttgggtgagtttatgcagataatcatttatgttgaatgtcgagggggtgttttgtccgttctatataaaatataattttatctacatattttggtgctcatgtgtgctttgttctatttgtatccagagagctgcaaacacaggttggggtgatcaagactc

SEQ ID NO: 72602 - DNA, 311 bp, Prunus persica
  Intron number 2 from transcript ppa016395m (locus ppa01639 5m.g) derived from phytozome v7.0 (chr-ID scaffold_6; pos 18158527 to 18158837 reverse strand)
aatttccttttccagaggaaggtatgaataaatatagaaaattaaattgaaattattactaatattattatcacatcaaaataatgaattaattaacatgatattattatgttgtggatgctggatatacaaatatatttggattcttggcaccttaccgaggtgaaagatatcatttgcgtgattataggggaccgcgccgagcaccaagaggtcctatagaattattcaattataggcattcttcattacataatataatttagcggttttttggtgtgttgaaagctcgttttccaattttcaaattg

SEQ ID NO: 72603 - DNA, 914 bp, Prunus persica
  Intron number 3 from transcript ppa019392m (locus ppa01939 2m.g) derived from phytozome v7.0 (chr-ID scaffold_1; pos 41666575 to 41667488)
ccgccaccagcccctattatatatccaccttacaggtaagaaatgttgcattattattatttttataacaattaaagctttttttttttggagggttaaagagaaatggtccatgcatatgcaatgaattaaataagtgtcgttttttatgctacatataaataaatatttcctcggtacagttggtatcaacctgtaaatagcaaatataaatcatgtaaattgaccttcgtagagaaggtggggtgccatgttctcttgatgtacatatattatgatacattgatggatatattgaccaaaatcatctataaaatacagcattaatattatattattaattgctgaaaaatgtaattgttttaaggaaattataaagattaatggagctacatttggtagatgaagacgtgaatagattacagtgatattacttaaaaagaaacaaatggtcaatctttgtcttcatcggtcaactctagggtggtgcttcctaagtcttttgtgttttccaactttgttcccctttttacaagttctaccctaaaaccaatcactcatacatctcattaagtcaaagttaacttaatctctgttaatatgatcagtgcgaaacactttaagaagcaaattattattattattttgttataatagaagcgatattggatattggggagggagaatcaaatcttagacctctcgaatacaaggataaatattctcaatcacttaaactataagccctttgtcttccagaatgaaatcatagaaagaaaaaaacttctcacctatagaatgaatttattttgttggaaataaatcttcagctatcaagttattttctgccatcgttacccggcaatctcatttaatattgatttgcagctacccaacgtacactcctgcagatt

SEQ ID NO: 72604 - DNA, 461 bp, Prunus persica
  Intron number 2 from transcript ppa010124m (locus ppa01012 4m.g) derived from phytozome v7.0 (chr-ID scaffold_7; pos 12238805 to 12239265 reverse strand)
aaagttgtcgacattttcatccccagagaccgaaggttggttgggataaagctttttgttttgtgtgtatttttttctataacatgtttgtttccggagaaattgagtagctttgttatgtttgaaaacaatattcatcaatgaagaactgccaagatattgttcttgtttgtaatcccatttaatccttatttttcttattctcacggatgctgagaagatatgggaattcgacgcttttgatcatctgtgtattgtgttcggaggagcgattgagcttctcttaaagtggaggactaggaacttgtaggaagtgcaaatttgaattatgtccttttcccctaagtttttgttgtaaatgtttcagtaaattgtttttctatttgaagactggatttgggtatttattttccttttgtggtttaggactggcgagtctaggggttttgcttttgtgcgat

SEQ ID NO: 72605 - DNA, 199 bp, Prunus persica
  Intron number 1 from transcript ppb017449m (locus ppb01744 9m.g) derived from phytozome v7.0 (chr-ID scaffold_1; pos 1793323 to 1793521 reverse strand)
gagtacagtggttcatggatttcctaaacccacaaagaagatcggaaaatgagatgaagaaaccacaatcctcaaagctagagaggagtggaccactgcagaagtcacacacagcactaataatcaaaataggttaaatgctttatttactgctgtctcttcagatcaatttgaatatatatctggttgtgatacttct

SEQ ID NO: 72606 - DNA, 499 bp, Prunus persica
  Intron number 1 from transcript ppa005716m (locus ppa00571 6m.g) derived from phytozome v7.0 (chr-ID scaffold_1; pos 28110446 to 28110944 reverse strand)
ggtaggtgctgtttttatttttcccatttcattttggtttctcgtactctgttcttcgatttgtggtgtctgtcgggttctgtgtgcttcctgattttcagtgtcttccttggtttgcctttttctttggctcctttgtgcctgtcttggagaagggggtggggcttgtttagttgtgaagtgggtgatggaaatttgtaaagatacttctttgttctcagttttggttctgtctgctgcctgcttatgaaagttgtgttttgtgagaaagtttggatttttgagttatcttttctttgtgaacaagtcctccaaatgctttactcgatggcttttttcatttccttgtattctttggaatttacaagtaccttttcttgattggttacaatggttctcttcttctccaattggttctttttgttctcctagctttttgtctaattatatttttccttttttgttttttctttttgctgggttttcttcagaggttagc

SEQ ID NO: 72607 - DNA, 670 bp, Prunus persica
  Intron number 1 from transcript ppa004490m (locus ppa00449 0m.g) derived from phytozome v7.0 (chr-ID scaffold_6; pos 21143214 to 21143883 reverse strand)
ctttggtctggggtcgtcataaccgctttggattggtattttgaactctacccttttgtgtttatggttcgtctttctttgaattttctcagttcttgaaaatctgaatttgggttttcctctttgttatgaattttgttttttttgtgcaaattaaatttaatgtgcaagcaatttctgtggcttttctttgatatgagtatgtttgattctttcacaattttcagagggccactggtttcggcgctttctgtagttgtgttaaagatttgaagttcttagtcagccagttgacttagttcagtttatagaaagatgtagtgttgtttgaaatcaggaatttgagagtctattcaaagtgaaggattgaatcctgcttggttgcctggaaaatccaagatttaaaaatatttaatttctggaaagtgaagctcatttcaaccatgccgaatagatttattagttctcgctgactaattttcagtttttaaggttcaaaagaataaagtttctgatagtccaagcttgtagtttctttcttttcctgcattgtcttagaactcaaccaaattttttttccttgaacttgcaactattttaaaattgataactcgaaaataatttcatttgtttccttgctacagtttcatctttctttttcttgaaaatt

SEQ ID NO: 72608 - DNA, 908 bp, Prunus persica
  Intron number 1 from transcript ppb023070m (locus ppb02307 0m.g) derived from phytozome v7.0 (chr-ID scaffold_8; pos 2513840 to 2514747 reverse strand)
ccgttaaactgtacgtaagaatatgccgttaaagatggcatgaaaactaaagtacgtagggaccacatacgatgaaaagaaggcattcaagggctgatttatctatatattatacagagcccagtccttttcctgtactcctaattaatcactaatgtccttgttatgttgctctcgccaccatttccagtcaaaaactcgaatcaaataacactttgaagttcttggaagccttggaatttttgacatgcgaaagcataatctatacatatatgcatatatcacaggaaaattatccgagaacttctctggtaaccatgttctagtggcatttgggaagtgaaaaggcttgcaaattatacattataaggtttacctgccaagaaatttcctcaattaattaagattttatgtcaacatttccagtagcttgtggaggtagacatctctatttatcctctatggcacccatgagttttacaggatatcatttatcttttcttacgttgtttcttgatagtttggtcatcacattaatgcgtgtgtgtgtgtctatatatatatatgtatatgtatatgtatatatatacaagcctctcagcaatctataacaaatatggcagttccacaaagaacaagcatgctagttgagcttcatcactcaaagcaattttgcttttttttaattctagtattctctagcaccatatatctacgaaccatgcatgcaaccaaactgagcgcagctctctcctgtccttggcactcaatctgtcttctcctactttaaattggaattctgataattgttgctcttggaaggcatcacttgtaaagatggatgggtaacccaattgctcttaccctccaaagggctcaaaggaggtgagtttcccttttcccttggt

SEQ ID NO: 72609 - DNA, 659 bp, Prunus persica
  Intron number 1 from transcript ppa025004m (locus ppa02500 4m.g) derived from phytozome v7.0 (chr-ID scaffold_3; pos 12963388 to 12964046)
tggatcagatttaggggtctagggctcgaggtttcggacttcaagcccttacttaattattatatatgagtggaacttcggtccctcattgtacatgaattataactttgattttttttttcttcataaaattaatatgttattgtggagtaaagtaataaattaaatacaaaattagtaaaatactcatttctagacataaaactataaatatgccctattctatttaatgtacataaacacacccaaaataaactcaaaaattgacagttgtcgattttttaaatttaatagtaatgttggattattgttttgccctttttcccagctccgaggctcaattaagataatcgacaattgacccttcaaaatcttggagctggtctatgagaaattaaggagcgctcgatttaactaacctccccgtcggagccgcagctctaattttcattgctttctggatctcttactcgatttctcacagatcttgcagctattttcagatctcatagctcaatctctcgcatctcagtcacagtcaaggtcattttacaactcaggaggtggactcgggtcttgatccatgaggccgactctttcctccaccgacaatgatgctttgaggaggccttttcttcgttcagtgagatcattgaatc

SEQ ID NO: 72610 - DNA, 558 bp, Prunus persica
  Intron number 1 from transcript ppa013942m (locus ppa01356 4m.g) derived from phytozome v7.0 (chr-ID scaffold_5; pos 13137115 to 13137672)
ccacaacccagacctgtcgtcaccaaattcgatctgtaagtctctctctctctctctctctctctctctctctgttgatgtacttatatcggccaatttctgttcttttctttttgggttcatctaaaaaataattgcctcttttctctagctattctccgtatttgagacctttgcgcataatgtttttccttaaagagaaattcttcagagaacactagacgtctcttgcttgagttattttgtaaccagaaactgtatgaaaactgttgaaccagaattctcatactgatgatgaacaatgtggaaagatggttttcaattcatgggtgtctttgggtctgtcaaatttggtttcttgatgtaaggttttatgtcgtaaagttttgggatgttgtcatctgaggatggtggcatggccctaatgctagaattgttttgtatttctgtttctattatctaatagttagtcaattgtaatttgattacgacaatatcttacatatccattgtgctattgtaggtttcttggatcctgacggaattgccgtattacta

SEQ ID NO: 72611 - DNA, 227 bp, Prunus persica
  Intron number 2 from transcript ppa000658m (locus ppa00065 8m.g) derived from phytozome v7.0 (chr-ID scaffold_7; pos 16847051 to 16847277 reverse strand)
tggaccttttggtcaggttgccaaaggtatttgaacgccaaacttcatgattgtaacatgttttttgttttgataatcaaaataagtgtgttaattcttaattatttattatcgttagagtagtttttggtaagaagattaggcgatcaggatttacgagaggttgtatttactcatttgggaagttcatgaatctaaataattttctcttttgcaggagtgtttcc

SEQ ID NO: 72612 - DNA, 692 bp, Prunus persica
  Intron number 1 from transcript ppa016973m (locus ppa01697 3m.g) derived from phytozome v7.0 (chr-ID scaffold_1; pos 37316475 to 37317166)
aagcctgagcaatttagaagcaagcgctttcactggtaagtaattcattcaagaatctccttgttgtccattttttgttttgaattttcattctgttttatttaatccactacacaatacatgattttgatgtgtttggtttttgattgttatctcgtgtgaaacagttgttgattgttgatgtgtgtgagtctcacgataaattcacacatacatcaacggttgacaatcgtccatgtgcgcgtgaacaactgtcgttaacattcatcttaaaacgcacactattgtttatttgagttttaaaaaagaagtttggtccgaaggtcatattaactaatgaagtattgaaatgtatataaggtaaatgtaattctatgacttttaattccatattaaaaacaaagttttgaaagaaaaaaaataacaaaagaagaaagaaaatcaaagatattgtaatcaatttaaatcaaagaaatatgagatcattgacaaaaagattgagacacgcatcatcattgataccagatcttctcaaacatttactttctatatgatggtatggtagcacgtcggtcgaattgaattatcttattttacaagttttcttttatttttcaaatgggttttcatttcttattttcttgggcctaattatgggccctttttcttgaccaaataggtaacctaggcct

SEQ ID NO: 72613 - DNA, 565 bp, Prunus persica
  Intron number 1 from transcript ppa015945m (locus ppa01594 5m.g) derived from phytozome v7.0 (chr-ID scaffold_8; pos 13974809 to 13975373 reverse strand)
gaggtcggctcttacggaagcagcaaatttggctgggatggttttaaacagagaggggtatttttctaaccacttattggcattatatatatttgaggattttctactttttatgttgtttttaacattgtctattgataaatttaaatgaaaatacttctctcctaatccggactgttataaactctgtaaatcatcccctccattaatcgaactgttaaatgcctacgtgaatttgattttattttatgcagaccaaagtgaaaaaatgtatggttatgaggctttcatgcagaccttctatgcagtggctgtctatttttccaatgtttcaaaagttggcaaaaatcaacgaatgccatatgaacaaactaataagaatttatttttagaggaaaacgtaaccttctagatataggtaggtcatctttttaatcgagcaaatcctccattttttgtgggattatatgttctttgccttatttaaacatttatatagcaaatttccatttcatgtattgattaacatgtttttacactggcaggtacgaatccaaatttattc

SEQ ID NO: 72614 - DNA, 346 bp, Prunus persica
  Intron number 1 from transcript ppa012568m (locus ppa01256 8m.g) derived from phytozome v7.0 (chr-ID scaffold_7; pos 4705495 to 4705840)
aagggattgagcagaaagaaaagtaagttcttttggttttaaatggtttaacgctaatgcattaaaaattgtgatcagtaataatgtgaggagatagattcaggggagtacaataataatgagagaaagcagtcaaatgcacatattaaacatatatttccgcatttatttgtgcaaaattaattgcaaattggtttagctttagcaatgtttttctgtatgtcaattaggagcacctcatggccctaattctcctttgagttgagatcagcggtaagattattatgttgtttcttcacacacagatgatttatttgcaggatatctgtgacatttgttgataagg

SEQ ID NO: 72615 - DNA, 567 bp, Prunus persica
  Intron number 1 from transcript ppa019177m (locus ppa01917 7m.g) derived from phytozome v7.0 (chr-ID scaffold_16; pos 329904 to 330470)
gggttcaaaggggcctggtaatttcttcaaattcttcatctattgtattcttttggtacttcaattttatagctttattttggtctgttagttttaaaaactgggcaaaatcttatgtgtgtttgagtgggtttgcctaagttcttgtttttgtttatgaatttcatagcaagtgttactggtgtggtgtttggttggtgcgaaaacctaggaattgaagggtttggttttcttttgggtggactggggagcaagcaaattttaacaattctgagctgggattttaggtttttatttacatgcatcaagttttaatatttgtagtatgtagtggttggattttacatgcataatcttgcgttttaattacctgtggatgcgtgaagtgggtgaacaaaagccgtccttttttaacttcggccatagtttttttcttacacagaatccaataaactattttaatccaattcgtgcgtattgtttaattatgtgaaagttttcaaattttctgagaggttcatgtttgttgcaggttggtgacatcattagcaggtttgagaagaagga

SEQ ID NO: 72616 - DNA, 348 bp, Prunus persica
  Intron number 2 from transcript ppa019177m (locus ppa01917 7m.g) derived from phytozome v7.0 (chr-ID scaffold_16; pos 330450 to 330797)
tagcaggtttgagaagaaggacttctatttgaaaggtaatttccaaccaacgatgtttgatcttgtatgattatgtgcactttgataatttgtgacaatcctatttaacaagcctttcctgttttataatgattatcaacttgacttacagataaaacctttcggacatcaaatttgatgtatggcttacaattttgtgtgttaattatactacaataagtttttcgggatgcttagctaaatttggatgtgtaacttatcaggaatttcttctcaataagtttttttttttttttttttttttttttttttttctttctggtatctgttcaggtttgaagttcatca

SEQ ID NO: 72617 - DNA, 1018 bp, Prunus persica
  Intron number 2 from transcript ppb012880m (locus ppb01288 0m.g) derived from phytozome v7.0 (chr-ID scaffold_5; pos 5528151 to 5529168 reverse strand)
aagcactaagtgtcctatcaggcttgatcaaggaagtgagaaggctagttgacaagcttcttcttgtcaactagcctaaatgtaagctcaatttctctttgagaaagacctccaaattattgtctttgagatgtgagagacagtgtctctgagagaggaagaacttggaaccctaaatgtaaaccgcgaaaatgaatgaaagcgacaaatttatagaataaatttttaaaaccaacggcggtccttaccaaaaaaccgccgtttaaattgtaaaatcaacgtcggtattactgacgtatattacagaactccacgtcggtacattaataatcacgacgtcttaaataatctaccatgacgcgagttattacttatgtactttaatttttgagtttactacgacggtacctacaacactactgtcgtatttatttaccacgtccgaagttaaatttaccgtcgtattttgtactttatacgtcgttgttatatgtaaccgccgtattatttttttgaaatggttttatatgtaagcaacttttcgtctacttgacttacacattagttgtttttatattcttattttatttaaatctgtcatccaaaaaagaaactttacatattgcagaatattaatttccttcgttttaaatttcctccggaaaaaaaactctatttataacgcactgtaattgaaaaataaactgaaaggtcacgggaaaaaaaattctattcataatttaaaaattaaaatccacgtcggttatattaaacctaacgacgttaaatgaaatgattccacgtcgaacgaaaaatattgcgtcgtgttagttaaaaacgacgtagttaaatgtaaccgccgtattatttttttgaaatggttttatatgtaagcaacttttcgacttacacatgcactgtttccaaacccgattaaaaatttcaatctccagagaaaccttttcgtcttttttccttgtcagagcattgtcagagtttctcatcgtcttcctctcgt

SEQ ID NO: 72618 - DNA, 984 bp, Prunus persica
  Intron number 1 from transcript ppa024726m (locus ppa02472 6m.g) derived from phytozome v7.0 (chr-ID scaffold_2; pos 17539947 to 17540930 reverse strand)
taagcatctcttacctcgccagcgcaaaaaagaatgtgagtccttcagaattagacttgtctcctttaactgttgttttatcaagtttgatgcaaatggaaacaaagatattgaatgaaatgatatcaatccccataaactgtactaaagattgtttagctgccttctttggacattgaatggtattctaaggcattttgaacaatattgaatgactgaagaaaaaactcaggatttaggattttgttggcacttaaaatttgtaatttgtggactgtgattgtaccttccattgtaggtgatggcacttatgagggatttgtacctctctgtgcgcaaaggtctgcttttcttgcctcttgcacacaagatgtatacttcatgtacttgggtcgtttcctctttttgttaataaactttattactaatcaaaaaagagattgctcgcttttctttgaaaccattgtcttaagatgccagtatggaattgctttaccacagaatttgatacaaactgaaattggccaaaatatgtaacgtacaggctgagctaagtttctgaacgttgcagtatatttgaagccttattatcctcgagtgaattaggatggtagtagttttgaacttcaaaagctcgtttttacacaatattggcccttgcgtctttgttacaatgctttcagactttgacaaatatgtccagaaattaaacagatattcaatttgtcattaaatatcggttaggaaattttcatgtagtgtccggactgaagtttcataataaggtgggataagctaaatggcaactcggcatcgaccatgacatcagaagagaaatatttatacttttcccattgttttaatccgaatgatttcgagtattacatagtttacactcttgattgtatataatttgcatggttcacattattcatttcttttttttcactttgcaatgggacttacaggcagaggtgatagttg

SEQ ID NO: 72619 - DNA, 294 bp, Prunus persica
  Intron number 1 from transcript ppa009002m (locus ppa00900 2m.g) derived from phytozome v7.0 (chr-ID scaffold_4; pos 4301368 to 4301661 reverse strand)
tccgaaagagcgcccagaagatcatagttttggtaattaatctaattatatgcattctgatcttcatttctcaatgcctgcatttttttcaagtcatgaaagtcattgcaaaatgacatctctgtgtgtggtttctaattgcaacaattttgccttcattcaataatgccaacatgaatcaaaggaagtttcctttcttgtcaatcacaataaattttggccaaaaagaaacagggcattgcattacaataagtactgatctgtgtgaaattctttgtttaggcattgccacca

SEQ ID NO: 72620 - DNA, 919 bp, Prunus persica
  Intron number 2 from transcript ppa005978m (locus ppa00597 8m.g) derived from phytozome v7.0 (chr-ID scaffold_3; pos 2468956 to 2469874)
ctattcgaatccaagctgtgtttcggggattcttggtaagtggttctccctcctgctatttccattaatatgtagcatatatttaagtacactgaaattagttatatgttctatttagttaagcatgagttattgtctaggtagatagctgaattcagttcaataactgtcacaaaactttataatatttgcactaactttgtgtcctgtgttgaatattataaagagattgatcctgagtgtcaaggcatttctttgatggtttcaccaaaaaaaaaatttctttcaaacgggtaatgcaattcaaacttcttgggtgggtatggaatctagtgtagattctgcactctcagtaacaaagtttttggacactgcaactttgatatgtaacttcctctttatttcatctcgacacagtttacatatagatataagatttaagtctttcttttctcgtacaattttctggtcagttttagtactagttttaggttctttctttgtttgatcagttttagtactaattttctggtcagcaagctggttcatagtaaaaatgaaaatgataaagaaatcagaagaaagttaagtaagttggagagtttgttgggaagtggattgaaaaatgaaagccagattgtatcagcttatcttgttttagatgagctgcttgaatggtgattattcaaagatagaactaattggaggtcattgggcttgtgatgttgaaaagcaaagaaaagagttaggatcagtaaactgggctgtagattatccatctaatgaataagacaatatgaacttttttgcatataagcgaatgcataatgttgtgtcattatgttcatttgataatggttaatggggtaactgataaactgcaggcaaggcaggctttgagggccttgagagcagtggt

SEQ ID NO: 72621 - DNA, 469 bp, Prunus persica
  Intron number 2 from transcript ppa011256m (locus ppa01125 6m.g) derived from phytozome v7.0 (chr-ID scaffold_1; pos 41561961 to 41562429 reverse strand)
tcttaaaagtggcccgaaccttggtaattcatttcttttcctcttttcatattgagctgtgaagctagaataatatgcacattttctgtacaattgagccaaagtcagaatagtcaatttccttcttttatggactcatttaaagagatgttgaaagccttccctggtgtgcttaaataaattttcatagcagcccgttgttttttaatccgtttggtacttttcctgtgtgactcttaagttcacatttttttcattaataacctttgaattgatgcgatggttagatggatttttttgaagattttttattattagcaacagtgttattttgtatagattgctacaacaacttgtggtctggttcagtatatatcagctgaatagcacagaaagaaattattttgtaagccgttctagtaatgatcttcctttctataggggctgtagcttcagaggttcgacttat

SEQ ID NO: 72622 - DNA, 428 bp, Prunus persica
  Intron number 1 from transcript ppa011256m (locus ppa01125 6m.g) derived from phytozome v7.0 (chr-ID scaffold_1; pos 41562506 to 41562933 reverse strand)
tggagtgcgtggttcagggaattatagaaacacaggtaagtactttgataatgtgggggttgggttaggcttacattttgttatacaatttctggaaatgcctctaaattctgatcacttgatagcacatctgtgtattgctgctaggggagaaagattgaatcttctgcttagagctcactttttgacacatgtcttctaaccatgtttaccaaattgttcatttgaggttaatatgtgagaaaggaagaaaaatctatatttggttttttattgagtagtttttgttttctggcatgtacaagttattcatgattatggactctattttgttcacaattggaaatagatccctaaaagaaccccttttcccccatctgtgggtagtttctgtagctgcatctaaaatatggttttcattttgcagc

SEQ ID NO: 72623 - DNA, 659 bp, Prunus persica
  Intron number 1 from transcript ppa008189m (locus ppa00818 9m.g) derived from phytozome v7.0 (chr-ID scaffold_2; pos 24788516 to 24789174)
ctgatccgatttacaagtatgcctttttctcacatgtttctgtttaattttaaaactaatttgctgattggaatttccctttcgttgtcttttgagtcttcccgagttcgtatcagtggtatttgatttctttatcctataataatcgaactcactgagttaagtatttgagttcgatagaatgctctcgctgtttgactgataagctaggttttacttataatccgataaagtcttcatcttttagaggtcgaaaactctaaaatctggaaaggtttcgtatttccgtacaacgattggtgtctttatacatgtgatgtttttgttgctttatgacgataatgatgataattctacaatcatttaatgctaggaaaaaatttaaaatttttaatgaagattagtgacctattattattagtgattggcatgctctggtatttattcgaaggaaaaaagataaaagtgttgtgtcaggaattatatgccaggaacatagagtaaatttgttctgctctttgatgtgatttcataagtacaaaatttatatctacaggatttcgtttgtcctgttctctttctcgtggctgttagaataatattcattatgattttgatggggttttcaggtcttgtgtggtgcagtgtgaaaaatctgg

SEQ ID NO: 72624 - DNA, 325 bp, Prunus persica
  Intron number 1 from transcript ppa003885m (locus ppa00388 5m.g) derived from phytozome v7.0 (chr-ID scaffold_2; pos 22731805 to 22732129 reverse strand)
gaaaacagatatacagaagttagagagggttgttgtgacctttgtctctgaccttgtacttagtaaattacttgcttgaatttagttttgattattgtcaatggaaaaaccagaagaaaaaagaataataaggaaatacctgtggttagcggagaaagaacaattagattaacattaagtgattgggcctctgcagtcgttgaaagtcacttaggtttctcatgcttatttctctttctaagctttcgttatcttttcacgttgtctcaggggtaatttaaatcttacagtcttgccaacatctaatttacggctttcattcgtt

SEQ ID NO: 72625 - DNA, 680 bp, Prunus persica
  Intron number 1 from transcript ppa007790m (locus ppa00779 0m.g) derived from phytozome v7.0 (chr-ID scaffold_2; pos 18998639 to 18999318 reverse strand)
aagtctctggttgctggcggagtcgctggtggagtgtgagttctcgatttcttgagttttcgtgtgtttgttgccctggaatgcagttcctcggagaaaaaatttcccgcaaaaattggattttgttttttaacaactcgtttgattagaaatcaatgtcattttgcgaagccaaggtataatgactgtataaattcgatcgttttgtgaggttaggcacgaaacaattgaatctttttctgtgacggctaagaatactgaaattggaaaaagtaggcgaagaaacggattcaatactatgtaattggttaatgaaaatgaataaggagaagcaatcggaatattaaatctcgtcaatcgattaaataattttgagcgtctgcaatgtgtagtatataattggtcatggtttgatttaagtcttgcgtgaatttctaattctcatgcgggtatctgaaatttgaaatttatgcatgcaatggcattaggtccattagattctagtaatgtaaaagaaattgttgtcttgtcttgtcattgcttattgatattagcaggatcattttgtgcattgtttatttctatctccatgcttttttcatgttgacctttttccagtaatgagatattttaatatccatgcaggtctcgaacagctgttgctccattggagcgactga

SEQ ID NO: 72626 - DNA, 887 bp, Prunus persica
  Intron number 1 from transcript ppa026987m (locus ppa02698 7m.g) derived from phytozome v7.0 (chr-ID scaffold_3; pos 3406657 to 3407543 reverse strand)
aagttcttgaaaaagttcagaagtagaattgataagtaagttctaccatgattacacttacgtgcaaccgggtgtatatttctttttttctatatctctcatctcttctttttgttgatatttagtagaaaaccatttttaataactcattaaaacatttactcttcgagtgaataatcacatctctcacaaaagtgaaactcacttgcagtctcacttatgctagagacgagacataattaagaaaaaaaaaagttaagtatattattattgattttcttaataggaaaattttttaaaaagaaaatatgaataaaacagacgcaatgagtatgcttctcgcattaatggatgcaggacccactaatatttgtgattcatgtaacatttcggggtagaggtgttcggccattagaatttgttacatgagagattgatgatgcatcaacaatgtcatccatgtatcattacttagatatggttaaattttatttacttaattaattgcatggtcgctttcatacataatttaccattgatcgctttcatttgtcgtttctttgaccttgattagaggccaaatggaatatgaagatgtgaaaaacaaaaactagcttaagtcgctgtcttggtgagcatagtagaaggcttgtgatgcaagccgaatactaatttatgagttctatgttgcttaatactgtgtctctttcattaatttctcaagggacaaacaaataggtcaagaaaagaactttcaggctactcttttattgtaaagggaatcaaattggagcatattaattatgagttaattaattaattaatttgctaatgtgttataattgattacagggttgggatcagacttccaacagtggaagttaggt

SEQ ID NO: 72627 - DNA, 898 bp, Prunus persica
  Intron number 1 from transcript ppa012509m (locus ppa01250 9m.g) derived from phytozome v7.0 (chr-ID scaffold_1; pos 21338757 to 21339654)
acagaaccgcccgccatattcgtatcagaaagaaggtaccattgccaaccatctctctctctctctctctctctctctctctctctctctcttgttttctctatctaatttctgtaatttggttgcttcgctttcaacccacataatgtaagatgaattttaccgttcaaattcaaggcatctgagttgtcccccttgtactttacgtgttctgaatttcccttatcttcttccctacctacccagaaactctttgttgtcagtttctgagtaatgggttcttctccttctacaagagcatggactttttgccattagattagaccaacatacattactggagcttagcttcccaagataggaaaatgtgtcttcattgtacatatacatgaactgggttagcctgttttggttgttttggttttgatttaccttattaatcatagattatattagttcccgtgagtatgcctcccataatctctagaggttcttgtactaggtgggtttggaaaaatttagtgtgttttctctgttggcagttttcaaagtgaaatttggaagctttaatttgggtgcttattagtaacactgatacactctccctttgcaatgcaaatgaacttctgttcaacaatttccctttgattctattagtttcttctatacactcatcaaagcatactggttaaaattaccaaatgggatcatcttgtgaacatttgtttgctttgctggttcaaggagcctctaaatttagtggttcttttgtacgattcattcctcaaataagttgaaagatatctcctgaaaatgagagttgctggttctgattatggatgacgcatttgttgtttcttcaggttgaagggactccggaaaggccaaggttagctgt

SEQ ID NO: 72628 - DNA, 775 bp, Prunus persica
  Intron number 2 from transcript ppa008510m (locus ppa00851 0m.g) derived from phytozome v7.0 (chr-ID scaffold_2; pos 18261435 to 18262209)
ctttgcccttgtttactccactgctggtatctcaggtatatttctttatttttctctcatatttttctttcttttggtttgatctactacgtacttggcaggcttcctttcttttattgtttttgtcttaaaaaaaataaagttgatgggttaaatatacccaaaaaaaaaaaaaaattcaggttttgagatgtttcttaaatttatgtttggttcctaggaaagtgagggaaggaaaagtaacagtggcgaaagaaaaaaagttcctcttttacttatgctttctgagagaatcaaatggaggagtcatgtttgtgtatggatttgctgttttggttgggtatctgaaagttttactggccatcactttacagatgtttgtatgcttgctgatgaaaaataaagaaaccacttactaaaagagaaaaaagaaaaaagaagcgatcttgtgtttggatattgtgatcatctgaaatttcagaggcttatttctctaaattcctgtttggttagtaatggttactgctaaaactgagaatggtagagtgaaaaaatgggatttgttaaaggtgcaagctttgttcctgatctccttgatgcttttaatggcctttttcactttacctcacaacattcagaaaaatgaaaatcttcatttttgttatgcagtataaatttgaaagttgatggtataaggaaaaaagataatattaaccttggtttgttgatcatttggtcaggtggtcacataaacccagccgtgacatttggtctc

SEQ ID NO: 72629 - DNA, 825 bp, Prunus persica
  Intron number 2 from transcript ppa010169m (locus ppa01016 9m.g) derived from phytozome v7.0 (chr-ID scaffold_2; pos 19756272 to 19757096)
tagccttcttcatcatcattctcttccactttctggtaattctcaactattgcagccattgatgctacaagttttgttctttaatatatgggtatttgggaaattggaaaatataatcaaccctcttttttttttcttgcaaaaagtttgcttttccttcttatttgggttttgttttttctttggtgggtttgtgttaatttaactatatcattgggtctaaaaagttaagttaaacttgaagtggttagcttgcatttaggtcaattaagtagattaatactgatagctgctgcaatgagcacaatttagagtaatttgcagaggaatgaataacttcataactatggggcaaatagagtagtgaactaagtctcatgctatacacgtgagtccaaagttaatggatgaacaagaatgaagttgcccccaaatgcttgacaagctaatagaagttgaatttgagacgagacctgagatgtagggacacaaatcaaaatttaggttcagatctgttggctggtttagcagtgttctaaaaaatttcagtatttaggtatagaggtacatttgatacttatattgtacacccttgggataattgcctttaacaaagattaaaacggtgcatgttgatttgtgggtttgatgactattcttattgggtttctttctgtaactgacttattcaagatttttataagaaaatttatacagaaaatagtttatctgtgtaacaacattgagtaataagattcatttagaagaaaactaactcttgagttttcccattggtttcaatttgcatttgtcttgcagcttata

SEQ ID NO: 72630 - DNA, 848 bp, Prunus persica
  Intron number 1 from transcript ppa021007m (locus ppa02100 7m.g) derived from phytozome v7.0 (chr-ID scaffold_7; pos 2687795 to 2688642)
catactctgtcaaaatccctgttggtgatagacatgtgagtggagttttgagaaatttggtttagtttcaactttgaaggaatgcattatattataattgggatttatctttatcactttgtgtttctttttatgtatagagaaactttggataggatttgtatcaagtgcagggaataagtaattgtgctggaagcttttgtagaaacttagttacgtcgttactgttacagttaatcatagccgaaaagaatgatatattgaagaaggagtagaataggatggcaaaccaattttcagaaaaatattttggtgtgcaaaacttgtaaatgaaacaaacttagaatgggaaaaaacacagtgggtcttgctgatcatttcaagctagtgtcagaaaaaactaatcctgttacttcgcattgtcagattattttcttttgagctattttatctcttttcaaagggctcttatcatgtgttccactcatacgcgcctggcatatgcagtgctttccaggaaaattaatttccgcaaaacgcaattagattaaattcctagtaaatggaacattccttaggactgaaaggtgatataaaaagaaaaacataggtttttactgaacgaagttctaatagttctgtgcacctttttagaagtgttaacaaggcccttagtttccagaaaggatatttagcagttcaattaaattgtgttgagaattgtttcataggtacttgtttattagaaaaaagatatgctaaattaagctcggttgtatcatcatgtaatattttgttttggaatcattacagattttggttgagacaggtcatattgggagacaagc

SEQ ID NO: 72631 - DNA, 768 bp, Prunus persica; identical to SEQ ID NO: 70795
  Intron number 1 from transcript ppb023635m (locus ppb02363 5m.g) derived from phytozome v7.0 (chr-ID scaffold_3; pos 11564192 to 11564959)

SEQ ID NO: 72632 - DNA, 456 bp, Prunus persica
  Intron number 1 from transcript ppa013065m (locus ppa01306 5m.g) derived from phytozome v7.0 (chr-ID scaffold_7; pos 12857070 to 12857525 reverse strand)
gctgcgcacacttctggtaaactggaattctacttataaccacatactgcttccttttcttgtatttttcatatcgaaaatatttgagatgtaggtaatgggttctgaagcctttgtgcttaggagcatattggcatcactgggttcctcctggatttacagattttgaagaggaagagagagagaaaacagagaaagatgtctctttgtggtgggtcctaggaattttgggtatcccaattccgttaaaaacaaaattcccattcccacatgaataattcttgtctagcttagaaatccatgtaggatattaggagttggggatagtttacaagcaaagatgtagtttttaataactggttttgtctgtgagcatgaacttttgtccctcgtgtccttcttttgatgcttggtgttaatgtgataattgactttcatcaggaacaatacaggaag

SEQ ID NO: 72633 - DNA, 888 bp, Prunus persica
  Intron number 4 from transcript ppa009429m (locus ppa00942 9m.g) derived from phytozome v7.0 (chr-ID scaffold_9; pos 602430 to 603317 reverse strand)
ctttatatccagatattgagaaatacgaggaggaggtataacttttgcttttgtacatttatattactagcaggttgacaagtacattgcatatggtcaagtataataaaggttgctgaatatgggaaaaatagaaagaataacacttcaaattagttttactacaatccagtttttaacagacgtaatgagcaaggagataaatagggttactgttgcagattgtatggccagcttgggtaatgattgtaatctgggttagcatgttttgagttggtcccatcctccattgtatgccttttgcgtgctgatcttcttgttttatctaggcccaggcttgttccagtgtaggttcttcctctggcttttgggctcccatgcacaaaaactaaaaagataaatagagtttattattctcgtttccataaatttttaaatatagacatctaagtgaagacataattaatgacaattttatagttagatgattcgtcatagatatatgctctttttaacttgatcatttgaacttgaaagtaagttttaatcaagaagatggaaacaacaaactgtcactctcacacacacatgctcatatacatatacatatatatatatatatatatgtttatgcatattccccgagagagagagagagagagagagagagagagagagagagagagagagagaatggaagagagagaaatttattcctcaaaaggatgtagttttattaagggttttgttttgagaatgttatgcatctatttcgactaaataaagataagtgtaagtttttgttttttttaacgaaaagatgtgtaagtttatcatgttttgcaaattgagaattaatttgtgtatggtttcaggaattggctttcc

SEQ ID NO: 72634 - DNA, 308 bp, Prunus persica
  Intron number 1 from transcript ppa012008m (locus ppa01200 8m.g) derived from phytozome v7.0 (chr-ID scaffold_4; pos 10409811 to 10410118)
ctccgctagcctttctcacaatttcttctccaaaggtaatcaaaactctcgctttcttgcaattattgcattcctctttatctgtcttcttcttcgacactcacaccacaaaacatgaacaattaagcacaatggggtggaaaattttaccatttctggtctaaagttttggtttttgcgtatcatatcacccatttatgagaaaccagacagaggatgatattaattcaaaagagaattttttatatctagtttcttttcttttgttttcagggtatttttcattgagcccagttcagaggccaact

SEQ ID NO: 72635 - DNA, 984 bp, Prunus persica
  Intron number 3 from transcript ppa026015m (locus ppa02601 5m.g) derived from phytozome v7.0 (chr-ID scaffold_4; pos 14640372 to 14641355)
ctgcgggtggattttccttcttggtttggggagtgagattggttatttactggtctttaaaaatttatatccaaaagtaagtataatggaaactgtatataccaaccatgtggtaagccatgattctattatttttgttacaaatgcatgcgcaatattatttgaattttgaaaccactcgcaaatgcttctcacaaatttatcattatataacctctttctttatatataatggtcttggacgtgcatctttgactcctcgtttgtgtacatcaagttgactaaaggggatgtacttcctactctacttcacctgagttcaaatccccctctccgtatttaatattaattttaaatttttttgacctcccctcctctacaatattatatacacttaataatcgacaacttgtaatttaatttaatagcctctctaaataaattagacatgattaagtttgaaatattaaactataacgtgtaagttttaaatcatatatgtttgatatactttattttctatttcgattccccctaatcttataattctagcttcgccactgactaaaagtgattgaggcaggaggtggttggcgggtttggggttgtaacactagaagtgactgacactagaattagttgtggcttaattaggtggtggattgccgatggtggttttgtttgtggctatatgtggttttttatatattaaaatcacattgttttgagatttttaagaaacaaaatctagttggaatttagacataaaatttacgaccttttcacattctaaatttctttcgtgctaattttaaaacttcctcgtttatcaacccaatttataacgaaatcataatatactattccttaaaacatgaattttgtcaaaataccatgtttaacttcttcatccaaacatggcctaaatctaaattccttataatttcagggggtgaggaccgtacttgttctccacaacacttt

SEQ ID NO: 72636 - DNA, 961 bp, Prunus persica
  Intron number 1 from transcript ppa007304m (locus ppa00730 4m.g) derived from phytozome v7.0 (chr-ID scaffold_6; pos 26356328 to 26357288 reverse strand)
tttctggtcaaacttagctggattggattatcaaggttttactttgacgtctactttggttggtttttttggttggtttatgttttttggttgctgagaaatgaaagaaaagtttgtttttttcggtagcggagaagttcaagttgaattcttttcgtttcctttatgaaagttcctgtgtgggttttgtttggtaactgagaaaattgggatggaaaagaaaggtgaagcccaacatatttttgttttggttatctttaatggttttttttcatctgggttttcttagattgcagtaagttttttgggcaaagggttaaaaagtttcaaagagcagagcttttgccctttgtagaaccaagaaaatggaggaaaggagaaagaaagaattgatttactttttgccaagtttagacgagtctctgtagttactagaaaagattaatatgttctcaattttttctttttaataccaaaaccagagttttacagaaaacatacaaaaccaaaatacctacctatctcccctccttttaccggatttgggtggccaaactattaattaatagaatagcattcaaactgtttagggacttacaaaataaaaactctgaatccaacggtggaattccacgcaagcatgaacattctctgtaatctcttcaccattcaatgtcttgtatgtatatcatattaaattcaaagattcttacctttctgagtcagatcatgcccttttgtcagtcacagtactatcactcaagtcaagttgccttaaacttctgtcagttctcagagaagaaagttaaataaaatgggattcaaaactaacaaatgtgtcaagcattttcttggcctcgtgcttgttctttccaagatccaaaatgactgttatgtgatgtttataaatgttcaacattgttcagattttttgagtctacaaccacaatttggtgacctg

SEQ ID NO: 72637 - DNA, 636 bp, Prunus persica
  Intron number 1 from transcript ppa016171m (locus ppa01617 1m.g) derived from phytozome v7.0 (chr-ID scaffold_2; pos 2535305 to 2535940 reverse strand)
ttgtttgtttgtccacaaatcttctagggtttagtgttgggccaacaagtctgattcatactatgcattttgaatgtgccagcaaagactgcatgttaactattttttttgggtgattaattggagattatgaacatcagtttcaagtgctggtccttattactatcagtttaaaatatttttttaagtcttatgagtgagttgggttcaaaagcaattttctaaaatcatattttatttttatttttaattatgaaaagtttttgtgtcagttgctttgatctgctgttttatgttttgaaaatcttcttgttacaatttttatttgaatattttgctgttctgacctaggatgattgcatccgcttttttgaggtggaactgagaccctgttttcagggagaacccctcgatgaagctacatttcatatgacagcaatggatttaacttaggtttttaatctgaattattgcatcaaaatccagtgtttgtgtgtttggtttttgtataataagattaggtgctaaggatgttacaatccaacgtgtttgaggtgtagaggaagcgagataagagattcatatttgtctaaccgggttgggagggttcaacattagactctagagtacttagag

SEQ ID NO: 72638 - DNA, 828 bp, Prunus persica
  Intron number 1 from transcript ppa008243m (locus ppa00824 3m.g) derived from phytozome v7.0 (chr-ID scaffold_1; pos 24697802 to 24698629)
tgggaagtgcaatttgggaatttcctatctgcaaggtttgattttccctggttatttagtaccaaatgtgttgcttatcatagttatgatattgaaatttagaggctttgaacagagagtgatagaagtttgattcttgtggaattggaatttactcatatatcatatccggtttcaaattgtacatttgccaatccatttatgtaaattcttgaatgttatacctttatgagctcttttgctaatccacgtctataacaagaagcttccaagtgttttggtgggttgctttttatgtactttaactatcattgagaaaaatagttgcccttcagctggttagaatggcaaagcaggatcattgtagttgcccccaactagttggggttaaagaaatttaaggtgagattctagaacttaccctgttgattcgaagaatagttaatgtaattataatgaagaacaatggtttcagatgatttaagttttgctttgttaatgcattatgaaataaggggttctcccccctctatatacataactttgattagattattttgaatacactaaatataggagcgtgtgttgcacatggatttctcttcaaatgctttccttcattatttcctacaaccaatacattagatgcacagttgtaattaaatggtgggtacttctttttatatgatgttgtatgatatgataggcagagttggatttcctttcatcaggaagtttttttgtttgcattgagtgtatagtcttgtttgtgcgtatgaatattattatctgtgcagttgaacctccaaatccaaaggaagctgtgaa

SEQ ID NO: 72639 - DNA, 890 bp, Prunus persica
  Intron number 1 from transcript ppa022861m (locus ppa02286 1m.g) derived from phytozome v7.0 (chr-ID scaffold_1; pos 5768667 to 5769556)
gtggcaagataaaattaaggtattttaattttttgttcttgtttttaatatactataaatatccatgtttttttaactatgtttaaaaattcattataatatttgtatatgtcataatgcaggcagaacctaaatatgcaagattccaatttgagggtattagtcctgagatggaggagaagttagatatgatgtttttgaatgtcacagccactggtaagcattcttgggcaccttcatctggtgtactaccaattgaaagtgatgatgatgccaaccaacttgaagttaacagtgattcgaatgagtctgtgccaattgaaatcactcaaactacaaacaatgtgccaaaaaagagaactaatcaatcacttgaaattcaagataataatgagaagaaaggtaaaggagggggaaaaataggaggtgctgcaaaattatcactacaaattgaacgtcttgttgaggtggttgagagtaggagtactggaacatcaatggctaatatagtttcacaaggaactagtattgctgaagtgatgaaagatgttgcaactttacctggggcagagcgtggtagcaagttgtggtggtttgcaactaaattgttttgtgctcaagagaagtgagagatgtttgttgtcatggaagatcgtgaccttaatcttcaatttcttaatcatgagttagctgaagactataatttgatagtttagtagctttaatttatgtttcgttgttatgttgttaatttatttgaatttgtaaatgatatttgaattaatgctggatgatcatttatttgaatttgttagtgatattttaaacatgtatgcacagtgaaaatgatatttgaagtaaataagcacatttgcaggttattttagaac

SEQ ID NO: 72640 - DNA, 507 bp, Prunus persica
  Intron number 2 from transcript ppa004040m (locus ppa00404 0m.g) derived from phytozome v7.0 (chr-ID scaffold_2; pos 4001241 to 4001747 reverse strand)
accgccaaatttccactgttgctcctggcactagtgtaccttcttgttactctttacctcttgttactgttattatgttatgattaatataaagctgcatggacaactacttagtgcttcaggcttttatttatttatttatctactgttttttgttgcttgtttgatttttctgggttgtttaatatatttttccgcttcctgttcagtagaattagaaaatttttgttctttcctatgtatatcttcattttttccagaaagccaaggtcttgcctctgtggtgatctttatctctaacttcatgtcaatttatcttttcttctttttctatctcttatgacatgtttatataaaacttagaatatctagaaatgaataggggactgaagtggaatggtaaaaaatgttgcaatattctgttcatacactacagaatcctgagtactacctgtaatgctaatgcttgcaggttcaccataccaggcgattttacgagaatttagt

SEQ ID NO: 72641 - DNA, 291 bp, Prunus persica
  Intron number 1 from transcript ppa009313m (locus ppa00931 3m.g) derived from phytozome v7.0 (chr-ID scaffold_8; pos 19911954 to 19912244 reverse strand)
ctcgccgtcaagaaatcatcttccgacacctcgtattattttcttcaatcttttgggtttaatcatgatttgcagttgatgatgctcatttaattattgggttttgaatttgatgactactgtgtaagaattttgttcaaatcctttcaattagtgtggtgtggttgtgcttattaaattcaagtgggaaatacaaatttttgatgtttgtatcgcatcacaatgtttttctgttaattatgagaggtgggttttttttttctttttccaggatcaatttgacattttggg

SEQ ID NO: 72642 - DNA, 512 bp, Prunus persica
  Intron number 1 from transcript ppa004069m (locus ppa00406 9m.g) derived from phytozome v7.0 (chr-ID scaffold_7; pos 9893524 to 9894035 reverse strand)
ccgccgtcacgaagactattgtggaagttgttcaggtgagaatttgggtggttttgagtgatgctgttcgattggtgattggatcttcttttgagtttttgttgttgaatttatgcagtgggggattgattttatttaaaagaactatttggttttggaagtgctagactatggttaaatttagaactaattctgcttcttgtaaatttagatctttgttgaatagatagaaaatagtcagttgattaccctgtagtacttagaaagaagtagctgataaaattctttcgggtaagttgggttgtttaattctttgatgagtatattctttgtacatcagttaatctagctttcgatggtcagattgtaattgctggaattaggtgaattgattctttttccttgttatctatagaacagattctccttcacaagatttattctttgaggaatccaccttttaatagttttacatgcgttggcatgagttaatgtgtttaattctgttgcag

SEQ ID NO: 72643 - DNA, 898 bp, Prunus persica
  Intron number 2 from transcript ppa022829m (locus ppa02282 9m.g) derived from phytozome v7.0 (chr-ID scaffold_1; pos 37749873 to 37750770 reverse strand)
gtgcacttgctcagcttcacattgccctgttgaaggttaaaaatttctttgatcatatatattagtttgtttgattttactatatgcttcttaagttgtttacaactttatatgaaacaccattgcctctggagcgattagaatgtgtgagcaaaggcttatagttgttggtgcattaatgtgttttacattttgctattactcattgacattgaatgggcatctgatttggtgtttggtgttttcatttaacgagatatgtgattgttgctaatatatggaatattgttagatgaagacaagggtgagaaatggtgtctaatggtttcttttgctttgtttatttttgggggattaggcagaattgtgcctcaatagattttcttaagtcatggatttgtagaatgtgatacatatggtaaatataagaatttaattatttaagtgatatattactatatatgttcagtctagtaatgctgttttgcctaagcttaacttaagaatcgaatagttgaactgtgtcatattctttcattcaaagattgattttgtttacccaagtttaaatatcttagctgattctttctctgtttagactatgatagatgattgactgaacaatcggttttggggaagacaacaatgaagtcagttttattactgattacggagagtttttggactaagaaacaaacaggatagtcttggtaggaatacatcgatttcaaaaattataaagaaaacaatttgatttgttttcagctgggtctgaaatccctacctatacaaaatatttgtcttttcttgttttctttccttttccacatatgatcatcttcatctcattctaacctgtgttctttccagggaataccacctgcaagtaaagcattgg

SEQ ID NO: 72644 - DNA, 587 bp, Prunus persica
  Intron number 3 from transcript ppa002183m (locus ppa00218 3m.g) derived from phytozome v7.0 (chr-ID scaffold_4; pos 11468135 to 11468721 reverse strand)
acgatcctgctggagtggtatgtgttctttctggtaaaataactgtgtgtgtatttgctttttacttccttttcttttgtgtgttatatattatcaatgtcttctgatgagaaatggtattagagccatggttgtaagattatgttggcaattttaatttttattattttatcctatatagctcactggtcaagtttgttggttgtaataggtggggtttccatgggattcaaattataagtctcatcagctttcttttttaaaataaaaaaacttataagcctagtcagaaaatttaaacttactgtttcttgatatataaactcatagttagagagagagagagagagagagagagagagagagagagagttgggctgccaattatctccatctagaagaatagatttgttttggaaacaacatttttgttattcccagaaaaatagcaaggagcccctctttggtacactcatgcatatattgaaatgtcttgctacagttgttcttagtacatgcatttgtatttcttaatgctgtgacttttggcaggataatctctccgctgttgatattctctcagcttg

SEQ ID NO: 72645 - DNA, 790 bp, Prunus persica
  Intron number 2 from transcript ppa009146m (locus ppa00914 6m.g) derived from phytozome v7.0 (chr-ID scaffold_4; pos 14123589 to 14124378 reverse strand)
ctcctgtcactgtatttcctctctctctctctctctctctctctctctctctctctgtgtgtatgtatctatctacttgcgaactctttgattttgctgggtagtcttcgatgtaatagttcttttttttggggggggggggggggggggggggggggggggggttggttgatttttgggttatggatttgatttagctatgatttcgatttttatttgttcggacaagtgggtttgtctttatttgttcatccttgtcgaatagcaattttgtgaagaaagaagattgaaatggtgttggattccagagaatagataaggtttttataatattacttcaattggattttcttttctttactgggaaaaccatatggttgaaaaaaaaaaaatacatgttgtagggtttacgaattgggaacgaaatacagttaacagttgttaccatttattttgctgtaggtaatgatagtttacatttctttctaaatggattatggctgttttataggctgaacttgtatgtgtctttagcataacgaggagccctattttcactctgattcttgttcattactttatattatgagctagttggaggtagtggggttataaacaaaatttagcagggaaatagggctagtggaataatttctttgtagtgaagatatggtgctctagaatatgaagttcaaatcctaaatgttgcaggttgcatgctaactggttgttgttgttgttactgtatgctttgttacatagatttgcggtgacatccacgggcagtttt

SEQ ID NO: 72646 - DNA, 443 bp, Prunus persica
  Intron number 5 from transcript ppa009028m (locus ppa00902 8m.g) derived from phytozome v7.0 (chr-ID scaffold_1; pos 32104787 to 32105229)
cttgtgtatggcctcttactataagctgtattttatgcctgaatgtgcagtagctctggcttctttacattgtgaaccttctctagaattgcttaatttttctaccacctgtatgtaataactggtctaagtgcagtaagagtctgtgcgcaactgacatggctgccaaaaaattgcttaattttggaatgaacctaattcattgctcattaaccttgcttttaatagcattttgagttgtagataaaaaaagtagcatcctaagttgataggttttttttatttcttttagtggttactttgttatgaaaacaatttttattaatttattatttttggttttgtttatcgtccatttgtttccttgaagagagaataagttttattttatgttacatttttttttttgcagttaaaaaatactgtgagtcttgctggactcc

SEQ ID NO: 72647 - DNA, 739 bp, Prunus persica
  Intron number 3 from transcript ppa003839m (locus ppa00383 9m.g) derived from phytozome v7.0 (chr-ID scaffold_1; pos 5869885 to 5870623 reverse strand)
cagaagagaaggacaaagtaggaaaggcagacaaggtaatttccattttcttcattttttattttcctcaccatgtaccaatcttcctagggttttaaggttcttcgcccctgtttgattctaacgtgcgcctaaggtgtacgacagttgctttaaatccaatgggtccactggatccattactgggtctagctctggcaacggtcccgatcattcagagcaaatgagcagagaagggctcagacctcagattgagattagatcttctggtctgtggcacctaaggcgcacactaggcacaaagcagccggctctgctatcgtgcacattgtgtttaatttcatgagtggtgaagattctgatgtgggtttgcttttttgtggcatgtacatgacgcaaatgattgctgctatggatatgctttaatcatcatcatcatcatcatcatcaacttctctgcagtttatttgggtgagtttttactggtggccttttctatataactatttgcccattattaattaaaatcattattttcaagtacaaggatggatcgtgatcaagttttagttggattagatagattcactctagattttggtcactgtatcagaaaaatattctttgcacgaatgcaccaaatcatggctcagatttttatttatgaaaaagtaattaaattaaataaatacttatctaaattattgaaattgttttgtaataatatttataggtggat

SEQ ID NO: 72648 - DNA, 245 bp, Prunus persica
  Intron number 1 from transcript ppa016947m (locus ppa01694 7m.g) derived from phytozome v7.0 (chr-ID scaffold_8; pos 15374759 to 15375003)
tacttttctttttgcaggtttgttcctgtgttttttttttttttttggttttgtttttggttgcactcgaaataagcatgtaatatgcatgcttaatgtgaaaagcttgtgagagatttgactggttgggcccactggttgactaatgactggtttacatgtttgtattattttcttttgattttcttcgccttccaaaatggtgtgcagggtttgaagtgagggcattaacctacgattactca

SEQ ID NO: 72649 - DNA, 747 bp, Prunus persica
  Intron number 1 from transcript ppa005269m (locus ppa00526 9m.g) derived from phytozome v7.0 (chr-ID scaffold_8; pos 1060561 to 1061307)
gcccacatactgttttgatcaagaaccttattcaggtatatgatcaacgcatgaactttctctgtttttcaaagaatttctgtatgttgctctgttttgttataagtacttggtcttgatgagttcaatttttcagtattagtttttcttttttctaaatttaacaatttggtgtcattttgcggagctattattttgatttcctctaaaagttgcaccttttgtgttctaagttcaaatataatcttttgtgtttcaaatttatgttctttgaagttgaggttccatttttcatttcatcatcactgtcaagcttgttcctttcttctaatttgattttgagcttgcttgaactgataccagttctgtctttcaatttactgaaatgggtttctttcaaaaattaaaaagaaaaattgaaagggtctctttgattgttgaaatttcctttttgcttagaaaaattgaaagctgtaatatttcaatgttattataagcaacctaatgggtttatttatatttacaaaataacaatggctttttaatttgaacatgatttactctgctatatctgttacatgattctctgcaagtttctaaggtgttgacacatgggtttgtgttggtactctattttgttgtcgtttttccacacctttgttttctctgtatcggaatttgtactgacttatccatgtttctctctctttagctggtgacagaaacgaggagcttttcttttatatt

SEQ ID NO: 72650 - DNA, 823 bp, Prunus persica
  Intron number 1 from transcript ppa019766m (locus ppa01976 6m.g) derived from phytozome v7.0 (chr-ID scaffold_9; pos 264799 to 265621 reverse strand)
gagatacaaatattgcctttttccacaatagtacggttcaaaaaaggaggagaaatcgggttgccctgataaaaaaaaccaaaatggtgactgggagtgtaacgattcttaggttcgtaattccattgaggcatacttctagaatttgtttacttctgaaggccagagagactagggtgatatcttatcttttgtctctccaataatcactgaggatattaacacaaacttaatggccccaataaatgatgaggagattagacatgttgtttttcaaaagtattggagcattattggtgaggatatgagtaggttggttaaaatatttttcttagagaacaaaaatatttctgctatgaataaaacagagattgctcttgtcccaaaggtttcgaactcggagttggtcacttaattctgccctattgcattatgcaactattcttacaggataatcttgaagattctcgctaatcaccttcaacccctacttaaatgcgatcatttctcccaaacaatgtgcgtttattcctggaaggtaaattcaagataatatttttatagcacatgaagccttccactatctaaagattagaagagctactagcatttttgaaatgggactgaagctagatatgaataaagcttacgatagaatcgagtgggatttcctccaataagtgttattgaaatgggttatgcaaagatttaggtacaaaagatgatgaactgtgttccttcactgaagttctctatgataatcaatggaaagacggggtgttttcaagccaacgaggacaattcgccagggggaccctatatc

SEQ ID NO: 72651 - DNA, 794 bp, Prunus persica
  Intron number 1 from transcript ppa008620m (locus ppa00862 0m.g) derived from phytozome v7.0 (chr-ID scaffold_6; pos 26293548 to 26294341 reverse strand)
gctccgctcagtactgaggatcccagtaattcaaggtctctatttctctctctatctctctgtatgtaaattgaattgaatttctttatgtttaatttgagatttaattaaagtaaagtttgggaaatctgattgggaaggtaagtgtgttttacttggctggttagatgttgagtttggtttacgggaagaagataaataaaaaatagtaaagaaatgaaaccttcagattgtggagaaagcaaaagccttgaactgaactgtggtaatgcatgttaggtgacactgaattctgacacatagataggaaattgaacgccggattattagatcagagccattaaggcaatcgatgttggatggatgatcaatagctactagctacaaatgcacaattcaaaactggctcgtaaggatagacttatgattgctgaagttgaggtccacgaagatatggtgtaaccgtatatggttcccagaatgtgggattttcatatttgacttacgtgagttctcgaaatgttttggtcctcctttgatccttctaatctgtaaggtctatggaaagccttgtagattagttttattaaagtgtgagatgttaggtgttgcaagaaatggggaatgaattttgtttcatgaagaacattatcaagtcttcttcttactagtatgcacaggaaaaagcaataaatagctgcaagtatggatgtttctttttttctgaagtatgactgtcatgtgtttttattgctgcagtaagggtgcacttactgttggtctaccaccggcat

SEQ ID NO: 72652 - DNA, 320 bp, Prunus persica
  Intron number 3 from transcript ppa022218m (locus ppa02221 8m.g) derived from phytozome v7.0 (chr-ID scaffold_2; pos 17562683 to 17563002 reverse strand)
gcagaaactggaaaaagattggtgtgtatctgcatatgactttattctttttcatatctttatgagttttgttttggtttttttagcttcaattgcttttcattaaattttgagaactaaaagacttcttagatcctgtgaaacaaagctccatcacttttttcttaagttggttttgtttgagctttggaggaagatgtataggctaccaatattaaatttataatgacctcgctctccctctagatgtacgtgtgtatatcactctccatctctcttcaaacgttggtttgacaaacttgaagattctttgcagctga

SEQ ID NO: 72653 - DNA, 397 bp, Prunus persica
  Intron number 2 from transcript ppa022218m (locus ppa02221 8m.g) derived from phytozome v7.0 (chr-ID scaffold_2; pos 17563039 to 17563435 reverse strand)
gacgatcaacaaagggcggctggacagaggaggaggtcagtagaggatgttgtatggtttatttgaatagttacgagtgctatttgtagcttcttagaaagataagtgaataggaaatataaagatggcccttttgtgtttattggtagttgtaccattcagttctgagtgatttaagctgagtacagaaagtttgtacatgtaggacttctagctttgtgtgtgttggggaaagaagatgtcatgtattctaataattgttacattttggtgcttattttggtttgtgcttgagaaactttaggttatgttagcatagttaatttttgattgcttgacattcaagtttttctatatcaaataatgaatgtatgcctcttgatgtcttgtttacagg

SEQ ID NO: 72654 - DNA, 433 bp, Prunus persica
  Intron number 1 from transcript ppa022218m (locus ppa02221 8m.g) derived from phytozome v7.0 (chr-ID scaffold_2; pos 17563452 to 17563884 reverse strand)
cagttctcaatctagcctctttgcaagggtttgtactttcttttcatctttgcattgtgcataagtgaactctagctatgtttgtaaactttgtattataataatccttttttcagataatagtgtggttgtgaattctcatagttcagtggtgcaaattgtatgcctttctgtttccgagaattcttgagggaaataaaatgatgttgattttaattttgggtttttcgttacgatgaggaactcagcctgtccaagctgaatagatgtatgttcctttattattgctatcttcttgtggagcataaaaagctgctgaaaacaattatgcattaccatttttgttttgttatagaatttatgaattttgaatccttatgttatgacatggcatgacctagaagttattaactatgtgtgcatatttaggaga

SEQ ID NO: 72655 - DNA, 1041 bp, Prunus persica
  Intron number 1 from transcript ppa003252m (locus ppa00325 2m.g) derived from phytozome v7.0 (chr-ID scaffold_1; pos 24801267 to 24802307 reverse strand)
tttcttcgcttgctgctgctggtacttggttgcaggtataatattgttcttcctctgtttttatttctatctcagttctgtctaagttagttatgggattaacatattcaattcccatgagacaaaaaggggagatactagcaaagagcatttctggatttggtagaattctcatggcttattgaaagaaatcaaactaaattaattagtattaaactaactttgtgtggatcatggaggaggcctagttatgttgagttcaatatcttggtccttttgttgggttacttaaactaacttttatggaccaacttctggaatatgttacccagacaggacagaatggacggctattagatatttataaatgtttaaccattgtgcaataataagaacaaacttccactgcatgtattttgtggttttgtgtttcgcttgatcgatgacctacatgaatgagttgtccctcaaaatcatcgaaccaagatttccttgatacatgcatacaatgacattggaaaacggtaagagctggtctcttcaatcaaatgcgtgtgaagggaagcttctctgtcttaggatgattcaccctccgaatcttctttagtaatggggttttatgatcaaaatagtaataccacggagtatgaccgccacactaaaatttctcttatttaacaagcataatagagttttcttttttcgaacttaatgaatgtattacattagcaattatgtatcatgcagcataactcattcagaatgacagagacctttatggaagaaagcaacaatatactcttccatgcgcttactttgacaaacaaataaattctatacatataactcaatttaagcttgactttgagtgtagttgtttcagaaagaaaaagaaaaaaacaaggactttgaatttggttgttcatttatatgctgcatatgtttccccctggatttagttgtgcacctatatgctacattctcctgttctttcttccatccaccactaattgttttctgctagtcaggttgcatcatatt

SEQ ID NO: 72656 - DNA, 225 bp, Prunus persica
  Intron number 1 from transcript ppa018123m (locus ppa01812 3m.g) derived from phytozome v7.0 (chr-ID scaffold_6; pos 259482 to 259706 reverse strand)
aagaagacaggtaggtcacatatataacaagaaataaccttgtcatcatcctctacttgccatttttttctttcttttttttggttcaagtttatggatgtttcatttctttggttggttgattttgatttcttctagtcacaaataatgttgcatgtaaaattaatgggttgtttttgtttttggtgtggtgaattaggaagctgatcaggttggtgaagcaat

SEQ ID NO: 72657 - DNA, 656 bp, Prunus persica
  Intron number 1 from transcript ppa010209m (locus ppa01020 9m.g) derived from phytozome v7.0 (chr-ID scaffold_5; pos 14956632 to 14957287 reverse strand)
tgcttcaaagacggcttcttgattcgttttctcgggtgagtaagttgtctgtttcttctcctttgtctggttgctgacacaaagtatggaaatggaaagagtttttgatcttgtatcttttggggtttctatttttggagttttgtctggacactcatgaaatcataagagcaccttaataaggaagatggcttctattcattgttgttttccacctgatatatatagatcttagaagaaaatcaaagtaatgttgtttaattataagtttaataattaaaatatcctttgtttccttattgggattctgcatctgattttgaattatgtaatttatatgatcaagctagtgtatagttagtttagtgtaatgtgtttgagtttattagctggaacctggaagaccacctgaaaaagtggtcatacacttgatactgggggaattaggttgtcttgttaagtgagatttgttttggttgtttaaaattatatgcttttaagcaacttctttattgtaaaagtatcatgaacattgcgaaactaaaactttgttttgatcatgaaacatagcacaactattactgaatgcggtttcgtaatttattgtgttttatgtttcaggtgccccttactaggaagcagtgctggttcttggt

SEQ ID NO: 72658 - DNA, 303 bp, Prunus persica
  Intron number 1 from transcript ppa020742m (locus ppa02074 2m.g) derived from phytozome v7.0 (chr-ID scaffold_6; pos 9527874 to 9528176 reverse strand)
ctggtttggaggatcaattggaggaaaccatgcctggggtagaaattgatcgatctaccttatggaagagagctagacaggacaaacatggtaacatcccggatccaaaggtggcagagaaagcaaaattaattgtaagctcactctgttttaaatttttattaaactgtgaataattcttattacatcttatgttatattttgcgtcgtgtgaatgatattaccacgtcgaaattttttaaaaaacgtcgttaaaggtctaaatcaggaatcactactctgttttctgtaattatagcataa

SEQ ID NO: 72659 - DNA, 996 bp, Prunus persica
  Intron number 1 from transcript ppa002105m (locus ppa00210 5m.g) derived from phytozome v7.0 (chr-ID scaffold_7; pos 20508884 to 20509879 reverse strand)
gatttcgaagataaatttcttgctaaaggtatgatctttgtctttcgtatgcatatcatctcaagtttgtacgctcccatgatggtttctcaatggatgtttggtacaattgatggcatagcatcaatagaaaatagaaaaggagaactttctcactaggacgctgtccaaggtagcctaatgatatgttggattcttctcaatgttcataaataagaaacggtggtatcaaacacgctctcactacttgaagtttgactttttattgcccgacacttggattgttttcgagttctttttgtttcctctttcttttcatatgcaaaatcttatggttgtttaaatggatgttggatttcatctttaaatattgaaccttttctatctaaaattaatttttttttgctgatgtacaccctataaaacctaccttctagtctatgtttacttggttaagagtccctcaggaaggggaaattcaggtcagaattgttggacagatgcttagagctactgttgtgaagtgggactagatgttcatttctttcaagatgcgagatgatttttagcttaaattgttgtagatggaggattgtgatgtagtgttctagatattgttggagatataaacagaaataagcatgaaccaacttagatagttggaaagtagagaatcttgttaccaaaaaaaggatttagtttattcgtaaatcaaatgttttatgcgttgaagagtagagaaggataaaatggaatttgattgggttttgcataccttgttaacagataccttatcactgcagattattttctatcacttgttttaaatgctatgtttctgacaacaaattatattttttcctatccctttcttattattgtgttgtagatgcggtacaatgttgctttgacaattgctcctacccttaatttttgttgtcattttcttttctttttccagtttctggtatacaaagcctctcttccagtgtgcaa

SEQ ID NO: 72660 - DNA, 939 bp, Prunus persica
  Intron number 2 from transcript ppa005118m (locus ppa00511 8m.g) derived from phytozome v7.0 (chr-ID scaffold_1; pos 33013634 to 33014572)
ctggaccgaggagtacaggtgtcatttcttttacttcatttccaaattcaatttttctaagcagcagcatcactgcaagatgctctcttaagctttacagctctcagtctctgacattgcttcattgctaaaacatgtctccagaatcacatatgaaaagatgtttctggtttcattggcatttacttttttgaaattaagaatatatgttacactatgctatggacgtctgaaataaccaatttatttattcttccataaaataaccagataaatgaatgactacaagttctgtatagtgggttgtggaactgtgtagttctgctctgtaactacgacgtaagtttttcaatttatcattaaaaataactggaaaattgagccatcagatgtaaaacttttgctaatggatcaagttgcttaaatttcaccgttctttcctccctaatgtacaattgagctggtgtctctattaaaagaaaatcgatgcctccagctgtagttgaatgtttgaacttaaagtgtgctaattgagtatctgttgtttcggaatataactgcccattcctcatggtctttatggcattggctgtatcattagtatttcttacatttgaaatttgatcatctacaagcatataaacataaagcctaggcattgacagtaaccaaggacaggcaggccattgtggccttgctatgtctcgtttcctgatttattctctgattcttaattttttttttatttatttgggaagaaacaactgtgctttataagtaactgggatctcaattttttctgttatgttactatgagtatattgttttgagcatagtgttctttctcttcaggtgtccctatactcgttggtcttctaattatgaatttttcaacacttgttaggtcttccctgcaaagggccaaaaagctatagatac

SEQ ID NO: 72661 - DNA, 881 bp, Prunus persica; identical to SEQ ID NO: 72444
  Intron number 1 from transcript ppa011979m (locus ppa01198 2m.g) derived from phytozome v7.0 (chr-ID scaffold_1; pos 37938717 to 37939597)

SEQ ID NO: 72662 - DNA, 616 bp, Prunus persica
  Intron number 1 from transcript ppa003079m (locus ppa00307 9m.g) derived from phytozome v7.0 (chr-ID scaffold_6; pos 17911525 to 17912140 reverse strand)
acgacgcatcgccactgcaccaatcttctctgtcggtaagttatcttttcattttttcttcatgcctctggttttgatttttcatcttcttgccgatagattttgggtcaaatccaactttgttttttgatttgatcttttatgttgtatgcaagaactttttggaatttgatctgctctcttacggttgttttttgttttctatatttgattgaattagatctgcactaatctactctccttacgatttatagcatacaacaattttattgaatgttttccgttgtgcgtttttatatggccaataactttactttacggagaaatagactagaactgaaatgggttaagtcaattgtaaaatttctttgtgaagtatgatggcttagggatgcccaagtaattgaaaatcgtttgaagaatttaactccatagagagattaagtgaacaagttccttgggcgtgtactccagagatgcccaaagtcttttgatttctttttttattctaattttatcgaaatcgattagtattgctttgcttatgtttgtgaaccaattaatttggtcattgttttccgatttctgtgtgcagttccataagtaggttatcacc

SEQ ID NO: 72663 - DNA, 1055 bp, Prunus persica
  Intron number 1 from transcript ppa019827m (locus ppa01982 7m.g) derived from phytozome v7.0 (chr-ID scaffold_3; pos 3533892 to 3534946)
gttaactccaagtggtctttcgccgactccttcgagtaagcacctccactccactcccctcccaaattactcaaacacccttcccataaaaacaagaagagagagaataattttaatttaatgcatatatatgcgttttattatcttatcgataaataaaaatttcatgtaacatatttcatatattgtgagatcgagaaaaaaatgtatgaaacatgaaatatacaagttttttttcttattaaccaatcggagagtccaatccaagcatgacggaggtctgttgcatttagcacgtacttttttcggtttactaaaatacccctggactctcggtttatttactactgggtttccacccaattttgtcttggtttgtttgtcatgctcccttgactattcagttgaagttttacgttgacgaatttgcccttgtgttcggcgcttcccttcccaaaatgacaacagattaatatttgaggctccccctgcctgcccctctttccaacttcatgccatatgaatgagcagaataagacccgtgactggctgattattctttttcttttgttttctctaacgttttcttattctatattttagtcttcatctcgtttaaacattttgtcttacttgttgaaaattcataactaatggatgaaatgcttttgtggatgaaccaacttcatgatggggcaaaaataatcaatcgatctgaaaattgtaaaaccaaacagatcatgtatgtaatgtatatgctggatcatgaatgtaatgtttattttcaagttttcgttcacaagtcatatttacaaaaatgtagacaatttataagacgttaagatatctaattgtgactcaataaaatagacgaacatagtgtttcaagaaaacaccaaaatgacaaccatcggtatataaaaaaatactagctgggttgtaggtttgtgattttgggtggatatgaaggctaagtatagagttagtaaatgaataatgttttgaatttgtggtgggcaggtatctggtgggagtttcagcagctgtggtagctc

SEQ ID NO: 72664 - DNA, 656 bp, Prunus persica
  Intron number 4 from transcript ppa024954m (locus ppa02495 4m.g) derived from phytozome v7.0 (chr-ID scaffold_7; pos 10949351 to 10950006 reverse strand)
cagagattacagcaaacttgaaactgttgaactcggtatttattttgtcttttgaagtcctcagtccatggaatgctttcatatatatgatgaagcactcagaataaatactgcatttgtcacatctccatgtgaaaccgcagctccaatacaatatgttatggatattgaacttaggtgggtcattatttctgttgaagcactagtgcttggttagggcaagttgggtcatgtttgcattagaactgtggcttgcttgtgcattctgtttaggtacaacatcacaagatcagccagtcaatctgtgtgaactattttgcatcttgtttttgtcatttttcttggactcttaaaaaacctagcaattatttgtgttagttcaattctgcccctctaaataaatgcaattagtatgattatcgagggagagagaaagagaagtaaattattagtctgatagtattttctgtgataacaaatagtcaaggcataatcgtgatttagacatggtgttacctatcatttctcggtttccacctcctatttgtgtgctctgtttgaattttgttgatgtaactttttatgagcattcattataaagcatattctggttctttgcagatagaaagcaaatttactctgtcaatcaagttatc

SEQ ID NO: 72665 - DNA, 784 bp, Prunus persica
  Intron number 1 from transcript ppa011064m (locus ppa01106 4m.g) derived from phytozome v7.0 (chr-ID scaffold_3; pos 1705651 to 1706434)
cagtccaactagcttggtaagctctctatccccaaccacttcaaaccacaaattctaattccatacaaatttaacagaaatgggtctttttttatctgtttgtttttgttgttcttgcttctgggtttatgctgaatgggtttttctcagacagccaacccagaaaatgtaggatgaggttgaagattcattgggtttatttattgggtgaactatgtaaatgggccgtcgttaatcttttgttatattggcattggttgaaaatattttagctcataataggggaatttaagtaaaactttgttatgttgagctgcatagatcaagattttgatgttgaagttgaaatcaataagacactagacttcagtagaattatgcagctacttaatgctactaagcaagcatttcttagatgaaatgaagggcttcgtcttatatgcggtattgcaagttttaggctcctttgggaaatttttgttactaatgggttttgagattggactatattaaagtgttaaggccatgccatcccatcattttagccaaacaaatcactttacaaatcccatcattttgaagttgtttcgtacctcaaagtacttcatccaaacacactttttatgttggaaaacaaagggatatttaatctacaatgaaacttcaaacatactggtgaagagtgtttcctctcccattagagacagtctctattttggtacatgctaaaatgtctaaagcatttggctttttttgttaatgtaggaactctgaggaaagagaa

SEQ ID NO: 72666 - DNA, 501 bp, Prunus persica
  Intron number 2 from transcript ppa011064m (locus ppa01106 4m.g) derived from phytozome v7.0 (chr-ID scaffold_3; pos 1706475 to 1706975)
caaccaagaaaggtactattgccatctgttcctttgttttccatctttttccatgatacagtagagaatctcatgaatataaaatgtgtgtaactgccttacattctatatgacttgtccctatttttacttttatttttctccagcggagtcaaatttgtttgattagttgtgatattttcatatatttctagaattttgaagaatatataagaattcacttactatgtccgaatatgttcaagatcatggttaacactttagcaccaaaagtttatgatggtcaaacattttttcatttgtgttcttccagttttataggagtttgaagtctacttcttgatttcatatcagtaagtgagcacagatgttttgctttttccacattaatagatgaagttatgcaacttgtgatacacaaagttatcaatattgaaacaattttgttgtattaacattatcctggtttcttttatatcgaatgtcaattttagcacttac

SEQ ID NO: 72667 - DNA, 402 bp, Prunus persica
  Intron number 2 from transcript ppa010019m (locus ppa01001 9m.g) derived from phytozome v7.0 (chr-ID scaffold_5; pos 9433937 to 9434338)
gtttgagttgcatcagtcctatttcagccttcaaagtaagtgaaaaaaaattctaatattttgctcaaattttagtgtttaacaacataattgcattagaaattgaagtttctctttggtgagcttcttgttttatggaaataacatgtccattaaaataaaaattatggatttggatcttggattgctttagagtatcaggtgaaagtgtttattttttatttttttaatgttggactgattcataataaatcaccatttacttgactgatgcaatgagaagaagtttatttactgaccagtgtttgattttgttctttctgaactaggattacaatttttgttgatcactagtttgattgaataggtttggataaatcagaagtaattggggattgtggc

SEQ ID NO: 72668 - DNA, 892 bp, Prunus persica
  Intron number 2 from transcript ppa010454m (locus ppa01045 4m.g) derived from phytozome v7.0 (chr-ID scaffold_5; pos 11098348 to 11099239)
atctttgttgcagattgctgctttgcggctttttggtgagtgcttctcgatctgctttgcttgcttcttaaccgttgctagatctgatttcgttgtcaatttcactgtttcacttcctattctgtttttcgtcattctcgttgccttcgttgacttggtctcgcatactttgacttcaagttttttatttatttataaaatttttctaaagttggaaattgagtaattcgttctgaatgacaaatggttgttcctctgcacaatgtatcactgcatgcttgctttgaattgcttcgtgttctgagttttactggatttttccttgtaatttgaaagctatgcatcttgtattatttccttaagtctttttatagatacaattcattttatcaaaatggaaaaagaacagaacagaacagaaccatcagtgtattctatggtggcaggatagatgaaatttgcccagtcacatcctaaattttcactaccatggaactagtataatatatggtgtggtttgaattcttctgcaaggacaactaatttgtatagatctgcattggatggaaactaaagaacacagagtagagcaagtagcaacctcagtgcactaattttccgtcatatgaaaaagagatactatttaatacttttggtatatggttaatgctgtatagactttaaattaattttgatgcgtgtaagcctttatagttatgcattgtcttgtgatcaccttttttcttgagagccaactcctagacttctccaattttccagaatcgggtctttgatttctcaccatatatgaaaaaaactattcaatcatgcactgaaattttgccgcccagtatagtggttttaatttatttttgtttccctgtagtgcgcc

SEQ ID NO: 72669 - DNA, 374 bp, Prunus persica
  Intron number 1 from transcript ppa010985m (locus ppa01098 5m.g) derived from phytozome v7.0 (chr-ID scaffold_1; pos 13875081 to 13875454 reverse strand)
cttcctcttgatcggagccacagctgctctagtcggtatacacccaatctctctctctctctctctctctctctctctctctattttgtgtttatctcaaaagaaaaatgctttatactccaatttttctctcaatctttttctgacttaggcatgggatggaacctaaatgtttgggtacccatgtgagagaattgggctgttatagctgtagcattttcattgtccgcattggttcagaatttttctttgccaaggtcaaaacttgggtaattttattggaaatattgactgaaaaaagtgaactgggtttgatgtttaatgggttgtaaattgtaggaccaaaggatttgcctagaatcgctagaacagca

SEQ ID NO: 72670 - DNA, 586 bp, Prunus persica
  Intron number 5 from transcript ppa010609m (locus ppa01060 9m.g) derived from phytozome v7.0 (chr-ID scaffold_5; pos 14858046 to 14858631 reverse strand)
aaggaggaaccaggagaaacataccaaagtttgaggtttgtatacatttaagttgcgtctatatatttattgccaggttgctcatatcattgaatatgtatactggaaacatgagtatttgaagaaaaaaactaaagcatcgttatctctctgcaatgcgcctatgcagcctcatctactagaccagttattactcccaagaaaaaaaagttatttatatatatgagggagattgagggagcttttatgagcattaagtttgtcttgatcttattgttggtgactggttttaacttcctgcaacttaaatgatcttcaaagtcatgtcaaagaaaaatgtgtgaaaatggttctataaattatttgaaagactttatgacaaatttacagaaaatagattttttgttttttggggtgaggttggggaaggagcacgtctgtattgagacgtattaatttcattgttgtaattttggtcctttgcgtgatagctatttattctcttttaacttcaaatttagtttttttttttctgcaatcctttaccatggctaatcagttacttgacaggtgggtacattgcttt

SEQ ID NO: 72671 - DNA, 161 bp, Prunus persica
  Intron number 1 from transcript ppa009133m (locus ppa00913 3m.g) derived from phytozome v7.0 (chr-ID scaffold_1; pos 41931396 to 41931556 reverse strand)
tgttcgagaagtacggcaccgtcgttgacgttgaggttttcattttccattgttctttactttgaagcctctgtttgttattcggtattaataatgtgtgattttatttgatgggttttgattatttttgtttgttctttgctgtggtggataagcttgcc

SEQ ID NO: 72672 - DNA, 426 bp, Prunus persica
  Intron number 2 from transcript ppa003279m (locus ppa00327 9m.g) derived from phytozome v7.0 (chr-ID scaffold_1; pos 1275292 to 1275717 reverse strand)
ttgtttctggaggtcgaaatctttgctttgttttctttacccatgcggtacatgattggttcttgctattattaaatcattattggggttctgggtgacataatcttaagctcactacagaaaactgagagaaactataaaaagaaaagtaattggtaaatgctgctatagcttctaaaattgacttatttttcagaagtaatgtaaaatgctaacttctaaattctgacttattttcgttctcatagctattcttattgtcctatctggtttggctatatatgaaaccaatttgaaacatgtaaatctcttttggtgcttattttgacctctcttgtgttttcttttttgaactcaaaattaatgcattgccaataattttcttcttcaggaggtgatcaggtcgaatacaggactagcttctca

SEQ ID NO: 72673 - DNA, 161 bp, Prunus persica
  Intron number 1 from transcript ppa003279m (locus ppa00327 9m.g) derived from phytozome v7.0 (chr-ID scaffold_1; pos 1275789 to 1275949 reverse strand)
agaattccaagaaaagcaaggttttttactttcttctgctggaaaaagtatttattttaatgaaaaatttatgaatttgtttattattcttttgttttgttttgttttgatttctggaaatggtttgctgattcttcaatttgttgtttggtgaagctctc

SEQ ID NO: 72674 - DNA, 385 bp, Prunus persica
  Intron number 1 from transcript ppa015682m (locus ppa01568 2m.g) derived from phytozome v7.0 (chr-ID scaffold_3; pos 1547703 to 1548087)
tctgggtgtttcatataattttgttgaagattaaggtttgtagcatctcatcatttggtcaaaattaaagcgtttaagcgtgtgtccagtatttcaagcctttcaagttatctaactcaaaatgaaccatatttgttgttgaataaatcccattcaccagaattggattgaaagtctcatcaagaaagaaaacactcttttcttgatttgattcccttatattccaagcgtggttgggagattattttttgtgcgtctagcgcaatgagagacgggattcgaactctgattctgagtggagatctcaaccttttttcttcttttcacccggtgtttttttttttttgtaggttgcactggagtgtgacataagtattgattataa

SEQ ID NO: 72675 - DNA, 928 bp, Prunus persica
  Intron number 3 from transcript ppa013902m (locus ppa01390 2m.g) derived from phytozome v7.0 (chr-ID scaffold_2; pos 23939609 to 23940536 reverse strand)
gttaaagctcacttttttggtatgtaatcatgtggatgtcatttaacttcatagaaattcaatgtaggaaagtaagttttcaagcattggatatggcattttattttcttggtaaagtctttccatagcttagttttgaagcctggtatcaaatatacggtattccctcctcctgcttccctcttctctctattttacattatgattgggatcaggtaattaagagtcatgaagaccgttgacctctttgggtcaatgatgtgccttccacatagttagcttgattttttattgttccaatccctagttggattttattgtacttagtgtttggggttgaggatgttcacaggattttagaggacatctcgttcatcccctttctaactcttttgtcataaataaaatccatatttgttacccaaaaaaaacaaaggaaaaaagggcttactttgaggttactagtactactcaaccctgaccgaaaggcaggcatatgcactcatatgacttatgatcatattattgcataattgtggatttctttctcattcattaggcagatagtggtcatcactgcaatggatgtagcttttgctggtctaatggtatatagaatagtgatagtttgtatgtctcactcttttacatcatttgctttgtaccactgggaaaataggattgcagctccaaataactaaacttgattcaaataggattgcgactcttaacatgcattcaccacactagcttattgttttattttgtcccaacaaggaaacttcagacataccgtcttttgatcattgatgaatcataggcagttaggattttggcctctaaatgatttagttgtcattactctgttgctctttccttaataatctatggttcttatttcttcaaaattatgatcactatgcaggtt

SEQ ID NO: 72676 - DNA, 408 bp, Prunus persica
  Intron number 1 from transcript ppa013902m (locus ppa01390 2m.g) derived from phytozome v7.0 (chr-ID scaffold_2; pos 23940940 to 23941347 reverse strand)
acaaccccaccaattccttgccttttttttgtctggtaagcctttcaattctctattttcccatttcatttctttggatttagacggcatataaatagcgagaatttcataaaccaaaaagaaaattttgattctgacatattgggatagttggaactcggaaggcatcaatcagtagatttgaaagaaaaaaactttaatcttctagcaaaatataacccaaccattgattacacatgtttggaatttgaagcagccggaaaaaccgattctcacaatgatagaaatcagagaagaacattctgtttctttataaataaacattgttgggagagaaaagaaaggtttttttttgtgtattgaatgtataattatatatgccaatgtgtataaaattttgtggcagga

SEQ ID NO: 72677 - DNA, 611 bp, Prunus persica
  Intron number 2 from transcript ppa023384m (locus ppa02338 4m.g) derived from phytozome v7.0 (chr-ID scaffold_2; pos 21272855 to 21273465 reverse strand)
ctgtcgtcgtcattttttccttcctttctctactggtaatttatataattaagttactatattatttctcaatactagtctgcctaatcatgaattactagtctcttcacacgtttgtttgtgagatgtttttttcttaatcatacatcataacaattttttagtttattttgtgctacaagaagaagcttttttcttaatcacaagtcataaagattttttagtgtgtgcaaaagattgtatgtgcttgtctttattgattttatttcagggacattttttgtcgtaatgattttttatgacgcaagtgtcaccatagttcatgatatatattattcatttttgtcatgatgaatcaaaagaaccaaattacttgaatagtgacacttttttgcggagggtaagaatatatttcccttgttactttgtgagtttataatgatgtacctttatatgaatggttgtggcaaaagaaaatcttttagttgcataattacatataccgtgagagattatagaataatatggtagtaaagaatagacagtgcacaaataataaaatgacacgtcaatatcatatattgatcatcatcttgaaccttcatcagggt

SEQ ID NO: 72678 - DNA, 481 bp, Prunus persica
  Intron number 1 from transcript ppa005797m (locus ppa00579 7m.g) derived from phytozome v7.0 (chr-ID scaffold_6; pos 21219334 to 21219814 reverse strand)
gaatttcctcgtctttcgttaccttcaggaatcaggtaggcaatactttgcaacccctcaatttttcataaatttcgctttatgttttctattcccgttttaaataagattgtcattctaggttttttgtttggtacattttttcatggtttatgaatcaatttctgttacatagttgcttttgtaacttaattagggttaaaaaactataatttgggaataacttttcgaattggcttcttggtttcgggagctgagggggcatgatcttacagatccgaaaacgatagtgggtttgattttaatgtgtagctctcctctggaatggtcgaaatatcatttctttttaatttttcttcataaaactttgttgctcgatggtttactactagaatatttggttgaataatttctcttgtttacaaagtttcttctttcatcactttttcaggcttcacccactcagcttttgctttaggat

SEQ ID NO: 72679 - DNA, 397 bp, Prunus persica
  Intron number 1 from transcript ppa015936m (locus ppa01593 6m.g) derived from phytozome v7.0 (chr-ID scaffold_8; pos 4686792 to 4687188)
aggtgggttattctatttgttgatatacctttttcgaagggatgacttttcagtttttacgtttagtaatttgactattacaaggatattactggtaatttttcaagaaggtagagtgaccctttgaagtagggacagtagtgattaaatgagggattaaacttaacaaactctgttagacaagaaacataactcaaaagaaaaaaaggcattgtacttttagctggaaataaggtttgtctcaggacctcagactgatttactaaggggaaaaagaaatgaaaatctccttcttggtgtttccattttggctttttgattgatctttttggttttgtgaaaatgaacatgttatgatgcagaaagaggacaagcgtgatagttctgctgtaagttg

SEQ ID NO: 72680 - DNA, 486 bp, Prunus persica
  Intron number 1 from transcript ppa002587m (locus ppa00258 7m.g) derived from phytozome v7.0 (chr-ID scaffold_4; pos 4381631 to 4382116 reverse strand)
tacttctctgcctcacagtacgagtgaaagcaaaagtaaatactagttctatttatgcatttggattctcttagatgttgtctcctttacatttatatttcttgataacttttcttttgatagaaacacaaaatttataacaaagttggagaaagtacagttaggatggaagaagttcataaaacttctaactaaaaaatacaaatcgcattcaaatcaaaattccccctatcaagaattatactaaagggtatatttttaaaagctatgcactatttcctgtctgatagatcggctcctaatatccttcagatatattagttctctacaagactttttgtttgtgcagcttatctgtgttgatgcattctccctgtctgtgtgcttgtatttactggatgttttgcttattaagttcctccgcataattgttttgctgtatgatttacagggaagaggggtaattccacaaaggtctttagtgca

SEQ ID NO: 72681 - DNA, 203 bp, Prunus persica
  Intron number 3 from transcript ppa018716m (locus ppa01871 6m.g) derived from phytozome v7.0 (chr-ID scaffold_8; pos 18948995 to 18949197)
tcagtgggatcatcaagcctggcaggtgagaagaaaaactctgtctatccatgaaataaactctgttatgttcttctttttcaattcaaaattagtcttcgtggcctaatatgcatactcacttgggttttaaccaaaaataaactactctactcacttagttcagtgttcctttttctttttttttcttttttttgtgcaga

SEQ ID NO: 72682 - DNA, 740 bp, Prunus persica
  Intron number 2 from transcript ppa006934m (locus ppa00693 3m.g) derived from phytozome v7.0 (chr-ID scaffold_7; pos 22168341 to 22169080)
tttctggggtatcggtttagcaccttgctgcctttgtattaccctttctctattatttatttctagtaattttttggtttaagtttctttaatttttaacgaatctgaatcttactgcaattttttgttttatctttttggcatggattgctccaattttgggggtttttggttttgttaaattaaaaaaaaaaaatatggatgggtgttttgagttctgagatggaatgggtttgatttaggtttgtttcttttagcattccctgtaggttgcaaaatgatctggtagtatacagttactattggggttttatttttcttgcattttcttcatgcaattgatacatgtggttttatttttttccttttcttataactaattgttttggaagcttagattgtggtatttgctctgaacatgtaagaacttctaaccttggacaactgatagtctgaaactaaattataataaaagggcaaatctctctttacgtgtttgctaactgtccatattaatcttgattgcttaagtgatcataagtttcattggtcttctgatgttcaattattcaatatttcagtattataatgattcattcgcatgatgttcttccaatcatcgtgtacaagttggcaagcatgtgttcaatgatgggttttattcaggtgcttgtattgagttatttcagttcaattggttagcaggttgtactgaggcttatttggatcttcttcgaaac

SEQ ID NO: 72683 - DNA, 980 bp, Prunus persica
  Intron number 5 from transcript ppa011349m (locus ppa01134 9m.g) derived from phytozome v7.0 (chr-ID scaffold_4; pos 7518336 to 7519315 reverse strand)
cagttattgacgccaaacattggagttgtttacaggtttgtctgtactacatgcttgagtttttcaagttgtggtatttgatactatctattgtgttgttggtgttatactgcttctacaatatttgatgatctttgggaaaatctcagctatgatggttgtaccacgtcatcattttaacatggtacaacaaaccaacattaaattgaaaactaatactgttggtgggatccctttttttctaaaatcaattttagaggactcacatggcataaatgatgttgtcccacctaaaaattttataagtttcaccgataatggctacaaagactttctcaagatgtaccatgggttttaattgacgggtttttttttgacagtagactccccttctgtatatcattgttcatattctattgagataaaatatgtgtggccattgacattatttttcttgttccatgttagatggcccatgtgtttgagtttttaaatttccctgctttgactcgtggaattatacgtgatctgatttacttgtttccattagatcttgtgagctgacaattgtagtgaagtttaactatgatgagttattgacgttgaatcattgttatcatattatatgccgcctacttggatgtgtacctgtaataaattgatgcttgtttcttttgtttgaccttctcccaatgacatattagtttcaagatactaatacatatttgtatggaagacactaggacagttaaaattccaaaaaggtgggattgcccttttaattatgtattaagaagtatttttctagaaagacgaggcgcccatgtttttttccctttgacgttgtagttgtcattgaattgacaatttaagttagcttttctttttttcctttttattatttgccagttcttcttttccatgtttccccagccaaatcttgtggttaactgaaatttactgttctcccatgcagtgga

SEQ ID NO: 72684 - DNA, 449 bp, Prunus persica
  Intron number 3 from transcript ppa011349m (locus ppa01134 9m.g) derived from phytozome v7.0 (chr-ID scaffold_4; pos 7519580 to 7520028 reverse strand)
agttgggtctggccagacatctttagggattaaaggtatgcaaattcttatgcctttttctaaattcttttcagatttatttgaatttacacatgaagtattcatcttgaataaaaggagacggattaaattggcctgaactgataatccagtataaagatgaataatctgttcatatttgctgaatttggcatgaacaaatattggagaactccgtagttgcatcaaatatttagaatttttattcacgttggtaagtatgaagaacttaatgtcgttggtagggaatgagtttccaacacattatttggaactgcagatctttttccttttgatacagcttatcgattttataggttcttgtgtcagataagtttagaaacttatcaaatgtttagtgtttttggtgttggtatttagaaaattctatctggttgttgcagctgcta

SEQ ID NO: 72685 - DNA, 832 bp, Prunus persica
  Intron number 1 from transcript ppa006341m (locus ppa00634 1m.g) derived from phytozome v7.0 (chr-ID scaffold_3; pos 453356 to 454187)
attaagagagaccattttgattctgttgaagtaagtccaccaaatcccagcatcacacactctccacaatactaaagttcatcacttcatcggatctgttttactgtttcttgtttgatctctctctctctctctctctctctctctctctcattttgcagaataatcacataaatgtcttgtgaaatagcaatatctctgtttctggattttctgtttcatttgatttgtaatctttgatggtttgtgattgatttgttgaaattgaagtggaataagaacaaaaagcattgctgagaggttccgtgtctaattcttttggttactacagatatgttgctttagatttagaccattttctgttaagtttaacagtatccttcaccatcctttgtttgttcgaaactgagaagcaaaatggattcagaatttgagttctctaatagttcaagaaatatttctggtcaactaagtcaaaatggattcagtgacattgattggattcaggactcctgtttcttttctctattgaattcagtggttttaatttctctacatttttcttggcacccaaaaagcgtttctatagaaattttgtttcccctctcacccatttccttttacgggtacttttcacttatcactctacaaatgttgtatagagttgtaatggagagctcatgtaattttatttatttatttatgaagtttacattgtttatttacgacaaatgaatttgagctagcactgattaactgggttattctctgcattttattctcttctgcttacataggagaaatttccgggcagcgaaagggataccttgga

SEQ ID NO: 72686 - DNA, 710 bp, Prunus persica
  Intron number 1 from transcript ppa004831m (locus ppa00483 1m.g) derived from phytozome v7.0 (chr-ID scaffold_4; pos 2171852 to 2172561)
caagctagaaagagagaggattcgagaagttcttggtaaagtgctctttgtgttccatttcaaatatttgttatttgtcttgtcatttaatttataagtctgcattaactatcaatatgtatcagtttggcatgattatggaaactttcaaggctgatttgaatatgctctagcatcaaacagatttatcagttatgcctagatgccttcaggccgcacactagaaggattgtgcacactcatggttatgggagttataagtgcagagtgggaagtaagaaacttgaagagcagaggagaagagtgagtcggttgagaaggaagatgaaagtaaaagtaggaacatgaacaaatgggggtagtgtatatttatgccaacattcataattctagttagatatatggacatttcatatatgtccaacaacaaagccagtttctttaataataaattttggaaaaaaagaataaaatttgcttcataaacgagcttcctgctaattgattgactaacggaaagaagacttgatgattggattgaaatttttagttttgacttttgaggcacaacaaattgggttttgaaattttttattgcaagctgttttatgggtgtggatagtttgatttccattttaagtttgattgatgttaatgtgtgaaaactaagtttgattggtgttatttggaatctgcagatagttgcggac

SEQ ID NO: 72687 - DNA, 753 bp, Prunus persica
  Intron number 1 from transcript ppa010731m (locus ppa01073 1m.g) derived from phytozome v7.0 (chr-ID scaffold_1; pos 19552198 to 19552950 reverse strand)
agacttttcgtaagttctttattctctcatcaattatttcttccactttattcattttttacatgtatttgtaaaataaaaaaactatttgtaccatgcatatgtttatacaagttgattgataatttcctaatacaatatgtcaatgccgtataataaaatagcgttatcatttttatacttccatcaatgacaaacttttcctgatcattgctttatacacgccacttttaaagttgtatatttagtgtagacacgggtttaatttatttgtatcaagttaactgacagtactatgtttccaataatagaagtagaaaatagatgttttctttttttttttcttgttcaaaattttcatttttttatagttttttttttttttgaaaaatgaggggaaacgatgatgaggaatccacaatttgaatattatgaatatggagacgggaatggagaaaaaattaatgggaaatggagatagtaatggtgtaccctggcccgatttgctccatttattgtcacccctagtagaaactctacaaagttacatcccttgtagatgagtctgtcttctattagaaactacaaagttacattccttgttctataaatagatatttaagccattaatatgaggttgattaaactgtgctattttacatataacccaaaaacgcaattggcaaaagatcccaaaaattgaagacaacatgatgtttgattgtgcagatttctgctacatagaagagatag

SEQ ID NO: 72688 - DNA, 727 bp, Prunus persica
  Intron number 2 from transcript ppa002660m (locus ppa00266 0m.g) derived from phytozome v7.0 (chr-ID scaffold_7; pos 10292059 to 10292785 reverse strand)
aaacagataagttcaaacgcacagctcaccaagaggttgctttctcgaaaactgtttgcatattgttaaatgtagaactggctgtcagctacaattttttatttttcaaattgttccatttttcaacatgatacattaccaatcaaagggttaggttttgttttgttgttctctccctctttgcatatcagctgtactctgagaatgaatcaaatgtagcatcaaatatccatctttcctgttttcttggcagtcaaaataggatataaaagcgtcctgcatcaataagctccaacttcattctttgcttgtccatatcagtactgtcatttctgcttcttgggctacaattcattctgtacaaataccaagatctgtttatgtaacaatctactgggaagttgcgttcttgaaacgatatgcatatgaaatcagaagaaacaagcatgcttttgcacagacatttgaaatatgtatctcataactacaatgatcctggattgtaaccttctggttggataatcccctgttatatccacttagaaaagacgataaaacttgttttgtcctccagctcaatactgtatcactagtgtttttttttcttttcattaatgtgtttctgatattgtatctagttttccacccaccatatttgaagaaaaccttaattgtcaatgtccttgaagtgagactgaaagatgtgttccctcaatttcttttgcag

SEQ ID NO: 72689 - DNA, 289 bp, Prunus persica
  Intron number 4 from transcript ppa004772m (locus ppa00477 2m.g) derived from phytozome v7.0 (chr-ID scaffold_6; pos 9753177 to 9753465)
ctgctccacgtgtcaactggttagtgtttgtttttcttttcttggttcgaattaagaatcttttcagaggatgtaaaattggaaattgctaggcttaccacattatcattacatgcattcgatatctggaatggaccacatgcatatgttgttttcccatggcctttccattttctaaactttaaatgtcgagtttcataataatttatcatctcaattttttttctttcccgatctccatttcctttgatttgcttcactgatatgttgaatgtttttcagcttttgt

SEQ ID NO: 72690 - DNA, 984 bp, Prunus persica
  Intron number 2 from transcript ppa013870m (locus ppa01387 0m.g) derived from phytozome v7.0 (chr-ID scaffold_6; pos 26472337 to 26473320 reverse strand)
aagaccagtgtcaggatcattcacgccaggtagttttggtttttataaattcttaatttctcttaacagattttgatttgcagctttgctaattgcattttgtaatgtatgcattgaccgagcttttaaggtaaataggtaggtatgtcttttcattaaattttgtttagctttagaagaatattgttgtaccttactcatttgatattgaaagaatattgctcaatgggagcttatgtatatgtttcatctgttgattcaattatactatttgaaattagtaactggtaacatgaatgcttgaatgcgcatgacattatgtttggcataaggcaatttctctctgaactagaggttagtttgtcattggtcatgcctcaaactattccctttctggtattcctttgccctgccagtgttatttgtcatgtaagtcctatgcataggttgttgccctggcatgagagctgtgccttagtcaggattgccattcaaaaatggattttgttgtgatggcccatcaatttggggatttagcatattgcagaggagcccctctgcattggccggaagcagtgttgctatttgttactttgggttggcatgagtgtcctgcatatggaaattttattgtgaacttaggctcttagatcctttagcctaacttagtatccaaactcttaaagaaaaatgcttaaagacacttgtgatcaagggagtatggagggagaaattgagagcattgtgagttattcttgttgtaacttgctttcatctgttgactgggaatgctttcaaatagtctttccaatccaattttcctgtttccattcatcctaatggcctttttaactttcaaactgtacagcccctcacccctgcaaaatctgttccgttcattttctagtttttcttgtttggtttgtttataacttcttgtgcttcccttctgacttcatgcccctcaatgttatttcaggttgc

SEQ ID NO: 72691 - DNA, 454 bp, Prunus persica
  Intron number 1 from transcript ppa013870m (locus ppa01387 0m.g) derived from phytozome v7.0 (chr-ID scaffold_6; pos 26473376 to 26473829 reverse strand)
ggttgtcgagcataagcttcgagctgtcggtaaatttccctgctttactctgctttgatttttccacttggattagaaaagttgtttgctttggcctggtttagatctttctttgttgttctcgttgtttgtgatttgaattcgttcatttggtttctagtttaatgatcttggatttctgttggatttctgttgttgcttgatttggacattcatttttacaatattggggaaaaaagtttgtcctttggttttaagccgaaattaggtttttatttatttatctatttttcttttagctttatttcttcaattattactcttagcttttgtacttggtatattttgtttttttatattggaaaaagggatattagccaaattactgcataattgtgttcgtggatctgttttgacaatgattttttatttgcataactggaaaagggtgtct

SEQ ID NO: 72692 - DNA, 591 bp, Prunus persica
  Intron number 1 from transcript ppa005746m (locus ppa00574 6m.g) derived from phytozome v7.0 (chr-ID scaffold_7; pos 18229614 to 18230204 reverse strand)
ccaccgtctggctcgcatacgacaccaccacctctgtaagccgcgccctttttaaattttctttgtgtcatttttgtttatctgtttttacctacttattggtatgaaatatttactgggttttatttaaatctatcgatttattggttttaattcatgattgccctttttttaattgagtttagcattttgtgtgtgtgtggattctgatacttttatgaacaagatcttctttatttatttgaattagcttgtatttatgcatttttaattgatgtattatgtacgtttcaagctttttggctcttctgtgtttgattgttttcatgtgatgttggatcgcctttggctaacacataatctgaagaagtgattttttatcaacaagacatttgtgaattgtgatatttcttttgtttttgatgctatacttggatttttggctctttcttttcttcgtgcatccatgaagtaaattgcttgtttaggaagagtaatatgtttgcttcagtaacctgacttttgcatcatcttatttcccttttatacttcttagacgtacgtggctcttaagattcagaaaagcgcagc

SEQ ID NO: 72693 - DNA, 917 bp, Prunus persica
  Intron number 1 from transcript ppb020577m (locus ppb02057 7m.g) derived from phytozome v7.0 (chr-ID scaffold_7; pos 13197284 to 13198200)
agcaaatcttaaactatttactccgtgtaagttatgtgaatttttagatttttggattcagctggcattgtttgcaatgtatatgtatggttcaaatctttcaccctctatggtcttacgggatttgaatgcatgaccaaagaccatgctttaaccgtaatctttcgtcctctatcgtgttatgggatttgaactcatgaccatggtttatagaaatcgtctttgtccggtttgcagaaattcttgtagtgtggcaacatttctgataggctcaagtctgcatttttgttgaattggccaaaagttgaacaaatttataggataaaagttgtttttttaaggtggtgttttctactagacaattcatattaaatgtgacactagatgaactccctataagatagaatcagaagcatttaatctaaagtctaccatgtattggtttaagaaaagaatataaggtgagctgggctggggttccaacttcaaacagagaaaccttgatttccaattactcctgttaattttgttttctttctctacccaaaggaaaattggttttgtacccaaaataaaaaataaaaaaagagacggaaaattggtacctttacgtttgttgcttaccaaaagaagatctttctctgattgtaatgatccaaagtatttttttttttttttttttatagaactgattctgtgtctctcagatcaataaatacagcccagttttcttcggctatttcttcttgtctcaggtaccatctctctttacaccattaaactattgttttcaattgttttcttcttctttatttcagggggtctcatggttgcataacttgcataattcagctattggttttttcccccccttttaattaggcagttgacttcggcacttgctcagtggttcgcgg

SEQ ID NO: 72694 - DNA, 886 bp, Prunus persica
  Intron number 2 from transcript ppa012492m (locus ppa01249 2m.g) derived from phytozome v7.0 (chr-ID scaffold_6; pos 26915487 to 26916372 reverse strand)
gcaacgacgaggtacatttctctaatttatagtttgatggggttatatgtgaaattgttctgtatatgaattcgatttggtattggcttaaatgggttttctttgattcttctttataatctcgtttaaagactgccactttgggatttattttctatagcaagggtcttcgggttactttctatatcaaatttccatgtgtatgcatttgtgtgtgtattgactatgtatggatgtacaggtttcggagcaaagctctgaaatttccgggttttgtggtctagttacactaaatcatttggttctttgatctaggtgtattttatgtgttgaaagtaaaatataaaacattaatattacgatcctggagagcttaatcacctcttttcacatattggtgcgagctcattggctgtctgtttatagataatcaagtagtaagatcactgtccttcagccttttaaaagatgtggtatttctcctcagtcgaaaaggtggtccatgatttgactagttgtaggtggtagttgctggtgttgagctttgtgacacatataagaaaacagaatgggattgtgactataggaaaacgggtaaaagaaaattagaggcctttttatttttgtttggtgatcaaactaagagggcatttactaaagctcgaggttataatgaacttggtattggcagcagttacaactgctcctgagctgcatgaactgttttccccttccaagttggttacgctttggatcatcaacgttggattttcccttttgatttgtagagactagtagatgggtgattaagaaaggaagattatgtgtatggaatgaatcacaatttgatatgaactaaagtgattttcattttatgcaggtcagc

SEQ ID NO: 72695 - DNA, 482 bp, Prunus persica
  Intron number 1 from transcript ppa008649m (locus ppa00864 9m.g) derived from phytozome v7.0 (chr-ID scaffold_6; pos 5270530 to 5271011)
gaagctccgcttcgcctccgatcagggtttcacaggtaaagcttcaatctttccatgtcgaatttcgctctctttcatttcgtctctatcaattgcaatatataaaaaagaaccctttaatttgcatcccaccaccgtacggacaattttcgattttctgtttgattaatgctcaatttttttgaagagaagttattcggttgtgctttcttctcatcggagttcgtttctgttgcataaatttctgcacgcaattttgtaattagacaattcaataggagttcaaggaaaccctagaatttaaatttcaaaattttcgacttattagggttcttgtttgatcgcgaatgaattcgaagaattcttaacttttgatttcatttaaattcaagtagttgttgcgtttttcttttttgtgggtataatttctgagaattctgattagtttgattctctgtagggtttgatcttcgaatttcaaa

SEQ ID NO: 72696 - DNA, 846 bp, Prunus persica
  Intron number 1 from transcript ppa010167m (locus ppa01016 7m.g) derived from phytozome v7.0 (chr-ID scaffold_2; pos 1734341 to 1735186)
cacatctttagcttcctccctcccatcccaggttgccctcttttcttcttttttctttaacaaagaaacaaatttctaggcaaaggcccaatatttaattgtatccatgagtccttgaaccattccagtatttggggttttgttcaattgcttgttttatcatttttttgtgtcgatttttgctttagggttttgctttggggtccatattttgctaattttcattgcttaattgcttcgtttttattgggttttttttggggtacctgaaatccataagaaatgatatacttgtcaagttacatactttatacttgtaagtctttggaagattggaaatgttggtgttgatgaagttttgatagtaatattgttggccccgtgttttgacgtttctagcaaaattcttaattatatttttatatatatttaaaatagtgaactgtgaacgtgaaaatgggtatttagtatagataataaagtctgcaaaataggactgcatactttgtcttataagaaaaggaatataattgttgaaaagatgtgatttttagttaacctcggtgagaggggagccaagtatagtaaggtcagggaagaagggaccagggaatgcctgagcattgttatgtgtcctaaacttttgtctgttttgcctggggatattttggtaggcactaaaatgggtgttatgactgcctaaagttgtctcattactgttgtatcaagttttcctaatagatattgatagctcaaatgcatgtaggtaaataaatttctccaatttctgtctcaaattgctattgagtttgcagatcggtataacaccgccctcgtttgccacag

SEQ ID NO: 72697 - DNA, 820 bp, Prunus persica
  Intron number 1 from transcript ppa011673m (locus ppa01167 3m.g) derived from phytozome v7.0 (chr-ID scaffold_3; pos 2754542 to 2755361)
atcaagccgcaacaccttaaaaagtagccttgtaagatgaggcacaaccaaagccaaccaagatatgagataatagattgtcaaaagaagagtcgcctcaaaacccaaagaacaccgaagattcgatgggatccagggaaaaagccccacagatctaaagcgttctctcttttagcggctaatatttttgttgagaattccgctcaaactagttattgttgaataaactgaacagtaaatctagaatgtaataaattggatcttgaacttaaacgcgtctagatcggatatttttaagttgtgaaagatccaactaaaaaaaaaagttgtgtggtttatcttgtagtgtagtcagtcctattaattccctttgaaaaaactcaagtaacagttgtatcaatcaaatcttgaatcatgatcatatcattttaatgatggcatcaattcataaacagtttgaactcgtgatagcattaatcatttggatatttctttgttattgtttgaggaacaatattaataacgataataaatccaattccatagacaaaaaaccaaccgaaaccaaacaaaacccagtagaaataattggccacaaccccataaatgattcccacaacaaaaaacttgtccaaactttcatcaacatcaaccaatcacaatccacaccgtgccatgcacatacaatcaaaaccatgcacctcacaaacaccttataaaaaccctctcctaacccctaacacataattaattccccccaaatccgactccttccatttccccagtctcctccccttcttctttcttaatcttcaactcc

SEQ ID NO: 72698 - DNA, 699 bp, Prunus persica
  Intron number 1 from transcript ppa001659m (locus ppa00165 9m.g) derived from phytozome v7.0 (chr-ID scaffold_6; pos 23745290 to 23745988)
ctcatcactgcctctaccaactcaagtcctgtacgcatccacattgatttatgaattctcgtgcgccacatgcttttctttctagctctttgcaatcatgacttcatgagctctcctggcctaccaaagcaataaaaacaaattcagctgaagaaattgctcaacattttcacactctccccactcactttcagaaacatgccgacggtttgcatatatataaagcggtgcgtttcagtaatagcgccaacagaagtaatagttcccaaatcttgctgctctcaaagtctctcatctcatccacttctgtttatggctttcctttcaatgaccccgcatgacacgaagaatcttcgtcttcgtaaaagcaccggacagtctctccttaaataaatctgttattggattttggttttactgactttctcactgtcaaagttgaagttgcctcattcatctaggtaagtttaaacatctacttttcttcttcttcttcttcttcttcttctagagtttaaattttgagtgaaggaagcatttcccacttctcagtttacaggaaaaggctagctaaggaggagatgttttctcttcagcataccacactgttgttgagagttttcctgttggtgttgatactagaaaatgttaaggggtcttcctcatcagcttccaattatttgattggccttggaagct

SEQ ID NO: 72699 - DNA, 998 bp, Prunus persica
  Intron number 2 from transcript ppa006101m (locus ppa00610 1m.g) derived from phytozome v7.0 (chr-ID scaffold_8; pos 15557334 to 15558331 reverse strand)
aaattggtttgtatctccttctatcctatatattaattgatatttagtcatataagtgtatttgagtctcactttgcccctgaaactcattttgtctcactttaccatatttttcacccagttttctcactttagcccaattttcacaaaatattaataaaaaattaaaaaaaattattcttatatcagattaaatattgaaaacactaatatatttctaatgtttggttcgctggtaacacatagagagagaagaggaggacgggagcatagggggagatggagggggaaggaaggggtaatggggagatggatgggcaggggaggggacaggggtagggatgcattttttgtttttgttttaagcttctttttttcttaaaaattaattttccttacaattttttttatggatctcaagtttcaaattatttttaatatatttatgttttaaatatttaatctaattttcaaaattttaaaattttaattttgaatttaaaactaatattttttgaaaaatggggtaaagtgagataagtatgtgtgaaaaataggataaagtgagacaaaatgagtttcagggagcaaagtgagactcaaatatattttcaggtgtatataaataagccttaatttaataaagcggaattctattttctattttctgacattttcagttttacccccattatttatttattttcgcaaacaagatttttcataaatgaagcttcactttttcaatataaaattaaatgtcaaactaaaagttatccatgtctaaaaattcttggttccgcccttattaggaattattttgagcagtatccgtaaattacatgattgcttgactgtccatcttaacagggatgggatgggaatggcataccatccccgattcgctccgttgccattcaaagcttgacttgacatgataagtaagttgttcattcattacaggtccaatatctttcagttttacaagtataacaaag

SEQ ID NO: 72700 - DNA, 380 bp, Prunus persica
  Intron number 1 from transcript ppa000560m (locus ppa00056 0m.g) derived from phytozome v7.0 (chr-ID scaffold_2; pos 24974154 to 24974533 reverse strand)
ttattggggacccactctccaaacaaacagagaaggtatttggtattttatactggaaagtttcactggtttagttagagaattgagttaattccagggtttagtcttagaaatgttaatcagtgtttgtatctgtttcattgcttagtttaaaattgagggctttccattaacctcagctactttgttactcaataatggttggaagtttggaacttggaagcatgctcatcatatatatttttaaaaaaaattttaaatggccatcagaagaaggttttcagcttgcataatgtcattgttgcgttaccaagtttgattcgtcttttggtttgattattgtcgttagattttacttgctttttctggacctgcttcaa

SEQ ID NO: 72701 - DNA, 805 bp, Prunus persica
  Intron number 3 from transcript ppa007629m (locus ppa00762 9m.g) derived from phytozome v7.0 (chr-ID scaffold_2; pos 20743425 to 20744229 reverse strand)
gaagagatatcagatcatcaaaggctgttagaaaggtatttatgttatttcccctgagggttatgtacttaatttgtatgcgtaatgaatcatctccagggatatattgtcaaattttattttgtctattattttatttcatagatttacttgtcattttcttaagctatcaaaatggatttaattgaggtatgttgagctatagcatgatattgatctagatcctctatattgatggattcactgctgactatgaagttgtacattgctggtgatttttctaaattgatttctatcatctcaaccctttaaaaacactattaaaaagcactcgtcataactttggaaggcctatactggcaattagattattgtgtttggcacgcaatcagaggtaacttgaaataagcttaaaaaatttaaacactgaaattagcagttaaaattagaacaccaaaatagcagttgtgatacatgattcttggagggatggagtagaggagcatatacatagatttaggggagacaatagtttgtagttaaggaatgtttggacagtagtgaatggtttcgttcttctgctgtattgacatcaagcgcataacttcagtgtgtttgtatgccacgccagcagttgtgactttgctttcaattacatttttattgtcattttcttttgttctcaaattggatgttcagtgtgttttgtttcctgttggtttgattttaactacagggaatgtttcagaaatgtttcacttcggatgtctgatattttcctttttctttaatagactgcagttgt

SEQ ID NO: 72702 - DNA, 630 bp, Prunus persica
  Intron number 2 from transcript ppa005579m (locus ppa00557 9m.g) derived from phytozome v7.0 (chr-ID scaffold_5; pos 6734600 to 6735229 reverse strand)
ctgatataattcaggtttgttgtagtaggaatgtccggattttcttcatggagtactttctaatcaaaatctttatattattttgtgctcaaacttgatcttttaacttctttactgtatttatattttcttaatgcttatcctttctttgatgcattagcatttaggatgactgctcttgcagttaactttttttttttttggtaggggttttttaaaataaagttttcatcatgttgacacatatatctgtgtatttagatttcaacattgcctttattttaggttttttaaacatgtacagtatgccctgtttgataaaaattttggtttttgttttttaaataaagacagaaggtggttaaaaatgagaatacatagaagaaatacaagagaggtacagaagagaagatgttattttaaaattgaaattgaaactaattttggtgttattttaaaagtacttgtatgtgtttcttcctttgtggttcagtactcttctatgttccccctgccccatcttctttttccatttttattactggaatgtgcataatgacatgtatgtaattggaatacagtgtttaaattgtagaaagtggaagaggcactggtgaagggttctgatat

SEQ ID NO: 72703 - DNA, 577 bp, Prunus persica
  Intron number 1 from transcript ppa002837m (locus ppa00283 7m.g) derived from phytozome v7.0 (chr-ID scaffold_5; pos 17653992 to 17654568 reverse strand)
gattcacaaaagaaggtcttatttcaggatctgggtttcttctgttttatagttccgagttctctttttcgatttcattatatgggcattgatctgatttgtttttccttgctgctctgtttgattcctgctttgcttttcttggtcgaatgtggtttgttttcctaggcgtcggttggttagggaaaatgcaccaatcaaaactgaattccaaccgttaatagcgtgggagaagtttttagaccttcaaagtttataaattcatgatgcaggagctgagaatacttggtttttttttcccaattaaacctatttttaccttgctcctgtaaggttcattgatgaagatattttttttgttaaccaaaaatgcactggtgttctttaaaccatcttctggatctaattattgaaggacattcaatcatattatttgcttttattgttcaataatgaatcaaacaaataaaaagttactcccctatgtttgttggtaaatattctcctacatctgtttacaactaatggttgctgatctttatgcagggcaatctagaaacagagtttttcacagaat

SEQ ID NO: 72704 - DNA, 543 bp, Prunus persica; identical to SEQ ID NO: 69048
  Intron number 1 from transcript ppa018278m (locus ppa01827 8m.g) derived from phytozome v7.0 (chr-ID scaffold_8; pos 7257076 to 7257618)

SEQ ID NO: 72705 - DNA, 665 bp, Prunus persica
  Intron number 2 from transcript ppa018278m (locus ppa01827 8m.g) derived from phytozome v7.0 (chr-ID scaffold_8; pos 7257695 to 7258359)
ggaagctaaacccagtggcaccgaacttcttattggtattggattctactcctctatctgtgatttttcttatcagttatatataaaactgtggtggccaatatgatatgtggatggaacattcttgtttgatttcgtttatgcttttctatgctgctctcttttgattcatacttttctgttggaccctattttattgcacttaagttcatttcagtctttcatttgtgtccccatatgatttactttttgtaatgtatatctatctttgttgttactgttttgagtgaagcttgtttatggaacaaatgaagcttgtttgtaacctaaccctttgtttgatttcattcacaaaagatggagttctatgaatcaattgaaatgggtaatattttcatttctataagtatatttgaatccgattattttcttatttttatgtgttctaactcaaattggtttgatttattttattatactttgtagaaatggggagtaaaacatcaatgacaaatttgaataagactctcccttcttagtgtgattaagatatgttggaaggtatttttattgcatcttattttaattatgatttgttgatggtgaaactttgtgttaattcttttaagtgttgtgtaggttgctttgtgaaggcttttggaaga

SEQ ID NO: 72706 - DNA, 611 bp, Prunus persica
  Intron number 1 from transcript ppa005060m (locus ppa00506 0m.g) derived from phytozome v7.0 (chr-ID scaffold_2; pos 22881450 to 22882060)
gaggaggccaagaaggtagggtacaccttaaaacctctttggtaaagtaccaatagatagctggttgaaccaatttacttttcttgtttgaaattaaaagaaaagagatttgacaaagtttttttccgtttttgtttttaagaatatcttcgctgctttttttattaattagttggcgtaaaaagatcttgacttacggacaatgtgtgagaaaatctcgttttaaattctaatgttggcaaaaataaaagaaaaatatatggtgatatctatcttatagggtaagtttgtgtgttgacgtcaaagagaaatggaggtgacttggatcccatgggctttagttaggcttagtgggtgacatacatgcagggcacgttaccacatttaaaagtgtatacggctaaaaaaaacaaaatcattctctttgagtcatcatgttcatgctagatgctgcacatgtacatcttcatctatatttattatataaaatatcttatgattctgtcactttcgcctccatatattcttttacaaattgggattaaatttaatgaatttttttattaataaattatgtgcagataacttttgagctagcagtgaagcagcta

SEQ ID NO: 72707 - DNA, 821 bp, Prunus persica
  Intron number 1 from transcript ppa014090m (locus ppa01409 0m.g) derived from phytozome v7.0 (chr-ID scaffold_12; pos 514994 to 515814)
gcgtctcaggtacctcgctcagcttttctcctttactttcataccaatatgttatttgggttttcttctgcttgtttcaatttcatatctgggttgggatttttggtgcttgatgtctgttcaggtccctcttaagtcaaatttaattgagattgtacagaaatttgttgaaacatattgttgggtttaatttaaaattttactctctctctgtttacaattagtattttcagcttgtgtagagaatgttatgtcggtgggttatacaaaaactttttgaaccaaaattttgggattgtgcaacaaatatttctcagtttttcgtaaggaatatgatgcttgaagcttgaagcttgtccaggctacaatgattttgaagtttttcttttgcttattgaattttgtcactgagttacgttttattctgaccaaaagcaattgaagaaacacaggtatttggttcaatggtcgcttggttttgtaggaattgtttgatttaatgatatataaaggaacatttggtccacttgaaagcgttctgcatcttcaagatggtctcaatttgttttattttgttttgggatgggatgtgattttcgaattaactacataaattgagagaaagaaaagaaactatgtcttgagttggaggatatctccaaaagtgtttggagagtttgtaattttcattagaatgccaatatatgttagcataagtttgatactgtaaagtgggcatctgttggttatttgttttctctactatcagtaattaaatcccggatttgtttttgttgcagactactgtcctcaaggttggt

SEQ ID NO: 72708 - DNA, 815 bp, Prunus persica
  Intron number 2 from transcript ppa014090m (locus ppa01409 0m.g) derived from phytozome v7.0 (chr-ID scaffold_12; pos 515835 to 516649)
tggtgctgtgaaaagggttcttggaaaacttgaaggtttgttgacagctctttcatttatgcagttccattgtcttgctcttcttcttctctgagactttgcttctttaagtgtttgtaatatatcataagaatagtatttgaacaatgctaaatacactactgatgatttccttatttgtatttgtatttgcctgcctagactcacattgacttaacccgtttttacaattacttctatattgcaattgagtacgaaatcgtgtgcatgaatgtgaattttattttgcaacgctactatcttgtgaaagtttgctatatctttgtggtgtatgttgaagctgaacctctgtacactggttatcacttcggtgtcccaaaaaacacatagaaagaaagaaataggtcattgttcttacatttgacagccgggtgtatgcatcaccttcagttgagagaccatgaaaatgttcctgttcactacgtggtttagtgctttgaatcgtgtaccaattcccttattaacactcattttaaaaagttgaggtagagatattgctctccacctggatttaggttttagataagcagtagggcccttggaaccaagaaaagtaagaaattgcagaggaatataggcaccacctatattatgtactccaaaaatcaatgatttagttagtgcgtatttggaatcttgctatttatcagttttctagctgttaccaaaatgtagagtccatactttgttgatttcatattatcttgataatgacgggacatgttctttcttattatcttcaggtgtagaatcat

SEQ ID NO: 72709 - DNA, 925 bp, Prunus persica
  Intron number 1 from transcript ppa024241m (locus ppa02424 1m.g) derived from phytozome v7.0 (chr-ID scaffold_3; pos 7856490 to 7857414 reverse strand)
gcagccctctgcctgcagcttaccaaggtacctatacctttaatctacatcacctttaatgcatttatacatgttatatctatcaccaaagtgtcaaagtggactatacattcaaatgaaacttcatcctcaattttttcttcgagtttggatctttgtttttcttttttccttatatgtttttgtatcattttgtgtgtggggtattttcgtttggttttttcatcattaccatacatatttgagattggtgggtagcatttcacattctaataaatgacgtgcactttggttccttgcatacttctagacaaggtgtaaagaacttctagttctaggattgccttttttcaatgctaagttgccaaacttaccatatggcatgtacgaatttgaatgtccgatccacattcatagtcttgtgacataagatgatacatttatacaaatcatgcaatttacatataggagattcactattatacccaatatgggagtccaaattataaaaatacctcatatgaaatggactttagaaacacacacaaagctcatttacaacataacaaaaaagcttttaacttcttataaattacaaaactgccatcaatttcttaaaacaagcccaactccaaaatctcataaaaatacccaaaacacttaataaggcatcaaagtaatttaataattaatattaaattcaataaggccagctgtcattttttggattttttttgggtttgtttatagaaattcaattgtgtagggtttatttataatattagtgctagaaataggtatatcactaaatatctctttacgaatcttgtataactctagcatctactttagacatgataaaactttggtattgatttataagatgatattgatctgtgtataaaacttttatgatgcagattca

SEQ ID NO: 72710 - DNA, 706 bp, Prunus persica
  Intron number 2 from transcript ppa006084m (locus ppa00608 4m.g) derived from phytozome v7.0 (chr-ID scaffold_8; pos 9290010 to 9290715)
tctctgctgctgaagttacttacaaggtgtgtgtgatattctgtattcgattgatacctttgcaattgtcgacattgcaatcaaagtaatgctttcgttgttcggtgctttttcttctatcactatcattttgcgttgttcggtgcttattcattcctcacgttttgtttcggggaataagcctttcgaacctttgaagtttgtagctgatatgaactgcatttggttggtttcctaaggagtttagaattttacttctttttggtgttatatttgtcatcttgtaacaatgcgcttcatagttacaacttacatggtgttgttgaggctgtgtgcctgttgctaatgctttcaatgaaaacttccctgatacagcatctagtctgtgtcgttgctttaagatacaaatcatgtgatttgaccattattattatcttcttgtggtggaaacatttgtttttatatgtcagtagttccacaatcatttgtttttatatgtcagtagttccacaatcatttatagtgccatgcatgttttttgttaaaggagcacatctgtaatttggaatggttctttcctgaattggcagcatttttgtgagtcgagatgattgccagattcttctgttaattggatttggatcagtggaaaggatagccaatgattggggtatcttttggcaggattacgacgactttgttgagg

SEQ ID NO: 72711 - DNA, 596 bp, Prunus persica
  Intron number 2 from transcript ppa000922m (locus ppa00092 2m.g) derived from phytozome v7.0 (chr-ID scaffold_8; pos 8095196 to 8095791 reverse strand)
aacctgcgccgactacttcacagactccttctacagctaaggaagagcctaaagaaccagtgagttttcggtttggtttggtgacaaactaagattttgttgcatttgcttggttgtgtctgtaaaagtcagacatatcgtttttagcatctatggtttggataaactaacagctacttgatgcaggtctgattgggtttaaatggttttagagacattagtttgtgttatttgcttctaaacaacaatatgatttgtaaacactgtatgttcttttttaaaacaaaaaagtagaatgatttttccactgcgtggttttaagagaattgatatacaaacattgtactgaatataatgataagaaaaggaggcttgttttcttaatcatgttatgtattttgttcttgtagtaatcaaggaaactatgaaagtgtaatcagaatctcaaaccaaaacggaaattccacagaaagaacaccaccccctcccaagttggctagtccacacaggagcatgggaatttcgaaactttgtttgtcataataaactttcccatttgttttcttgtgtgcttttatctgtgataaaccaggtgc

SEQ ID NO: 72712 - DNA, 983 bp, Prunus persica
  Intron number 1 from transcript ppa008090m (locus ppa00809 0m.g) derived from phytozome v7.0 (chr-ID scaffold_6; pos 11147948 to 11148930 reverse strand)
ctccactgtcttctacgacactccttccactttaggtactttctctaagccttttaacttcttagtttgcttgtactcttgagtatttatgctaatttcccaatcaagaaattttgttttttgtcttctgggttttggaagaccactgcatttctactacttttggcttgttcagttaattgtttcactatatttttggtaagcaacttgtaaatcttgctaatcctttgaaaagttggaaccttttgttattttaatcactaagcaaattaatatgatccaatgttcaagattattgcggttttatatatttgactagtttttttttttttttttttttttggtatgtgtgtgtgtgtgtgtgtaaatcttactctagttaactaatacgaattagtctcttcctttggtcaatccattccccatgatttgaaaggctaaagtacttttagatcaaaattggggagaaggggtaacatagtcacaaggaagtagtttttgcatgttacaatagatatgttttcaggtgccagcatgtaatctattttccgttaaccagatttgactaacggaagaaccctcaatgaatttaattttcagaaaacaaaccacaaggtcatgcgtcaaatggggtgaaccccatgggggttgcctgtacatttcccagtatggttttgtttgaggagtcctctgtagactaatgcacatatggtcttggtcaagctgacgtatttgtaaaagaatatgcatcagttgcaagccaaatttattgaagtatatttttcagatgttgttatctttctatttttttgaatcctgattatgttggcaaataagctttggggatatgactttcatctgattcattttagatgctgcatccaggtttcttggttaaattgaaaatatttgtagtttggtggttctgatttctgattgtatgcgtagataaggctgagaggttattggctgaagcagctggg

SEQ ID NO: 72713 - DNA, 1037 bp, Prunus persica
  Intron number 2 from transcript ppa009279m (locus ppa00927 9m.g) derived from phytozome v7.0 (chr-ID scaffold_5; pos 4398548 to 4399584 reverse strand)
ataggcacagattcatagcccatagatacaaacaggtgtgcaaacacatcctatttgtagaagaagtttttgttcttttaattttgtcatggtttaagttttacttgtaaattggtgtatacatgcaaagttttcttaaattcttctacaccattgagacaagccttttggtttcagggctgcgttattgagagtgcactgttctagcagtgatagtgatgcattggtttctttgatgcacatgatcaacatgcaacatttatcattttcttatatgttatagaaatataattggtcataaatgcatttaaaattggaaggaactggccctaaagatgttacaaaactccaaaaatagtcatgcaatgttttcctcttgcttaaaattcgatgtagataggaagaaatatatatgtactttaccgtcatgcatgcaatgttatcaaggtagtgcttagggatgattcttcatcaaaaaggtgtatagaatacaatatatggtcttactctggtaacaatatcattttctttcaaagattcaagggacaaataaatcacataactagcaaaatcctcacttaaaaaaaaaaaaaatcataagtcacctgggaaatttatgtttgatggagacaatccacagagagctcatgtcattttggaatcatgaacatattatgcttgaggaaagaattattcttgccatgtgacttagcttgatggctgtctaacagaatttggctctgcagggctagctcctgatggactagctaccctgcacctattaataccaatctcaattccattcttattaacaaatttgatgtgttaaaaaaagttaaattaagctaccatactcatttgacatctgttcttattattcatttgtataaagaactagtgtgcttttgttttctgattaagaaagctgcataggcttctgtaaactattttggatgttttaatgttagagctatctgtagaaaaaactcaaacattttctgttatttcagggtttgcacagtttcctaaatcaagag

SEQ ID NO: 72714 - DNA, 657 bp, Prunus persica
  Intron number 4 from transcript ppa011480m (locus ppa01148 0m.g) derived from phytozome v7.0 (chr-ID scaffold_5; pos 11062592 to 11063248 reverse strand)
gtgatcttgaaaaattctttaacaaagaagggaaggtacgggtgattgcacatttaattttggaattgtatatggcacacaaattaccctgagacaacttaaagtagatttaatttattgttctatggggatttcaaatgactgcaactcttttactcaaatatcttttgaaagaaaaagtaaggaaagaaccaacttgaaaataattaaagtttcagtcgtttgagaccatattttgaaattggtcccttgtttttcaactggctattgtaatttatatttggatctatctagaaacaaaaggagacttgtgagttccaaagaatggagtcacttaggaacttcgacagctatcctttccatttactcttcattcctgagattcaagagaagccttacaagtgattcttgtaaaaacaataactgttctggtttctaacagagtgtgtgccgagaaatgtgctttcttttctttcactggagtttaaatactaggtcatttaaggagaggtgctctgtgtttattaagtcgtggctttacgtccatttggaaagtagtaaccttagagtatcttattagagatcatatttcaagaaaattacatataagctctggtttcaggttctggagtgccatctggttacagaccctcgcac

SEQ ID NO: 72715 - DNA, 570 bp, Prunus persica
  Intron number 1 from transcript ppa008383m (locus ppa00838 3m.g) derived from phytozome v7.0 (chr-ID scaffold_1; pos 25348695 to 25349264 reverse strand)
actattcttctgattggattttctctgtaactgtaagtgaaccattcatttcattctatctccctgcttaatatctagtccagttgtggctcgtttattcttcttgagctatcattactgggttcttttaatttccagtgctatggggttttctttctccagtttatgtgcgtctcggtgctctgtttttttgtttgtctctctagaatttgagatggttcatgctttttcttgattttgctgcaaatgttaatatgggtaatgaagatggcgaattgtttttatcaaattcagtttggtcacaaatatgtattcagtgtttgggtttaccagcttgggatatagaatggccactgaattttgttattatttgattgattcttggcttgaggcactaatttttaaatgaagaagaagaaaaaatggattaactactttctaattgtcgttaaacagtaggcaaccattataagctaacataaccaagtcaatgtttactttcccatgtgcaagttatgaaattaatgaaaatgttcattgaactggtgtttccaaacagttccagcttta

SEQ ID NO: 72716 - DNA, 797 bp, Prunus persica
  Intron number 1 from transcript ppa015874m (locus ppa01587 4m.g) derived from phytozome v7.0 (chr-ID scaffold_4; pos 680862 to 681658)
gttattttaggtcaatgtgaatttcaccaattaatatttagctcgtatttgcgtgtacgcgttaaggcagtatttggttaaactccgatttaaacgaaatttggtatgacttaggaatgaatcaatcacaacaaacactttaaattcaccaaacttattattctccttttccagggtaaaaccacatccatgacaatttctaattcgcatttgttttcacctttgctacttgtgtgcataaaattggacccaatactaaatagcaacccaagctcccttctctctctgctttattaatgccttgaaaactcgttctcctttctttattgtttgtagggtcccaagcactgaactctgagcagctcactcaggaaccaaaagaaacttcccacctcccaagtatctcacccacgctcttcatcctccacacatctccccctccctctctcactgccaaaatctcaatctcaatggaagaaagccccaaattcaaaccacaaaccttctcgcagagcagcagtcgaagaagacgaaccatcaccgactctaactcgcccgagttcgagttctggatggtccggaatccctcctgccctcaacccaatctcctctccgctgacgaactctttgttgatggcgtgctcctccctctccacctcctccccaaccaacccgacccacctgacccaaatccacaacctatctcagaacagcctgttccagactcagaaaccgtctcagaaccagctgttccggacccagaaccggaacccagcccaggacccgagctgtcaacc

SEQ ID NO: 72717 - DNA, 739 bp, Prunus persica
  Intron number 1 from transcript ppa002179m (locus ppa00217 9m.g) derived from phytozome v7.0 (chr-ID scaffold_5; pos 14140898 to 14141636 reverse strand)
gtcgcactcagggaagtttgtgcgagtgaagaagggtaagttccctttcggcgctttcttgactggggttgatcttaagttagcttatgcagatttgaagagattgggattgcattagctggcttatgattgatcaatgatttctatgtaaccatgtttatggttttattagtatctgtattttcctgagacgcccttaagaaatgttgttgcatatataccaatgtttcttatttcaatcaattgtgcttttaactttttcttaagtaaatgatcggtactctagttttacagggtctggggctctagtattcattattatagtttgttttatagtagttgatgttgctatagtagttggagtcatgtatcattttggtgtttgtgaaaatcaactacagtatgcacaattatgcatctcatgcatgaatggatctttcttcctttgaagctgtgtgtttagcttaatttatctgttgttagggtctgaatgaactctgcaagattcatgaccgatcaattcaaacccggtagtatttgtaatttacatttggttgggttaatggtagagtcattttctttcttgcttttcaagtttagatttgatgttgttttgtggtgctgaattgatgatactgtccctgattgttggaattacctattcctggtctttctttggtggcattgatttctcttttctttgtctaatggcaacagagggaggcggtggtaagggtac

SEQ ID NO: 72718 - DNA, 611 bp, Prunus persica
  Intron number 1 from transcript ppa024766m (locus ppa02476 6m.g) derived from phytozome v7.0 (chr-ID scaffold_1; pos 7468728 to 7469338)
aacaacttcttcaggaaaggaatactagggaaaatgtaagtttttttttatatcttacacgtggatctttattagtgtccaaaccattatagattgaattggattttctttattgattggacttttccgttttgaatctttttatcctagcgtttggggttcatctagtttgggatctgatgtaagttttttttcttttcaaaataccaaattgatctttattagggttcgatctatatgaccactgaaatcaggtgttctgttattctttgaattggattttcgatctataccaagttctttatatgaagtttatctttattaggattcaatctgtttgattgctgattgattttaggggttctgttttactttgaattggattttctctgttcattggactttttatttctgaatcttgttccccttacatgtgcatgtatttatctggttttctgttaatctattttgggatctgatgttaaattgaatttgaaaaacagttagaaatatgattgaaatgtgagttttaatctttaatagactgatattctgatgtgcttgcgttatgtgactatcagctggacaggttcatccccaacagatcagcg

SEQ ID NO: 72719 - DNA, 796 bp, Prunus persica
  Intron number 1 from transcript ppa026079m (locus ppa02607 9m.g) derived from phytozome v7.0 (chr-ID scaffold_6; pos 26794765 to 26795560)
tcacgattccaagccttcttcaacctccgaaacaagtacgtgttcttgtttgttttattaattttccgatttcgtttttcttctcctcctcttttattctctaattcccaattttgaaatgaaaaggaaaaaaaagatgaaatgttactttttatagaatccgataacggtttgtgtttttccccacttctctagtttcaaaattacaagaaaatattgaatttgaggttttgtttatttcaaacttgaatttgaggtcggatgcgattattactgatttttattattattattttattttcagtccaagagaatgtaaaattgggaaattttctgattagatttaatcttttatgtttccaattaaaaccctagaagctgcgacatgcgagttggacagttatgtcagcgacaaaggtttgtattttcttcaactcttgatttgttatatatttaaattaaagattgtaatgatttcaactgaactgtgatattacagatgtaaaattagtagttgaaatgacatttaaaaaaaaaaaaaaaaaactaaggtgcactataaattcttgatttttttttttttttctttctttagtgatttgcatgtttaagatttgatgagtggttcaccaggctttaaaccttaatcttcatatccattataacattttctcagcaactagacggctaacacccactctatcatggtacatatacatattgcttctgcaacgtgtttaatgatttagaatttatttcaggtattgctacacaagaagttgagggttctgatttg

SEQ ID NO: 72720 - DNA, 442 bp, Prunus persica
  Intron number 1 from transcript ppa017460m (locus ppa01746 0m.g) derived from phytozome v7.0 (chr-ID scaffold_3; pos 3520412 to 3520853)
gtgactctcagttctccggcgacctttgcgttccggtaaaactctaattacattaattttcacctcaccactattcttaacgtaaattcggatttaattaactcttcgtttttggccattgcatgcacaatttgcatgagccacaggttaattttataattaaatgttagagaaaattttattggcaaaataattagcaattttgtacaaggataaatttgtaattggacaaattattcaaagggggtggaggaaaaaaaggatggaaatagctttactcttttgcttttgcatgcaatacgcatgagtattaggatgactattaggacattaattttatgtttaattatgaaataaaacttttattaattattcagtgcaaatttgattaattttgtgttatttaaatttgattacagcacgacgacttggcggagctaga

SEQ ID NO: 72721 - DNA, 285 bp, Prunus persica
  Intron number 1 from transcript ppa002434m (locus ppa00243 4m.g) derived from phytozome v7.0 (chr-ID scaffold_5; pos 13913090 to 13913374 reverse strand)
cgaataaggatcgattggaagaggagtcgtataaggtctaaagattaaagctttttatctcattgcgttttttggttatttgttgttgttaatttgttacctatttgcattatttgtttttgaattgcttggctcaattttgtctcaagcacatttgagtataaaattggaaacttggtgaaaaaaatattaattggaatgaattaattctttaagttcgataattagtaattagttgaatttggccataaattatgcttcttcttttcttcaatgacatacagt

SEQ ID NO: 72722 - DNA, 448 bp, Prunus persica
  Intron number 1 from transcript ppa027023m (locus ppa02702 3m.g) derived from phytozome v7.0 (chr-ID scaffold_2; pos 13935119 to 13935566)
gtttccaggttcacacctctctctctctctctctctctctctctctctcgtctacaattatatgtattttctttactttctctaggccagatgaattatctagtaatatcaatttacagtatctagtacattgtcgatattctggtaaccattaccctcaattcttttacaaaataaaatactggaggcattttgatatggtaatatgatgccgtaaggattcgaacttgagacctttgatctacaggacatggccattttccactagactagaccccgttgccagttatacaaatgtttttgatgatgtgaatggaagagtttctttatgctctccacttttggtcacttcgagttaaaagtgaaacacacactcgcacacatctaacaagattgccttatcaatgaacaatgcaggtttggtcgtactggaatctacaaaaccttc

SEQ ID NO: 72723 - DNA, 738 bp, Prunus persica
  Intron number 1 from transcript ppa005653m (locus ppa00565 3m.g) derived from phytozome v7.0 (chr-ID scaffold_6; pos 28704233 to 28704970)
gaagaagctgtggtctgtctataatccccaaacaggttccttccccttctctctctctctctaatatggaatatatgtacctatataatataacaggaggagggctttggttggtaacaaggtagaggaacaggagaggagagtcaagtgagacgagtgttgttggtttttcctttttactattcataattggattccttgtttcgggtggcaattggaaaagaaaatgtgtctaggcctggctagcaaggggagacaaggcaactgtggaattttgtcaatcatctgtttgtttatatttacatgatacttactgttagtaatattttcttctacaaaaatctaaacttttaaaccatcttcttaaatacttctcatagctgattatattatatgacatccatactgatattcagatcaattggatactcaaacatgcttcatctatgttctaacaatttcattcaaaatttatatatcagagtcataattttatttgaagagctactaatactatcatttcgcttcaatgtacatgaatgaaacatcaaacccaacgggttggtttggtatggtagaatttgaatcataaaagtaaggtagaactttcattctagggaactaacagattcatccccaattttgcatctcatatcattgtctaagttttcctttgatgtcctgtttctgcttgtatttccaggttatacagaaacactagacaaagacactgaaatc

SEQ ID NO: 72724 - DNA, 334 bp, Prunus persica
  Intron number 2 from transcript ppa005653m (locus ppa00565 3m.g) derived from phytozome v7.0 (chr-ID scaffold_6; pos 28704993 to 28705326)
ggctatacgcaattgatattctagatccttcttgggtaagaattatatgggttctcatagtttggtttatgcagcatataattttacgacctcactaaattcgaagtttttgcccttttgaaaatgatgacgatggaagggtcttttgacttttgaatgtagcacactagtgattgtggaactcttctgttttggtgaagttgggttgatgaatagcattagaaacatgcaactgtttttgcacctttaaatgacaaacttgattttttattttactattcctcggaaattaaattcttatattatattttttttattgtttccagtttgtgaa

SEQ ID NO: 72725 - DNA, 477 bp, Prunus persica
  Intron number 5 from transcript ppb022233m (locus ppb02223 3m.g) derived from phytozome v7.0 (chr-ID scaffold_6; pos 23241902 to 23242378 reverse strand)
cagcggcaaagttgagcccagaactgtgggataaggtgaggaatttaaaatttgccttttaattagttacatgaattttctaggaaaatatattaaattttttttaaaaaaaaaaaacaagtaaatgagataaaaataggaacatggacttcatatatagcccttagtttcattgatatttttgtcataattttatagattagttaccaaactgaaatgctttagaggcattgacccaagttcaagattcgttgacccgatagtcaaaatataatgtgaagggaagaaaacgataaacagaaagcacctcaatcttctgctgaatttgctgtgtaatagttcagcgcaattagtggcatatatgcatggaattattatttgttttgttgtatacaacagtacaataatgtttatctttgacattatatttgatgagtgcctaacttgttggagaaatgggcaggcaccacgtagaca

SEQ ID NO: 72726 - DNA, 915 bp, Prunus persica
  Intron number 1 from transcript ppa1027165m (locus ppa1027 165m.g) derived from phytozome v7.0 (chr-ID scaffold_3; po s 20551811 to 20552725 reverse strand)
gggctctgttgaaggaaggctagaagggacacgtggtgaatcatcctaacgtagtacaactcttgagccgtttgatgtccccaatgccgccacatcgaaactgcaacacatgcatactcgtggagaaacaaaccctttgaatcgctacagaaacaaaccatacatggccctaaatccccgcgagtatgcttccttaatgtactctggtgggtacgtatatttcaaacccaaatgtcagcttgccgggtacaaaacgtggagatggccgctctgctagaaaaggacaacaaaaacaaaatagccgcttcttctcgctctcttctctgctactcagctgtcagctccccaccaccgcctcatataccaatttctcgccactttaccacgatattttccctttcacaaatttcagttctctctctcctctattttctctctctcacgcacacggcgttttcaaaatttgatttttagttatctctctgtgtggaatttgattccattcctttccgtattttttttaatctttctctgagaatcgcttcctgagcttcaagcttttggtttcttcaggtatatatatatatattttattttcatttccttttttactatttatacgactattttattccatgtatgcattattctcgtctgttagtgcacatttagtattatattagtcccattttcgagctctttcttgacgaaaccaaaaccctagaatgtgctgatttactacttgcttttgtttttgcttctggggtttgtatgcaattcgtttcagctgtaaaatcaaagtctgggcttgattttctcgagagaagattatcctcgaaatgggagcggccccaacacgatctacagccgtagaggggggttcagcttctgctcttgaaccacctaaaggttcag

SEQ ID NO: 72727 - DNA, 364 bp, Prunus persica
  Intron number 2 from transcript ppa008539m (locus ppa00853 9m.g) derived from phytozome v7.0 (chr-ID scaffold_1; pos 26151627 to 26151990)
gatctagtctttttgacatcaccactgataccccagtatgtactttcattatttttaattaattaagggaatcactgattaattcatgccttatgttttgagtattatttgtcttttgtgcgttaattaatttttcattttacttttacaaagaaataaatgttaacgataagaataatttttttgtcaaaatgtgcggtacggcatcacagtccgtggtcgagcagcagacaatatatcattgtctagctagcaatacaaatttgacacgagaagaatacttttacacttctcgttgttatccatgagtttgtatattaaatgtgtatcatattttgaatggttgcagttgacgaattcattg

SEQ ID NO: 72728 - DNA, 753 bp, Prunus persica
  Intron number 1 from transcript ppa005247m (locus ppa00524 7m.g) derived from phytozome v7.0 (chr-ID scaffold_6; pos 6555341 to 6556093)
tgtgattgtgttcgtctcgtttcttgcttttgcaggtgcgtgagagtgtgtgtggtttgatgtgttgtgtttggttggtgagaaaatgtgggcggaaagaaacgagcttttgcggttgtttataatttatgctctgtttggttgctgagaaacttcaggactaatagtttatttatttatttatttataggttatgcttgttatgcgttttgaaattttggtaaatatgaaaatttttgggacattaaaatgtttcagcagaagaggtgtgactcaagtttttgttatgtttttcgaaacgttttcttgtgtttggttgatgagaaaatgaaggaaataggactttaaatttcactgttcacgatttttatttattcagttttctggacttgttttagcttacaaatggatccttgaaaactacatgatctaattcatttcttgacaaccgaacataatattttggaaatcttggaagtgttctggaaaaagcttcatacaacatatctggtctcacagtggtcaaaatttatcatacaccgcaattaactttagtacaaatattttaattttaacatttgaaacttgaaatttcattttcaccattcttacatgtagaattcgtgctcctgttagtcagattattcatgagatcttttttgtttattgttgtgttttatttcccaagtataattgggtctttaaaataagtatgcatcttgctgacatgggtttacaaatttccagcattgt

SEQ ID NO: 72729 - DNA, 806 bp, Prunus persica
  Intron number 3 from transcript ppa013336m (locus ppa01333 6m.g) derived from phytozome v7.0 (chr-ID scaffold_7; pos 21153291 to 21154096)
ttcttcttcaccttcccctgttggctgaagataaggtactattcatcattcctgtaacatatctatggcactgaaattttagtgtcataaatgcgttaattctttgattgcgacatgggttttttttttcttctattggatgatgggagagtgttgtgttgtttttctcatctgaggatagttcaataaattcaactattgctgcatttcacaaagacatactcgagttatatttttatttgctcaccttttgtgtattaattgtctccttttagtctcattgtctgtcctattatgattcgttatcgtctgttaagagttacttactgtagtttccaagtgtttgatgttttacacgcaaaaatgaagtgagagagaactattacccctttggttgtgtttgattgcgtacttgttttgtgttatatagtgggacgggttgtgttatatttgacccaaaccagacccgttaggtatttaccctagttggtaggattgtggtctatggctgtacctaaccctagttggtaggattgtggtctatggctggacatagatgcacgtaatcgcctatttgaaggttagaccgtgtgcatcccatttggtgcaagcattttagtaagcaaggcttattggttgcagacatgaaagaccatgcccaagatagtattatatgtttatttcttcatgattttttagtttagtatgttgaagcttcaaaatccttactttttactttgatgattctcctagtgatttaaatcaatttaaagcacgttacaagtgttttatttgaatttggcaga

SEQ ID NO: 72730 - DNA, 1070 bp, Prunus persica
  Intron number 2 from transcript ppa013278m (locus ppa01327 8m.g) derived from phytozome v7.0 (chr-ID scaffold_1; pos 40727388 to 40728457 reverse strand)
aaggggagggaggagctgtaattcgtggaaagaaggtttgtttgttttgtttttctgctgtatatgctttacacaagcacctgaatttcatatcgtcaaaccacaggttttaagtttggacatttggatttgatttcacctgaccatttggtataaattctcagtgcatacttaagagcatacaacgacatttccgttgaactactttcttaagtttgcctctgaatttcacaataaaagtagaggagtttacatgaagaatgctatgttttcatgaaattacgtccataagcttactttttgcgtatgacaagtgagcatgaaatgtgaccattctatgaacaagcatgtgaacgaattgatccgctcatcaactggtttgatttgagaattgtaccctagtgttgaattgtaaccctatagtggaaatcctttattcaaaatgtggacattaactgaatatgcatacatttttcatttctgtaatttcataaaagaaattaagagaaaacacaggtttactaacgtgatttgcactataaagtgttcaatgaagactgtaaaagtcatccttctctcaccttcttactttttaaaattgttaaccatcaattcaatcggttgatgttccttcttgttgcagtcaacattctgcctgtgattgatttgatattattgtagggctttaggagatggtatgtccttaaaggaataatccacctcaaaagttcctctaaagtgttatttaatttttctgttgggttgctcatttatagtcgcacatactgactaaagtgcaaaaacacatggatgccaaattgtgtaatgcactttatttttttgaaattttagtacaattatcactttatgaggtccatcaccttttttttttcctttagatagagctgtatatacttgcaaccacctgataattgcacggatttgccttttctgatgttctgcttgctgtatttttagtgcagattgtgtcattccaagtgtaatgaggtttattttgatttgattttcctgcagggttctggtggcattactgtgaagaaaactggcca

SEQ ID NO: 72731 - DNA, 539 bp, Prunus persica
  Intron number 1 from transcript ppa013278m (locus ppa01327 8m.g) derived from phytozome v7.0 (chr-ID scaffold_1; pos 40728534 to 40729072 reverse strand)
gaagtgtgtgggctcagagctccagcttccctaaggttccttcttcaacttcctctgtcattcttatttttttaattttttgcttttttgcttttatttttgtatgatttatctcattagatctgtgcaaattggctctgtttgtttgctcggaaaatcttttcacggtagaggaattgaattgaaaatgcgaggttgtgtaacagattaatactgattaaagagttgtgctcggaattgaaaaaggattcgtgattctaactgattgagattgatcaatatgatttgtgattgatattttttttaaaggatttgtactccgcttgttgagatttctgcatttgagttttgtttccatgccgagaaaattttttctgtttgtttgccaatggccttttaatgctaatgcgataggaattcagatgcaggacattttggatgttttttcttgattttaattgaaaatgtggtagtgagtgagtgtgagattgattttggttatttataagcagtttaagcctgaagaaattgcggcgata

SEQ ID NO: 72732 - DNA, 851 bp, Prunus persica
  Intron number 2 from transcript ppa020245m (locus ppa02024 5m.g) derived from phytozome v7.0 (chr-ID scaffold_4; pos 2383434 to 2384284 reverse strand)
agaaacgtcagttaagacgtctgcttctcgaagtggtaaggtccccattttattttggtttcttggttttccaactacacagaagattttgtatatttgatttgtgtatgtgtgcgctcgcaactgtgttttcgtttcttctattctgtataattgggtactaagcagttaagctaaatgaatggaaaactcccaattcccaactgtagcttactgatgctctttctgttagatcattgtcacacagtcacacacacacacacatttcatttgcctaaactcatagccattgttcgaccttaattagaatacgttctcagctagatttggtctgaaagaccaacataacacatatgcacatgattacactgcagtgcatttcaattaggtggatgcctataacctcaccctgcatatcgcacccttgacctgggtttttggattaaggcatgcagttaaagaagataatatcacgaaccccttttacaaactagtgtagcaaacataaaatattccagtaacatgataaaatgcaaaatatacagcattgttgtcagggatgatgactaaaactcattatgcatcataattacaatcattattgggtgatttgtacgttttcgtttttgtgagaatattctgtaagaagtttgggtggatcttcaggactctattagcttggccctaaaagtattaatgtgctgaaagaaaaaagaccttataatttttgctataagcactattgtctattgctaatataatgtgtcaattttgatgtgtacaagtaatattacatgtgttttccattataaccttgcatttctgcatgcagctttttggagctgtttatc

SEQ ID NO: 72733 - DNA, 767 bp, Prunus persica
  Intron number 1 from transcript ppb021853m (locus ppb02185 3m.g) derived from phytozome v7.0 (chr-ID scaffold_3; pos 11198197 to 11198963)
gatcatcttcctcttgctttcattgcacgcaaaaggtaagctttcattttcactattttggttactgttttgcatgctcatacgttttttgtttgaaaaatctttttaccttttttctggccaaaatcattttacttctttccaagtttgataaaatatacagacaaagagggaaagtttccaactttgaagacaactacctcaactaaataagacgacggttcgtcagttgttctagcgtcgtctgaaaattgacaaagttgtttttaatataatagtctttttttatatgcttgtttaattgcaggtttgatttctctgaacaatggtttttgtttttcccttatttgataaaatataaagaaaaagaaactagggttggtatctaatatagacgaaaaatatcttattgttttacgtcgtgtgaatgttaataccacgacggtgtattactattgacgtcgtatgaacataaataccacgacgttatataaataatagttttaccacgacggtgtattactattgacgtcgtgtgaacatatttaccacgacgttatataaataatggttttaaacatttattacgtctgagattatttcattgcgtcgtctaaaatcatatcatacgtcgtatttttttaataccgtcgtttgtgttcttaatgttttcctgaaatattttcacttgcagttttgtctgttaaaatggtttctcatcaacaaactaaggattctggctccaagaagcttggagtggtagctcc

SEQ ID NO: 72734 - DNA, 917 bp, Prunus persica
  Intron number 2 from transcript ppa006628m (locus ppa00662 8m.g) derived from phytozome v7.0 (chr-ID scaffold_2; pos 24700698 to 24701614)
gctaataatctcacatctggttagtttaccacttatttccctgtttttcacatgtacactgctttttgattatatgcctcctaattaaagttgggattttgattccatttagtatctcattgggaactttcataatctgggttcaagctagttttgttagttgaagattgcttatttgcaaaaaaatatttctgatttctttcttcttgggcttttctttgtattgggtttctgttttgttcaatttcctttcgcagtaatgaatctttttctcttaatgtttgattgcatctctgttacaaagttcactgcaccgaattttgagacacctttaatcgtaaattcttttctttcaagtgaaaaatcatgtcacgggtatatctgcttcctagcagttgatccagaatcttaatatatttgaaaaaaaaaatcttgcttttatatggattcattatatgttaagctttatacggaacatgagtttggttgttgatctgtgaactgtcttgaagctgtttgaaaaattacagaatgaacagtagaagattagttgggaaacagttgttctgtaaagacgaacctttttagtttactaaacatgccgaatcacgtcatctgtattttcttggtgcaactgtgtgattttgattttgattttgaaccagttggcttgcagtttatagctttatcttgtagctgctaattcttttccccgatatatgtctcgaaattaagaaattttgggtattaattaaccttaagcatatatccaaaccaggacagctaaatatgcaacatggtggccgagaaatagtatgttgaaagacaattttgtttcctttttgttgtttgattagtaatgctcaaattatgtgactgcagctcttgataaaaaattggttctgggtgaagattct

SEQ ID NO: 72735 - DNA, 650 bp, Prunus persica
  Intron number 2 from transcript ppa012601m (locus ppa01260 1m.g) derived from phytozome v7.0 (chr-ID scaffold_6; pos 5721118 to 5721767)
aggttatttctttcctttttttttttttttccttatttgattttaagtattaaagtacctttcttgtgcgatttatgggttttattattgagacttgagcttcccttgaaaggtgagattggtaaaaggggaaggagcaagtgcagaatctgttgatttcttagggctgcttgtttgtgcaatgtcataatatataagcaggggcttgaatgcatatatgcttattttattgttagggatttgaagaccttgatccccaattcttaagatcaaacaaattaaggacactagataagcataacaaaaacccagaatttttacttggttcaccccaaactggtttaaacccacaagggtgattcgggtttgaatcaaataaacgaagaagcagaagggtattacaatcaagagcatatgggttcttcctcacacaagaataatctcttcccttgttctcaataaaccccaacctcactcaagcaaaattgcaccaagagaaatcctaagttctgaaattttgcagaaatgcttaattcttgtaaaaatctcaacattaatgaggtctgcttattgtgcacaaattaatcgtagtccattgttttgagcattttgtaggtccaagagtcgccatcagtcttcataacttttgt

SEQ ID NO: 72736 - DNA, 574 bp, Prunus persica
  Intron number 1 from transcript ppb018532m (locus ppb01853 2m.g) derived from phytozome v7.0 (chr-ID scaffold_3; pos 7553927 to 7554500)
tctgacagtgctctgacaaggaaaaaagacaaaaagttttctctgggagattgaaatttttaatcgggtttggaaacagtgcatgtgtaagtcaggtagacgaaaagttgcttacatataaaaccatttcaaaaaaataataaggcggttacatataactacgacgtataaattacaaaatacgacgatacatttagcttcggacgtggtaaataaatacgacagtagagttgtaggtaccgtcgtagtaaactcaaaaattaaagtacataagtaataactcgcgtcatggtagattatttaacatgtcgtttttattaatgtaccgacgtggatttctgtaatatacgtcggtcataccgacgttgattttacaatttaaacggcggtttttttgtaaggaccgccgttggttttaaaaatttattctataaatttgtcgctttcattcattttcggtttacatttagggttccaagttcttcctctctcagagacactgtctctcacatctcaaagacaataatttggatgtctttctcaaagagaaattgagcttactcgcatcaaatct

SEQ ID NO: 72737 - DNA, 652 bp, Prunus persica
  Intron number 1 from transcript ppa011898m (locus ppa01189 8m.g) derived from phytozome v7.0 (chr-ID scaffold_1; pos 6022100 to 6022751 reverse strand)
agcagatctctctccggctcctgattccccttgaggtaaacccagtacccaatccgtttcttcaatacattttatcacgttgaaatcgcttctatgtttccagaggaagtgcaggaaagtttttattttatttattcctttgtaccgaaagaaatactaaagttgaaacctttagcagtcgtacggggtgatataatgttagaaaccatgattggaaactatatgttggttggttttttgtgaaatttgattcagaagaagttttagtttggggttttggtgttggctctgtaaattgtgctgattgcttttgcttttctttccgggaaaatgtgatgaaccatttggagttagtctatgcatgtttgtttgtacttgtggttttggtgaagttaaggcttttgctattgcttatactgagatttatacgataagctaaccagagctcctctgttccccggtctccaccgtttattattctgatgagtttggaaatgaatttgaaaattgattcggttgtatgagttttaaaaacgattcgtttgtttcctttaagagtagtaaagctgcattgttttatggactttttttgggtctcttgaaaaacaatgtaattatatttcatgcctattctttagtcagatttgtcaag

SEQ ID NO: 72738 - DNA, 669 bp, Prunus persica
  Intron number 3 from transcript ppa012595m (locus ppa01259 5m.g) derived from phytozome v7.0 (chr-ID scaffold_6; pos 27088229 to 27088897)
aaaaatattcaccaattgaagggtagcagctccaggtatatgttatttttccctttataggcctctactggttatttcatatatttacagaatgcacctgtctcatgcatcccccttatgttcagcatgggaagaagcactcttctgacctttcaagtcactttgatatcaccatatcagttgctgcttgatgcaaacacatccttttaaacattcaaaacttccattgaacatttcagtggaattgtcttggaaaatatctgaaacatagaattggaccagtaggacttccaacagttccagctttgaaatgaaaatttaagcaagactcaaagctcccttcggctgaaatttcttttttaatttggagggtttatcatcaagcagaaatgtcatatcagcaaatctttcatactaaagtccaaatctttaagttgttttcttggtctccactttgtcccacatgaaggcatgtaccttgagaatatcgctacttaccacagccattaaaatatatccaaagtatttgtcagctacaaaaagaactcttttttttagttgtacttgttcttgtctatatatatgtttcttctgttggtgtttcatgaagaaaatttggttcttgcaataacagcattggtgttcagaggtttcagagggcctgcattg

SEQ ID NO: 72739 - DNA, 625 bp, Prunus persica
  Intron number 2 from transcript ppa026402m (locus ppa02640 2m.g) derived from phytozome v7.0 (chr-ID scaffold_4; pos 660141 to 660765)
gtggttaagccttgcagtttaattacagcatatcagttaacagatgctcaagttttatgacattgacatgcatattaattcttgttatacatgctgctgcaggccttcctgctcgagacctggaggtcacaacaaatcccaaggatgatgtggagagcagcttgggcagcaaccaagacccccaagccatctcttggaagaagcctgaaggtaatcaaaataatttgtgatctatttaattgttaaccagattttttgaattaatatttatatacaagtttaatatagctaggatcctgatgaagttgcatgcataacattgcaggtattctgaaggtgtacacttccctgtgggacttccttgctaaaggttgcttagtttctggcttttctattctttatgatgcatgcttgcttgcttatttcatttctctttcatttgattctcttatacaataactaatcgtgtataagcgtggccatgatggatagaaatggacataatcgaaaagatctggaaggataagagaattaaacatgctcttaaaaacctcatccctttgctcgtcgagaaagacaattcatggcagaattctaaagaagcaaagggcaagacgatatctct

SEQ ID NO: 72740 - DNA, 515 bp, Prunus persica
  Intron number 1 from transcript ppa011188m (locus ppa01118 8m.g) derived from phytozome v7.0 (chr-ID scaffold_1; pos 360978 to 361492 reverse strand)
ccacaccttcaattacctcgtcgaaaacggcttcagtgagtcccccatgcatttacatgcccttcaaatctttcttaccaatgtctgattcttctcttagatttgttcgttatcgttggctttgatccatgcgttttgtaatttgcttttgttggaatgaagatcatatgtatatgtatctatgattatgaaaacgctgattgcgttgattctttttaaagcaaatattttgtaactatatggttgcatggtatgcattcaagattgggtgattaagattcatgagattattgttggattgcggctgcgtttttttaattgcagtattagttttcttagtcaattttgcatatgaacaaaaaaaaacattgtgcatttgatttgactgaagcaatttccaactctgcaatttgagttgataatccttgtttgtaaattgtaaggataggtttttaaatgtctttgttttggattctgcagcttactgcgtagttgcatctgaatctgctggcagg

SEQ ID NO: 72741 - DNA, 706 bp, Prunus persica
  Intron number 1 from transcript ppa020889m (locus ppa02088 9m.g) derived from phytozome v7.0 (chr-ID scaffold_4; pos 3042245 to 3042950)
caataacaaactatcaggtacgtttgtgtcaacaagctatctagactctattgttgatctatcattatgtttcaacatcttgttattaatctataagcctaatatgctttcttctttagaaaattatgctaatttttttatacttgcaggtcatccgatactcaaaaactctcacttgaatagattagtatttggtttttaattttaagaatggttgggtctataatgttttttttttaataaatatttttttatatacttagaaagtttttacaaaacttacatttatgaaactagtgagtacatgttgtaggctacaaatgataaaagtggttgggtgtcgggggataaagacatagatgatagattgtaaataatagagaatatttatgacctttttcacaaggaggcccattataacatgatattttataaatataaaaaacacccttcaaatttaatactacagaaaaatttcatattgtaccttcaagcgaaatttttttaactaataaaccaattagaaagtgaccaagtgactagttgagagtttttttttccctccaaaatagccactctgatagcttttctataaattatgtagtgtgtgtttttttttttctaatttcatttatttacatgtattatgagtgtttgtttggcatacttaacaggtgggatacccagagaaataggtaccttaaca

SEQ ID NO: 72742 - DNA, 362 bp, Prunus persica
  Intron number 4 from transcript ppa018748m (locus ppa01874 8m.g) derived from phytozome v7.0 (chr-ID scaffold_7; pos 9502675 to 9503036)
tcaacctcccctctaccagcccattgttgcggagggtaaatgttaaattctccttacatttttatgaagtttggtgatggtaaaatcattaacaatcagaacaactagattggagcataccacttctaacaaattttaatttccaataaacaaacaagcaaacattagcgtcatttgaattcataagcctctaacgccttgccgtttctgctttatatgagatagagcagtcacttaataacaactataatttcttctcttcctctccctgtcaaaattttttgcgaaccgaggtagtagtgataatacacaacagaaatgaaatttaatgttttttttccttctttcctgtatttgtgcag

SEQ ID NO: 72743 - DNA, 974 bp, Prunus persica
  Intron number 2 from transcript ppb020460m (locus ppb02046 0m.g) derived from phytozome v7.0 (chr-ID scaffold_8; pos 951045 to 952018)
gttaaaagagtagagctttctgggagtcatctgaggtgccttcgggaagcttcatgggttggtctctcacaacctatcaaacaatcagctactggtttccactctcatctctctctctctctctctctctctctctctctctctctctctcttgtttatcttagagaaagaaaagcatacaactttcagagaatcagttcactttttgaatttgacatatgccaatagcttcatagtgaatttagacataccaatagctttagtctatttaatgctgtcccagatcaagcatttagccaatcctatatgaaatattaatatagcttacaagtccacacacaattggttttctatatttagagtgaaatccaactaaccaaccaatgcttgcagcagattgatagaattaacactttccttggcataattgatctctaggtagtaacttatgattgcatttcattgatgtagttcctggtaactttttacataacaggtttatttgtttggcaaaacagtccattccagattcaatagcaggacttgagaaactcaagcagctccatgttttgtgttatcttttagtttccttgcccaactccgtcggattgttgcttaacctgagggtcctcaatgtgtcaggaaacaagctggatgcccttcctaaaagcattgctcgttgtaggtaacgtctcaaattttctttttcgacttgtcccatctgttcttcatgtgttctgttcttggtgagtaatgtttccttcctttcctgcaattctcactttgtgactgttttcaaaacaactttttcgactcaatatactggtggagctagatgcaagctttaacaacctgatgtgtttgccaacaaatattggttatgggctactgaatctcgaaaggctctcaatccacttgaataaaatccgttcccttcctccatccatctgtgaaatgaggtcacagatatctag

SEQ ID NO: 72744 - DNA, 1037 bp, Prunus persica
  Intron number 5 from transcript ppa011175m (locus ppa01117 5m.g) derived from phytozome v7.0 (chr-ID scaffold_6; pos 19054879 to 19055915 reverse strand)
tgagctctttggtcatcagttggtctatcactgaggcaagtgtttactggttgccaattcttgccttttttactctcttttatgtttacagctatgtaaaaagtattattattgtattgctagagaaaaattgttgtgtccaactgcctagagacctgcaagtagtgtttttgtttttggggttttatcccttatgcaatctgagtcatccagtattattctaaatcaatatcgaaatatagaatcaagaggtttagttggtgcactaaacataatttgtcttgcttcccacaaaacggcatgaccacttaattgaagatatagatcaaatgccactttttatctcatagtaaagagcacggggtgccagcattgataaattttaaaacagtttcattgttcatatctacataattgaggatgtattcacttggtttatttgagaacagaatgtctctagccagtgtggttctcagccatgggacatttttatccttgaattataaggtttatcattttggattgtctataaaatgacccgttaatacccaggcttttagcctaatgaaatgctttctgtgatcataatttgttgctttaagcatgaaaaaaaataatatatttttgttttctaaagcagttggcttgaacttctgcttcgaaacatgtactaagagcaactatgcatgtatgttttctgcttcttaactgcaaattttaaatgcaaaatttgtatgttatagttggcctttttatcaagttgtatctatacagaacaatcataaaataaattcccagacaattgcctctctgttgaaacttccagaattcctgactcagggtaatacatgctgcatccaggcgtctattgcattaatacatgctgaatcctgatgttggttgcattaatgcatgctgcatactgatgttgattgcactcatgttgcttttctccagtggataagttgtagtaggtgggaaacaaattcagattcgtttctttgtaattgcagattattcgatactctttctttggc

SEQ ID NO: 72745 - DNA, 669 bp, Prunus persica
  Intron number 1 from transcript ppa005276m (locus ppa00527 6m.g) derived from phytozome v7.0 (chr-ID scaffold_1; pos 22565877 to 22566545 reverse strand)
aacggtctcttctaacatttccagattgccttctggttagttgtaggcagttttcattctttcattaaatccttattatttggtaatttcaatgtcttgttgcttgatctgatctgggtatttcttattcattcgtttttatgaagaacatgctgaggatgccttcttcttttagttatttggttttgttgtatattactttgctgcatgattgattgtttgattaagtttgtgagttctaaatttgatatgttttaggtagaccccaccagattttgacatagttcataaagactcttcctatcttttgtaaaattagatctcatgatgactttgattgttcaggtcaatctgattggtagccagtggtggtgtcccaagttgtagcttatttgcataattgaagaactaacatagatattcataatttcatccaattgaatacagtacaactgaattttataacatgtcctttatatgttttagaacatgccaaatttcgatcatttcctattgggattgtggtttcattgagtttcctttgttgcaaatccaatggatctttggctttgagtgttttgttgaactcagggaggtcaaggggagactgatatgatacttagggatctacactaatttgttacaattggatttgcaggagcagacaga

SEQ ID NO: 72746 - DNA, 943 bp, Prunus persica
  Intron number 1 from transcript ppb018226m (locus ppb01822 6m.g) derived from phytozome v7.0 (chr-ID scaffold_7; pos 6956360 to 6957302)
catcgtcttcctcttgctttcattgcacgcaaaaggtaagctttcattttcactattttggttgctgttttgcatgctcatacgttttttgtttgaaaaatctttttaccttttttctggccaaaatcattttacttctttccaagtttgataaaatatacagacaaagagggaaagtttccaactttgaagacaactacctcaactaaataagacaacggtagcttcttatttacgtggttaaatatatagaccacgacggttcgtcagtcgttctagcgtcgtctgaaaattgacaaggttgtttttaaaattatagtcttttttttatttgcttgtttaattgcaggtttgatttctctgaacaatggtttttgtttttccctaatttgataaaatataaagaaaaagaaagtagggttggtatctaatatagacgacagtatcttattgttttacgtcgtgtgaatgttaataccacgacgtcatattaaaataccgtcgtctatataagattccaaaactttctttcttggccttgtatttatcaaattagaaaacaaaaaacatggttcagaaaaatcaaatctgcaatcaaacattcacagagaaagaaaaaagggttttggatccttatatagacgacggtatattactattgacgtcgtgtgaacatcaataccacgacgttatataaatatttcgtcgtttatagttaattatcacgtcgtccggtaaatatcgacgtaataagttattattacgtcttattttatattatttcgtcgttgtttaattaccttggttttaaatatttattacctctgagattatttcattgcgtcgtttaaaatcatatcatacgtcgtattttattaataaccgtcgtttgtgttcttaatcttttcctgaaatattttcacttgcagttttgtctgcaaaa

SEQ ID NO: 72747 - DNA, 1040 bp, Prunus persica
  Intron number 1 from transcript ppa011373m (locus ppa01137 3m.g) derived from phytozome v7.0 (chr-ID scaffold_6; pos 9270580 to 9271619 reverse strand)
gcttccacaggtacttccacttttatactcaccttagcttttgattttatcttctgggtttttagtttcatcaaacaattatgaattaccaccatgaaattttatatctttgaaattggttctttatttgagtctaataccccattgtgatgggttttctaattgtttggaacaaaaattgtgaaatacccaccatgggtttctctctgaacccaccatttacctcctgattgagtagaaaaagtcaatcttttgcccatgtgtttcctcattgatataagataaacaggaaatcatagcagataatgttattgatagctttctgggaatatcggtgtagttttttgaaacaataaattttttatggataaataggaaaaaatctgagaggtgctaaaagaatgcaaagttaattgagatggttttgatatttcaatagaaagcatgctatggtgaatcatttcttcaaaattgtagttctatgatgcccctttcttgggttcagttagcttggttatgtttgccgattcgctaatgtcctgaaatcatcatcacaatcacctgcgacatcttttagcaatagatacattgctttctacatgtagatgaatctgttggacagtctccgatgtgtgccggttgatgcaagaagttgatatatgtggatcctcttgtgagtccggtgtacatcaatggctgacagccacttaatgcatgggtgactgtccaaaacaaagcttttatgtgtactgtttcgtcaaaatagagactcactcaccgcaaatatatgtagttttcttgtgaacattatattatggcagagcttcaggggcacatattatacaaactctgttggatatgcttttgctaatgataaacttggctatgcatgatatgcctttctttgttcaaccgatggctactgtctgcactttgcctgggttatttcaattgtaaacttggatgtcgttggtctatgctaatagtttcccgattaactcacaggctgttccagtacatccaaggtgccaatttgaatt

SEQ ID NO: 72748 - DNA, 535 bp, Prunus persica
  Intron number 2 from transcript ppa007045m (locus ppa00704 5m.g) derived from phytozome v7.0 (chr-ID scaffold_1; pos 39445044 to 39445578 reverse strand)
gaggctggaatatcagtgaccatcattactgggctgtaagttcgtcactctttttgaagaactttgctttttgcttttcttcttctaaatatatgaaaaaagctgaattttaatgttgccgtctctaaatgtcttttaatatcataaaagtgcttttgaaatcagggagaaagttacttccttcttgctttgtagttaaaacaagatatagaaatttacttctgcgaaattgttagaatatggcactattttcagcacttaatgacttcatgttgactaagaatgccattttcgtagcatccaaacacctactctcaaatatattaatatcataaactgaatttctgatatcctaaaattttaattcttcaagtgtttctctggcatgtatgttatttattatcccttaataacatttcatttgtgtttttagtctaaatcttgaatttcttttcatatactctttttttttttgggtccaattttttgttcgaatgcagtctgtgggttttactgcagctcccctctttgccgt

SEQ ID NO: 72749 - DNA, 767 bp, Prunus persica
  Intron number 1 from transcript ppa011856m (locus ppa01185 6m.g) derived from phytozome v7.0 (chr-ID scaffold_8; pos 11967638 to 11968404)
ttctcgccgctctccaagcttggcagtcatcgaaggtcagctttcctatcactttccttactggtttcccattgttcattgttgatttggatctggatttgcctttgattgtgctgagtgttcatttgtattgtctctcattttgcattcaatcactcgttttttgggaaatcccagaaacttttgttccatcttgtgtgttttgaatttggtgggagctggtgatgctggatctgtattttgaagcttctttgtttgtttgaggacattgtctgtttgtgccaaaccctagcttttagcttgattgctgagaaaaagagtaagcatgggaagagaaatgaacaagttgagttttcggtagtaatttttgttggttttgtttacatgtaatgaaatatttagtagtttgcttagttaactggttttccaacttttcttgggccccaaaattagtgaaatccttctaaggtttctcattctacattctcttagcattcggaaatccacattaggatttcttctcttttacatatcctggactgggattgttttttgcataaggggtctggtgtgttcatttgagtttgctgctagcctatcatacatgatgcatacatatagacatacacatcaacatacgtatatcagcatataaactcattcatacacatatgtatatgtttggtgcttcttgtgattgtgactacttattttgataagaccgtaccattgtattaacagattgtgaagtttggaaattgaattga

SEQ ID NO: 72750 - DNA, 1070 bp, Prunus persica
  Intron number 5 from transcript ppb015805m (locus ppb01580 5m.g) derived from phytozome v7.0 (chr-ID scaffold_1; pos 31440621 to 31441690)
ttatcagtataactggttctactctaacatcaaaggtatgccttccagtatctaaaatctgccactggttcgtttaattccatgaactaagtaccatgcttaattgttttttgcttgaaattaaatattacttgtcaagattaattatatgtgaaacgttttctctgtatgactgttactttcgctgttacaggcttatctgatgcaaaagctagagaacctcatctattttttaaggcattttcttcatagtgtatcttgtatgcacttgtccacgactaagttgcactctttatgtttcttccatgccgccccacctaaaaaaacatcccaaagcaaacagtataattcctggattacattctctagattacttttgtgtttcaatgttttaaatctggattaaagttatccttcttaagttgggagatctagtatgcacaataatgtgcttgtgggacttcatgtattctttccaggaggtgtcttataggttagctgaatccgcttaaaaaatctagttaatattggcttatgtttgggattataaggtgttagtacttttaattttcatatgcacaggattagattctacttctttgaacttgatatatttgaatttgaatatcaattttgagagagagaattgagtttggttttgtgcttgaaattgtagacaaataaggagctttacgttgatttttatctgggagatatttatgtctttgtaacttttattaatttaatacagtggtttggagatgctgaaaagctgaccaaggctctcttctcctttgccagcaagcttgctcctgtcataatatttgttgatgaggtgagtttttcttttcgaggtaaaaaatgatgtgcaacaaactagttccttttgtttactgaaacctcctaatatatatttgagaaattttatggagattgaaagcattatatactgtagaaaaagagttgttttcattgatgattgttatgggtatgaccctggatttatgactatcttgttataaatttatgttgtaggttgatagtttgcttggtgctcgtggtggttcttt

SEQ ID NO: 72751 - DNA, 780 bp, Prunus persica
  Intron number 1 from transcript ppb015108m (locus ppb01510 8m.g) derived from phytozome v7.0 (chr-ID scaffold_6; pos 9370446 to 9371225)
gatcatcttcctcttgctttcattgcacgcaaaaggtaagctttcattttcactattttggttactgttttgcatgctcatacgttttttgtttgaaaaatctttttaccttttttctggccaaaatcattttacttctttccaagtttgataaaatatacagacaaagagagaaagtttccaactttgaagacaactacatcaactaaataagacgacggtagaccacgacggttcgtcagttgttctagcgtcgtctgaaaattgacaaagttgtttttaatataatagtctttttttatatgcttgtttaattgcaggtttgatttcgctgaacaatggtttttgtttttcccttatttgataaaatataaagaaaaagaaactagggttggtatctaatatagacgacaaaatatcttattgttttacgtcgtgtgaatgttaataccacgacggtgtattactattgacgtcgtatgaacataaataccacgacgttatataattaatagtttaccacgacggtgtattactattgacgtcgtgtgaacatatataccacgacgttatataaataatggttttaaacatttattacgtctgagattatttcattgcgtcgtctaaaatcatatcatacgtcgtatttttttaataccgtcgtttgtgttcttaatgttttcctgaaatattttcacttgcagttttgtctgttaaaatggtttctcaacaacaaactaaggattctggctccaagaagcttggagtggtagctcc

SEQ ID NO: 72752 - DNA, 766 bp, Prunus persica
  Intron number 1 from transcript ppa003044m (locus ppa00304 4m.g) derived from phytozome v7.0 (chr-ID scaffold_1; pos 40968783 to 40969548)
gcaacgtactgtaaagggtttttcaagccaactataaagagcaggagggtttttcaccaaatttcccttaaactcaccccaacttttaaaatttggttttttgtcaaaaaaaaattgatgtcctattgagtattttgatttttttatgagattttgggatttaaaaaattaatagcagttttgtaatttaaaagaagttaaaaagtatttttgttattttataaataagttttgtgtgtttctaaagtccatttcatataaagtttttattataatttgggttcttatatcaggtataataggaaatttctcaaaacaaaaagtatttttcttaaaatattctgaaaatttaagtttcgagaaaaattaggaggatattttaaagcggggtgcactaacttttaatgcccagcggagcccagctttctcaaactgagattctgtttgagttcttctttgtttcgcggggattttcaaactgcaaaataggcaatgctttcgccgactctcttgccaccacgtattggcgtcaatctttatcaaacaccttctctgctctccattcaatcaccaatacagagaaagcattcaaattcaaagaccagaaatcgtaaaacccccacgaattttcgttgtttttattgcgaaaacccatcttctacttacgactttgagaatttaagctcccaagaaaacccagatgccgaattctctgatactcggtcactgagccaaagctccagaccctatttgcttgctctttggc

SEQ ID NO: 72753 - DNA, 190 bp, Prunus persica
  Intron number 1 from transcript ppa000243m (locus ppa00024 3m.g) derived from phytozome v7.0 (chr-ID scaffold_8; pos 2185904 to 2186093 reverse strand)
ttcgggaaataacggctgctgctgaattcttacaagtaattatcttcattgcctctagtttgattattaagaaatggtagcaagtttattaaaaattgttgattgaaatgtaacgttgtttttttttttggtgggggtgttggttttctttccagggtaccaataggcagagcctgtttttgcatagaaa

SEQ ID NO: 72754 - DNA, 845 bp, Prunus persica
  Intron number 2 from transcript ppb019220m (locus ppb01922 0m.g) derived from phytozome v7.0 (chr-ID scaffold_5; pos 2340871 to 2341715)
atctagtgggtggggctccaggattgtggagtgaggtttgtttcgtcgtccttggaaattcatcttgtacaagtttcttcttttgcctagatgtctaagtttgtagagtggagcagtcctaatactgctatctcatctgcatccctgctatcatcttcaccttttccgtgggatatgacttttaggcataatttcactaagaggattgttttgacttctgtccagcatagtagaaacaggccaaatgggctagtccaggccactagtggccctggatagggctgggaaactgcccactgggcccatggactgcggagcatttgatgatggtgacttttttataatgactgtaaccatcattgtaatgcagatgctgatggataattctttgtaccttatcttgaaaaatttcttaaattgcttccatttcatccttttaggctttgaaacaccatcttggttataatttgtaatcatcgtttgtttttctattttctggtctcctatgttaaaatttcttgtttttctgagatctagttattgggaaaacaaagttatgaacaatgaattgctagcactggttactttgttatgatgtccaggcactgtaggctggtgtaccaaaggaattggatggaaatttagaatgaccattgtatattcacaatagtaaagaaagagaaacagtttattatttttttcaaagggtacataaagagagtttttgatatgcggttagaaatacatctcttaggcatatgctatgaattttactattgttcctttgggaattgattctaagtaccaaatgggtgttttgatctgatggcaatgcagggggcgca

SEQ ID NO: 72755 - DNA, 667 bp, Prunus persica
  Intron number 1 from transcript ppa009934m (locus ppa00993 4m.g) derived from phytozome v7.0 (chr-ID scaffold_8; pos 18393294 to 18393960)
ctcaaagcacagcttgaaacctaatcgatcagcctgtgagtagttcaatttgatttgctctatctaatgcacttctaatgataaatttctgaactttgtcgagaattatagaaattttttaaacagagctttttcttgcgccgaaagttcggaaattttgtgtggaatttggggttttgtgtttgatctgtgtgatatttaaagataaggttaattttgtcggtattttggaatttgaacattgaaaaggtcttctttggaggtaaagttcaggacttttgtcgtttctttcaatgatttgtaaagtaattgatcaaattcttacaatgtagctgcaattatttggttgtgttgttgaattctgtatggagcctatttgaatgctgcttaaatgttaaaaattggtaattttttttgcgtagtttaggattttcctttttcggacttgtaaatttaagtttgcaataggatttggggcatgtttacgtccgtcttgggctttgaagtgcccgatttgagagtcgagtaggacacgtctttgtttgctttagctggaatgcgctgtttccccccttaaatttccctactctttttatttttgtttgttattcttaccagtgttgtttgcataggtgatcttgattaattcagtaccctacatcttctt

SEQ ID NO: 72756 - DNA, 302 bp, Prunus persica
  Intron number 4 from transcript ppa009934m (locus ppa00993 4m.g) derived from phytozome v7.0 (chr-ID scaffold_8; pos 18394636 to 18394937)
ggtgctcttatttgtaagttatatttattttctgtctgtttttgcctatcattagttaatacttcgttatatggatttcctttgtttgaagtagcattttttatattttagtgatacagataagtaaactcagaatcttccatgtttggtgtgtttggtttcggaatttaagattaaagagagagaattcaagataatgagttttaatggaaaggaagttgtgtggattgttaatatggaactgtggttcaataatgcaagccttctctgaatgacccctcttactttcttttgcagtgccc

SEQ ID NO: 72757 - DNA, 753 bp, Prunus persica
  Intron number 1 from transcript ppa018787m (locus ppa01878 7m.g) derived from phytozome v7.0 (chr-ID scaffold_2; pos 16727058 to 16727810 reverse strand)
aattgaggataaaggatcacccactttatcttcaggtattattttttcttttaatttcttattatgagtgtttttttgtttttgggatttgtaatgtgttcaaaatgtatgctttgagtttcattgttataaaagtctaacattggcagttgtaattgaaaccctgaaacttagtcaaatgatttctttctgtagaagaacccctttagcattgtaggtgacttcttgtttgagaatctgcttaggtgccctgtttctgaatttgtgagactgatgggtgaatgctattgaagatgttccatctctttcaagatcttatcctcttcccacttttattcattacattttgttgaactccagttttctttgttcattttgatctgcttgttaggagcttctctggctgtgcacgatatgttttattgtcatcaacaagttcacttacaaatgtcatatttttgtaacaaaaatgtgggagagaatctcattttatattgatgaagttttgagcaaattgaaatgccctttgtacttgacatagtttagttggagccaatgtcagacttcttcgaaattttttaacttctaaaagatacagtttttgaaggaacttatatcatatcctgaaattatatgttcctacacttgcaagtgaatttttttaaattggtagccacttatataacctaaagtccatggcttattgaactgttcataggtggcagaaattgctgtactagaagaatcttttga

SEQ ID NO: 72758 - DNA, 540 bp, Prunus persica
  Intron number 3 from transcript ppa004371m (locus ppa00437 1m.g) derived from phytozome v7.0 (chr-ID scaffold_1; pos 29827718 to 29828257)
acaagggtggactgtgcctcaaaggtttatatctcatgtgttgtgtctcttaagttttcttttccaacgttcttctccccatgtggtgtggttacttgatttcttttgctgtaaaagatggcctattttctgagcagtgtttagtgaaggctggggttgcctttctgtagggcggttggggaggataggattgcaattatttgctcatagaatgatctgtaagagttccaggttgaagtaaagaaataaataggttctttagagagcatctagtaatgtgaatacaccattaaaagagatagctcatcttccatagcatgacctaaagcttcattcatatttaactttctagtctgcatttgtgtaattattctgatgtttgagactggtattttgccatctcttttgaattcgcatattacttcttttctgtttggttattaaattatcaagatacattgcttggtccttagaccctacctttttaacttgtttggcagtacagataaataccaaactctgtgataacttttctgtggg

SEQ ID NO: 72759 - DNA, 407 bp, Prunus persica
  Intron number 1 from transcript ppa006115m (locus ppa00611 5m.g) derived from phytozome v7.0 (chr-ID scaffold_1; pos 44041898 to 44042304)
tttcgggaatcaagtggcagccaacaaggtttgaacttaatgaacctattttaattcacatgtgttcatcgtcaacccagtataaccacacttaatacacgttttcaatttttttctcacaggtcttggctcatctgagcctaactcctatagtctaagcggctgttggtgtgttaaaaatttgatctcaaattctcaatacgcacaaaataagcaattaattacaaaacccacattacatttggcatgggtttgtggattggaatccatagagttggcttcctccaatttcagaagtccgttgtgatatattttttttgttggcgtgtttctgttttgtgttttgtgttttccttttggttccattgtctcagaaatatatcttccttccttaatagaaagaggag

SEQ ID NO: 72760 - DNA, 632 bp, Prunus persica
  Intron number 2 from transcript ppa006115m (locus ppa00611 5m.g) derived from phytozome v7.0 (chr-ID scaffold_1; pos 44042353 to 44042984)
gagttggctgcccttcttgccattcaacaagaaaagtaatgatacatgtagatattagaccaaaaagtttgaacttaccactgtatatattgctattttgatctccatgtctataatcagacaccccccccccaaaaaaagaaaaaaaaaaagaagaaagatgcctatacagttgcaaattcttattatgtaagaaatgtgaatttattgttttttttttttatagatatgttcattttgtgttatagatcgtatttatagatatttgcaaaatgttttatttgattttgttacaaaatgtttctcatgtagtacaacttgagaccattgaccagcacattcttattaggccagtgagaaaatttactgaaaatttatattaaattagttcaacccaccggtatatacattggaagaagtgttatagttctcacaattcaggttcataccatttcacgactgttttttctaatgacagacctgagcttggatttttcattttatttctttggattgtgccatgattttcagtttgatataattgcaacacgtttgaatgtagaatgtattttcctttaggtcccattcttggaaaaatgagcagaactattttgtttttcagggaaccacta

SEQ ID NO: 72761 - DNA, 655 bp, Prunus persica
  Intron number 1 from transcript ppa009501m (locus ppa00935 6m.g) derived from phytozome v7.0 (chr-ID scaffold_7; pos 14701453 to 14702107)
gagttttggggtatgcctctctttctctctgatcgttgatttgttaggattttgttttctcatatacgagttatgccttttcgtttcgagcaatgttttgccgtttggttcccgagaaaactagggaaaatggtaggactagtctggttaggttttcattatgtgacttgatatcttacaggaacatgacagactaagccataattcaactgtctaactcggtcttgatgagtcttttttattattttcgtttttttttttccctggtcattttactccaagtaggaaagcgtttagggcttttagatttttcttttcaaatgatttgttttgtgctcgtttagaacttaatgtgtttgctttcactctgtttgtttacggagaaattaaatggaaagaacatttgagtctgagttcgctgtacatattccaactgaagaaaaaagaactattttgttgtcttctgcatgtttgtcactaaatcatattggcttcacacatgggaaaagaaaaaccctttgacgccttgttttcattctgaaaacttttgccacattactttttgttagtgccaatatttcaattgttaatttactactttaatgtgactcaatttccaggtgttgaggtaaaaagtgggcagtctgtttctgtt

SEQ ID NO: 72762 - DNA, 892 bp, Prunus persica
  Intron number 1 from transcript ppa003961m (locus ppa00265 1m.g) derived from phytozome v7.0 (chr-ID scaffold_6; pos 308231 to 309122 reverse strand)
gaacccttcttctaccagccccaggttccaggttcgtcctttatctctcttcaaaacccaacatttcattctcaatttaattggtaagccttttagctcacttgggttgggtcttaattttctgtatggttggctagaaaggtaaggtgcttgtgaaatgaggccaaattgtcaaaagttatttttataatgaatttggtatcgtcaaaagctagatatttttaagccttttagctcacttgggtctcagttgtccgttttgtttcctggaaatgtaagaacttatgaaatgaagcaagattgtttctgtttcttatgttttgatttgtggaaagctatataattttatttgcatatgctcaatttcgcttttattttctacataactgactgtttatgataaagtctgatgttttttcggctctacttcaccttctgatttgaagtttggcattggcatttatgttgcatgcttcacttcaattattcatttttttgcagcaactgtttttgtttggtcttatggcaggtcgagtatatattatactgtctttttgcttactttgctttgctagtatttctctgtcaatgtcttgatcctgtatacgtgtaatcatattgtggagacatgaactatggtaagattgagatggaaatttcatatcttgccaaaaaatgctttgggtttggggacatattgccttcggatattcatcaattaccatgatcctaggatagaaaaatgagttcatttgcatgccccgtttttcttacccgacccatacattatttcctgttgcacttaactgaattggctgtaaattatgtgtgtctagtttttagttgtttgtggattgaattttaatgttccaattctttgctcaactcagag

SEQ ID NO: 72763 - DNA, 729 bp, Prunus persica; identical to SEQ ID NO: 72153
  Intron number 1 from transcript ppa008154m (locus ppa00815 4m.g) derived from phytozome v7.0 (chr-ID scaffold_2; pos 22035832 to 22036560 reverse strand)

SEQ ID NO: 72764 - DNA, 605 bp, Prunus persica
  Intron number 2 from transcript ppa012080m (locus ppa01208 0m.g) derived from phytozome v7.0 (chr-ID scaffold_5; pos 11025401 to 11026005 reverse strand)
gacccaaagagagtaaatcatccgaacccatatatgatattcccccttttgtgtttattgttttgatgtcatctctggtgggttctatccatgttatgtcttaaagctgtgttcgtttatgttgatcatgtgaaagttgttttgggtttcagatttataatgttttagatagaattatagttaccagctactgaccacataaatagtctcctctctgaagtctgaactatttcatttaaccgtggttttggtttgatattttttttggggataaaaagtttgggattgatttagttgtgggaatttacttaatttttcggaatgaactgatctggctactgatgcttgtttaaatatctgaattccaatttagattaggatgtgattttagagttttaacttagacttctctctactgcttgtgcataaatgggcggcaagtttcttgttttctggttttcttcaacaggatgaagttttgacatacttgctttcgagtaatatggaaattgaatgaaaggtgggccttttcttttctttttttccccttttttggatgcaatgtggcaggtccgtatcagggaggtgtctggaggataagggtg

SEQ ID NO: 72765 - DNA, 633 bp, Prunus persica
  Intron number 1 from transcript ppa023708m (locus ppa02370 8m.g) derived from phytozome v7.0 (chr-ID scaffold_5; pos 7712583 to 7713215)
tgatagacatatttaggggtgggcactcaaaccggcgaaccggaaatccaaaccaaaccgcaccgaaccaaaccggaaaaaaaccgagttgaccaaaaagtcaaaaaccggtcaaaaaccgaaccggaccggtttggaccggttccggatccggttccatgtcttcaaaaaccgaaccgggccgaaccgaaccggtgaaactaaaaaaatatataatttcaatatatatatttatatttaatgctatatttttaatttcactaaaaaaaacataatatttatccaagttcaatgtcaaaatatctctattttctcactttaatatttattttttatatgaaattgaataatttgttaattttcaagtaaaaaaataatatttcagttgagaattgtattaaaaagtaatttaaaaaaataatttttataatccggttcaaaaccgaaccgaaccggaaccggaccgaaaccggttcaaaccgaaccggacagtttttgaaattttttttattaaaaccgaaccgaaccaaaccggatgaatagtattggatcggttctaatttgaggcaaaaaccggtccaaaccgaaccgtgcccacccctagacatatttgttgaaattggaaagggacaa

SEQ ID NO: 72766 - DNA, 706 bp, Prunus persica
  Intron number 2 from transcript ppa022065m (locus ppa02206 5m.g) derived from phytozome v7.0 (chr-ID scaffold_4; pos 5982277 to 5982982)
aggctcagctccattttaagcacctatctttctaagtgagttacactctggtttaaatatgtgagttcaaaattccaaaaatgaacagggagtggttgtaactatctatgttcatgattttcatataaattaaattatgaagggagggggatttggtggaacatctaagtagaagaagcaaaactatgtttcctttcttttttcctttagcaagcattgtactttgcaccaattttgttttgtttaatcttgttctttaagaaaaaaacttatgaaggattgttcatcatttgtttcattgtaaaaaaaggagatttggaaaaccaaataccagttaagcatagggtatgtcaattttatgtttctaaaatgaatcatatgctattagagcccatacatctactattaccatagagtcatagtggttttacattgtctgttggattgaccacttattcaaataggttcaattcactctttcgcatgctacatgctatgtgcattgttttttttgcctaaccactaaaacgagcaagtacgtagtgtttccttgtgaacagattcttaaatgtgtatgtgtctgcttatttgtgtgtgtgctttctatgcattattgaagtttttattgttagtgtgtttatgggcttgtattgtttccagttatgactttatttgtatgtcttgatcctgcttgtgcatcatagat

SEQ ID NO: 72767 - DNA, 625 bp, Prunus persica
  Intron number 1 from transcript ppa006976m (locus ppa00697 6m.g) derived from phytozome v7.0 (chr-ID scaffold_5; pos 17474883 to 17475507 reverse strand)
tgctcaagtacttgcctcacggagagcgtaacagagtaagttttatccattttttcgtgttcaagtgtgtttctttttttcttcattcggtggtggtccatttggttgctgagaatttcgtggaaaaggaagcaacttgaatatgctcgcaatttttaatcttattgatcgaattattatcgttatttttgcctcttgtgatttgggcatttaattagggtttcgctggggaactgtcttctaacgggcaagtgatttggcataaaattacggaaatgcccttaagccctgctttttgtatgtaggaaggtggtgtggcaatcatcatcattttctttccttgcctcttttccttttacttctttttcccttattaaaataaataaataaataaaaagattttaagtaaaagaaaacaacgcagagaaagttcagtggacagggtgacataatttttcgaccaaaaaaaagaacaagttgacataatttttcgaccaaaaaaaagaacaggttgacatgattacatagtacactattctaattcgtgaaaaatcaaacaactgatgtcgtttgtgcatgctatgtatcaggttcagaaacatagagactacaggcagaagattat
